(19) United States
(12) Patent Application Publication
(10) Pub. No.: US 2010/0209914 A1
(43) Pub. Date: Aug. 19, 2010

(54) METHODS, SYSTEMS, AND KITS FOR EVALUATING MULTIPLE SCLEROSIS

(75) Inventors: Douglas Bigwood, Medison, CT (US); Eric Eastman, Hihgland, MD (US); Eric Kaldjian, Ann Arbor, MI (US)

Correspondence Address: COOLEY LLP;ATTN: Patent Group, Suite 1100, 777 - 6th Street, NW, WASHINGTON, DC, 20001, US

(73) Assignee: ORE PHARMACEUTICALS , INC., Gaithersburg, MA (US)

(21) Appl. No.: 12/513,764

(22) PCT Filed: May 26, 2008
(86) PCT No.: PCT/US2008/064924

§ 371 Date: Apr. 26, 2010

Related U.S. Application Data
(60) Provisional application No. 60/924,671, filed on May 25, 2007.

(51) Int. Cl. C12Q 1/68

(52) U.S. Cl. 435/6

(57) ABSTRACT

The present invention provides a method for evaluating multiple sclerosis (MS), or excluding MS as a diagnosis for a patient The method comprises determining a gene expression profile for a sample from such a patient. The gene expression profile, which contains gene expression values for a plurality of genes that are differentially expressed in white blood cells of MS patients, is compared to an MS-profile and/or a non-MS profile, and classified. The invention also provides a method for monitoring treatment of an MS patient Pre-treatment and post-treatment gene expression profiles contain gene expression values for a plurality of genes that are differentially expressed upon treatment of MS patients. The expression profiles may then be compared, to identify differences between pre-treatment and post-treatment gene expression. These differences are indicative of the patient's response to treatment The invention further provides kits and systems for performing the methods of the invention.

### PRIORITY

[0001] This application claims priority to U.S. Provisional Application No. 60/924,671 filed May 25, 2007, which is hereby incorporated by reference in its entirety.

### FIELD OF THE INVENTION

[0002] The present invention relates to methods, systems, and kits for evaluating multiple sclerosis (MS), and for assisting in the diagnosis, prognosis, and/or treatment of MS.

### SEQUENCE LISTING

[0003] The contents of the accompanying Sequence Listing are hereby incorporated by reference.

### BACKGROUND OF THE INVENTION

[0004] Multiple sclerosis (MS) is a disease that affects the central nervous system, and can range from relatively benign to somewhat disabling to devastating. In MS, the myelin surrounding nerve cells is damaged or destroyed, impacting the ability of the nerves to conduct electrical impulses to and from the brain, and leaving scar tissue called sclerosis. These damaged areas are also known as “plaques” or “lesions.” According to the National Multiple Sclerosis Society, there are approximately 400,000 individuals with MS in the United States.

[0005] The first symptoms of MS typically appear between the ages of 20 and 40, and include blurred or double vision, red-green color distortion, or even blindness in one eye. Most MS patients experience muscle weakness in their extremities and difficulty with coordination and balance. In severe cases, MS can produce partial or complete paralysis. Paresthesias (numbness, prickling, or “pins and needles”), speech impediments, tremors, and dizziness are frequent symptoms of MS. Approximately half of MS patients experience cognitive impairments.

[0006] Diagnosing MS is complicated, because there is no single test that can confirm the presence of MS. The process of diagnosing MS typically involves criteria from the patient's history, a clinical examination, and one or more laboratory tests, with all three often being necessary to rule out other possible causes for symptoms and/or to gather facts sufficient for a diagnosis of MS.

[0007] Magnetic resonance imaging (MRI) is a preferred test. An MRI can detect plaques or scarring possibly caused by MS. However, an abnormal MRI does not necessarily indicate MS, as lesions in the brain may be associated with other disorders. Further, spots may also be found in healthy individuals, particularly in healthy older persons. These spots are called UBOs, for unidentified bright objects, and are not related to an ongoing disease process. In addition, a normal MRI does not absolutely rule out the presence MS. About 5% of individuals who are confirmed to have MS on the basis of other criteria, have no brain lesions detectable by MRI. These individuals may have lesions in the spinal cord or may have lesions that cannot be detected by MRI.

[0008] A diagnosis of MS might be made based on an evaluation of symptoms, signs, and the results of an MRI, but additional tests may be ordered as well. These include tests of evoked potential, cerebrospinal fluid, and blood.

[0009] For example, cerebrospinal fluid is sampled by a lumbar puncture, and is tested for levels of immune system proteins and for the presence of an antibody staining pattern called “oligoclonal bands.” Oligoclonal bands indicate an immune response within the central nervous system and are found in the spinal fluid of 90-95% of individuals with MS. However, oligoclonal bands are also associated with diseases other than MS, and therefore the presence of oligoclonal bands alone is not definitive of MS.

[0010] There is likewise no definitive blood test for MS, but blood tests can exclude other possible causes for various neurologic symptoms, such as Lyme disease, collagen-vascular diseases, rare hereditary disorders, and AIDS.

[0011] Diagnosing MS generally requires: (1) objective evidence of at least two areas of myelin loss, or demyelinating lesions, “separated in time and space” (lesions occurring in different places within the brain, spinal cord, or optic nerve-at different points in time); and (2) all other diseases that can cause similar neurologic symptoms have been objectively excluded. Until (1) and (2) have been satisfied, a physician does not make a definite diagnosis of MS.

[0012] Depending on the clinical problems present when an individual sees a physician, one or more of the tests described above might be performed. Sometimes tests are performed several times over a period of months to help gather the necessary information. A definite MS diagnosis must satisfy the McDonald criteria, named for the distinguished neurologist W. Ian McDonald who sparked society-supported efforts to make the diagnostic process for MS faster and more precise.

[0013] There are a few distinct clinical courses for MS, referred to as relapsing-remitting MS, secondary-progressive MS, progressive-relapsing MS, and primary progressive MS. Relapsing-remitting MS is characterized by clearly-defined, acute attacks (relapses), usually with full or partial recovery, and no disease progression between attacks. Secondary-progressive MS is initially relapsing-remitting but then becomes continuously progressive at a variable rate, with or without occasional relapses along the way. The disease-modifying medications are thought to provide benefit for those who continue to have relapses. Primary progressive MS may be characterized by disease progression from the beginning with few or no periods of remission. Progressive-relapsing MS is characterized by disease progression from the beginning, but with clear, acute relapses along the way.

[0014] There are several options available for treating individuals diagnosed with MS. Beta-interferon (Avonex, Betaseron, Rebif) has been approved to treat MS. Interferons are also made by the body, mainly to combat viral infections. Interferons have been shown to decrease the worsening or relapse of MS, however disease progression remains unaffected and the side effects of interferons are poorly tolerated. Glatiramer acetate (Copaxone) is a mixture of amino acids that has been shown to decrease the relapse rates of MS by 30%, and appears to also have a positive effect on the overall level of disability. Glatiramer acetate is better tolerated than the interferons and has fewer side effects. Glatiramer acts by binding to major histocompatibility complex class II molecules and competing with MBP and other myelin proteins for such binding and presentation to T cells. Natalizumab (Tysabri) is a monoclonal antibody that binds to alpha-4-integrin on white blood cells and interferes with their movement from the bloodstream into the brain and spinal cord.

[0015] An object of the present invention is to provide a blood-based diagnostic test for a more objective, definitive, and rapid diagnosis of MS. Another object of the invention is to provide a diagnostic test for monitoring MS progression, adequacy of treatment, and/or response to treatment.

### SUMMARY OF THE INVENTION

[0016] The present invention provides methods, systems, and kits for evaluating multiple sclerosis (MS) in a patient. Particularly, the invention provides convenient blood-based, gene-expression tests for evaluating MS, including for diagnosing MS, for excluding MS as a diagnosis, and for monitoring the course of disease or efficacy of treatment.

[0017] In one aspect, the invention provides a method for diagnosing MS or excluding MS as a diagnosis for a patient. In this aspect, the invention provides for a confident diagnosis of MS, or a confident exclusion of MS as a diagnosis, and in certain embodiments may help predict a clinical course of the patient's disease and/or a beneficial course of treatment.

[0018] In certain embodiments, the method comprises determining a gene expression profile for a blood sample (such as a whole blood sample) of a patient having or suspected of having MS. The gene expression profile contains gene transcript levels (or “expression levels”) for a plurality of genes that are differentially expressed in blood cells of MS patients, and such genes are listed in Tables 1 and 2. Tables 1 and 2 list genes that are differentially expressed in whole blood and PBMCs, respectively, of MS patients, and provide, inter alia, Mean-MS and Mean-control gene expression levels for these differentially expressed genes. In certain embodiments, the gene expression profile contains the expression level in the sample for at least one gene that is also listed in Table 6 (that is, in addition to being listed in Table 1 and/or 2).

[0019] In some embodiments, the method comprises determining a gene expression profile for a white blood cell sample (such as a PBMC sample) of a patient having or suspected of having MS. In these embodiments, the gene expression profile contains gene expression levels for a plurality of genes that are differentially expressed in white blood cells of MS patients, and such genes are listed in Table 2. In certain embodiments, the gene expression profile contains the expression level in the sample for at least one gene that is also listed in Table 6 (that is, in addition to being listed in Table 1 and/or 2).

[0020] The gene expression profile prepared according to this aspect of the invention is compared to an MS-profile and/or a non-MS profile, to classify the patient's gene expression profile as an MS profile or a non-MS profile. Generally, the non-MS profile is a healthy, non-disease, profile. In certain embodiments, the MS-profile is a relapsing-remitting MS profile.

[0021] In a second aspect, the invention provides a method for monitoring the course of disease or efficacy of treatment for an MS patient, to thereby provide accurate and objective criteria for determining disease progression and the efficacy of an MS treatment.

[0022] In this second aspect, the method comprises determining a gene expression profile, as described above, at various time points after an initial diagnosis of MS. Where the patient is undergoing treatment for MS, the gene expression profiles may include a pre-treatment (or early treatment) gene expression profile and at least one post-treatment gene expression profile of a patient having MS. In some embodiments, the MS patient is undergoing treatment with at least one of Beta-interferon, Glatiramer acetate, and Natalizumab. In certain embodiments, the pre-treatment and post-treatment gene expression profiles are determined for blood samples (such as a whole blood samples) of the patient, or white blood cell samples (such as PBMC samples). The gene expression profiles in accordance with this aspect contain gene expression levels for a plurality of genes that are differentially expressed in blood or in white blood cells of MS patients, and such genes are listed in Table 1 or 2, respectively. In certain embodiments, the gene expression profile contains the expression level in the sample for at least one gene that is also listed in Table 6.

[0023] Further, in embodiments where the patient is undergoing treatment with Beta-Interferon, such pre- and post-treatment gene expression profiles may contain gene expression levels for the genes listed in Tables 3 and/or 5, which list genes that are differentially expressed in PBMCs between pre- and post-treatment with Beta-interferon, and which may be correlative of a positive response to treatment. In embodiments where the patient is undergoing treatment with Glatiramer acetate (e.g., Copaxone), the pre- and post-treatment profiles may contain gene expression levels for genes listed in Table 4 and/or 5, which lists genes that are differentially expressed in PBMCs between pre- and post-treatment with Copaxone, and which may be correlative of a positive response to treatment. Table 5 lists genes that are differentially expressed between pre- and post-treatment with either or both of Beta-Interferon and Glatiramer acetate.

[0024] The pre-treatment gene expression profile may be compared with the post-treatment gene expression profile, to identify differences between pre-treatment and post-treatment gene expression (e.g., differences between pre-treatment and post-treatment blood transcript levels). These differences may be indicative of the patient's response (positive or negative) to treatment. Alternatively or in addition, the gene expression profiles determined over time, including the pre- and post-treatment profiles, may be compared to MS- and non-MS gene expression profiles (such as those shown in Tables 1 and 2), to determine whether, or to the extent, that the profile becomes more comparable to an MS or non-MS profile. For example, the post-treatment profile may become more or less indicative of an MS profile. Such may be indicative of a patient's positive or negative response to treatment.

[0025] In a third aspect, the invention provides a method for preparing a patient gene expression profile for evaluating MS. According to this aspect, the gene expression profile is useful for determining whether the patient has MS, as well as for monitoring the course of the disease, and predicting whether a particular treatment is or will be efficacious. In accordance with this aspect, the method generally comprises quantifying the level of expression, in a patient blood sample, for a plurality of genes listed in one of Tables 1-5.

[0026] For example, the gene expression profile may contain the levels of expression in the sample for a plurality of genes listed in Table 1 or Table 2. In some embodiments, at least one of these genes is also listed in Table 6. In accordance with this aspect, the patient may have, or be suspected to have, MS. Such gene expression profiles are useful for classifying samples as MS or non-MS samples in accordance with the first aspect of the invention, or for monitoring the course of the patient's MS over time.

[0027] Alternatively, the gene expression profile may contain the levels of expression in the sample for a plurality of genes listed in Table 3, 4, and/or 5. Preferably, at least one of these genes is also listed in Table 6. Such gene expression profiles are useful for predicting whether a particular treatment might be efficacious, or where treatment is already ongoing, determining whether the current treatment is effective.

[0028] In still other aspects, the invention provides kits and systems for performing the methods of the invention.

### DETAILED DESCRIPTION OF THE INVENTION

[0029] The present invention provides methods, systems, and kits for evaluating multiple sclerosis (MS). The invention provides convenient blood-based, gene-expression tests for evaluating MS in patients. Such patients may be known to have MS, may be suspected of having MS on the basis of one or more MS-like symptoms or results from one or more MS-related clinical exams, or may be beginning or undergoing treatment for MS. In the various aspects of the invention, the invention aids in diagnosing MS, or excluding MS as a diagnosis, monitoring the progression of disease, and predicting or determining efficacy of the various options for MS treatment and care.

### Methods For Diagnosing MS

[0030] In one aspect, the invention provides a method for diagnosing MS, or for excluding MS as a diagnosis for a patient. The method comprises determining a gene expression profile for a blood sample (such as a whole blood sample) or a white blood cell sample (such as a PBMC sample) of a patient having or suspected of having MS. The gene expression profile prepared according to this aspect of the invention is compared to an MS-profile and/or a non-MS profile, to classify the patient's gene expression profile as an MS profile or a non-MS profile. By classifying the profile as an MS or non-MS profile, a diagnosis of MS may be made, or MS may be excluded as a diagnosis.

[0031] Generally, the patient is suspected of having MS. For example, the patient may be suspected of having MS on the basis of neurologic and/or immunologic symptoms consistent with MS, e.g., after an initial physician's exam. The patient may, in some embodiments, be positive for the presence of oligoclonal bands. In these or other embodiments, the patient may have CNS lesions characteristic of MS, which are observable on an MRI. In certain embodiments, the patient has not undergone treatment for MS, but in some embodiments, the patient is already undergoing treatment, such as treatment with Beta-interferon, Glatiramer acetate, and Natalizumab.

[0032] Thus, the patient may have one or more presumptive signs of a multiple sclerosis. Presumptive signs of multiple sclerosis include for example, altered sensory, motor, visual or proprioceptive system with at least one of numbness or weakness in one or more limbs, often occurring on one side of the body at a time or the lower half of the body, partial or complete loss of vision, frequently in one eye at a time and often with pain during eye movement, double vision or blurring of vision, tingling or pain in numb areas of the body, electric-shock sensations that occur with certain head movements, tremor, lack of coordination or unsteady gait, fatigue, dizziness, muscle stiffness or spasticity, slurred speech, paralysis, problems with bladder, bowel or sexual function, and mental changes such as forgetfulness or difficulties with concentration, relative to medical standards.

[0033] The gene expression profile is determined for a blood sample, such as a whole blood sample or a white blood cell sample, of the patient. The white blood cell sample may be a Peripheral Blood Mononuclear Cell (PBMC) sample of the patient. PBMCs are a mixture of monocytes and lymphocytes. There are several known methods for isolating PBMCs from whole blood. While any suitable method may be employed, in one embodiment, PBMCs are isolated from whole blood samples using density gradient centrifugation. For example, anticoagulated whole blood is layered over a separating medium, and after centrifugation, the following layers are visually observed from top to bottom: plasma/platelets, PBMCs, separating medium and erythrocytes/granulocytes. The PBMC layer may then be removed for RNA isolation. Alternatively, the blood cell sample may be further isolated from whole blood or PBMCs to yield a cell subpopulation, such as a population of lymphocytes (e.g., T-lymphocytes or sub-population thereof). Examples for isolating such sub-populations are known in the art, and include cell sorting, or cell-capturing using antibodies to particular cell-specific markers.

[0034] In preparing the gene expression profile of the patient sample(s), RNA is extracted from the collected cells (e.g., using whole blood or PBMC samples) by any known method. For example, RNA may be purified from cells using a variety of standard procedures as described, for example, in RNA Methodologies, A laboratory guide for isolation and characterization, 2nd edition, 1998, Robert E. Farrell, Jr., Ed., Academic Press. In addition, there are various products commercially available for RNA isolation which may be used. Total RNA or polyA+ RNA may be used for preparing gene expression profiles in accordance with the invention.

[0035] The gene expression profile (or gene expression signature) is then generated for the samples using any of various techniques known in the art, and described in detail elsewhere herein. Such methods generally include, without limitation, polymerase-based assays, such as RT-PCR (e.g., Taqman™), hybridization-based assays, such as DNA microarray analysis, flap-endonuclease-based assays (e.g., Invader™), as well as direct mRNA capture with branched DNA (QuantiGene™) or Hybrid Capture™ (Digene).

[0036] The gene expression profile contains gene expression levels for a plurality of genes that are differentially expressed in blood samples of MS patients, and such genes are disclosed herein. For example, Tables 1 and 2 list genes that are differentially expressed in whole blood and PBMC samples, respectively, of MS patients. As used herein, the term “gene,” refers to a DNA sequence expressed in a sample as an RNA transcript, and may be a full-length gene (protein encoding or non-encoding) or an expressed fragment such as expressed sequence tags or “ESTs.” Thus, the sequences listed in the Tables and Sequence Listing are each independently a full-length gene sequence, whose expression product is present in samples, or is a partial expressed sequence detectable in samples, such as an EST sequence. As used herein, “differentially expressed” means that the level or abundance of an RNA transcript (or abundance of an RNA population sharing a common target sequence, such as splice variant RNAs) is significantly higher or lower in a sample as compared to a reference level. For example, the level of the RNA or RNA population may be higher or lower by at least two-fold as compared to a reference level. The reference level is the level of the same RNA or RNA population in a control sample or control population (e.g., a Mean control level).

[0037] Table 1A lists genes that are differentially expressed in whole blood of MS patients, and thus the expression level of these genes or subset thereof may be determined in patient samples to prepare a gene expression profile in accordance with this aspect of the invention. Table 1A refers to these genes by name (title and abbreviation), GeneBank Accession No., and sequence identifier as found in the accompanying Sequence Listing. Table 1A further provides Mean-MS and Mean-control gene expression levels as generated from an exemplary sample set and data set, as well as measures of the statistical association of each differential gene expression level with MS. Table 1B lists these same genes, and expresses the differential RNA levels as fold change (Control/MS), MeanRatio (Control/MS), and Mean Difference (Control-MS).

[0038] Thus, in accordance with this aspect, the patient's gene expression profile, which is generated from the patient's blood sample (e.g., a whole blood sample), may contain the levels of expression for at least about 3 genes listed in Table 1. In some embodiments, the patient's gene expression profile contains the levels of expression for at least about 5, 7, 10, 12, 15, 20, 25, 40, 50, 75, or 100 genes listed in Table 1, such genes being differentially expressed in blood of MS patients over non-MS individuals. In some embodiments, the gene expression profile may contain the levels of expression for all or substantially all genes listed in Table 1, such as at least about 200, 250, or 300 genes. In any of the embodiments described in this paragraph, the gene expression profile may comprise the level of expression of at least one gene that is also listed in Table 6. That is, at least one of the genes is listed in both Table 1 and Table 6.

[0039] Table 2A lists genes that are differentially expressed in PBMCs of MS patients, and thus the expression level of these genes or subset thereof may be determined in patient samples to prepare a gene expression profile in accordance with this aspect of the invention. Table 2A refers to these genes by name (title and abbreviation), GeneBank Accession No., and sequence identifier as found in the accompanying Sequence Listing. Table 2A further provides the fold change between control and MS samples as generated from an exemplary sample set and data set, as well as measures of the statistical association of each differential gene expression level with MS. Table 2B lists these same genes, and shows the mean control and MS data signals, and indicates the top 42 genes in terms of fold change.

[0040] Thus, in accordance with these embodiments, the patient's gene expression profile (generated from whole blood or a white blood cell sample, including a PBMC sample) may contain the levels of expression for at least about 3 genes listed in Table 2. In some embodiments, the patient's gene expression profile contains the levels of expression for at least about 5, 7, 10, 12, 15, 20, 25, 40, 50, 75 or 100 genes listed in Table 2, such genes being differentially expressed in blood, and particularly PBMCs, of MS patients over non-MS individuals (controls). In some embodiments, the gene expression profile may contain the levels of expression for all or substantially all genes listed in Table 2, such as at least about 200, 250, or 300 genes. In any of the embodiments described in this paragraph, the gene expression profile may comprise the level of expression of at least one gene that is also listed in Table 6. That is, at least one of the genes is listed in both Table 2 and Table 6. In some preferred embodiments, one or more, or all, of the genes in Table 2 that are included in the gene expression profile, are in the top 42 genes in terms of fold change between MS and controls, as shown in Table 2.

[0041] In certain embodiments, the gene expression profile contains a measure of expression levels for a plurality of genes that are each, independently, expressed in MS samples relative to control samples by a fold change magnitude (up or down) of at least 1.2. In some embodiments, the plurality of genes are differentially expressed in MS samples with respect to control samples (e.g., non-MS sample) by a fold change magnitude of at least 1.5, or at least about 1.7, or at least about 2, or at least about 2.5. Alternatively, the expression levels may differ by at least about 3- or 5-, 10-fold, or more. Tables 1 and 2 list genes by differential levels of expression in control versus MS samples, as determined in whole blood or PBMCs, respectively, and such levels may be used to select genes for profiling in accordance with this paragraph.

[0042] The gene expression profile prepared according to this aspect of the invention is compared to an MS-profile and/or a non-MS profile, to classify the patient's gene expression profile as an MS profile or a non-MS profile. In certain embodiments, the non-MS profile is a healthy profile. In these or other embodiments, the MS-profile may be a general MS-profile (e.g., not limited to a clinical MS subtype), or may be a relapsing-remitting MS profile. Tables 1 and 2 present exemplary MS and non-MS profiles, which may be used to classify patient samples. Of course, additional MS and non-MS profiles for classifying samples may be generated from additional MS and control sample sets, using the genes listed in Tables 1 and 2 as described above.

[0043] Various classification schemes are known for classifying samples between two or more classes or groups, and these include, without limitation: Naïve Bayes, Support Vector Machines, Nearest Neighbors, Decision Trees, Logistic, Artificial Neural Networks, and Rule-based schemes. In addition, the predictions from multiple models can be combined to generate an overall prediction. For example, a “majority rules” prediction may be generated from the outputs of a Naïve Bayes model, a Support Vector Machine model, and a Nearest Neighbor model.

[0044] Thus, a classification algorithm or “class predictor” may be constructed to classify samples. The process for preparing a suitable class predictor is reviewed in R. Simon, Diagnostic and prognostic prediction using gene expression profiles in high-dimensional microarray data, British Journal of Cancer (2003) 89, 1599-1604, which review is hereby incorporated by reference in its entirety.

[0045] Generally, the gene expression profile for the patient is compared to both a non-MS profile and an MS profile. Such MS and non-MS profiles may be assembled from gene expression data disclosed herein (Tables 1 and 2), which may be stored in a database and correlated to patient profiles. Thus, MS and non-MS profiles may be assembled from data and matched to a particular patient by, for example, age, race, gender, and/or clinical manifestations of MS. The MS profile may represent a particular clinical course of MS, such as relapsing-remitting MS.

[0046] After comparing the patient's gene expression profile to the MS and/or non-MS profile, the sample is classified as, or for example, given a probability of being, an MS profile or a non-MS profile. The classification may be determined computationally based upon known methods as described above. The result of the computation may be displayed on a computer screen or presented in a tangible form, for example, as a probability (e.g., from 0 to 100%) of the patient having MS. The report will aid a physician in diagnosis or treatment of the patient. For example, in certain embodiments of the invention, the patient's gene expression profile will be determined to be an MS profile on the basis of a probability, and the patient will be subsequently treated for MS as appropriate. In other embodiments, the patient's profile will be determined to be a non-MS profile, thereby allowing the physician to exclude MS as a diagnosis for the patient.

[0047] In various embodiments, the method according to this aspect of the invention distinguishes a MS-afflicted patient from a non-MS afflicted patient with at least about 50%, 75%, 80%, 85%, 90%, 95%, 97%, 98%, 99% or greater accuracy. In this respect, the method according to this aspect may lend additional or alternative predictive value over standard clinical methods of diagnosing MS, such as for example, absence or presence of lesions on an MRI, testing positive or negative for oligoclonal bands, or the absence or presence of other signs and symptoms of MS such as blurred vision, fatigue, and/or loss of balance.

### Methods For Determining Efficacy of Treatment

[0048] In a second aspect, the invention is a method for monitoring treatment of an MS patient. While any treatment program may be monitored, including test compounds, in certain embodiments the patient is undergoing treatment with one or more of Beta-Interferon, Glatiramer acetate, and Natalizumab. In this aspect, the invention comprises determining a pre-treatment (or early treatment) gene expression profile and at least one post-treatment gene expression profile for the patient, as already described. The pre-treatment profile may be determined from a sample taken prior to treatment, or may be an early treatment profile determined, for example, for a sample taken within the first six months of treatment. The post-treatment profile(s) may be determined for samples taken anytime after the start of treatment, such as after about three months, after about six months, after about twelve months of treatment, and/or later.

[0049] The pre-treatment and post-treatment gene expression profiles are prepared from blood samples (e.g., whole blood) or white blood cell samples (such as PBMC samples or subpopulation thereof), isolated from the patient at the selected pre- and post-treatment time points.

[0050] The pre- and post-treatment gene expression profiles contain gene expression levels for a plurality of genes that are differentially expressed in blood cells of MS patients, as described in the preceding section with respect to Tables 1, 2, and 6. Thus, in accordance with this aspect, the patient's gene expression profile, which is generated from the patient's blood sample (e.g., a whole blood sample), may contain the levels of expression for at least about 3 genes listed in Table 1. In some embodiments, the patient's gene expression profile contains the levels of expression for at least about 5, 7, 10, 12, 15, 20, 25, 40, 50, 75, or 100 genes listed in Table 1, such genes being differentially expressed in blood of MS patients over non-MS individuals. In some embodiments, the gene expression profile may contain the levels of expression for all or substantially all genes listed in Table 1, such as at least about 200, 250, or 300 genes. In any of the embodiments described in this paragraph, the gene expression profile may comprise the level of expression of at least one gene that is also listed in Table 6. That is, at least one of the genes is listed in both Table 1 and Table 6. Alternatively, the patient's gene expression profile (generated from whole blood or a white blood cell sample, including a PBMC sample) may contain the levels of expression for at least about 3 genes listed in Table 2. In some embodiments, the patient's gene expression profile contains the levels of expression for at least about 5, 7, 10, 12, 15, 20, 25, 40, 50, 75 or 100 genes listed in Table 2, such genes being differentially expressed in blood, and particularly PBMCs, of MS patients over non-MS individuals (controls). In some embodiments, the gene expression profile may contain the levels of expression for all or substantially all genes listed in Table 2, such as at least about 200, 250, or 300 genes. In any of the embodiments described in this paragraph, the gene expression profile may comprise the level of expression of at least one gene that is also listed in Table 6. That is, at least one of the genes is listed in both Table 2 and Table 6. In some preferred embodiments, one or more, or all, of the genes in Table 2 that are included in the gene expression profile, are in the top 42 genes in terms of fold change between MS and controls, as shown in Table 2.

[0051] Thus, such gene expression profiles may be useful for monitoring a patient's treatment, to determine whether the post-treatment sample classifies as an MS-sample, to the same, lesser, or greater extent as the pre-treatment sample. Such pre-treatment and post-treatment samples may be classified or scored as MS or non-MS samples as disclosed elsewhere herein.

[0052] Alternatively, or in addition, the pre-treatment and post-treatment gene expression profiles may be compared to identify differences in gene expression upon treatment with MS. For example, where the patient is being treated with Beta-interferon, gene expression values may be determined (pre- and post-treatment) for genes (e.g., 3, 5, 7, 10, 15, 20, or 40 genes) listed in Tables 3 and/or 5. In certain embodiments, at least one gene is also listed in Table 6, in addition to being listed in Tables 3 and/or 5. Or, where the patient is being treated with Glatiramer acetate, gene expression values may be determined (pre- and post-treatment) for genes (e.g., 3, 5, 7, 10, 15, 20, or 40 genes) listed in Tables 4 or 5. In certain embodiments, at least one gene is also listed in Table 6, in addition to being listed in Tables 3 and/or 5. Tables 3 and 5 list genes that are differentially expressed in PBMCs between pre- and post-treatment with Beta-interferon. Table 4 and 5 list genes that are differentially expressed in PBMCs between pre- and post-treatment with Copaxone. Table 5 lists genes that are differentially expressed between pre- and post-treatment with each of Beta-Interferon and Glatiramer acetate.

[0053] The pre-treatment gene expression profile may then be compared with the post-treatment gene expression profile, to identify differences between pre-treatment and post-treatment gene expression. These differences may be indicative of the patient's response (positive or negative) to treatment.

[0054] Many of the genes that are indicative of a patient's response to Beta-interferon may encode cell surface markers, e.g. cell surface markers on immune cells, and several of which are interferon-inducible genes (see Table 3). Accordingly, in some embodiments of the invention, at least one, or at least five, or at least 10 of the genes in the gene expression profile encode a cell-surface marker, some or all of which are interferon-inducible. Such genes are listed in Example 2, herein.

[0055] After comparison, the post-treatment gene expression profile may be classified as being indicative of MS, or not being indicative of MS (or being less indicative of MS than the pre-treatment sample), for example due to effective therapy. Alternatively, the post-treatment sample may be more indicative of MS, suggesting that an alternative therapy would be desirable. The analysis in accordance with this aspect may be performed computationally as described. The result of the analysis may be displayed or presented in tangible form to aid in considering further treatment options, such as adjusting or changing the treatment, if needed, and to track the clinical course of the patient's disease.

### Methods for Preparing Gene Expression Profiles

[0056] In a third aspect, the invention provides a method for preparing a patient gene expression profile for evaluating MS. According to this aspect, the gene expression profile is useful for determining whether the patient has MS, as well as for monitoring the course of the disease, and predicting whether a particular treatment is or will be efficacious. In accordance with this aspect, the method generally comprises quantifying the level of expression, in a patient blood sample, for a plurality of genes listed in one of Tables 1-5 as discussed above for the first and second aspects of the invention.

[0057] For example, the gene expression profile may contain the levels of expression in the sample for a plurality of genes listed in Table 1 or Table 2. In some embodiments, at least one of these genes is also listed in Table 6. In accordance with this aspect, the patient may have, or be suspected to have, MS. Such gene expression profiles are useful for classifying samples as MS or non-MS samples in accordance with the first aspect of the invention, or for monitoring the course of the patient's MS over time.

[0058] Specifically, in accordance with this aspect, the patient's gene expression profile, which is generated from the patient's blood sample (e.g., a whole blood sample), may contain the levels of expression for at least about 3 genes listed in Table 1. In some embodiments, the patient's gene expression profile contains the levels of expression for at least about 5, 7, 10, 12, 15, 20, 25, 40, 50, 75, or 100 genes listed in Table 1, such genes being differentially expressed in blood of MS patients over non-MS individuals. In some embodiments, the gene expression profile may contain the levels of expression for all or substantially all genes listed in Table 1, such as at least about 200, 250, or 300 genes. In any of the embodiments described in this paragraph, the gene expression profile may comprise the level of expression of at least one gene that is also listed in Table 6. That is, at least one of the genes is listed in both Table 1 and Table 6.

[0059] Alternatively, the patient's gene expression profile (generated from whole blood or a white blood cell sample, including a PBMC sample) may contain the levels of expression for at least about 3 genes listed in Table 2. In some embodiments, the patient's gene expression profile contains the levels of expression for at least about 5, 7, 10, 12, 15, 20, 25, 40, 50, 75 or 100 genes listed in Table 2, such genes being differentially expressed in blood, and particularly PBMCs, of MS patients over non-MS individuals (controls). In some embodiments, the gene expression profile may contain the levels of expression for all or substantially all genes listed in Table 2, such as at least about 200, 250, or 300 genes. In any of the embodiments described in this paragraph, the gene expression profile may comprise the level of expression of at least one gene that is also listed in Table 6. That is, at least one of the genes is listed in both Table 2 and Table 6. In some preferred embodiments, one or more, or all, of the genes in Table 2 that are included in the gene expression profile, are in the top 42 genes in terms of fold change between MS and controls, as shown in Table 2.

[0060] Alternatively, the gene expression profile may contain the levels of expression in the sample for a plurality of genes listed in Table 3, 4, and/or 5. Preferably, at least one of these genes is also listed in Table 6. Such gene expression profiles are useful for predicting whether a particular treatment might be efficacious, or where treatment is already ongoing, determining whether the current treatment is effective.

### Assay Formats

[0061] Gene expression profiles, including patient gene expression profiles and the MS and non-MS profiles as described herein, may be prepared according to any suitable method for measuring gene expression. That is, the profiles may be prepared using any quantitative or semi-quantitative method for determining RNA transcript levels in samples. Such methods include polymerase-based assays, such as RT-PCR, Taqman™, hybridization-based assays, for example using DNA microarrays or other solid support, nucleic acid sequence based amplification (NASBA), flap endonuclease-based assays, as well as direct mRNA capture with branched DNA (QuantiGene™) or Hybrid Capture™ (Digene). The assay format, in addition to determining the gene expression levels for a combination of genes listed in one or more of Tables 1-6, will also allow for the control of, inter alia, intrinsic signal intensity variation between tests. Such controls may include, for example, controls for background signal intensity and/or sample processing, and/or other desirable controls for gene expression quantification across samples. For example, expression levels between samples may be controlled by testing for the expression level of one or more genes that are not differentially expressed in MS patients, or which are generally expressed at similar levels across the population. Such genes may include constitutively expressed genes, many of which are known in the art. Exemplary assay formats for determining gene expression levels, and thus for preparing gene expression profiles and MS- and non-MS profiles are described in this section.

[0062] The nucleic acid sample is typically in the form of mRNA or reverse transcribed mRNA (cDNA) isolated from a blood sample, such as a whole blood sample, PBMC sample, or other subpopulation of blood cells (e.g., T-lymphocytes) isolated from the patient's blood. In some embodiments, the nucleic acids in the sample may be cloned or amplified, generally in a manner that does not bias the representation of the transcripts within a sample. In some embodiments, it may be preferable to use total RNA or polyA+ RNA as a source without cloning or amplification, to avoid additional processing steps.

[0063] As is apparent to one of skill in the art, nucleic acid samples used in the methods of the invention may be prepared by any available method or process. Methods of isolating total mRNA are well known to those of skill in the art. For example, methods of isolation and purification of nucleic acids are described in detail in Chapter 3 of Laboratory Techniques in Biochemistry and Molecular Biology, Vol. 24, Hybridization With Nucleic Acid Probes: Theory and Nucleic Acid Probes, P. Tijssen, Ed., Elsevier Press, New York, 1993. Such samples include RNA samples, but also include cDNA synthesized from a mRNA sample isolated from a cell or tissue of interest (e.g., whole blood or PBMC sample). Such samples also include DNA amplified from the cDNA, and RNA transcribed from the amplified DNA.

[0064] In determining a patient's gene expression profile, or in determining an MS- or non-MS profile in accordance with the invention, a hybridization-based assay may be employed. Nucleic acid hybridization involves contacting a probe and a target sample under conditions where the probe and its complementary target sequence (if present) in the sample can form stable hybrid duplexes through complementary base pairing. The nucleic acids that do not form hybrid duplexes may be washed away leaving the hybridized nucleic acids to be detected, typically through detection of an attached detectable label. It is generally recognized that nucleic acids may be denatured by increasing the temperature or decreasing the salt concentration of the buffer containing the nucleic acids. Under low stringency conditions (e.g., low temperature and/or high salt) hybrid duplexes (e.g., DNA:DNA, RNA:RNA, or RNA:DNA) will form even where the annealed sequences are not perfectly complementary. Thus, specificity of hybridization is reduced at lower stringency. Conversely, at higher stringency (e.g., higher temperature or lower salt) successful hybridization tolerates fewer mismatches. One of skill in the art will appreciate that hybridization conditions may be selected to provide any degree of stringency.

[0065] In certain embodiments, hybridization is performed at low stringency, such as 6×SSPET at 37° C. (0.005% Triton X-100), to ensure hybridization, and then subsequent washes are performed at higher stringency (e.g., 1×SSPET at 37° C.) to eliminate mismatched hybrid duplexes. Successive washes may be performed at increasingly higher stringency (e.g., down to as low as 0.25×SSPET at 37° C. to 50° C.) until a desired level of hybridization specificity is obtained. Stringency can also be increased by addition of agents such as formamide. Hybridization specificity may be evaluated by comparison of hybridization to the test probes with hybridization to the various controls that may be present, as described below (e.g., expression level control, normalization control, mismatch controls, etc.).

[0066] In general, there is a tradeoff between hybridization specificity (stringency) and signal intensity. Thus, in a preferred embodiment, the wash is performed at the highest stringency that produces consistent results and that provides a signal intensity greater than approximately 10% of the background intensity. The hybridized array may be washed at successively higher stringency solutions and read between each wash. Analysis of the data sets thus produced will reveal a wash stringency above which the hybridization pattern is not appreciably altered and which provides adequate signal for the particular oligonucleotide probes of interest.

[0067] The hybridized nucleic acids are typically detected by detecting one or more labels attached to the sample nucleic acids. The labels may be incorporated by any of a number of means well known to those of skill in the art. See WO 99/32660.

[0068] Numerous hybridization assay formats are known, and which may be used in accordance with the invention. Such hybridization-based formats include solution-based and solid support-based assay formats. Solid supports containing oligonucleotide probes designed to detect differentially expressed genes (e.g., listed in Tables 1-5) can be filters, polyvinyl chloride dishes, particles, beads, microparticles or silicon or glass based chips, etc. Any solid surface to which oligonucleotides can be bound, either directly or indirectly, either covalently or non-covalently, may be used. Bead-based assays are described, for example, in U.S. Pat. Nos. 6,355,431, 6,396,995, and 6,429,027, which are hereby incorporated by reference. Other chip-based assays are described in U.S. Pat. Nos. 6,673,579, 6,733,977, and 6,576,424, which are hereby incorporated by reference.

[0069] An exemplary solid support is a high density array or DNA chip, which may contain a particular oligonucleotide probes at predetermined locations on the array. Each predetermined location may contain more than one molecule of the probe, but each molecule within the predetermined location has an identical probe sequence. Such predetermined locations are termed features. Probes corresponding to the genes of Tables 1-5 may be attached to single or multiple solid support structures, e.g., the probes may be attached to a single chip or to multiple chips to comprise a chip set.

[0070] Oligonucleotide probe arrays for expression monitoring can be made and used according to any techniques known in the art (see for example, Lockhart et al (1996), Nat Biotechnol 14:1675-1680; McGall et al. (1996), Proc Nat Acad Sci USA 93:13555-13460). Such probe arrays may contain the oligonucleotide probes necessary for determining a patient's gene expression profile, or for preparing MS- and non-MS profiles with population samples. Thus, such arrays may contain oligonucleotide designed to hybridize to at least 2, 3, 4, 5, 6, 7, 8, 9, 10, 20, 30, 50, 70, 100, 200, 300 or more of the genes described herein (e.g., as described in one of Tables 1-5, or as described in any of Tables 1-5). In some embodiments, the array contains probes designed to hybridize to all or nearly all of the genes listed in Tables 1-5. In still other embodiments, arrays are constructed that contain oligonucleotides designed to detect all or nearly all of the genes in Table 1-5 on a single solid support substrate, such as a chip or a set of beads.

[0071] Probes based on the sequences of the genes described herein for preparing expression profiles may be prepared by any suitable method. Oligonucleotide probes, for hybridization-based assays, will be of sufficient length or composition (including nucleotide analogs) to specifically hybridize only to appropriate, complementary nucleic acids (e.g., exactly or substantially complementary RNA transcripts or cDNA). Typically the oligonucleotide probes will be at least about 10, 12, 14, 16, 18, 20 or 25 nucleotides in length. In some cases, longer probes of at least 30, 40, or 50 nucleotides may be desirable. In some embodiments, complementary hybridization between a probe nucleic acid and a target nucleic acid embraces minor mismatches (e.g., one, two, or three mismatches) that can be accommodated by reducing the stringency of the hybridization media to achieve the desired detection of the target polynucleotide sequence. Of course, the probes may be perfect matches with the intended target probe sequence, for example, the probes may each have a probe sequence that is perfectly complementary to a target sequence (e.g., a sequence of a gene listed in Tables 1-5).

[0072] A probe is a nucleic acid capable of binding to a target nucleic acid of complementary sequence through one or more types of chemical bonds, usually through complementary base pairing, usually through hydrogen bond formation. A probe may include natural (i.e., A, G, U, C, or T) or modified bases (7-deazaguanosine, inosine, etc.), or locked nucleic acid (LNA). In addition, the nucleotide bases in probes may be joined by a linkage other than a phosphodiester bond, so long as the bond does not interfere with hybridization. Thus, probes may be peptide nucleic acids in which the constituent bases are joined by peptide bonds rather than phosphodiester linkages.

[0073] When using hybridization-based assays, in may be necessary to control for background signals. The terms “background” or “background signal intensity” refer to hybridization signals resulting from non-specific binding, or other interactions, between the labeled target nucleic acids and components of the oligonucleotide array (e.g., the oligonucleotide probes, control probes, the array substrate, etc.). Background signals may also be produced by intrinsic fluorescence of the array components themselves. A single background signal can be calculated for the entire array, or a different background signal may be calculated for each location of the array. In an exemplary embodiment, background is calculated as the average hybridization signal intensity for the lowest 5% to 10% of the probes in the array. Alternatively, background may be calculated as the average hybridization signal intensity produced by hybridization to probes that are not complementary to any sequence found in the sample (e.g. probes directed to nucleic acids of the opposite sense or to genes not found in the sample such as bacterial genes where the sample is mammalian nucleic acids). Background can also be calculated as the average signal intensity produced by regions of the array that lack any probes at all. Of course, one of skill in the art will appreciate that hybridization signals may be controlled for background using one or a combination of known approached, including one or a combination of approaches described in this paragraph.

[0074] The hybridization-based assay will be generally conducted under conditions in which the probe(s) will hybridize to their intended target subsequence, but with only insubstantial hybridization to other sequences or to other sequences, such that the difference may be identified. Such conditions are sometimes called “stringent conditions.” Stringent conditions are sequence-dependent and can vary under different circumstances. For example, longer probe sequences generally hybridize to perfectly complementary sequences (over less than fully complementary sequences) at higher temperatures. Generally, stringent conditions may be selected to be about 5° C. lower than the thermal melting point (Tm) for the specific sequence at a defined ionic strength and pH. Exemplary stringent conditions may include those in which the salt concentration is at least about 0.01 to 1.0 M Na⁺ ion concentration (or other salts) at pH 7.0 to 8.3 and the temperature is at least about 30° C. for short probes (e.g., 10 to 50 nucleotides). Desired hybridization conditions may also be achieved with the addition of agents such as formamide or tetramethyl ammonium chloride (TMAC).

[0075] When using an array, one of skill in the art will appreciate that an enormous number of array designs are suitable for the practice of this invention. The array will typically include a number of test probes that specifically hybridize to the sequences of interest. That is, the array will include probes designed to hybridize to any region of the genes listed in Tables 1-5, and the accompanying sequence listing. In instances where the gene reference in the Tables is an EST, probes may be designed from that sequence or from other regions of the corresponding full-length transcript that may be available in any of the public sequence databases, such as those herein described. See WO 99/32660 for methods of producing probes for a given gene or genes. In addition, software is commercially available for designing specific probe sequences. Typically, the array will also include one or more control probes, such as probes specific for a constitutively expressed gene, thereby allowing data from different arrays to be normalized or controlled.

[0076] The hybridization-based assays may include, in addition to “test probes” (e.g., that bind the target sequences of interest, which are listed in Tables 1-6), the assay may also test for hybridization to one or a combination of control probes. Exemplary control probes include: normalization controls, expression level controls, and mismatch controls. For example, when determining the levels of gene expression in patient or control samples, the expression values may be normalized to control between samples. That is, the levels of gene expression in each sample may be normalized by determining the level of expression of at least one constitutively expressed gene in each sample. In accordance with the invention, the constitutively expressed gene is generally not differentially expressed in samples (blood samples, including whole blood or PBMC samples) of MS patients.

[0077] Other useful controls are normalization controls, for example, using probes designed to be complementary to a labeled reference oligonucleotide added to the nucleic acid sample to be assayed. The signals obtained from the normalization controls after hybridization provide a control for variations in hybridization conditions, label intensity, “reading” efficiency and other factors that may cause the signal of a perfect hybridization to vary between arrays. In one embodiment, signals (e.g., fluorescence intensity) read from all other probes in the array are divided by the signal (e.g., fluorescence intensity) from the control probes thereby normalizing the measurements. Exemplary normalization probes are selected to reflect the average length of the other probes (e.g., test probes) present in the array, however, they may be selected to cover a range of lengths. The normalization control(s) may also be selected to reflect the (average) base composition of the other probes in the array. In some embodiments, the assay employs one or a few normalization probes, and they are selected such that they hybridize well (i.e., no secondary structure) and do not hybridize to any potential targets.

[0078] The hybridization-based assay may employ expression level controls, for example, probes that hybridize specifically with constitutively expressed genes in the biological sample. Virtually any constitutively expressed gene provides a suitable target for expression level controls. Typically expression level control probes have sequences complementary to subsequences of constitutively expressed “housekeeping genes” including, but not limited to the actin gene, the transferrin receptor gene, the GAPDH gene, and the like.

[0079] The hybridization-based assay may also employ mismatch controls for the target sequences, and/or for expression level controls or for normalization controls. Mismatch controls are probes designed to be identical to their corresponding test or control probes, except for the presence of one or more mismatched bases. A mismatched base is a base selected so that it is not complementary to the corresponding base in the target sequence to which the probe would otherwise specifically hybridize. One or more mismatches are selected such that under appropriate hybridization conditions (e.g., stringent conditions) the test or control probe would be expected to hybridize with its target sequence, but the mismatch probe would not hybridize (or would hybridize to a significantly lesser extent). Preferred mismatch probes contain a central mismatch. Thus, for example, where a probe is a 20-mer, a corresponding mismatch probe will have the identical sequence except for a single base mismatch (e.g., substituting a G, a C or a T for an A) at any of positions 6 through 14 (the central mismatch).

[0080] Mismatch probes thus provide a control for non-specific binding or cross hybridization to a nucleic acid in the sample other than the target to which the probe is directed. For example, if the target is present, the perfect match probes should provide a more intense signal than the mismatch probes. The difference in intensity between the perfect match and the mismatch probe helps to provide a good measure of the concentration of the hybridized material.

[0081] Methods of forming high density arrays of oligonucleotides with a minimal number of synthetic steps are known. The oligonucleotide analogue array can be synthesized on a single or on multiple solid substrates by a variety of methods, including, but not limited to, light-directed chemical coupling, and mechanically directed coupling (see Pirrung, U.S. Pat. No. 5,143,854). In brief, the light-directed combinatorial synthesis of oligonucleotide arrays on a glass surface proceeds using automated phosphoramidite chemistry and chip masking techniques. In one specific implementation, a glass surface is derivatized with a silane reagent containing a functional group, e.g., a hydroxyl or amine group blocked by a photolabile protecting group. Photolysis through a photolithographic mask is used selectively to expose functional groups which are then ready to react with incoming 5′ photoprotected nucleoside phosphoramidites. The phosphoramidites react only with those sites which are illuminated (and thus exposed by removal of the photolabile blocking group). Thus, the phosphoramidites only add to those areas selectively exposed from the preceding step. These steps are repeated until the desired array of sequences have been synthesized on the solid surface. Combinatorial synthesis of different oligonucleotide analogues at different locations on the array is determined by the pattern of illumination during synthesis and the order of addition of coupling reagents.

[0082] In addition to the foregoing, additional methods which can be used to generate an array of oligonucleotides on a single substrate are described in PCT Publication Nos. WO 93/09668 and WO 01/23614. High density nucleic acid arrays can also be fabricated by depositing pre-made or natural nucleic acids in predetermined positions. Synthesized or natural nucleic acids are deposited on specific locations of a substrate by light directed targeting and oligonucleotide directed targeting. Another embodiment uses a dispenser that moves from region to region to deposit nucleic acids in specific spots.

[0083] The hybdridization-based assay may, as an alternative to purely passive hybridization, employ the methods described in U.S. Pat. No. 6,326,173, which is hereby incorporated by reference. For example, the assay may involve electronically concentrating and hybridizing the nucleic acid sample to the surface of a microchip (e.g., capture sites). This method may allow for rapid concentration and subsequent specific hybridization of template nucleic acid molecules to their complementary anchored amplification primers.

[0084] Alternatively, the invention may employ reverse transcription polymerase chain reaction (RT-PCR), which is a sensitive method for the detection of mRNA, including low abundant mRNAs present in clinical samples. The application of fluorescence techniques to RT-PCR combined with suitable instrumentation has led to quantitative RT-PCR methods that combine amplification, detection and quantification in a closed system. Two commonly used quantitative RT-PCR techniques are the Taqman RT-PCR assay (ABI, Foster City, USA) and the Lightcycler assay (Roche, USA).

[0085] Thus, in one embodiment of the present invention, the preparation of patient gene expression profiles or the preparation of MS- and non-MS profiles comprises conducting real-time quantitative PCR (TaqMan) with sample-derived RNA and control RNA. Holland, et al., PNAS 88:7276-7280 (1991) describe an assay known as a Taqman assay. The 5′ to 3′ exonuclease activity of Taq polymerase is employed in a polymerase chain reaction product detection system to generate a specific detectable signal concomitantly with amplification. An oligonucleotide probe, non-extendable at the 3′ end, labeled at the 5′ end, and designed to hybridize within the target sequence, is introduced into the polymerase chain reaction assay. Annealing of the probe to one of the polymerase chain reaction product strands during the course of amplification generates a substrate suitable for exonuclease activity. During amplification, the 5′ to 3′ exonuclease activity of Taq polymerase degrades the probe into smaller fragments that can be differentiated from undegraded probe. A version of this assay is also described in Gelfand et al., in U.S. Pat. No. 5,210,015, which is hereby incorporated by reference.

[0086] Further, U.S. Pat. No. 5,491,063 to Fisher, et al., which is hereby incorporated by reference, provides a Taqman-type assay. The method of Fisher et al. provides a reaction that results in the cleavage of single-stranded oligonucleotide probes labeled with a light-emitting label wherein the reaction is carried out in the presence of a DNA binding compound that interacts with the label to modify the light emission of the label. The method of Fisher uses the change in light emission of the labeled probe that results from degradation of the probe.

[0087] The TaqMan detection assays offer certain advantages. First, the methodology makes possible the handling of large numbers of samples efficiently and without cross-contamination and is therefore adaptable for robotic sampling. As a result, large numbers of test samples can be processed in a very short period of time using the TaqMan assay. Another advantage of the TaqMan system is the potential for multiplexing. Since different fluorescent reporter dyes can be used to construct probes, the expression of several different genes associated with MS could be assayed in the same PCR reaction, thereby reducing the labor costs that would be incurred if each of the tests were performed individually. Thus, the TaqMan assay format is preferred where the patient's gene expression profile, and the corresponding MS- and non-MS profiles comprise the expression levels of about 20 of fewer, or about 10 or fewer, or about 7 of fewer, or about 5 genes (e.g., genes listed in Tables 1-6).

[0088] Alternatively, the assay format may employ the methodologies described in Direct Multiplexed Measurement of Gene Expression with Color-Coded Probe Pairs, Nature Biotechnology (Mar. 7, 2008), which describes the nCounter™ Analysis System (nanoString Technologies). This system captures and counts individual mRNA transcripts by a molecular bar-coding technology, and is commercialized by Nanostring.

[0089] In other embodiments, the invention employs detection and quantification of RNA levels in real-time using nucleic acid sequence based amplification (NASBA) combined with molecular beacon detection molecules. NASBA is described for example, in Compton J., Nucleic acid sequence-based amplification, Nature 1991; 350(6313): 91-2. NASBA is a singe-step isothermal RNA-specific amplification method. Generally, the method involves the following steps: RNA template is provided to a reaction mixture, where the first primer attaches to its complementary site at the 3′ end of the template; reverse transcriptase synthesizes the opposite, complementary DNA strand; RNAse H destroys the RNA template (RNAse H only destroys RNA in RNA-DNA hybrids, but not single-stranded RNA); the second primer attaches to the 3′ end of the DNA strand, and reverse transcriptase synthesizes the second strand of DNA; and T7 RNA polymerase binds double-stranded DNA and produces a complementary RNA strand which can be used again in step 1, such that the reaction is cyclic.

[0090] In yet other embodiments, the assay format is a flap endonuclease-based format, such as the Invader™ assay (Third Wave Technologies). In the case of using the invader method, an invader probe containing a sequence specific to the region 3′ to a target site, and a primary probe containing a sequence specific to the region 5′ to the target site of a template and an unrelated flap sequence, are prepared. Cleavase is then allowed to act in the presence of these probes, the target molecule, as well as a FRET probe containing a sequence complementary to the flap sequence and an auto-complementary sequence that is labeled with both a fluorescent dye and a quencher. When the primary probe hybridizes with the template, the 3′ end of the invader probe penetrates the target site, and this structure is cleaved by the Cleavase resulting in dissociation of the flap. The flap binds to the FRET probe and the fluorescent dye portion is cleaved by the Cleavase resulting in emission of fluorescence.

[0091] In yet other embodiments, the assay format employs direct mRNA capture with branched DNA (QuantiGene™, Panomics) or Hybrid Capture™ (Digene).

[0092] The design of appropriate probes for hybridizing to a particular target nucleic acid, and as configured for any appropriate nucleic acid detection assay, is well known.

### Computer Systems

[0093] In another aspect, the invention is a computer system that contains a database, on a computer-readable medium, of mean gene expression values determined in an MS patient population and in a non-MS patient population. These gene expression values are determined in blood samples, such as whole blood cell samples or white blood cell samples (e.g., PBMC samples), and for genes selected from one or more of Tables 1-5. The database may include gene expression measurements for at least one or a plurality of genes that are also listed in Table 6. The database may include, for each gene, Mean-MS and Mean-Control (e.g., non-MS or healthy) gene expression levels, as well as various statistical measures, including measures of value dispersion (e.g., Standard Variation), fold change (e.g., between control and MS populations), and statistical significance (statistical association with MS). Various such measures are shown in the accompanying Tables, and such measures may be employed in the computer systems of the invention. Further, the MS patient population may include patients being treated with Beta-interferon, Glatiramer acetate, and/or Natalizumab, and such treatment and other clinical information may be included in the database such that an appropriate gene expression profile may be assembled for use with the diagnostic methods of the invention. Generally, profiles may be assembled based upon parameters to be selected and input by a user, with these parameters including one or more of age, race, gender, MS treatment, and clinical manifestation and course of MS.

[0094] In certain embodiments, the database contains mean gene expression values for at least about 5, 7, 10, 20, 40, 50, or 100 genes selected from any one, or a combination of, Tables 1-6. In some embodiments, the database may contain mean gene expression values for more than about 100 genes, or about 300 genes, or about 400 genes selected from Tables 1-6. In one embodiment, the database contains mean gene expression values for all or substantially all the genes listed in Tables 1-6. The database may include gene expression measurements for at least one or a plurality of genes that are also listed in Table 6.

[0095] The computer system of the invention may be programmed to compare (e.g., in response to user inputs) a gene expression profile to a non-MS gene expression profile and/or an MS-gene expression profile stored and/or generated from the database, to determine whether the gene expression profile is itself an MS-profile or a non-MS profile. For example, the computer system may be programmed to perform any of the known classification schemes for classifying gene expression profiles. Various classification schemes are known for classifying samples, and these include, without limitation: Naïve Bayes, Support Vector Machines, Nearest Neighbors, Decision Trees, Logistic, Artificial Neural Networks, and Rule-based schemes. The computer system may employ a classification algorithm or “class predictor” as described in R. Simon, Diagnostic and prognostic prediction using gene expression profiles in high-dimensional microarray data, British Journal of Cancer (2003) 89, 1599-1604, which is hereby incorporated by reference in its entirety.

[0096] The computer system of the invention may comprise a user interface, allowing a user to input gene expression values for comparison to an MS and/or non-MS gene expression profile, or gene expression profile previously generated for the patient. The patient's gene expression values may be input from a location remote from the database.

[0097] The computer system may further comprise a display, for presenting and/or displaying a result, such as a profile assembled from the database, or the result of a comparison (or classification) between input gene expression values and an MS and non-MS profiles. Such results may further be provided in a tangible form (e.g., as a printed report).

[0098] The computer system of the invention may further comprise relational databases containing sequence information, for instance, for the genes of Tables 1-5. For example, the database may contain information associated with a given gene, or patient sample, such as descriptive information about the gene associated with the sequence information, or descriptive information concerning the clinical status of the patient. The database may be designed to include different parts, for instance a sequence database and a gene expression database. Methods for the configuration and construction of such databases and computer-readable media to which such databases are saved are widely available, for instance, see U.S. Pat. No. 5,953,727, which is hereby incorporated by reference in its entirety.

[0099] The databases of the invention may be linked to an outside or external database (e.g., on the world wide web) such as GenBank (ncbi.nlm.nih.gov/entrez.index.html); KEGG (genome.ad.jp/kegg); SPAD (grt.kuyshu-u.ac.jp/spad/index.html); HUGO (gene.ucl.ac.uk/hugo); Swiss-Prot (expasy.ch.sprot); Prosite (expasy.ch/tools/scnpsitl.html); OMIM (ncbi.nlm.nih.gov/omim); and GDB (gdb.org). In certain embodiments, the external database is GenBank and the associated databases maintained by the National Center for Biotechnology Information (NCBI) (ncbi.nlm.nih.gov).

[0100] Any appropriate computer platform, user interface, etc. may be used to perform the necessary comparisons between sequence information, gene expression information (e.g., gene expression profiles) and any other information in the database or information provided as an input. For example, a large number of computer workstations are available from a variety of manufacturers, such has those available from Silicon Graphics. Client/server environments, database servers and networks are also widely available and appropriate platforms for the databases described herein.

[0101] The databases of the invention may be used to produce, among other things, electronic Northerns that allow the user to determine the samples in which a given gene is expressed and to allow determination of the abundance or expression level of the given gene.

### Diagnostic Kits

[0102] The invention further provides a kit or array containing nucleic acid primers and/or probes for determining the level of expression in a patient sample of a plurality of genes listed in Tables 1-5. The kit may consist essentially of primers and/or probes related to evaluating MS in a sample, and primers and/or probes related to necessary or meaningful assay controls (such as expression level controls and normalization controls, as described herein under “Assay Formats”). The kit for evaluating MS may comprise nucleic acid probes and/or primers designed to detect the expression level of ten or more genes associated with MS, such as the genes listed in Tables 1, 2, 3, 4, and/or 5. The kit may include a set of probes and/or primers designed to detect or quantify the expression levels of at least 5, 7, 10, or 20 genes listed in one or more of Tables 1, 2, 3, 4, and/or 5. In certain embodiments, the kit includes at least one probe and/or primer for quantifying expression of at least one or a plurality of genes that are also listed in Table 6. The primers and/or probes may be designed to detect gene expression levels in accordance with any assay format, including those described herein under the heading “Assay Format.” Exemplary assay formats include polymerase-based assays, such as RT-PCR, Taqman™, hybridization-based assays, for example using DNA microarrays or other solid support, nucleic acid sequence based amplification (NASBA), flap endonuclease-based assays.

[0103] In accordance with this aspect, the probes and primers may comprise antisense nucleic acids or oligonucleotides that are wholly or partially complementary to the diagnostic targets described herein (e.g., Tables 1-6). The probes and primers will be designed to detect the particular diagnostic target via an available nucleic acid detection assay format, which are well known in the art. The kits of the invention may comprise probes and/or primers designed to detect the diagnostic targets via detection methods that include amplification, endonuclease cleavage, and hybridization.

[0104] Without further description, it is believed that one of ordinary skill in the art can, using the preceding description and the following illustrative examples, make and utilize the compounds of the present invention and practice the claimed methods.

### EXAMPLES

[0105] MS and control (non-MS) gene expression profiles were identified by hybridization of RNA samples (from whole blood or PBMC samples) to microarrays.

[0106] Total RNA isolated from PBMC samples of 11 MS patients and 8 healthy controls was hybridized to a U133A/B chip set (Affymetrix).

[0107] Total RNA isolated from whole blood of 62 MS patients and 64 healthy controls was hybridized to a U133 Plus 2.0 chip (Affymetrix). These patients had at least one diagnosis of relapsing remitting MS.

[0108] Samples were processed as follows.

[0109] For PBMC isolation and subsequent RNA isolation, whole blood was collected into Vacutainer tubes (BD) containing an anticoagulant such as heparin. Peripheral blood mononuclear cells (PBMCs) were isolated by ficoll-hypaque density gradient centrifugation. Total RNA was isolated using standard RNA isolation kits (Qiagen).

[0110] For whole blood and subsequent RNA isolation, approximately 2.5 ml of whole blood was collected into each of 2-4 PAXgene tubes (BD/PreAnalytiX) using a blood collection set (BD Safety-Lok™ Blood Collection Set with butterfly needle), per PAXgene tube) following the protocol recommended by the manufacture. The PAXgene tubes were inverted 8-10 times to ensure proper mixture of blood with RNA stabilization solution. Total RNA was isolated using the PAXgene 96 Blood RNA Kit (Qiagen).

[0111] Following RNA isolation, the RNA was checked for quality, quantity and purity. Total RNA was evaluated for Quality by using the Agilent Bioanalyzer. RNA preps were quantified by measuring the absorbance at A260 and purity was assessed based on the ratio of the absorbance at A260/A280.

[0112] Hybridization of total RNA to microarrays, and following analysis of the data, produced the following MS and non-MS gene expression profiles (or “signatures”).

[0113] Table 1A lists genes that are differentially expressed in whole blood of MS patients, and provides an exemplary MS and non-MS profile for such genes. Table 1A refers to these genes by name (title and abbreviation), GeneBank Accession No., and sequence identifier as found in the accompanying Sequence Listing. Table 1A further provides Mean-MS and Mean-control gene expression levels as generated from the sample and data set, as well as measures of the statistical association of each differential gene expression level with MS. Table 1B lists these same genes, and expresses the differential RNA levels as fold change (Control/MS).

[0114] Table 2A lists genes that are differentially expressed in PBMCs of MS patients, and provides an exemplary MS and non-MS profile for such genes. Table 2A refers to these genes by name (title and abbreviation), GeneBank Accession No., and sequence identifier as found in the accompanying Sequence Listing. Table 2A further provides the fold change between control and MS samples as generated from this exemplary sample and data set, as well as measures of the statistical association of each differential gene expression level with MS. Table 2B lists these same genes, and shows the mean control and MS data signals, and indicates the top 42 genes in terms of fold change.

[0115] Tables 3 and 5 list genes that are differentially expressed in PBMCs between pre- and post-treatment with Beta-interferon. Table 4 and 5 list genes that are differentially expressed in PBMCs between pre- and post-treatment with Copaxone. Table 5 lists genes that are differentially expressed between pre- and post-treatment with each of Beta-Interferon and Glatiramer acetate.

[0116] The identification of such gene signatures, is illustrated in the following examples.

### Example 1

### Genes that are Differentially Expressed Between MS and Normal Samples Using a False Discovery Rate P-Value of 0.001.

[0117] The procedure to derive the list of differentially expressed genes in Table 2 was as follows.

[0118] A Genesis® (GeneLogic proprietary software) Comparative Analysis was performed using normal white blood cell (WBC) samples as the reference set and MS WBC samples as the experimental set. Parameters were as follows:
[0119] Log with Floor=0,
[0120] 95% Confidence level,
[0121] Unequal Variance,
[0122] Exclude Expression with Call Values of “Unknown” or “No Value,”
[0123] Sample Set Expression Lower and Upper Percentiles of 25 and 75,
[0124] MAS5.0 Affymetrix Summarization,
[0125] Exclude gene fragments absent in all samples,

[0126] No other analysis filters were used. The analysis yielded 25,340 gene fragments. Fold Change, t-test p-value, and all sample expression values for each of these 25,340 fragments were exported from Genesis. All MAS5 logged expression values from Genesis for the 25,340 gene fragments for all 19 samples were uploaded into Partek Genomics Suite(R) software. A Benjamini and Hochberg False Discovery Rate correction was performed using a p-value cutoff of 0.001. This yielded a set of 339 non-control gene fragments listed in Table 2. Annotations for gene sets were based on UniGene assignments using the Gene Logic GeneIndex Build 33.

[0127] A correlation heatmap was calculated and visualized using Stat->Correlate->Similarity Matrix. Parameters=Pearson, All Combinations (19×19). The default heatmap showed the following. First, the normal (Control) group is cohesive and highly correlated. Second, the MS within-group correlations were higher than the Normal within-group correlations, except for three MS samples. These three MS samples were not as highly correlated to the remainder of the MS samples as the correlations for the majority of this group's intersample correlations. However, the three samples in question are also not highly correlated to each other, indicating absence of “batch” effect for contiguous GID's. Third, the Normal vs. MS correlations indicate robust differences even before gene selection, a sign that many genes are differentially expressed between the groups. Fourth, correlations are at levels consistent with what is expected. No outliers.

[0128] The data was transposed in Partek to allow for Principal Components Analysis (PCA). A categorical factor variable was added to the transposed data for coloring the PCA visual by terms “MS” and “Normal”. PCA Parameters: Correlation Dispersion Matrix, Normalized Eigenvector Scaling. Review of PCA showed: the variance explained by the plot is relatively larger than expected such that a robust response is expected upon hypothesis testing for individual genes. Even without prior gene selection, both groups separate well on the 1^{st} principal component, indicating a robust separation of samples. Further, the number of fragments p<0.01 (unadjusted) was 4,146, and the number of fragments p<0.01 (unadjusted) and with a fold change of >=2 was 386. This number of changing fragments indicates a high degree of regulation that is likely to be biologically real.

[0129] Comparison of the genes and gene fragments listed in Table 2 between baseline MS samples and control blood samples identifies a differentiating signature.

[0130] Thus, genes were further identified on the basis of stringent statistical differentiation thresholding, for example, using a fold-change cut-off to identify gene fragments with expression intensity in MS WBC that is either less than half or more than twice the expression intensity in normal WBC. This rationale is based on the consideration that it is more practical to detect changes in clinical samples when the range of the difference between disease and normal is large.

[0131] The procedure to derive the list of gene fragments with a fold change of at least 2 was as follows. A Genesis® Comparative Analysis was performed using normal WBC samples as the reference set and MS WBC samples as the experimental set. Parameters were as follows:
[0132] Log with Floor=0,
[0133] 95% Confidence level,
[0134] Unequal Variance,
[0135] Exclude expression with call values of “unknown” or “no value,”
[0136] MAS5.0 Affymetrix Summarization,
[0137] Include only gene fragments that do not have Affymetrix “Present” Call in 100% of Samples in either sample set,
[0138] Sample set expression lower and upper percentiles of 25 and 75,
[0139] Fold-change magnitude of +/−2.0,
[0140] Raw p-value threshold of 0.05.

[0141] This analysis yielded a set of 182 genes, which are listed in Table 2. Annotations for gene sets were based on UniGene assignments using the Gene Logic GeneIndex Build 33.

[0142] Thus comparison of the genes listed in Table 2 between baseline MS samples and control blood samples identifies a differentiating signature.

### Example 2

### Genes that are Differentially Expressed Between Pre- and Post-Avonex Treatment MS Samples

[0143] Expression changes in WBC after treatment can be used as a pharmacodynamic measure of exposure to drugs, and thus as a measure of adequate dosing. They may also be a measure of therapeutic response. In the context of neutralizing antibodies to a biologic therapy, it can also be used as a functional measure activity of the drug. Presence of neutralizing antibodies to beta-interferons is known to inhibit response to therapy in patients with MS. Consequently, a Genesis® Comparative Analysis was performed using pre-Avonex treatment WBC samples as the reference set and post-Avonex treatment MS samples WBC samples as the experimental set. Parameters were as follows:
[0144] Log with Floor=0,
[0145] 95% confidence level,
[0146] Unequal Variance,
[0147] Exclude expression with call values of “Unknown” or “No Value,”
[0148] MAS5.0 Affymetrix Summarization,
[0149] Include only gene fragments that do not have Affymetrix “Present” Call in 100% of samples in either sample set,
[0150] Sample set expression lower and upper percentiles of 25 and 75,
[0151] Fold-change magnitude of +/−1.3,
[0152] Raw p-value threshold of 0.05.

[0153] This analysis yielded the set of 111 genes listed in Table 3. Gene expression values for the genes listed in Table 3 provide a gene signature associated with drug exposure and response to treatment, or worsening of disease.

[0154] Further, many interferon-inducible genes were identified as markers for adequate treatment monitoring, and these include:

| | |
|---|---|
| IFI44L | interferon-induced protein 44-like |
| RSAD2 | radical S-adenosyl methionine domain containing 2 |
| RSAD2 | radical S-adenosyl methionine domain containing 2 |
| IFI44 | interferon-induced protein 44 |
| MX1 | myxovirus (influenza virus) resistance 1, |
| | interferon-inducible protein p78 (mouse |
| LOC650557 | similar to HLA class II histocompatibility |
| | antigen, DQ(W1.1) beta chain precursor |
| IFIT3 | interferon-induced protein with tetratricopeptide repeats 3 |
| LY6E | lymphocyte antigen 6 complex, locus E |
| ISG15 | ISG15 ubiquitin-like modifier |
| BIRC4BP | XIAP associated factor-1 |
| LOC129607 | hypothetical protein LOC129607 |
| IFI44 | interferon-induced protein 44 |
| APOBEC3A | apolipoprotein B mRNA editing enzyme, |
| | catalytic polypeptide-like 3A |
| MS4A4A | membrane-spanning 4-domains, subfamily A, member 4 |
| IFIT2 | interferon-induced protein with tetratricopeptide repeats 2 |
| IFIT3 | interferon-induced protein with tetratricopeptide repeats 3 |
| PARP14 | poly (ADP-ribose) polymerase family, member 14 |
| IFI6 | interferon, alpha-inducible protein 6 |

### Example 3

### Genes that are Differentially Expressed Between Pre- and Post-Copaxone Treatment MS Samples

[0155] Parameters were the same as for Example 2. This analysis yielded the set of 229 gene listed in Table 4. Annotations for gene sets were based on UniGene assignments using the Gene Logic GeneIndex Build 33. Gene expression values for the genes listed in Table 4 provide a gene signature associated with drug exposure and response to treatment, or worsening of disease.

### Example 4

### Genes that are Differentially Expressed Between Pre- and Post-Copaxone Treatment MS Samples and Between Pre- and Post-Avonex Treatment MS Samples

[0156] Avonex and Copaxone have distinct mechanisms of molecular action. Beta-interferon (Avonex) is a protein made by the body, thought primarily to combat viral infections. Glatiramer acetate (Copaxone) is a mixture of amino acids that bind to major histocompatibility complex class II molecules and competition with MBP and other myelin proteins for such binding and presentation to T cells. Genes that are altered in expression after treatment with both agents may represent a common signature of therapeutic benefit. Table 5 lists the genes that are common to both Table 3 and Table 4. Parameters were the same as for Example 2.

[0157] This analysis yielded the set of 36 gene fragments listed in Table 5. Annotations for gene sets were based on UniGene assignments using the Gene Logic GeneIndex Build 33.

[0158] Gene expression values for the genes listed in Table 5 provide a gene signature associated with drug exposure and response to treatment, or worsening of disease.

[0159] All patents or publications disclosed herein are incorporated by reference in their entireties.

TABLE 1A

| | | | SEQ | | | | | | |
|---|---|---|---|---|---|---|---|---|---|
| | | Genbank | ID | | Bonferroni | Stepup | | Mean | Mean |
| Gene Title | Gene Symbol | Acc. No. | NO. | p-value | (p-value) | (p-value) | T | (CONTROL) | (MS) |
| FK506 binding protein 5 | FKBP5 | NM_004117 | 0813 | 4.95E−20 | 2.71E−15 | 2.71E−15 | −10.9889 | 78.0882 | 190.055 |
| FK506 binding protein 5 | FKBP5 | W86302 | 1003 | 9.38E−18 | 5.13E−13 | 2.56E−13 | −10.0535 | 473.34 | 934.916 |
| FK506 binding protein 5 | FKBP5 | AI753747 | 0255 | 3.80E−17 | 2.08E−12 | 6.93E−13 | −9.80302 | 1184.25 | 2126.26 |
| cyclin D3 | CCND3 | NM_001760 | 0778 | 9.21E−13 | 5.04E−08 | 1.26E−08 | −7.96208 | 2021.6 | 2569.7 |
| tetraspanin 14 | TSPAN14 | NM_030927 | 0958 | 8.54E−12 | 4.67E−07 | 9.09E−08 | −7.54226 | 436.935 | 543.259 |
| chemokine (C—X—C motif) | CXCR4 | AF348491 | 0158 | 9.97E−12 | 5.45E−07 | 9.09E−08 | −7.51268 | 1798.6 | 2290.67 |
| receptor 4 | | | | | | | | | |
| Rho GTPase activating | ARHGAP27 | AI814329 | 0276 | 1.22E−11 | 6.65E−07 | 9.50E−08 | −7.47481 | 47.2712 | 91.2659 |
| protein 27 | | | | | | | | | |
| integrin, beta 2 | ITGB2 | L78790 | 0728 | 1.83E−11 | 1.00E−06 | 1.25E−07 | −7.39644 | 3519.18 | 4443.09 |
| (complement component 3 | | | | | | | | | |
| receptor 3 and 4 subunit) | | | | | | | | | |
| adrenergic, beta, receptor | ADRBK1 | M80776 | 0738 | 4.17E−11 | 2.28E−06 | 2.53E−07 | −7.23859 | 275.479 | 414.407 |
| kinase 1 | | | | | | | | | |
| solute carrier family 6 | SLC6A6 | NM_003043 | 0797 | 5.34E−11 | 2.92E−06 | 2.72E−07 | −7.1906 | 125.121 | 202.558 |
| (neurotransmitter | | | | | | | | | |
| transporter, taurine), | | | | | | | | | |
| member 6 | | | | | | | | | |
| Rho GTPase activating | ARHGAP18 | BE501862 | 0576 | 5.47E−11 | 2.99E−06 | 2.72E−07 | 7.18598 | 237.506 | 168.061 |
| protein 18 | | | | | | | | | |
| DNA-damage-inducible | DDIT4 | NM_019058 | 0928 | 6.90E−11 | 3.77E−06 | 3.14E−07 | −7.1411 | 247.135 | 427.375 |
| transcript 4 | | | | | | | | | |
| chromodomain helicase | CHD9 | AW300405 | 0505 | 7.89E−11 | 4.31E−06 | 3.32E−07 | 7.11505 | 241.321 | 194.754 |
| DNA binding protein 9 | | | | | | | | | |
| polypyrimidine tract | PTBP1 | AA679988 | 0041 | 9.27E−11 | 5.07E−06 | 3.54E−07 | −7.08362 | 140.67 | 188.645 |
| binding protein 1 | | | | | | | | | |
| DEAD (Asp-Glu-Ala-Asp) | DDX6 | NM_004397 | 0822 | 9.71E−11 | 5.31E−06 | 3.54E−07 | 7.07456 | 59.5517 | 43.1658 |
| box polypeptide 6 | | | | | | | | | |
| transmembrane 9 | TM9SF1 | BE899402 | 0606 | 1.17E−10 | 6.40E−06 | 4.00E−07 | −7.03808 | 95.4238 | 120.952 |
| superfamily member 1 | | | | | | | | | |
| structural maintenance of | SMC3 | AI373676 | 0193 | 1.62E−10 | 8.88E−06 | 4.76E−07 | 6.97411 | 277.737 | 200.67 |
| chromosomes 3 | | | | | | | | | |
| chromosome 6 open | C6orf166 | AI742378 | 0253 | 1.71E−10 | 9.35E−06 | 4.76E−07 | −6.96395 | 84.0063 | 129.545 |
| reading frame 166 | | | | | | | | | |
| salvador homolog 1 | SAV1 | AJ292969 | 0315 | 1.74E−10 | 9.52E−06 | 4.76E−07 | 6.96043 | 122.391 | 92.8185 |
| (Drosophila) | | | | | | | | | |
| heat shock 70 kDa protein | HSPA5 | AF216292 | 0145 | 1.74E−10 | 9.52E−06 | 4.76E−07 | −6.96042 | 1512.26 | 1749.33 |
| 5 (glucose-regulated | | | | | | | | | |
| protein, 78 kDa) | | | | | | | | | |
| MFNG O-fucosylpeptide | MFNG | AI738965 | 0249 | 2.02E−10 | 1.10E−05 | 5.26E−07 | −6.93133 | 171.014 | 235.075 |
| 3-beta-N- | | | | | | | | | |
| acetylglucosaminyltransferase | | | | | | | | | |
| ankyrin repeat and BTB | ABTB1 | BF115480 | 0622 | 2.50E−10 | 1.37E−05 | 6.20E−07 | −6.88974 | 39.5212 | 65.1926 |
| (POZ) domain containing 1 | | | | | | | | | |
| leukotriene B4 receptor | LTB4R | U33448 | 0980 | 4.64E−10 | 2.54E−05 | 1.06E−06 | −6.76716 | 127.687 | 245.457 |
| myeloid cell leukemia | MCL1 | BF594446 | 0650 | 4.65E−10 | 2.54E−05 | 1.06E−06 | −6.76677 | 182.812 | 295.014 |
| sequence 1 (BCL2- | | | | | | | | | |
| related) | | | | | | | | | |
| Friend leukemia virus | FLI1 | M93255 | 0741 | 5.83E−10 | 3.19E−05 | 1.27E−06 | −6.72202 | 620.183 | 755.664 |
| integration 1 | | | | | | | | | |
| unc-93 homolog B1 | UNC93B1 | AW001274 | 0460 | 7.24E−10 | 3.96E−05 | 1.52E−06 | −6.67888 | 130.118 | 217.625 |
| (C. elegans) | | | | | | | | | |
| mindbomb homolog 1 | MIB1 | W80418 | 1001 | 8.62E−10 | 4.71E−05 | 1.71E−06 | 6.64405 | 230.686 | 181.53 |
| (Drosophila) | | | | | | | | | |
| period homolog 1 | PER1 | NM_002616 | 0790 | 8.86E−10 | 4.85E−05 | 1.71E−06 | −6.63854 | 54.7084 | 86.7084 |
| (Drosophila) | | | | | | | | | |
| splicing factor, | SFRS17A | M99578 | 0743 | 9.08E−10 | 4.96E−05 | 1.71E−06 | −6.63372 | 89.447 | 111.808 |
| arginine/serine-rich 17A | | | | | | | | | |
| zinc finger and BTB | ZBTB16 | NM_006006 | 0849 | 9.49E−10 | 5.19E−05 | 1.73E−06 | −6.62487 | 122.114 | 211.501 |
| domain containing 16 | | | | | | | | | |
| ER lipid raft associated 1 | ERLIN1 | NM_006459 | 0862 | 9.95E−10 | 5.44E−05 | 1.76E−06 | −6.61532 | 49.7838 | 68.0357 |
| PHD finger protein 3 | PHF3 | AW189430 | 0482 | 1.05E−09 | 5.75E−05 | 1.80E−06 | 6.60417 | 170.33 | 132.083 |
| toll-like receptor 2 | TLR2 | NM_003264 | 0801 | 1.15E−09 | 6.29E−05 | 1.85E−06 | −6.58638 | 1897.07 | 2567.42 |
| paxillin | PXN | D86862 | 0710 | 1.17E−09 | 6.39E−05 | 1.85E−06 | −6.58298 | 92.9515 | 193.438 |
| RAB GTPase activating | RABGAP1L | AB019490 | 0087 | 1.21E−09 | 6.62E−05 | 1.85E−06 | 6.57615 | 286.939 | 191.152 |
| protein 1-like | | | | | | | | | |
| proline rich 14 | PRR14 | BE788667 | 0599 | 1.25E−09 | 6.82E−05 | 1.85E−06 | −6.57015 | 122.602 | 235.313 |
| Fc fragment of IgA, | FCAR | D87858 | 0712 | 1.25E−09 | 6.86E−05 | 1.85E−06 | −6.56901 | 97.3093 | 155.905 |
| receptor for | | | | | | | | | |
| tripeptidyl peptidase I | TPP1 | AA602532 | 0032 | 1.76E−09 | 9.62E−05 | 2.53E−06 | −6.50075 | 200.439 | 264.395 |
| signal-regulatory protein | SIRPA | D86043 | 0709 | 1.85E−09 | 0.000101 | 2.59E−06 | −6.49062 | 69.319 | 119.932 |
| alpha | | | | | | | | | |
| insulin-like growth factor 2 | IGF2BP3 | AU160004 | 0441 | 2.08E−09 | 0.000114 | 2.84E−06 | 6.46737 | 35.8267 | 21.3437 |
| mRNA binding protein 3 | | | | | | | | | |
| RAN binding protein 3 | RANBP3 | AI689052 | 0244 | 2.52E−09 | 0.000138 | 3.36E−06 | −6.42824 | 128.056 | 158.814 |
| tankyrase, TRF1- | TNKS2 | BF060683 | 0615 | 2.84E−09 | 0.000155 | 3.69E−06 | 6.4041 | 346.06 | 256.529 |
| interacting ankyrin-related | | | | | | | | | |
| ADP-ribose polymerase 2 | | | | | | | | | |
| transmembrane 9 | TM9SF4 | AI418892 | 0200 | 3.11E−09 | 0.00017 | 3.87E−06 | −6.38564 | 167.867 | 208.305 |
| superfamily protein | | | | | | | | | |
| member 4 | | | | | | | | | |
| CCR4-NOT transcription | CNOT1 | BC040523 | 0561 | 3.12E−09 | 0.00017 | 3.87E−06 | −6.38501 | 70.5108 | 91.1365 |
| complex, subunit 1 | | | | | | | | | |
| trophoblast-derived | TncRNA | AV659198 | 0443 | 3.26E−09 | 0.000178 | 3.93E−06 | −6.37561 | 80.5859 | 112.859 |
| noncoding RNA | | | | | | | | | |
| CD83 molecule | CD83 | NM_004233 | 0816 | 3.31E−09 | 0.000181 | 3.93E−06 | 6.37304 | 119.09 | 91.3124 |
| Transcribed locus | — | AI032730 | 0160 | 3.49E−09 | 0.000191 | 4.05E−06 | 6.36222 | 195.488 | 149.453 |
| TBC1 domain family, | TBC1D2B | BF195608 | 0625 | 3.90E−09 | 0.000213 | 4.23E−06 | −6.33953 | 288.317 | 340.68 |
| member 28 | | | | | | | | | |
| hypothetical protein | FLJ10038 | NM_017976 | 0918 | 3.91E−09 | 0.000214 | 4.23E−06 | 6.33873 | 86.1568 | 69.6291 |
| FLJ10038 | | | | | | | | | |
| procollagen-proline, 2- | P4HB | AK075503 | 0362 | 3.93E−09 | 0.000215 | 4.23E−06 | −6.33781 | 289.177 | 412.473 |
| oxoglutarate 4- | | | | | | | | | |
| dioxygenase (proline 4- | | | | | | | | | |
| hydroxylase), beta | | | | | | | | | |
| polypeptide | | | | | | | | | |
| Ewing sarcoma breakpoint | EWSR1 /// | AF327066 | 0156 | 3.95E−09 | 0.000216 | 4.23E−06 | −6.3368 | 331.762 | 417.378 |
| region 1 /// Friend | FLI1 | | | | | | | | |
| leukemia virus integration 1 | | | | | | | | | |
| Rab interacting lysosomal | RILPL2 | AI810244 | 0275 | 4.09E−09 | 0.000224 | 4.30E−06 | −6.32963 | 726.676 | 871.377 |
| protein-like 2 | | | | | | | | | |
| RAB5C, member RAS | RAB5C | AF141304 | 0136 | 4.41E−09 | 0.000241 | 4.54E−06 | −6.31423 | 663.073 | 848.044 |
| oncogene family | | | | | | | | | |
| SMAD specific E3 | SMURF2 | AY014180 | 0532 | 4.48E−09 | 0.000245 | 4.54E−06 | 6.31098 | 417.357 | 352.415 |
| ubiquitin protein ligase 2 | | | | | | | | | |
| diacylglycerol lipase, beta | DAGLB | BE795104 | 0600 | 5.78E−09 | 0.000316 | 5.75E−06 | −6.2587 | 76.1839 | 103.52 |
| — | — | AW275093 | 0495 | 6.77E−09 | 0.00037 | 6.61E−06 | 6.22634 | 37.8503 | 25.7363 |
| cisplatin resistance- | CROP | AW089673 | 0478 | 7.20E−09 | 0.000394 | 6.80E−06 | 6.21366 | 1253.96 | 1024.1 |
| associated overexpressed | | | | | | | | | |
| protein | | | | | | | | | |
| CUG triplet repeat, RNA | CUGBP2 | AI652861 | 0231 | 7.22E−09 | 0.000395 | 6.80E−06 | −6.21313 | 439.059 | 508.726 |
| binding protein 2 | | | | | | | | | |
| cleft lip and palate | CLPTM1 | BC004865 | 0551 | 7.52E−09 | 0.000411 | 6.86E−06 | −6.20462 | 269.664 | 340.303 |
| associated | | | | | | | | | |
| transmembrane protein 1 | | | | | | | | | |
| plasminogen activator, | PLAUR | AY029180 | 0533 | 7.53E−09 | 0.000412 | 6.86E−06 | −6.20442 | 407.032 | 590.904 |
| urokinase receptor | | | | | | | | | |
| SH3 domain and | SH3TC1 | NM_018986 | 0926 | 7.68E−09 | 0.00042 | 6.89E−06 | −6.20022 | 156.867 | 208.68 |
| tetratricopeptide repeats 1 | | | | | | | | | |
| CCAAT/enhancer binding | CEBPD | AV655640 | 0442 | 7.96E−09 | 0.000435 | 7.02E−06 | −6.19304 | 66.2588 | 101.6 |
| protein (C/EBP), delta | | | | | | | | | |
| myotrophin | MTPN | AL533334 | 0410 | 8.33E−09 | 0.000455 | 7.23E−06 | 6.18357 | 2922.38 | 2651.39 |
| diacylglycerol kinase, zeta | DGKZ | NM_003646 | 0806 | 8.88E−09 | 0.000486 | 7.50E−06 | −6.17031 | 495.581 | 742.687 |
| 104 kDa | | | | | | | | | |
| coiled-coil domain | CCDC95 | AA743390 | 0052 | 9.01E−09 | 0.000492 | 7.50E−06 | −6.16737 | 114.613 | 146.782 |
| containing 95 | | | | | | | | | |
| golgi autoantigen, golgin | GOLGA8B | AI829170 | 0286 | 9.05E−09 | 0.000495 | 7.50E−06 | 6.16637 | 85.2551 | 49.0105 |
| subfamily a, 8B | | | | | | | | | |
| O-linked N- | OGT | U77413 | 0990 | 9.95E−09 | 0.000544 | 8.02E−06 | −6.14688 | 276.547 | 320.452 |
| acetylglucosamine | | | | | | | | | |
| (GlcNAc) transferase | | | | | | | | | |
| (UDP-N- | | | | | | | | | |
| acetylgluco- | | | | | | | | | |
| samine:polypeptide-N- | | | | | | | | | |
| acetylglucosaminyl | | | | | | | | | |
| transferase) | | | | | | | | | |
| alpha thalassemia/mental | ATRX /// | AI650257 | 0227 | 1.01E−08 | 0.00055 | 8.02E−06 | 6.14467 | 408.475 | 331.005 |
| retardation syndrome X- | LOC728849 | | | | | | | | |
| linked (RAD54 homolog, | | | | | | | | | |
| S. cerevisiae) /// similar to | | | | | | | | | |
| transcriptional regulator | | | | | | | | | |
| ATRX isoform 1 | | | | | | | | | |
| mitogen-activated protein | MAP2K1 | AI571419 | 0217 | 1.01E−08 | 0.000554 | 8.02E−06 | −6.14319 | 404.667 | 463.791 |
| kinase kinase 1 | | | | | | | | | |
| Glutathione S-transferase | GSTK1 | AV722006 | 0451 | 1.16E−08 | 0.000636 | 9.08E−06 | 6.11454 | 19.2432 | 11.7156 |
| kappa 1 | | | | | | | | | |
| ATP-binding cassette, | ABCC1 | NM_004996 | 0833 | 1.27E−08 | 0.000694 | 9.77E−06 | −6.09625 | 116.754 | 144.306 |
| sub-family C | | | | | | | | | |
| (CFTR/MRP), member 1 | | | | | | | | | |
| chromosome 19 open | C19orf6 | AI805266 | 0270 | 1.32E−08 | 0.000719 | 9.99E−06 | −6.0888 | 83.2411 | 131.22 |
| reading frame 6 | | | | | | | | | |
| potassium channel | KCTD5 | AA872593 | 0073 | 1.34E−08 | 0.000732 | 1.00E−05 | −6.08503 | 69.8096 | 86.2762 |
| tetramerisation domain | | | | | | | | | |
| containing 5 | | | | | | | | | |
| Transcribed locus | — | AI767751 | 0265 | 1.60E−08 | 0.000873 | 1.18E−05 | 6.04842 | 71.4585 | 56.7931 |
| leukotriene B4 receptor | LTB4R | U41070 | 0982 | 1.65E−08 | 0.0009 | 1.20E−05 | −6.04214 | 138.048 | 192.488 |
| TSC22 domain family, | TSC22D3 | NM_004089 | 0811 | 1.75E−08 | 0.000955 | 1.26E−05 | −6.02976 | 544.464 | 834.605 |
| member 3 | | | | | | | | | |
| peroxiredoxin 6 | PRDX6 | NM_004905 | 0831 | 1.78E−08 | 0.000971 | 1.26E−05 | 6.02632 | 877.551 | 731.524 |
| 6-phosphofructo-2- | PFKFB2 | AB044805 | 0093 | 1.86E−08 | 0.00102 | 1.30E−05 | −6.01598 | 29.4293 | 42.6113 |
| kinase/fructose-2,6- | | | | | | | | | |
| biphosphatase 2 | | | | | | | | | |
| chromobox homolog 4 (Pc | CBX4 | NM_003655 | 0807 | 1.88E−08 | 0.001028 | 1.30E−05 | −6.01429 | 72.9469 | 113.789 |
| class homolog, | | | | | | | | | |
| Drosophila) | | | | | | | | | |
| GTPase, IMAP family | GIMAP5 | AL080068 | 0378 | 1.99E−08 | 0.001088 | 1.36E−05 | 6.00246 | 95.8797 | 62.4753 |
| member 5 | | | | | | | | | |
| surfeit 4 | SURF4 | AF078866 | 0123 | 2.03E−08 | 0.00111 | 1.37E−05 | −5.99814 | 226.218 | 267.996 |
| PHD finger protein 12 | PHF12 | AL161953 | 0399 | 2.12E−08 | 0.001158 | 1.41E−05 | −5.98937 | 30.8623 | 52.3356 |
| CCAAT/enhancer binding | CEBPD | NM_005195 | 0837 | 2.29E−08 | 0.001253 | 1.51E−05 | −5.97285 | 2487.99 | 3256.48 |
| protein (C/EBP), delta | | | | | | | | | |
| prion protein (p27-30) | PRNP | AV725328 | 0453 | 2.37E−08 | 0.001297 | 1.54E−05 | −5.96555 | 110.316 | 135.332 |
| (Creutzfeldt-Jakob | | | | | | | | | |
| disease, Gerstmann- | | | | | | | | | |
| Strausler-Scheinker | | | | | | | | | |
| syndrome, fatal familial | | | | | | | | | |
| insomnia) | | | | | | | | | |
| phosphoinositide-3- | PIK3R5 | NM_014308 | 0883 | 2.40E−08 | 0.001313 | 1.54E−05 | −5.96298 | 182.242 | 221.794 |
| kinase, regulatory subunit | | | | | | | | | |
| 5, p101 | | | | | | | | | |
| myotubularin related | MTMR1 | AK001816 | 0322 | 2.49E−08 | 0.001362 | 1.57E−05 | −5.9552 | 65.8114 | 89.0136 |
| protein 1 | | | | | | | | | |
| SLAIN motif family, | SLAIN2 | AI979301 | 0310 | 2.49E−08 | 0.001363 | 1.57E−05 | 5.95515 | 209.516 | 151.766 |
| member 2 | | | | | | | | | |
| C-type lectin domain | CLEC1B | NM_016509 | 0902 | 2.90E−08 | 0.001584 | 1.80E−05 | 5.92338 | 93.1775 | 59.0062 |
| family 1, member B | | | | | | | | | |
| tetratricopeptide repeat | TTC7A | BE205790 | 0568 | 3.05E−08 | 0.001666 | 1.87E−05 | −5.91278 | 37.0092 | 50.8386 |
| domain 7A | | | | | | | | | |
| suppressor of Ty 16 | SUPT16H | AK024072 | 0341 | 3.08E−08 | 0.001685 | 1.87E−05 | 5.91033 | 263.419 | 187.951 |
| homolog (S. cerevisiae) | | | | | | | | | |
| SERPINE1 mRNA binding | SERBP1 | BC003049 | 0547 | 3.25E−08 | 0.001778 | 1.92E−05 | 5.89903 | 1399.78 | 1212.41 |
| protein 1 | | | | | | | | | |
| RNA binding motif protein | RBM14 | AF315633 | 0153 | 3.26E−08 | 0.001782 | 1.92E−05 | −5.89857 | 39.9955 | 59.7803 |
| 14 | | | | | | | | | |
| T-cell acute lymphocytic | TAL1 | NM_003189 | 0800 | 3.28E−08 | 0.001794 | 1.92E−05 | 5.89718 | 206.228 | 138.234 |
| leukemia 1 | | | | | | | | | |
| Ras association | RAPH1 | AA194149 | 0014 | 3.30E−08 | 0.001805 | 1.92E−05 | 5.89586 | 48.0791 | 34.1444 |
| (RAlGDS/AF-6) and | | | | | | | | | |
| pleckstrin homology | | | | | | | | | |
| domains 1 | | | | | | | | | |
| disabled homolog 2, | DAB2 | N21202 | 0744 | 3.55E−08 | 0.001939 | 2.01E−05 | 5.88069 | 97.375 | 73.5883 |
| mitogen-responsive | | | | | | | | | |
| phosphoprotein | | | | | | | | | |
| (Drosophila) | | | | | | | | | |
| v-ets erythroblastosis virus | ETS1 | NM_005238 | 0840 | 3.55E−08 | 0.00194 | 2.01E−05 | −5.8806 | 52.905 | 74.8306 |
| E26 oncogene homolog 1 | | | | | | | | | |
| (avian) | | | | | | | | | |
| elastin microfibril | EMILIN2 | AL552384 | 0416 | 3.58E−08 | 0.001958 | 2.01E−05 | −5.87865 | 39.6291 | 58.0146 |
| interfacer 2 | | | | | | | | | |
| myosin IXB | MYO9B | NM_004145 | 0815 | 3.60E−08 | 0.001968 | 2.01E−05 | −5.87757 | 63.7389 | 105.347 |
| DnaJ (Hsp40) homolog, | DNAJC13 | BC043583 | 0562 | 3.70E−08 | 0.002021 | 2.04E−05 | 5.87194 | 25.7886 | 18.3726 |
| subfamily C, member 13 | | | | | | | | | |
| acyl-Coenzyme A binding | ACBD5 | BC025309 | 0560 | 3.93E−08 | 0.002151 | 2.15E−05 | 5.85869 | 84.7927 | 62.1417 |
| domain containing 5 | | | | | | | | | |
| Ras association | RAPH1 | AA194149 | 0014 | 4.25E−08 | 0.002321 | 2.30E−05 | 5.84254 | 31.6578 | 22.9448 |
| (RAlGDS/AF-6) and | | | | | | | | | |
| pleckstrin homology | | | | | | | | | |
| domains 1 | | | | | | | | | |
| C-type lectin domain | CLEC4E | BC000715 | 0538 | 4.41E−08 | 0.002412 | 2.35E−05 | −5.8344 | 829.005 | 1208.34 |
| family 4, member E | | | | | | | | | |
| Fc fragment of IgA, | FCAR | U43677 | 0983 | 4.43E−08 | 0.002424 | 2.35E−05 | −5.8333 | 63.8877 | 101.844 |
| receptor for | | | | | | | | | |
| ATPase, Ca++ | ATP2A3 | AA877910 | 0076 | 4.84E−08 | 0.002649 | 2.52E−05 | −5.81444 | 72.7871 | 103.656 |
| transporting, ubiquitous | | | | | | | | | |
| methionine | MAT2A | NM_005911 | 0848 | 4.90E−08 | 0.002681 | 2.52E−05 | −5.8119 | 97.8356 | 120.978 |
| adenosyltransferase II, | | | | | | | | | |
| alpha | | | | | | | | | |
| general transcription factor | GTF2A1 | NM_015859 | 0891 | 4.94E−08 | 0.002701 | 2.52E−05 | 5.81025 | 49.1129 | 30.3493 |
| IIA, 1, 19/37 kDa | | | | | | | | | |
| DAZ associated protein 2 | DAZAP2 | AL534321 | 0411 | 4.96E−08 | 0.002711 | 2.52E−05 | −5.80949 | 1687.13 | 2024.25 |
| chromosome 1 open | C1orf38 | AB035482 | 0091 | 4.98E−08 | 0.002723 | 2.52E−05 | −5.80855 | 1388.6 | 1760.08 |
| reading frame 38 | | | | | | | | | |
| arrestin domain containing 1 | ARRDC1 | AK001822 | 0323 | 5.37E−08 | 0.002936 | 2.69E−05 | −5.79252 | 226.097 | 291.039 |
| RAD23 homolog B | RAD23B | AL527365 | 0409 | 5.42E−08 | 0.002966 | 2.70E−05 | −5.79036 | 500.181 | 673.845 |
| (S. cerevisiae) | | | | | | | | | |
| chromosome 19 open | C19orf6 | AC004528 | 0097 | 5.59E−08 | 0.003057 | 2.75E−05 | −5.78388 | 95.6151 | 147.154 |
| reading frame 6 | | | | | | | | | |
| procollagen-proline, 2- | P4HB | J02783 | 0716 | 5.81E−08 | 0.003178 | 2.84E−05 | −5.77559 | 1504.99 | 1750.23 |
| oxoglutarate 4- | | | | | | | | | |
| dioxygenase (proline 4- | | | | | | | | | |
| hydroxylase), beta | | | | | | | | | |
| polypeptide | | | | | | | | | |
| period homolog 1 | PER1 | AF022991 | 0108 | 6.03E−08 | 0.003298 | 2.92E−05 | −5.76764 | 72.7414 | 94.1226 |
| (Drosophila) | | | | | | | | | |
| galactosylceramidase | GALC | D25284 | 0705 | 6.24E−08 | 0.003413 | 2.99E−05 | −5.76034 | 55.0178 | 65.2393 |
| CDNA FLJ33748 fis, clone | — | H75391 | 0715 | 6.38E−08 | 0.00349 | 3.03E−05 | 5.75554 | 58.2421 | 42.1421 |
| BRCAN2000148 | | | | | | | | | |
| glucosamine (N-acetyl)-6- | GNS | NM_002076 | 0782 | 6.49E−08 | 0.00355 | 3.06E−05 | −5.75189 | 94.4501 | 134.182 |
| sulfatase (Sanfilippo | | | | | | | | | |
| disease IIID) | | | | | | | | | |
| non-POU domain | NONO | L14599 | 0721 | 6.55E−08 | 0.00358 | 3.06E−05 | −5.75007 | 523.202 | 604.536 |
| containing, octamer- | | | | | | | | | |
| binding | | | | | | | | | |
| zinc finger protein 117 | ZNF117 | NM_024498 | 0946 | 6.86E−08 | 0.003749 | 3.18E−05 | 5.74018 | 140.903 | 101.407 |
| activin A receptor, type IB | ACVR1B | AL117643 | 0384 | 7.04E−08 | 0.003851 | 3.24E−05 | −5.73445 | 173.827 | 206.214 |
| minichromosome | MCM3AP | AK022303 | 0333 | 7.15E−08 | 0.00391 | 3.26E−05 | −5.73118 | 30.2496 | 41.9715 |
| maintenance complex | | | | | | | | | |
| component 3 associated | | | | | | | | | |
| protein | | | | | | | | | |
| natural killer-tumor | NKTR | AA732581 | 0048 | 7.29E−08 | 0.003984 | 3.28E−05 | 5.72714 | 151.814 | 110.341 |
| recognition sequence | | | | | | | | | |
| sorbin and SH3 domain | SORBS3 | MM_005775 | 0844 | 7.34E−08 | 0.004013 | 3.28E−05 | −5.72558 | 27.3042 | 44.7622 |
| containing 3 | | | | | | | | | |
| phosphoinositide-3-kinase | PIK3IP1 | BE042976 | 0563 | 7.42E−08 | 0.004058 | 3.28E−05 | −5.7232 | 535.676 | 693.49 |
| interacting protein 1 | | | | | | | | | |
| CDNA FLJ34061 fis, clone | — | BG430133 | 0695 | 7.44E−08 | 0.004065 | 3.28E−05 | 5.72283 | 40.264 | 27.4554 |
| FCBBF3000462 | | | | | | | | | |
| heterogeneous nuclear | HNRNPC | AV725195 | 0452 | 8.11E−08 | 0.004435 | 3.53E−05 | 5.7041 | 1949.64 | 1687.13 |
| ribonucleoprotein C | | | | | | | | | |
| (C1/C2) | | | | | | | | | |
| calnexin | CANX | AI761759 | 0258 | 8.14E−08 | 0.004453 | 3.53E−05 | −5.70324 | 426.358 | 492.788 |
| inositol polyphosphate-5- | INPP5D | U53470 | 0985 | 8.34E−08 | 0.004561 | 3.59E−05 | −5.69807 | 246.284 | 314.816 |
| phosphatase, 145 kDa | | | | | | | | | |
| hepatocellular carcinoma- | HCRP1 | AK025343 | 0356 | 8.40E−08 | 0.00459 | 3.59E−05 | −5.69672 | 56.4645 | 71.8341 |
| related HCRP1 | | | | | | | | | |
| solute carrier family 12 | SLC12A9 | BC000154 | 0535 | 9.12E−08 | 0.004986 | 3.83E−05 | −5.6789 | 66.7681 | 99.8859 |
| (potassium/chloride | | | | | | | | | |
| transporters), member 9 | | | | | | | | | |
| suppression of | ST14 | U20428 | 0979 | 9.16E−08 | 0.005011 | 3.83E−05 | −5.67782 | 22.546 | 32.7603 |
| tumorigenicity 14 (colon | | | | | | | | | |
| carcinoma) | | | | | | | | | |
| plasminogen activator, | PLAUR | U08839 | 0975 | 9.17E−08 | 0.005016 | 3.83E−05 | −5.67761 | 524.092 | 709.03 |
| urokinase receptor | | | | | | | | | |
| TAF8 RNA polymerase II, | TAF8 | BU618741 | 0703 | 9.40E−08 | 0.005138 | 3.89E−05 | −5.67241 | 59.63 | 73.0919 |
| TATA box binding protein | | | | | | | | | |
| (TBP)-associated factor, | | | | | | | | | |
| 43 kDa | | | | | | | | | |
| chemokine (C—X—C motif) | CXCR4 | L01639 | 0719 | 9.54E−08 | 0.005218 | 3.90E−05 | −5.66907 | 1512.58 | 1818.68 |
| receptor 4 | | | | | | | | | |
| N-acetylglucosamine-1- | GNPTG | AF302786 | 0151 | 9.56E−08 | 0.005226 | 3.90E−05 | −5.66876 | 178.91 | 206.84 |
| phosphate transferase, | | | | | | | | | |
| gamma subunit | | | | | | | | | |
| protein associated with | PATL1 | AA359612 | 0018 | 9.69E−08 | 0.005298 | 3.92E−05 | −5.66579 | 72.1086 | 87.181 |
| topoisomerase II homolog | | | | | | | | | |
| 1 (yeast) | | | | | | | | | |
| galactosidase, beta 1 | GLB1 | NM_000404 | 0758 | 1.04E−07 | 0.005679 | 4.18E−05 | −5.6508 | 511.828 | 593.578 |
| PDZ and LIM domain 2 | PDLIM2 | NM_021630 | 0934 | 1.05E−07 | 0.005739 | 4.19E−05 | −5.64853 | 541.251 | 633.673 |
| (mystique) | | | | | | | | | |
| (clone 1NIB-4) normalized | — | BQ002274 | 0702 | 1.08E−07 | 0.005882 | 4.26E−05 | −5.64319 | 20.177 | 30.5449 |
| cDNA library sequence | | | | | | | | | |
| transmembrane protein 43 | TMEM43 | W74580 | 1000 | 1.10E−07 | 0.006007 | 4.32E−05 | −5.63862 | 440.535 | 521.401 |
| exosome component 1 | EXOSC1 | BC012538 | 0559 | 1.11E−07 | 0.006085 | 4.35E−05 | 5.63584 | 38.3959 | 29.0411 |
| transducin-like enhancer | TLE4 | AL358975 | 0400 | 1.15E−07 | 0.006276 | 4.45E−05 | −5.62913 | 204.851 | 242.919 |
| of split 4 (E(sp1) homolog, | | | | | | | | | |
| Drosophila) | | | | | | | | | |
| plectin 1, intermediate | PLEC1 | Z54367 | 1015 | 1.20E−07 | 0.006555 | 4.62E−05 | −5.61971 | 95.9978 | 135.448 |
| filament binding protein | | | | | | | | | |
| 500 kDa | | | | | | | | | |
| FIP1 like 1 (S. cerevisiae) | FIP1L1 | NM_030917 | 0957 | 1.23E−07 | 0.006726 | 4.70E−05 | 5.61413 | 201.771 | 180.087 |
| blocked early in transport | BET1L | NM_016526 | 0903 | 1.25E−07 | 0.006853 | 4.74E−05 | −5.61006 | 12.5373 | 29.2921 |
| 1 homolog (S. cerevisiae)- | | | | | | | | | |
| like | | | | | | | | | |
| SMEK homolog 1, | SMEK1 | NM_017936 | 0917 | 1.26E−07 | 0.006873 | 4.74E−05 | 5.60944 | 91.0002 | 70.0335 |
| suppressor of mek1 | | | | | | | | | |
| (Dictyostelium) | | | | | | | | | |
| nuclear casein kinase and | NUCKS1 | AW515443 | 0516 | 1.28E−07 | 0.006977 | 4.78E−05 | 5.60618 | 1001.36 | 797.94 |
| cyclin-dependent kinase | | | | | | | | | |
| substrate 1 | | | | | | | | | |
| myosin IXB | MYO9B | AF143684 | 0137 | 1.29E−07 | 0.007064 | 4.81E−05 | −5.60349 | 301.367 | 426.587 |
| zinc finger RNA binding | ZFR | AI459274 | 0207 | 1.33E−07 | 0.007252 | 4.90E−05 | 5.59779 | 90.3366 | 66.8956 |
| protein | | | | | | | | | |
| chromosome 8 open | C8orf42 | AI632224 | 0222 | 1.35E−07 | 0.007362 | 4.94E−05 | 5.5945 | 19.8855 | 12.7616 |
| reading frame 42 | | | | | | | | | |
| retinol saturase (all-trans- | RETSAT | AK098125 | 0364 | 1.35E−07 | 0.007405 | 4.94E−05 | −5.59324 | 38.949 | 52.5054 |
| retinol 13,14-reductase) | | | | | | | | | |
| protein kinase, AMP- | PRKAB2 | NM_005399 | 0841 | 1.50E−07 | 0.008186 | 5.39E−05 | 5.57142 | 44.2835 | 33.7496 |
| activated, beta 2 non- | | | | | | | | | |
| catalytic subunit | | | | | | | | | |
| U2 small nuclear RNA | U2AF2 | NM_007279 | 0875 | 1.50E−07 | 0.008188 | 5.39E−05 | −5.57136 | 111.086 | 152.14 |
| auxiliary factor 2 | | | | | | | | | |
| WD repeat domain 1 | WDR1 | AF274954 | 0150 | 1.58E−07 | 0.008627 | 5.64E−05 | −5.55997 | 413.045 | 580.746 |
| PTK2 protein tyrosine | PTK2 | AL037339 | 0368 | 1.61E−07 | 0.008819 | 5.67E−05 | 5.55518 | 73.6126 | 59.6382 |
| kinase 2 | | | | | | | | | |
| solute carrier family 16, | SLC16A3 | AL513917 | 0404 | 1.62E−07 | 0.008831 | 5.67E−05 | −5.55488 | 372.042 | 569.693 |
| member 3 | | | | | | | | | |
| (monocarboxylic acid | | | | | | | | | |
| transporter 4) | | | | | | | | | |
| tripartite motif-containing 8 | TRIM8 | NM_030912 | 0956 | 1.62E−07 | 0.008848 | 5.67E−05 | 5.55447 | 781.843 | 658.669 |
| Full-length cDNA clone | — | AW953794 | 0525 | 1.74E−07 | 0.009534 | 6.05E−05 | −5.53815 | 27.1676 | 38.0869 |
| CS0DF032YA11 of Fetal | | | | | | | | | |
| brain of Homo sapiens | | | | | | | | | |
| (human) | | | | | | | | | |
| speckle-type POZ protein | SPOP | NM_003563 | 0805 | 1.75E−07 | 0.009565 | 6.05E−05 | 5.53745 | 917.406 | 826.599 |
| BCL2-associated X | BAX | U19599 | 0977 | 1.77E−07 | 0.009659 | 6.07E−05 | −5.53531 | 114.446 | 151.371 |
| protein | | | | | | | | | |
| high mobility group AT- | HMGA1 | AF176039 | 0141 | 1.80E−07 | 0.009863 | 6.16E−05 | −5.53073 | 22.5906 | 40.0994 |
| hook 1 | | | | | | | | | |
| Transcribed locus | — | BE348304 | 0572 | 1.84E−07 | 0.010055 | 6.25E−05 | 5.52651 | 55.2633 | 42.0568 |
| transmembrane and | TMCO3 | NM_017905 | 0914 | 1.89E−07 | 0.010358 | 6.39E−05 | −5.52001 | 68.6431 | 86.2412 |
| coiled-coil domains 3 | | | | | | | | | |
| C-type lectin domain | CLEC4E | NM_014358 | 0885 | 1.99E−07 | 0.010891 | 6.67E−05 | −5.50901 | 152.544 | 201.687 |
| family 4, member E | | | | | | | | | |
| chromosome 7 open | C7orf27 | AK024482 | 0345 | 2.00E−07 | 0.010939 | 6.67E−05 | −5.50806 | 101.071 | 132.536 |
| reading frame 27 | | | | | | | | | |
| suppressor of zeste 12 | SUZ12 /// | AI924660 | 0297 | 2.03E−07 | 0.011081 | 6.69E−05 | 5.50523 | 295.079 | 253.21 |
| homolog (Drosophila) /// | SUZ12P | | | | | | | | |
| suppressor of zeste 12 | | | | | | | | | |
| homolog pseudogene | | | | | | | | | |
| unc-93 homolog B1 | UNC93B1 | NM_030930 | 0959 | 2.03E−07 | 0.011114 | 6.69E−05 | −5.50458 | 89.4778 | 132.242 |
| (C. elegans) | | | | | | | | | |
| Transcribed locus, | — | AI738675 | 0248 | 2.09E−07 | 0.011409 | 6.83E−05 | −5.49882 | 394.226 | 504.553 |
| strongly similar to | | | | | | | | | |
| XP_529518.1 | | | | | | | | | |
| PREDICTED: hypothetical | | | | | | | | | |
| protein XP_529518 [Pan | | | | | | | | | |
| troglodytes] | | | | | | | | | |
| differentially expressed in | DEF6 | NM_022047 | 0937 | 2.17E−07 | 0.011852 | 7.06E−05 | −5.49046 | 287.062 | 338.604 |
| FDCP 6 homolog (mouse) | | | | | | | | | |
| KIAA0146 | KIAA0146 | AI363213 | 0191 | 2.21E−07 | 0.01207 | 7.14E−05 | −5.48646 | 80.4881 | 111.914 |
| BCL6 co-repressor | BCOR | AF317392 | 0154 | 2.23E−07 | 0.012214 | 7.16E−05 | 5.48386 | 111.082 | 75.8345 |
| KIAA0319-like | KIAA0319L | W58365 | 0999 | 2.24E−07 | 0.012251 | 7.16E−05 | −5.48318 | 368.026 | 488.272 |
| — | — | AK000677 | 0317 | 2.26E−07 | 0.012378 | 7.20E−05 | 5.48093 | 62.6473 | 48.142 |
| ADP-dependent | ADPGK | BC006112 | 0557 | 2.32E−07 | 0.012687 | 7.33E−05 | −5.47549 | 135.74 | 160.824 |
| glucokinase | | | | | | | | | |
| TSC22 domain family, | TSC22D3 | AL110191 | 0382 | 2.34E−07 | 0.012819 | 7.37E−05 | −5.47322 | 3412.5 | 4338.52 |
| member 3 | | | | | | | | | |
| nemo-like kinase | NLK | NM_016231 | 0897 | 2.37E−07 | 0.012956 | 7.40E−05 | 5.47089 | 86.344 | 73.4371 |
| amyloid beta (A4) | APLP2 | AW001847 | 0461 | 2.40E−07 | 0.013111 | 7.41E−05 | −5.46827 | 677.954 | 884.114 |
| precursor-like protein 2 | | | | | | | | | |
| phospholipase D family, | PLD3 | NM_012268 | 0878 | 2.41E−07 | 0.013179 | 7.41E−05 | −5.46712 | 190.559 | 273.424 |
| member 3 | | | | | | | | | |
| Transcribed locus | — | BF114745 | 0621 | 2.41E−07 | 0.01319 | 7.41E−05 | 5.46695 | 103.561 | 92.2368 |
| ER lipid raft associated 1 | ERLIN1 | AL568449 | 0419 | 2.47E−07 | 0.013486 | 7.53E−05 | −5.46206 | 340.054 | 398.739 |
| Transcribed locus | — | H24473 | 0713 | 2.58E−07 | 0.014086 | 7.83E−05 | 5.45246 | 26.6195 | 19.7937 |
| procollagen-proline, 2- | P4HB | NM_000918 | 0762 | 2.66E−07 | 0.014538 | 8.03E−05 | −5.44549 | 795.05 | 902.135 |
| oxoglutarate 4- | | | | | | | | | |
| dioxygenase (proline 4- | | | | | | | | | |
| hydroxylase), beta | | | | | | | | | |
| polypeptide | | | | | | | | | |
| calreticulin | CALR | BE251303 | 0570 | 2.71E−07 | 0.014816 | 8.14E−05 | −5.44132 | 356.88 | 465.235 |
| PTK2B protein tyrosine | PTK2B | NM_004103 | 0812 | 2.73E−07 | 0.014902 | 8.14E−05 | −5.44003 | 101.943 | 153.102 |
| kinase 2 beta | | | | | | | | | |
| KIAA0892 | KIAA0892 | AC003030 | 0096 | 2.77E−07 | 0.01513 | 8.19E−05 | −5.43668 | 15.0909 | 27.2329 |
| angiotensin II receptor- | AGTRAP | AF165187 | 0139 | 2.77E−07 | 0.015159 | 8.19E−05 | −5.43627 | 577.465 | 745.496 |
| associated protein | | | | | | | | | |
| Transcribed locus | — | AW244016 | 0490 | 2.85E−07 | 0.015562 | 8.37E−05 | −5.43047 | 108.711 | 161.89 |
| Full length insert cDNA | — | AF086041 | 0124 | 2.90E−07 | 0.015846 | 8.40E−05 | 5.42647 | 73.6103 | 50.4274 |
| clone YX53E08 | | | | | | | | | |
| suppression of | ST14 | NM_021978 | 0936 | 2.90E−07 | 0.015869 | 8.40E−05 | −5.42615 | 36.3457 | 56.3781 |
| tumorigenicity 14 (colon | | | | | | | | | |
| carcinoma) | | | | | | | | | |
| serologically defined colon | SDCCAG1 | BC006001 | 0556 | 2.92E−07 | 0.015938 | 8.40E−05 | 5.42519 | 413.226 | 349.695 |
| cancer antigen 1 | | | | | | | | | |
| Cbp/p300-interacting | CITED2 | NM_006079 | 0852 | 2.92E−07 | 0.015952 | 8.40E−05 | −5.425 | 256.843 | 305.525 |
| transactivator, with | | | | | | | | | |
| Glu/Asp-rich carboxy- | | | | | | | | | |
| terminal domain, 2 | | | | | | | | | |
| ankyrin repeat and FYVE | ANKFY1 | NM_016376 | 0901 | 2.94E−07 | 0.016093 | 8.43E−05 | −5.42305 | 86.1838 | 107.681 |
| domain containing 1 | | | | | | | | | |
| interleukin 13 receptor, | IL13RA1 | NM_001560 | 0773 | 2.97E−07 | 0.016254 | 8.43E−05 | −5.42085 | 640.164 | 787.654 |
| alpha 1 | | | | | | | | | |
| EH domain binding protein | EHBP1L1 | AA149545 | 0012 | 2.98E−07 | 0.016276 | 8.43E−05 | −5.42055 | 260.818 | 334.559 |
| 1-like 1 | | | | | | | | | |
| Rho GTPase activating | ARHGAP4 | NM_001666 | 0777 | 3.01E−07 | 0.016452 | 8.48E−05 | −5.41817 | 204.777 | 266.516 |
| protein 4 | | | | | | | | | |
| Transcribed locus | — | AW298731 | 0504 | 3.03E−07 | 0.016586 | 8.49E−05 | −5.41638 | 27.4913 | 49.2688 |
| Ras and Rab interactor 3 | RIN3 | AW027923 | 0470 | 3.07E−07 | 0.016787 | 8.49E−05 | −5.4137 | 162.083 | 222.874 |
| CDNA clone | — | N57510 | 0749 | 3.07E−07 | 0.016793 | 8.49E−05 | 5.41363 | 127.327 | 110.056 |
| IMAGE: 5313062 | | | | | | | | | |
| Homo sapiens, clone | — | AV735241 | 0455 | 3.08E−07 | 0.016816 | 8.49E−05 | 5.41333 | 171.32 | 145.168 |
| IMAGE: 3345917, mRNA | | | | | | | | | |
| pro-platelet basic protein | PPBP | R64130 | 0963 | 3.13E−07 | 0.017119 | 8.60E−05 | 5.40937 | 4143.9 | 2480.31 |
| (chemokine (C—X—C motif) | | | | | | | | | |
| ligand 7) | | | | | | | | | |
| cell division cycle 2-like 1 | CDC2L1 /// | NM_001787 | 0779 | 3.18E−07 | 0.017373 | 8.69E−05 | −5.40611 | 167.96 | 197.461 |
| (PITSLRE proteins) /// cell | CDC2L2 | | | | | | | | |
| division cycle 2-like 2 | | | | | | | | | |
| (PITSLRE proteins) | | | | | | | | | |
| cysteine conjugate-beta | CCBL2 | BC000819 | 0540 | 3.28E−07 | 0.017938 | 8.92E−05 | 5.39902 | 322.023 | 274.341 |
| lyase 2 | | | | | | | | | |
| sema domain, | SEMA4A | NM_022367 | 0939 | 3.36E−07 | 0.018372 | 9.09E−05 | −5.39372 | 362.638 | 494.889 |
| immunoglobulin domain | | | | | | | | | |
| (Ig), transmembrane | | | | | | | | | |
| domain (TM) and short | | | | | | | | | |
| cytoplasmic domain, | | | | | | | | | |
| (semaphorin) 4A | | | | | | | | | |
| Rho GDP dissociation | ARHGDIA | D13989 | 0704 | 3.41E−07 | 0.018624 | 9.14E−05 | −5.3907 | 98.9323 | 215.826 |
| inhibitor (GDI) alpha | | | | | | | | | |
| Wolf-Hirschhorn syndrome | WHSC1L1 | NM_017778 | 0912 | 3.41E−07 | 0.01864 | 9.14E−05 | 5.3905 | 68.4864 | 57.256 |
| candidate 1-like 1 | | | | | | | | | |
| tissue factor pathway | TFPI | AF021834 | 0107 | 3.46E−07 | 0.018898 | 9.22E−05 | 5.38745 | 21.9809 | 12.7738 |
| inhibitor (lipoprotein- | | | | | | | | | |
| associated coagulation | | | | | | | | | |
| inhibitor) | | | | | | | | | |
| zinc finger protein 271 | ZNF271 | AF159567 | 0138 | 3.56E−07 | 0.019471 | 9.43E−05 | 5.38082 | 179.018 | 149.631 |
| Wiskott-Aldrich syndrome | WAS | NM_000377 | 0757 | 3.57E−07 | 0.019512 | 9.43E−05 | −5.38036 | 184.107 | 410.974 |
| (eczema- | | | | | | | | | |
| thrombocytopenia) | | | | | | | | | |
| EH domain binding protein 1 | EHBP1 | BF116032 | 0624 | 3.63E−07 | 0.019842 | 9.54E−05 | 5.37662 | 96.9949 | 68.9836 |
| solute carrier family 6 | SLC6A6 | U16120 | 0976 | 3.71E−07 | 0.020295 | 9.65E−05 | −5.37161 | 60.7858 | 85.2317 |
| (neurotransmitter | | | | | | | | | |
| transporter, taurine), | | | | | | | | | |
| member 6 | | | | | | | | | |
| ADAM metallopeptidase | ADAM8 | AI814527 | 0277 | 3.72E−07 | 0.020315 | 9.65E−05 | −5.37139 | 120.008 | 221.72 |
| domain 8 | | | | | | | | | |
| zinc finger protein 36, C3H | ZFP36L2 | AI356398 | 0189 | 3.73E−07 | 0.020368 | 9.65E−05 | −5.37081 | 563.157 | 986.407 |
| type-like 2 | | | | | | | | | |
| RAB27B, member RAS | RAB27B | BF438386 | 0637 | 3.77E−07 | 0.020613 | 9.72E−05 | 5.36815 | 187.305 | 137.411 |
| oncogene family | | | | | | | | | |
| versican | VCAN | D32039 | 0706 | 3.79E−07 | 0.020739 | 9.74E−05 | −5.36679 | 1066.01 | 1372.33 |
| Interleukin 8 | IL8 | AJ239383 | 0313 | 4.33E−07 | 0.02365 | 0.000108 | −5.33753 | 75.0461 | 119.62 |
| leukocyte immunoglobulin- | LILRA2 | U82277 | 0993 | 4.81E−07 | 0.026298 | 0.000116 | −5.31382 | 349.215 | 498.426 |
| like receptor, subfamily A | | | | | | | | | |
| (with TM domain), | | | | | | | | | |
| member 2 | | | | | | | | | |
| immunoglobulin heavy | IGH@ /// | S55735 | 0965 | 5.11E−07 | 0.027913 | 0.000122 | −5.30048 | 2641.16 | 4723.74 |
| locus /// immunoglobulin | IGHA1 /// | | | | | | | | |
| heavy constant alpha 1 /// | IGHA2 /// | | | | | | | | |
| immunoglobulin heavy | LOC100126583 | | | | | | | | |
| constant alpha 2 (A2m | | | | | | | | | |
| marker) /// hypothetical | | | | | | | | | |
| LOC100126583 | | | | | | | | | |
| regulator of G-protein | RGS14 | AF037194 | 0109 | 5.12E−07 | 0.027979 | 0.000122 | −5.29995 | 80.6164 | 117.832 |
| signaling 14 | | | | | | | | | |
| F-box protein 9 | FBXO9 | AK095315 | 0363 | 5.15E−07 | 0.028176 | 0.000122 | 5.29838 | 1081.96 | 798.526 |
| septin 9 | 9-Sep | NM_006640 | 0865 | 5.17E−07 | 0.028263 | 0.000122 | −5.29769 | 87.4231 | 164.873 |
| myeloid cell leukemia | MCL1 | NM_021960 | 0935 | 5.40E−07 | 0.029511 | 0.000126 | −5.288 | 3409.06 | 4155.72 |
| sequence 1 (BCL2- | | | | | | | | | |
| related) | | | | | | | | | |
| poly(A) polymerase alpha | PAPOLA | BF797555 | 0662 | 5.74E−07 | 0.031378 | 0.00013 | 5.27423 | 1470.85 | 1208.87 |
| Transcribed locus | — | AI492388 | 0212 | 6.97E−07 | 0.038094 | 0.00015 | −5.23055 | 216.947 | 349.917 |
| Rho GDP dissociation | ARHGDIA | AI571798 | 0218 | 7.40E−07 | 0.040446 | 0.000155 | −5.21702 | 94.6544 | 217.268 |
| inhibitor (GDI) alpha | | | | | | | | | |
| guanine nucleotide | GNAZ | NM_002073 | 0781 | 7.49E−07 | 0.040958 | 0.000155 | 5.21417 | 138.429 | 84.1772 |
| binding protein (G | | | | | | | | | |
| protein), alpha z | | | | | | | | | |
| polypeptide | | | | | | | | | |
| ATPase, Ca++ | ATP2A3 | AF068220 | 0120 | 8.34E−07 | 0.04561 | 0.000168 | −5.18981 | 95.5902 | 142.894 |
| transporting, ubiquitous | | | | | | | | | |
| prostaglandin- | PTGS1 | BE613133 | 0580 | 9.28E−07 | 0.050719 | 0.000182 | 5.1657 | 276.922 | 176.715 |
| endoperoxide synthase 1 | | | | | | | | | |
| (prostaglandin G/H | | | | | | | | | |
| synthase and | | | | | | | | | |
| cyclooxygenase) | | | | | | | | | |
| ankyrin repeat and BTB | ABTB1 | AW511257 | 0514 | 9.52E−07 | 0.052074 | 0.000185 | −5.15971 | 39.4124 | 61.2487 |
| (POZ) domain containing 1 | | | | | | | | | |
| folate receptor 1 (adult) | FOLR1 | AF000381 | 0102 | 1.38E−06 | 0.075578 | 0.000238 | 5.07454 | 1958.77 | 1397.2 |
| Fc fragment of IgA, | FCAR | NM_002000 | 0780 | 1.45E−06 | 0.079201 | 0.000246 | −5.06377 | 177.357 | 246.89 |
| receptor for | | | | | | | | | |
| G-protein signaling | GPSM3 | BG111168 | 0671 | 1.76E−06 | 0.095967 | 0.00028 | −5.01948 | 477.969 | 796.568 |
| modulator 3 (AGS3-like, | | | | | | | | | |
| C. elegans) | | | | | | | | | |
| Spermatid perinuclear | STRBP | AK024960 | 0353 | 1.93E−06 | 0.105266 | 0.000299 | 4.99807 | 44.2908 | 29.796 |
| RNA binding protein | | | | | | | | | |
| enoyl Coenzyme A | ECHDC3 | NM_024693 | 0948 | 2.10E−06 | 0.114859 | 0.000316 | −4.97782 | 61.4091 | 98.8895 |
| hydratase domain | | | | | | | | | |
| containing 3 | | | | | | | | | |
| heterogeneous nuclear | HNRNPC | NM_004500 | 0824 | 2.17E−06 | 0.118742 | 0.000322 | 4.97009 | 1575.25 | 1401.51 |
| ribonucleoprotein C | | | | | | | | | |
| (C1/C2) | | | | | | | | | |
| colony stimulating factor 3 | CSF3R | NM_000760 | 0761 | 2.36E−06 | 0.128959 | 0.000344 | −4.95087 | 3038.28 | 4004.48 |
| receptor (granulocyte) | | | | | | | | | |
| myosin, light chain 6, | MYL6 | BE734356 | 0594 | 2.45E−06 | 0.134031 | 0.000356 | 4.94187 | 5732.33 | 4706.58 |
| alkali, smooth muscle and | | | | | | | | | |
| non-muscle | | | | | | | | | |
| strawberry notch homolog | SBNO2 | AC005390 | 0100 | 2.72E−06 | 0.148716 | 0.000383 | −4.91756 | 126.198 | 194.376 |
| 2 (Drosophila) | | | | | | | | | |
| DEAD (Asp-Glu-Ala-Asp) | DDX17 | AA521056 | 0025 | 2.79E−06 | 0.152295 | 0.000387 | 4.91199 | 3247.14 | 2585.45 |
| box polypeptide 17 | | | | | | | | | |
| amyotrophic lateral | ALS2CR12 | AI057333 | 0163 | 3.30E−06 | 0.180188 | 0.000423 | 4.8725 | 92.0138 | 46.3901 |
| sclerosis 2 (juvenile) | | | | | | | | | |
| chromosome region, | | | | | | | | | |
| candidate 12 | | | | | | | | | |
| egl nine homolog 2 | EGLN2 | AW057545 | 0472 | 3.41E−06 | 0.186485 | 0.000434 | −4.8644 | 46.7042 | 81.0448 |
| (C. elegans) | | | | | | | | | |
| WD and tetratricopeptide | WDTC1 | AK001734 | 0321 | 3.74E−06 | 0.204421 | 0.000464 | −4.84273 | 143.089 | 215.035 |
| repeats 1 | | | | | | | | | |
| CD74 molecule, major | CD74 | M28590 | 0733 | 3.99E−06 | 0.218102 | 0.000477 | −4.82741 | 393.178 | 654.678 |
| histocompatibility | | | | | | | | | |
| complex, class II invariant | | | | | | | | | |
| chain | | | | | | | | | |
| glycoprotein VI (platelet) | GP6 | AB043821 | 0092 | 4.78E−06 | 0.261363 | 0.000537 | 4.78445 | 95.1473 | 61.4523 |
| dual specificity | DUSP1 | AA530892 | 0027 | 4.79E−06 | 0.261693 | 0.000537 | −4.78415 | 107.394 | 209.5 |
| phosphatase 1 | | | | | | | | | |
| transcription factor binding | TFE3 | AY034078 | 0534 | 4.79E−06 | 0.262114 | 0.000537 | −4.78376 | 58.8061 | 97.4688 |
| to IGHM enhancer 3 | | | | | | | | | |
| gelsolin (amyloidosis, | GSN | BE675337 | 0587 | 4.83E−06 | 0.2639 | 0.000538 | −4.78215 | 77.2986 | 118.847 |
| Finnish type) | | | | | | | | | |
| guanine nucleotide | GNG11 | NM_004126 | 0814 | 4.83E−06 | 0.264071 | 0.000538 | 4.78199 | 548.288 | 339.78 |
| binding protein (G | | | | | | | | | |
| protein), gamma 11 | | | | | | | | | |
| CD6 molecule | CD6 | NM_006725 | 0867 | 5.60E−06 | 0.306414 | 0.000594 | −4.74649 | 92.2557 | 150.98 |
| nerve growth factor | NGFRAP1 | NM_014380 | 0886 | 6.87E−06 | 0.375513 | 0.000699 | 4.69768 | 691.606 | 498.72 |
| receptor (TNFRSF16) | | | | | | | | | |
| associated protein 1 | | | | | | | | | |
| selectin P ligand | SELPLG | AI741056 | 0250 | 7.68E−06 | 0.419967 | 0.000755 | −4.67069 | 2721.41 | 3268.22 |
| CD44 molecule (Indian | CD44 | AF098641 | 0127 | 7.70E−06 | 0.420973 | 0.000756 | −4.67012 | 371.069 | 433.064 |
| blood group) | | | | | | | | | |
| ORAI calcium release- | ORAI2 | BF939788 | 0663 | 7.87E−06 | 0.430403 | 0.000771 | −4.66476 | 59.2229 | 93.4356 |
| activated calcium | | | | | | | | | |
| modulator 2 | | | | | | | | | |
| prosaposin (variant | PSAP | M32221 | 0734 | 8.14E−06 | 0.444966 | 0.000787 | −4.65671 | 5511.12 | 6507.81 |
| Gaucher disease and | | | | | | | | | |
| variant metachromatic | | | | | | | | | |
| leukodystrophy) | | | | | | | | | |
| cortactin | CTTN | NM_005231 | 0839 | 8.54E−06 | 0.467172 | 0.000808 | 4.64491 | 182.112 | 121.169 |
| CD6 molecule | CD6 | U66145 | 0988 | 9.03E−06 | 0.493658 | 0.00084 | −4.63152 | 108.146 | 166.093 |
| potassium voltage-gated | KCNAB2 | AF044253 | 0112 | 9.05E−06 | 0.494828 | 0.00084 | −4.63095 | 32.1399 | 55.8352 |
| channel, shaker-related | | | | | | | | | |
| subfamily, beta member 2 | | | | | | | | | |
| tyrosine 3- | YWHAZ | NM_003406 | 0803 | 1.07E−05 | 0.585411 | 0.000955 | 4.58999 | 3462.95 | 2974.74 |
| monooxygenase/tryptophan | | | | | | | | | |
| 5-monooxygenase | | | | | | | | | |
| activation protein, zeta | | | | | | | | | |
| polypeptide | | | | | | | | | |
| prefoldin subunit 5 | PFDN5 | NM_002624 | 0793 | 1.11E−05 | 0.608358 | 0.000981 | 4.58059 | 1086.43 | 759.973 |
| zinc finger E-box binding | ZEB2 | AV739670 | 0456 | 1.26E−05 | 0.687237 | 0.00107 | 4.5507 | 90.1064 | 58.9124 |
| homeobox 2 | | | | | | | | | |
| lymphocyte-specific | LSP1 | NM_002339 | 0784 | 1.80E−05 | 0.983838 | 0.001356 | −4.46201 | 2289.02 | 2996.22 |
| protein 1 | | | | | | | | | |
| GM2 ganglioside activator | GM2A | AL513583 | 0403 | 1.94E−05 | 1 | 0.001433 | −4.44336 | 295.155 | 407.539 |
| B-cell CLL/lymphoma 3 | BCL3 | AI829875 | 0287 | 2.01E−05 | 1 | 0.001474 | −4.43457 | 73.2591 | 122.329 |
| signal-regulatory protein | SIRPA | AC004832 | 0099 | 2.15E−05 | 1 | 0.00155 | −4.41809 | 66.2175 | 114.978 |
| alpha | | | | | | | | | |
| chromosome 21 open | C21orf7 | NM_020152 | 0932 | 2.42E−05 | 1 | 0.00169 | 4.3876 | 280.123 | 180.541 |
| reading frame 7 | | | | | | | | | |
| arachidonate 12- | ALOX12 | NM_000697 | 0760 | 2.59E−05 | 1 | 0.001773 | 4.37069 | 142.898 | 92.6631 |
| lipoxygenase | | | | | | | | | |
| immunoglobulin heavy | IGHD | AJ275469 | 0314 | 2.75E−05 | 1 | 0.001841 | −4.35534 | 115.496 | 181.147 |
| constant delta | | | | | | | | | |
| signal-regulatory protein | SIRPA | NM_004648 | 0827 | 2.87E−05 | 1 | 0.001899 | −4.34524 | 277.486 | 340.134 |
| alpha | | | | | | | | | |
| talin 1 | TLN1 | NM_006289 | 0857 | 3.03E−05 | 1 | 0.001968 | −4.33118 | 677.305 | 962.298 |
| versican | VCAN | R94644 | 0964 | 3.18E−05 | 1 | 0.002032 | −4.31901 | 1312.01 | 1597.22 |
| leukocyte immunoglobulin- | LILRA4 | AF041261 | 0110 | 3.36E−05 | 1 | 0.002112 | −4.30455 | 50.1417 | 71.7018 |
| like receptor, subfamily A | | | | | | | | | |
| (with TM domain), | | | | | | | | | |
| member 4 | | | | | | | | | |
| dual specificity | DUSP1 | NM_004417 | 0823 | 3.50E−05 | 1 | 0.002177 | −4.2941 | 2510.99 | 3381.13 |
| phosphatase 1 | | | | | | | | | |
| leukocyte immunoglobulin- | LILRA2 | U82278 | 0994 | 3.51E−05 | 1 | 0.002177 | −4.29389 | 1033.51 | 1293.64 |
| like receptor, subfamily A | | | | | | | | | |
| (with TM domain), | | | | | | | | | |
| member 2 | | | | | | | | | |
| leukocyte immunoglobulin- | LILRA2 | U82276 | 0992 | 3.94E−05 | 1 | 0.002317 | −4.26416 | 899.494 | 1137.99 |
| like receptor, subfamily A | | | | | | | | | |
| (with TM domain), | | | | | | | | | |
| member 2 | | | | | | | | | |
| colony stimulating factor 3 | CSF3R | NM_172313 | 0960 | 4.66E−05 | 1 | 0.002581 | −4.22109 | 3895.82 | 4816.3 |
| receptor (granulocyte) | | | | | | | | | |
| immunoglobulin lambda | IGL@ | D87021 | 0711 | 4.82E−05 | 1 | 0.002642 | −4.21222 | 44.8257 | 78.8501 |
| locus | | | | | | | | | |
| opioid growth factor | OGFR | AF172449 | 0140 | 5.54E−05 | 1 | 0.002911 | −4.17619 | 54.9759 | 81.4231 |
| receptor | | | | | | | | | |
| BCL2-associated | BAG1 | NM_004323 | 0820 | 5.83E−05 | 1 | 0.003012 | 4.16308 | 3331.77 | 2495.07 |
| athanogene | | | | | | | | | |
| tetraspanin 5 | TSPAN5 | AF065389 | 0119 | 6.55E−05 | 1 | 0.003253 | 4.13256 | 1141.55 | 805.081 |
| platelet factor 4 | PF4 | NM_002619 | 0791 | 7.11E−05 | 1 | 0.003433 | 4.11123 | 2982.12 | 2052.36 |
| (chemokine (C—X—C motif) | | | | | | | | | |
| ligand 4) | | | | | | | | | |
| Fc fragment of IgA, | FCAR | U56237 | 0986 | 7.24E−05 | 1 | 0.003466 | −4.10642 | 22.6711 | 32.7601 |
| receptor for | | | | | | | | | |
| transketolase (Wernicke- | TKT | BF696840 | 0656 | 7.66E−05 | 1 | 0.003582 | −4.09169 | 2569.82 | 3111.72 |
| Korsakoff syndrome) | | | | | | | | | |
| heterogeneous nuclear | HNRNPC | AA664258 | 0039 | 8.17E−05 | 1 | 0.003762 | 4.07462 | 1778.78 | 1539.09 |
| ribonucleoprotein C | | | | | | | | | |
| (C1/C2) | | | | | | | | | |
| tumor necrosis factor | TNFRSF10C | NM_003841 | 0808 | 8.60E−05 | 1 | 0.003866 | −4.06101 | 1233.42 | 1735.81 |
| receptor superfamily, | | | | | | | | | |
| member 10c, decoy | | | | | | | | | |
| without an intracellular | | | | | | | | | |
| domain | | | | | | | | | |
| clusterin | CLU | M25915 | 0732 | 0.000109 | 1 | 0.00464 | 3.99777 | 917.982 | 586.775 |
| Interleukin 8 | IL8 | L34164 | 0723 | 0.000115 | 1 | 0.004824 | −3.98299 | 68.9562 | 113.762 |
| chromosome Y open | CYorf15A | AW468885 | 0510 | 0.000124 | 1 | 0.005062 | 3.96438 | 61.848 | 33.1275 |
| reading frame 15A | | | | | | | | | |
| insulin-like growth factor 1 | IGF1R | BF347362 | 0633 | 0.000127 | 1 | 0.005152 | −3.95765 | 22.2597 | 31.1978 |
| receptor | | | | | | | | | |
| Immunoglobulin heavy | IGHG1 | M24668 | 0731 | 0.000144 | 1 | 0.005654 | −3.92265 | 42.8722 | 66.9195 |
| constant gamma 1 (G1m | | | | | | | | | |
| marker) | | | | | | | | | |
| adducin 3 (gamma) | ADD3 | AI763123 | 0262 | 0.000155 | 1 | 0.005926 | 3.90373 | 2119.65 | 1920.44 |
| GM2 ganglioside activator | GM2A | M76477 | 0737 | 0.000176 | 1 | 0.006491 | −3.86822 | 21.724 | 39.5498 |
| small EDRK-rich factor 2 | SERF2 | BE568651 | 0579 | 0.000179 | 1 | 0.00656 | 3.86335 | 4954.6 | 4192.08 |
| neurofilament, light | NEFL | AL537457 | 0413 | 0.000179 | 1 | 0.006562 | 3.86307 | 31.9431 | 23.1309 |
| polypeptide 68 kDa | | | | | | | | | |
| hypothetical protein | LOC284701 | AL137733 | 0398 | 0.000218 | 1 | 0.007625 | −3.80903 | 64.9496 | 112.816 |
| LOC284701 | | | | | | | | | |
| interferon regulatory factor 7 | IRF7 | NM_004030 | 0810 | 0.000231 | 1 | 0.007884 | −3.79395 | 409.493 | 623.352 |
| CTD (carboxy-terminal | CTDSPL | NM_005808 | 0846 | 0.000235 | 1 | 0.00799 | 3.78905 | 93.671 | 62.2121 |
| domain, RNA polymerase | | | | | | | | | |
| II, polypeptide A) small | | | | | | | | | |
| phosphatase-like | | | | | | | | | |
| immunoglobulin heavy | IGHA1 /// | U92706 | 0997 | 0.000252 | 1 | 0.008417 | −3.76895 | 86.7125 | 132.558 |
| constant alpha 1 /// | IGHG1 /// | | | | | | | | |
| immunoglobulin heavy | IGHG3 /// | | | | | | | | |
| constant gamma 1 (G1m | IGHM /// | | | | | | | | |
| marker) /// immunoglobulin | IGHV4-31 | | | | | | | | |
| heavy constant gamma 3 | | | | | | | | | |
| (G3m marker) /// | | | | | | | | | |
| immunoglobulin heavy | | | | | | | | | |
| constant mu /// | | | | | | | | | |
| immunoglobulin heavy | | | | | | | | | |
| variable 4-31 | | | | | | | | | |
| calreticulin | CALR | NM_004343 | 0821 | 0.00026 | 1 | 0.008592 | −3.76047 | 79.4426 | 119.207 |
| profilin 1 | PFN1 | NM_005022 | 0834 | 0.000262 | 1 | 0.008638 | −3.75833 | 6953.19 | 7641.43 |
| GM2 ganglioside activator | GM2A | M76477 | 0737 | 0.000299 | 1 | 0.009457 | −3.72107 | 162.01 | 213.128 |
| Immunoglobulin heavy | IGHA1 | AW519168 | 0517 | 0.000324 | 1 | 0.009983 | −3.69913 | 152.921 | 219.57 |
| constant alpha 1 | | | | | | | | | |
| BCL2-associated | BAG1 | AF116273 | 0132 | 0.000352 | 1 | 0.010602 | 3.67548 | 3286.14 | 2540.18 |
| athanogene | | | | | | | | | |
| integrin, beta 2 | ITGB2 | NM_000211 | 0756 | 0.000355 | 1 | 0.010648 | −3.67283 | 5760.57 | 6367.25 |
| (complement component 3 | | | | | | | | | |
| receptor 3 and 4 subunit) | | | | | | | | | |
| integral membrane protein | ITM2B | AF092128 | 0126 | 0.000477 | 1 | 0.013182 | −3.58869 | 10431.6 | 11336.4 |
| 2B | | | | | | | | | |
| myeloid cell leukemia | MCL1 | AI275690 | 0180 | 0.000503 | 1 | 0.013715 | −3.5734 | 6463.22 | 7020.98 |
| sequence 1 (BCL2- | | | | | | | | | |
| related) | | | | | | | | | |
| GNAS complex locus | GNAS | AA650558 | 0038 | 0.000515 | 1 | 0.013953 | 3.56649 | 1501.58 | 1173 |
| tubulin, beta 1 | TUBB1 | N63244 | 0750 | 0.000816 | 1 | 0.019091 | 3.4314 | 2271.09 | 1745.37 |
| ribosomal protein L23 | RPL23 | NM_000978 | 0767 | 0.000818 | 1 | 0.019126 | 3.43065 | 2085.23 | 1502.85 |
| peroxiredoxin 6 | PRDX6 | BE869583 | 0604 | 0.000914 | 1 | 0.020772 | 3.39769 | 3442.93 | 2661.75 |
| neurofilament, light | NEFL | BF055311 | 0613 | 0.00094 | 1 | 0.021238 | 3.38918 | 82.1 | 61.5983 |
| polypeptide 68 kDa | | | | | | | | | |
| immunoglobulin kappa | IGK@ /// IGKC | AW575927 | 0518 | 0.001341 | 1 | 0.027148 | −3.28165 | 4837.67 | 5839.72 |
| constant /// | /// IGKV1-5 /// | | | | | | | | |
| immunoglobulin kappa | IGKV2-24 | | | | | | | | |
| variable 1-5 /// | | | | | | | | | |
| immunoglobulin kappa | | | | | | | | | |
| variable 2-24 /// | | | | | | | | | |
| immunoglobulin kappa | | | | | | | | | |
| locus | | | | | | | | | |
| cystatin C (amyloid | CST3 | NM_000099 | 0755 | 0.001346 | 1 | 0.027219 | −3.28039 | 3566.07 | 4248.09 |
| angiopathy and cerebral | | | | | | | | | |
| hemorrhage) | | | | | | | | | |
| ribosomal protein L7 | RPL7 | NM_000971 | 0766 | 0.001461 | 1 | 0.028666 | 3.25511 | 6070.42 | 4837.24 |
| interferon induced | IFITM1 | AA749101 | 0057 | 0.001797 | 1 | 0.033003 | −3.19088 | 7152.48 | 8178.72 |
| transmembrane protein 1 | | | | | | | | | |
| (9-27) | | | | | | | | | |
| ribosomal protein L36a /// | LOC729362 /// | NM_021029 | 0933 | 0.001813 | 1 | 0.03322 | 3.18807 | 4537.53 | 3218.25 |
| similar to large subunit | RPL36A | | | | | | | | |
| ribosomal protein L36a | | | | | | | | | |
| SUB1 homolog (S. cerevisiae) | SUB1 | BE784583 | 0598 | 0.001896 | 1 | 0.034265 | 3.17412 | 1392.33 | 1081.88 |
| guanylate kinase 1 | GUK1 | BC006249 | 0558 | 0.001983 | 1 | 0.035305 | 3.15989 | 4000.02 | 3171.59 |
| Pre-B-cell colony | PBEF1 | AA873350 | 0074 | 0.002161 | 1 | 0.037276 | −3.13274 | 3292.91 | 3867.52 |
| enhancing factor 1 | | | | | | | | | |
| prostaglandin- | PTGS1 | NM_000962 | 0764 | 0.002218 | 1 | 0.037809 | 3.12446 | 103.535 | 79.4279 |
| endoperoxide synthase 1 | | | | | | | | | |
| (prostaglandin G/H | | | | | | | | | |
| synthase and | | | | | | | | | |
| cyclooxygenase) | | | | | | | | | |
| F-box protein 7 | FBXO7 | NM_012179 | 0877 | 0.002317 | 1 | 0.038996 | 3.11068 | 6069.43 | 5014.48 |
| hemoglobin, alpha 1 /// | HBA1 /// HBA2 | AF105974 | 0128 | 0.002367 | 1 | 0.039561 | 3.10384 | 6124.77 | 4656.14 |
| hemoglobin, alpha 2 | | | | | | | | | |
| hemoglobin, alpha 1 | HBA1 | BC005931 | 0555 | 0.00239 | 1 | 0.039846 | 3.10074 | 6143.06 | 4645.89 |
| immunoglobulin lambda | IGL@ /// IGLJ3 | X57812 | 1008 | 0.002707 | 1 | 0.043327 | −3.06075 | 3476.47 | 4451 |
| locus /// immunoglobulin | /// IGLV2-14 /// | | | | | | | | |
| lambda variable 4-3 /// | IGLV3-25 /// | | | | | | | | |
| immunoglobulin lambda | IGLV4-3 | | | | | | | | |
| variable 3-25 /// | | | | | | | | | |
| immunoglobulin lambda | | | | | | | | | |
| variable 2-14 /// | | | | | | | | | |
| immunoglobulin lambda | | | | | | | | | |
| joining 3 | | | | | | | | | |
| major histocompatibility | HLA-G | M90686 | 0740 | 0.002992 | 1 | 0.046215 | −3.02834 | 5755.57 | 7193.31 |
| complex, class I, G | | | | | | | | | |
| SUB1 homolog (S. cerevisiae) | SUB1 | BG231551 | 0678 | 0.003023 | 1 | 0.046448 | 3.02497 | 2004.47 | 1599.13 |
| chemokine (C—X3—C motif) | CX3CR1 | U20350 | 0978 | 0.003112 | 1 | 0.04726 | 3.0156 | 2713.44 | 2373.65 |
| receptor 1 | | | | | | | | | |
| metastasis associated | MALAT1 | AF132202 | 0134 | 0.003436 | 1 | 0.050486 | −2.98318 | 6262.75 | 7016.01 |
| lung adenocarcinoma | | | | | | | | | |
| transcript 1 (non-protein | | | | | | | | | |
| coding) | | | | | | | | | |
| metastasis associated | MALAT1 | BG534952 | 0699 | 0.00728 | 1 | 0.08193 | 2.72885 | 6776.17 | 6030.81 |
| lung adenocarcinoma | | | | | | | | | |
| transcript 1 (non-protein | | | | | | | | | |
| coding) | | | | | | | | | |
| tubulin, beta 2A | TUBB2A | NM_001069 | 0768 | 0.017717 | 1 | 0.144043 | 2.40355 | 1238.52 | 689.685 |
| solute carrier family 25, | SLC25A37 | BG251467 | 0679 | 0.019789 | 1 | 0.154414 | 2.36091 | 7684.14 | 6998.66 |
| member 37 | | | | | | | | | |
| solute carrier family 25, | SLC25A37 | BG251467 | 0679 | 0.037867 | 1 | 0.228447 | 2.09875 | 4732.41 | 4047.49 |
| member 37 | | | | | | | | | |
| GNAS complex locus | GNAS | NM_016592 | 0905 | 0.060396 | 1 | 0.298237 | 1.89518 | 6053.88 | 5672.78 |
| metastasis associated | MALAT1 | BE708432 | 0592 | 0.097547 | 1 | 0.387215 | 1.66947 | 15502.2 | 14795.3 |
| lung adenocarcinoma | | | | | | | | | |
| transcript 1 (non-protein | | | | | | | | | |
| coding) | | | | | | | | | |

TABLE 1B

| | | | | | MeanDiff | | |
|---|---|---|---|---|---|---|---|
| | | Genbank | SEQ ID | MeanRatio | (CONTROL − | FoldChange | |
| Gene Title | Gene Symbol | Acc. No. | NO. | (CONTROL/MS) | MS) | (CONTROL/MS) | Probe Set ID |
| FK506 binding protein 5 | FKBP5 | NM_004117 | 0813 | 0.410872 | −111.966 | −2.43385 | 204560_at |
| FK506 binding protein 5 | FKBP5 | W86302 | 1003 | 0.506291 | −461.576 | −1.97515 | 224856_at |
| FK506 binding protein 5 | FKBP5 | AI753747 | 0255 | 0.556963 | −942.013 | −1.79545 | 224840_at |
| cyclin D3 | CCND3 | NM_001760 | 0778 | 0.786706 | −548.102 | −1.27112 | 201700_at |
| tetraspanin 14 | TSPAN14 | NM_030927 | 0958 | 0.804285 | −106.324 | −1.24334 | 221002_s_at |
| chemokine (C—X—C motif) | CXCR4 | AF348491 | 0158 | 0.785186 | −492.069 | −1.27358 | 211919_s_at |
| receptor 4 | | | | | | | |
| Rho GTPase activating | ARHGAP27 | AI814329 | 0276 | 0.51795 | −43.9948 | −1.93069 | 227057_at |
| protein 27 | | | | | | | |
| integrin, beta 2 | ITGB2 | L78790 | 0728 | 0.792057 | −923.911 | −1.26254 | 1555349_a_at |
| (complement component 3 | | | | | | | |
| receptor 3 and 4 subunit) | | | | | | | |
| adrenergic, beta, receptor | ADRBK1 | M80776 | 0738 | 0.664754 | −138.928 | −1.50432 | 201401_s_at |
| kinase 1 | | | | | | | |
| solute carrier family 6 | SLC6A6 | NM_003043 | 0797 | 0.617703 | −77.4371 | −1.6189 | 205920_at |
| (neurotransmitter | | | | | | | |
| transporter, taurine), | | | | | | | |
| member 6 | | | | | | | |
| Rho GTPase activating | ARHGAP18 | BE501862 | 0576 | 1.41321 | 69.4447 | 1.41321 | 225173_at |
| protein 18 | | | | | | | |
| DNA-damage-inducible | DDIT4 | NM_019058 | 0928 | 0.578263 | −180.24 | −1.72932 | 202887_s_at |
| transcript 4 | | | | | | | |
| chromodomain helicase | CHD9 | AW300405 | 0505 | 1.23911 | 46.5668 | 1.23911 | 229586_at |
| DNA binding protein 9 | | | | | | | |
| polypyrimidine tract | PTBP1 | AA679988 | 0041 | 0.745687 | −47.9749 | −1.34105 | 212016_s_at |
| binding protein 1 | | | | | | | |
| DEAD (Asp-Glu-Ala-Asp) | DDX6 | NM_004397 | 0822 | 1.3796 | 16.3859 | 1.3796 | 204909_at |
| box polypeptide 6 | | | | | | | |
| transmembrane 9 | TM9SF1 | BE899402 | 0606 | 0.788937 | −25.5286 | −1.26753 | 209149_s_at |
| superfamily member 1 | | | | | | | |
| structural maintenance of | SMC3 | AI373676 | 0193 | 1.38405 | 77.0678 | 1.38405 | 209258_s_at |
| chromosomes 3 | | | | | | | |
| chromosome 6 open | C6orf166 | AI742378 | 0253 | 0.64847 | −45.5391 | −1.54209 | 223143_s_at |
| reading frame 166 | | | | | | | |
| salvador homolog 1 | SAV1 | AJ292969 | 0315 | 1.3186 | 29.5723 | 1.3186 | 234491_s_at |
| (Drosophila) | | | | | | | |
| heat shock 70 kDa protein | HSPA5 | AF216292 | 0145 | 0.864477 | −237.075 | −1.15677 | 211936_at |
| 5 (glucose-regulated | | | | | | | |
| protein, 78 kDa) | | | | | | | |
| MFNG O-fucosylpeptide | MFNG | AI738965 | 0249 | 0.727485 | −64.0613 | −1.3746 | 204152_s_at |
| 3-beta-N- | | | | | | | |
| acetylglucosaminyltransferase | | | | | | | |
| ankyrin repeat and BTB | ABTB1 | BF115480 | 0622 | 0.606222 | −25.6714 | −1.64956 | 242567_at |
| (POZ) domain containing 1 | | | | | | | |
| leukotriene B4 receptor | LTB4R | U33448 | 0980 | 0.520201 | −117.77 | −1.92234 | 216388_s_at |
| myeloid cell leukemia | MCL1 | BF594446 | 0650 | 0.619672 | −112.202 | −1.61376 | 200796_s_at |
| sequence 1 (BCL2- | | | | | | | |
| related) | | | | | | | |
| Friend leukemia virus | FLI1 | M93255 | 0741 | 0.820712 | −135.481 | −1.21845 | 210786_s_at |
| integration 1 | | | | | | | |
| unc-93 homolog B1 (C. elegans) | UNC93B1 | AW001274 | 0460 | 0.597899 | −87.5072 | −1.67252 | 225869_s_at |
| mindbomb homolog 1 | MIB1 | W80418 | 1001 | 1.27079 | 49.1563 | 1.27079 | 224726_at |
| (Drosophila) | | | | | | | |
| period homolog 1 | PER1 | NM_002616 | 0790 | 0.630947 | −32 | −1.58492 | 202861_at |
| (Drosophila) | | | | | | | |
| splicing factor, | SFRS17A | M99578 | 0743 | 0.800003 | −22.3614 | −1.25 | 210269_s_at |
| arginine/serine-rich 17A | | | | | | | |
| zinc finger and BTB | ZBTB16 | NM_006006 | 0849 | 0.577369 | −89.3868 | −1.73199 | 205883_at |
| domain containing 16 | | | | | | | |
| ER lipid raft associated 1 | ERLIN1 | NM_006459 | 0862 | 0.73173 | −18.2519 | −1.36662 | 202444_s_at |
| PHD finger protein 3 | PHF3 | AW189430 | 0482 | 1.28957 | 38.2468 | 1.28957 | 217951_s_at |
| toll-like receptor 2 | TLR2 | NM_003264 | 0801 | 0.738901 | −670.351 | −1.35336 | 204924_at |
| paxillin | PXN | D86862 | 0710 | 0.480522 | −100.487 | −2.08107 | 211823_s_at |
| RAB GTPase activating | RABGAP1L | AB019490 | 0087 | 1.5011 | 95.7868 | 1.5011 | 215342_s_at |
| protein 1-like | | | | | | | |
| proline rich 14 | PRR14 | BE788667 | 0599 | 0.521016 | −112.711 | −1.91933 | 1559397_s_at |
| Fc fragment of IgA, | FCAR | D87858 | 0712 | 0.62416 | −58.5952 | −1.60215 | 211816_x_at |
| receptor for | | | | | | | |
| tripeptidyl peptidase I | TPP1 | AA602532 | 0032 | 0.758102 | −63.9567 | −1.31908 | 214196_s_at |
| signal-regulatory protein | SIRPA | D86043 | 0709 | 0.577984 | −50.6133 | −1.73015 | 202895_s_at |
| alpha | | | | | | | |
| insulin-like growth factor 2 | IGF2BP3 | AU160004 | 0441 | 1.67856 | 14.483 | 1.67856 | 203819_s_at |
| mRNA binding protein 3 | | | | | | | |
| RAN binding protein 3 | RANBP3 | AI689052 | 0244 | 0.806327 | −30.7581 | −1.24019 | 202639_s_at |
| tankyrase, TRF1- | TNKS2 | BF060683 | 0615 | 1.34901 | 89.5309 | 1.34901 | 222562_s_at |
| interacting ankyrin-related | | | | | | | |
| ADP-ribose polymerase 2 | | | | | | | |
| transmembrane 9 | TM9SF4 | AI418892 | 0200 | 0.805871 | −40.4381 | −1.24089 | 212194_s_at |
| superfamily protein | | | | | | | |
| member 4 | | | | | | | |
| CCR4-NOT transcription | CNOT1 | BC040523 | 0561 | 0.773683 | −20.6257 | −1.29252 | 1554052_at |
| complex, subunit 1 | | | | | | | |
| trophoblast-derived | TncRNA | AV659198 | 0443 | 0.714038 | −32.2735 | −1.40049 | 238320_at |
| noncoding RNA | | | | | | | |
| CD83 molecule | CD83 | NM_004233 | 0816 | 1.30421 | 27.778 | 1.30421 | 204440_at |
| Transcribed locus | — | AI032730 | 0160 | 1.30802 | 46.0351 | 1.30802 | 244679_at |
| TBC1 domain family, | TBC1D2B | BF195608 | 0625 | 0.846298 | −52.3633 | −1.18162 | 212796_s_at |
| member 2B | | | | | | | |
| hypothetical protein | FLJ10038 | NM_017976 | 0918 | 1.23737 | 16.5277 | 1.23737 | 205511_at |
| FLJ10038 | | | | | | | |
| procollagen-proline, 2- | P4HB | AK075503 | 0362 | 0.70108 | −123.296 | −1.42637 | 1564494_s_at |
| oxoglutarate 4- | | | | | | | |
| dioxygenase (proline 4- | | | | | | | |
| hydroxylase), beta | | | | | | | |
| polypeptide | | | | | | | |
| Ewing sarcoma breakpoint | EWSR1 /// | AF327066 | 0156 | 0.794872 | −85.6159 | −1.25806 | 211825_s_at |
| region 1 /// Friend | FLI1 | | | | | | |
| leukemia virus integration 1 | | | | | | | |
| Rab interacting lysosomal | RILPL2 | AI810244 | 0275 | 0.833939 | −144.701 | −1.19913 | 227983_at |
| protein-like 2 | | | | | | | |
| RAB5C, member RAS | RAB5C | AF141304 | 0136 | 0.781885 | −184.971 | −1.27896 | 201156_s_at |
| oncogene family | | | | | | | |
| SMAD specific E3 | SMURF2 | AY014180 | 0532 | 1.18427 | 64.941 | 1.18427 | 205596_s_at |
| ubiquitin protein ligase 2 | | | | | | | |
| diacylglycerol lipase, beta | DAGLB | BE795104 | 0600 | 0.735937 | −27.3357 | −1.35881 | 225833_at |
| — | — | AW275093 | 0495 | 1.4707 | 12.114 | 1.4707 | 242929_at |
| cisplatin resistance- | CROP | AW089673 | 0478 | 1.22445 | 229.86 | 1.22445 | 208835_s_at |
| associated overexpressed | | | | | | | |
| protein | | | | | | | |
| CUG triplet repeat, RNA | CUGBP2 | AI652861 | 0231 | 0.863056 | −69.6671 | −1.15867 | 227178_at |
| binding protein 2 | | | | | | | |
| cleft lip and palate | CLPTM1 | BC004865 | 0551 | 0.792422 | −70.6394 | −1.26195 | 211136_s_at |
| associated | | | | | | | |
| transmembrane protein 1 | | | | | | | |
| plasminogen activator, | PLAUR | AY029180 | 0533 | 0.688829 | −183.872 | −1.45174 | 211924_s_at |
| urokinase receptor | | | | | | | |
| SH3 domain and | SH3TC1 | NM_018986 | 0926 | 0.751709 | −51.8135 | −1.3303 | 219256_s_at |
| tetratricopeptide repeats 1 | | | | | | | |
| CCAAT/enhancer binding | CEBPD | AV655640 | 0442 | 0.652156 | −35.3408 | −1.53337 | 213006_at |
| protein (C/EBP), delta | | | | | | | |
| myotrophin | MTPN | AL533334 | 0410 | 1.10221 | 270.99 | 1.10221 | 224656_s_at |
| diacylglycerol kinase, zeta | DGKZ | NM_003646 | 0806 | 0.667281 | −247.106 | −1.49862 | 207556_s_at |
| 104 kDa | | | | | | | |
| coiled-coil domain | CCDC95 | AA743390 | 0052 | 0.780837 | −32.1692 | −1.28068 | 227286_at |
| containing 95 | | | | | | | |
| golgi autoantigen, golgin | GOLGA8B | AI829170 | 0286 | 1.73953 | 36.2445 | 1.73953 | 208797_s_at |
| subfamily a, 8B | | | | | | | |
| O-linked N- | OGT | U77413 | 0990 | 0.86299 | −43.9052 | −1.15876 | 207563_s_at |
| acetylglucosamine | | | | | | | |
| (GlcNAc) transferase | | | | | | | |
| (UDP-N- | | | | | | | |
| acetylglucosamine:polypeptide- | | | | | | | |
| N- | | | | | | | |
| acetylglucosaminyl | | | | | | | |
| transferase) | | | | | | | |
| alpha thalassemia/mental | ATRX /// | AI650257 | 0227 | 1.23404 | 77.4692 | 1.23404 | 208859_s_at |
| retardation syndrome X- | LOC728849 | | | | | | |
| linked (RAD54 homolog, | | | | | | | |
| S. cerevisiae) /// similar to | | | | | | | |
| transcriptional regulator | | | | | | | |
| ATRX isoform 1 | | | | | | | |
| mitogen-activated protein | MAP2K1 | AI571419 | 0217 | 0.87252 | −59.124 | −1.14611 | 202670_at |
| kinase kinase 1 | | | | | | | |
| Glutathione S-transferase | GSTK1 | AV722006 | 0451 | 1.64253 | 7.52765 | 1.64253 | 243325_at |
| kappa 1 | | | | | | | |
| ATP-binding cassette, | ABCC1 | NM_004996 | 0833 | 0.809071 | −27.5522 | −1.23599 | 202805_s_at |
| sub-family C | | | | | | | |
| (CFTR/MRP), member 1 | | | | | | | |
| chromosome 19 open | C19orf6 | AI805266 | 0270 | 0.634364 | −47.9788 | −1.57638 | 213986_s_at |
| reading frame 6 | | | | | | | |
| potassium channel | KCTD5 | AA872593 | 0073 | 0.809141 | −16.4666 | −1.23588 | 222645_s_at |
| tetramerisation domain | | | | | | | |
| containing 5 | | | | | | | |
| Transcribed locus | — | AI767751 | 0265 | 1.25823 | 14.6655 | 1.25823 | 228084_at |
| leukotriene B4 receptor | LTB4R | U41070 | 0982 | 0.717178 | −54.4399 | −1.39435 | 210128_s_at |
| TSC22 domain family, | TSC22D3 | NM_004089 | 0811 | 0.652362 | −290.14 | −1.53289 | 207001_x_at |
| member 3 | | | | | | | |
| peroxiredoxin 6 | PRDX6 | NM_004905 | 0831 | 1.19962 | 146.027 | 1.19962 | 200845_s_at |
| 6-phosphofructo-2- | PFKFB2 | AB044805 | 0093 | 0.690646 | −13.182 | −1.44792 | 209992_at |
| kinase/fructose-2,6- | | | | | | | |
| biphosphatase 2 | | | | | | | |
| chromobox homolog 4 (Pc | CBX4 | NM_003655 | 0807 | 0.641073 | −40.8418 | −1.55988 | 206724_at |
| class homolog, | | | | | | | |
| Drosophila) | | | | | | | |
| GTPase, IMAP family | GIMAP5 | AL080068 | 0378 | 1.53468 | 33.4044 | 1.53468 | 215352_at |
| member 5 | | | | | | | |
| surfeit 4 | SURF4 | AF078866 | 0123 | 0.84411 | −41.7779 | −1.18468 | 222979_s_at |
| PHD finger protein 12 | PHF12 | AL161953 | 0399 | 0.5897 | −21.4733 | −1.69578 | 234939_s_at |
| CCAAT/enhancer binding | CEBPD | NM_005195 | 0837 | 0.764013 | −768.486 | −1.30888 | 203973_s_at |
| protein (C/EBP), delta | | | | | | | |
| prion protein (p27-30) | PRNP | AV725328 | 0453 | 0.815149 | −25.0163 | −1.22677 | 215707_s_at |
| (Creutzfeldt-Jakob | | | | | | | |
| disease, Gerstmann- | | | | | | | |
| Strausler-Scheinker | | | | | | | |
| syndrome, fatal familial | | | | | | | |
| insomnia) | | | | | | | |
| phosphoinositide-3- | PIK3R5 | NM_014308 | 0883 | 0.821673 | −39.5518 | −1.21703 | 220566_at |
| kinase, regulatory subunit | | | | | | | |
| 5, p101 | | | | | | | |
| myotubularin related | MTMR1 | AK001816 | 0322 | 0.739341 | −23.2022 | −1.35256 | 214975_s_at |
| protein 1 | | | | | | | |
| SLAIN motif family, | SLAIN2 | AI979301 | 0310 | 1.38052 | 57.75 | 1.38052 | 224854_s_at |
| member 2 | | | | | | | |
| C-type lectin domain | CLEC1B | NM_016509 | 0902 | 1.57911 | 34.1712 | 1.57911 | 220496_at |
| family 1, member B | | | | | | | |
| tetratricopeptide repeat | TTC7A | BE205790 | 0568 | 0.727973 | −13.8295 | −1.37368 | 224924_at |
| domain 7A | | | | | | | |
| suppressor of Ty 16 | SUPT16H | AK024072 | 0341 | 1.40153 | 75.4675 | 1.40153 | 233827_s_at |
| homolog (S. cerevisiae) | | | | | | | |
| SERPINE1 mRNA binding | SERBP1 | BC003049 | 0547 | 1.15454 | 187.371 | 1.15454 | 209669_s_at |
| protein 1 | | | | | | | |
| RNA binding motif protein | RBM14 | AF315633 | 0153 | 0.669042 | −19.7848 | −1.49467 | 1555639_a_at |
| 14 | | | | | | | |
| T-cell acute lymphocytic | TAL1 | NM_003189 | 0800 | 1.49187 | 67.9937 | 1.49187 | 206283_s_at |
| leukemia 1 | | | | | | | |
| Ras association | RAPH1 | AA194149 | 0014 | 1.40811 | 13.9347 | 1.40811 | 225188_at |
| (RalGDS/AF-6) and | | | | | | | |
| pleckstrin homology | | | | | | | |
| domains 1 | | | | | | | |
| disabled homolog 2, | DAB2 | N21202 | 0744 | 1.32324 | 23.7867 | 1.32324 | 201278_at |
| mitogen-responsive | | | | | | | |
| phosphoprotein | | | | | | | |
| (Drosophila) | | | | | | | |
| v-ets erythroblastosis virus | ETS1 | NM_005238 | 0840 | 0.706997 | −21.9256 | −1.41443 | 214447_at |
| E26 oncogene homolog 1 | | | | | | | |
| (avian) | | | | | | | |
| elastin microfibril | EMILIN2 | AL552384 | 0416 | 0.683088 | −18.3855 | −1.46394 | 242288_s_at |
| interfacer 2 | | | | | | | |
| myosin IXB | MYO9B | NM_004145 | 0815 | 0.605039 | −41.608 | −1.65279 | 208452_x_at |
| DnaJ (Hsp40) homolog, | DNAJC13 | BC043583 | 0562 | 1.40365 | 7.41601 | 1.40365 | 1560020_at |
| subfamily C, member 13 | | | | | | | |
| acyl-Coenzyme A binding | ACBD5 | BC025309 | 0560 | 1.36451 | 22.651 | 1.36451 | 1568877_a_at |
| domain containing 5 | | | | | | | |
| Ras association | RAPH1 | AA194149 | 0014 | 1.37974 | 8.71298 | 1.37974 | 225189_s_at |
| (RalGDS/AF-6) and | | | | | | | |
| pleckstrin homology | | | | | | | |
| domains 1 | | | | | | | |
| C-type lectin domain | CLEC4E | BC000715 | 0538 | 0.686069 | −379.336 | −1.45758 | 222934_s_at |
| family 4, member E | | | | | | | |
| Fc fragment of IgA, | FCAR | U43677 | 0983 | 0.627309 | −37.9565 | −1.59411 | 211307_s_at |
| receptor for | | | | | | | |
| ATPase, Ca++ | ATP2A3 | AA877910 | 0076 | 0.702202 | −30.8685 | −1.42409 | 213042_s_at |
| transporting, ubiquitous | | | | | | | |
| methionine | MAT2A | NM_005911 | 0848 | 0.808703 | −23.1428 | −1.23655 | 200769_s_at |
| adenosyltransferase II, | | | | | | | |
| alpha | | | | | | | |
| general transcription factor | GTF2A1 | NM_015859 | 0891 | 1.61825 | 18.7636 | 1.61825 | 206521_s_at |
| IIA, 1, 19/37 kDa | | | | | | | |
| DAZ associated protein 2 | DAZAP2 | AL534321 | 0411 | 0.83346 | −337.118 | −1.19982 | 212595_s_at |
| chromosome 1 open | C1orf38 | AB035482 | 0091 | 0.788942 | −371.48 | −1.26752 | 210785_s_at |
| reading frame 38 | | | | | | | |
| arrestin domain containing 1 | ARRDC1 | AK001822 | 0323 | 0.77686 | −64.9423 | −1.28723 | 226405_s_at |
| RAD23 homolog B | RAD23B | AL527365 | 0409 | 0.742279 | −173.664 | −1.3472 | 201222_s_at |
| (S. cerevisiae) | | | | | | | |
| chromosome 19 open | C19orf6 | AC004528 | 0097 | 0.649764 | −51.5385 | −1.53902 | 212574_x_at |
| reading frame 6 | | | | | | | |
| procollagen-proline, 2- | P4HB | J02783 | 0716 | 0.859883 | −245.237 | −1.16295 | 200654_at |
| oxoglutarate 4- | | | | | | | |
| dioxygenase (proline 4- | | | | | | | |
| hydroxylase), beta | | | | | | | |
| polypeptide | | | | | | | |
| period homolog 1 | PER1 | AF022991 | 0108 | 0.772837 | −21.3812 | −1.29393 | 36829_at |
| (Drosophila) | | | | | | | |
| galactosylceramidase | GALC | D25284 | 0705 | 0.843323 | −10.2215 | −1.18579 | 211810_s_at |
| CDNA FLJ33748 fis, clone | — | H75391 | 0715 | 1.38204 | 16.1 | 1.38204 | 1559515_at |
| BRCAN2000148 | | | | | | | |
| glucosamine (N-acetyl)-6- | GNS | NM_002076 | 0782 | 0.703894 | −39.7323 | −1.42067 | 203676_at |
| sulfatase (Sanfilippo | | | | | | | |
| disease IIID) | | | | | | | |
| non-POU domain | NONO | L14599 | 0721 | 0.865461 | −81.334 | −1.15545 | 208698_s_at |
| containing, octamer- | | | | | | | |
| binding | | | | | | | |
| zinc finger protein 117 | ZNF117 | NM_024498 | 0946 | 1.38949 | 39.4965 | 1.38949 | 207605_x_at |
| activin A receptor, type IB | ACVR1B | AL117643 | 0384 | 0.842946 | −32.3868 | −1.18632 | 213198_at |
| minichromosome | MCM3AP | AK022303 | 0333 | 0.720718 | −11.7219 | −1.38751 | 215581_s_at |
| maintenance complex | | | | | | | |
| component 3 associated | | | | | | | |
| protein | | | | | | | |
| natural killer-tumor | NKTR | AA732581 | 0048 | 1.37587 | 41.4737 | 1.37587 | 231235_at |
| recognition sequence | | | | | | | |
| sorbin and SH3 domain | SORBS3 | NM_005775 | 0844 | 0.609982 | −17.4581 | −1.63939 | 207788_s_at |
| containing 3 | | | | | | | |
| phosphoinositide-3-kinase | PIK3IP1 | BE042976 | 0563 | 0.772434 | −157.815 | −1.29461 | 221757_at |
| interacting protein 1 | | | | | | | |
| CDNA FLJ34061 fis, clone | — | BG430133 | 0695 | 1.46652 | 12.8086 | 1.46652 | 1565614_at |
| FCBBF3000462 | | | | | | | |
| heterogeneous nuclear | HNRNPC | AV725195 | 0452 | 1.15559 | 262.504 | 1.15559 | 214737_x_at |
| ribonucleoprotein C | | | | | | | |
| (C1/C2) | | | | | | | |
| calnexin | CANX | AI761759 | 0258 | 0.865197 | −66.4295 | −1.15581 | 208852_s_at |
| inositol polyphosphate-5- | INPP5D | U53470 | 0985 | 0.782311 | −68.532 | −1.27826 | 203331_s_at |
| phosphatase, 145 kDa | | | | | | | |
| hepatocellular carcinoma- | HCRP1 | AK025343 | 0356 | 0.78604 | −15.3697 | −1.2722 | 216174_at |
| related HCRP1 | | | | | | | |
| solute carrier family 12 | SLC12A9 | BC000154 | 0535 | 0.668443 | −33.1179 | −1.49601 | 223994_s_at |
| (potassium/chloride | | | | | | | |
| transporters), member 9 | | | | | | | |
| suppression of | ST14 | U20428 | 0979 | 0.688211 | −10.2143 | −1.45304 | 216905_s_at |
| tumorigenicity 14 (colon | | | | | | | |
| carcinoma) | | | | | | | |
| plasminogen activator, | PLAUR | U08839 | 0975 | 0.739167 | −184.938 | −1.35287 | 210845_s_at |
| urokinase receptor | | | | | | | |
| TAF8 RNA polymerase II, | TAF8 | BU618741 | 0703 | 0.815823 | −13.4618 | −1.22576 | 1556178_x_at |
| TATA box binding protein | | | | | | | |
| (TBP)-associated factor, | | | | | | | |
| 43 kDa | | | | | | | |
| chemokine (C—X—C motif) | CXCR4 | L01639 | 0719 | 0.831693 | −306.096 | −1.20237 | 209201_x_at |
| receptor 4 | | | | | | | |
| N-acetylglucosamine-1- | GNPTG | AF302786 | 0151 | 0.864971 | −27.9294 | −1.15611 | 224887_at |
| phosphate transferase, | | | | | | | |
| gamma subunit | | | | | | | |
| protein associated with | PATL1 | AA359612 | 0018 | 0.827113 | −15.0724 | −1.20902 | 235235_s_at |
| topoisomerase II homolog | | | | | | | |
| 1 (yeast) | | | | | | | |
| galactosidase, beta 1 | GLB1 | NM_000404 | 0758 | 0.862277 | −81.7493 | −1.15972 | 201576_s_at |
| PDZ and LIM domain 2 | PDLIM2 | NM_021630 | 0934 | 0.854149 | −92.4219 | −1.17076 | 219165_at |
| (mystique) | | | | | | | |
| (clone 1NIB-4) normalized | — | BQ002274 | 0702 | 0.660567 | −10.368 | −1.51385 | 1556314_a_at |
| cDNA library sequence | | | | | | | |
| transmembrane protein 43 | TMEM43 | W74580 | 1000 | 0.844907 | −80.8659 | −1.18356 | 217795_s_at |
| exosome component 1 | EXOSC1 | BC012538 | 0559 | 1.32212 | 9.35476 | 1.32212 | 1559044_at |
| transducin-like enhancer | TLE4 | AL358975 | 0400 | 0.843292 | −38.0674 | −1.18583 | 216997_x_at |
| of split 4 (E(sp1) homolog, | | | | | | | |
| Drosophila) | | | | | | | |
| plectin 1, intermediate | PLEC1 | Z54367 | 1015 | 0.708741 | −39.4505 | −1.41095 | 216971_s_at |
| filament binding protein | | | | | | | |
| 500 kDa | | | | | | | |
| FIP1 like 1 (S. cerevisiae) | FIP1L1 | NM_030917 | 0957 | 1.12041 | 21.6845 | 1.12041 | 221007_s_at |
| blocked early in transport | BET1L | NM_016526 | 0903 | 0.428008 | −16.7549 | −2.3364 | 220470_at |
| 1 homolog (S. cerevisiae)- | | | | | | | |
| like | | | | | | | |
| SMEK homolog 1, | SMEK1 | NM_017936 | 0917 | 1.29938 | 20.9668 | 1.29938 | 220369_at |
| suppressor of mek1 | | | | | | | |
| (Dictyostelium) | | | | | | | |
| nuclear casein kinase and | NUCKS1 | AW515443 | 0516 | 1.25494 | 203.425 | 1.25494 | 229353_s_at |
| cyclin-dependent kinase | | | | | | | |
| substrate 1 | | | | | | | |
| myosin IXB | MYO9B | AF143684 | 0137 | 0.706462 | −125.22 | −1.4155 | 217297_s_at |
| zinc finger RNA binding | ZFR | AI459274 | 0207 | 1.35041 | 23.441 | 1.35041 | 33148_at |
| protein | | | | | | | |
| chromosome 8 open | C8orf42 | AI632224 | 0222 | 1.55823 | 7.12392 | 1.55823 | 226778_at |
| reading frame 42 | | | | | | | |
| retinol saturase (all-trans- | RETSAT | AK098125 | 0364 | 0.74181 | −13.5564 | −1.34805 | 1566472_s_at |
| retinol 13,14-reductase) | | | | | | | |
| protein kinase, AMP- | PRKAB2 | NM_005399 | 0841 | 1.31212 | 10.5339 | 1.31212 | 214474_at |
| activated, beta 2 non- | | | | | | | |
| catalytic subunit | | | | | | | |
| U2 small nuclear RNA | U2AF2 | NM_007279 | 0875 | 0.730157 | −41.0539 | −1.36957 | 218382_s_at |
| auxiliary factor 2 | | | | | | | |
| WD repeat domain 1 | WDR1 | AF274954 | 0150 | 0.711232 | −167.701 | −1.40601 | 210935_s_at |
| PTK2 protein tyrosine | PTK2 | AL037339 | 0368 | 1.23432 | 13.9745 | 1.23432 | 208820_at |
| kinase 2 | | | | | | | |
| solute carrier family 16, | SLC16A3 | AL513917 | 0404 | 0.653057 | −197.651 | −1.53126 | 202855_s_at |
| member 3 | | | | | | | |
| (monocarboxylic acid | | | | | | | |
| transporter 4) | | | | | | | |
| tripartite motif-containing 8 | TRIM8 | NM_030912 | 0956 | 1.187 | 123.174 | 1.187 | 221012_s_at |
| Full-length cDNA clone | — | AW953794 | 0525 | 0.713306 | −10.9193 | −1.40192 | 230968_at |
| CS0DF032YA11 of Fetal | | | | | | | |
| brain of Homo sapiens | | | | | | | |
| (human) | | | | | | | |
| speckle-type POZ protein | SPOP | NM_003563 | 0805 | 1.10986 | 90.8075 | 1.10986 | 204640_s_at |
| BCL2-associated X | BAX | U19599 | 0977 | 0.756064 | −36.9248 | −1.32264 | 211833_s_at |
| protein | | | | | | | |
| high mobility group AT- | HMGA1 | AF176039 | 0141 | 0.563365 | −17.5088 | −1.77505 | 210457_x_at |
| hook 1 | | | | | | | |
| Transcribed locus | — | BE348304 | 0572 | 1.31402 | 13.2065 | 1.31402 | 237554_at |
| transmembrane and | TMCO3 | NM_017905 | 0914 | 0.795943 | −17.5981 | −1.25637 | 220240_s_at |
| coiled-coil domains 3 | | | | | | | |
| C-type lectin domain | CLEC4E | NM_014358 | 0885 | 0.75634 | −49.143 | −1.32216 | 219859_at |
| family 4, member E | | | | | | | |
| chromosome 7 open | C7orf27 | AK024482 | 0345 | 0.762591 | −31.4652 | −1.31132 | 225437_s_at |
| reading frame 27 | | | | | | | |
| suppressor of zeste 12 | SUZ12 /// | AI924660 | 0297 | 1.16535 | 41.8695 | 1.16535 | 213971_s_at |
| homolog (Drosophila) /// | SUZ12P | | | | | | |
| suppressor of zeste 12 | | | | | | | |
| homolog pseudogene | | | | | | | |
| unc-93 homolog B1 (C. elegans) | UNC93B1 | NM_030930 | 0959 | 0.676621 | −42.7644 | −1.47793 | 220998_s_at |
| Transcribed locus, | — | AI738675 | 0248 | 0.781337 | −110.327 | −1.27986 | 240064_at |
| strongly similar to | | | | | | | |
| XP_529518.1 | | | | | | | |
| PREDICTED: hypothetical | | | | | | | |
| protein XP_529518 [Pan | | | | | | | |
| troglodytes] | | | | | | | |
| differentially expressed in | DEF6 | NM_022047 | 0937 | 0.84778 | −51.5421 | −1.17955 | 221293_s_at |
| FDCP 6 homolog (mouse) | | | | | | | |
| KIAA0146 | KIAA0146 | AI363213 | 0191 | 0.719196 | −31.4259 | −1.39044 | 228325_at |
| BCL6 co-repressor | BCOR | AF317392 | 0154 | 1.4648 | 35.2478 | 1.4648 | 223916_s_at |
| KIAA0319-like | KIAA0319L | W58365 | 0999 | 0.753732 | −120.246 | −1.32673 | 222468_at |
| — | — | AK000677 | 0317 | 1.3013 | 14.5053 | 1.3013 | 233876_at |
| ADP-dependent | ADPGK | BC006112 | 0557 | 0.844025 | −25.0846 | −1.1848 | 224455_s_at |
| glucokinase | | | | | | | |
| TSC22 domain family, | TSC22D3 | AL110191 | 0382 | 0.786558 | −926.021 | −1.27136 | 208763_s_at |
| member 3 | | | | | | | |
| nemo-like kinase | NLK | NM_016231 | 0897 | 1.17576 | 12.9069 | 1.17576 | 218318_s_at |
| amyloid beta (A4) | APLP2 | AW001847 | 0461 | 0.766817 | −206.16 | −1.30409 | 214875_x_at |
| precursor-like protein 2 | | | | | | | |
| phospholipase D family, | PLD3 | NM_012268 | 0878 | 0.696935 | −82.8652 | −1.43485 | 201050_at |
| member 3 | | | | | | | |
| Transcribed locus | — | BF114745 | 0621 | 1.12277 | 11.3237 | 1.12277 | 235459_at |
| ER lipid raft associated 1 | ERLIN1 | AL568449 | 0419 | 0.852824 | −58.6846 | −1.17257 | 202441_at |
| Transcribed locus | — | H24473 | 0713 | 1.34485 | 6.82582 | 1.34485 | 229951_x_at |
| procollagen-proline, 2- | P4HB | NM_000918 | 0762 | 0.881299 | −107.084 | −1.13469 | 200656_s_at |
| oxoglutarate 4- | | | | | | | |
| dioxygenase (proline 4- | | | | | | | |
| hydroxylase), beta | | | | | | | |
| polypeptide | | | | | | | |
| calreticulin | CALR | BE251303 | 0570 | 0.767097 | −108.355 | −1.30362 | 212953_x_at |
| PTK2B protein tyrosine | PTK2B | NM_004103 | 0812 | 0.665846 | −51.1597 | −1.50185 | 203111_s_at |
| kinase 2 beta | | | | | | | |
| KIAA0892 | KIAA0892 | AC003030 | 0096 | 0.554142 | −12.142 | −1.80459 | 216926_s_at |
| angiotensin II receptor- | AGTRAP | AF165187 | 0139 | 0.774605 | −168.031 | −1.29098 | 1555736_a_at |
| associated protein | | | | | | | |
| Transcribed locus | — | AW244016 | 0490 | 0.671508 | −53.1796 | −1.48918 | 227762_at |
| Full length insert cDNA | — | AF086041 | 0124 | 1.45973 | 23.1829 | 1.45973 | 1556812_a_at |
| clone YX53E08 | | | | | | | |
| suppression of | ST14 | NM_021978 | 0936 | 0.644679 | −20.0323 | −1.55116 | 202005_at |
| tumorigenicity 14 (colon | | | | | | | |
| carcinoma) | | | | | | | |
| serologically defined colon | SDCCAG1 | BC006001 | 0556 | 1.18167 | 63.5301 | 1.18167 | 1569594_a_at |
| cancer antigen 1 | | | | | | | |
| Cbp/p300-interacting | CITED2 | NM_006079 | 0852 | 0.840662 | −48.6818 | −1.18954 | 207980_s_at |
| transactivator, with | | | | | | | |
| Glu/Asp-rich carboxy- | | | | | | | |
| terminal domain, 2 | | | | | | | |
| ankyrin repeat and FYVE | ANKFY1 | NM_016376 | 0901 | 0.800364 | −21.4969 | −1.24943 | 219868_s_at |
| domain containing 1 | | | | | | | |
| interleukin 13 receptor, | IL13RA1 | NM_001560 | 0773 | 0.812748 | −147.49 | −1.23039 | 201887_at |
| alpha 1 | | | | | | | |
| EH domain binding protein | EHBP1L1 | AA149545 | 0012 | 0.779588 | −73.7409 | −1.28273 | 91703_at |
| 1-like 1 | | | | | | | |
| Rho GTPase activating | ARHGAP4 | NM_001666 | 0777 | 0.768348 | −61.7389 | −1.30149 | 204425_at |
| protein 4 | | | | | | | |
| Transcribed locus | — | AW298731 | 0504 | 0.557986 | −21.7775 | −1.79216 | 239249_at |
| Ras and Rab interactor 3 | RIN3 | AW027923 | 0470 | 0.727238 | −60.7916 | −1.37507 | 219456_s_at |
| CDNA clone | — | N57510 | 0749 | 1.15693 | 17.2711 | 1.15693 | 234998_at |
| IMAGE: 5313062 | | | | | | | |
| Homo sapiens, clone | — | AV735241 | 0455 | 1.18015 | 26.1526 | 1.18015 | 225055_at |
| IMAGE: 3345917, mRNA | | | | | | | |
| pro-platelet basic protein | PPBP | R64130 | 0963 | 1.67072 | 1663.59 | 1.67072 | 214146_s_at |
| (chemokine (C—X—C motif) | | | | | | | |
| ligand 7) | | | | | | | |
| cell division cycle 2-like 1 | CDC2L1 /// | NM_001787 | 0779 | 0.850597 | −29.5012 | −1.17564 | 207428_x_at |
| (PITSLRE proteins) /// cell | CDC2L2 | | | | | | |
| division cycle 2-like 2 | | | | | | | |
| (PITSLRE proteins) | | | | | | | |
| cysteine conjugate-beta | CCBL2 | BC000819 | 0540 | 1.1738 | 47.6813 | 1.1738 | 209472_at |
| lyase 2 | | | | | | | |
| sema domain, | SEMA4A | NM_022367 | 0939 | 0.732766 | −132.251 | −1.36469 | 219259_at |
| immunoglobulin domain | | | | | | | |
| (Ig), transmembrane | | | | | | | |
| domain (TM) and short | | | | | | | |
| cytoplasmic domain, | | | | | | | |
| (semaphorin) 4A | | | | | | | |
| Rho GDP dissociation | ARHGDIA | D13989 | 0704 | 0.45839 | −116.893 | −2.18155 | 201167_x_at |
| inhibitor (GDI) alpha | | | | | | | |
| Wolf-Hirschhorn syndrome | WHSC1L1 | NM_017778 | 0912 | 1.19614 | 11.2303 | 1.19614 | 218173_s_at |
| candidate 1-like 1 | | | | | | | |
| tissue factor pathway | TFPI | AF021834 | 0107 | 1.72078 | 9.20714 | 1.72078 | 210664_s_at |
| inhibitor (lipoprotein- | | | | | | | |
| associated coagulation | | | | | | | |
| inhibitor) | | | | | | | |
| zinc finger protein 271 | ZNF271 | AF159567 | 0138 | 1.1964 | 29.3872 | 1.1964 | 211009_s_at |
| Wiskott-Aldrich syndrome | WAS | NM_000377 | 0757 | 0.447977 | −226.867 | −2.23226 | 205400_at |
| (eczema- | | | | | | | |
| thrombocytopenia) | | | | | | | |
| EH domain binding protein 1 | EHBP1 | BF116032 | 0624 | 1.40606 | 28.0113 | 1.40606 | 212650_at |
| solute carrier family 6 | SLC6A6 | U16120 | 0976 | 0.713183 | −24.4459 | −1.40216 | 205921_s_at |
| (neurotransmitter | | | | | | | |
| transporter, taurine), | | | | | | | |
| member 6 | | | | | | | |
| ADAM metallopeptidase | ADAM8 | AI814527 | 0277 | 0.541261 | −101.711 | −1.84754 | 205179_s_at |
| domain 8 | | | | | | | |
| zinc finger protein 36, C3H | ZFP36L2 | AI356398 | 0189 | 0.570918 | −423.25 | −1.75157 | 201367_s_at |
| type-like 2 | | | | | | | |
| RAB27B, member RAS | RAB27B | BF438386 | 0637 | 1.3631 | 49.8935 | 1.3631 | 228708_at |
| oncogene family | | | | | | | |
| versican | VCAN | D32039 | 0706 | 0.776785 | −306.325 | −1.28736 | 211571_s_at |
| Interleukin 8 | IL8 | AJ239383 | 0313 | 0.627373 | −44.5734 | −1.59395 | 217281_x_at |
| leukocyte immunoglobulin- | LILRA2 | U82277 | 0993 | 0.700637 | −149.21 | −1.42727 | 211102_s_at |
| like receptor, subfamily A | | | | | | | |
| (with TM domain), | | | | | | | |
| member 2 | | | | | | | |
| immunoglobulin heavy | IGH@ /// | S55735 | 0965 | 0.559124 | −2082.58 | −1.78851 | 217022_s_at |
| locus /// immunoglobulin | IGHA1 /// | | | | | | |
| heavy constant alpha 1 /// | IGHA2 /// | | | | | | |
| immunoglobulin heavy | LOC100126583 | | | | | | |
| constant alpha 2 (A2m | | | | | | | |
| marker) /// hypothetical | | | | | | | |
| LOC100126583 | | | | | | | |
| regulator of G-protein | RGS14 | AF037194 | 0109 | 0.684164 | −37.2156 | −1.46164 | 211021_s_at |
| signaling 14 | | | | | | | |
| F-box protein 9 | FBXO9 | AK095315 | 0363 | 1.35494 | 283.431 | 1.35494 | 1566509_s_at |
| septin 9 | 9-Sep | NM_006640 | 0865 | 0.530246 | −77.4496 | −1.88592 | 207425_s_at |
| myeloid cell leukemia | MCL1 | NM_021960 | 0935 | 0.820331 | −746.654 | −1.21902 | 200798_x_at |
| sequence 1 (BCL2- | | | | | | | |
| related) | | | | | | | |
| poly(A) polymerase alpha | PAPOLA | BF797555 | 0662 | 1.21671 | 261.98 | 1.21671 | 212718_at |
| Transcribed locus | — | AI492388 | 0212 | 0.619996 | −132.97 | −1.61291 | 228854_at |
| Rho GDP dissociation | ARHGDIA | AI571798 | 0218 | 0.435657 | −122.614 | −2.29538 | 213606_s_at |
| inhibitor (GDI) alpha | | | | | | | |
| guanine nucleotide | GNAZ | NM_002073 | 0781 | 1.6445 | 54.2522 | 1.6445 | 204993_at |
| binding protein (G | | | | | | | |
| protein), alpha z | | | | | | | |
| polypeptide | | | | | | | |
| ATPase, Ca++ | ATP2A3 | AF068220 | 0120 | 0.668956 | −47.3043 | −1.49487 | 207521_s_at |
| transporting, ubiquitous | | | | | | | |
| prostaglandin- | PTGS1 | BE613133 | 0580 | 1.56705 | 100.206 | 1.56705 | 238669_at |
| endoperoxide synthase 1 | | | | | | | |
| (prostaglandin G/H | | | | | | | |
| synthase and | | | | | | | |
| cyclooxygenase) | | | | | | | |
| ankyrin repeat and BTB | ABTB1 | AW511257 | 0514 | 0.643482 | −21.8363 | −1.55405 | 228848_at |
| (POZ) domain containing 1 | | | | | | | |
| folate receptor 1 (adult) | FOLR1 | AF000381 | 0102 | 1.40192 | 561.562 | 1.40192 | 211074_at |
| Fc fragment of IgA, | FCAR | NM_002000 | 0780 | 0.718362 | −69.5336 | −1.39206 | 207674_at |
| receptor for | | | | | | | |
| G-protein signaling | GPSM3 | BG111168 | 0671 | 0.600035 | −318.6 | −1.66657 | 214847_s_at |
| modulator 3 (AGS3-like, | | | | | | | |
| C. elegans) | | | | | | | |
| Spermatid perinuclear | STRBP | AK024960 | 0353 | 1.48647 | 14.4948 | 1.48647 | 233251_at |
| RNA binding protein | | | | | | | |
| enoyl Coenzyme A | ECHDC3 | NM_024693 | 0948 | 0.620987 | −37.4804 | −1.61034 | 219298_at |
| hydratase domain | | | | | | | |
| containing 3 | | | | | | | |
| heterogeneous nuclear | HNRNPC | NM_004500 | 0824 | 1.12397 | 173.739 | 1.12397 | 200014_s_at |
| ribonucleoprotein C | | | | | | | |
| (C1/C2) | | | | | | | |
| colony stimulating factor 3 | CSF3R | NM_000760 | 0761 | 0.75872 | −966.201 | −1.31801 | 203591_s_at |
| receptor (granulocyte) | | | | | | | |
| myosin, light chain 6, | MYL6 | BE734356 | 0594 | 1.21794 | 1025.74 | 1.21794 | 212082_s_at |
| alkali, smooth muscle and | | | | | | | |
| non-muscle | | | | | | | |
| strawberry notch homolog | SBNO2 | AC005390 | 0100 | 0.649244 | −68.1785 | −1.54025 | 215760_s_at |
| 2 (Drosophila) | | | | | | | |
| DEAD (Asp-Glu-Ala-Asp) | DDX17 | AA521056 | 0025 | 1.25593 | 661.69 | 1.25593 | 230180_at |
| box polypeptide 17 | | | | | | | |
| amyotrophic lateral | ALS2CR12 | AI057333 | 0163 | 1.98348 | 45.6236 | 1.98348 | 239458_at |
| sclerosis 2 (juvenile) | | | | | | | |
| chromosome region, | | | | | | | |
| candidate 12 | | | | | | | |
| egl nine homolog 2 (C. elegans) | EGLN2 | AW057545 | 0472 | 0.576276 | −34.3406 | −1.73528 | 223083_s_at |
| WD and tetratricopeptide | WDTC1 | AK001734 | 0321 | 0.665423 | −71.9458 | −1.5028 | 216036_x_at |
| repeats 1 | | | | | | | |
| CD74 molecule, major | CD74 | M28590 | 0733 | 0.600568 | −261.5 | −1.66509 | 1567628_at |
| histocompatibility | | | | | | | |
| complex, class II invariant | | | | | | | |
| chain | | | | | | | |
| glycoprotein VI (platelet) | GP6 | AB043821 | 0092 | 1.54831 | 33.695 | 1.54831 | 220336_s_at |
| dual specificity | DUSP1 | AA530892 | 0027 | 0.512623 | −102.105 | −1.95075 | 201044_x_at |
| phosphatase 1 | | | | | | | |
| transcription factor binding | TFE3 | AY034078 | 0534 | 0.603333 | −38.6627 | −1.65746 | 1565347_s_at |
| to IGHM enhancer 3 | | | | | | | |
| gelsolin (amyloidosis, | GSN | BE675337 | 0587 | 0.650402 | −41.5488 | −1.53751 | 214040_s_at |
| Finnish type) | | | | | | | |
| guanine nucleotide | GNG11 | NM_004126 | 0814 | 1.61366 | 208.508 | 1.61366 | 204115_at |
| binding protein (G | | | | | | | |
| protein), gamma 11 | | | | | | | |
| CD6 molecule | CD6 | NM_006725 | 0867 | 0.611045 | −58.7246 | −1.63654 | 208602_x_at |
| nerve growth factor | NGFRAP1 | NM_014380 | 0886 | 1.38676 | 192.886 | 1.38676 | 217963_s_at |
| receptor (TNFRSF16) | | | | | | | |
| associated protein 1 | | | | | | | |
| selectin P ligand | SELPLG | AI741056 | 0250 | 0.832688 | −546.812 | −1.20093 | 209879_at |
| CD44 molecule (Indian | CD44 | AF098641 | 0127 | 0.856847 | −61.9943 | −1.16707 | 210916_s_at |
| blood group) | | | | | | | |
| ORAI calcium release- | ORAI2 | BF939788 | 0663 | 0.633836 | −34.2127 | −1.57769 | 218811_at |
| activated calcium | | | | | | | |
| modulator 2 | | | | | | | |
| prosaposin (variant | PSAP | M32221 | 0734 | 0.846847 | −996.693 | −1.18085 | 200866_s_at |
| Gaucher disease and | | | | | | | |
| variant metachromatic | | | | | | | |
| leukodystrophy) | | | | | | | |
| cortactin | CTTN | NM_005231 | 0839 | 1.50296 | 60.9429 | 1.50296 | 201059_at |
| CD6 molecule | CD6 | U66145 | 0988 | 0.651121 | −57.9464 | −1.53581 | 211893_x_at |
| potassium voltage-gated | KCNAB2 | AF044253 | 0112 | 0.575621 | −23.6953 | −1.73725 | 211791_s_at |
| channel, shaker-related | | | | | | | |
| subfamily, beta member 2 | | | | | | | |
| tyrosine 3- | YWHAZ | NM_003406 | 0803 | 1.16412 | 488.217 | 1.16412 | 200639_s_at |
| monooxygenase/tryptophan | | | | | | | |
| 5-monooxygenase | | | | | | | |
| activation protein, zeta | | | | | | | |
| polypeptide | | | | | | | |
| prefoldin subunit 5 | PFDN5 | NM_002624 | 0793 | 1.42957 | 326.46 | 1.42957 | 207132_x_at |
| zinc finger E-box binding | ZEB2 | AV739670 | 0456 | 1.5295 | 31.1939 | 1.5295 | 233031_at |
| homeobox 2 | | | | | | | |
| lymphocyte-specific | LSP1 | NM_002339 | 0784 | 0.76397 | −707.2 | −1.30895 | 203523_at |
| protein 1 | | | | | | | |
| GM2 ganglioside activator | GM2A | AL513583 | 0403 | 0.724236 | −112.384 | −1.38076 | 212737_at |
| B-cell CLL/lymphoma 3 | BCL3 | AI829875 | 0287 | 0.59887 | −49.0698 | −1.66981 | 204907_s_at |
| signal-regulatory protein | SIRPA | AC004832 | 0099 | 0.575913 | −48.7608 | −1.73637 | 217024_x_at |
| alpha | | | | | | | |
| chromosome 21 open | C21orf7 | NM_020152 | 0932 | 1.55157 | 99.5819 | 1.55157 | 221211_s_at |
| reading frame 7 | | | | | | | |
| arachidonate 12- | ALOX12 | NM_000697 | 0760 | 1.54212 | 50.2344 | 1.54212 | 207206_s_at |
| lipoxygenase | | | | | | | |
| immunoglobulin heavy | IGHD | AJ275469 | 0314 | 0.637582 | −65.6509 | −1.56843 | 214973_x_at |
| constant delta | | | | | | | |
| signal-regulatory protein | SIRPA | NM_004648 | 0827 | 0.815813 | −62.6483 | −1.22577 | 202896_s_at |
| alpha | | | | | | | |
| talin 1 | TLN1 | NM_006289 | 0857 | 0.703842 | −284.992 | −1.42077 | 203254_s_at |
| versican | VCAN | R94644 | 0964 | 0.821433 | −285.21 | −1.21738 | 215646_s_at |
| leukocyte immunoglobulin- | LILRA4 | AF041261 | 0110 | 0.699309 | −21.5601 | −1.42998 | 210313_at |
| like receptor, subfamily A | | | | | | | |
| (with TM domain), | | | | | | | |
| member 4 | | | | | | | |
| dual specificity | DUSP1 | NM_004417 | 0823 | 0.742647 | −870.146 | −1.34654 | 201041_s_at |
| phosphatase 1 | | | | | | | |
| leukocyte immunoglobulin- | LILRA2 | U82278 | 0994 | 0.798914 | −260.133 | −1.2517 | 211100_x_at |
| like receptor, subfamily A | | | | | | | |
| (with TM domain), | | | | | | | |
| member 2 | | | | | | | |
| leukocyte immunoglobulin- | LILRA2 | U82276 | 0992 | 0.79042 | −238.501 | −1.26515 | 211101_x_at |
| like receptor, subfamily A | | | | | | | |
| (with TM domain), | | | | | | | |
| member 2 | | | | | | | |
| colony stimulating factor 3 | CSF3R | NM_172313 | 0960 | 0.808882 | −920.479 | −1.23627 | 1553297_a_at |
| receptor (granulocyte) | | | | | | | |
| immunoglobulin lambda | IGL@ | D87021 | 0711 | 0.568492 | −34.0245 | −1.75904 | 216560_x_at |
| locus | | | | | | | |
| opioid growth factor | OGFR | AF172449 | 0140 | 0.675188 | −26.4472 | −1.48107 | 211513_s_at |
| receptor | | | | | | | |
| BCL2-associated | BAG1 | NM_004323 | 0820 | 1.33534 | 836.698 | 1.33534 | 202387_at |
| athanogene | | | | | | | |
| tetraspanin 5 | TSPAN5 | AF065389 | 0119 | 1.41793 | 336.467 | 1.41793 | 209890_at |
| platelet factor 4 | PF4 | NM_002619 | 0791 | 1.45302 | 929.754 | 1.45302 | 206390_x_at |
| (chemokine (C—X—C motif) | | | | | | | |
| ligand 4) | | | | | | | |
| Fc fragment of IgA, | FCAR | U56237 | 0986 | 0.692035 | −10.089 | −1.44501 | 211306_s_at |
| receptor for | | | | | | | |
| transketolase (Wernicke- | TKT | BF696840 | 0656 | 0.825852 | −541.902 | −1.21087 | 208699_x_at |
| Korsakoff syndrome) | | | | | | | |
| heterogeneous nuclear | HNRNPC | AA664258 | 0039 | 1.15573 | 239.689 | 1.15573 | 212626_x_at |
| ribonucleoprotein C | | | | | | | |
| (C1/C2) | | | | | | | |
| tumor necrosis factor | TNFRSF10C | NM_003841 | 0808 | 0.710572 | −502.391 | −1.40732 | 206222_at |
| receptor superfamily, | | | | | | | |
| member 10c, decoy | | | | | | | |
| without an intracellular | | | | | | | |
| domain | | | | | | | |
| clusterin | CLU | M25915 | 0732 | 1.56445 | 331.206 | 1.56445 | 208792_s_at |
| Interleukin 8 | IL8 | L34164 | 0723 | 0.606145 | −44.8057 | −1.64977 | 211650_x_at |
| chromosome Y open | CYorf15A | AW468885 | 0510 | 1.86697 | 28.7205 | 1.86697 | 236694_at |
| reading frame 15A | | | | | | | |
| insulin-like growth factor 1 | IGF1R | BF347362 | 0633 | 0.713503 | −8.93807 | −1.40154 | 243358_at |
| receptor | | | | | | | |
| Immunoglobulin heavy | IGHG1 | M24668 | 0731 | 0.640653 | −24.0473 | −1.56091 | 211633_x_at |
| constant gamma 1 (G1m | | | | | | | |
| marker) | | | | | | | |
| adducin 3 (gamma) | ADD3 | AI763123 | 0262 | 1.10373 | 199.209 | 1.10373 | 201752_s_at |
| GM2 ganglioside activator | GM2A | M76477 | 0737 | 0.549282 | −17.8258 | −1.82056 | 209727_at |
| small EDRK-rich factor 2 | SERF2 | BE568651 | 0579 | 1.18189 | 762.518 | 1.18189 | 224625_x_at |
| neurofilament, light | NEFL | AL537457 | 0413 | 1.38097 | 8.81215 | 1.38097 | 221805_at |
| polypeptide 68 kDa | | | | | | | |
| hypothetical protein | LOC284701 | AL137733 | 0398 | 0.575711 | −47.8667 | −1.73698 | 234664_at |
| LOC284701 | | | | | | | |
| interferon regulatory factor 7 | IRF7 | NM_004030 | 0810 | 0.656921 | −213.859 | −1.52225 | 208436_s_at |
| CTD (carboxy-terminal | CTDSPL | NM_005808 | 0846 | 1.50567 | 31.4589 | 1.50567 | 201906_s_at |
| domain, RNA polymerase | | | | | | | |
| II, polypeptide A) small | | | | | | | |
| phosphatase-like | | | | | | | |
| immunoglobulin heavy | IGHA1 /// | U92706 | 0997 | 0.654147 | −45.8457 | −1.52871 | 216557_x_at |
| constant alpha 1 /// | IGHG1 /// | | | | | | |
| immunoglobulin heavy | IGHG3 /// | | | | | | |
| constant gamma 1 (G1m | IGHM /// | | | | | | |
| marker) /// immunoglobulin | IGHV4-31 | | | | | | |
| heavy constant gamma 3 | | | | | | | |
| (G3m marker) /// | | | | | | | |
| immunoglobulin heavy | | | | | | | |
| constant mu /// | | | | | | | |
| immunoglobulin heavy | | | | | | | |
| variable 4-31 | | | | | | | |
| calreticulin | CALR | NM_004343 | 0821 | 0.666427 | −39.7641 | −1.50054 | 200935_at |
| profilin 1 | PFN1 | NM_005022 | 0834 | 0.909933 | −688.243 | −1.09898 | 200634_at |
| GM2 ganglioside activator | GM2A | M76477 | 0737 | 0.760155 | −51.1178 | −1.31552 | 35820_at |
| Immunoglobulin heavy | IGHA1 | AW519168 | 0517 | 0.696459 | −66.6484 | −1.43583 | 215118_s_at |
| constant alpha 1 | | | | | | | |
| BCL2-associated | BAG1 | AF116273 | 0132 | 1.29366 | 745.959 | 1.29366 | 211475_s_at |
| athanogene | | | | | | | |
| integrin, beta 2 | ITGB2 | NM_000211 | 0756 | 0.904719 | −606.678 | −1.10532 | 202803_s_at |
| (complement component 3 | | | | | | | |
| receptor 3 and 4 subunit) | | | | | | | |
| integral membrane protein | ITM2B | AF092128 | 0126 | 0.920192 | −904.73 | −1.08673 | 217732_s_at |
| 2B | | | | | | | |
| myeloid cell leukemia | MCL1 | AI275690 | 0180 | 0.920558 | −557.764 | −1.0863 | 200797_s_at |
| sequence 1 (BCL2- | | | | | | | |
| related) | | | | | | | |
| GNAS complex locus | GNAS | AA650558 | 0038 | 1.28011 | 328.574 | 1.28011 | 217673_x_at |
| tubulin, beta 1 | TUBB1 | N63244 | 0750 | 1.30121 | 525.72 | 1.30121 | 230690_at |
| ribosomal protein L23 | RPL23 | NM_000978 | 0767 | 1.38751 | 582.376 | 1.38751 | 200888_s_at |
| peroxiredoxin 6 | PRDX6 | BE869583 | 0604 | 1.29349 | 781.185 | 1.29349 | 200844_s_at |
| neurofilament, light | NEFL | BF055311 | 0613 | 1.33283 | 20.5017 | 1.33283 | 221916_at |
| polypeptide 68 kDa | | | | | | | |
| immunoglobulin kappa | IGK@ /// IGKC | AW575927 | 0518 | 0.828408 | −1002.05 | −1.20713 | 224795_x_at |
| constant /// | /// IGKV1-5 /// | | | | | | |
| immunoglobulin kappa | IGKV2-24 | | | | | | |
| variable 1-5 /// | | | | | | | |
| immunoglobulin kappa | | | | | | | |
| variable 2-24 /// | | | | | | | |
| immunoglobulin kappa | | | | | | | |
| locus | | | | | | | |
| cystatin C (amyloid | CST3 | NM_000099 | 0755 | 0.839452 | −682.022 | −1.19125 | 201360_at |
| angiopathy and cerebral | | | | | | | |
| hemorrhage) | | | | | | | |
| ribosomal protein L7 | RPL7 | NM_000971 | 0766 | 1.25494 | 1233.19 | 1.25494 | 200717_x_at |
| interferon induced | IFITM1 | AA749101 | 0057 | 0.874523 | −1026.24 | −1.14348 | 214022_s_at |
| transmembrane protein 1 | | | | | | | |
| (9-27) | | | | | | | |
| ribosomal protein L36a /// | LOC729362 /// | NM_021029 | 0933 | 1.40994 | 1319.28 | 1.40994 | 201406_at |
| similar to large subunit | RPL36A | | | | | | |
| ribosomal protein L36a | | | | | | | |
| SUB1 homolog (S. cerevisiae) | SUB1 | BE784583 | 0598 | 1.28695 | 310.449 | 1.28695 | 224586_x_at |
| guanylate kinase 1 | GUK1 | BC006249 | 0558 | 1.2612 | 828.435 | 1.2612 | 200075_s_at |
| Pre-B-cell colony | PBEF1 | AA873350 | 0074 | 0.851427 | −574.61 | −1.1745 | 243296_at |
| enhancing factor 1 | | | | | | | |
| prostaglandin- | PTGS1 | NM_000962 | 0764 | 1.30351 | 24.1075 | 1.30351 | 205127_at |
| endoperoxide synthase 1 | | | | | | | |
| (prostaglandin G/H | | | | | | | |
| synthase and | | | | | | | |
| cyclooxygenase) | | | | | | | |
| F-box protein 7 | FBXO7 | NM_012179 | 0877 | 1.21038 | 1054.96 | 1.21038 | 201178_at |
| hemoglobin, alpha 1 /// | HBA1 /// HBA2 | AF105974 | 0128 | 1.31542 | 1468.63 | 1.31542 | 209458_x_at |
| hemoglobin, alpha 2 | | | | | | | |
| hemoglobin, alpha 1 | HBA1 | BC005931 | 0555 | 1.32226 | 1497.18 | 1.32226 | 211745_x_at |
| immunoglobulin lambda | IGL@ /// IGLJ3 | X57812 | 1008 | 0.781053 | −974.535 | −1.28032 | 214677_x_at |
| locus /// immunoglobulin | /// IGLV2-14 /// | | | | | | |
| lambda variable 4-3 /// | IGLV3-25 /// | | | | | | |
| immunoglobulin lambda | IGLV4-3 | | | | | | |
| variable 3-25 /// | | | | | | | |
| immunoglobulin lambda | | | | | | | |
| variable 2-14 /// | | | | | | | |
| immunoglobulin lambda | | | | | | | |
| joining 3 | | | | | | | |
| major histocompatibility | HLA-G | M90686 | 0740 | 0.800128 | −1437.74 | −1.2498 | 211530_x_at |
| complex, class I, G | | | | | | | |
| SUB1 homolog (S. cerevisiae) | SUB1 | BG231551 | 0678 | 1.25347 | 405.331 | 1.25347 | 212857_x_at |
| chemokine (C—X3—C motif) | CX3CR1 | U20350 | 0978 | 1.14315 | 339.788 | 1.14315 | 205898_at |
| receptor 1 | | | | | | | |
| metastasis associated | MALAT1 | AF132202 | 0134 | 0.892637 | −753.262 | −1.12028 | 223940_x_at |
| lung adenocarcinoma | | | | | | | |
| transcript 1 (non-protein | | | | | | | |
| coding) | | | | | | | |
| metastasis associated | MALAT1 | BG534952 | 0699 | 1.12359 | 745.361 | 1.12359 | 224567_x_at |
| lung adenocarcinoma | | | | | | | |
| transcript 1 (non-protein | | | | | | | |
| coding) | | | | | | | |
| tubulin, beta 2A | TUBB2A | NM_001069 | 0768 | 1.79577 | 548.832 | 1.79577 | 204141_at |
| solute carrier family 25, | SLC25A37 | BG251467 | 0679 | 1.09794 | 685.472 | 1.09794 | 222529_at |
| member 37 | | | | | | | |
| solute carrier family 25, | SLC25A37 | BG251467 | 0679 | 1.16922 | 684.917 | 1.16922 | 222528_s_at |
| member 37 | | | | | | | |
| GNAS complex locus | GNAS | NM_016592 | 0905 | 1.06718 | 381.104 | 1.06718 | 200981_x_at |
| metastasis associated | MALAT1 | BE708432 | 0592 | 1.04778 | 706.89 | 1.04778 | 1558678_s_at |
| lung adenocarcinoma | | | | | | | |
| transcript 1 (non-protein | | | | | | | |
| coding) | | | | | | | |

TABLE 2A

| | | | | | t-Test | Fold Change | | Log10 |
|---|---|---|---|---|---|---|---|---|
| | Known | Genbank | SEQ | | p-Value | Signed | | Mean |
| Fragment | Genes: Gene | Accession | ID | Sequence Clusters: | (MS vs | Magnitude (MS | FC | (Control |
| Name | Symbol | No. | NO. | Cluster Title | Control) | vs. Control) | Magnitude | Samples) |
| 214847_s_at | GPSM3 | BG111168 | 0671 | “G-protein signalling | 1.29E−11 | 1.82 | 1.82 | 2.2 |
| | | | | modulator 3 (AGS3-like, | | | | |
| | | | | C. elegans)” | | | | |
| 227510_x_at | | AL037917 | 0369 | Transcribed locus | 1.41E−10 | 6.2 | 6.2 | 2.29 |
| 223578_x_at | MALAT1 | AF113016 | 0131 | Metastasis associated | 1.55E−10 | 3.4 | 3.4 | 1.83 |
| | | | | lung adenocarcinoma | | | | |
| | | | | transcript 1 (non-coding | | | | |
| | | | | RNA) | | | | |
| 232431_at | | AI934556 | 0302 | “Glucocorticoid receptor | 4.46E−10 | −2.75 | 2.75 | 2.52 |
| | | | | alpha mRNA, variant 3′ | | | | |
| | | | | UTR” | | | | |
| 219878_s_at | KLF13 | NM_015995 | 0892 | Kruppel-like factor 13 | 8.23E−10 | 13.42 | 13.42 | 0.4 |
| 214352_s_at | KRAS | BF673699 | 0652 | V-Ki-ras2 Kirsten rat | 1.04E−09 | 2.25 | 2.25 | 2.06 |
| | | | | sarcoma viral oncogene | | | | |
| | | | | homolog | | | | |
| 228582_x_at | MALAT1 | AI475544 | 0211 | Metastasis associated | 1.06E−09 | 9.68 | 9.68 | 2.39 |
| | | | | lung adenocarcinoma | | | | |
| | | | | transcript 1 (non-coding | | | | |
| | | | | RNA) | | | | |
| 243981_at | | AI763206 | 0263 | Transcribed locus | 1.42E−09 | −2.43 | 2.43 | 2.5 |
| 201753_s_at | ADD3 | NM_019903 | 0931 | Adducin 3 (gamma) | 1.95E−09 | −1.85 | 1.85 | 3.16 |
| 211074_at | FOLR1 | AF000381 | 0102 | Folate receptor 1 (adult) | 3.38E−09 | 2.39 | 2.39 | 2.16 |
| 225956_at | LOC153222 | AL565238 | 0417 | Adult retina protein | 3.62E−09 | −1.48 | 1.48 | 2.87 |
| 223161_at | KIAA1147 | AA029331 | 0003 | KIAA1147 | 4.65E−09 | 2.34 | 2.34 | 2.27 |
| 218389_s_at | APH1A | NM_016022 | 0894 | Anterior pharynx defective | 4.69E−09 | 1.51 | 1.51 | 2.26 |
| | | | | 1 homolog A (C. elegans) | | | | |
| 236924_at | GLMN | AA814383 | 0065 | “Glomulin, FKBP | 7.55E−09 | −2.5 | 2.5 | 2.05 |
| | | | | associated protein” | | | | |
| 226148_at | ZBTB44 | AU144305 | 0422 | Zinc finger and BTB | 1.05E−08 | −1.78 | 1.78 | 2.96 |
| | | | | domain containing 44 | | | | |
| 219696_at | FLJ20054 | NM_019049 | 0927 | Hypothetical protein | 1.10E−08 | −1.47 | 1.47 | 2.18 |
| | | | | FLJ20054 | | | | |
| 223940_x_at | | AF132202 | 0134 | | 1.32E−08 | 2.92 | 2.92 | 2.45 |
| 225889_at | AEBP2 | BF475280 | 0639 | AE binding protein 2 | 1.37E−08 | −1.88 | 1.88 | 2.69 |
| 214697_s_at | ROD1 | AW190873 | 0485 | ROD1 regulator of | 1.71E−08 | 2.27 | 2.27 | 1.9 |
| | | | | differentiation 1 (S. pombe) | | | | |
| 208610_s_at | SRRM2 | AI655799 | 0233 | Serine/arginine repetitive | 2.18E−08 | 3.16 | 3.16 | 1.72 |
| | | | | matrix 2 | | | | |
| 241751_at | OFD1 | AW292752 | 0498 | Oral-facial-digital | 2.26E−08 | −2.4 | 2.4 | 2.17 |
| | | | | syndrome 1 | | | | |
| 204049_s_at | PHACTR2 | NM_014721 | 0889 | Phosphatase and actin | 3.26E−08 | −1.7 | 1.7 | 2.33 |
| | | | | regulator 2 | | | | |
| 225377_at | C9orf86 | BE783949 | 0597 | Chromosome 9 open | 3.78E−08 | 1.9 | 1.9 | 2.27 |
| | | | | reading frame 86 | | | | |
| 225139_at | RBM35B | AW070424 | 0473 | RNA binding motif protein | 3.81E−08 | −1.6 | 1.6 | 3 |
| | | | | 35B | | | | |
| 216177_at | LOC391132 | AW582267 | 0519 | Similar to 60S ribosomal | 3.88E−08 | −1.88 | 1.88 | 2.19 |
| | | | | protein L29 (P23) | | | | |
| 242232_at | | AI652864 | 0232 | | 4.50E−08 | 2.15 | 2.15 | 1.7 |
| 200734_s_at | ARF3 | BG341906 | 0689 | ADP-ribosylation factor 3 | 4.57E−08 | 1.78 | 1.78 | 2.25 |
| 211716_x_at | ARHGDIA | BC005851 | 0554 | Rho GDP dissociation | 4.64E−08 | 1.66 | 1.66 | 2.62 |
| | | | | inhibitor (GDI) alpha | | | | |
| 215460_x_at | BRD1 | AL080149 | 0380 | Bromodomain containing 1 | 4.65E−08 | −1.39 | 1.39 | 2.25 |
| 222576_s_at | EIF2C1 | AW071829 | 0475 | “Eukaryotic translation | 4.71E−08 | 1.88 | 1.88 | 2.14 |
| | | | | initiation factor 2C, 1” | | | | |
| 230141_at | ARID4A | AI640594 | 0226 | AT rich interactive domain | 5.62E−08 | −1.88 | 1.88 | 2.19 |
| | | | | 4A (RBP1-like) | | | | |
| 227740_at | UHMK1 | AW173222 | 0481 | U2AF homology motif | 5.74E−08 | 2.45 | 2.45 | 2.37 |
| | | | | (UHM) kinase 1 | | | | |
| 204805_s_at | H1FX | NM_006026 | 0851 | “H1 histone family, | 6.56E−08 | 2.3 | 2.3 | 2.26 |
| | | | | member X” | | | | |
| 208624_s_at | EIF4G1 | BE966878 | 0610 | “Eukaryotic translation | 6.81E−08 | 1.41 | 1.41 | 1.88 |
| | | | | initiation factor 4 gamma, | | | | |
| | | | | 1” | | | | |
| 243612_at | NSD1 | AL526448 | 0408 | Nuclear receptor binding | 7.09E−08 | −2.61 | 2.61 | 2.19 |
| | | | | SET domain protein 1 | | | | |
| 201167_x_at | ARHGDIA | D13989 | 0704 | Rho GDP dissociation | 7.24E−08 | 2.48 | 2.48 | 1.72 |
| | | | | inhibitor (GDI) alpha | | | | |
| 241786_at | | AI380514 | 0198 | Transcribed locus | 7.33E−08 | −2.3 | 2.3 | 2.61 |
| 238430_x_at | SLFN5 | AI923675 | 0295 | Schlafen family member 5 | 7.41E−08 | 2.67 | 2.67 | 2.57 |
| 202102_s_at | BRD4 | BF718610 | 0657 | Bromodomain containing 4 | 7.45E−08 | 1.54 | 1.54 | 2.32 |
| 201737_s_at | MARCH6 | NM_005885 | 0847 | Membrane-associated | 8.45E−08 | −1.77 | 1.77 | 2.53 |
| | | | | ring finger (C3HC4) 6 | | | | |
| 229926_at | | AI633738 | 0225 | Transcribed locus | 8.49E−08 | −1.61 | 1.61 | 2.04 |
| 230961_at | | BE856980 | 0603 | | 9.10E−08 | −2.05 | 2.05 | 2.07 |
| 201996_s_at | SPEN | AL524033 | 0406 | “Spen homolog, | 9.12E−08 | 2.59 | 2.59 | 1.55 |
| | | | | transcriptional regulator | | | | |
| | | | | (Drosophila)” | | | | |
| 231858_x_at | DKFZp761E198 | BC004895 | 0552 | DKFZp761E198 protein | 9.89E−08 | 1.83 | 1.83 | 2.02 |
| 200608_s_at | RAD21 | NM_006265 | 0855 | RAD21 homolog (S. pombe) | 9.99E−08 | −1.44 | 1.44 | 2.61 |
| 201168_x_at | ARHGDIA | NM_004309 | 0818 | Rho GDP dissociation | 1.00E−07 | 1.81 | 1.81 | 2.37 |
| | | | | inhibitor (GDI) alpha | | | | |
| 224631_at | ZFP91 | AA758013 | 0058 | Zinc finger protein 91 | 1.00E−07 | 1.92 | 1.92 | 2.02 |
| | | | | homolog (mouse) | | | | |
| 225563_at | PAN3 | AI970788 | 0309 | PAN3 polyA specific | 1.05E−07 | −1.62 | 1.62 | 3.03 |
| | | | | ribonuclease subunit | | | | |
| | | | | homolog (S. cerevisiae) | | | | |
| 222133_s_at | PHF20L1 | AK022280 | 0332 | PHD finger protein 20-like 1 | 1.09E−07 | −1.61 | 1.61 | 2.12 |
| 237768_x_at | | AA825925 | 0066 | | 1.10E−07 | −2.29 | 2.29 | 2.57 |
| 208677_s_at | BSG | AL550657 | 0415 | Basigin (Ok blood group) | 1.16E−07 | 2.21 | 2.21 | 1.92 |
| 224572_s_at | IRF2BP2 | BG485163 | 0697 | Interferon regulatory factor | 1.36E−07 | 2.35 | 2.35 | 2.63 |
| | | | | 2 binding protein 2 | | | | |
| 221899_at | PFAAP5 | AI809961 | 0274 | Phosphonoformate | 1.37E−07 | −1.92 | 1.92 | 2.5 |
| | | | | immuno-associated | | | | |
| | | | | protein 5 | | | | |
| 224969_at | ATXN7L3 | AL390158 | 0401 | Ataxin 7-like 3 | 1.45E−07 | 1.65 | 1.65 | 2.32 |
| 229389_at | ATG16L2 | AA741058 | 0050 | ATG16 autophagy related | 1.46E−07 | 3 | 3 | 2.32 |
| | | | | 16-like 2 (S. cerevisiae) | | | | |
| 242134_at | | AI733194 | 0247 | Transcribed locus | 1.50E−07 | 2.2 | 2.2 | 1.72 |
| 224676_at | TMED4 | AI472339 | 0208 | Transmembrane emp24 | 1.52E−07 | 2.09 | 2.09 | 2.45 |
| | | | | protein transport domain | | | | |
| | | | | containing 4 | | | | |
| 224568_x_at | MALAT1 | AW005982 | 0462 | Metastasis associated | 1.60E−07 | 3.14 | 3.14 | 2.28 |
| | | | | lung adenocarcinoma | | | | |
| | | | | transcript 1 (non-coding | | | | |
| | | | | RNA) | | | | |
| 218659_at | ASXL2 | NM_018263 | 0923 | Additional sex combs like | 1.65E−07 | −1.46 | 1.46 | 2.88 |
| | | | | 2 (Drosophila) | | | | |
| 203497_at | PPARBP | NM_004774 | 0829 | PPAR binding protein | 1.68E−07 | −1.57 | 1.57 | 2.4 |
| 204285_s_at | PMAIP1 | AI857639 | 0288 | Phorbol-12-myristate-13- | 1.74E−07 | 2.56 | 2.56 | 1.82 |
| | | | | acetate-induced protein 1 | | | | |
| 213015_at | | BF448315 | 0638 | “ARTC1 mRNA, complete | 1.93E−07 | 2.51 | 2.51 | 1.95 |
| | | | | sequence” | | | | |
| 224567_x_at | MALAT1 | BG534952 | 0699 | Metastasis associated | 1.95E−07 | 2.79 | 2.79 | 2.47 |
| | | | | lung adenocarcinoma | | | | |
| | | | | transcript 1 (non-coding | | | | |
| | | | | RNA) | | | | |
| 222790_s_at | RSBN1 | AK022166 | 0330 | Round spermatid basic | 2.00E−07 | −2.2 | 2.2 | 2.87 |
| | | | | protein 1 | | | | |
| 207057_at | SLC16A7 | NM_004731 | 0828 | “Solute carrier family 16, | 2.09E−07 | 4.01 | 4.01 | 1.41 |
| | | | | member 7 | | | | |
| | | | | (monocarboxylic acid | | | | |
| | | | | transporter 2)” | | | | |
| 212852_s_at | TROVE2 | AL538601 | 0414 | “TROVE domain family, | 2.09E−07 | −1.44 | 1.44 | 2.61 |
| | | | | member 2” | | | | |
| 238761_at | | BE645241 | 0581 | | 2.13E−07 | −2.49 | 2.49 | 2.86 |
| 214198_s_at | DGCR2 | AU150824 | 0430 | DiGeorge syndrome | 2.16E−07 | −1.66 | 1.66 | 2.25 |
| | | | | critical region gene 2 | | | | |
| 202809_s_at | INTS3 | NM_023015 | 0943 | Integrator complex subunit 3 | 2.18E−07 | −1.26 | 1.26 | 2.19 |
| 236072_at | | N64578 | 0751 | Transcribed locus | 2.23E−07 | −2.3 | 2.3 | 1.91 |
| 225827_at | EIF2C2 | AI832074 | 0288 | “Eukaryotic translation | 2.28E−07 | 2.51 | 2.51 | 2.14 |
| | | | | initiation factor 2C, 2” | | | | |
| 241775_at | | AW298119 | 0502 | “CDNA FLJ26437 fis, | 2.37E−07 | −2.2 | 2.2 | 2.5 |
| | | | | clone KDN02067” | | | | |
| 215706_x_at | ZYX | BC002323 | 0543 | Zyxin | 2.42E−07 | 1.68 | 1.68 | 2.6 |
| 201730_s_at | TPR | BF110993 | 0619 | Translocated promoter | 2.44E−07 | 1.77 | 1.77 | 2.29 |
| | | | | region (to activated MET | | | | |
| | | | | oncogene) | | | | |
| 226447_at | ASH1L | BG290742 | 0687 | “Ash1 (absent, small, or | 2.55E−07 | −1.52 | 1.52 | 2.6 |
| | | | | homeotic)-like | | | | |
| | | | | (Drosophila)” | | | | |
| 200623_s_at | CALM3 | MM_005184 | 0836 | “Calmodulin 3 | 2.82E−07 | 1.87 | 1.87 | 2.33 |
| | | | | (phosphorylase kinase, | | | | |
| | | | | delta)” | | | | |
| 215990_s_at | BCL6 | S67779 | 0966 | B-cell CLL/lymphoma 6 | 2.92E−07 | 1.96 | 1.96 | 1.8 |
| | | | | (zinc finger protein 51) | | | | |
| 212007_at | UBXD2 | AI927512 | 0301 | UBX domain containing 2 | 3.02E−07 | 1.5 | 1.5 | 2.05 |
| 225885_at | EEA1 | AI336848 | 0183 | Early endosome antigen 1 | 3.04E−07 | −1.63 | 1.63 | 2.5 |
| 212629_s_at | PKN2 | AI633689 | 0224 | Protein kinase N2 | 3.06E−07 | 1.66 | 1.66 | 1.83 |
| 216971_s_at | PLEC1 | Z54367 | 1015 | “Plectin 1, intermediate | 3.10E−07 | 3.34 | 3.34 | 1.55 |
| | | | | filament binding protein | | | | |
| | | | | 500 kDa” | | | | |
| 225289_at | STAT3 | AI139252 | 0174 | Signal transducer and | 3.15E−07 | 1.58 | 1.58 | 2.62 |
| | | | | activator of transcription 3 | | | | |
| | | | | (acute-phase response | | | | |
| | | | | factor) | | | | |
| 217713_x_at | | AA126763 | 0008 | | 3.42E−07 | −1.62 | 1.62 | 2.22 |
| 225361_x_at | FAM122B | AI348001 | 0187 | Family with sequence | 3.69E−07 | −1.44 | 1.44 | 2.8 |
| | | | | similarity 122B | | | | |
| 242920_at | | AW590838 | 0520 | | 3.89E−07 | −2.63 | 2.63 | 2.52 |
| 227754_at | | AV700815 | 0447 | “CDNA FLJ10417 fis, | 3.93E−07 | −2.01 | 2.01 | 2.24 |
| | | | | clone NT2RP1000112” | | | | |
| 226680_at | | BF056303 | 0614 | Transcribed locus | 4.00E−07 | −2.17 | 2.17 | 2.33 |
| 202157_s_at | CUGBP2 | U69546 | 0989 | “CUG triplet repeat, RNA | 4.02E−07 | −1.47 | 1.47 | 3.3 |
| | | | | binding protein 2” | | | | |
| 208988_at | | BE675843 | 0589 | | 4.05E−07 | −1.46 | 1.46 | 2.28 |
| 222243_s_at | TOB2 | AB051450 | 0094 | “Transducer of ERBB2, 2” | 4.21E−07 | −1.35 | 1.35 | 2.03 |
| 217862_at | | N24868 | 0746 | Transcribed locus | 4.42E−07 | 1.53 | 1.53 | 2.29 |
| 64486_at | CORO1B | AI341234 | 0185 | “Coronin, actin binding | 4.42E−07 | 1.38 | 1.38 | 2.35 |
| | | | | protein, 1B” | | | | |
| 230918_at | | BE856598 | 0601 | | 4.43E−07 | −1.77 | 1.77 | 2.38 |
| 204978_at | SFRS16 | NM_007056 | 0873 | “Splicing factor, | 4.48E−07 | 2.27 | 2.27 | 1.8 |
| | | | | arginine/serine-rich 16” | | | | |
| 232879_at | CRTC3 | AK024981 | 0354 | CREB regulated | 4.61E−07 | −2.01 | 2.01 | 1.96 |
| | | | | transcription coactivator 3 | | | | |
| 235032_at | DNAJA5 | BG112118 | 0672 | DnaJ homology subfamily | 4.73E−07 | −1.89 | 1.89 | 2.4 |
| | | | | A member 5 | | | | |
| 203591_s_at | CSF3R | NM_000760 | 0761 | Colony stimulating factor 3 | 5.00E−07 | 2.01 | 2.01 | 2.16 |
| | | | | receptor (granulocyte) | | | | |
| 228098_s_at | MYLIP | AW292746 | 0497 | Myosin regulatory light | 5.00E−07 | −1.57 | 1.57 | 3.02 |
| | | | | chain interacting protein | | | | |
| 234734_s_at | TNRC6A | AK025696 | 0358 | Trinucleotide repeat | 5.06E−07 | 1.67 | 1.67 | 2.26 |
| | | | | containing 6A | | | | |
| 244433_at | | AI950023 | 0307 | | 5.36E−07 | −2.03 | 2.03 | 2.63 |
| 226641_at | | AU157224 | 0438 | “CDNA FLJ11570 fis, | 5.42E−07 | −1.56 | 1.56 | 2.93 |
| | | | | clone HEMBA1003309” | | | | |
| 222791_at | RSBN1 | AK022166 | 0330 | Round spermatid basic | 5.54E−07 | −2.12 | 2.12 | 3.08 |
| | | | | protein 1 | | | | |
| 225706_at | GLCCI1 | AI761989 | 0259 | Glucocorticoid induced | 5.60E−07 | −1.86 | 1.86 | 3 |
| | | | | transcript 1 | | | | |
| 243790_at | ZNF585A | AA203136 | 0015 | Zinc finger protein 585A | 5.73E−07 | −2.21 | 2.21 | 2.19 |
| 244145_at | | BG260337 | 0683 | | 5.74E−07 | −1.62 | 1.62 | 2.4 |
| 203751_x_at | JUND | AI762296 | 0260 | Jun D proto-oncogene | 5.89E−07 | 1.97 | 1.97 | 1.9 |
| 225216_at | CXorf39 | AI590719 | 0220 | Chromosome X open | 5.91E−07 | −1.37 | 1.37 | 2.62 |
| | | | | reading frame 39 | | | | |
| 228853_at | “(LOC730432, | AI652546 | 0229 | Serine/threonine/tyrosine | 5.96E−07 | −1.49 | 1.49 | 2.5 |
| | STYX)” | | | interacting protein | | | | |
| 232909_s_at | “(BPTF, | AU146870 | 0426 | “(Bromodomain PHD | 6.00E−07 | −1.58 | 1.58 | 2.89 |
| | LOC646043)” | | | finger transcription factor, | | | | |
| | | | | Similar to Enhancer of | | | | |
| | | | | bithorax CG32346-PB, | | | | |
| | | | | isoform B)” | | | | |
| 36564_at | IBRDC3 | W27419 | 0998 | IBR domain containing 3 | 6.14E−07 | 1.89 | 1.89 | 2.03 |
| 200073_s_at | HNRPD | M94630 | 0742 | “Heterogeneous nuclear | 6.30E−07 | −1.43 | 1.43 | 3.24 |
| | | | | ribonucleoprotein D (AU- | | | | |
| | | | | rich element RNA binding | | | | |
| | | | | protein 1, 37 kDa)” | | | | |
| 200808_s_at | ZYX | NM_003461 | 0804 | Zyxin | 6.30E−07 | 1.78 | 1.78 | 2.6 |
| 235125_x_at | | AI078279 | 0167 | Transcribed locus | 6.45E−07 | −2.67 | 2.67 | 2.17 |
| 226712_at | | BF206389 | 0627 | “CDNA: FLJ22100 fis, | 6.45E−07 | 1.51 | 1.51 | 2.3 |
| | | | | clone HEP17127” | | | | |
| 208447_s_at | PRPS1 | NM_002764 | 0795 | Phosphoribosyl | 6.64E−07 | 1.93 | 1.93 | 1.83 |
| | | | | pyrophosphate synthetase 1 | | | | |
| 226426_at | | BG149849 | 0674 | Transcribed locus | 6.67E−07 | −1.5 | 1.5 | 2.66 |
| 239163_at | UBE2B | AW364833 | 0507 | Ubiquitin-conjugating | 6.80E−07 | 2.05 | 2.05 | 1.81 |
| | | | | enzyme E2B (RAD6 | | | | |
| | | | | homolog) | | | | |
| 219426_at | EIF2C3 | NM_024852 | 0949 | “Eukaryotic translation | 6.81E−07 | 1.65 | 1.65 | 1.64 |
| | | | | initiation factor 2C, 3” | | | | |
| 235341_at | LOC144871 | AL119957 | 0387 | Hypothetical protein | 7.43E−07 | 1.78 | 1.78 | 2.3 |
| | | | | LOC144871 | | | | |
| 242243_at | TMF1 | AI767435 | 0264 | TATA element modulatory | 7.88E−07 | −2.26 | 2.26 | 2.01 |
| | | | | factor 1 | | | | |
| 201236_s_at | BTG2 | NM_006763 | 0870 | “BTG family, member 2” | 8.07E−07 | 1.55 | 1.55 | 2.45 |
| 202577_s_at | DDX19A | BC005162 | 0553 | DEAD (Asp-Glu-Ala-As) | 8.20E−07 | −1.44 | 1.44 | 2.07 |
| | | | | box polypeptide 19A | | | | |
| 227772_at | | AV700849 | 0448 | | 9.74E−07 | −1.72 | 1.72 | 2.33 |
| 229897_at | ZNF641 | BF195808 | 0626 | Zinc finger protein 641 | 9.75E−07 | 1.86 | 1.86 | 2.15 |
| 218566_s_at | CHORDC1 | NM_012124 | 0876 | Cysteine and histidine-rich | 9.81E−07 | −1.61 | 1.61 | 2.33 |
| | | | | domain (CHORD)- | | | | |
| | | | | containing 1 | | | | |
| 203839_s_at | TNK2 | NM_005781 | 0845 | “Tyrosine kinase, non- | 9.95E−07 | 2.11 | 2.11 | 1.63 |
| | | | | receptor, 2” | | | | |
| 204361_s_at | SKAP2 | AB014486 | 0085 | Src kinase associated | 1.02E−06 | −1.79 | 1.79 | 2.09 |
| | | | | phosphoprotein 2 | | | | |
| 224250_s_at | SECISBP2 | BC001189 | 0541 | SECIS binding protein 2 | 1.02E−06 | 1.74 | 1.74 | 2.57 |
| 225350_s_at | ZYG11B | AV701229 | 0449 | Zyg-11 homolog B (C. elegans) | 1.03E−06 | −1.54 | 1.54 | 2.83 |
| 204516_at | | BG390306 | 0692 | Transcribed locus | 1.05E−06 | −2.17 | 2.17 | 2.56 |
| 225620_at | RAB35 | AL534848 | 0412 | “RAB35, member RAS | 1.05E−06 | 1.56 | 1.56 | 2.27 |
| | | | | oncogene family” | | | | |
| 226965_at | FAM116A | BF438017 | 0636 | “(Family with sequence | 1.07E−06 | −1.53 | 1.53 | 2.91 |
| | | | | similarity 116, member A, | | | | |
| | | | | Transcribed locus)” | | | | |
| 239808_at | | AI084489 | 0169 | Transcribed locus | 1.08E−06 | −1.87 | 1.87 | 2.47 |
| 227428_at | GABPA | BE876628 | 0605 | “GA binding protein | 1.20E−06 | −1.53 | 1.53 | 2.52 |
| | | | | transcription factor, alpha | | | | |
| | | | | subunit 60 kDa” | | | | |
| 218595_s_at | “(HEATR1, | NM_018072 | 0921 | “Lectin, galactoside- | 1.20E−06 | −1.43 | 1.43 | 2.3 |
| | LGALS8)” | | | binding, soluble, 8 | | | | |
| | | | | (galectin 8)” | | | | |
| 222266_at | C19orf2 | BF796940 | 0661 | Chromosome 19 open | 1.23E−06 | −1.72 | 1.72 | 2.17 |
| | | | | reading frame 2 | | | | |
| 239597_at | | AA993566 | 0080 | | 1.23E−06 | 2.33 | 2.33 | 2.06 |
| 203415_at | PDCD6 | NM_013232 | 0879 | Programmed cell death 6 | 1.23E−06 | 1.36 | 1.36 | 2.2 |
| 208866_at | | BF510713 | 0642 | CDNA clone | 1.23E−06 | −1.59 | 1.59 | 2.2 |
| | | | | IMAGE: 4044084 | | | | |
| 212575_at | C19orf6 | BF966155 | 0665 | Chromosome 19 open | 1.27E−06 | 12.23 | 12.23 | 0.38 |
| | | | | reading frame 6 | | | | |
| 225176_at | | AA156754 | 0013 | “CDNA FLJ42149 fis, | 1.30E−06 | −1.4 | 1.4 | 2.96 |
| | | | | clone THYMU1000692” | | | | |
| 227223_at | RBM39 | BE466173 | 0575 | RNA binding motif protein | 1.32E−06 | 2.29 | 2.29 | 2.22 |
| | | | | 39 | | | | |
| 41386_i_at | JMJD3 | AB002344 | 0082 | Jumonji domain | 1.33E−06 | 1.7 | 1.7 | 2.35 |
| | | | | containing 3 | | | | |
| 225995_x_at | “(FAM39DP, | BG178695 | 0675 | “(CXYorf1-related protein, | 1.38E−06 | 1.64 | 1.64 | 2.45 |
| | FLJ00038, | | | Family with sequence | | | | |
| | LOC376475, | | | similarity 39, member D | | | | |
| | LOC727741)” | | | pseudogene)” | | | | |
| 228328_at | KLHL28 | AI982758 | 0311 | Kelch-like 28 (Drosophila) | 1.41E−06 | −1.71 | 1.71 | 2.43 |
| 235409_at | MGA | AU149225 | 0429 | MAX gene associated | 1.41E−06 | 2.4 | 2.4 | 1.89 |
| 200649_at | NUCB1 | BC002356 | 0544 | Nucleobindin 1 | 1.42E−06 | 1.85 | 1.85 | 2.2 |
| 232615_at | | AA632758 | 0034 | Transcribed locus | 1.43E−06 | −2.01 | 2.01 | 3.06 |
| 205882_x_at | ADD3 | AI818488 | 0278 | Adducin 3 (gamma) | 1.44E−06 | −1.46 | 1.46 | 3.28 |
| 228496_s_at | CRIM1 | AW243081 | 0489 | Cysteine rich | 1.44E−06 | −2.14 | 2.14 | 2.18 |
| | | | | transmembrane BMP | | | | |
| | | | | regulator 1 (chordin-like) | | | | |
| 209189_at | FOS | BC004490 | 0549 | V-fos FBJ murine | 1.50E−06 | 3.42 | 3.42 | 2.61 |
| | | | | osteosarcoma viral | | | | |
| | | | | oncogene homolog | | | | |
| 239233_at | KIAA1212 | AA744613 | 0053 | KIAA1212 | 1.53E−06 | −2.29 | 2.29 | 1.4 |
| 224308_s_at | INTS2 | AL136800 | 0393 | Integrator complex subunit 2 | 1.61E−06 | −1.98 | 1.98 | 1.98 |
| 208705_s_at | EIF5 | BG481972 | 0696 | Eukaryotic translation | 1.62E−06 | 1.3 | 1.3 | 2.56 |
| | | | | initiation factor 5 | | | | |
| 218607_s_at | SDAD1 | NM_018115 | 0922 | SDA1 domain containing 1 | 1.63E−06 | 1.52 | 1.52 | 2.24 |
| 200041_s_at | BAT1 | NM_004640 | 0826 | HLA-B associated | 1.71E−06 | 1.29 | 1.29 | 2.94 |
| | | | | transcript 1 | | | | |
| 202850_at | ABCD3 | NM_002858 | 0796 | “ATP-binding cassette, | 1.71E−06 | −1.56 | 1.56 | 2.3 |
| | | | | sub-family D (ALD), | | | | |
| | | | | member 3” | | | | |
| 224562_at | “(LOC644739, | AK025566 | 0357 | “(Similar to Wiskott- | 1.73E−06 | 1.76 | 1.76 | 2.94 |
| | LOC647909, | | | Aldrich syndrome protein | | | | |
| | WASF2)” | | | family member 4 (WASP- | | | | |
| | | | | family protein member 4), | | | | |
| | | | | WAS protein family, | | | | |
| | | | | member 2)” | | | | |
| 222644_s_at | GLT25D1 | AI924150 | 0296 | Glycosyltransferase 25 | 1.80E−06 | 2.01 | 2.01 | 2.09 |
| | | | | domain containing 1 | | | | |
| 212536_at | ATP11B | AB023173 | 0088 | “ATPase, Class VI, type | 1.81E−06 | −1.52 | 1.52 | 2.17 |
| | | | | 11B” | | | | |
| 215269_at | TMEM1 | AI922538 | 0294 | Transmembrane protein 1 | 1.82E−06 | −1.96 | 1.96 | 2.01 |
| 243303_at | | AA811657 | 0064 | | 1.93E−06 | −1.92 | 1.92 | 2.34 |
| 201991_s_at | KIF5B | BF223224 | 0630 | Kinesin family member 5B | 1.95E−06 | −1.36 | 1.36 | 2.75 |
| 213327_s_at | USP12 | AI820101 | 0280 | Ubiquitin specific | 1.97E−06 | −1.58 | 1.58 | 1.97 |
| | | | | peptidase 12 | | | | |
| 213882_at | TM2D1 | AA012917 | 0001 | TM2 domain containing 1 | 1.97E−06 | −1.68 | 1.68 | 1.66 |
| 214715_x_at | ZNF160 | AK024789 | 0348 | Zinc finger protein 160 | 2.00E−06 | −1.65 | 1.65 | 2.37 |
| 225845_at | ZBTB44 | BG253884 | 0681 | Zinc finger and BTB | 2.01E−06 | −1.68 | 1.68 | 2.81 |
| | | | | domain containing 44 | | | | |
| 215529_x_at | DIP2A | AI590053 | 0219 | DIP2 disco-interacting | 2.01E−06 | −1.99 | 1.99 | 1.89 |
| | | | | protein 2 homolog A | | | | |
| | | | | (Drosophila) | | | | |
| 242539_at | LOC730069 | AW665509 | 0523 | Similar to nuclear receptor | 2.04E−06 | −2.21 | 2.21 | 2.33 |
| | | | | binding factor 2 | | | | |
| 203311_s_at | ARF6 | M57763 | 0735 | ADP-ribosylation factor 6 | 2.07E−06 | 1.9 | 1.9 | 2.23 |
| 205854_at | TULP3 | AK024246 | 0342 | Tubby like protein 3 | 2.08E−06 | −1.57 | 1.57 | 1.79 |
| 212042_x_at | “(LOC653949, | BG389744 | 0691 | Ribosomal protein L7 | 2.10E−06 | −1.37 | 1.37 | 3.51 |
| | RPL7, | | | | | | | |
| | hCG_2015956, | | | | | | | |
| | hCG_31916)” | | | | | | | |
| 233369_at | | AU146027 | 0424 | “CDNA FLJ11835 fis, | 2.23E−06 | −1.78 | 1.78 | 2.42 |
| | | | | clone HEMBA1006595” | | | | |
| 212513_s_at | USP33 | AB029020 | 0089 | Ubiquitin specific | 2.27E−06 | −1.31 | 1.31 | 2.52 |
| | | | | peptidase 33 | | | | |
| 218626_at | EIF4ENIF1 | NM_019843 | 0930 | Eukaryotic translation | 2.30E−06 | −1.33 | 1.33 | 2.1 |
| | | | | initiation factor 4E nuclear | | | | |
| | | | | import factor 1 | | | | |
| 208246_x_at | | NM_017618 | 0909 | | 2.31E−06 | −1.63 | 1.63 | 2.29 |
| 224559_at | MALAT1 | AF001540 | 0104 | Metastasis associated | 2.36E−06 | 4.55 | 4.55 | 2.49 |
| | | | | lung adenocarcinoma | | | | |
| | | | | transcript 1 (non-coding | | | | |
| | | | | RNA) | | | | |
| 205312_at | SPI1 | NM_003120 | 0798 | Spleen focus forming virus | 2.41E−06 | 2.77 | 2.77 | 1.91 |
| | | | | (SFFV) proviral integration | | | | |
| | | | | oncogene spi1 | | | | |
| 213318_s_at | BAT3 | BG028844 | 0669 | HLA-B associated | 2.45E−06 | 1.41 | 1.41 | 2.56 |
| | | | | transcript 3 | | | | |
| 212099_at | RHOB | AI263909 | 0179 | “Ras homolog gene | 2.50E−06 | 2.36 | 2.36 | 2.32 |
| | | | | family, member B” | | | | |
| 223131_s_at | TRIM8 | AI925572 | 0299 | Tripartite motif-containing 8 | 2.51E−06 | 1.74 | 1.74 | 1.9 |
| 212487_at | GPATCH8 | AI673812 | 0234 | G patch domain | 2.53E−06 | 2.33 | 2.33 | 1.57 |
| | | | | containing 8 | | | | |
| 200011_s_at | ARF3 | NM_001659 | 0775 | ADP-ribosylation factor 3 | 2.55E−06 | 1.43 | 1.43 | 2.95 |
| 210543_s_at | “(LOC731751, | U34994 | 0981 | “Protein kinase, DNA- | 2.61E−06 | −1.39 | 1.39 | 2.21 |
| | PRKDC)” | | | activated, catalytic | | | | |
| | | | | polypeptide” | | | | |
| 217313_at | | AC004692 | 0098 | | 2.63E−06 | −1.62 | 1.62 | 2.34 |
| 228106_at | C4orf30 | AA031528 | 0004 | Chromosome 4 open | 2.66E−06 | −1.57 | 1.57 | 2.42 |
| | | | | reading frame 30 | | | | |
| 218043_s_at | AZI2 | NM_022461 | 0940 | 5-azacytidine induced 2 | 2.67E−06 | −2.08 | 2.08 | 1.89 |
| 203514_at | MAP3K3 | BF971923 | 0666 | Mitogen-activated protein | 2.67E−06 | −1.52 | 1.52 | 2.21 |
| | | | | kinase kinase kinase 3 | | | | |
| 223295_s_at | LUC7L | BE049621 | 0566 | LUC7-like (S. cerevisiae) | 2.68E−06 | −1.57 | 1.57 | 2.67 |
| 235469_at | MGC40405 | AV744101 | 0457 | Hypothetical protein | 2.73E−06 | −2.48 | 2.48 | 1.95 |
| | | | | MGC40405 | | | | |
| 209440_at | PRPS1 | BC001605 | 0542 | Phosphoribosyl | 2.77E−06 | 1.42 | 1.42 | 2.22 |
| | | | | pyrophosphate synthetase 1 | | | | |
| 227039_at | AKAP13 | AI674926 | 0235 | A kinase (PRKA) anchor | 2.82E−06 | 1.92 | 1.92 | 2.46 |
| | | | | protein 13 | | | | |
| 218499_at | RP6-213H19.1 | NM_016542 | 0904 | Serine/threonine protein | 2.94E−06 | −1.52 | 1.52 | 2.53 |
| | | | | kinase MST4 | | | | |
| 232440_at | ZDHHC13 | AU155198 | 0433 | “Zinc finger, DHHC-type | 2.95E−06 | −1.75 | 1.75 | 2.26 |
| | | | | containing 13” | | | | |
| 209727_at | GM2A | M76477 | 0737 | GM2 ganglioside activator | 2.97E−06 | 5.7 | 5.7 | 1.01 |
| 241891_at | | T92908 | 0972 | | 2.97E−06 | −1.82 | 1.82 | 2.64 |
| 227525_at | GLCCI1 | AA058770 | 0006 | Glucocorticoid induced | 3.10E−06 | −1.75 | 1.75 | 2.66 |
| | | | | transcript 1 | | | | |
| 228088_at | | AI092265 | 0170 | “CDNA FLJ31513 fis, | 3.17E−06 | −1.49 | 1.49 | 2.11 |
| | | | | clone NT2RI1000127” | | | | |
| 242362_at | | AI797788 | 0269 | | 3.17E−06 | −2.27 | 2.27 | 2.69 |
| 34478_at | RAB11B | X79780 | 1009 | “RAB11B, member RAS | 3.23E−06 | 2.63 | 2.63 | 1.27 |
| | | | | oncogene family” | | | | |
| 223135_s_at | BBX | AL136769 | 0392 | Bobby sox homolog | 3.25E−06 | 1.41 | 1.41 | 2.47 |
| | | | | (Drosophila) | | | | |
| 225780_at | RSC1A1 | AL565415 | 0418 | “Regulatory solute carrier | 3.26E−06 | −1.59 | 1.59 | 2.5 |
| | | | | protein, family 1, member | | | | |
| | | | | 1” | | | | |
| 211791_s_at | KCNAB2 | AF044253 | 0112 | “Potassium voltage-gated | 3.27E−06 | 4.73 | 4.73 | 1.31 |
| | | | | channel, shaker-related | | | | |
| | | | | subfamily, beta member | | | | |
| | | | | 2” | | | | |
| 204252_at | CDK2 | M68520 | 0736 | Cyclin-dependent kinase 2 | 3.29E−06 | −1.38 | 1.38 | 2.06 |
| 202420_s_at | DHX9 | NM_001357 | 0771 | DEAH (Asp-Glu-Ala-His) | 3.31E−06 | −1.29 | 1.29 | 2.35 |
| | | | | box polypeptide 9 | | | | |
| 223138_s_at | DHX36 | AI937206 | 0304 | DEAH (Asp-Glu-Ala-His) | 3.31E−06 | 1.69 | 1.69 | 2.21 |
| | | | | box polypeptide 36 | | | | |
| 240452_at | GSPT1 | AA580082 | 0030 | G1 to S phase transition 1 | 3.38E−06 | −2.24 | 2.24 | 2.5 |
| 202082_s_at | SEC14L1 | AV748469 | 0458 | SEC14-like 1 (S. cerevisiae) | 3.38E−06 | 1.72 | 1.72 | 1.74 |
| 213038_at | IBRDC3 | AL031602 | 0365 | IBR domain containing 3 | 3.63E−06 | 1.55 | 1.55 | 1.95 |
| 232038_at | C6orf170 | AI052103 | 0162 | Chromosome 6 open | 3.76E−06 | −2 | 2 | 1.73 |
| | | | | reading frame 170 | | | | |
| 229036_at | TNRC6B | AI681177 | 0238 | “(Transcribed locus, | 3.80E−06 | 1.83 | 1.83 | 2.32 |
| | | | | Trinucleotide repeat | | | | |
| | | | | containing 6B)” | | | | |
| 229235_at | | AI983432 | 0312 | Transcribed locus | 3.81E−06 | −1.53 | 1.53 | 2.59 |
| 226412_at | C6orf111 | N66397 | 0752 | Chromosome 6 open | 3.84E−06 | −1.63 | 1.63 | 2.76 |
| | | | | reading frame 111 | | | | |
| 212637_s_at | WWP1 | AU155187 | 0432 | WW domain containing E3 | 3.95E−06 | −1.64 | 1.64 | 1.62 |
| | | | | ubiquitin protein ligase 1 | | | | |
| 220296_at | | NM_024564 | 0947 | | 3.99E−06 | −1.96 | 1.96 | 2 |
| 240695_at | | AA876138 | 0075 | | 4.03E−06 | 1.68 | 1.68 | 1.78 |
| 224759_s_at | C12orf23 | AK001731 | 0320 | Chromosome 12 open | 4.20E−06 | −1.63 | 1.63 | 2.48 |
| | | | | reading frame 23 | | | | |
| 222794_x_at | PAPD1 | AK022188 | 0331 | PAP associated domain | 4.32E−06 | −1.41 | 1.41 | 2.51 |
| | | | | containing 1 | | | | |
| 224974_at | SUDS3 | AK024460 | 0344 | Suppressor of defective | 4.36E−06 | −1.94 | 1.94 | 2.27 |
| | | | | silencing 3 homolog (S. cerevisiae) | | | | |
| 242650_at | | AW298590 | 0503 | Transcribed locus | 4.42E−06 | −2.21 | 2.21 | 1.84 |
| 212921_at | SMYD2 | AF070592 | 0121 | SET and MYND domain | 4.45E−06 | −1.74 | 1.74 | 1.88 |
| | | | | containing 2 | | | | |
| 217717_s_at | YWHAB | BF246499 | 0631 | “Tyrosine 3- | 4.47E−06 | 1.58 | 1.58 | 2.51 |
| | | | | monooxygenase/tryptophan | | | | |
| | | | | 5-monooxygenase | | | | |
| | | | | activation protein, beta | | | | |
| | | | | polypeptide” | | | | |
| 221419_s_at | | NM_013307 | 0880 | | 4.56E−06 | 2.08 | 2.08 | 2.03 |
| 204809_at | CLPX | NM_006660 | 0866 | ClpX caseinolytic | 4.61E−06 | −1.37 | 1.37 | 1.99 |
| | | | | peptidase X homolog (E. coli) | | | | |
| 201409_s_at | PPP1CB | NM_002709 | 0794 | “Protein phosphatase 1, | 4.64E−06 | −1.38 | 1.38 | 2.43 |
| | | | | catalytic subunit, beta | | | | |
| | | | | isoform” | | | | |
| 209829_at | C6orf32 | AB002384 | 0083 | Chromosome 6 open | 4.67E−06 | −1.61 | 1.61 | 2.89 |
| | | | | reading frame 32 | | | | |
| 225761_at | PAPD4 | AI434509 | 0203 | PAP associated domain | 4.74E−06 | −1.42 | 1.42 | 2.78 |
| | | | | containing 4 | | | | |
| 228471_at | ANKRD44 | AA744636 | 0054 | Ankyrin repeat domain 44 | 4.84E−06 | −1.71 | 1.71 | 2.75 |
| 201526_at | ARF5 | NM_001662 | 0776 | ADP-ribosylation factor 5 | 4.87E−06 | 1.49 | 1.49 | 2.21 |
| 241435_at | | AA702930 | 0044 | | 5.03E−06 | −2.16 | 2.16 | 3.23 |
| 227567_at | AMZ2 | AL524467 | 0407 | Archaemetzincins-2 | 5.11E−06 | −1.69 | 1.69 | 2.53 |
| 209563_x_at | CALM1 | BC000454 | 0537 | “Calmodulin 1 | 5.22E−06 | 1.68 | 1.68 | 2.84 |
| | | | | (phosphorylase kinase, | | | | |
| | | | | delta)” | | | | |
| 242518_at | | AA748423 | 0056 | | 5.26E−06 | 1.6 | 1.6 | 1.87 |
| 239049_at | | BF514509 | 0644 | | 5.31E−06 | −1.85 | 1.85 | 2.38 |
| 209024_s_at | SYNCRIP | AI472757 | 0209 | “Synaptotagmin binding, | 5.50E−06 | 1.48 | 1.48 | 2.14 |
| | | | | cytoplasmic RNA | | | | |
| | | | | interacting protein” | | | | |
| 211948_x_at | BAT2D1 | BG261071 | 0685 | BAT2 domain containing 1 | 5.57E−06 | 2.77 | 2.77 | 2.01 |
| 228446_at | KIAA2026 | BF062203 | 0616 | KIAA2026 | 5.67E−06 | −1.44 | 1.44 | 2.53 |
| 229541_at | | BE669703 | 0583 | “CDNA FLJ38918 fis, | 5.86E−06 | 1.96 | 1.96 | 1.97 |
| | | | | clone NT2NE2010633” | | | | |
| 237330_at | | AA603494 | 0033 | Transcribed locus | 5.89E−06 | −2.48 | 2.48 | 1.96 |
| 217842_at | LUC7L2 | NM_016019 | 0893 | LUC7-like 2 (S. cerevisiae) | 5.90E−06 | −1.51 | 1.51 | 1.79 |
| 201828_x_at | FAM127A | NM_003928 | 0809 | “Family with sequence | 5.96E−06 | 1.27 | 1.27 | 2.33 |
| | | | | similarity 127, member A” | | | | |
| 229366_at | | BG149765 | 0673 | Transcribed locus | 5.98E−06 | −1.33 | 1.33 | 2.34 |
| 201986_at | THRAP1 | AB011165 | 0084 | Thyroid hormone receptor | 6.02E−06 | −1.46 | 1.46 | 2.51 |
| | | | | associated protein 1 | | | | |
| 202373_s_at | RAB3GAP2 | AF255648 | 0148 | RAB3 GTPase activating | 6.03E−06 | −1.34 | 1.34 | 2.46 |
| | | | | protein subunit 2 (non- | | | | |
| | | | | catalytic) | | | | |
| 241906_at | | BF001773 | 0612 | | 6.07E−06 | −2.1 | 2.1 | 2.45 |
| 201318_s_at | “(MRCL3, | NM_006471 | 0863 | “(Myosin regulatory light | 6.16E−06 | −1.33 | 1.33 | 3.25 |
| | MRLC2)” | | | chain MRCL3, Myosin | | | | |
| | | | | regulatory light chain | | | | |
| | | | | MRLC2)” | | | | |
| 207941_s_at | RBM39 | NM_004902 | 0830 | RNA binding motif protein | 6.17E−06 | −1.34 | 1.34 | 2.85 |
| | | | | 39 | | | | |
| 229586_at | CHD9 | AW300405 | 0505 | Chromodomain helicase | 6.33E−06 | 1.64 | 1.64 | 2.01 |
| | | | | DNA binding protein 9 | | | | |
| 217336_at | | AL118510 | 0385 | | 6.34E−06 | −1.68 | 1.68 | 2.28 |
| 209648_x_at | SOCS5 | AL136896 | 0394 | Suppressor of cytokine | 6.36E−06 | −1.86 | 1.86 | 1.59 |
| | | | | signaling 5 | | | | |
| 226664_at | TBC1D20 | AL121747 | 0388 | “TBC1 domain family, | 6.40E−06 | 1.39 | 1.39 | 2.3 |
| | | | | member 20” | | | | |
| 225786_at | LOC284702 | AI440495 | 0204 | Hypothetical protein | 6.49E−06 | −1.6 | 1.6 | 2.45 |
| | | | | LOC284702 | | | | |
| 208635_x_at | NACA | BF976260 | 0667 | Nascent-polypeptide- | 6.53E−06 | −1.24 | 1.24 | 3.71 |
| | | | | associated complex alpha | | | | |
| | | | | polypeptide | | | | |
| 223444_at | SENP7 | AL136599 | 0391 | SUMO1/sentrin specific | 6.56E−06 | −1.88 | 1.88 | 2.36 |
| | | | | peptidase 7 | | | | |
| 208975_s_at | KPNB1 | L38951 | 0725 | Karyopherin (importin) | 6.58E−06 | −1.54 | 1.54 | 2.17 |
| | | | | beta 1 | | | | |
| 208935_s_at | LGALS8 | L78132 | 0727 | “Lectin, galactoside- | 6.59E−06 | −1.66 | 1.66 | 2.18 |
| | | | | binding, soluble, 8 | | | | |
| | | | | (galectin 8)” | | | | |
| 200847_s_at | TMEM66 | NM_016127 | 0895 | Transmembrane protein | 6.65E−06 | −1.29 | 1.29 | 3.1 |
| | | | | 66 | | | | |
| 218247_s_at | RKHD2 | NM_016626 | 0906 | Ring finger and KH | 6.67E−06 | −1.93 | 1.93 | 2.32 |
| | | | | domain containing 2 | | | | |
| 227121_at | | BF476076 | 0640 | MRNA; cDNA | 6.71E−06 | −1.51 | 1.51 | 2.61 |
| | | | | DKFZp586K1922 (from | | | | |
| | | | | clone DKFZp586K1922) | | | | |
| 235984_at | | AL036662 | 0367 | Transcribed locus | 6.72E−06 | 1.85 | 1.85 | 2 |
| 212069_s_at | KIAA0515 | AK026025 | 0360 | KIAA0515 | 6.72E−06 | 1.73 | 1.73 | 1.89 |
| 243649_at | | AI678692 | 0236 | | 6.73E−06 | −1.82 | 1.82 | 2.15 |
| 238549_at | | AI420611 | 0201 | Transcribed locus | 6.84E−06 | −1.43 | 1.43 | 2.5 |
| 233093_s_at | BIRC6 | AK023788 | 0339 | Baculoviral IAP repeat- | 6.88E−06 | −1.25 | 1.25 | 2.93 |
| | | | | containing 6 (apollon) | | | | |
| 221749_at | YTHDF3 | AU157915 | 0439 | “YTH domain family, | 6.98E−06 | −1.61 | 1.61 | 2.37 |
| | | | | member 3” | | | | |
| 242726_at | | BF221850 | 0629 | Transcribed locus | 7.03E−06 | −2 | 2 | 2.11 |
| 242195_x_at | NUMBL | BE350811 | 0573 | Numb homolog | 7.11E−06 | −1.48 | 1.48 | 2.77 |
| | | | | (Drosophila)-like | | | | |
| 204020_at | PURA | BF739943 | 0658 | Purine-rich element | 7.23E−06 | −1.4 | 1.4 | 2.5 |
| | | | | binding protein A | | | | |
| 208694_at | PRKDC | U47077 | 0984 | “Protein kinase, DNA- | 7.38E−06 | −1.5 | 1.5 | 2.12 |
| | | | | activated, catalytic | | | | |
| | | | | polypeptide” | | | | |
| 200047_s_at | YY1 | NM_003403 | 0802 | YY1 transcription factor | 7.42E−06 | −1.29 | 1.29 | 2.83 |
| 228097_at | MYLIP | AW292746 | 0497 | Myosin regulatory light | 7.43E−06 | −1.57 | 1.57 | 2.55 |
| | | | | chain interacting protein | | | | |
| 213605_s_at | | AL049987 | 0376 | MRNA; cDNA | 7.49E−06 | −2.47 | 2.47 | 2.16 |
| | | | | DKFZp564F112 (from | | | | |
| | | | | clone DKFZp564F112) | | | | |
| 218259_at | MKL2 | NM_014048 | 0881 | MKL/myocardin-like 2 | 7.81E−06 | −1.57 | 1.57 | 2.02 |
| 240338_at | LRAP | AI807341 | 0272 | Leukocyte-derived | 7.89E−06 | −2.06 | 2.06 | 1.76 |
| | | | | arginine aminopeptidase | | | | |
| 226366_at | SHPRH | AI828221 | 0285 | SNF2 histone linker PHD | 7.99E−06 | −1.32 | 1.32 | 2.24 |
| | | | | RING helicase | | | | |
| 218237_s_at | SLC38A1 | NM_030674 | 0955 | “Solute carrier family 38, | 8.02E−06 | −1.91 | 1.91 | 2.93 |
| | | | | member 1” | | | | |
| 201473_at | JUNB | NM_002229 | 0783 | Jun B proto-oncogene | 8.04E−06 | 1.97 | 1.97 | 2.54 |
| 226786_at | RFX1 | BF507952 | 0641 | “Regulatory factor X, 1 | 8.06E−06 | 1.46 | 1.46 | 2.56 |
| | | | | (influences HLA class II | | | | |
| | | | | expression)” | | | | |
| 214948_s_at | | AL050136 | 0377 | MRNA; cDNA | 8.09E−06 | −1.4 | 1.4 | 2.26 |
| | | | | DKFZp586L141 (from | | | | |
| | | | | clone DKFZp586L141) | | | | |
| 225672_at | GOLGA2 | AL514295 | 0405 | “Golgi autoantigen, golgin | 8.22E−06 | 1.32 | 1.32 | 2.53 |
| | | | | subfamily a, 2” | | | | |
| 229787_s_at | OGT | AI742039 | 0251 | O-linked N- | 8.27E−06 | −2.15 | 2.15 | 2.41 |
| | | | | acetylglucosamine | | | | |
| | | | | (GlcNAc) transferase | | | | |
| | | | | (UDP-N- | | | | |
| | | | | acetylglucosamine:polypeptide- | | | | |
| | | | | N- | | | | |
| | | | | acetylglucosaminyl | | | | |
| | | | | transferase) | | | | |
| 202253_s_at | DNM2 | NM_004945 | 0832 | Dynamin 2 | 8.34E−06 | 1.63 | 1.63 | 1.93 |
| 225564_at | SPATA13 | AW269397 | 0493 | Spermatogenesis | 8.50E−06 | −1.7 | 1.7 | 2.97 |
| | | | | associated 13 | | | | |
| 218967_s_at | PTER | NM_030664 | 0954 | Phosphotriesterase | 8.54E−06 | −1.53 | 1.53 | 2.11 |
| | | | | related | | | | |
| 217007_s_at | ADAM15 | AK000667 | 0316 | ADAM metallopeptidase | 8.61E−06 | 4.58 | 4.58 | 0.88 |
| | | | | domain 15 (metargidin) | | | | |
| 228250_at | FNIP1 | AW263086 | 0491 | Folliculin interacting | 8.65E−06 | 2.39 | 2.39 | 1.78 |
| | | | | protein 1 | | | | |
| 212291_at | HIPK1 | AI393355 | 0199 | Homeodomain interacting | 8.65E−06 | 1.96 | 1.96 | 2.07 |
| | | | | protein kinase 1 | | | | |
| 203203_s_at | KRR1 | NM_007043 | 0872 | “KRR1, small subunit | 8.67E−06 | −1.64 | 1.64 | 1.93 |
| | | | | (SSU) processome | | | | |
| | | | | component, homolog | | | | |
| | | | | (yeast)” | | | | |
| 229470_at | FAM105B | AW451634 | 0509 | “Family with sequence | 8.88E−06 | −1.53 | 1.53 | 2.41 |
| | | | | similarity 105, member B” | | | | |
| 224698_at | FAM62B | AB033054 | 0090 | Family with sequence | 8.90E−06 | −1.58 | 1.58 | 2.83 |
| | | | | similarity 62 (C2 domain | | | | |
| | | | | containing) member B | | | | |
| 244061_at | | AI510829 | 0213 | | 8.91E−06 | −2.35 | 2.35 | 2.44 |
| 204075_s_at | KIAA0562 | NM_014704 | 0887 | KIAA0562 | 9.05E−06 | −2.13 | 2.13 | 1.39 |
| 217019_at | | AL137162 | 0395 | | 9.06E−06 | −2.35 | 2.35 | 1.82 |
| 218600_at | LIMD2 | NM_030576 | 0953 | LIM domain containing 2 | 9.07E−06 | 1.85 | 1.85 | 2.01 |
| 213606_s_at | ARHGDIA | AI571798 | 0218 | Rho GDP dissociation | 9.08E−06 | 2.93 | 2.93 | 1.41 |
| | | | | inhibitor (GDI) alpha | | | | |
| 201260_s_at | SYPL1 | NM_006754 | 0869 | Synaptophysin-like 1 | 9.26E−06 | −1.5 | 1.5 | 2.48 |
| 234340_at | | AK021431 | 0324 | “CDNA FLJ11369 fis, | 9.44E−06 | −1.75 | 1.75 | 1.7 |
| | | | | clone HEMBA1000338” | | | | |
| 207686_s_at | CASP8 | NM_001228 | 0770 | “Caspase 8, apoptosis- | 9.51E−06 | 2.19 | 2.19 | 1.79 |
| | | | | related cysteine | | | | |
| | | | | peptidase” | | | | |
| 201332_s_at | STAT6 | NM_003153 | 0799 | “Signal transducer and | 9.57E−06 | 1.49 | 1.49 | 2.01 |
| | | | | activator of transcription 6, | | | | |
| | | | | interleukin-4 induced” | | | | |
| 203388_at | ARRB2 | NM_004313 | 0819 | “Arrestin, beta 2” | 9.59E−06 | 1.54 | 1.54 | 2.66 |
| 204275_at | SOLH | AI796687 | 0268 | Small optic lobes homolog | 9.61E−06 | 1.51 | 1.51 | 1.72 |
| | | | | (Drosophila) | | | | |
| 238057_at | USP45 | AW195800 | 0487 | Ubiquitin specific | 9.61E−06 | −2.28 | 2.28 | 1.91 |
| | | | | peptidase 45 | | | | |
| 242352_at | NIPBL | AW272262 | 0494 | Nipped-B homolog | 9.63E−06 | 2.68 | 2.68 | 1.78 |
| | | | | (Drosophila) | | | | |
| 212846_at | RRP1B | AA811192 | 0063 | KIAA0179 | 9.81E−06 | −1.28 | 1.28 | 2.51 |
| 212090_at | GRINA | AL571424 | 0420 | “Glutamate receptor, | 9.90E−06 | 1.94 | 1.94 | 1.99 |
| | | | | ionotropic, N-methyl D- | | | | |
| | | | | asparate-associated | | | | |
| | | | | protein 1 (glutamate | | | | |
| | | | | binding)” | | | | |
| 227636_at | THAP5 | BG500677 | 0698 | THAP domain containing 5 | 9.92E−06 | −1.73 | 1.73 | 2.29 |
| 209379_s_at | KIAA1128 | AF241785 | 0147 | KIAA1128 | 9.94E−06 | −1.5 | 1.5 | 2.33 |
| 230180_at | | AA521056 | 0025 | | 9.99E−06 | 2.56 | 2.56 | 1.96 |
| 217489_s_at | IL6R | S72848 | 0968 | Interleukin 6 receptor | 1.01E−05 | 2.12 | 2.12 | 1.44 |
| 200014_s_at | “(HNRPC, | NM_004500 | 0824 | Heterogeneous nuclear | 1.03E−05 | −1.21 | 1.21 | 2.71 |
| | hCG_1641229)” | | | ribonucleoprotein C | | | | |
| | | | | (C1/C2) | | | | |
| 221628_s_at | N-PAC | AF326966 | 0155 | Cytokine-like nuclear | 1.03E−05 | 2.06 | 2.06 | 1.63 |
| | | | | factor n-pac | | | | |
| 214594_x_at | ATP8B1 | BG252666 | 0680 | “ATPase, Class I, type 8B, | 1.05E−05 | −2.44 | 2.44 | 2.17 |
| | | | | member 1” | | | | |
| 218528_s_at | RNF38 | NM_022781 | 0941 | Ring finger protein 38 | 1.05E−05 | −1.27 | 1.27 | 2.49 |
| 223494_at | MGEA5 | AF307332 | 0152 | Meningioma expressed | 1.08E−05 | −1.49 | 1.49 | 3.22 |
| | | | | antigen 5 (hyaluronidase) | | | | |
| 234260_at | | AL122039 | 0390 | MRNA; cDNA | 1.09E−05 | −2.06 | 2.06 | 1.99 |
| | | | | DKFZp434E0572 (from | | | | |
| | | | | clone DKFZp434E0572) | | | | |
| 203104_at | CSF1R | NM_005211 | 0838 | “Colony stimulating factor | 1.09E−05 | 1.96 | 1.96 | 2.55 |
| | | | | 1 receptor, formerly | | | | |
| | | | | McDonough feline | | | | |
| | | | | sarcoma viral (v-fms) | | | | |
| | | | | oncogene homolog” | | | | |
| 221755_at | EHBP1L1 | BG334196 | 0688 | EH domain binding protein | 1.10E−05 | 1.88 | 1.88 | 1.68 |
| | | | | 1-like 1 | | | | |
| 200976_s_at | TAX1BP1 | NM_006024 | 0850 | Tax1 (human T-cell | 1.11E−05 | −1.26 | 1.26 | 2.84 |
| | | | | leukemia virus type I) | | | | |
| | | | | binding protein 1 | | | | |
| 212297_at | ATP13A3 | BF218804 | 0628 | ATPase type 13A3 | 1.12E−05 | −1.73 | 1.73 | 2 |
| 208841_s_at | G3BP2 | AB014560 | 0086 | GTPase activating protein | 1.12E−05 | −1.37 | 1.37 | 2.55 |
| | | | | (SH3 domain) binding | | | | |
| | | | | protein 2 | | | | |
| 200632_s_at | NDRG1 | NM_006096 | 0853 | N-myc downstream | 1.13E−05 | 1.38 | 1.38 | 2.35 |
| | | | | regulated gene 1 | | | | |
| 215383_x_at | SPG21 | AL137312 | 0397 | “Spastic paraplegia 21, | 1.13E−05 | −1.61 | 1.61 | 2.29 |
| | | | | maspardin (autosomal | | | | |
| | | | | recessive, Mast | | | | |
| | | | | syndrome)” | | | | |
| 235493_at | | AI927329 | 0300 | Transcribed locus | 1.15E−05 | −1.86 | 1.86 | 2.33 |
| 236614_at | LOC729683 | AW006288 | 0463 | Hypothetical protein | 1.15E−05 | 1.36 | 1.36 | 2.25 |
| | | | | LOC729683 | | | | |
| 209273_s_at | ISCA1 | BG387555 | 0690 | Iron-sulfur cluster | 1.16E−05 | −1.44 | 1.44 | 2.16 |
| | | | | assembly 1 homolog (S. cerevisiae) | | | | |
| 227621_at | WTAP | BE464729 | 0574 | Wilms tumor 1 associated | 1.18E−05 | −1.37 | 1.37 | 3.2 |
| | | | | protein | | | | |
| 225431_x_at | ACY1L2 | BE779764 | 0596 | Aminoacylase 1-like 2 | 1.18E−05 | −2.17 | 2.17 | 2.43 |
| 235879_at | | AI697540 | 0245 | Transcribed locus | 1.20E−05 | −2.13 | 2.13 | 2.94 |
| 226825_s_at | TMEM165 | AW665624 | 0524 | Transmembrane protein | 1.22E−05 | 1.67 | 1.67 | 2.76 |
| | | | | 165 | | | | |
| 218143_s_at | SCAMP2 | NM_005697 | 0843 | Secretory carrier | 1.22E−05 | 1.46 | 1.46 | 2.38 |
| | | | | membrane protein 2 | | | | |
| 203890_s_at | DAPK3 | BF686824 | 0655 | Death-associated protein | 1.24E−05 | 1.7 | 1.7 | 1.41 |
| | | | | kinase 3 | | | | |
| 208313_s_at | SF1 | NM_004630 | 0825 | Splicing factor 1 | 1.27E−05 | 1.4 | 1.4 | 2.67 |
| 211352_s_at | NCOA3 | U80737 | 0991 | Nuclear receptor | 1.28E−05 | 1.88 | 1.88 | 1.74 |
| | | | | coactivator 3 | | | | |
| 224579_at | SLC38A1 | BF247552 | 0632 | “Solute carrier family 38, | 1.28E−05 | −1.46 | 1.46 | 3.14 |
| | | | | member 1” | | | | |
| 201752_s_at | ADD3 | AI763123 | 0262 | Adducin 3 (gamma) | 1.28E−05 | −1.44 | 1.44 | 3.26 |
| 231747_at | CYSLTR1 | NM_006639 | 0864 | Cysteinyl leukotriene | 1.30E−05 | 1.73 | 1.73 | 2.57 |
| | | | | receptor 1 | | | | |
| 208319_s_at | RBM3 | NM_006743 | 0868 | “RNA binding motif | 1.30E−05 | −1.66 | 1.66 | 2.61 |
| | | | | (RNP1, RRM) protein 3” | | | | |
| 227159_at | GHDC | AI827015 | 0284 | GH3 domain containing | 1.33E−05 | 1.45 | 1.45 | 2.3 |
| 230387_at | | AL038450 | 0371 | Transcribed locus | 1.33E−05 | −1.75 | 1.75 | 2.34 |

TABLE 2B

| | Known | Genbank | SEQ | | Mean Signal | Log10 | Mean | Top 42 |
|---|---|---|---|---|---|---|---|---|
| Fragment | Genes: Gene | Accession | ID | Sequence Clusters: | Control | Mean (MS | Signal MS | (FC |
| Name | Symbol | No. | NO. | Cluster Title | Samples | Samples) | Samples | Filtered) |
| 214847_s_at | GPSM3 | BG111168 | 0671 | “G-protein signalling | 158.4893192 | 2.46 | 288.4031503 | |
| | | | | modulator 3 (AGS3-like, | | | | |
| | | | | C. elegans)” | | | | |
| 227510_x_at | | AL037917 | 0369 | Transcribed locus | 194.98446 | 3.09 | 1230.268771 | 1 |
| 223578_x_at | MALAT1 | AF113016 | 0131 | Metastasis associated | 67.60829754 | 2.36 | 229.0867653 | 2 |
| | | | | lung adenocarcinoma | | | | |
| | | | | transcript 1 (non-coding | | | | |
| | | | | RNA) | | | | |
| 232431_at | | AI934556 | 0302 | “Glucocorticoid receptor | 331.1311215 | 2.08 | 120.2264435 | 3 |
| | | | | alpha mRNA, variant 3′ | | | | |
| | | | | UTR” | | | | |
| 219878_s_at | KLF13 | NM_015995 | 0892 | Kruppel-like factor 13 | 2.511886432 | 1.53 | 33.88441561 | 4 |
| 214352_s_at | KRAS | BF673699 | 0652 | V-Ki-ras2 Kirsten rat | 114.8153621 | 2.41 | 257.0395783 | 5 |
| | | | | sarcoma viral oncogene | | | | |
| | | | | homolog | | | | |
| 228582_x_at | MALAT1 | AI475544 | 0211 | Metastasis associated | 245.4708916 | 3.37 | 2344.228815 | 6 |
| | | | | lung adenocarcinoma | | | | |
| | | | | transcript 1 (non-coding | | | | |
| | | | | RNA) | | | | |
| 243981_at | | AI763206 | 0263 | Transcribed locus | 316.227766 | 2.12 | 131.8256739 | 7 |
| 201753_s_at | ADD3 | NM_019903 | 0931 | Adducin 3 (gamma) | 1445.439771 | 2.89 | 776.2471166 | |
| 211074_at | FOLR1 | AF000381 | 0102 | Folate receptor 1 (adult) | 144.5439771 | 2.54 | 346.7368505 | 8 |
| 225956_at | LOC153222 | AL565238 | 0417 | Adult retina protein | 741.3102413 | 2.7 | 501.1872336 | |
| 223161_at | KIAA1147 | AA029331 | 0003 | KIAA1147 | 186.2087137 | 2.63 | 426.5795188 | 9 |
| 218389_s_at | APH1A | NM_016022 | 0894 | Anterior pharynx defective | 181.9700859 | 2.44 | 275.4228703 | |
| | | | | 1 homolog A (C. elegans) | | | | |
| 236924_at | GLMN | AA814383 | 0065 | “Glomulin, FKBP | 112.2018454 | 1.66 | 45.70881896 | 10 |
| | | | | associated protein” | | | | |
| 226148_at | ZBTB44 | AU144305 | 0422 | Zinc finger and BTB | 912.0108394 | 2.71 | 512.861384 | |
| | | | | domain containing 44 | | | | |
| 219696_at | FLJ20054 | NM_019049 | 0927 | Hypothetical protein | 151.3561248 | 2.02 | 104.7128548 | |
| | | | | FLJ20054 | | | | |
| 223940_x_at | | AF132202 | 0134 | | 281.8382931 | 2.92 | 831.7637711 | 11 |
| 225889_at | AEBP2 | BF475280 | 0639 | AE binding protein 2 | 489.7788194 | 2.41 | 257.0395783 | |
| 214697_s_at | ROD1 | AW190873 | 0485 | ROD1 regulator of | 79.43282347 | 2.26 | 181.9700859 | 12 |
| | | | | differentiation 1 (S. pombe) | | | | |
| 208610_s_at | SRRM2 | AI655799 | 0233 | Serine/arginine repetitive | 52.48074602 | 2.22 | 165.9586907 | 13 |
| | | | | matrix 2 | | | | |
| 241751_at | OFD1 | AW292752 | 0498 | Oral-facial-digital | 147.9108388 | 1.79 | 61.65950019 | 14 |
| | | | | syndrome 1 | | | | |
| 204049_s_at | PHACTR2 | NM_014721 | 0889 | Phosphatase and actin | 213.796209 | 2.1 | 125.8925412 | |
| | | | | regulator 2 | | | | |
| 225377_at | C9orf86 | BE783949 | 0597 | Chromosome 9 open | 186.2087137 | 2.55 | 354.8133892 | |
| | | | | reading frame 86 | | | | |
| 225139_at | RBM35B | AW070424 | 0473 | RNA binding motif protein | 1000 | 2.8 | 630.9573445 | |
| | | | | 35B | | | | |
| 216177_at | LOC391132 | AW582267 | 0519 | Similar to 60S ribosomal | 154.8816619 | 1.92 | 83.17637711 | |
| | | | | protein L29 (P23) | | | | |
| 242232_at | | AI652864 | 0232 | | 50.11872336 | 2.03 | 107.1519305 | 15 |
| 200734_s_at | ARF3 | BG341906 | 0689 | ADP-ribosylation factor 3 | 177.827941 | 2.5 | 316.227766 | |
| 211716_x_at | ARHGDIA | BC005851 | 0554 | Rho GDP dissociation | 416.8693835 | 2.84 | 691.8309709 | |
| | | | | inhibitor (GDI) alpha | | | | |
| 215460_x_at | BRD1 | AL080149 | 0380 | Bromodomain containing 1 | 177.827941 | 2.11 | 128.8249552 | |
| 222576_s_at | EIF2C1 | AW071829 | 0475 | “Eukaryotic translation | 138.0384265 | 2.42 | 263.0267992 | |
| | | | | initiation factor 2C, 1” | | | | |
| 230141_at | ARID4A | AI640594 | 0226 | AT rich interactive domain | 154.8816619 | 1.92 | 83.17637711 | |
| | | | | 4A (RBP1-like) | | | | |
| 227740_at | UHMK1 | AW173222 | 0481 | U2AF homology motif | 234.4228815 | 2.76 | 575.4399373 | 16 |
| | | | | (UHM) kinase 1 | | | | |
| 204805_s_at | H1FX | NM_006026 | 0851 | “H1 histone family, | 181.9700859 | 2.63 | 426.5795188 | 17 |
| | | | | member X” | | | | |
| 208624_s_at | EIF4G1 | BE966878 | 0610 | “Eukaryotic translation | 75.8577575 | 2.03 | 107.1519305 | |
| | | | | initiation factor 4 gamma, | | | | |
| | | | | 1” | | | | |
| 243612_at | NSD1 | AL526448 | 0408 | Nuclear receptor binding | 154.8816619 | 1.77 | 58.88436554 | 18 |
| | | | | SET domain protein 1 | | | | |
| 201167_x_at | ARHGDIA | D13989 | 0704 | Rho GDP dissociation | 52.48074602 | 2.11 | 128.8249552 | 19 |
| | | | | inhibitor (GDI) alpha | | | | |
| 241786_at | | AI380514 | 0198 | Transcribed locus | 407.3802778 | 2.25 | 177.827941 | 20 |
| 238430_x_at | SLFN5 | AI923675 | 0295 | Schlafen family member 5 | 371.5352291 | 3 | 1000 | 21 |
| 202102_s_at | BRD4 | BF718610 | 0657 | Bromodomain containing 4 | 208.9296131 | 2.51 | 323.5936569 | |
| 201737_s_at | MARCH6 | NM_005885 | 0847 | Membrane-associated | 338.8441561 | 2.28 | 190.5460718 | |
| | | | | ring finger (C3HC4) 6 | | | | |
| 229926_at | | AI633738 | 0225 | Transcribed locus | 109.6478196 | 1.83 | 67.60829754 | |
| 230961_at | | BE856980 | 0603 | | 117.4897555 | 1.76 | 57.54399373 | 22 |
| 201996_s_at | SPEN | AL524033 | 0406 | “Spen homolog, | 35.48133892 | 1.96 | 91.20108394 | 23 |
| | | | | transcriptional regulator | | | | |
| | | | | (Drosophila)” | | | | |
| 231858_x_at | DKFZp761E198 | BC004895 | 0552 | DKFZp761E198 protein | 104.7128548 | 2.28 | 190.5460718 | |
| 200608_s_at | RAD21 | NM_006265 | 0855 | RAD21 homolog (S. pombe) | 407.3802778 | 2.45 | 281.8382931 | |
| 201168_x_at | ARHGDIA | NM_004309 | 0818 | Rho GDP dissociation | 234.4228815 | 2.63 | 426.5795188 | |
| | | | | inhibitor (GDI) alpha | | | | |
| 224631_at | ZFP91 | AA758013 | 0058 | Zinc finger protein 91 | 104.7128548 | 2.31 | 204.1737945 | |
| | | | | homolog (mouse) | | | | |
| 225563_at | PAN3 | AI970788 | 0309 | PAN3 polyA specific | 1071.519305 | 2.82 | 660.693448 | |
| | | | | ribonuclease subunit | | | | |
| | | | | homolog (S. cerevisiae) | | | | |
| 222133_s_at | PHF20L1 | AK022280 | 0332 | PHD finger protein 20-like 1 | 131.8256739 | 1.91 | 81.28305162 | |
| 237768_x_at | | AA825925 | 0066 | | 371.5352291 | 2.21 | 162.1810097 | 24 |
| 208677_s_at | BSG | AL550657 | 0415 | Basigin (Ok blood group) | 83.17637711 | 2.27 | 186.2087137 | 25 |
| 224572_s_at | IRF2BP2 | BG485163 | 0697 | Interferon regulatory factor | 426.5795188 | 3 | 1000 | 26 |
| | | | | 2 binding protein 2 | | | | |
| 221899_at | PFAAP5 | AI809961 | 0274 | Phosphonoformate | 316.227766 | 2.22 | 165.9586907 | |
| | | | | immuno-associated | | | | |
| | | | | protein 5 | | | | |
| 224969_at | ATXN7L3 | AL390158 | 0401 | Ataxin 7-like 3 | 208.9296131 | 2.54 | 346.7368505 | |
| 229389_at | ATG16L2 | AA741058 | 0050 | ATG16 autophagy related | 208.9296131 | 2.8 | 630.9573445 | 27 |
| | | | | 16-like 2 (S. cerevisiae) | | | | |
| 242134_at | | AI733194 | 0247 | Transcribed locus | 52.48074602 | 2.06 | 114.8153621 | 28 |
| 224676_at | TMED4 | AI472339 | 0208 | Transmembrane emp24 | 281.8382931 | 2.77 | 588.8436554 | 29 |
| | | | | protein transport domain | | | | |
| | | | | containing 4 | | | | |
| 224568_x_at | MALAT1 | AW005982 | 0462 | Metastasis associated | 190.5460718 | 2.78 | 602.5595861 | 30 |
| | | | | lung adenocarcinoma | | | | |
| | | | | transcript 1 (non-coding | | | | |
| | | | | RNA) | | | | |
| 218659_at | ASXL2 | NM_018263 | 0923 | Additional sex combs like | 758.577575 | 2.72 | 524.8074602 | |
| | | | | 2 (Drosophila) | | | | |
| 203497_at | PPARBP | NM_004774 | 0829 | PPAR binding protein | 251.1886432 | 2.21 | 162.1810097 | |
| 204285_s_at | PMAIP1 | AI857639 | 0289 | Phorbol-12-myristate-13- | 66.0693448 | 2.23 | 169.8243652 | 31 |
| | | | | acetate-induced protein 1 | | | | |
| 213015_at | | BF448315 | 0638 | “ARTC1 mRNA, complete | 89.12509381 | 2.35 | 223.8721139 | 32 |
| | | | | sequence” | | | | |
| 224567_x_at | MALAT1 | BG534952 | 0699 | Metastasis associated | 295.1209227 | 2.91 | 812.8305162 | 33 |
| | | | | lung adenocarcinoma | | | | |
| | | | | transcript 1 (non-coding | | | | |
| | | | | RNA) | | | | |
| 222790_s_at | RSBN1 | AK022166 | 0330 | Round spermatid basic | 741.3102413 | 2.53 | 338.8441561 | 34 |
| | | | | protein 1 | | | | |
| 207057_at | SLC16A7 | NM_004731 | 0828 | “Solute carrier family 16, | 25.70395783 | 2.01 | 102.3292992 | 35 |
| | | | | member 7 | | | | |
| | | | | (monocarboxylic acid | | | | |
| | | | | transporter 2)” | | | | |
| 212852_s_at | TROVE2 | AL538601 | 0414 | “TROVE domain family, | 407.3802778 | 2.46 | 288.4031503 | |
| | | | | member 2” | | | | |
| 238761_at | | BE645241 | 0581 | | 724.4359601 | 2.46 | 288.4031503 | 36 |
| 214198_s_at | DGCR2 | AU150824 | 0430 | DiGeorge syndrome | 177.827941 | 2.03 | 107.1519305 | |
| | | | | critical region gene 2 | | | | |
| 202809_s_at | INTS3 | NM_023015 | 0943 | Integrator complex subunit 3 | 154.8816619 | 2.09 | 123.0268771 | |
| 236072_at | | N64578 | 0751 | Transcribed locus | 81.28305162 | 1.54 | 34.67368505 | 37 |
| 225827_at | EIF2C2 | AI832074 | 0288 | “Eukaryotic translation | 138.0384265 | 2.54 | 346.7368505 | 38 |
| | | | | initiation factor 2C, 2” | | | | |
| 241775_at | | AW298119 | 0502 | “CDNA FLJ26437 fis, | 316.227766 | 2.16 | 144.5439771 | 39 |
| | | | | clone KDN02067” | | | | |
| 215706_x_at | ZYX | BC002323 | 0543 | Zyxin | 398.1071706 | 2.83 | 676.0829754 | |
| 201730_s_at | TPR | BF110993 | 0619 | Translocated promoter | 194.98446 | 2.54 | 346.7368505 | |
| | | | | region (to activated MET | | | | |
| | | | | oncogene) | | | | |
| 226447_at | ASH1L | BG290742 | 0687 | “Ash1 (absent, small, or | 398.1071706 | 2.42 | 263.0267992 | |
| | | | | homeotic)-like | | | | |
| | | | | (Drosophila)” | | | | |
| 200623_s_at | CALM3 | NM_005184 | 0836 | “Calmodulin 3 | 213.796209 | 2.6 | 398.1071706 | |
| | | | | (phosphorylase kinase, | | | | |
| | | | | delta)” | | | | |
| 215990_s_at | BCL6 | S67779 | 0966 | B-cell CLL/lymphoma 6 | 63.09573445 | 2.1 | 125.8925412 | |
| | | | | (zinc finger protein 51) | | | | |
| 212007_at | UBXD2 | AI927512 | 0301 | UBX domain containing 2 | 112.2018454 | 2.23 | 169.8243652 | |
| 225885_at | EEA1 | AI336848 | 0183 | Early endosome antigen 1 | 316.227766 | 2.29 | 194.98446 | |
| 212629_s_at | PKN2 | AI633689 | 0224 | Protein kinase N2 | 67.60829754 | 2.06 | 114.8153621 | |
| 216971_s_at | PLEC1 | Z54367 | 1015 | “Plectin 1, intermediate | 35.48133892 | 2.07 | 117.4897555 | 40 |
| | | | | filament binding protein | | | | |
| | | | | 500 kDa” | | | | |
| 225289_at | STAT3 | AI139252 | 0174 | Signal transducer and | 416.8693835 | 2.82 | 660.693448 | |
| | | | | activator of transcription 3 | | | | |
| | | | | (acute-phase response | | | | |
| | | | | factor) | | | | |
| 217713_x_at | | AA126763 | 0008 | | 165.9586907 | 2.01 | 102.3292992 | |
| 225361_x_at | FAM122B | AI348001 | 0187 | Family with sequence | 630.9573445 | 2.64 | 436.5158322 | |
| | | | | similarity 122B | | | | |
| 242920_at | | AW590838 | 0520 | | 331.1311215 | 2.1 | 125.8925412 | 41 |
| 227754_at | | AV700815 | 0447 | “CDNA FLJ10417 fis, | 173.7800829 | 1.93 | 85.11380382 | 42 |
| | | | | clone NT2RP1000112” | | | | |
| 226680_at | | BF056303 | 0614 | Transcribed locus | 213.796209 | 1.99 | 97.7237221 | |
| 202157_s_at | CUGBP2 | U69546 | 0989 | “CUG triplet repeat, RNA | 1995.262315 | 3.14 | 1380.384265 | |
| | | | | binding protein 2” | | | | |
| 208988_at | | BE675843 | 0589 | | 190.5460718 | 2.11 | 128.8249552 | |
| 222243_s_at | TOB2 | AB051450 | 0094 | “Transducer of ERBB2, 2” | 107.1519305 | 1.9 | 79.43282347 | |
| 217862_at | | N24868 | 0746 | Transcribed locus | 194.98446 | 2.47 | 295.1209227 | |
| 64486_at | CORO1B | AI341234 | 0185 | “Coronin, actin binding | 223.8721139 | 2.49 | 309.0295433 | |
| | | | | protein, 1B” | | | | |
| 230918_at | | BE856598 | 0601 | | 239.8832919 | 2.14 | 138.0384265 | |
| 204978_at | SFRS16 | NM_007056 | 0873 | “Splicing factor, | 63.09573445 | 2.15 | 141.2537545 | |
| | | | | arginine/serine-rich 16” | | | | |
| 232879_at | CRTC3 | AK024981 | 0354 | CREB regulated | 91.20108394 | 1.65 | 44.66835922 | |
| | | | | transcription coactivator 3 | | | | |
| 235032_at | DNAJA5 | BG112118 | 0672 | DnaJ homology subfamily | 251.1886432 | 2.13 | 134.8962883 | |
| | | | | A member 5 | | | | |
| 203591_s_at | CSF3R | NM_000760 | 0761 | Colony stimulating factor 3 | 144.5439771 | 2.47 | 295.1209227 | |
| | | | | receptor (granulocyte) | | | | |
| 228098_s_at | MYLIP | AW292746 | 0497 | Myosin regulatory light | 1047.128548 | 2.83 | 676.0829754 | |
| | | | | chain interacting protein | | | | |
| 234734_s_at | TNRC6A | AK025696 | 0358 | Trinucleotide repeat | 181.9700859 | 2.48 | 301.995172 | |
| | | | | containing 6A | | | | |
| 244433_at | | AI950023 | 0307 | | 426.5795188 | 2.32 | 208.9296131 | |
| 226641_at | | AU157224 | 0438 | “CDNA FLJ11570 fis, | 851.1380382 | 2.73 | 537.0317964 | |
| | | | | clone HEMBA1003309” | | | | |
| 222791_at | RSBN1 | AK022166 | 0330 | Round spermatid basic | 1202.264435 | 2.75 | 562.3413252 | |
| | | | | protein 1 | | | | |
| 225706_at | GLCCI1 | AI761989 | 0259 | Glucocorticoid induced | 1000 | 2.73 | 537.0317964 | |
| | | | | transcript 1 | | | | |
| 243790_at | ZNF585A | AA203136 | 0015 | Zinc finger protein 585A | 154.8816619 | 1.85 | 70.79457844 | |
| 244145_at | | BG260337 | 0683 | | 251.1886432 | 2.19 | 154.8816619 | |
| 203751_x_at | JUND | AI762296 | 0260 | Jun D proto-oncogene | 79.43282347 | 2.19 | 154.8816619 | |
| 225216_at | CXorf39 | AI590719 | 0220 | Chromosome X open | 416.8693835 | 2.48 | 301.995172 | |
| | | | | reading frame 39 | | | | |
| 228853_at | “(LOC730432, | AI652546 | 0229 | Serine/threonine/tyrosine | 316.227766 | 2.33 | 213.796209 | |
| | STYX)” | | | interacting protein | | | | |
| 232909_s_at | “(BPTF, | AU146870 | 0426 | “(Bromodomain PHD | 776.2471166 | 2.69 | 489.7788194 | |
| | LOC646043)” | | | finger transcription factor, | | | | |
| | | | | Similar to Enhancer of | | | | |
| | | | | bithorax CG32346-PB, | | | | |
| | | | | isoform B)” | | | | |
| 36564_at | IBRDC3 | W27419 | 0998 | IBR domain containing 3 | 107.1519305 | 2.31 | 204.1737945 | |
| 200073_s_at | HNRPD | M94630 | 0742 | “Heterogeneous nuclear | 1737.800829 | 3.08 | 1202.264435 | |
| | | | | ribonucleoprotein D (AU- | | | | |
| | | | | rich element RNA binding | | | | |
| | | | | protein 1, 37 kDa)” | | | | |
| 200808_s_at | ZYX | NM_003461 | 0804 | Zyxin | 398.1071706 | 2.85 | 707.9457844 | |
| 235125_x_at | | AI078279 | 0167 | Transcribed locus | 147.9108388 | 1.75 | 56.23413252 | |
| 226712_at | | BF206389 | 0627 | “CDNA: FLJ22100 fis, | 199.5262315 | 2.48 | 301.995172 | |
| | | | | clone HEP17127” | | | | |
| 208447_s_at | PRPS1 | NM_002764 | 0795 | Phosphoribosyl | 67.60829754 | 2.12 | 131.8256739 | |
| | | | | pyrophosphate synthetase 1 | | | | |
| 226426_at | | BG149849 | 0674 | Transcribed locus | 457.0881896 | 2.49 | 309.0295433 | |
| 239163_at | UBE2B | AW364833 | 0507 | Ubiquitin-conjugating | 64.5654229 | 2.13 | 134.8962883 | |
| | | | | enzyme E2B (RAD6 | | | | |
| | | | | homolog) | | | | |
| 219426_at | EIF2C3 | NM_024852 | 0949 | “Eukaryotic translation | 43.65158322 | 1.86 | 72.44359601 | |
| | | | | initiation factor 2C, 3” | | | | |
| 235341_at | LOC144871 | AL119957 | 0387 | Hypothetical protein | 199.5262315 | 2.55 | 354.8133892 | |
| | | | | LOC144871 | | | | |
| 242243_at | TMF1 | AI767435 | 0264 | TATA element modulatory | 102.3292992 | 1.66 | 45.70881896 | |
| | | | | factor 1 | | | | |
| 201236_s_at | BTG2 | NM_006763 | 0870 | “BTG family, member 2” | 281.8382931 | 2.63 | 426.5795188 | |
| 202577_s_at | DDX19A | BC005162 | 0553 | DEAD (Asp-Glu-Ala-As) | 117.4897555 | 1.91 | 81.28305162 | |
| | | | | box polypeptide 19A | | | | |
| 227772_at | | AV700849 | 0448 | | 213.796209 | 2.09 | 123.0268771 | |
| 229897_at | ZNF641 | BF195808 | 0626 | Zinc finger protein 641 | 141.2537545 | 2.42 | 263.0267992 | |
| 218566_s_at | CHORDC1 | NM_012124 | 0876 | Cysteine and histidine-rich | 213.796209 | 2.12 | 131.8256739 | |
| | | | | domain (CHORD)- | | | | |
| | | | | containing 1 | | | | |
| 203839_s_at | TNK2 | NM_005781 | 0845 | “Tyrosine kinase, non- | 42.65795188 | 1.96 | 91.20108394 | |
| | | | | receptor, 2” | | | | |
| 204361_s_at | SKAP2 | AB014486 | 0085 | Src kinase associated | 123.0268771 | 1.84 | 69.18309709 | |
| | | | | phosphoprotein 2 | | | | |
| 224250_s_at | SECISBP2 | BC001189 | 0541 | SECIS binding protein 2 | 371.5352291 | 2.81 | 645.654229 | |
| 225350_s_at | ZYG11B | AV701229 | 0449 | Zyg-11 homolog B (C. elegans) | 676.0829754 | 2.64 | 436.5158322 | |
| 204516_at | | BG390306 | 0692 | Transcribed locus | 363.0780548 | 2.22 | 165.9586907 | |
| 225620_at | RAB35 | AL534848 | 0412 | “RAB35, member RAS | 186.2087137 | 2.47 | 295.1209227 | |
| | | | | oncogene family” | | | | |
| 226965_at | FAM116A | BF438017 | 0636 | “(Family with sequence | 812.8305162 | 2.72 | 524.8074602 | |
| | | | | similarity 116, member A, | | | | |
| | | | | Transcribed locus)” | | | | |
| 239808_at | | AI084489 | 0169 | Transcribed locus | 295.1209227 | 2.2 | 158.4893192 | |
| 227428_at | GABPA | BE876628 | 0605 | “GA binding protein | 331.1311215 | 2.33 | 213.796209 | |
| | | | | transcription factor, alpha | | | | |
| | | | | subunit 60 kDa” | | | | |
| 218595_s_at | “(HEATR1, | NM_018072 | 0921 | “Lectin, galactoside- | 199.5262315 | 2.15 | 141.2537545 | |
| | LGALS8)” | | | binding, soluble, 8 | | | | |
| | | | | (galectin 8)” | | | | |
| 222266_at | C19orf2 | BF796940 | 0661 | Chromosome 19 open | 147.9108388 | 1.93 | 85.11380382 | |
| | | | | reading frame 2 | | | | |
| 239597_at | | AA993566 | 0080 | | 114.8153621 | 2.43 | 269.1534804 | |
| 203415_at | PDCD6 | NM_013232 | 0879 | Programmed cell death 6 | 158.4893192 | 2.33 | 213.796209 | |
| 208866_at | | BF510713 | 0642 | CDNA clone | 158.4893192 | 2 | 100 | |
| | | | | IMAGE: 4044084 | | | | |
| 212575_at | C19orf6 | BF966155 | 0665 | Chromosome 19 open | 2.398832919 | 1.47 | 29.51209227 | |
| | | | | reading frame 6 | | | | |
| 225176_at | | AA156754 | 0013 | “CDNA FLJ42149 fis, | 912.0108394 | 2.81 | 645.654229 | |
| | | | | clone THYMU1000692” | | | | |
| 227223_at | RBM39 | BE466173 | 0575 | RNA binding motif protein | 165.9586907 | 2.58 | 380.1893963 | |
| | | | | 39 | | | | |
| 41386_i_at | JMJD3 | AB002344 | 0082 | Jumonji domain | 223.8721139 | 2.58 | 380.1893963 | |
| | | | | containing 3 | | | | |
| 225995_x_at | “(FAM39DP, | BG178695 | 0675 | “(CXYorf1-related protein, | 281.8382931 | 2.67 | 467.7351413 | |
| | FLJ00038, | | | Family with sequence | | | | |
| | LOC376475, | | | similarity 39, member D | | | | |
| | LOC727741)” | | | pseudogene)” | | | | |
| 228328_at | KLHL28 | AI982758 | 0311 | Kelch-like 28 (Drosophila) | 269.1534804 | 2.2 | 158.4893192 | |
| 235409_at | MGA | AU149225 | 0429 | MAX gene associated | 77.62471166 | 2.27 | 186.2087137 | |
| 200649_at | NUCB1 | BC002356 | 0544 | Nucleobindin 1 | 158.4893192 | 2.46 | 288.4031503 | |
| 232615_at | | AA632758 | 0034 | Transcribed locus | 1148.153621 | 2.75 | 562.3413252 | |
| 205882_x_at | ADD3 | AI818488 | 0278 | Adducin 3 (gamma) | 1905.460718 | 3.11 | 1288.249552 | |
| 228496_s_at | CRIM1 | AW243081 | 0489 | Cysteine rich | 151.3561248 | 1.85 | 70.79457844 | |
| | | | | transmembrane BMP | | | | |
| | | | | regulator 1 (chordin-like) | | | | |
| 209189_at | FOS | BC004490 | 0549 | V-fos FBJ murine | 407.3802778 | 3.14 | 1380.384265 | |
| | | | | osteosarcoma viral | | | | |
| | | | | oncogene homolog | | | | |
| 239233_at | KIAA1212 | AA744613 | 0053 | KIAA1212 | 25.11886432 | 1.04 | 10.96478196 | |
| 224308_s_at | INTS2 | AL136800 | 0393 | Integrator complex subunit 2 | 95.4992586 | 1.68 | 47.86300923 | |
| 208705_s_at | EIF5 | BG481972 | 0696 | Eukaryotic translation | 363.0780548 | 2.67 | 467.7351413 | |
| | | | | initiation factor 5 | | | | |
| 218607_s_at | SDAD1 | NM_018115 | 0922 | SDA1 domain containing 1 | 173.7800829 | 2.42 | 263.0267992 | |
| 200041_s_at | BAT1 | NM_004640 | 0826 | HLA-B associated | 870.96359 | 3.06 | 1148.153621 | |
| | | | | transcript 1 | | | | |
| 202850_at | ABCD3 | NM_002858 | 0796 | “ATP-binding cassette, | 199.5262315 | 2.11 | 128.8249552 | |
| | | | | sub-family D (ALD), | | | | |
| | | | | member 3” | | | | |
| 224562_at | “(LOC644739, | AK025566 | 0357 | “(Similar to Wiskott- | 870.96359 | 3.19 | 1548.816619 | |
| | LOC647909, | | | Aldrich syndrome protein | | | | |
| | WASF2)” | | | family member 4 (WASP- | | | | |
| | | | | family protein member 4), | | | | |
| | | | | WAS protein family, | | | | |
| | | | | member 2)” | | | | |
| 222644_s_at | GLT25D1 | AI924150 | 0296 | Glycosyltransferase 25 | 123.0268771 | 2.39 | 245.4708916 | |
| | | | | domain containing 1 | | | | |
| 212536_at | ATP11B | AB023173 | 0088 | “ATPase, Class VI, type | 147.9108388 | 1.99 | 97.7237221 | |
| | | | | 11B” | | | | |
| 215269_at | TMEM1 | AI922538 | 0294 | Transmembrane protein 1 | 102.3292992 | 1.72 | 52.48074602 | |
| 243303_at | | AA811657 | 0064 | | 218.7761624 | 2.06 | 114.8153621 | |
| 201991_s_at | KIF5B | BF223224 | 0630 | Kinesin family member 5B | 562.3413252 | 2.62 | 416.8693835 | |
| 213327_s_at | USP12 | AI820101 | 0280 | Ubiquitin specific | 93.32543008 | 1.77 | 58.88436554 | |
| | | | | peptidase 12 | | | | |
| 213882_at | TM2D1 | AA012917 | 0001 | TM2 domain containing 1 | 45.70881896 | 1.43 | 26.91534804 | |
| 214715_x_at | ZNF160 | AK024789 | 0348 | Zinc finger protein 160 | 234.4228815 | 2.15 | 141.2537545 | |
| 225845_at | ZBTB44 | BG253884 | 0681 | Zinc finger and BTB | 645.654229 | 2.58 | 380.1893963 | |
| | | | | domain containing 44 | | | | |
| 215529_x_at | DIP2A | AI590053 | 0219 | DIP2 disco-interacting | 77.62471166 | 1.59 | 38.9045145 | |
| | | | | protein 2 homolog A | | | | |
| | | | | (Drosophila) | | | | |
| 242539_at | LOC730069 | AW665509 | 0523 | Similar to nuclear receptor | 213.796209 | 1.99 | 97.7237221 | |
| | | | | binding factor 2 | | | | |
| 203311_s_at | ARF6 | M57763 | 0735 | ADP-ribosylation factor 6 | 169.8243652 | 2.51 | 323.5936569 | |
| 205854_at | TULP3 | AK024246 | 0342 | Tubby like protein 3 | 61.65950019 | 1.59 | 38.9045145 | |
| 212042_x_at | “(LOC653949, | BG389744 | 0691 | Ribosomal protein L7 | 3235.936569 | 3.37 | 2344.228815 | |
| | RPL7, | | | | | | | |
| | hCG_2015956, | | | | | | | |
| | hCG_31916)” | | | | | | | |
| 233369_at | | AU146027 | 0424 | “CDNA FLJ11835 fis, | 263.0267992 | 2.17 | 147.9108388 | |
| | | | | clone HEMBA1006595” | | | | |
| 212513_s_at | USP33 | AB029020 | 0089 | Ubiquitin specific | 331.1311215 | 2.4 | 251.1886432 | |
| | | | | peptidase 33 | | | | |
| 218626_at | EIF4ENIF1 | NM_019843 | 0930 | Eukaryotic translation | 125.8925412 | 1.98 | 95.4992586 | |
| | | | | initiation factor 4E nuclear | | | | |
| | | | | import factor 1 | | | | |
| 208246_x_at | | NM_017618 | 0909 | | 194.98446 | 2.08 | 120.2264435 | |
| 224559_at | MALAT1 | AF001540 | 0104 | Metastasis associated | 309.0295433 | 3.15 | 1412.537545 | |
| | | | | lung adenocarcinoma | | | | |
| | | | | transcript 1 (non-coding | | | | |
| | | | | RNA) | | | | |
| 205312_at | SPI1 | NM_003120 | 0798 | Spleen focus forming virus | 81.28305162 | 2.35 | 223.8721139 | |
| | | | | (SFFV) proviral integration | | | | |
| | | | | oncogene spi1 | | | | |
| 213318_s_at | BAT3 | BG028844 | 0669 | HLA-B associated | 363.0780548 | 2.71 | 512.861384 | |
| | | | | transcript 3 | | | | |
| 212099_at | RHOB | AI263909 | 0179 | “Ras homolog gene | 208.9296131 | 2.7 | 501.1872336 | |
| | | | | family, member B” | | | | |
| 223131_s_at | TRIM8 | AI925572 | 0299 | Tripartite motif-containing 8 | 79.43282347 | 2.15 | 141.2537545 | |
| 212487_at | GPATCH8 | AI673812 | 0234 | G patch domain | 37.15352291 | 1.94 | 87.096359 | |
| | | | | containing 8 | | | | |
| 200011_s_at | ARF3 | NM_001659 | 0775 | ADP-ribosylation factor 3 | 891.2509381 | 3.1 | 1258.925412 | |
| 210543_s_at | “(LOC731751, | U34994 | 0981 | “Protein kinase, DNA- | 162.1810097 | 2.07 | 117.4897555 | |
| | PRKDC)” | | | activated, catalytic | | | | |
| | | | | polypeptide” | | | | |
| 217313_at | | AC004692 | 0098 | | 218.7761624 | 2.13 | 134.8962883 | |
| 228106_at | C4orf30 | AA031528 | 0004 | Chromosome 4 open | 263.0267992 | 2.22 | 165.9586907 | |
| | | | | reading frame 30 | | | | |
| 218043_s_at | AZI2 | NM_022461 | 0940 | 5-azacytidine induced 2 | 77.62471166 | 1.57 | 37.15352291 | |
| 203514_at | MAP3K3 | BF971923 | 0666 | Mitogen-activated protein | 162.1810097 | 2.02 | 104.7128548 | |
| | | | | kinase kinase kinase 3 | | | | |
| 223295_s_at | LUC7L | BE049621 | 0566 | LUC7-like (S. cerevisiae) | 467.7351413 | 2.47 | 295.1209227 | |
| 235469_at | MGC40405 | AV744101 | 0457 | Hypothetical protein | 89.12509381 | 1.56 | 36.30780548 | |
| | | | | MGC40405 | | | | |
| 209440_at | PRPS1 | BC001605 | 0542 | Phosphoribosyl | 165.9586907 | 2.37 | 234.4228815 | |
| | | | | pyrophosphate synthetase 1 | | | | |
| 227039_at | AKAP13 | AI674926 | 0235 | A kinase (PRKA) anchor | 288.4031503 | 2.74 | 549.5408739 | |
| | | | | protein 13 | | | | |
| 218499_at | RP6-213H19.1 | NM_016542 | 0904 | Serine/threonine protein | 338.8441561 | 2.34 | 218.7761624 | |
| | | | | kinase MST4 | | | | |
| 232440_at | ZDHHC13 | AU155198 | 0433 | “Zinc finger, DHHC-type | 181.9700859 | 2.02 | 104.7128548 | |
| | | | | containing 13” | | | | |
| 209727_at | GM2A | M76477 | 0737 | GM2 ganglioside activator | 10.23292992 | 1.77 | 58.88436554 | |
| 241891_at | | T92908 | 0972 | | 436.5158322 | 2.38 | 239.8832919 | |
| 227525_at | GLCCI1 | AA058770 | 0006 | Glucocorticoid induced | 457.0881896 | 2.41 | 257.0395783 | |
| | | | | transcript 1 | | | | |
| 228088_at | | AI092265 | 0170 | “CDNA FLJ31513 fis, | 128.8249552 | 1.94 | 87.096359 | |
| | | | | clone NT2RI1000127” | | | | |
| 242362_at | | AI797788 | 0269 | | 489.7788194 | 2.33 | 213.796209 | |
| 34478_at | RAB11B | X79780 | 1009 | “RAB11B, member RAS | 18.62087137 | 1.69 | 48.97788194 | |
| | | | | oncogene family” | | | | |
| 223135_s_at | BBX | AL136769 | 0392 | Bobby sox homolog | 295.1209227 | 2.62 | 416.8693835 | |
| | | | | (Drosophila) | | | | |
| 225780_at | RSC1A1 | AL565415 | 0418 | “Regulatory solute carrier | 316.227766 | 2.3 | 199.5262315 | |
| | | | | protein, family 1, member | | | | |
| | | | | 1” | | | | |
| 211791_s_at | KCNAB2 | AF044253 | 0112 | “Potassium voltage-gated | 20.41737945 | 1.98 | 95.4992586 | |
| | | | | channel, shaker-related | | | | |
| | | | | subfamily, beta member | | | | |
| | | | | 2” | | | | |
| 204252_at | CDK2 | M68520 | 0736 | Cyclin-dependent kinase 2 | 114.8153621 | 1.92 | 83.17637711 | |
| 202420_s_at | DHX9 | NM_001357 | 0771 | DEAH (Asp-Glu-Ala-His) | 223.8721139 | 2.24 | 173.7800829 | |
| | | | | box polypeptide 9 | | | | |
| 223138_s_at | DHX36 | AI937206 | 0304 | DEAH (Asp-Glu-Ala-His) | 162.1810097 | 2.44 | 275.4228703 | |
| | | | | box polypeptide 36 | | | | |
| 240452_at | GSPT1 | AA580082 | 0030 | G1 to S phase transition 1 | 316.227766 | 2.15 | 141.2537545 | |
| 202082_s_at | SEC14L1 | AV748469 | 0458 | SEC14-like 1 (S. cerevisiae) | 54.95408739 | 1.98 | 95.4992586 | |
| 213038_at | IBRDC3 | AL031602 | 0365 | IBR domain containing 3 | 89.12509381 | 2.14 | 138.0384265 | |
| 232038_at | C6orf170 | AI052103 | 0162 | Chromosome 6 open | 53.70317964 | 1.43 | 26.91534804 | |
| | | | | reading frame 170 | | | | |
| 229036_at | TNRC6B | AI681177 | 0238 | “(Transcribed locus, | 208.9296131 | 2.58 | 380.1893963 | |
| | | | | Trinucleotide repeat | | | | |
| | | | | containing 6B)” | | | | |
| 229235_at | | AI983432 | 0312 | Transcribed locus | 389.045145 | 2.41 | 257.0395783 | |
| 226412_at | C6orf111 | N66397 | 0752 | Chromosome 6 open | 575.4399373 | 2.54 | 346.7368505 | |
| | | | | reading frame 111 | | | | |
| 212637_s_at | WWP1 | AU155187 | 0432 | WW domain containing E3 | 41.68693835 | 1.4 | 25.11886432 | |
| | | | | ubiquitin protein ligase 1 | | | | |
| 220296_at | | NM_024564 | 0947 | | 100 | 1.71 | 51.2861384 | |
| 240695_at | | AA876138 | 0075 | | 60.25595861 | 2.01 | 102.3292992 | |
| 224759_s_at | C12orf23 | AK001731 | 0320 | Chromosome 12 open | 301.995172 | 2.26 | 181.9700859 | |
| | | | | reading frame 23 | | | | |
| 222794_x_at | PAPD1 | AK022188 | 0331 | PAP associated domain | 323.5936569 | 2.36 | 229.0867653 | |
| | | | | containing 1 | | | | |
| 224974_at | SUDS3 | AK024460 | 0344 | Suppressor of defective | 186.2087137 | 1.98 | 95.4992586 | |
| | | | | silencing 3 homolog | | | | |
| | | | | (S. cerevisiae) | | | | |
| 242650_at | | AW298590 | 0503 | Transcribed locus | 69.18309709 | 1.5 | 31.6227766 | |
| 212921_at | SMYD2 | AF070592 | 0121 | SET and MYND domain | 75.8577575 | 1.64 | 43.65158322 | |
| | | | | containing 2 | | | | |
| 217717_s_at | YWHAB | BF246499 | 0631 | “Tyrosine 3- | 323.5936569 | 2.71 | 512.861384 | |
| | | | | monooxygenase/tryptophan | | | | |
| | | | | 5-monooxygenase | | | | |
| | | | | activation protein, beta | | | | |
| | | | | polypeptide” | | | | |
| 221419_s_at | | NM_013307 | 0880 | | 107.1519305 | 2.35 | 223.8721139 | |
| 204809_at | CLPX | NM_006660 | 0866 | ClpX caseinolytic | 97.7237221 | 1.85 | 70.79457844 | |
| | | | | peptidase X homolog (E. coli) | | | | |
| 201409_s_at | PPP1CB | NM_002709 | 0794 | “Protein phosphatase 1, | 269.1534804 | 2.29 | 194.98446 | |
| | | | | catalytic subunit, beta | | | | |
| | | | | isoform” | | | | |
| 209829_at | C6orf32 | AB002384 | 0083 | Chromosome 6 open | 776.2471166 | 2.68 | 478.6300923 | |
| | | | | reading frame 32 | | | | |
| 225761_at | PAPD4 | AI434509 | 0203 | PAP associated domain | 602.5595861 | 2.63 | 426.5795188 | |
| | | | | containing 4 | | | | |
| 228471_at | ANKRD44 | AA744636 | 0054 | Ankyrin repeat domain 44 | 562.3413252 | 2.51 | 323.5936569 | |
| 201526_at | ARF5 | NM_001662 | 0776 | ADP-ribosylation factor 5 | 162.1810097 | 2.39 | 245.4708916 | |
| 241435_at | | AA702930 | 0044 | | 1698.243652 | 2.9 | 794.3282347 | |
| 227567_at | AMZ2 | AL524467 | 0407 | Archaemetzincins-2 | 338.8441561 | 2.3 | 199.5262315 | |
| 209563_x_at | CALM1 | BC000454 | 0537 | “Calmodulin 1 | 691.8309709 | 3.07 | 1174.897555 | |
| | | | | (phosphorylase kinase, | | | | |
| | | | | delta)” | | | | |
| 242518_at | | AA748423 | 0056 | | 74.13102413 | 2.07 | 117.4897555 | |
| 239049_at | | BF514509 | 0644 | | 239.8832919 | 2.12 | 131.8256739 | |
| 209024_s_at | SYNCRIP | AI472757 | 0209 | “Synaptotagmin binding, | 138.0384265 | 2.31 | 204.1737945 | |
| | | | | cytoplasmic RNA | | | | |
| | | | | interacting protein” | | | | |
| 211948_x_at | BAT2D1 | BG261071 | 0685 | BAT2 domain containing 1 | 102.3292992 | 2.45 | 281.8382931 | |
| 228446_at | KIAA2026 | BF062203 | 0616 | KIAA2026 | 338.8441561 | 2.38 | 239.8832919 | |
| 229541_at | | BE669703 | 0583 | “CDNA FLJ38918 fis, | 93.32543008 | 2.27 | 186.2087137 | |
| | | | | clone NT2NE2010633” | | | | |
| 237330_at | | AA603494 | 0033 | Transcribed locus | 91.20108394 | 1.56 | 36.30780548 | |
| 217842_at | LUC7L2 | NM_016019 | 0893 | LUC7-like 2 (S. cerevisiae) | 61.65950019 | 1.61 | 40.73802778 | |
| 201828_x_at | FAM127A | NM_003928 | 0809 | “Family with sequence | 213.796209 | 2.43 | 269.1534804 | |
| | | | | similarity 127, member A” | | | | |
| 229366_at | | BG149765 | 0673 | Transcribed locus | 218.7761624 | 2.22 | 165.9586907 | |
| 201986_at | THRAP1 | AB011165 | 0084 | Thyroid hormone receptor | 323.5936569 | 2.35 | 223.8721139 | |
| | | | | associated protein 1 | | | | |
| 202373_s_at | RAB3GAP2 | AF255648 | 0148 | RAB3 GTPase activating | 288.4031503 | 2.33 | 213.796209 | |
| | | | | protein subunit 2 (non- | | | | |
| | | | | catalytic) | | | | |
| 241906_at | | BF001773 | 0612 | | 281.8382931 | 2.13 | 134.8962883 | |
| 201318_s_at | “(MRCL3, | NM_006471 | 0863 | “(Myosin regulatory light | 1778.27941 | 3.13 | 1348.962883 | |
| | MRLC2)” | | | chain MRCL3, Myosin | | | | |
| | | | | regulatory light chain | | | | |
| | | | | MRLC2)” | | | | |
| 207941_s_at | RBM39 | NM_004902 | 0830 | RNA binding motif protein | 707.9457844 | 2.72 | 524.8074602 | |
| | | | | 39 | | | | |
| 229586_at | CHD9 | AW300405 | 0505 | Chromodomain helicase | 102.3292992 | 2.23 | 169.8243652 | |
| | | | | DNA binding protein 9 | | | | |
| 217336_at | | AL118510 | 0385 | | 190.5460718 | 2.06 | 114.8153621 | |
| 209648_x_at | SOCS5 | AL136896 | 0394 | Suppressor of cytokine | 38.9045145 | 1.32 | 20.89296131 | |
| | | | | signaling 5 | | | | |
| 226664_at | TBC1D20 | AL121747 | 0388 | “TBC1 domain family, | 199.5262315 | 2.44 | 275.4228703 | |
| | | | | member 20” | | | | |
| 225786_at | LOC284702 | AI440495 | 0204 | Hypothetical protein | 281.8382931 | 2.25 | 177.827941 | |
| | | | | LOC284702 | | | | |
| 208635_x_at | NACA | BF976260 | 0667 | Nascent-polypeptide- | 5128.61384 | 3.62 | 4168.693835 | |
| | | | | associated complex alpha | | | | |
| | | | | polypeptide | | | | |
| 223444_at | SENP7 | AL136599 | 0391 | SUMO1/sentrin specific | 229.0867653 | 2.09 | 123.0268771 | |
| | | | | peptidase 7 | | | | |
| 208975_s_at | KPNB1 | L38951 | 0725 | Karyopherin (importin) | 147.9108388 | 1.98 | 95.4992586 | |
| | | | | beta 1 | | | | |
| 208935_s_at | LGALS8 | L78132 | 0727 | “Lectin, galactoside- | 151.3561248 | 1.96 | 91.20108394 | |
| | | | | binding, soluble, 8 | | | | |
| | | | | (galectin 8)” | | | | |
| 200847_s_at | TMEM66 | NM_016127 | 0895 | Transmembrane protein | 1258.925412 | 2.99 | 977.237221 | |
| | | | | 66 | | | | |
| 218247_s_at | RKHD2 | NM_016626 | 0906 | Ring finger and KH | 208.9296131 | 2.04 | 109.6478196 | |
| | | | | domain containing 2 | | | | |
| 227121_at | | BF476076 | 0640 | MRNA; cDNA | 407.3802778 | 2.43 | 269.1534804 | |
| | | | | DKFZp586K1922 (from | | | | |
| | | | | clone DKFZp586K1922) | | | | |
| 235984_at | | AL036662 | 0367 | Transcribed locus | 100 | 2.27 | 186.2087137 | |
| 212069_s_at | KIAA0515 | AK026025 | 0360 | KIAA0515 | 77.62471166 | 2.13 | 134.8962883 | |
| 243649_at | | AI678692 | 0236 | | 141.2537545 | 1.88 | 75.8577575 | |
| 238549_at | | AI420611 | 0201 | Transcribed locus | 316.227766 | 2.35 | 223.8721139 | |
| 233093_s_at | BIRC6 | AK023788 | 0339 | Baculoviral IAP repeat- | 851.1380382 | 2.83 | 676.0829754 | |
| | | | | containing 6 (apollon) | | | | |
| 221749_at | YTHDF3 | AU157915 | 0439 | “YTH domain family, | 234.4228815 | 2.16 | 144.5439771 | |
| | | | | member 3” | | | | |
| 242726_at | | BF221850 | 0629 | Transcribed locus | 128.8249552 | 1.81 | 64.5654229 | |
| 242195_x_at | NUMBL | BE350811 | 0573 | Numb homolog | 588.8436554 | 2.6 | 398.1071706 | |
| | | | | (Drosophila)-like | | | | |
| 204020_at | PURA | BF739943 | 0658 | Purine-rich element | 316.227766 | 2.36 | 229.0867653 | |
| | | | | binding protein A | | | | |
| 208694_at | PRKDC | U47077 | 0984 | “Protein kinase, DNA- | 131.8256739 | 1.94 | 87.096359 | |
| | | | | activated, catalytic | | | | |
| | | | | polypeptide” | | | | |
| 200047_s_at | YY1 | NM_003403 | 0802 | YY1 transcription factor | 676.0829754 | 2.72 | 524.8074602 | |
| 228097_at | MYLIP | AW292746 | 0497 | Myosin regulatory light | 354.8133892 | 2.35 | 223.8721139 | |
| | | | | chain interacting protein | | | | |
| 213605_s_at | | AL049987 | 0376 | MRNA; cDNA | 144.5439771 | 1.76 | 57.54399373 | |
| | | | | DKFZp564F112 (from | | | | |
| | | | | clone DKFZp564F112) | | | | |
| 218259_at | MKL2 | NM_014048 | 0881 | MKL/myocardin-like 2 | 104.7128548 | 1.83 | 67.60829754 | |
| 240338_at | LRAP | AI807341 | 0272 | Leukocyte-derived | 57.54399373 | 1.45 | 28.18382931 | |
| | | | | arginine aminopeptidase | | | | |
| 226366_at | SHPRH | AI828221 | 0285 | SNF2 histone linker PHD | 173.7800829 | 2.12 | 131.8256739 | |
| | | | | RING helicase | | | | |
| 218237_s_at | SLC38A1 | NM_030674 | 0955 | “Solute carrier family 38, | 851.1380382 | 2.65 | 446.6835922 | |
| | | | | member 1” | | | | |
| 201473_at | JUNB | NM_002229 | 0783 | Jun B proto-oncogene | 346.7368505 | 2.83 | 676.0829754 | |
| 226786_at | RFX1 | BF507952 | 0641 | “Regulatory factor X, 1 | 363.0780548 | 2.72 | 524.8074602 | |
| | | | | (influences HLA class II | | | | |
| | | | | expression)” | | | | |
| 214948_s_at | | AL050136 | 0377 | MRNA; cDNA | 181.9700859 | 2.11 | 128.8249552 | |
| | | | | DKFZp586L141 (from | | | | |
| | | | | clone DKFZp586L141) | | | | |
| 225672_at | GOLGA2 | AL514295 | 0405 | “Golgi autoantigen, golgin | 338.8441561 | 2.65 | 446.6835922 | |
| | | | | subfamily a, 2” | | | | |
| 229787_s_at | OGT | AI742039 | 0251 | O-linked N- | 257.0395783 | 2.08 | 120.2264435 | |
| | | | | acetylglucosamine | | | | |
| | | | | (GlcNAc) transferase | | | | |
| | | | | (UDP-N- | | | | |
| | | | | acetylglucosamine:polypeptide- | | | | |
| | | | | N- | | | | |
| | | | | acetylglucosaminyl | | | | |
| | | | | transferase) | | | | |
| 202253_s_at | DNM2 | NM_004945 | 0832 | Dynamin 2 | 85.11380382 | 2.15 | 141.2537545 | |
| 225564_at | SPATA13 | AW269397 | 0493 | Spermatogenesis | 933.2543008 | 2.74 | 549.5408739 | |
| | | | | associated 13 | | | | |
| 218967_s_at | PTER | NM_030664 | 0954 | Phosphotriesterase | 128.8249552 | 1.93 | 85.11380382 | |
| | | | | related | | | | |
| 217007_s_at | ADAM15 | AK000667 | 0316 | ADAM metallopeptidase | 7.58577575 | 1.54 | 34.67368505 | |
| | | | | domain 15 (metargidin) | | | | |
| 228250_at | FNIP1 | AW263086 | 0491 | Folliculin interacting | 60.25595861 | 2.16 | 144.5439771 | |
| | | | | protein 1 | | | | |
| 212291_at | HIPK1 | AI393355 | 0199 | Homeodomain interacting | 117.4897555 | 2.36 | 229.0867653 | |
| | | | | protein kinase 1 | | | | |
| 203203_s_at | KRR1 | NM_007043 | 0872 | “KRR1, small subunit | 85.11380382 | 1.71 | 51.2861384 | |
| | | | | (SSU) processome | | | | |
| | | | | component, homolog | | | | |
| | | | | (yeast)” | | | | |
| 229470_at | FAM105B | AW451634 | 0509 | “Family with sequence | 257.0395783 | 2.22 | 165.9586907 | |
| | | | | similarity 105, member B” | | | | |
| 224698_at | FAM62B | AB033054 | 0090 | Family with sequence | 676.0829754 | 2.63 | 426.5795188 | |
| | | | | similarity 62 (C2 domain | | | | |
| | | | | containing) member B | | | | |
| 244061_at | | AI510829 | 0213 | | 275.4228703 | 2.07 | 117.4897555 | |
| 204075_s_at | KIAA0562 | NM_014704 | 0887 | KIAA0562 | 24.54708916 | 1.07 | 11.74897555 | |
| 217019_at | | AL137162 | 0395 | | 66.0693448 | 1.45 | 28.18382931 | |
| 218600_at | LIMD2 | NM_030576 | 0953 | LIM domain containing 2 | 102.3292992 | 2.28 | 190.5460718 | |
| 213606_s_at | ARHGDIA | AI571798 | 0218 | Rho GDP dissociation | 25.70395783 | 1.88 | 75.8577575 | |
| | | | | inhibitor (GDI) alpha | | | | |
| 201260_s_at | SYPL1 | NM_006754 | 0869 | Synaptophysin-like 1 | 301.995172 | 2.3 | 199.5262315 | |
| 234340_at | | AK021431 | 0324 | “CDNA FLJ11369 fis, | 50.11872336 | 1.45 | 28.18382931 | |
| | | | | clone HEMBA1000338” | | | | |
| 207686_s_at | CASP8 | NM_001228 | 0770 | “Caspase 8, apoptosis- | 61.65950019 | 2.13 | 134.8962883 | |
| | | | | related cysteine | | | | |
| | | | | peptidase” | | | | |
| 201332_s_at | STAT6 | NM_003153 | 0799 | “Signal transducer and | 102.3292992 | 2.18 | 151.3561248 | |
| | | | | activator of transcription 6, | | | | |
| | | | | interleukin-4 induced” | | | | |
| 203388_at | ARRB2 | NM_004313 | 0819 | “Arrestin, beta 2” | 457.0881896 | 2.85 | 707.9457844 | |
| 204275_at | SOLH | AI796687 | 0268 | Small optic lobes homolog | 52.48074602 | 1.9 | 79.43282347 | |
| | | | | (Drosophila) | | | | |
| 238057_at | USP45 | AW195800 | 0487 | Ubiquitin specific | 81.28305162 | 1.55 | 35.48133892 | |
| | | | | peptidase 45 | | | | |
| 242352_at | NIPBL | AW272262 | 0494 | Nipped-B homolog | 60.25595861 | 2.21 | 162.1810097 | |
| | | | | (Drosophila) | | | | |
| 212846_at | RRP1B | AA811192 | 0063 | KIAA0179 | 323.5936569 | 2.41 | 257.0395783 | |
| 212090_at | GRINA | AL571424 | 0420 | “Glutamate receptor, | 97.7237221 | 2.27 | 186.2087137 | |
| | | | | ionotropic, N-methyl D- | | | | |
| | | | | asparate-associated | | | | |
| | | | | protein 1 (glutamate | | | | |
| | | | | binding)” | | | | |
| 227636_at | THAP5 | BG500677 | 0698 | THAP domain containing 5 | 194.98446 | 2.05 | 112.2018454 | |
| 209379_s_at | KIAA1128 | AF241785 | 0147 | KIAA1128 | 213.796209 | 2.16 | 144.5439771 | |
| 230180_at | | AA521056 | 0025 | | 91.20108394 | 2.37 | 234.4228815 | |
| 217489_s_at | IL6R | S72848 | 0968 | Interleukin 6 receptor | 27.54228703 | 1.77 | 58.88436554 | |
| 200014_s_at | “(HNRPC, | NM_004500 | 0824 | Heterogeneous nuclear | 512.861384 | 2.63 | 426.5795188 | |
| | hCG_1641229)” | | | ribonucleoprotein C | | | | |
| | | | | (C1/C2) | | | | |
| 221628_s_at | N-PAC | AF326966 | 0155 | Cytokine-like nuclear | 42.65795188 | 1.95 | 89.12509381 | |
| | | | | factor n-pac | | | | |
| 214594_x_at | ATP8B1 | BG252666 | 0680 | “ATPase, Class I, type 8B, | 147.9108388 | 1.79 | 61.65950019 | |
| | | | | member 1” | | | | |
| 218528_s_at | RNF38 | NM_022781 | 0941 | Ring finger protein 38 | 309.0295433 | 2.38 | 239.8832919 | |
| 223494_at | MGEA5 | AF307332 | 0152 | Meningioma expressed | 1659.586907 | 3.05 | 1122.018454 | |
| | | | | antigen 5 (hyaluronidase) | | | | |
| 234260_at | | AL122039 | 0390 | MRNA; cDNA | 97.7237221 | 1.68 | 47.86300923 | |
| | | | | DKFZp434E0572 (from | | | | |
| | | | | clone DKFZp434E0572) | | | | |
| 203104_at | CSF1R | NM_005211 | 0838 | “Colony stimulating factor | 354.8133892 | 2.84 | 691.8309709 | |
| | | | | 1 receptor, formerly | | | | |
| | | | | McDonough feline | | | | |
| | | | | sarcoma viral (v-fms) | | | | |
| | | | | oncogene homolog” | | | | |
| 221755_at | EHBP1L1 | BG334196 | 0688 | EH domain binding protein | 47.86300923 | 1.95 | 89.12509381 | |
| | | | | 1-like 1 | | | | |
| 200976_s_at | TAX1BP1 | NM_006024 | 0850 | Tax1 (human T-cell | 691.8309709 | 2.74 | 549.5408739 | |
| | | | | leukemia virus type I) | | | | |
| | | | | binding protein 1 | | | | |
| 212297_at | ATP13A3 | BF218804 | 0628 | ATPase type 13A3 | 100 | 1.77 | 58.88436554 | |
| 208841_s_at | G3BP2 | AB014560 | 0086 | GTPase activating protein | 354.8133892 | 2.41 | 257.0395783 | |
| | | | | (SH3 domain) binding | | | | |
| | | | | protein 2 | | | | |
| 200632_s_at | NDRG1 | NM_006096 | 0853 | N-myc downstream | 223.8721139 | 2.49 | 309.0295433 | |
| | | | | regulated gene 1 | | | | |
| 215383_x_at | SPG21 | AL137312 | 0397 | “Spastic paraplegia 21, | 194.98446 | 2.08 | 120.2264435 | |
| | | | | maspardin (autosomal | | | | |
| | | | | recessive, Mast | | | | |
| | | | | syndrome)” | | | | |
| 235493_at | | AI927329 | 0300 | Transcribed locus | 213.796209 | 2.05 | 112.2018454 | |
| 236614_at | LOC729683 | AW006288 | 0463 | Hypothetical protein | 177.827941 | 2.38 | 239.8832919 | |
| | | | | LOC729683 | | | | |
| 209273_s_at | ISCA1 | BG387555 | 0690 | Iron-sulfur cluster | 144.5439771 | 2 | 100 | |
| | | | | assembly 1 homolog | | | | |
| | | | | (S. cerevisiae) | | | | |
| 227621_at | WTAP | BE464729 | 0574 | Wilms tumor 1 associated | 1584.893192 | 3.07 | 1174.897555 | |
| | | | | protein | | | | |
| 225431_x_at | ACY1L2 | BE779764 | 0596 | Aminoacylase 1-like 2 | 269.1534804 | 2.09 | 123.0268771 | |
| 235879_at | | AI697540 | 0245 | Transcribed locus | 870.96359 | 2.61 | 407.3802778 | |
| 226825_s_at | TMEM165 | AW665624 | 0524 | Transmembrane protein | 575.4399373 | 2.98 | 954.992586 | |
| | | | | 165 | | | | |
| 218143_s_at | SCAMP2 | NM_005697 | 0843 | Secretory carrier | 239.8832919 | 2.54 | 346.7368505 | |
| | | | | membrane protein 2 | | | | |
| 203890_s_at | DAPK3 | BF686824 | 0655 | Death-associated protein | 25.70395783 | 1.64 | 43.65158322 | |
| | | | | kinase 3 | | | | |
| 208313_s_at | SF1 | NM_004630 | 0825 | Splicing factor 1 | 467.7351413 | 2.82 | 660.693448 | |
| 211352_s_at | NCOA3 | U80737 | 0991 | Nuclear receptor | 54.95408739 | 2.02 | 104.7128548 | |
| | | | | coactivator 3 | | | | |
| 224579_at | SLC38A1 | BF247552 | 0632 | “Solute carrier family 38, | 1380.384265 | 2.98 | 954.992586 | |
| | | | | member 1” | | | | |
| 201752_s_at | ADD3 | AI763123 | 0262 | Adducin 3 (gamma) | 1819.700859 | 3.1 | 1258.925412 | |
| 231747_at | CYSLTR1 | NM_006639 | 0864 | Cysteinyl leukotriene | 371.5352291 | 2.81 | 645.654229 | |
| | | | | receptor 1 | | | | |
| 208319_s_at | RBM3 | NM_006743 | 0868 | “RNA binding motif | 407.3802778 | 2.39 | 245.4708916 | |
| | | | | (RNP1, RRM) protein 3” | | | | |
| 227159_at | GHDC | AI827015 | 0284 | GH3 domain containing | 199.5262315 | 2.47 | 295.1209227 | |
| 230387_at | | AL038450 | 0371 | Transcribed locus | 218.7761624 | 2.1 | 125.8925412 | |

TABLE 3

| Fragment | | | | | |
|---|---|---|---|---|---|
| Id | Name | SEQ ID NO. | Accession | Symbol | Gene Name |
| 235101 | 204439_at | 0871 | NM_006820 | IFI44L | interferon-induced protein 44-like |
| 273089 | 242625_at | 0483 | AW189843 | RSAD2 | radical S-adenosyl methionine domain containing 2 |
| 244312 | 213797_at | 0184 | AI337069 | RSAD2 | radical S-adenosyl methionine domain containing 2 |
| 244967 | 214453_s_at | 0860 | NM_006417 | IFI44 | interferon-induced protein 44 |
| 272333 | 241869_at | 0469 | AW026509 | APOL6 | apolipoprotein L, 6 |
| 232750 | 202086_at | 0786 | NM_002462 | MX1 | myxovirus (influenza virus) resistance 1, interferon-inducible |
| | | | | | protein p78 (mouse) |
| 243517 | 212999_x_at | 0496 | AW276186 | LOC650557 | similar to HLA class II histocompatibility antigen, DQ(W1.1) beta |
| | | | | | chain precursor (DQB1*0501) |
| 259919 | 229450_at | 0166 | AI075407 | IFIT3 | interferon-induced protein with tetratricopeptide repeats 3 |
| 232809 | 202145_at | 0785 | NM_002346 | LY6E | lymphocyte antigen 6 complex, locus E |
| 236145 | 205483_s_at | 0835 | NM_005101 | ISG15 | ISG15 ubiquitin-like modifier |
| 262204 | 231735_s_at | 0882 | NM_014086 | | |
| 243866 | 213350_at | 0654 | BF680255 | RPS11 | ribosomal protein S11 |
| 261953 | 231484_at | 0202 | AI424825 | | |
| 245632 | 215123_at | 0375 | AL049250 | | |
| 236794 | 206133_at | 0908 | NM_017523 | XAF1 | XIAP associated factor-1 |
| 257172 | 226702_at | 0252 | AI742057 | LOC129607 | hypothetical protein LOC129607 |
| 244573 | 214059_at | 0565 | BE049439 | IFI44 | interferon-induced protein 44 |
| 241463 | 210873_x_at | 0973 | U03891 | APOBEC3A | apolipoprotein B mRNA editing enzyme, catalytic |
| | | | | | polypeptide-like 3A |
| 250106 | 219607_s_at | 0945 | NM_024021 | MS4A4A | membrane-spanning 4-domains, subfamily A, member 4 |
| 257227 | 226757_at | 0009 | AA131041 | IFIT2 | interferon-induced protein with tetratricopeptide repeats 2 |
| 269075 | 238611_at | 0292 | AI906424 | | |
| 235409 | 204747_at | 0772 | NM_001549 | IFIT3 | interferon-induced protein with tetratricopeptide repeats 3 |
| 268477 | 238013_at | 0634 | BF347859 | | |
| 265621 | 235157_at | 0501 | AW297731 | | |
| 247363 | 216858_x_at | 0379 | AL080112 | | |
| 235077 | 204415_at | 0942 | NM_022873 | IFI6 | interferon, alpha-inducible protein 6 |
| 235634 | 204972_at | 0907 | NM_016817 | OAS2 | 2′-5′-oligoadenylate synthetase 2, 69/71 kDa |
| 263006 | 232537_x_at | 0440 | AU159474 | MARK3 | MAP/microtubule affinity-regulating kinase 3 |
| 272288 | 241824_at | 0002 | AA019641 | | |
| 264429 | 233964_at | 0381 | AL110135 | | |
| 268332 | 237868_x_at | 0267 | AI791828 | | |
| 247318 | 216813_at | 0402 | AL512728 | | |
| 245901 | 215392_at | 0428 | AU148154 | | |
| 272081 | 241617_x_at | 0607 | BE961949 | | |
| 245771 | 215262_at | 0115 | AF052160 | | |
| 118805 | 44673_at | 0748 | N53555 | SIGLEC1 | sialic acid binding Ig-like lectin 1, sialoadhesin |
| 249851 | 219352_at | 0915 | NM_017912 | HERC6 | hect domain and RLD 6 |
| 245223 | 214712_at | 0340 | AK023827 | RUNDC2B | RUN domain containing 2B |
| 238391 | 207735_at | 0913 | NM_017831 | RNF125 | ring finger protein 125 |
| 236214 | 205552_s_at | 0787 | NM_002534 | OAS1 | 2′,5′-oligoadenylate synthetase 1, 40/46 kDa |
| 267022 | 236558_at | 0043 | AA699809 | | |
| 255042 | 224568_x_at | 0462 | AW005982 | MALAT1 | metastasis associated lung adenocarcinoma transcript 1 (non- |
| | | | | | coding RNA) |
| 273157 | 242693_at | 0522 | AW664859 | | |
| 233351 | 202687_s_at | 0987 | U57059 | TNFSF10 | tumor necrosis factor (ligand) superfamily, member 10 |
| 259086 | 228617_at | 0011 | AA142842 | XAF1 | XIAP associated factor-1 |
| 254068 | 223577_x_at | 0068 | AA827878 | MALAT1 | metastasis associated lung adenocarcinoma transcript 1 (non- |
| | | | | | coding RNA) |
| 268806 | 238342_at | 0653 | BF677084 | | |
| 273735 | 243271_at | 0164 | AI064690 | | |
| 258078 | 227609_at | 0035 | AA633203 | EPSTI1 | epithelial stromal interaction 1 (breast) |
| 274457 | 243993_at | 0020 | AA436887 | | |
| 250190 | 219691_at | 0911 | NM_017654 | SAMD9 | sterile alpha motif domain containing 9 |
| 231959 | 201295_s_at | 0620 | BF111821 | WSB1 | WD repeat and SOCS box-containing 1 |
| 235195 | 204533_at | 0774 | NM_001565 | CXCL10 | chemokine (C—X—C motif) ligand 10 |
| 247438 | 216933_x_at | 0967 | S67788 | APC | adenomatosis polyposis coli |
| 244919 | 214405_at | 1014 | Z39557 | | |
| 249708 | 219209_at | 0938 | NM_022168 | IFIH1 | interferon induced with helicase C domain 1 |
| 258895 | 228426_at | 0492 | AW268886 | CLEC2D | C-type lectin domain family 2, member D |
| 255711 | 225239_at | 0188 | AI355441 | | |
| 241858 | 211300_s_at | 0718 | K03199 | TP53 | tumor protein p53 (Li-Fraumeni syndrome) |
| 248900 | 218400_at | 0854 | NM_006187 | OAS3 | 2′-5′-oligoadenylate synthetase 3, 100 kDa |
| 260469 | 230000_at | 0214 | AI523817 | RNF213 | ring finger protein 213 |
| 254430 | 223940_x_at | 0134 | AF132202 | | |
| 250362 | 219863_at | 0899 | NM_016323 | HERC5 | hect domain and RLD 5 |
| 274878 | 244414_at | 0175 | AI148006 | | |
| 267794 | 237330_at | 0033 | AA603494 | | |
| 274252 | 243788_at | 0060 | AA789293 | | |
| 246704 | 216197_at | 0328 | AK021569 | ATF7IP | activating transcription factor 7 interacting protein |
| 263872 | 233406_at | 0329 | AK022100 | | |
| 241392 | 210797_s_at | 0117 | AF063612 | OASL | 2′-5′-oligoadenylate synthetase-like |
| 239530 | 208900_s_at | 0468 | AW025108 | TOP1 | topoisomerase (DNA) I |
| 266011 | 235547_at | 0701 | BG548427 | | |
| 270025 | 239561_at | 0059 | AA780679 | | |
| 263432 | 232964_at | 0396 | AL137266 | LOC441257 | hypothetical LOC441257 |
| | | | | LOC442609 | similar to Williams Beuren syndrome chromosome region 19 |
| | | | | WBSCR19 | Williams Beuren syndrome chromosome region 19 |
| 252807 | 222313_at | 0528 | AW972359 | | |
| 258499 | 228030_at | 0161 | AI041522 | RBM6 | RNA binding motif protein 6 |
| 252260 | 221765_at | 0196 | AI378044 | UGCG | UDP-glucose ceramide glucosyltransferase |
| 254110 | 223619_x_at | 0133 | AF119841 | PECR | peroxisomal trans-2-enoyl-CoA reductase |
| 265453 | 234989_at | 0445 | AV699657 | TncRNA | trophoblast-derived noncoding RNA |
| 252824 | 222330_at | 0530 | AW974995 | | |
| 242071 | 211530_x_at | 0740 | M90686 | HLA-G | HLA-G histocompatibility antigen, class I, G |
| 241567 | 210985_s_at | 0116 | AF056322 | SP100 | SP100 nuclear antigen |
| 246107 | 215599_at | 1012 | X83300 | GUSBP1 | glucuronidase, beta pseudogene 1 |
| | | | | LOC730390 | similar to SMA4 |
| | | | | SMA4 | SMA4 |
| 275143 | 244679_at | 0160 | AI032730 | | |
| 244135 | 213620_s_at | 0007 | AA126728 | ICAM2 | intercellular adhesion molecule 2 |
| 274272 | 243808_at | 0486 | AW193531 | | |
| 234059 | 203397_s_at | 0618 | BF063271 | GALNT3 | UDP-N-acetyl-alpha-D-galactosamine:polypeptide N- |
| | | | | | acetylgalactosaminyltransferase 3 |
| | | | | | (GalNAc-T3) |
| 272396 | 241932_at | 0165 | AI073803 | | |
| 251201 | 220702_at | 0925 | NM_018616 | | |
| 246681 | 216174_at | 0356 | AK025343 | HCRP1 | hepatocellular carcinoma-related HCRP1 |
| 247070 | 216565_x_at | 0389 | AL121994 | | |
| 239595 | 208965_s_at | 0682 | BG256677 | IFI16 | interferon, gamma-inducible protein 16 |
| 246029 | 215521_at | 0335 | AK023029 | PHC3 | polyhomeotic homolog 3 (Drosophila) |
| 272488 | 242024_at | 0971 | T90999 | | |
| 274112 | 243648_at | 0017 | AA280627 | ZC3H11A | zinc finger CCCH-type containing 11A |
| 264725 | 234260_at | 0390 | AL122039 | | |
| 271008 | 240544_at | 0745 | N23033 | | |
| 261578 | 231109_at | 0962 | R44974 | | |
| 244828 | 214314_s_at | 0567 | BE138647 | EIF5B | eukaryotic translation initiation factor 5B |
| 238481 | 207827_x_at | 0724 | L36675 | SNCA | synuclein, alpha (non A4 component of amyloid precursor) |
| 235128 | 204466_s_at | 0684 | BG260394 | SNCA | synuclein, alpha (non A4 component of amyloid precursor) |
| 265641 | 235177_at | 0221 | AI625022 | FAM119A | family with sequence similarity 119, member A |
| 233540 | 202876_s_at | 0789 | NM_002586 | PBX2 | pre-B-cell leukemia homeobox 2 |
| 263328 | 232860_x_at | 0337 | AK023732 | RBM41 | RNA binding motif protein 41 |
| 242745 | 212224_at | 0759 | NM_000689 | ALDH1A1 | aldehyde dehydrogenase 1 family, member A1 |
| 252300 | 221805_at | 0413 | AL537457 | NEFL | neurofilament, light polypeptide 68 kDa |
| 256137 | 225665_at | 0173 | AI129320 | ZAK | sterile alpha motif and leucine zipper containing kinase AZK |
| 252427 | 221932_s_at | 0010 | AA133341 | GLRX5 | glutaredoxin 5 homolog (S. cerevisiae) |
| 258398 | 227929_at | 0431 | AU151342 | | |
| 257281 | 226811_at | 0372 | AL046017 | FAM46C | family with sequence similarity 46, member C |
| 239330 | 208700_s_at | 0720 | L12711 | TKT | transketolase (Wernicke-Korsakoff syndrome) |
| 257126 | 226656_at | 0467 | AW024741 | CRTAP | cartilage associated protein |

TABLE 4

| Fragment Id | Name | SEQ ID NO. | Accession | Symbol | Gene Name |
|---|---|---|---|---|---|
| 255042 | 224568_x_at | 0462 | AW005982 | MALAT1 | metastasis associated lung adenocarcinoma transcript 1 (non-coding |
| | | | | | RNA) |
| 254430 | 223940_x_at | 0134 | AF132202 | | |
| 269238 | 238774_at | 0526 | AW960454 | | |
| 272333 | 241869_at | 0469 | AW026509 | APOL6 | apolipoprotein L, 6 |
| 255041 | 224567_x_at | 0699 | BG534952 | MALAT1 | metastasis associated lung adenocarcinoma transcript 1 (non-coding |
| | | | | | RNA) |
| 257145 | 226675_s_at | 1002 | W80468 | MALAT1 | metastasis associated lung adenocarcinoma transcript 1 (non-coding |
| | | | | | RNA) |
| 238469 | 207815_at | 0792 | NM_002620 | PF4V1 | platelet factor 4 variant 1 |
| 247363 | 216858_x_at | 0379 | AL080112 | | |
| 272488 | 242024_at | 0971 | T90999 | | |
| 245632 | 215123_at | 0375 | AL049250 | | |
| 238391 | 207735_at | 0913 | NM_017831 | RNF125 | ring finger protein 125 |
| 239530 | 208900_s_at | 0468 | AW025108 | TOP1 | topoisomerase (DNA) I |
| 265492 | 235028_at | 0686 | BG288330 | | |
| 235672 | 205010_at | 0929 | NM_019067 | GNL3L | guanine nucleotide binding protein-like 3 (nucleolar)-like |
| 268477 | 238013_at | 0634 | BF347859 | | |
| 240326 | 209703_x_at | 0550 | BC004492 | METTL7A | methyltransferase like 7A |
| 247318 | 216813_at | 0402 | AL512728 | | |
| 255711 | 225239_at | 0188 | AI355441 | | |
| 262881 | 232412_at | 0347 | AK024690 | | |
| 273238 | 242774_at | 0242 | AI684761 | SYNE2 | spectrin repeat containing, nuclear envelope 2 |
| 257532 | 227062_at | 0434 | AU155361 | TncRNA | trophoblast-derived noncoding RNA |
| 247055 | 216550_x_at | 1010 | X80821 | ANKRD12 | ankyrin repeat domain 12 |
| 241039 | 210426_x_at | 0974 | U04897 | RORA | RAR-related orphan receptor A |
| 263432 | 232964_at | 0396 | AL137266 | LOC441257 | hypothetical LOC441257 |
| | | | | LOC442609 | similar to Williams Beuren syndrome chromosome region 19 |
| | | | | WBSCR19 | Williams Beuren syndrome chromosome region 19 |
| 265852 | 235388_at | 0700 | BG538482 | CHD9 | chromodomain helicase DNA binding protein 9 |
| 268332 | 237868_x_at | 0267 | AI791828 | | |
| 264429 | 233964_at | 0381 | AL110135 | | |
| 137612 | 60815_at | 0031 | AA601208 | LOC441257 | hypothetical LOC441257 |
| 249611 | 219112_at | 0900 | NM_016340 | RAPGEF6 | Rap guanine nucleotide exchange factor (GEF) 6 |
| 272343 | 241879_at | 0513 | AW511222 | | |
| 245894 | 215385_at | 0334 | AK022473 | | |
| 251439 | 220940_at | 0952 | NM_025190 | KIAA1641 | KIAA1641 |
| 248290 | 217790_s_at | 0874 | NM_007107 | SSR3 | signal sequence receptor, gamma (translocon-associated protein |
| | | | | | gamma) |
| 232068 | 201404_x_at | 0536 | BC000268 | PSMB2 | proteasome (prosome, macropain) subunit, beta type, 2 |
| 246382 | 215874_at | 0361 | AK026820 | | |
| 247438 | 216933_x_at | 0967 | S67788 | APC | adenomatosis polyposis coli |
| 246107 | 215599_at | 1012 | X83300 | GUSBP1 | glucuronidase, beta pseudogene 1 |
| | | | | LOC730390 | similar to SMA4 |
| | | | | SMA4 | SMA4 |
| 270035 | 239571_at | 0172 | AI123399 | | |
| 260649 | 230180_at | 0025 | AA521056 | | |
| 273380 | 242916_at | 0037 | AA642477 | CEP110 | centrosomal protein 110 kDa |
| 272196 | 241732_at | 0643 | BF513820 | | |
| 274821 | 244357_at | 0970 | T90760 | | |
| 244165 | 213650_at | 0464 | AW006438 | GOLGA8A | golgi autoantigen, golgin subfamily a, 8A |
| 245771 | 215262_at | 0115 | AF052160 | | |
| 252807 | 222313_at | 0528 | AW972359 | | |
| 274112 | 243648_at | 0017 | AA280627 | ZC3H11A | zinc finger CCCH-type containing 11A |
| 248204 | 217704_x_at | 0281 | AI820796 | SUZ12P | suppressor of zeste 12 homolog pseudogene |
| 241090 | 210479_s_at | 0722 | L14611 | RORA | RAR-related orphan receptor A |
| 245901 | 215392_at | 0428 | AU148154 | | |
| 241969 | 211424_x_at | 0130 | AF113007 | METTL7A | methyltransferase like 7A |
| 251085 | 220586_at | 0951 | NM_025134 | CHD9 | chromodomain helicase DNA binding protein 9 |
| 257461 | 226991_at | 0023 | AA489681 | NFATC2 | nuclear factor of activated T-cells, cytoplasmic, calcineurin- |
| | | | | | dependent 2 |
| 268805 | 238341_at | 0653 | BF677084 | | |
| 255023 | 224549_x_at | 0142 | AF194537 | | |
| 243107 | 212587_s_at | 0273 | AI809341 | PTPRC | protein tyrosine phosphatase, receptor type, C |
| 270156 | 239692_at | 0168 | AI083578 | | |
| 262855 | 232386_at | 0450 | AV703288 | VPS13C | vacuolar protein sorting 13 homolog C (S. cerevisiae) |
| 262458 | 231989_s_at | 0095 | AC003007 | SMG1 | PI-3-kinase-related kinase SMG-1 |
| 252481 | 221986_s_at | 0465 | AW006750 | KLHL24 | kelch-like 24 (Drosophila) |
| 238601 | 207953_at | 0106 | AF010144 | AD7C-NTP | neuronal thread protein AD7c-NTP |
| 269722 | 239258_at | 0578 | BE551407 | | |
| 274495 | 244031_at | 0072 | AA868193 | | |
| 273155 | 242691_at | 0070 | AA829017 | | |
| 241975 | 211430_s_at | 0739 | M87789 | IGHG1 | immunoglobulin heavy constant gamma 1 (G1m marker) |
| 265453 | 234989_at | 0445 | AV699657 | TncRNA | trophoblast-derived noncoding RNA |
| 269566 | 239102_s_at | 0500 | AW293296 | | |
| 236769 | 206108_s_at | 0856 | NM_006275 | SFRS6 | splicing factor, arginine/serine-rich 6 |
| 274342 | 243878_at | 0177 | AI248610 | | |
| 242548 | 212027_at | 0298 | AI925305 | RBM25 | RNA binding motif protein 25 |
| 274316 | 243852_at | 0308 | AI963460 | | |
| 252824 | 222330_at | 0530 | AW974995 | | |
| 271008 | 240544_at | 0745 | N23033 | | |
| 272689 | 242225_at | 0216 | AI569482 | | |
| 245204 | 214693_x_at | 0593 | BE732345 | LOC727908 | hypothetical protein LOC727908 |
| | | | | LOC728936 | similar to CG10522-PA |
| | | | | LOC728980 | hypothetical protein LOC728980 |
| | | | | NBPF1 | neuroblastoma breakpoint family, member 1 |
| | | | | NBPF11 | neuroblastoma breakpoint family, member 11 |
| | | | | NBPF14 | neuroblastoma breakpoint family, member 14 |
| | | | | NBPF15 | neuroblastoma breakpoint family, member 15 |
| 259656 | 229187_at | 0159 | AI026708 | LOC283788 | hypothetical protein LOC283788 |
| 246029 | 215521_at | 0335 | AK023029 | PHC3 | polyhomeotic homolog 3 (Drosophila) |
| 272833 | 242369_x_at | 0215 | AI561070 | | |
| 239243 | 208610_s_at | 0233 | AI655799 | SRRM2 | serine/arginine repetitive matrix 2 |
| 243962 | 213446_s_at | 0237 | AI679073 | IQGAP1 | IQ motif containing GTPase activating protein 1 |
| 264616 | 234151_at | 0346 | AK024629 | | |
| 231152 | AFFX-r2- | 0729 | M10098 | | |
| | Hs18SrRNA- | | | | |
| | M_x_at | | | | |
| 261953 | 231484_at | 0202 | AI424825 | | |
| 274272 | 243808_at | 0486 | AW193531 | | |
| 264020 | 233554_at | 0157 | AF339764 | | |
| 245521 | 215012_at | 0423 | AU144775 | | |
| 247997 | 217497_at | 0521 | AW613387 | | |
| 273343 | 242879_x_at | 0305 | AI939442 | | |
| 265524 | 235060_at | 0373 | AL047052 | DKFZp547E087 | hypothetical gene LOC283846 |
| 251975 | 221477_s_at | 0647 | BF575213 | SOD2 | superoxide dismutase 2, mitochondrial |
| 248110 | 217610_at | 0374 | AL047879 | | |
| 244919 | 214405_at | 1014 | Z39557 | | |
| 252260 | 221765_at | 0196 | AI378044 | UGCG | UDP-glucose ceramide glucosyltransferase |
| 245538 | 215029_at | 0383 | AL117451 | | |
| 268267 | 237803_x_at | 0021 | AA455236 | | |
| 265068 | 234604_at | 0350 | AK024881 | | |
| 239886 | 209257_s_at | 0660 | BF795297 | SMC3 | structural maintenance of chromosomes 3 |
| 239489 | 208859_s_at | 0227 | AI650257 | ATRX | alpha thalassemia/mental retardation syndrome X-linked (RAD54 |
| | | | | LOC728849 | homolog, S. cerevisiae) |
| | | | | | similar to transcriptional regulator ATRX isoform 1 |
| 236256 | 205594_at | 0890 | NM_014897 | ZNF652 | zinc finger protein 652 |
| 242515 | 211993_at | 0266 | AI768512 | WNK1 | WNK lysine deficient protein kinase 1 |
| 268806 | 238342_at | 0653 | BF677084 | | |
| 254110 | 223619_x_at | 0133 | AF119841 | PECR | peroxisomal trans-2-enoyl-CoA reductase |
| 261578 | 231109_at | 0962 | R44974 | | |
| 263939 | 233473_x_at | 0437 | AU156202 | | |
| 266109 | 235645_at | 0512 | AW501507 | ESCO1 | establishment of cohesion 1 homolog 1 (S. cerevisiae) |
| 266011 | 235547_at | 0701 | BG548427 | | |
| 246096 | 215588_x_at | 0352 | AK024958 | RIOK3 | RIO kinase 3 (yeast) |
| 270605 | 240141_at | 0617 | BF062399 | | |
| 270275 | 239811_at | 0664 | BF954306 | | |
| 242529 | 212007_at | 0301 | AI927512 | UBXD2 | UBX domain containing 2 |
| 264725 | 234260_at | 0390 | AL122039 | | |
| 237626 | 206965_at | 0898 | NM_016285 | KLF12 | Kruppel-like factor 12 |
| 233810 | 203147_s_at | 0608 | BE962483 | TRIM14 | tripartite motif-containing 14 |
| 274340 | 243876_at | 0062 | AA806845 | | |
| 246372 | 215864_at | 0355 | AK025077 | | |
| 262735 | 232266_x_at | 0343 | AK024379 | CDC2L5 | cell division cycle 2-like 5 (cholinesterase-related cell division |
| | | | | | controller) |
| 267016 | 236552_at | 0261 | AI762475 | | |
| 265187 | 234723_x_at | 0350 | AK024881 | | |
| 239295 | 208663_s_at | 0230 | AI652848 | TTC3 | tetratricopeptide repeat domain 3 |
| 269628 | 239164_at | 0586 | BE674896 | | |
| 244440 | 213926_s_at | 0254 | AI742626 | HRB | HIV-1 Rev binding protein |
| 274283 | 243819_at | 0425 | AU146329 | | |
| 264641 | 234176_at | 0349 | AK024877 | | |
| 259455 | 228986_at | 0531 | AW978375 | OSBPL8 | oxysterol binding protein-like 8 |
| 239465 | 208835_s_at | 0478 | AW089673 | CROP | cisplatin resistance-associated overexpressed protein |
| 247068 | 216563_at | 1010 | X80821 | ANKRD12 | ankyrin repeat domain 12 |
| 246736 | 216229_x_at | 1011 | X81001 | HCG2P7 | HLA complex group 2 pseudogene 7 |
| 267786 | 237322_at | 0293 | AI914323 | MIAT | myocardial infarction associated transcript (non-protein coding) |
| 231366 | 200702_s_at | 0693 | BG421209 | DDX24 | DEAD (Asp-Glu-Ala-Asp) box polypeptide 24 |
| 262879 | 232410_at | 0694 | BG428861 | | |
| 243866 | 213350_at | 0654 | BF680255 | RPS11 | ribosomal protein S11 |
| 272288 | 241824_at | 0002 | AA019641 | | |
| 241872 | 211317_s_at | 0111 | AF041461 | CFLAR | CASP8 and FADD-like apoptosis regulator |
| 253530 | 223036_at | 0708 | D84430 | FARSB | phenylalanyl-tRNA synthetase, beta subunit |
| 240136 | 209508_x_at | 0105 | AF005774 | CFLAR | CASP8 and FADD-like apoptosis regulator |
| 251203 | 220704_at | 0924 | NM_018563 | | |
| 267085 | 236621_at | 0444 | AV683684 | | |
| 242600 | 212079_s_at | 0046 | AA715041 | MLL | myeloid/lymphoid or mixed-lineage leukemia (trithorax homolog, |
| | | | | | Drosophila) |
| 238023 | 207365_x_at | 0888 | NM_014709 | USP34 | ubiquitin specific peptidase 34 |
| 238386 | 207730_x_at | 0916 | NM_017932 | | |
| 243314 | 212794_s_at | 0319 | AK001728 | KIAA1033 | KIAA1033 |
| 266926 | 236462_at | 0051 | AA742310 | | |
| 265631 | 235167_at | 0611 | BE972419 | | |
| 266723 | 236259_at | 0635 | BF433725 | STK4 | serine/threonine kinase 4 |
| 240866 | 210251_s_at | 0129 | AF112221 | RUFY3 | RUN and FYVE domain containing 3 |
| 245168 | 214657_s_at | 0421 | AU134977 | TncRNA | trophoblast-derived noncoding RNA |
| 269022 | 238558_at | 0205 | AI445833 | | |
| 273291 | 242827_x_at | 0061 | AA806368 | | |
| 264284 | 233819_s_at | 0336 | AK023499 | ZNF294 | zinc finger protein 294 |
| 246694 | 216187_x_at | 0146 | AF222691 | | |
| 236717 | 206056_x_at | 1007 | X52075 | SPN | sialophorin (leukosialin, CD43) |
| 52 | AFFX- | 0729 | M10098 | | |
| | HUMRGE/ | | | | |
| | M10098_3_at | | | | |
| 243544 | 213026_at | 0609 | BE965998 | ATG12 | ATG12 autophagy related 12 homolog (S. cerevisiae) |
| 269715 | 239251_at | 0527 | AW963634 | | |
| 246037 | 215529_x_at | 0219 | AI590053 | DIP2A | DIP2 disco-interacting protein 2 homolog A (Drosophila) |
| 239887 | 209258_s_at | 0193 | AI373676 | SMC3 | structural maintenance of chromosomes 3 |
| 250837 | 220338_at | 0920 | NM_018037 | RALGPS2 | Ral GEF with PH domain and SH3 binding motif 2 |
| 244471 | 213957_s_at | 0036 | AA635523 | CEP350 | centrosomal protein 350 kDa |
| 234292 | 203630_s_at | 0859 | NM_006348 | COG5 | component of oligomeric golgi complex 5 |
| 252480 | 221985_at | 0465 | AW006750 | KLHL24 | kelch-like 24 (Drosophila) |
| 237212 | 206551_x_at | 0910 | NM_017644 | KLHL24 | kelch-like 24 (Drosophila) |
| 247346 | 216841_s_at | 1006 | X15132 | SOD2 | superoxide dismutase 2, mitochondrial |
| 232118 | 201454_s_at | 0471 | AW055008 | NPEPPS | aminopeptidase puromycin sensitive |
| 246112 | 215604_x_at | 0338 | AK023783 | | |
| 268974 | 238510_at | 0055 | AA744964 | ZNF720 | zinc finger protein 720 |
| 250731 | 220232_at | 0950 | NM_024906 | SCD5 | stearoyl-CoA desaturase 5 |
| 262594 | 232125_at | 0427 | AU147419 | | |
| 233043 | 202379_s_at | 0190 | AI361805 | NKTR | natural killer-tumor recognition sequence |
| 269738 | 239274_at | 0454 | AV729557 | | |
| 238885 | 208246_x_at | 0909 | NM_017618 | | |
| 271687 | 241223_x_at | 0282 | AI821721 | | |
| 231749 | 201085_s_at | 0040 | AA664291 | SON | SON DNA binding protein |
| 245712 | 215203_at | 0508 | AW438464 | | |
| 105867 | 39313_at | 0081 | AB002342 | WNK1 | WNK lysine deficient protein kinase 1 |
| 241338 | 210742_at | 0118 | AF064103 | CDC14A | CDC14 cell division cycle 14 homolog A (S. cerevisiae) |
| 248079 | 217579_x_at | 0506 | AW301806 | | |
| 258784 | 228315_at | 0223 | AI632728 | | |
| 262204 | 231735_s_at | 0882 | NM_014086 | | |
| 267022 | 236558_at | 0043 | AA699809 | | |
| 270061 | 239597_at | 0080 | AA993566 | | |
| 273495 | 243031_at | 0753 | N90377 | | |
| 266718 | 236254_at | 0564 | BE048857 | VPS13B | vacuolar protein sorting 13 homolog B (yeast) |
| 264495 | 234030_at | 0125 | AF090925 | | |
| 274975 | 244511_at | 0446 | AV700591 | | |
| 239717 | 209088_s_at | 0969 | T70262 | UBN1 | ubinuclein 1 |
| 236173 | 205511_at | 0918 | NM_017976 | | |
| 260682 | 230213_at | 0569 | BE220399 | C19orf43 | chromosome 19 open reading frame 43 |
| 253127 | 222633_at | 0149 | AF268193 | TBL1XR1 | transducin (beta)-like 1X-linked receptor 1 |
| 242364 | 211833_s_at | 0977 | U19599 | BAX | BCL2-associated X protein |
| 264377 | 233912_x_at | 0327 | AK021525 | | |
| 261710 | 231241_at | 0511 | AW469714 | LOC645744 | similar to PCAF associated factor 65 beta isoform b |
| 272801 | 242337_at | 0186 | AI347128 | | |
| 248179 | 217679_x_at | 0240 | AI683552 | | |
| 260844 | 230375_at | 0303 | AI936531 | C6orf111 | chromosome 6 open reading frame 111 |
| 271706 | 241242_at | 0577 | BE503118 | | |
| 272920 | 242456_at | 0079 | AA931565 | MRE11A | MRE11 meiotic recombination 11 homolog A (S. cerevisiae) |
| 268417 | 237953_at | 0171 | AI092511 | | |
| 271732 | 241268_x_at | 0306 | AI939447 | | |
| 262856 | 232387_at | 0359 | AK025700 | AP1GBP1 | AP1 gamma subunit binding protein 1 |
| 248249 | 217749_at | 0896 | NM_016128 | COPG | coatomer protein complex, subunit gamma |
| 269075 | 238611_at | 0292 | AI906424 | | |
| 273157 | 242693_at | 0522 | AW664859 | | |
| 246444 | 215936_s_at | 0318 | AK001657 | KIAA1033 | KIAA1033 |
| 274291 | 243827_at | 0370 | AL038125 | | |
| 237453 | 206792_x_at | 0763 | NM_000923 | PDE4C | phosphodiesterase 4C, cAMP-specific (phosphodiesterase E1 dunce |
| | | | | | homolog, Drosophila) |
| 269728 | 239264_at | 0529 | AW973078 | | |
| 275230 | 244766_at | 0676 | BG180003 | LOC440354 | PI-3-kinase-related kinase SMG-1 pseudogene |
| 253746 | 223254_s_at | 0077 | AA887053 | KIAA1333 | KIAA1333 |
| 274016 | 243552_at | 0466 | AW008914 | | |
| 273410 | 242946_at | 0499 | AW293276 | CD53 | CD53 molecule |
| 260055 | 229586_at | 0504 | AW300405 | CHD9 | chromodomain helicase DNA binding protein 9 |
| 239076 | 208442_s_at | 0754 | NM_000051 | ATM\|\|LOC651610 | ataxia telangiectasia mutated (includes complementation groups A, C |
| | | | | | and D) |
| | | | | | similar to Serine-protein kinase ATM (Ataxia telangiectasia mutated) |
| | | | | | (A-T, mutated) |
| 275010 | 244546_at | 0257 | AI760495 | CYCS | cytochrome c, somatic |
| 260997 | 230528_s_at | 0228 | AI651726 | MGC2752 | hypothetical protein MGC2752 |
| 273598 | 243134_at | 0484 | AW190862 | CHD2 | chromodomain helicase DNA binding protein 2 |
| 265990 | 235526_at | 0595 | BE748802 | C11orf58 | chromosome 11 open reading frame 58 |
| 256821 | 226350_at | 0435 | AU155565 | CHML | choroideremia-like (Rab escort protein 2) |
| 240298 | 209675_s_at | 0548 | BC004242 | HNRPUL1 | heterogeneous nuclear ribonucleoprotein U-like 1 |
| 253682 | 223189_x_at | 0476 | AW082219 | MLL5 | myeloid/lymphoid or mixed-lineage leukemia 5 (trithorax homolog, |
| | | | | | Drosophila) |
| 262364 | 231895_at | 0024 | AA501453 | SASS6 | spindle assembly 6 homolog (C. elegans) |
| 273868 | 243404_at | 0029 | AA553477 | | |
| 255450 | 224977_at | 0386 | AL119182 | C6orf89 | chromosome 6 open reading frame 89 |
| 254234 | 223743_s_at | 0539 | BC000756 | MRPL4 | mitochondrial ribosomal protein L4 |
| 232220 | 201556_s_at | 0546 | BC002737 | VAMP2 | vesicle-associated membrane protein 2 (synaptobrevin 2) |
| 255483 | 225010_at | 0351 | AK024913 | CCDC6 | coiled-coil domain containing 6 |
| 261662 | 231193_s_at | 0571 | BE326569 | | |
| 263781 | 233314_at | 0326 | AK021487 | PTEN | phosphatase and tensin homolog (mutated in multiple advanced |
| | | | | | cancers 1) |
| 233906 | 203243_s_at | 0861 | NM_006457 | PDLIM5 | PDZ and LIM domain 5 |
| 268932 | 238468_at | 0016 | AA214704 | TNRC6B | trinucleotide repeat containing 6B |
| 261248 | 230779_at | 0649 | BF594371 | TNRC6B | trinucleotide repeat containing 6B |

TABLE 5

| Fragment Id | Name | SEQ ID NO. | Accession | Symbol | Gene Name |
|---|---|---|---|---|---|
| 238391 | 207735_at | 0913 | NM_017831 | RNF125 | ring finger protein 125 |
| 239530 | 208900_s_at | 0468 | AW025108 | TOP1 | topoisomerase (DNA) I |
| 243866 | 213350_at | 0654 | BF680255 | RPS11 | ribosomal protein S11 |
| 244919 | 214405_at | 1014 | Z39557 | | |
| 245632 | 215123_at | 0375 | AL049250 | | |
| 245771 | 215262_at | 0115 | AF052160 | | |
| 245901 | 215392_at | 0428 | AU148154 | | |
| 246029 | 215521_at | 0335 | AK023029 | PHC3 | polyhomeotic homolog 3 (Drosophila) |
| 246107 | 215599_at | 1012 | X83300 | GUSBP1 | glucuronidase, beta pseudogene 1 |
| | | | | LOC730390 | similar to SMA4 |
| | | | | SMA4 | SMA4 |
| 247318 | 216813_at | 0402 | AL512728 | | |
| 247363 | 216858_x_at | 0379 | AL080112 | | |
| 247438 | 216933_x_at | 0967 | S67788 | APC | adenomatosis polyposis coli |
| 252260 | 221765_at | 0196 | AI378044 | UGCG | UDP-glucose ceramide glucosyltransferase |
| 252807 | 222313_at | 0528 | AW972359 | | |
| 252824 | 222330_at | 0530 | AW974995 | | |
| 254110 | 223619_x_at | 0133 | AF119841 | PECR | peroxisomal trans-2-enoyl-CoA reductase |
| 255042 | 224568_x_at | 0462 | AW005982 | MALAT1 | metastasis associated lung adenocarcinoma transcript 1 (non- |
| | | | | | coding RNA) |
| 255711 | 225239_at | 0188 | AI355441 | | |
| 261578 | 231109_at | 0962 | R44974 | | |
| 261953 | 231484_at | 0202 | AI424825 | | |
| 262204 | 231735_s_at | 0882 | NM_014086 | | |
| 264429 | 233964_at | 0381 | AL110135 | | |
| 264725 | 234260_at | 0390 | AL122039 | | |
| 265453 | 234989_at | 0445 | AV699657 | TncRNA | trophoblast-derived noncoding RNA |
| 266011 | 235547_at | 0701 | BG548427 | | |
| 267022 | 236558_at | 0043 | AA699809 | | |
| 268332 | 237868_x_at | 0267 | AI791828 | | |
| 268477 | 238013_at | 0634 | BF347859 | | |
| 268806 | 238342_at | 0653 | BF677084 | | |
| 269075 | 238611_at | 0292 | AI906424 | | |
| 271008 | 240544_at | 0745 | N23033 | | |
| 272288 | 241824_at | 0002 | AA019641 | | |
| 272333 | 241869_at | 0469 | AW026509 | APOL6 | apolipoprotein L, 6 |
| 273157 | 242693_at | 0522 | AW664859 | | |
| 274112 | 243648_at | 0017 | AA280627 | ZC3H11A | zinc finger CCCH-type containing 11A |
| 274272 | 243808_at | 0486 | AW193531 | | |

TABLE 6

| SEQ ID NO | Accession No. |
|---|---|
| 0001 | AA012917.1 |
| 0002 | AA019641.1 |
| 0003 | AA029331.1 |
| 0004 | AA031528.1 |
| 0005 | AA045257.1 |
| 0006 | AA058770.1 |
| 0007 | AA126728.1 |
| 0008 | AA126763.1 |
| 0009 | AA131041.1 |
| 0010 | AA133341.1 |
| 0011 | AA142842.1 |
| 0012 | AA149545.1 |
| 0013 | AA156754.1 |
| 0014 | AA194149.1 |
| 0015 | AA203136.1 |
| 0016 | AA214704.1 |
| 0017 | AA280627.1 |
| 0018 | AA359612.1 |
| 0019 | AA416756.1 |
| 0020 | AA436887.1 |
| 0021 | AA455236.1 |
| 0022 | AA468591.1 |
| 0023 | AA489681.1 |
| 0024 | AA501453.1 |
| 0025 | AA521056.1 |
| 0026 | AA521056.1 |
| 0027 | AA530892.1 |
| 0028 | AA530892.1 |
| 0030 | AA580082.1 |
| 0031 | AA601208.1 |
| 0032 | AA602532.1 |
| 0033 | AA603494.1 |
| 0034 | AA632758.1 |
| 0035 | AA633203.1 |
| 0036 | AA635523.1 |
| 0037 | AA642477.1 |
| 0038 | AA650558.1 |
| 0039 | AA664258.1 |
| 0040 | AA664291.1 |
| 0041 | AA679988.1 |
| 0042 | AA699443.1 |
| 0043 | AA699809.1 |
| 0044 | AA702930.1 |
| 0045 | AA703523.1 |
| 0046 | AA715041.1 |
| 0047 | AA721230.1 |
| 0048 | AA732581.1 |
| 0049 | AA732581.1 |
| 0050 | AA741058.1 |
| 0051 | AA742310.1 |
| 0052 | AA743390.1 |
| 0053 | AA744613.1 |
| 0054 | AA744636.1 |
| 0055 | AA744964.1 |
| 0056 | AA748423.1 |
| 0057 | AA749101.1 |
| 0058 | AA758013.1 |
| 0059 | AA780679.1 |
| 0060 | AA789293.1 |
| 0061 | AA806368.1 |
| 0062 | AA806845.1 |
| 0063 | AA811192.1 |
| 0064 | AA811657.1 |
| 0065 | AA814383.1 |
| 0066 | AA825925.1 |
| 0067 | AA827805.1 |
| 0068 | AA827878.1 |
| 0069 | AA828049.1 |
| 0070 | AA829017.1 |
| 0071 | AA843122.1 |
| 0072 | AA868193.1 |
| 0073 | AA872593.1 |
| 0074 | AA873350.1 |
| 0075 | AA876138.1 |
| 0076 | AA877910.1 |
| 0077 | AA887053.1 |
| 0078 | AA916568.1 |
| 0079 | AA931565.1 |
| 0080 | AA993566.1 |
| 0081 | AB002342.2 |
| 0084 | AB011165.2 |
| 0085 | AB014486.1 |
| 0086 | AB014560.1 |
| 0087 | AB019490.1 |
| 0088 | AB023173.1 |
| 0090 | AB033054.2 |
| 0091 | AB035482.1 |
| 0092 | AB043821.1 |
| 0093 | AB044805.1 |
| 0094 | AB051450.1 |
| 0095 | AC003007.1 |
| 0096 | AC003030.1 |
| 0097 | AC004528.1 |
| 0098 | AC004692.2 |
| 0099 | AC004832.3 |
| 0102 | AF000381.2 |
| 0103 | AF000381.2 |
| 0104 | AF001540.1 |
| 0106 | AF010144.1 |
| 0107 | AF021834.1 |
| 0108 | AF022991.1 |
| 0109 | AF037194.1 |
| 0110 | AF041261.1 |
| 0111 | AF041461.1 |
| 0112 | AF044253.1 |
| 0113 | AF044253.1 |
| 0114 | AF047002.1 |
| 0116 | AF056322.1 |
| 0117 | AF063612.1 |
| 0118 | AF064103.1 |
| 0119 | AF065389.1 |
| 0121 | AF070592.1 |
| 0122 | AF070620.1 |
| 0123 | AF078866.1 |
| 0124 | AF086041.1 |
| 0126 | AF092128.1 |
| 0129 | AF112221.1 |
| 0130 | AF113007.1 |
| 0131 | AF113016.1 |
| 0132 | AF116273.1 |
| 0133 | AF119841.1 |
| 0134 | AF132202.1 |
| 0135 | AF132202.1 |
| 0136 | AF141304.1 |
| 0137 | AF143684.1 |
| 0138 | AF159567.1 |
| 0139 | AF165187.1 |
| 0140 | AF172449.1 |
| 0141 | AF176039.1 |
| 0142 | AF194537.1 |
| 0143 | AF194973.1 |
| 0144 | AF212842.1 |
| 0146 | AF222691.1 |
| 0147 | AF241785.1 |
| 0148 | AF255648.1 |
| 0149 | AF268193.1 |
| 0150 | AF274954.1 |
| 0151 | AF302786.1 |
| 0152 | AF307332.1 |
| 0153 | AF315633.1 |
| 0154 | AF317392.1 |
| 0155 | AF326966.1 |
| 0156 | AF327066.1 |
| 0157 | AF339764.1 |
| 0159 | AI026708.1 |
| 0161 | AI041522.1 |
| 0162 | AI052103.1 |
| 0163 | AI057333.1 |
| 0164 | AI064690.1 |
| 0165 | AI073803.1 |
| 0166 | AI075407.1 |
| 0167 | AI078279.1 |
| 0168 | AI083578.1 |
| 0169 | AI084489.1 |
| 0170 | AI092265.1 |
| 0171 | AI092511.1 |
| 0172 | AI123399.1 |
| 0173 | AI129320.1 |
| 0174 | AI139252.1 |
| 0175 | AI148006.1 |
| 0176 | AI241945.1 |
| 0177 | AI248610.1 |
| 0178 | AI249980.1 |
| 0179 | AI263909.1 |
| 0181 | AI283051.1 |
| 0182 | AI332638.1 |
| 0183 | AI336848.1 |
| 0184 | AI337069.1 |
| 0185 | AI341234.1 |
| 0186 | AI347128.1 |
| 0187 | AI348001.1 |
| 0188 | AI355441.1 |
| 0190 | AI361805.1 |
| 0191 | AI363213.1 |
| 0192 | AI369073.1 |
| 0193 | AI373676.1 |
| 0194 | AI377324.1 |
| 0195 | AI378026.1 |
| 0196 | AI378044.1 |
| 0197 | AI379691.1 |
| 0198 | AI380514.1 |
| 0199 | AI393355.1 |
| 0200 | AI418892.1 |
| 0201 | AI420611.1 |
| 0202 | AI424825.1 |
| 0203 | AI434509.1 |
| 0204 | AI440495.1 |
| 0205 | AI445833.1 |
| 0206 | AI458949.1 |
| 0207 | AI459274.1 |
| 0208 | AI472339.1 |
| 0209 | AI472757.1 |
| 0210 | AI473796.1 |
| 0211 | AI475544.1 |
| 0212 | AI492388.1 |
| 0213 | AI510829.1 |
| 0214 | AI523817.1 |
| 0215 | AI561070.1 |
| 0216 | AI569482.1 |
| 0217 | AI571419.1 |
| 0218 | AI571798.1 |
| 0219 | AI590053.1 |
| 0220 | AI590719.1 |
| 0221 | AI625022.1 |
| 0222 | AI632224.1 |
| 0223 | AI632728.1 |
| 0225 | AI633738.1 |
| 0228 | AI651726.1 |
| 0229 | AI652546.1 |
| 0230 | AI652848.1 |
| 0231 | AI652861.1 |
| 0232 | AI652864.1 |
| 0233 | AI655799.1 |
| 0234 | AI673812.1 |
| 0235 | AI674926.1 |
| 0236 | AI678692.1 |
| 0238 | AI681177.1 |
| 0239 | AI681868.1 |
| 0240 | AI683552.1 |
| 0241 | AI683805.1 |
| 0242 | AI684761.1 |
| 0243 | AI688640.1 |
| 0244 | AI689052.1 |
| 0245 | AI697540.1 |
| 0246 | AI732802.1 |
| 0247 | AI733194.1 |
| 0248 | AI738675.1 |
| 0249 | AI738965.1 |
| 0250 | AI741056.1 |
| 0251 | AI742039.1 |
| 0252 | AI742057.1 |
| 0253 | AI742378.1 |
| 0254 | AI742626.1 |
| 0255 | AI753747.1 |
| 0256 | AI754928.1 |
| 0257 | AI760495.1 |
| 0259 | AI761989.1 |
| 0260 | AI762296.1 |
| 0261 | AI762475.1 |
| 0262 | AI763123.1 |
| 0263 | AI763206.1 |
| 0264 | AI767435.1 |
| 0265 | AI767751.1 |
| 0266 | AI768512.1 |
| 0267 | AI791828.1 |
| 0268 | AI796687.1 |
| 0269 | AI797788.1 |
| 0270 | AI805266.1 |
| 0271 | AI806984.1 |
| 0272 | AI807341.1 |
| 0274 | AI809961.1 |
| 0275 | AI810244.1 |
| 0276 | AI814329.1 |
| 0277 | AI814527.1 |
| 0278 | AI818488.1 |
| 0279 | AI819630.1 |
| 0281 | AI820796.1 |
| 0282 | AI821721.1 |
| 0284 | AI827015.1 |
| 0285 | AI828221.1 |
| 0286 | AI829170.1 |
| 0287 | AI829875.1 |
| 0288 | AI832074.1 |
| 0289 | AI857639.1 |
| 0290 | AI860647.1 |
| 0291 | AI871160.1 |
| 0292 | AI906424.1 |
| 0293 | AI914323.1 |
| 0295 | AI923675.1 |
| 0296 | AI924150.1 |
| 0297 | AI924660.1 |
| 0298 | AI925305.1 |
| 0299 | AI925572.1 |
| 0300 | AI927329.1 |
| 0301 | AI927512.1 |
| 0302 | AI934556.1 |
| 0303 | AI936531.1 |
| 0304 | AI937206.1 |
| 0305 | AI939442.1 |
| 0306 | AI939447.1 |
| 0307 | AI950023.1 |
| 0308 | AI963460.1 |
| 0309 | AI970788.1 |
| 0310 | AI979301.1 |
| 0311 | AI982758.1 |
| 0312 | AI983432.1 |
| 0313 | AJ239383.1 |
| 0314 | AJ275469.1 |
| 0315 | AJ292969.1 |
| 0316 | AK000667.1 |
| 0317 | AK000677.1 |
| 0318 | AK001657.1 |
| 0319 | AK001728.1 |
| 0320 | AK001731.1 |
| 0321 | AK001734.1 |
| 0322 | AK001816.1 |
| 0323 | AK001822.1 |
| 0324 | AK021431.1 |
| 0325 | AK021457.1 |
| 0326 | AK021487.1 |
| 0327 | AK021525.1 |
| 0328 | AK021569.1 |
| 0329 | AK022100.1 |
| 0330 | AK022166.1 |
| 0331 | AK022188.1 |
| 0332 | AK022280.1 |
| 0333 | AK022303.1 |
| 0334 | AK022473.1 |
| 0335 | AK023029.1 |
| 0336 | AK023499.1 |
| 0337 | AK023732.1 |
| 0338 | AK023783.1 |
| 0339 | AK023788.1 |
| 0340 | AK023827.1 |
| 0341 | AK024072.1 |
| 0342 | AK024246.1 |
| 0343 | AK024379.1 |
| 0344 | AK024460.1 |
| 0345 | AK024482.1 |
| 0346 | AK024629.1 |
| 0347 | AK024690.1 |
| 0348 | AK024789.1 |
| 0349 | AK024877.1 |
| 0350 | AK024881.1 |
| 0351 | AK024913.1 |
| 0352 | AK024958.1 |
| 0353 | AK024960.1 |
| 0354 | AK024981.1 |
| 0355 | AK025077.1 |
| 0356 | AK025343.1 |
| 0357 | AK025566.1 |
| 0358 | AK025696.1 |
| 0359 | AK025700.1 |
| 0360 | AK026025.1 |
| 0361 | AK026820.1 |
| 0362 | AK075503.1 |
| 0364 | AK098125.1 |
| 0366 | AL035687.13 |
| 0367 | AL036662.1 |
| 0368 | AL037339.1 |
| 0369 | AL037917.2 |
| 0370 | AL038125.1 |
| 0371 | AL038450.1 |
| 0372 | AL046017.1 |
| 0373 | AL047052.1 |
| 0377 | AL050136.1 |
| 0378 | AL080068.1 |
| 0379 | AL080112.1 |
| 0380 | AL080149.1 |
| 0381 | AL110135.1 |
| 0382 | AL110191.1 |
| 0383 | AL117451.1 |
| 0385 | AL118510.6 |
| 0386 | AL119182.1 |
| 0387 | AL119957.1 |
| 0388 | AL121747.41 |
| 0389 | AL121994.12 |
| 0390 | AL122039.1 |
| 0391 | AL136599.1 |
| 0392 | AL136769.1 |
| 0393 | AL136800.1 |
| 0394 | AL136896.1 |
| 0395 | AL137162.25 |
| 0396 | AL137266.1 |
| 0397 | AL137312.1 |
| 0398 | AL137733.1 |
| 0399 | AL161953.1 |
| 0400 | AL358975.8 |
| 0401 | AL390158.1 |
| 0402 | AL512728.1 |
| 0403 | AL513583.3 |
| 0404 | AL513917.3 |
| 0405 | AL514295.3 |
| 0406 | AL524033.3 |
| 0407 | AL524467.3 |
| 0408 | AL526448.3 |
| 0409 | AL527365.3 |
| 0410 | AL533334.3 |
| 0411 | AL534321.3 |
| 0412 | AL534848.3 |
| 0413 | AL537457.2 |
| 0415 | AL550657.3 |
| 0416 | AL552384.3 |
| 0417 | AL565238.3 |
| 0418 | AL565415.3 |
| 0419 | AL568449.2 |
| 0420 | AL571424.3 |
| 0421 | AU134977.1 |
| 0422 | AU144305.1 |
| 0423 | AU144775.2 |
| 0424 | AU146027.1 |
| 0425 | AU146329.1 |
| 0426 | AU146870.1 |
| 0427 | AU147419.2 |
| 0428 | AU148154.1 |
| 0429 | AU149225.2 |
| 0430 | AU150824.1 |
| 0431 | AU151342.2 |
| 0432 | AU155187.1 |
| 0433 | AU155198.1 |
| 0434 | AU155361.1 |
| 0435 | AU155565.1 |
| 0436 | AU155612.1 |
| 0437 | AU156202.1 |
| 0438 | AU157224.1 |
| 0439 | AU157915.1 |
| 0440 | AU159474.1 |
| 0441 | AU160004.2 |
| 0442 | AV655640.1 |
| 0443 | AV659198.1 |
| 0444 | AV683684.1 |
| 0445 | AV699657.1 |
| 0446 | AV700591.1 |
| 0447 | AV700815.2 |
| 0448 | AV700849.1 |
| 0449 | AV701229.1 |
| 0450 | AV703288.2 |
| 0451 | AV722006.1 |
| 0452 | AV725195.1 |
| 0453 | AV725328.1 |
| 0454 | AV729557.1 |
| 0455 | AV735241.1 |
| 0456 | AV739670.1 |
| 0457 | AV744101.1 |
| 0458 | AV748469.1 |
| 0459 | AV760302.2 |
| 0460 | AW001274.1 |
| 0461 | AW001847.1 |
| 0462 | AW005982.1 |
| 0463 | AW006288.1 |
| 0464 | AW006438.1 |
| 0465 | AW006750.1 |
| 0466 | AW008914.1 |
| 0467 | AW024741.1 |
| 0468 | AW025108.1 |
| 0469 | AW026509.1 |
| 0470 | AW027923.1 |
| 0472 | AW057545.1 |
| 0473 | AW070424.1 |
| 0474 | AW070431.1 |
| 0476 | AW082219.1 |
| 0477 | AW082668.1 |
| 0478 | AW089673.1 |
| 0479 | AW131450.1 |
| 0480 | AW163148.1 |
| 0481 | AW173222.1 |
| 0482 | AW189430.1 |
| 0483 | AW189843.1 |
| 0484 | AW190862.1 |
| 0485 | AW190873.1 |
| 0486 | AW193531.1 |
| 0487 | AW195800.1 |
| 0488 | AW238632.1 |
| 0489 | AW243081.1 |
| 0490 | AW244016.1 |
| 0491 | AW263086.1 |
| 0492 | AW268886.1 |
| 0493 | AW269397.1 |
| 0494 | AW272262.1 |
| 0495 | AW275093.1 |
| 0496 | AW276186.1 |
| 0497 | AW292746.1 |
| 0498 | AW292752.1 |
| 0499 | AW293276.1 |
| 0500 | AW293296.1 |
| 0501 | AW297731.1 |
| 0502 | AW298119.1 |
| 0503 | AW298590.1 |
| 0504 | AW298731.1 |
| 0505 | AW300405.1 |
| 0506 | AW301806.1 |
| 0507 | AW364833.1 |
| 0508 | AW438464.1 |
| 0509 | AW451634.1 |
| 0510 | AW468885.1 |
| 0511 | AW469714.1 |
| 0512 | AW501507.1 |
| 0513 | AW511222.1 |
| 0514 | AW511257.1 |
| 0515 | AW514168.1 |
| 0516 | AW515443.1 |
| 0517 | AW519168.1 |
| 0518 | AW575927.1 |
| 0519 | AW582267.1 |
| 0520 | AW590838.1 |
| 0522 | AW664859.1 |
| 0523 | AW665509.1 |
| 0524 | AW665624.1 |
| 0525 | AW953794.1 |
| 0526 | AW960454.1 |
| 0527 | AW963634.1 |
| 0528 | AW972359.1 |
| 0529 | AW973078.1 |
| 0530 | AW974995.1 |
| 0531 | AW978375.1 |
| 0532 | AY014180.1 |
| 0534 | AY034078.1 |
| 0535 | BC000154.2 |
| 0536 | BC000268.1 |
| 0537 | BC000454.2 |
| 0538 | BC000715.2 |
| 0539 | BC000756.2 |
| 0540 | BC000819.1 |
| 0541 | BC001189.1 |
| 0542 | BC001605.1 |
| 0543 | BC002323.2 |
| 0544 | BC002356.2 |
| 0545 | BC002711.2 |
| 0546 | BC002737.2 |
| 0547 | BC003049.1 |
| 0548 | BC004242.1 |
| 0550 | BC004492.2 |
| 0551 | BC004865.2 |
| 0552 | BC004895.2 |
| 0553 | BC005162.2 |
| 0554 | BC005851.2 |
| 0556 | BC006001.1 |
| 0557 | BC006112.1 |
| 0558 | BC006249.2 |
| 0559 | BC012538.1 |
| 0560 | BC025309.1 |
| 0561 | BC040523.1 |
| 0562 | BC043583.1 |
| 0564 | BE048857.1 |
| 0565 | BE049439.1 |
| 0566 | BE049621.1 |
| 0567 | BE138647.1 |
| 0568 | BE205790.1 |
| 0569 | BE220399.1 |
| 0570 | BE251303.1 |
| 0571 | BE326569.1 |
| 0572 | BE348304.1 |
| 0573 | BE350811.1 |
| 0574 | BE464729.1 |
| 0575 | BE466173.1 |
| 0576 | BE501862.1 |
| 0577 | BE503118.1 |
| 0578 | BE551407.1 |
| 0579 | BE568651.1 |
| 0580 | BE613133.1 |
| 0581 | BE645241.1 |
| 0582 | BE646573.1 |
| 0583 | BE669703.1 |
| 0584 | BE674143.1 |
| 0585 | BE674760.1 |
| 0586 | BE674896.1 |
| 0587 | BE675337.1 |
| 0588 | BE675800.1 |
| 0589 | BE675843.1 |
| 0590 | BE675995.1 |
| 0591 | BE676543.1 |
| 0592 | BE708432.1 |
| 0593 | BE732345.1 |
| 0594 | BE734356.1 |
| 0595 | BE748802.1 |
| 0596 | BE779764.1 |
| 0597 | BE783949.1 |
| 0598 | BE784583.1 |
| 0599 | BE788667.1 |
| 0600 | BE795104.1 |
| 0601 | BE856598.1 |
| 0602 | BE856637.1 |
| 0603 | BE856980.1 |
| 0604 | BE869583.1 |
| 0605 | BE876628.1 |
| 0606 | BE899402.1 |
| 0607 | BE961949.2 |
| 0608 | BE962483.2 |
| 0609 | BE965998.2 |
| 0610 | BE966878.2 |
| 0611 | BE972419.1 |
| 0612 | BF001773.1 |
| 0613 | BF055311.1 |
| 0614 | BF056303.1 |
| 0615 | BF060683.1 |
| 0616 | BF062203.1 |
| 0617 | BF062399.1 |
| 0618 | BF063271.1 |
| 0620 | BF111821.1 |
| 0621 | BF114745.1 |
| 0622 | BF115480.1 |
| 0623 | BF115786.1 |
| 0624 | BF116032.1 |
| 0625 | BF195608.1 |
| 0626 | BF195808.1 |
| 0627 | BF206389.1 |
| 0628 | BF218804.1 |
| 0629 | BF221850.1 |
| 0631 | BF246499.1 |
| 0632 | BF247552.1 |
| 0633 | BF347362.1 |
| 0634 | BF347859.1 |
| 0635 | BF433725.1 |
| 0636 | BF438017.1 |
| 0637 | BF438386.1 |
| 0638 | BF448315.1 |
| 0639 | BF475280.1 |
| 0640 | BF476076.1 |
| 0641 | BF507952.1 |
| 0642 | BF510713.1 |
| 0643 | BF513820.1 |
| 0644 | BF514509.1 |
| 0645 | BF514975.1 |
| 0646 | BF525395.1 |
| 0647 | BF571480.1 |
| 0648 | BF575213.1 |
| 0649 | BF594371.1 |
| 0650 | BF594446.1 |
| 0651 | BF670827.1 |
| 0652 | BF673699.1 |
| 0653 | BF677084.1 |
| 0654 | BF680255.1 |
| 0655 | BF686824.1 |
| 0656 | BF696840.1 |
| 0658 | BF739943.1 |
| 0659 | BF791874.1 |
| 0660 | BF795297.1 |
| 0661 | BF796940.1 |
| 0662 | BF797555.1 |
| 0663 | BF939788.1 |
| 0664 | BF954306.1 |
| 0665 | BF966155.1 |
| 0666 | BF971923.1 |
| 0667 | BF976260.1 |
| 0668 | BF982174.1 |
| 0669 | BG028844.1 |
| 0670 | BG032366.1 |
| 0671 | BG111168.1 |
| 0672 | BG112118.1 |
| 0673 | BG149765.1 |
| 0674 | BG149849.1 |
| 0675 | BG178695.1 |
| 0676 | BG180003.1 |
| 0677 | BG222258.1 |
| 0678 | BG231551.1 |
| 0679 | BG251467.1 |
| 0680 | BG252666.1 |
| 0681 | BG253884.1 |
| 0682 | BG256677.1 |
| 0683 | BG260337.1 |
| 0684 | BG260394.1 |
| 0685 | BG261071.1 |
| 0686 | BG288330.1 |
| 0687 | BG290742.1 |
| 0688 | BG334196.1 |
| 0689 | BG341906.1 |
| 0690 | BG387555.1 |
| 0691 | BG389744.1 |
| 0692 | BG390306.1 |
| 0693 | BG421209.1 |
| 0694 | BG428861.1 |
| 0695 | BG430133.1 |
| 0696 | BG481972.1 |
| 0697 | BG485163.1 |
| 0698 | BG500677.1 |
| 0699 | BG534952.1 |
| 0700 | BG538482.1 |
| 0701 | BG548427.1 |
| 0702 | BQ002274.1 |
| 0703 | BU618741.1 |
| 0704 | D13989.1 |
| 0705 | D25284.1 |
| 0706 | D32039.1 |
| 0707 | D83485.1 |
| 0708 | D84430.1 |
| 0709 | D86043.1 |
| 0710 | D86862.1 |
| 0711 | D87021.1 |
| 0712 | D87858.1 |
| 0713 | H24473.1 |
| 0714 | H49240.1 |
| 0715 | H75391.1 |
| 0719 | L01639.1 |
| 0720 | L12711.1 |
| 0721 | L14599.1 |
| 0723 | L34164.1 |
| 0724 | L36675.1 |
| 0725 | L38951.1 |
| 0726 | L48784.1 |
| 0728 | L78790.1 |
| 0730 | M11167.1 |
| 0731 | M24668.1 |
| 0732 | M25915.1 |
| 0733 | M28590.1 |
| 0734 | M32221.1 |
| 0738 | M80776.1 |
| 0740 | M90686.1 |
| 0741 | M93255.1 |
| 0744 | N21202.1 |
| 0745 | N23033.1 |
| 0746 | N24868.1 |
| 0747 | N51961.1 |
| 0748 | N53555.1 |
| 0749 | N57510.1 |
| 0750 | N63244.1 |
| 0751 | N64578.1 |
| 0752 | N66397.1 |
| 0753 | N90377.1 |
| 0754 | NM_000051.3 |
| 0755 | NM_000099.2 |
| 0758 | NM_000404.2 |
| 0759 | NM_000689.3 |
| 0760 | NM_000697.2 |
| 0761 | NM_000760.2 |
| 0762 | NM_000918.3 |
| 0763 | NM_000923.3 |
| 0764 | NM_000962.2 |
| 0766 | NM_000971.3 |
| 0767 | NM_000978.3 |
| 0768 | NM_001069.2 |
| 0769 | NM_001155.3 |
| 0770 | NM_001228.4 |
| 0772 | NM_001549.3 |
| 0779 | NM_001787.1 |
| 0780 | NM_002000.2 |
| 0781 | NM_002073.2 |
| 0782 | NM_002076.2 |
| 0784 | NM_002339.2 |
| 0785 | NM_002346.2 |
| 0787 | NM_002534.2 |
| 0788 | NM_002541.2 |
| 0790 | NM_002616.1 |
| 0792 | NM_002620.2 |
| 0793 | NM_002624.3 |
| 0794 | NM_002709.2 |
| 0795 | NM_002764.3 |
| 0796 | NM_002858.3 |
| 0797 | NM_003043.3 |
| 0799 | NM_003153.3 |
| 0800 | NM_003189.1 |
| 0802 | NM_003403.3 |
| 0804 | NM_003461.4 |
| 0805 | NM_003563.3 |
| 0807 | NM_003655.2 |
| 0809 | NM_003928.1 |
| 0810 | NM_004030.1 |
| 0812 | NM_004103.3 |
| 0813 | NM_004117.2 |
| 0814 | NM_004126.3 |
| 0815 | NM_004145.2 |
| 0816 | NM_004233.3 |
| 0818 | NM_004309.3 |
| 0819 | NM_004313.3 |
| 0820 | NM_004323.4 |
| 0824 | NM_004500.3 |
| 0825 | NM_004630.2 |
| 0826 | NM_004640.5 |
| 0827 | NM_004648.1 |
| 0828 | NM_004731.3 |
| 0829 | NM_004774.3 |
| 0830 | NM_004902.2 |
| 0832 | NM_004945.2 |
| 0834 | NM_005022.2 |
| 0836 | NM_005184.2 |
| 0837 | NM_005195.3 |
| 0839 | NM_005231.3 |
| 0840 | NM_005238.2 |
| 0841 | NM_005399.3 |
| 0843 | NM_005697.3 |
| 0844 | NM_005775.4 |
| 0845 | NM_005781.4 |
| 0846 | NM_005808.2 |
| 0848 | NM_005911.4 |
| 0849 | NM_006006.4 |
| 0850 | NM_006024.5 |
| 0851 | NM_006026.2 |
| 0852 | NM_006079.3 |
| 0854 | NM_006187.2 |
| 0855 | NM_006265.1 |
| 0856 | NM_006275.4 |
| 0858 | NM_006305.2 |
| 0859 | NM_006348.2 |
| 0860 | NM_006417.4 |
| 0861 | NM_006457.2 |
| 0862 | NM_006459.3 |
| 0863 | NM_006471.2 |
| 0864 | NM_006639.2 |
| 0865 | NM_006640.4 |
| 0867 | NM_006725.2 |
| 0868 | NM_006743.3 |
| 0869 | NM_006754.2 |
| 0871 | NM_006820.2 |
| 0872 | NM_007043.6 |
| 0874 | NM_007107.2 |
| 0875 | NM_007279.2 |
| 0876 | NM_012124.1 |
| 0877 | NM_012179.3 |
| 0878 | NM_012268.2 |
| 0879 | NM_013232.3 |
| 0881 | NM_014048.3 |
| 0882 | NM_014086.1 |
| 0883 | NM_014308.2 |
| 0885 | NM_014358.2 |
| 0886 | NM_014380.1 |
| 0887 | NM_014704.2 |
| 0888 | NM_014709.3 |
| 0889 | NM_014721.2 |
| 0891 | NM_015859.2 |
| 0892 | NM_015995.2 |
| 0893 | NM_016019.2 |
| 0894 | NM_016022.2 |
| 0895 | NM_016127.4 |
| 0896 | NM_016128.3 |
| 0897 | NM_016231.4 |
| 0898 | NM_016285.2 |
| 0900 | NM_016340.4 |
| 0901 | NM_016376.3 |
| 0902 | NM_016509.3 |
| 0903 | NM_016526.4 |
| 0904 | NM_016542.3 |
| 0905 | NM_016592.2 |
| 0906 | NM_016626.3 |
| 0907 | NM_016817.2 |
| 0908 | NM_017523.2 |
| 0909 | NM_017618.1 |
| 0910 | NM_017644.3 |
| 0911 | NM_017654.2 |
| 0912 | NM_017778.2 |
| 0913 | NM_017831.3 |
| 0914 | NM_017905.4 |
| 0915 | NM_017912.3 |
| 0916 | NM_017932.1 |
| 0917 | NM_017936.3 |
| 0918 | NM_017976.1 |
| 0919 | NM_017987.4 |
| 0920 | NM_018037.1 |
| 0921 | NM_018072.4 |
| 0922 | NM_018115.2 |
| 0923 | NM_018263.4 |
| 0924 | NM_018563.1 |
| 0925 | NM_018616.1 |
| 0926 | NM_018986.3 |
| 0927 | NM_019049.1 |
| 0928 | NM_019058.2 |
| 0929 | NM_019067.4 |
| 0930 | NM_019843.2 |
| 0931 | NM_019903.3 |
| 0932 | NM_020152.2 |
| 0933 | NM_021029.4 |
| 0934 | NM_021630.4 |
| 0936 | NM_021978.3 |
| 0937 | NM_022047.3 |
| 0938 | NM_022168.2 |
| 0939 | NM_022367.2 |
| 0940 | NM_022461.2 |
| 0941 | NM_022781.4 |
| 0942 | NM_022873.2 |
| 0943 | NM_023015.3 |
| 0944 | NM_023914.2 |
| 0945 | NM_024021.2 |
| 0946 | NM_024498.1 |
| 0947 | NM_024564.1 |
| 0948 | NM_024693.4 |
| 0949 | NM_024852.2 |
| 0950 | NM_024906.2 |
| 0951 | NM_025134.4 |
| 0952 | NM_025190.2 |
| 0953 | NM_030576.3 |
| 0954 | NM_030664.3 |
| 0955 | NM_030674.3 |
| 0956 | NM_030912.2 |
| 0957 | NM_030917.2 |
| 0958 | NM_030927.1 |
| 0959 | NM_030930.2 |
| 0960 | NM_172313.1 |
| 0961 | R05895.1 |
| 0962 | R44974.1 |
| 0963 | R64130.1 |
| 0964 | R94644.1 |
| 0965 | S55735.1 |
| 0966 | S67779.1 |
| 0968 | S72848.1 |
| 0969 | T70262.1 |
| 0970 | T90760.1 |
| 0971 | T90999.1 |
| 0972 | T92908.1 |
| 0973 | U03891.2 |
| 0977 | U19599.1 |
| 0980 | U33448.1 |
| 0982 | U41070.1 |
| 0983 | U43677.1 |
| 0985 | U53470.1 |
| 0986 | U56237.1 |
| 0988 | U66145.1 |
| 0990 | U77413.1 |
| 0991 | U80737.1 |
| 0992 | U82276.1 |
| 0993 | U82277.1 |
| 0994 | U82278.1 |
| 0996 | U84744.1 |
| 0997 | U92706.1 |
| 0998 | W27419.1 |
| 0999 | W58365.1 |
| 1000 | W74580.1 |
| 1001 | W80418.1 |
| 1002 | W80468.1 |
| 1003 | W86302.1 |
| 1004 | W86659.1 |
| 1006 | X15132.1 |
| 1007 | X52075.1 |
| 1008 | X57812.1 |
| 1011 | X81001.1 |
| 1012 | X83300.1 |
| 1013 | Z25430.1 |
| 1014 | Z39557.1 |

The application's sequence listing, which the Patent Office published only in electronic form, follows.

SEQUENCE LISTING (1015 sequences)

SEQ ID NO: 1 - DNA, 592 bp, Homo sapiens
  misc_feature (458)..(458): n is a, c, g, or t
  misc_feature (509)..(509): n is a, c, g, or t
  misc_feature (533)..(533): n is a, c, g, or t
  misc_feature (540)..(540): n is a, c, g, or t
  misc_feature (548)..(548): n is a, c, g, or t
  misc_feature (559)..(559): n is a, c, g, or t
ttttgtgaataagttatacttttatttttcagaaacaaaaatgacaagtggcaacttgcctttgtaaaagattaaagagtatcagagtaataagctatctctcatagagacagaagcccgagaaacactattatacagctttcaaaggaagtcctattaaataaatctcacaataatatactttaactcaacaaaacaaaaaccacaaaaaattatacagaactcataaaatggtatatgaatgaaaaagagaaatctttaaatccatacactagaagttctctattaaaatcaaggaggctcaaatcctaaaacagaaagaagaaatacgttaaaacacaatattttttaagagtccaatgaggttattgcagatgtacattttaacatttcatttgctcaatggtatttttttctcattcttggagcacttctggtataatggtagagagattacntggaatgataatgccagatactgggccctccccaatggggcccttcagggntttaaggttcccaatccgggatcnggggatncccccccnaatgggttacnttatagggctcccaggatggggatcccccctta

SEQ ID NO: 2 - DNA, 466 bp, Homo sapiens
  misc_feature (443)..(443): n is a, c, g, or t
  misc_feature (462)..(462): n is a, c, g, or t
ttttttattatactttaagttctagggtacttgtgcacaacgaaaaagcactccttttttaaccaggttttatttagaagaaaacaaaaaagaaactcaaagtcaagcagttcctagttaaccacggttaaatatgtggcatttatttgtccctcattaaaaagaaaaagcatcctaagaattccaaactcaccaatttaacactctctgggactggaaaaatacattcccaagatagttttcctaaaaatttcccgtagagggcactagagaggtatgattgaggctagcttgggaatcacagtcatttctggtaaaagttctttgatgtgaggaatgtcccagtctggtacagttggcaaaagttcactctggggaattttgtgtgtgtgtgtgtgtgtgtgtgtgtgtgtgtgtgtgtgtgtgtgtcctgggaaggggtngttgaggaagaagagtgcnagtc

SEQ ID NO: 3 - DNA, 668 bp, Homo sapiens
  misc_feature (18)..(18): n is a, c, g, or t
  misc_feature (369)..(369): n is a, c, g, or t
  misc_feature (394)..(394): n is a, c, g, or t
  misc_feature (510)..(510): n is a, c, g, or t
  misc_feature (535)..(535): n is a, c, g, or t
  misc_feature (551)..(551): n is a, c, g, or t
  misc_feature (557)..(557): n is a, c, g, or t
  misc_feature (608)..(608): n is a, c, g, or t
  misc_feature (634)..(634): n is a, c, g, or t
gtaaacatacacattacngaaatgacagcaacccacattgcagaggagaaaagtctattagctgtacagtttacatttcaatgcccaaacttatttatatatttacataaagatgctaccttgattaatcaatgtctatttgcatttccacatgtgaatttcttcagttttgatattccatatgaaggagctacagtgaaaacacttttgaataaagcagtgaaccctaagaatcttatcttgagatgagatgtgtgaaccaccatttgaatgttatttctccctgctgtgtacattagtctggctgggtgttggtcacagacatgggatgcactgacggctattcccataaccgagccaggcgggaanggggaaaaggaagacattatttgtncaccaacaaccccagtatcccaagtcaaaattctcaactatggccaaaaaggcctaaactcgacccacaggaactgggctttctaactgggttgacaacacgtaagctggccctcntggcaaaaagccaaccagagaacangcaggtggcaacaggnccccgnctagagcagagcacttcagaagaggatggataatccatcagggatgctcanggcttcctgaccactgtccgggtganggcctgccacttttcctcaacaatctggtatgtc

SEQ ID NO: 4 - DNA, 492 bp, Homo sapiens
  misc_feature (36)..(36): n is a, c, g, or t
  misc_feature (209)..(209): n is a, c, g, or t
  misc_feature (303)..(304): n is a, c, g, or t
  misc_feature (367)..(367): n is a, c, g, or t
  misc_feature (393)..(393): n is a, c, g, or t
  misc_feature (403)..(403): n is a, c, g, or t
  misc_feature (465)..(465): n is a, c, g, or t
  misc_feature (475)..(475): n is a, c, g, or t
gcatgtacaaagctattggtttattcagctgccaantggtggaaaggcttcctttcgaagtgaatagcaaaaatgcattcatgagcaaggcacttttatacacacacagagagaaaaaggaacgtattatgaacacatgaacataaacatattttaatattcagacctcttccctacctcctcccacctccacttaaacaaacaaacanaaaaaaaggaaacagtttcctgtaacattttagaaaccagtttcacagaatacctacataggaacaatttctgatacattcagttacactaacnntatgatatggtttcaggtcaataatttccactaacaaatacttttattctacaattccctctntttttccttttagacaagacaacttnaggctcagcngaaatatttcactaggttaataaggcattcttctctcttcttaaagttgctatatatttacncaattggtgnttcctaacctttttttt

SEQ ID NO: 5 - DNA, 562 bp, Homo sapiens
  misc_feature (543)..(543): n is a, c, g, or t
gctttgaggttgctgaaaggggagtctgctttactgtggttacgttaggacttctcgaagttctgtttcttaggcggtcatatgccctacttttagtagcaacatgactaaggtctcaaaatcaatgaatactttgcagagttggtggcattcattaagcatttactaagaagcacctacgtgccagatttgagtttgattctagacatgtagaatcttttgagtgccatccaacctcttgaatactttgatggctataaaacaaccctcaaatgttgaaccaaactagaagtctagtttctgacttctacacattggtaatgtaactctgtggcaacactgagcaagtttattccacatatagtaagactccccttccccttcccattccatgagtccttaatcccatttgctttttttttttcttggagacaagggtcactctgtccaaccaggctggaatgcagtggtgcagtcatggctactgaagcctcagtttccaggctcaagcaatccctccacttgtctccagagtagcgggantacaggcatgcaccactac

SEQ ID NO: 6 - DNA, 573 bp, Homo sapiens
  misc_feature (256)..(256): n is a, c, g, or t
ttttcagttttactaataactttatttaaataagacacaggaacttctatactgaaaaaatacaaaacaaaagccacacatttccttgtgtaaagccatattatatggtaactcaaatactgttcagcgcaatggctagaattaaacagtacaattatatacaaaatttaaacaatttctgacaaatttctacagctggatgtaggatacatttgagctcaacaacttctgggaaatttacatggcaaagcgtaanttttaacacatttggttcaaaactttaatatatgctaagaacaaatgtacaacacaattaatatttagtatctcatgagaaaataaaagcacatcactataaatatcgtacatgagatttcatcaccaaaaaagcatattcagtccatttttctgaaattgatattgatactattgcattttatttggacaaaagcagagtgtaagatcaacatattatgtaatgctaaccagacatcagaagtcaaatggagctcatatttatcttcgggactagtaatttccccctttaaccataatctacaaatatagtatttc

SEQ ID NO: 7 - DNA, 578 bp, Homo sapiens
  misc_feature (167)..(167): n is a, c, g, or t
  misc_feature (249)..(249): n is a, c, g, or t
  misc_feature (464)..(464): n is a, c, g, or t
  misc_feature (476)..(476): n is a, c, g, or t
  misc_feature (480)..(480): n is a, c, g, or t
  misc_feature (502)..(502): n is a, c, g, or t
  misc_feature (537)..(537): n is a, c, g, or t
  misc_feature (539)..(539): n is a, c, g, or t
  misc_feature (568)..(568): n is a, c, g, or t
ttttaagtccaggtgtttgtattcgggctagaaaaggcaatgtcccaagtctctgctgcctgtcacagtccttcagccagggctggacctcaaccctgaggagtcacactgagttccagtgaccaccgtggtgtggccatgcactcatggttgctatggccggaacnggcggcagcctcctccaagccgctcgcaccccgtagtgcccatccgctgctggcgcaagtgctggccgaagatgaagcagancaggacagatgtcacgaacagggacagcaacaccgacaccaccgtgactatgatgaccatctggctgtccgacacaggctcatagatctccaacatcttcggggctgagtgtttgtgaaagatgttgccaacgcgagacatcaagttcagcacagccaggcaaggagaagttgcggtggccatcctctctgtcagccgtgctgttgaatgtggcngtgggctcctgncgangggcttggcctttccgaagtcncatagtgcagagtctcattgcaacgaaacaggaanangttaagttttcagggctcaacgtggcacntgactcaatg

SEQ ID NO: 8 - DNA, 566 bp, Homo sapiens
  misc_feature (562)..(562): n is a, c, g, or t
tttaacggaatggcttcagtgagtcctttcaaagcatttaatccaatccatagaaatggcaatgctttcttttctttctttctttttttttttttttgagatagagtctcactctgtcacccaggctggagtgtagtggcactatctaggctcactgcaaccccccacctcccaggttcaagcaattatgctgcctcagcctcccaagaagctgggacttcaggcatgagccaccacacctggataattttttgtatttttttagtagagacggggtttcaccatgttggccaggctggtctagaactcctgagctcaagtgattctccgcccaccttggcctcccaaagtgctgggattacaggcatgagccaccacgcccagcctgcaacgctttctttttgccctcttgtttatcagtttgtgtcatatttacacagcaaagcctagtggctaaaagcacgagccacggagcaggctgcctaggttcttatctgagctctgccactagctggcttaaagcagagtgcggcctctattttttcattggtaaattaagggncaat

SEQ ID NO: 9 - DNA, 539 bp, Homo sapiens
tatgttttatcatatttaggttatttattaatgaaaatatatgacattttcaggaatacaaattttgcaccctgatgacctcaaatgcgtgcaacaagatgtttaatacagaaaataacacaaaaactgttgttacagtggttagaatttttaactttaaaaaaccatgaatttgtattgttttaattgcacaataaaataatgttgatatatacttaagcttaaattaattccaacaggcaaacattttccaacccagagtgtggctgatgctgggtcagctgactctattttggttcacaccaactttgatgtctaggctattcagcatctacctagaaaatctcaatcgttccaagcataccgtgaattttgtgatttctcagaagattttcggagttaaaagaagtgtttatatcacttaatatccaacatttctaaaggggggaaaacccaccatctattatcaatgacatttcccaagtccttgcaccaggcccttagtcaccaggttcccacgttttgttgccttcctaccg

SEQ ID NO: 10 - DNA, 596 bp, Homo sapiens
  misc_feature (494)..(494): n is a, c, g, or t
  misc_feature (528)..(528): n is a, c, g, or t
  misc_feature (577)..(577): n is a, c, g, or t
  misc_feature (587)..(587): n is a, c, g, or t
ttcttgtggcaaatttaatagaagaatatgagactcacccttacttcccacacataaaacactgcaggcactccaaatccttacagacatatgcacttcggaatcaactcaggcatgcacagcatccctgtgctggagtttattttaaaaaacaacgccccagttatcacagtttctttttttgtccaccattttccataacaaaagaagctacacaaaatttggggggagatactctctttggagactgacacatttgcagaggggtcatgaataatgattccaaagctcctatttaacttctgaatcaggcaaagaataagtgacaatataagaatgaattttgtttacagcaatatcataatacagcattgaatcattacagtggcagtggttgtaattaagtccccataaaatattcttaggcccgaaacaccagaccaactaaaatcaccaactggctcacgaaccaaatgatcagtgcaagcagttgnggtctccatagtgaaaaccaaaatgggtagggcntttctgggcagtgggtctctgacatgaacggtccctctctgctcaagangacttggcgncccccttgg

SEQ ID NO: 11 - DNA, 657 bp, Homo sapiens
  misc_feature (456)..(456): n is a, c, g, or t
  misc_feature (535)..(535): n is a, c, g, or t
  misc_feature (637)..(637): n is a, c, g, or t
  misc_feature (642)..(642): n is a, c, g, or t
agagaggtgtttttattctttggggacaaagccgggttctgtgggtgtaggattctccaggttctccaggctgtagggcccagaggcttaatcagaattttcagacaaaactggaacctttcttttttcccgttggtttatttgtagtccttgggcaaaccaatgtctttgttcgaaagagggaaaataatccaaacgtttttcttttaacttttttttttaggttcaggggcacatgtgtaggcttgctatataggtaaattgcatgtcaccagggtttgttgtacagattatttcatcatccagataaaaagcatagtaccagataggtagttttttgatcctcaccctccttccatgctccgacctcaggtaggccccagtgtctgcggttcccttctttgtatccatgtgtactcaatgtttagcttctacttataagtgagaacatgtggnatttggttttctgtttctgagtgagttcattaggataatggcttccagctccatccacgttgctgcacaggacatgatnccattctttttatggcgcatagtatccaggtgtatagtgccacatttccttttttttttaaagcagatctgctggtgccagctggatgcatgcagattcggncatgnacacacctccagtta

SEQ ID NO: 12 - DNA, 582 bp, Homo sapiens
  misc_feature (352)..(352): n is a, c, g, or t
  misc_feature (354)..(354): n is a, c, g, or t
  misc_feature (399)..(399): n is a, c, g, or t
  misc_feature (403)..(403): n is a, c, g, or t
  misc_feature (522)..(522): n is a, c, g, or t
  misc_feature (538)..(538): n is a, c, g, or t
  misc_feature (549)..(549): n is a, c, g, or t
  misc_feature (560)..(560): n is a, c, g, or t
  misc_feature (569)..(569): n is a, c, g, or t
  misc_feature (574)..(574): n is a, c, g, or t
gtggagatgcagctgaggagcctcatggagtcaggtgccaacaagctgcaggaggaggtgctgatccaggagtggttcaccctggtcaacaagaagaacgctctcatccggaggcaggaccagctgcagctgctcatggaggagcaggacttggagcgaaggttcgagctgctgagccgcgagctgcgggccatgctggcatcgaagactggcagaaaacgtccgctcagcagcaccgagagcagctcctactggaggagctggtgtcgctggtgaaccagcgcgatgagctagtccgggacctggaccacaaggagcggatcgccctggaggaggacgagcgcctggagcngncctggaacagcggcgccgcaagctgagccggcagttgagccgcgngaangctgcgtgctgagctgaggccgccggccgggtggcccataacttctcgcgtccccggcgtccgccccgccccgggcctgcgctgcggacgacccggccgtcccggaggccgcgcgcgtntccgctagggccgccnggcccttgccncgtataggcanggcggattncgacnccacgggc

SEQ ID NO: 13 - DNA, 646 bp, Homo sapiens
  misc_feature (590)..(590): n is a, c, g, or t
  misc_feature (597)..(597): n is a, c, g, or t
  misc_feature (602)..(602): n is a, c, g, or t
  misc_feature (612)..(612): n is a, c, g, or t
  misc_feature (624)..(624): n is a, c, g, or t
gtatttaaatacttttattttcatttcacaaaaaaagcaacagtgtttgcagctacacatgcctttcagtcagtgctggtcatatgcaaaacaagttatcagaaatataaagaaaaataagccttttccctttacaagtgaaacaacacaatttgcatatacaatattatatatacatattttcaaaatgtttcacaaaagacagattatgatacaaatttataattccacccacaagctcagactcaaggaattgaagatctctataggtgtttaaatataaaaatgtaatacctttacaagtttccaagtaactactttccaaagtatttgaaagaggctattcttcacagcaacatggaacacttggctttaatcaagacagctgtaaaactaagttttgtctcaatgtgagtttgttgattaatgcaaatgctccaattatggcctaattctcttttatatacacatacatacacagcgtattattgtactgatggtttacaagtccaatttctggagctttccttcagctaagccagacctttacttccttgagtattttaaattaagaacgttcagaaatatcnctaatgnctacnggtgtttacntccaaaaagggncccttttcttgatttttggcaa

SEQ ID NO: 14 - DNA, 615 bp, Homo sapiens
  misc_feature (277)..(277): n is a, c, g, or t
  misc_feature (284)..(284): n is a, c, g, or t
  misc_feature (425)..(425): n is a, c, g, or t
  misc_feature (454)..(454): n is a, c, g, or t
  misc_feature (465)..(465): n is a, c, g, or t
  misc_feature (476)..(476): n is a, c, g, or t
  misc_feature (535)..(535): n is a, c, g, or t
  misc_feature (543)..(543): n is a, c, g, or t
  misc_feature (603)..(603): n is a, c, g, or t
  misc_feature (611)..(611): n is a, c, g, or t
aaatgaaatctatgaattttttttattaaggatttgataagctgatataatgaaaacatgtaaatgaaaaacatttacactgactgtacgactagtgtgctaagccattacaatagtttactgacataactggcaagagtaacttggaaaataacttaatccagcagaacaaaaacatcctcagaaaaacatcctcagtagtactgaatatatctctctcatatatctatctatctatctatctatatatatatatatatatagctttgcacaatcngggagcnaggcacataatgaaatgagcatacatttatgcagaagaaaataatagcaacaaagctgcgagaaaaattgtaacttcatcttcactgagctgtgcataatcctttgaataataatgtcctctacctggtacattatagtgnagttccttgtcttcttcatgctttaaaanagtatacttcnacattgtatcnacctatggcaaagctcccacggcctacaagttggtgtgagccttgactcctgttttttnaggactgngggagggagcatccccgttaatataatgtgcaatccccttaacagtaaacatggttttanaccctagncagc

SEQ ID NO: 15 - DNA, 846 bp, Homo sapiens
  misc_feature (606)..(606): n is a, c, g, or t
gtggattaggtatagtgccaacaaattgaatgataaaacaacataatacgtagttattttgatagtgatgaatcctaagttatgtgagttgttcgttgtggaacacattgtgtaacagactcctgggtgtttttctttctcattcgaatctaccacagttggtcatatccaaccctcattcagtatttctatcaagaaagagatgctacaaaaaaaaaaaagaaaaaacctttatgtatacagacgtaaacctcagaatgtatgttgagtccccactgtcatctaccaagacttgcacccccctcattatctaccatgactgtctctcagcctcacgggccctcagcactttgtgttttgacccccagcaccgtgtcttgtgaactcccatcaccttcaagaaagcttccgaggtaagaattttatggtcatctgggacaacttaaatctcccttctgctgtcatagttcttccaactcagttgcctttttttttttttcgtactcatcactgacttgaagcttagtatctggcttccttaaggatgtactttcatgtacagattaatacttatatgagacgacacgacatatgttagggctgaanggcatgacgctgcattttcctgttacttaactatgtggtaattcatattccggaaagtctgggatctcatactcttcacacctacacgaggtggtcctccatgggagctaaagcctccactggggcgcatttacctccaatagggcggagtggcgcgagagctatttcagggttgcttatctaggaatctgcaggtttctaatgacgaagggatcttggggaaaaccatcgcgtcggaat

SEQ ID NO: 16 - DNA, 364 bp, Homo sapiens
cataagttagcaatcggttcttccaaactcctgtgggttgaatatggtatagaaggtatgcaagaggaaaaagaaaggaaaagataaaactcctgcctcagaatttggaagcacctttattaacacatatatctcgcagaaactagagctcataggctgttaactttttgcaactattcactcatttttaccacttttcttttttgggtagggggttatttttgtaaggttaacagccagattccattttgacctcagatgctgtgtacttttaaattccatttttaatattctgcatcttgactcttctctaaaacagaatgaaatgtcttcattctgacaaaatctttcgcaaggctttttt

SEQ ID NO: 17 - DNA, 428 bp, Homo sapiens
cgacgccttttccccttaattcgcaaacccttctttcttttctttttagcgggctgttttgcctctttattcactccttctgctaccatcttttcctctaccacatcttcttcatctgtattagaattaataggaacacatcccagaatcccagaatcactaaaagtgttgcatcttctgccaggagagagtgaagaaactggtacacttagagtacatacactcattctctttatgtctccacaattcgtaccagaatctgttagtgggtttattactcaagcagaaatacagctgttcctctctacttgcattaccttttctccagtttctatggggaatcaaattcccactggaccaataacttccaagccaggttatttttggaggaaaactgacagcaatggagaacattcccgaactctttc

SEQ ID NO: 18 - DNA, 353 bp, Homo sapiens
  misc_feature (146)..(146): n is a, c, g, or t
  misc_feature (317)..(317): n is a, c, g, or t
cagagttcagaccctgctacagaatcaacacaaaataatcagtggacggaggtgatgttcatggcaacacgagaacttctgcggattccccaagcagccctggccaagccaatctctatacctacaaacctagtgtccctcttttntcgctatgttgaccggcagaaactgaacttgctggagacaaaactgcagctagttcaggggatacgataaaagatctccaaatgtgtcctgtacctccttttggctgccacctgcactgctgccatcaccaatggagtgtttttaatgagggaaggaaggtagcttttttncccaaagcaaagtcttgtgggatcgattcctgttta

SEQ ID NO: 19 - DNA, 276 bp, Homo sapiens
tttttaaacaaggataggttggggaggtgggaaaagagtgtcaacaggagaaagggggctgggaattctgattctctaaaagagatgagtagtcctagaaagagaacaggggcacgatttgcaggcaataaaatgttagtctgggctcaggagagctgcagttacacagccccctccatccaggaccgtgatgagtagttcctcgcagggctccctggaaacgtgggtagtagatgaacaggcctccaagcagctgctgacataatcattgtggcg

SEQ ID NO: 20 - DNA, 429 bp, Homo sapiens
ttttcctgaaacaaatggcctatatttgacatcattaggtataaaatttgatgtcatcgggtatgaaatttggtctcttttgtaagatgtatcactccattcttggcttcccttcatttcttggcccaccaacgtatctaatacctgctactatttggcccacaaataaagcaccttactaatcattccagcagattctcttcataatttatacagattattataaccactaaggacaaacatgaagatacatacaccatgggagaacaactgtttttatctgagatgtgtttatttgataaatgttcctttaaagaagacattaattaataccaactgtagcagtcagatttgactaggttataataacaaagattttattctctttcatgttatacatccactgagcactgactggaggctctgctc

SEQ ID NO: 21 - DNA, 467 bp, Homo sapiens
gctctattttcaggaaaatttctatcatataaaagcttatttcagttattataaaagtgcttattctctggttatttcttctttttatataatcttgtcatgtttcatagtagcagtatcttctgctatctctctgagtatattaattatactttatttctacttcagctactgttttctacaggacatactgcctctaattcttaaacaggttctggagtatgaactgtcttgtttctcattgacacaacactctccagtcacatgtattcggctttcccatttctgccagttcctcctttacatcttccaaaagttgtgtctctttaatatgttgcttcctcttccttatgcctgtggatttatatattttttagtcttttgctcaaaatttttagtcccttactaggaaggaacatggaaaaacatgtgttcaatcacgaagtttaactggaagtctgctgtta

SEQ ID NO: 22 - DNA, 361 bp, Homo sapiens
tagaaacaaagatttttttttttaattataattttacagctaaataatggggactaatttcctacagagattaccatctttatacttttctgcatttttcagttttttgttattttataaaaacactcaaagtttttgaccttcaaaaattagaatattctggatcatggtaaacgctgaccaccaaacacatctggtacaaatatcaaagcaggcactggcctggtggttaactggactcagtatcatgtttacgtagttaactatgagcacaaatgaactgttcatcactcatatcacttcctttctatatatacaacgtataattatcctatgaataaccagtactatgacgttaagc

SEQ ID NO: 23 - DNA, 557 bp, Homo sapiens
tttttttttttgacatgataaattcagcctcactgtagtccagagtgagaattagaacataccaacttccaatctgcctaaatgtgacagcctctgcccaagactggctcactgaggcgtcttggctactggatgtaaacaaaaaatgcaatatccgtgcctcccagttctttgaaggaatcaattcatccttggttatatctatgctggaaaactgtgggtgtcctttggataaagcatacaggagttacctaccaggatttagatttggtcccttctgtaaatattagcctgaacgttgagttctgtgaacatgaattcttttcgaattccattacaatgcaggcagggttttggtgtcaattttttaaaatcaaaatcacctactaaattagttattttgcgcgggaggatctagacacttgatgattctcagtgaccagatccaggctcagggctgaagtcagcataattcttgagcaagaaaaaggtgattccttcttccacaaagccattccttctcctgagatgccatcttctagagaggtgactaacaa

SEQ ID NO: 24 - DNA, 447 bp, Homo sapiens
aataaagttaaatattttaatgattttttttttaaaaaagtcttgatctgtgagttcctacagggtctgttttggctttgttaccatatttttacagtaacaaatcaaagcattattcattctttctttgcatccatttcttttccctcactaaaaaatgctcttcaaggaagacaagaggaaagaaacaaaaatgcagtatgcgttttgaagtacttgattttcaaagtgtagatgctgcataatagtttattaacaaagctcaaagtttacagaaataacattaaatgcaacactttttgattattaacacatgtacaattttacactgcaaaacaattgcaactaaaagtttaggaggtaaagaattagcacacttggaagtctgtatacatttaatacaaatttgcaagatatcagaatgatctctcctgaaaattcaacttt

SEQ ID NO: 25 - DNA, 605 bp, Homo sapiens
tttttttttaaaatatagaagttctgagttagacctgtttagctcagaatagtgggctaaactaccataaaattctctgtatatcttaaatggtaatgggtcaaaaactccagaaaatcatcagttgataacacacctacagataagtgcatgggtttgaggggatagccaagtgcccatgataatttgacctcagtaaattaaactgggcaatacacatatttgctattctgatactgcattagacttataaaattccatctaataagcattcataaaactggacctctctgtatatatctagcttagacagggatagggaaaagaataactgaagaaactagcttacaatagctaggtttcgtcaggcctattctatccagccaggaaacaccaccagagagaagctgagccattcagctgtctgtctcctctccctctgtttgaattgtcattgctagggcttgctgcagaccaaacctcgtttgtaggagccaggagaggatttgagaattaaaagggggttggggaaaccaagtttaaaaaaattttggtggggccagggattgggaaaatcacgcttggattttttccttcaaaaatat

SEQ ID NO: 26 - DNA, 605 bp, Homo sapiens; identical to SEQ ID NO: 25

SEQ ID NO: 27 - DNA, 494 bp, Homo sapiens
tgtgtccaggcccatgggcccttggccggcgcgcacgatggtctgaagcgcacgttgacagagccggcgatgtggcgtagtgaaagcgaagaaggagcggcagtccagcagcaggcattggccgctcgctcccccagcagcgccgcagcctccagcgtccagggtgcccacttccatgaccatggccggcctcagcgcccccagcgtgatcggccctgcggtgctctttgtctgttctcggggccaagggcagggcggcgcttttcgaggaaaagctagacccccgggtctctctgcgccgaaccaaaagccgcttttggactgagagaggagcgtcacgcgtggctccgggctcctcggcttcttcgcggttccccgactgcgcctccgacccgcgtcgcacacacagcccaaatgtcagatcatattccttttatacatatatgaaatataaaaacaaattaacaaagcatatatatatatatttgcgaggg

SEQ ID NO: 28 - DNA, 494 bp, Homo sapiens; identical to SEQ ID NO: 27

SEQ ID NO: 29 - DNA, 564 bp, Homo sapiens
taacaaaaaaggggcccatgtctgataagtcaagaccacttgtcctctctgagcttcttgagtaatgggagataattccaacgtcacaaggttgatgaaaaaaagcaccattcatgtgcctggcatctatttattccacttcagttttcttcctatctggttgtctacttttgctctcctacaccttgctcaggggatatccccagtactggcaatatgagtgtgtttaataaaggagcaaaggaaagcattttctggtgacaagtctcatctggctgttcggtgacaccaaggcacatgcccaggaaactggtagtttccagtctggcaccacagcctctagagaaacagaaccagggcacctttcccagcaagtttatggagaaaaaacagggatgggcaggtatcatcaggaagcagggtcccaggctgagggcagagatgtggcttgtttccctatctagggatgcctggggggaattagggtaaaaaggcaaacagcaggtcaaggtagcttatttgggccaaggttgaagactgcagcctgagacacttccaggttgc

SEQ ID NO: 30 - DNA, 374 bp, Homo sapiens
ggtcgactttttttttttttttttttgcaagaaaaaagaagcaaacgagttatgacgtacctgcttttgaatgtcacaaatcaaacaatgtctagatgcttccaatcccccacattcccaaaatctagtatacctgcatattttaaaattccaacatttactttctagctattgtaactacaaaggaaaaaaaattgtgatctactaccagtacattgtgaaaagcgcaaaatgactgaagaccgtatgaaacagatggtttcctattcattttttacccatggtgcctaacggtgggcttggcatttaatggagactaagttctgacatggtaatagataatagcaacaggagagaaaaggtgaaacgtattt

SEQ ID NO: 31 - DNA, 488 bp, Homo sapiens
gatcccagcagtgtccagaagaagaccaaggacagaacagagactaggtttggtgagatgggacagattttgggaaagatcatgatgagccatcaaccgcagccccaggaagagcggacgccccagcggcgcctcagggtaccccctccaggaggtggtggatgatgaagtgttgggaccatcaggtgaggggactggagaaagaagaggtggcataggattgactaagatgaaggaagggggccaggcgtggtggctcacccctgtaaccccaacactttgggaggctgaggcgggcagatcacctgaggtcaggaattcaagaccagcctggccaacatggtgaaaccccatctctactaaaagtacaaaaattagccaggcggtagtggtgtgtgcctataatcccagctacttgggaggctaagacaggagaatcacttgagcctgggaggaagaggttgcagtgagccgagatcgtgctactg

SEQ ID NO: 32 - DNA, 651 bp, Homo sapiens
agatagtcactgggggttgtcaggatctctctccagcttatagcattcccttgagggagcagggatcaacacccatctcccacccccttccccactgtccagtcctcttggtagtaccagggctactgtagacccaggtggagatgttggcaccagcactcatcaggtactgcacatctagactggcctcaatcccggcccggccccggccactgttgtccaaccacacgggctactgatgcctgatgtgcaaagttgccaccgaagaggcgcatgaactgagccaggtctgagtcatggaaatactgctccaggaactgggcacaggcttggctgttattgctggtgccagagcccacgtcttgtgaggtcaagttgtatcgcttacggatcacagagggggttaccccagatgcaggcctacagtccctgtcacctgcggctcaggacgttgcctcagggatgatgttgggggaaaacgtgcagtcccccacaaagtcacatgggggggcaaggctgttgaaagctggtaggatgtggggaccttacacatgggttttcgtagtcctccacatagtgatgaaatcagcccagggagcagagtctgcttgtcggatgtcagcagcaagtcagaagtctgtgtgatcaaga

SEQ ID NO: 33 - DNA, 394 bp, Homo sapiens
ttttgccaaatctgagatgcaactgaatttattcttacctcatcatctcctaaacttcatcaacctggtgtttaaggccatcattcaaattaagctgtcctcctcaagcttaccatttgcctaattcaaagtttttctctcagcttttcaaaactttttgacttttccatcacactactgacccatgctaaccaaatccaccatatttcccgtggtttctgcaactacactgtctcaatccttttcataactatccttcactgttccttatgacttggtttaaagatttgtattccctcctcctgttccatatcctttaacattacctaaagctttgagttaaatgaaggttgccagggaaaaaaatgttttaaatgtaaacaacaacaaagac

SEQ ID NO: 34 - DNA, 390 bp, Homo sapiens
ttatattcgcggccgggcggcgtgtttttttttttttgctgcatatatagctgtggtacattttaatgtgaaatgatgactgcatcagcttatatccatggagcagattttagcattcagcttgggtctcccagtcaatatctacgagtctcttcttaaggagatcgatgacacagatacatacagactaacaaatgtgataccaataatcaagaattcactcagttaagattttgcccactgatttccacacaagaaacctagaatttactagattcttgtgcctgtgaggctccactcatttccctgaatcacaaaagctacagagtatttagatagaaatatacctactcttaacatgaaccattttaaatatatgtattactgtgt

SEQ ID NO: 35 - DNA, 570 bp, Homo sapiens
gtttttacagaaggagttcaaaatttatttataaatttgtgtaaaagaatataagacctttttcttttgtacatatttgtaccataaagaaagtagggattaaaatctaaaaagacccccaaagctttcaaaacctgatctgagaattagataagaatatgtcacttagaaagacaagcctgtagcacccatagctctgattaacctgaaagcatcaagtgactccctctttttctaccctaccaacatcactctaattatacttccaattagaaaaataatgtagcatttccctggcagtagagtttaaatatgagttcaggaatcagctcctccaaacatgcataaatgaggacaaggagaagccagtcactcctgactgcacggtcaagtgtgtgggcagttgaaattaaggtaaaaacagtgaggctgaacaaaatcacattaagaaaaagcatctcatgaggcttttcgaggtcagttgatgaaggccagataggagtcaatattttctcatataccccagctgttaccgctattcatattccaacagcctccagattgctcgag

SEQ ID NO: 36 - DNA, 348 bp, Homo sapiens
gaagaatcctaatccattactttattaacaacattaaaaacattttagacgtcacatacacattagccttgatactaaacccccttcttcctatgtctaacctctaactgcttgatcagactggcttcttgggctttcagtctttccttttgcctttttttctgttccttcttcagctggttcacaactgattttcttttccgcaactcatccttcagagctctgatcctaccttcaatatcactctggtcagatgtagtttctgactgtgtcatagataatgactcatctgaccaactataacagtgctgatgggacttgataggcaggtgacattgtcctccagtc

SEQ ID NO: 37 - DNA, 520 bp, Homo sapiens
gcgtttccagtggtgtgtggtctctcaagttcatgtgatcatttctaagttgttcatctggctccatcttcttgatctgtactgcctgagcactgtcaataatataactctctgtggcaaacatatttctgtatctggatttgccaatgtaagggctttcatctggggctttatcaatttcagcatactctgatggataataatttagtggctcaaatttagcatcaattttataaaaggccaattcctgttccagctcatattgcttctgacatgctcgtgttaattctatggtcttctgttttagccaatttcacagctgggagtgggaagaggccgaattcaattccaagtctcctgatttcaaatccaatactgcctattcttccatgctgccttcgatgtactgctgcagggtgtccagcacattacccacattgatattttcactgaatgatcataagtctccgagtctcaagaaagcaactcacaatcaacactgtcaactaatcttgggttc

SEQ ID NO: 38 - DNA, 676 bp, Homo sapiens
  misc_feature (520)..(520): n is a, c, g, or t
gctcatttttaatttttattgattttttaatgctgcacaacacaatatttatttcattttgaatttcatttatttctttatttctgttgctgcttttattttatttactgaaagtgagagggaacttttgtggccttttttttctttttcttctgtaggccgccttaagcttactaaatttggaacatctaagcaagctgaagggaagaggggtttttcagaatcactgggggaaaaaggaaaggttgcggtgttgatcatgccctatggtgggtgaccaactgcttgtacaattacgtttcactcttaattaattgtgcttaaggctgaattaaatttgggtgttcccttcttagagcagctcgtattggcggagatgcatgcgctggatgatgtcacggcagtcgttgaagacacggcggatgttctcagtgtccacggcgcaggtaaagtgagggtagcagtagtggcgccatctccactagcagtgctgattctcagaaactcatcccgaatgaangtacttggccgggtcacgcgtgggtcctctcccggctcgggagtcgcatccctacagagtgtgtagcgagcgaactctggaaagtagtcctcaatctcgatttgccaccgggacttctcagcagcaggtcttgcttgtgtagaagagatcacaaga

SEQ ID NO: 39 - DNA, 663 bp, Homo sapiens
  misc_feature (487)..(487): n is a, c, g, or t
ttttaaaaaccatacatcctttttattgttaagtcataaagaggtatcaaaattaaaagcaaaaattacagggtaagacttaacaaaactactaggagcgtcaaaggaagtgaaaatgggactaggcgcggggcaatatgaattaatgaacatgggaaggacaaggatggggagaacagtgagcatgtgctgaagatactaggggagaggatctggtgaaaaatttgatcttagacaagcgcctaggtaaagaaataatgggataagatttctaaaccccactatgtgcttaagagtcatcctcgccattgggctggtctctgtcatcctctccttcctcagcctctttttcatcatccttgatcaactccagctggtcatccccccgatcttcgttatcatcatcatccagtaggtccccctcctcagcagagtcatctgcacccccctcagactccatcttcacataagtctcatctttcttcanggagactgctggtctggtcctcttctggactaaccattcttcacctcaacgcttggttgccccggtcgctttcaattttgtcagggtttccgagagagaaccaacttgtggtttatcggggtagctccttctaagtggccgaaggtaatcccttcaaatttccaattggagatccc

SEQ ID NO: 40 - DNA, 651 bp, Homo sapiens
  misc_feature (496)..(496): n is a, c, g, or t
tgagtgtccttaacttttacaaaaatttcataatcatctttttcctctgaagaagactctgaagctctttctggcatactacttacaaccgggctggcagcagatctgtcacgtccaacatcacttgcaagtaaaggtccttcaatgccagctctaaggcttgtaagacgttccatgtccttaggaagtaacggtctcactaaatctgcttcattaatatcctcaatattggcagaaaatcctgaatcaggcagtgtctctttaggagggggaggtacttctttttctcctccactactttctttagggctgagcagagctgctaatgtctggtcactctcttttacaggtaatggttcttctgtatccttactaacaaggttattattagatggtaaatcaagatgaatatctttagcaggcaaaggcccttcaatgtcagcttcactagcagcactaggactggtggaaattagcatgtcatgttcagtatctngagtagttaaagattaatcaacatcatatttattaactagactgagagtagatgccgtgggtaaatcaataccctaacaagtccctgtgcatcaggttccgagcaagagaccagtaggagttagagttgctcctgaacagcttcctaacaccagg

SEQ ID NO: 41 - DNA, 715 bp, Homo sapiens
tctcgctggtgtgaccccctcaccccttggatcgccaggacaccccggggtggtggggtggctgcaggaagggaggttttttaaggcacaaggaagccaagtcgtggtcggggcgcccagctgcaggccccacgcccgacacaggccccaccaaggcatgggcccgagggtctggccccgggtgtggagggccgggaactcccgctgccacagtcaccaagagcctgagctgtccctgtcaccgcaggtgaggcaaggtgaactagatttaattttttttaaaaacaggtaaactgatttctctttaaaaaaataaaatctctggtctgctaaggtcacttcagctgtttttaaagatggctttctctggaatgatggaagttgtcgccaggggcccggcgtgtgggcctgtgactcagatggtggatctggagaaggagacccgagtgagtggttctccccaggttctggttgtgcaggtcaatgaaggcctggaccgcctccttcacgagcccatgtggatgagtggcaatcttgcagtcctttctggagaacttgaattctttgaagtacggcccaatatgtggaaaataagaacttgagattctttcttcgagacttaggggcgggattgttggagaagtggagtcttggcacagggcggaaatattttatcggaaattactcggagacccgacttcttggaagcggtgca

SEQ ID NO: 42 - DNA, 391 bp, Homo sapiens
tgtttttttttttccatatttcttggctaagcgactcatctgtgaggtttttcacaaaattgttgccatcgccaaaaatattccatttactgaaaaaaatccacatataagtgtactcacgcagttcaaactaatgtggttcaagagtcaactgtataaaaggtattaatatgtctggaaagagatatgtttccaatttaacagacactaccaatgagaagagttgggctaggcaggaaacttcaaattttccttttttactttatatattctatttgtatctcaacttataacctgtggaccacgtttattagaagaaaatgcagattcctgaaacttcctgcagaccccatgagtgacaatctcagggagatggagttccagaatctgc

SEQ ID NO: 43 - DNA, 476 bp, Homo sapiens
cagctaagatgatacaaatatttcagaaaatttttgccaaaaatagtaacattggcagtcaagccatattatttcacacttgcaaaaaatgttttttatggctctgcatgctttttagttatcaattctaatgcctgggtgaataaacacacacacacaaacacatacacgtatataaaatatttatttaaaaattacaagtatctagtgttagaaaatttatggcagcttataaggtgaatgattttaagagaaaattatacttcacatacatacaaatataaatatgcatgcacacatatatacttcagggttatgttttcatttggtagatatgagtttgattcactctaagaatcacagtttactggcttttgcaagtactgaaaataactgcatctaacacgaagtatattgttgctcttaaatgtatatttcctgataactcacttgtttccgtaaaggacttgggttag

SEQ ID NO: 44 - DNA, 478 bp, Homo sapiens
cccactactaacacatcccaatggtagatatgtataagtgaaatgagtgcgttcttcctgcccctataatgacaagcctgacagagaacacatcacacagaagaatgtgccaagaatcaagacctcttagaagaatgttagaaagttttctctccaaatggattctgtctaagtaggaaggccttggaactagaaaggtctaagatcaaatttatgacttgaaaactctatggctttgggcaaattatctgaacttaattctggactcaatttcttatctacaaaatgggaattaaggcatcaacctcaaagggttgtttaaagaatgtgattatgtatttctgtaaagcacattgcaaagtatctgacacatagtaggtactctctgtaaatattagcttcacttctctcactcctccaactgaactgcagttatgtaaagaaaagcaagcatccagcagttttgaagaatgtttgg

SEQ ID NO: 45 - DNA, 471 bp, Homo sapiens
actaattttccatttcctccccttttatagtttttaatgtggtattagaaaagtttaaattacatatgtggcttatattctatttctatttgacagcacagttcttcacagtttgctatagacaatctgaaaattgggttctgaactactaatcagatagccaatgcaaagaaggaattataaatatactgcttagataagataaaaacatatcagctactcagaaatgtaataattcattagagaagttggaaaaatgtaccttgaaggactgaaaagggagacaatatgaaataagcaaccgagttctaaacccacaaatgaaatgcaataggaaattctacacagctgtttctcctgcaagcatggacccatagcagatcctggagcacaatttagagtggccacatgccaacaagaagcttgctggggcattgcgacagggctctgcgcacatacaaacctccgttc

SEQ ID NO: 46 - DNA, 972 bp, Homo sapiens
tttttttttctattggatactcctgaagaagatgttccagcagaagttcgattactaggcaaggttacagactcaaatattctagagtgagcctcacttggagtaaatcttggagctctcagaagagggctccttttgtgcatatcaaaccttgttccagaatggagtggcgaaaacaatcgggctgaagcagcggtaccagatgcagaaaaaccagatgcaaagccaacgtcctcgggagttagtggagggggtcggaaattatcaaatattggtttgcgaataagaccttctttggcatactttgctgaggaaaagtattgtggctctgacctagaatgctttaaagaagtccacctaaatgtcggttctcgcaaaatagattttcgcttcccttgcataggagcagtggaagcaggcaaaaatggtgatcctaaggggattgttgggggcatagccaaggtgtgttgcccaaaatactgaaggctggtttccatggttgccgttgattccccaaaggtggaggtgagaacaagaggttttctcctggggggcccttttaaagtttgataatttttcctcgtgtccgatccaaaactctctccggcaacggaaaacttccgcttccccctcaataatctcaatttctggggactgggaaagtggcagtggagaatgacttcaggggtatgctccgctccttagggagttccgaattttctctgagaggctgaaggttcttgggggtttcaacactggggctaccagtatggaaggaattcgagagattttcaagagggtgtcgggaagcttgcctggttttttcagaaagttccacaggacggggccctgaaatactattcgggcctgtgtacgaattttgtggccctagggcgcaatttcccataatggatcgtttaaattgcgaatctagttaaagcagttctccttgtgaatagttatgcgcacaaa

SEQ ID NO: 47 - DNA, 340 bp, Homo sapiens
tttttttttttttttttttttttttttttaccttcaaactttttttttaataattcaacatttactttagaaattaaatgcatcattgcatagaagagttctcataaaactgcttggtcaactactgacaaaatacggtttcatgtcagagaccgacagtaaattttcagaaaaatgttttggtatgtttatggtaaatcatacaagtataaagtttagatacttaaaatttccagaatctgatattttcacctttatccctcttaaaattattttgtatgtcttataacaaaatatatacatacatctctatgtgttaccttttaaacaaatatgatcc

SEQ ID NO: 48 - DNA, 507 bp, Homo sapiens
atgcacataacaacagaattaaagagataaaggcaaagagagagagagccttagagtaatgagacattacctttggagcgcacggtgtaacactctttctgtaaattttacacaaaaatggcaagaaataaattgtaatacacttttaagacaagactgaatctatgttttaatatcaatataactttgaaattaattattttcaagttttatgcagagcaagaaagcttttttaaatggagggctctaaattttctttcatatgggatatttacgtagagatgaattatgcttaagaaaagcatcgtggctaagtgggaatctatttagatccttaatattgtaacatagagtgccaataatagctattaacatattacatttcctttcacaaatcccagaaattagctaagacaacattttctcaaaagagaatagtgtatcttgcatacatacataaatataaaaatctgaatgcccaggaccagttactaccagttgaaagca

SEQ ID NO: 49 - DNA, 507 bp, Homo sapiens; identical to SEQ ID NO: 48

SEQ ID NO: 50 - DNA, 579 bp, Homo sapiens
tttttttttaattaaaatatgtcactctgaaagctgtatggagaagggacagggagtgctaaaggagtgttccagggcaggatgaaagttacttgtactatgtcagatatggtgcaagaaacagagagacattgatggatttggagatagagtcaacatgagcttgtgaccagctcaggatggagggctgggaagagtcagaggtgcccctgcatttccagcatgtgtgagaacgactggggggcagtcacaggaagacaggaagaacagcccacctcattcatcgcttagtctacaaatagtcattagtatggaatggactgtggacacaggccctaaggatataggtttgcctcggaggcaaacgaagacatcccagggcttggggagctcacagcccagaggctgggggtggtgtgggggtcagatgtttgagaatcacctctcaaacaaatattaaattggacctacaacagcagctctagggagaggttctcaaatgagtccgtacctatgcccgcatttctgttgggcaggtgacttgccattctgtgactggatgtgtatttcctgggctat

SEQ ID NO: 51 - DNA, 541 bp, Homo sapiens
ttttttttatgggttaaggagcagaaagtttaataagcaaaagaaaggggagaggacagcagctctctgttgcgagagagagaggtgtccaaaagggaagaggtcagatgaatatttttataagcaagtatttttaacaaacttttcaaataagtaaataaataatcttatcacagtaagtttttaaattgatactgggtgactatttcacacaagtgttgtgaagcatctgtgacactatgaaaagatccaagtaaggtagtaaagtctggagtagatccaagtaagttagtaaagtctgggggtagtaaagtctagatacttaacagcttgaagattccattttatgaaatttgcgtcatcaactgacacattcttgctgaggctgaacatactatgttcagaaaccggcaaagtggcggggtgcagctcatgcctgtaaccgcagtaccctggcaggtgaggtggcagatctcttgaggccaggagttcgatacagcctggttaatacggggagaccccatctccatttgaaaaatta

SEQ ID NO: 52 - DNA, 514 bp, Homo sapiens
  misc_feature (154)..(154): n is a, c, g, or t
tttttttttttcctttaatacagaaacttcattgaaaaaacctagccctgtacagctgcccttttaaagaggtggccattgcagggtctctgcctccccagcaggtggcagatgctcccggccactcgtttaaataactgtcccctggaggggnccggggtttgaaggcagggccctgccaccctcctgggggacacccgtgcatgtttacgccttttctggttgtgtcagtggccggagcatggcagctgggcatcaataaacacctccgaggaagctggactcgtgtgtgctggcacggggagggcgccgggcggggccgtggtgggcatggcgtgatgtcacggtcactccgggatgtcgatcaccaggtcatcgtctccatccaaggcatcgtccccgctacctgcatcgctgaacatctgccgagggaccgtgctcaggatcgtgggggtctcacaaaccctcctagagagctctgtgggtctctctgcagtcccgtgctttgtctgtg

SEQ ID NO: 53 - DNA, 473 bp, Homo sapiens
ttttttttttttttttttttttgattataatttggtttatttctctttgactctctataaaaaaagaactggaaaaactattgtattaactgatttcaagtatagaagccatcttgaagaaaagacagttacttgagctcttgaatttatcagatgatgaaaagtgcagagaagaaacaataaatacaaatgttcctagtcactgtgtaaatcacatttaaatttgatggggttttctaagaataacactaagtttataagtattaacaatcttttaaatctgaaaaatgttttataaatatgggtattagttaatatttgttatataaagtgttgaattattaactatttctttaaaacaggacagatggcctaattaaatgacaaaagaaaacaacatctttttacattttcccactgatactgtacatatgtaatataaagtacacattctggaagaaaaaaaggagtga

SEQ ID NO: 54 - DNA, 793 bp, Homo sapiens
ttttttttgttattctaaataagatacatagcaattaaaatagagaacaaataatggatgtttcctcaccatttgtttcatttcaaataaatataaacacatttacagcaaaagtatatggacattttctctagtttggcaaaaaaaaaaaaaaaggtcaacacatcatcagttacaaatgttaagtggtcaactagaaatctgtgtcctaagaaatataaaatacaacaaagactggtacacagaaagattacatttaactccataaaaaagctacttcagttctcacttgcattttgaaggaaaaaaatgtgtatcttccattttagactgaaggcattttgggtgcccccacaattggttgtttaaggacttggggtcttggaaattggaaaaacctaaccacccgcctccacacacacatgatatataatatatagcacacggcacagcatatattgtgatgactgtgtaatggtggccatgaattctttaaaagaggtgctgcattacttcctatttttgtcacaggcgggttaccagggtggtagggaaaggggggttccaataatggatccttagaaagatttttgggccaggaggggaagccaggaccaccagtcaaattcaactaattggtgggaaatttttccatccatcaccaaggaccaaacttggggccaattcgggttgttttaacaatgggtctaaaattccacgcccaaatttgcccatccttgatccggggccgtaagcaagctgtgtccatctttgtgatatataatagtgtgag

SEQ ID NO: 55 - DNA, 357 bp, Homo sapiens
ttttttttttttttttttttcaaatatgtaatatttaattttttattgatataccacattacatacagaaacattcatgtaaagctttttggattataacagataatttacataactggggaatagaaccagctttactcctacccagaaaataaatttctccctccctccctgtccaaaggtaaacaagatcctgagctaacattgtaaacgaatattgtacatttatacaaatgctattaaagacataaaaataaaatatatagacctgcccccagcttcaactactaatcatgtaccacttctgcttcatctatacttcaaccctttccctacccccacccatttaattttttt

SEQ ID NO: 56 - DNA, 434 bp, Homo sapiens
tttttttttttttttttcgtttttttttttttttttgagacagagtcttgctctgtcatccaggctggagttcgagactctatctcaaaacaaaaacacaaaaaaaacaaaacaacatttttttttgtagagttggggggtctcactacattgcccagactagtctctaactcctggcctcaaatggtcctctcacctcagcctctcaatgcactaggattacaagtgtgagccaccacactccaaaatttttcaattaacacatttataaatattctcagagaatgccaatttaactattagagggaaatctagtttgccttatttccaagttctcagtgggttgttttggaagaaaggaacagaaactactcaaactagtttaatcaataaaaatagaaggtagagttattggaatgtagggatatctcata

SEQ ID NO: 57 - DNA, 633 bp, Homo sapiens
tttttttttttttttttttttcacaagcacgtgcactttattgaatgacactgtagacaggtgtgtgggtataaactgctgtatctaggggcaggaccaagggggcaggggcaacagccagctgtgcagggccagcattgcacagtggagtgcaaaggttgcaggctatgggcggctactagtaaccccgtttttcctgtattatctgtaacataatatggtagactgtcacagagccgaataccagtaacaggatgaatccaatggtcatgaggatgcccagaatcagggcccagatgttcaggcacttggcggtggaggcataggcctgggccccggtcacgtcgccaaccatcttcctgtccctagacttcacggagtaggcgaatgctatgtaagcccagacagcaccagttcaagaagagggtgttgaacagggaccagacgacatggtcgggcacggaggtctcgctgtggattttgatcacggtggaccttggaaggatggtgctggggggtccccacaggtccacctcatgttcctcctgtgcatcttctggcttttggaaagaatgttgaattaaggttgagaagtgtggttttcgcgtggaccaagggcccccttggtttccg

SEQ ID NO: 58 - DNA, 580 bp, Homo sapiens
tttgtcctttttaacttttaaatacaaagtctgagctgtcccatgccccaagtcttcctgtccactaaggtccggcagagtctgaatcttcaatcagaacctctgtggtagcaccgagtatatctgagttcataaccagcccttcagtgcctccactgctgccgcttcccacaaagatcttcccatcagccatcaggctcacccgttccgtcccactgcagtatgactttgacatcccttcagcttctaacagtaggcactctccagaggttgagtttcccaagggctcaggaagaagaggaagaccctgaccatctgaaggctgcgtcagggactctgggttagtgcccaagatatctgtgctggtgatgagggcgcctgcattggcagccagagcttctgcaatcagcacctcagggtggctttttgccttgtgtgccactacgctgtccttcttctcaaattttttgccacagatattgcaagaaaactggtagaaggagtctgcatcatgtttcttcatgtgccaattaagagatgccttttgtcgacaagtaaatccacagatctcacatctaag

SEQ ID NO: 59 - DNA, 476 bp, Homo sapiens
  misc_feature (352)..(352): n is a, c, g, or t
aatataaaacctttcatccgttttggaggttactttaaagatagggacaagcaaggtataagacatgggggatgatgaggaaccacataaatttttctactgtttttctcattaaatactaaggcattatatatcactgtgaacaatcaaggatcaactgacactgaaatactgccaagactgcacatattctattgactccctgcctaactccatagctccctattgctaaactgaaatggtgtaccttcccaaattacaaaatgtgtctcattgtacaccttaaaatcaggaatgtttatgttttacaaaaacatccaaccattatgacagattctgacacccatggggnagcaagtggcagtcatggtggaattcttgccagcttgaaagaaacatagggacagacctctgacatctgcctagattctcaagcctggctcacagtgggagaaatgaccgccaaaagagtgtaa

SEQ ID NO: 60 - DNA, 503 bp, Homo sapiens
tttttttagagaccggggtcttgctaccttgccaaggctgttctcaagctcctggcctcaagtgatccttctgccttggcagttttcaaagtgctgggattacaggcacgagctactgtgcctggccaaaatgaggaagacctttattcaagaaacacaaccaggaatttaaatacaggcaaacctctcaaaacactgctttgcccatagcaagctctcaataataatcattattgtcactacaaatgaagaagaaaacaatggcatattaagaaatagtgctctggttaattatctatttaaaaagttagaatcctaatgccatactgtattcaaaaataaattctatgagaattaaagacataaatgagcaatgtactttaagtgtgctttaattcaatatcatgattaggaaagatacatgaaggtaggaagtagattttttttttaaggcgaagaatggaaaaaaggaaagaaatctaagggaagaagaggtaggaaga

SEQ ID NO: 61 - DNA, 458 bp, Homo sapiens
ttttttttttgtattttttgcagggacagggtttcaccatattgctcagggtagtctcgaacccccgagctcaagggatccaccctgcctcggcctcccagtgtgccgggacttcacacgcgagccaccgagcccagctacattcttatttcctaaactttacaagttcacactcttccctttaaacaaatgtgccccctttggcggtgtcatttgagtcccggtgtatgtcattaagcctcttaacctcaaccactacttcccactgaaataactctattttctttttttctaatgaaaaagtaagacatgttctatgtaaaaattaaaatatggtgagcacttaccacttactatgagccaggcattgaactaagtattttttaatcttattttcatcctcgtgatatgaggtcagtgctttgatgagttccattttacgtaagaaagtagttaag

SEQ ID NO: 62 - DNA, 437 bp, Homo sapiens
  misc_feature (346)..(346): n is a, c, g, or t
tttttttttctatttttagtagagacagcgtttcaccacgttggtcaggctggtctggaactcctgaccttttgatacgcccacctccgcctcccaaagttctgggattacaggtgtgagccaccgcgcctggccgtgaatctgcattttttaaaaaccaacattttcaccaaaatgagcctacagttttgttcatcaggaaaaacaatggatattcataacattaaaatgaactgcgttgtgatacaaaaatacagtatatgtgcagaataaaaagcatcttttctcctagatacttaagtagaagtagtaatcctattttacagttagatttttgtttgttgtntttttttaagacagagtctcaaaaagaaaacgaaaaaataacactcaccatctgacaaagttaccttgcctcagtaagagtgaggaatcag

SEQ ID NO: 63 - DNA, 386 bp, Homo sapiens
tatttggacttggctttgatgagtatctgacaaaccctgcagacactagtacaatttgatcgtaaacaaagtccttgccagcatagtccagcaaattctgataaaacacatacaaaagttaagagacagctcgatttcatcttcctcccaacacctgcaactgtttccagattttctgtgtagtcttctttgtgctttcagttcagtaaaaattagaaaggataacaaacttgtaaagtcagatacctaattgtacaaaattgactagaccatggagaagggggaagcatcattttacaaaatattgttaagatcaccagcattaatttaaattattttcctttctggacttccaagtccacttggcaattttacttaggaaaata

SEQ ID NO: 64 - DNA, 512 bp, Homo sapiens
tttttttttaaggaactggcaatacagctattgcagagctaggatttaaacccaggcaggttggcttcagttatcttcatggtacacataatagctagacgaggtggaagcagggataccagtaagaaagttattgatagtggcttggattagactgatagcagtgagtttccctaacgggttcattttccccagtcatgggatttttatgaataggatgattaataagaaagtataacaataaaggggagttaacatttgccagttcaacagactgagtaaagctacacgatttagctttactaaataaacgcccatgcgttttattttgactgcatgcttcaagaagctttcactttcaaattactcattacaaaaaagaagaccttaagttgggttggctttccaacgtgttaaatactcaaatgcaggtgatttggttctattagcactaagaacaaaaaactcagtctttgacccgagagaattctgacaaatgccaacttattaac

SEQ ID NO: 65 - DNA, 501 bp, Homo sapiens
tttttttgcttctttatgttgatttttaaataatggatgttttagttgtataatttttaaattgttaagtggaaagttttcttaacctctaatggcaaatttgggttatatgcagcaggaatttccttaaccagtgtagccacacagtataacaagcatattactcttatgtgcactgactgctctcatttctcctatttttacctctctctatccagcctttttcttttactgatacatgatattttacatatttatgggtacatgtatttgttacacgtataaaatgtataataatgtcagagtatttggggtatccatcctcttgagtattcatcatttctatgggttggtaacatttcctgtcctctctcctagctacattgaaatatacaatatattgttgctaattatagtcactgtaatgtgctatcaagcaatacagcttgtcttttatctaactctttttgtacccattcaccagttgctctacatttcctc

SEQ ID NO: 66 - DNA, 460 bp, Homo sapiens
tttttttttaaacatttgaagaggtatggggcggagggggaaatggaatttgaccgactcactattgcccagactggagtgcagtggctattcataagcacaatcatagctcactgcagccttgaactcctgggctcaagcaatcctcctacctcagcttcccaagtagctgggactacaggcgtgtgccacagtggccagctaattttttcatttttaaaagatgacatcttactatattgcccatctagtcacaaactcctagcctcaagcaatcctcttgcctcagcctcacaagtagctaggattacaggcgcaggccatcatgaccaacaaaaagaaattttttatattgattgcatgatgaaatattttgaatatattgagttaaatagattttctcatttgtttatttgtgctgttttctttttaatgtgggcattagaaaatttacaattaa

SEQ ID NO: 67 - DNA, 472 bp, Homo sapiens
tttttttttttttttttttttttttttttttatctgtaagaaaatgtttattcttttgaaccccacaggaaaaaaaaaaaagaatgcagccaagaccagtatttaacgaagtgtccccaaaaggcagcaaaatgggggaaacctcaaaacaaagtcagtgacaattttccatgtttttgcacaaagaagagaaaatctatgacaattctgagtaacactttcatggcgacaattacacaagatgattcaaaaatgcaaaatggcagcaacatgcacacctggctaaagctagaagtattttttttaatctcaaaataagatctgtgatttaaaggaggattctttttaatacttctattttactgacttgcttgtcctacttaatttgctttaaatgagacgtacatgccaattaacaggaaattttagaagaactatgtccttccagaatccatggcaaggaagcaaaacc

SEQ ID NO: 68 - DNA, 502 bp, Homo sapiens
ttttttttctatagacttttttcagataacatcttctgagtcataaccagcctggcagtatgatggcctagatgcagagaaaacagctccttggtgaattgataagtaaaggcagaaaagattatatgtcatacctccattggggaataagcataaccctgagattcttactactgatgagaacattatctgcatatgccaaaaaattttaagcaaatgaaagctaccaatttaaagttacggaatctaccattttaaagttaattgcttgtcaagctataaccacaaaaataatgaattgatgagaaatacaatgaagaggcaatgtccatctcaaaatactgcttttacaaaagcagaataaaagcgaaaagaaatgaaaatgttacactacattaatcctggaataaaagaagccgaaataaatgagagatgagttgggatcaagtggattgaggaggctgtgctgtgtgccaatgtttcgtttgcctcagacaggtat

SEQ ID NO: 69 - DNA, 421 bp, Homo sapiens
  misc_feature (3)..(3): n is a, c, g, or t
gcncgactttttttttttttaaatcaaacccaaaacactactgtcctaagcattatggttcacagaatcaagtgaaatgtatggcattttttccttctctccatacaagggtactctgatcaagagctagtctatcaactattgatcaagcatttataatgacaagagtgtaagagtaactaactgcagggttacaaagtatgttatataaggtccaggggattttccccaacagtgtagaactgattggaggataatagtaaggttcttgaattggggaaattccattcaaatgataatcctcaccagtccatggagcttttaagcccctaagcagccataaacaaaagcccacttgacaaagagatggtatgcttggttaccataggacatctcactcctctggcctcattgcttagat

SEQ ID NO: 70 - DNA, 383 bp, Homo sapiens
ttttttctcttagcacacagccctcactctgtcgcccaggctggagtgcagtggggtgatctcggctcaccgcaagctccgcctcccgggttcatgccattctcccgtctcagcctcccgagtagccgggaccacaggcgcccgcaccacgtccggccaattctctgtatctttttagtagcgacagggtttcaccgtgttagccagatggtcccgatctcctagccctgtgatccacccgcctcggcctcccaaagtgctgggactaccgcgcccggccgaaagtgttttaaatctttgtatacatgtattttggtgtaagaagcactcaatcctaatgagtatgcccaacatgacttgtttggttataaatataagtatgt

SEQ ID NO: 71 - DNA, 568 bp, Homo sapiens
ttttttataaacatgctgttgttattttctaacaggactgtcattccatttttattatttttcctatcagtggacctagttatttccagttttttgctataagtatttttacttgtgtttctttatggacatatgtgaagtttgtaaaatattaatatttacctaggtgtaaaattatgaggtcttcttagagtattggatccatacgctgataggtaataacaaactttccacaagatgattctatcaatttagccttccaaggagtatatgagtttctgttattccatatcttgaccaataattggcattgtgagactttatatttttgcctaaatgtaccttgttgtggttttatttatttgtttgtttttgagacagggtctcactccgtcacccaggctggagtacagtggcacaatcatgtctccagtctcaatctcctgggctcaagtgatcctcccgcctcagcccccaagtaattgggacttcaggcatgtgcttccacagccagctaagttttgtaattctttgcagagatggggttttgctgtgttgcctaggctgg

SEQ ID NO: 72 - DNA, 467 bp, Homo sapiens
tttggtcaacatgctgtgatctgggagcctggttaatttttaaatttgtgtgtgtggagacagggtctcaccatgttgcccaggatggtgtcaaactcctggcctcaagcagtccttctgccttggcctccgagtatgctgggattacaggcaaaagctagcacaactgtcctgtataacttttcataattactaaattatgcaaaaatttctgggtctgtacatatggatctatttcattccatttaactgtatggatatactattaattgaatgaaccatttacctgctgatggacatttctgtttataatgtttacattatgcagttcatattatatacagttgacaacaaaaaatgctgccatgaatatctttgtgcagctctttaatgcacagtgactatttccttagaattgttaagagtatcatttttcaattcaacaagaaatggttaaaaggtccctt

SEQ ID NO: 73 - DNA, 712 bp, Homo sapiens
ccagactgtgtgtagcaccaagaacgcttccttcacacgatcttcaggatcgagcgggctgactgggagtgtctgcctcagtcccacgtggcacttggaaaaaacagagcgaggcccccccaagaggcagcgccacccggccgccgtgctcccccaacttggggacgtctggccttggacagctgggcccgtctctcaccacccacctcagaggcaaaaaaggattcacacccagatctctagaaaaatgatcaaaagcaggtttcttctcacagccaagcttcctggacatggcagttcattacatctcgggaaaacgtaaatcatttcttcagctgtcaatactgtgtccctcacatccttgagcctcgttcttgcaaaatcttggccttctcgctgggctcgctggccgtaccggtaagggtgttgttcagctccttgggacaacaacagaggaactcggcttggtcttcggtcccattattggaagaagaaccgatgctgaccaactgctcgaaattcccagcgttggacatggtggaaaccatcttgctgagtacctactactggcaattgaggaaacggtaaacatgcttaacaggcacctgcgatggttttgctgtctccgtctccaaatttgtccctttacaagttttattaatgaagtgagattggtaaatatcggtttcgtccaaaatccttcctccgggag

SEQ ID NO: 74 - DNA, 443 bp, Homo sapiens
tttggaggtatgtcctgaacttccatactattaactagacacagaactgcacagcaggatgcctgctgtgtgcattccagatatagtacatagctcagctctcaaatcagcaacaaagaagataagcacaccaggtccacatagcagagaacttcacattatcaagtttctatccaaagcttcaaagaagcaaataatattttgaaagactatgtgataaaaggatcaatttttagaaagtttcatgatctgtcatggatcaatagtttataaaggacactgaaacttggatgttgaggcaatgtcaaattgccccaagtttctaaatgcttactcttcatttctgtacttaatgtggacttggatcaaatagggcatgaaccagcattggtccgtggactgcattttgactagtattggtttaaagaagttgttcgtttact

SEQ ID NO: 75 - DNA, 497 bp, Homo sapiens
ttttttttaattagcagtgcacaacatgtagtcccagggactcaggaggctaaggtgggaggattgcttgagcccatgagctcaaggctgcagtgagagacagagcgagatcttttaagaggtggctcttaaaaaaataataataaaaataaaagttggatctgatggattgcaaaaaacaagcgcaaagcactatatgcttcttccatgggtcccacatggaccgggagccctttgaattcagggcctggtgctccttgccctctgcctactctcagtgctcagccagggcgttgcttagggtgggggctcctgggggtaaaaggtcaagggctttggctatagtcctggcatcaaacttggggtgtaatcccagttcttcctcataatatcaggttggtgcaaaagtaactgtggttttcaccattaagagtatgtggtgtagggggctaggggagggatagcattaggaaaaatacctaatgtagatcatgggt

SEQ ID NO: 76 - DNA, 1159 bp, Homo sapiens
  misc_feature (475)..(475): n is a, c, g, or t
  misc_feature (1123)..(1123): n is a, c, g, or t
gccgacactgggctgggtagaagggcgccacggtcaggaacctgaggatgtcggtggtctcaggtaccagggacgcgggtggcaagttggacctctgcgtggcagaccgggcggcagtgtgactctgaacatctcccgagctcaggacggggaacctgagtccaggaggcgcgcggggctgaggcagtccagccaggctttcccgacttgtctcccgggaaaggacatcctcgctccgccctcctgccggctccttgtgtccgtctctctgacccttcacccgcccgggccctgcacatataaacagaagcagcctcgagctctcgggagccgactttgtggaagcagagtggagtggagggggctgcccaccctcgctgtacacagctgggcccagatggccccttctgatcccccagggctgacccagtcccagaccaggcacgaagagagaggtcagagccggtaagaaggnaccccagagtcctccgtcagtgcagaggcaccagtcaccaagtgaaacgtcagccttccgaacaagggggagcaagcttcagctgcactcgtgaatttgggggtggggggtcccggatctctgggtaatgctgcactccaggttcctggctggccccctccagccttgagttcttgggcagaagtgcagagaagggaacttccagggaagtcaggaggaagggattaacgaactcccaggcagaaagaagttgggaaaagacccccaggaggggccggggattgcaatctgaactcgggccgttaaatataccgcgggaacggttggcaaatggcgagtttttttgcaaggttggggggcgaggaaacacttgggacattcgttttgggttaacaccgaaatcacccctgttccagggccaatttgggctattctcttggaatggggttcgggaaaggtatttagggcctatccaaagagataaaggaaggaatatgggaaaaccacacacttgggccccctcattgggggcttcaaaaatgagagaggagcgcgcagaaaaataaaattgagagcgctggattgtcacaaaacaacaccaggggtttacaagggggaatcacagagaactgttttcgagacgttggngatttaaattcaatcaacaaacagaaaaacaagtgg

SEQ ID NO: 77 - DNA, 562 bp, Homo sapiens
aatttggaatcctaactctattaatagtgttgatacatttcttctaaatttgctgccttgcctcagtagatctttactctgggatccaggtgactgtctgggtaatttaggtgatgactcttccaacaaacaatctgtaatccccacattattagaattgggtaatacatgttttttggctttttggaactctcctgaattgtagataatacccctacattccaaacactcccaattttgctcccatgaccgtaatgaggagcaggctaaatgtgtgccactggaaccacaacactgacagcgctttatttcccatttgctatcaggtgcattatagtctcgcccttctttgcaacgacatcttcgaacatcacaacgctcatagtgctgcagaagctcttgataagcgttttcctctaattcccaggaagcatctttttcaggaatatgaattcccattctcaacatctctttctgaaagatgtcactattattgcatattgtacacctaaagaaaaacactcccgcatttattgcttgaacctgtaaacagtctctatga

SEQ ID NO: 78 - DNA, 471 bp, Homo sapiens
ggtcattctagccttttcataaaacaatgtctcttttaaccactacacttatcttattcccttctattgatggatttagtcagcatctttttagacttgaatacaaacgtacccactcctaaaaatgaatgaaaaaaataactgtttctggtataagtgtatatattaaaaaaaatagtgcatgtcttatatctttcatttttcactcaacattttaaaaagagctatgttgttctatacagataagtttatttcttataactgcctgtataatattccatcatacaaatatgacattttatctacacccccaattgcttatttagaaaatctggatattcagattattttcaatattttgttattacaaagaatgctgcctaatatattatttgatagtcccatcagtcaagcctgatacaataaaattttatgcatgacaattactatatgttaagatcgatggtctca

SEQ ID NO: 79 - DNA, 464 bp, Homo sapiens
agactgagcctcactcttgttgcccaggctgcagtgcaatggcacaatctcggctcactgcaacctctgcctcctgggttcaagcgattctcctgcctcagcctcctgagcagctaagaccacaggcacacaccaccatgcccagctaatcttttgtatttttagtagagacgaggcttcaccatgccggccaggtgtgtctcaaactcccgacctcaggtgaaccccctcctcggcctcccaaagtgctgggattaaaggcatgagcactgcacccagcccattgagatacttttttactcagtttttttctaagaatggattttcctctttatgaaaacaaaatattccttttctttataaaactttataggcaaatttatcaagctggtaaattccataacaggctgaaccaaatgaaatacctaagtaaagcaaattacatgattagaaggctaattatg

SEQ ID NO: 80 - DNA, 498 bp, Homo sapiens
ttttaatgtccaagaccaagtgatgattttcctgtataggttctagaagcctaatttgtgtgtgcaactcaaacattcgacaaacataagataccaatctgctcagcacttactatgaattcaatgtgattgtgcataccaccttactttccaaatcaaggtatacagcagtggggataagtgatgttaattttaaaaatttaaatatttttatactaaaataaacattatggagtagcagatgcaaaatctgcatgaattcttaagataaaaatgaagactgcaaagaatcatagatttctcaaagggtcacattgaactatgccttcaggactcctggagtacaagcacatttgcccaaattgttctgtcattatgggtacactttatgggtacattatgggcagaagataactaaaaagtgtttttctctactgcaatgatccctcatgtagtatatttttttcctactactgtttataatactttacccaattt

SEQ ID NO: 81 - DNA, 6812 bp, Homo sapiens
cggccgcgaccactaccaccactgagcaccgcttcttccgccggagcgtcatctgcgactccaatgccactgcactggagcttcccggccttcctctttccctgccccagcccagcatccccgcggctgtcccgcagagtgctccaccggagccccaccgggaagagaccgtgaccgccaccgccacttcccaggtagcccagcagcctccagccgctgccgcccctggggaacaggccgtcgcgggccctgccccctcgactgtccccagcagtaccagcaaagaccgcccagtgtcccagcctagccttgtggggagcaaagaggagccgccgccggcgagaagtggcagcggcggcggcagcgccaaggagccacaggaggaacggagccagcagcaggatgatatcgaagagctggagaccaaggccgtgggaatgtctaacgatggccgctttctcaagtttgacatcgaaatcggcagaggctcctttaagacggtctacaaaggtctggacactgaaaccaccgtggaagtcgcctggtgtgaactgcaggatcgaaaattaacaaagtctgagaggcagagatttaaagaagaagctgaaatgttaaaaggtcttcagcatcccaatattgttagattttatgattcctgggaatccacagtaaaaggaaagaagtgcattgttttggtgactgaacttatgacgtctggaacacttaaaacgtatctgaaaaggtttaaagtgatgaagatcaaagttctaagaagctggtgccgtcagatccttaaaggtcttcagtttcttcatactcgaactccacctatcattcaccgcgatcttaaatgtgacaacatctttatcaccggccctactggctcagtcaagattggagacctcggtctggcaaccctgaagcgggcttcttttgccaagagtgtgataggtaccccagagttcatggcccctgagatgtatgaggagaaatatgatgaatccgttgacgtttatgcttttgggatgtgcatgcttgagatggctacatctgaatatccttactcggagtgccaaaatgctgcgcagatctaccgtcgcgtgaccagtggggtgaagccagccagttttgacaaagtagcaattcctgaagtgaaggaaattattgaaggatgcatacgacaaaacaaagatgaaagatattccatcaaagaccttttgaaccatgccttcttccaagaggaaacaggagtacgggtagaattagcagaagaagatgatggagaaaaaatagccataaaattatggctacgtattgaagatattaagaaattaaagggaaaatacaaagataatgaagctattgagttttcttttgatttagagagagatgtcccagaagatgttgcacaagaaatggtagagtctgggtatgtctgtgaaggtgatcacaagaccatggctaaagctatcaaagacagagtatcattaattaagaggaaacgagagcagcggcagttggtacgggaggagcaagaaaaaaaaaagcaggaagagagcagtctcaaacagcaggtagaacaatccagtgcttcccagacaggaatcaagcagctcccttctgctagcaccggcatacctactgcttctaccacttcagcttcagtttctacacaagtagaacctgaagaacctgaggcagatcaacatcaacaactacagtaccagcaacccagtatatctgtgttatctgatgggacggttgacagtggtcagggatcctctgtcttcacagaatctcgagtgagcagccaacagacagtttcatatggttcccaacatgaacaggcacattctacaggcacagtcccagggcatataccttctactgtccaagcacagtctcagccccatggggtatatccaccctcaagtgtggcacaggggcagagccagggtcagccatcctcaagtagcttaacaggggtttcatcttcccaacccatacaacatcctcagcagcagggaatacagcagacagcccctcctcaacagacagtgcagtattcactttcacagacatcaacctccagtgaggccactactgcacagccagtgagtcaacctcaagctccacaagtcttgcctcaagtatcagctggaaaacagagtactcagggagtctctcaggttgctcctgcagagccagttgcagtagcacagccccaagctacccagccgaccactttggcttcctctgtagacagtgcacattcagatgttgcttcaggtatgagtgatggcaatgagaacgtcccatcttccagtggaaggcatgaaggaagaactacaaaacggcattaccgaaaatctgtaaggagtcgctctcgacatgaaaaaacttcacgcccaaaattaagaattttgaatgtttcaaataaaggagaccgagtagtagaatgtcaattagagactcataataggaaaatggttacattcaaatttgacctagatggtgacaaccccgaggagatagcaacaattatggtgaacaatgactttattctagcaatagagagagagtcgtttgtggatcaagtgcgagaaattattgaaaaagctgatgaaatgctcagtgaggatgtcagtgtggaaccagagggtgatcagggattggagagtctacaaggaaaggatgactatggcttttcaggttctcagaaattggaaggagagttcaaacaaccaattcctgcgtcttccatgccacagcaaataggcattcctaccagttctttaactcaagttgttcattctgcgggaaggcggtttatagtgagtcctgtgccagaaagccgattacgagaatcaaaagttttccccagtgaaataacagatacagttgctgcctctacagctcagagccctggaatgaacttgtctcactctgcatcatcccttagtctacaacaggccttttctgaacttagacgtgcccaaatgacagaaggacccaatacagcacctccaaactttagtcatacaggaccaacatttccagtagtacctcctttcttaagtagcattgctggagtcccaaccacagcagcagccacagcaccagtccctgcaacaagcagccctcctaatgacatttccacatcagtaattcagtctgaggttacagtgcccactgaagaggggattgctggagttgccaccagcacaggtgtggtaacttcaggtggtctccccataccacctgtgtctgaatcaccagtactttccagcgtagtttcaagtatcacaatacctgcagttgtctcaatatctactacatccccgtcacttcaagtccccacatccacatctgagatcgttgtttctagtacagcactgtatccttcagtaacagtttcagcaacttcagcctctgcagggggcagtactgctaccccaggtcctaagcctccagctgtagtatctcagcaggcagcaggcagcactactgtgggagccacattaacatcagtttctaccaccacttcattcccaagcacagcttcacagctgtccattcagcttagcagcagtacttctactcctactttagctgaaaccgtggtagttagcgcacactcactagataagacatctcatagcagtacaactggattggctttctccctctctgcaccatcttcctcttcctctcctggagcaggagtgtctagttatatttctcagcctggtgggctgcatcctttggtcattccatcagtgatagcttctactcctattcttccccaagcagcaggacctacttctacacctttattaccccaagtacctagtatcccacccttggtacagcctgttgccaatgtgcctgctgtacagcagacactaattcatagtcagcctcaaccagctttgcttcccaaccagccccatactcattgtcctgaagtagattctgatacacaacccaaagctcctggaattgatgacataaagactctagaagaaaagctgcggtctctgttcagtgaacacagctcatctggagctcagcatgcctctgtctcactggagacctcactagtcatagagagcactgtcacaccaggcatcccaactactgctgttgcaccaagcaaactcctgacttctaccacaagtacttgcttaccaccaaccaatttaccactaggaacagttgctttgccagttacaccagtggtcacacctgggcaagtttctaccccagtcagcactactacatcaggagtgaaacctggaactgctccctccaagccacctctaactaaggctccggtgctgccagtgggtactgaacttccagcaggtactctacccagcgagcagctgccaccttttccaggaccttctctaacccagtcccagcaacctctagaggatcttgatgctcaattgagaagaacacttagtccagagatgatcacagtgacttctgcggttggtcctgtgtccatggcggctccaacagcaatcacagaagcaggaacacagcctcagaaggtttctcaagtcaaagaaggccctgtcctagcaactagttcaggagctggtgtttttaagatgggacgatttcaggtttctgttgcagcagacggtgcccagaaagagggtaaaaataagtcagaagatgcaaagtctgttcattttgaatccagcacctcagagtcctcagtgctatcaagtagtagtccagagagtaccttggtgaaaccagagccgaatggcataaccatccctggtatctcttcagatgtgccagagagtgcccacaaaactactgcctcagaggcaaagtcagacactgggcagcctaccaaggttggacgttttcaggtgacaactacagcaaacaaagtgggtcgtttctctgtatcaaaaactgaggacaagatcactgacacaaagaaagaaggaccagtggcatctcctccttttatggatttggaacaagctgttcttcctgctgtgataccaaagaaagagaagcctgaactgtcagagccttcacatctaaatgggccgtcttctgacccggaggccgcttttttaagtagggatgtggatgatggttccggtagtccacactcgccccatcagctgagctcaaagagccttcctagccagaatctaagtcaaagccttagtaattcatttaactcctcttacatgagtagcgacaatgagtcagatatcgaagatgaagacttaaagttagagctgcgacgactacgagataaacatctcaaagagattcaggacctgcagagtcgccagaagcatgaaattgaatctttgtataccaaactgggcaaggtgccccctgctgttattattcccccagctgctcccctttcagggagaagacgacgacccactaaaagcaaaggcagcaaatctagtcgaagcagttccttggggaataaaagcccccagctttcaggtaacctgtctggtcagagtgcagcttcagtcttgcacccccagcagaccctccaccctcctggcaacatcccagagtccgggcagaatcagctgttacagccccttaagccatctccctccagtgacaacctctattcagccttcaccagtgatggtgccatttcagtaccaagcctttctgctccaggtcaaggaaccagcagcacaaacactgttggggcaacagtgaacagccaagccgcccaagctcagcctcctgccatgacgtccagcaggaagggcacattcacagatgacttgcacaagttggtagacaattgggcccgagatgccatgaatctctcaggcaggagaggaagcaaagggcacatgaattatgagggccctggaatggcaaggaagttctctgcacctgggcaactgtgcatctccatgacctcgaacctgggtggctctgcccccatctctgcagcatcagctacctctctaggtcacttcaccaagtctatgtgccccccacagcagtatggctttccagctaccccatttggcgctcaatggagtgggacgggtggcccagcaccacagccacttggccagttccaacctgtgggaactgcctccttgcagaatttcaacatcagcaatttgcagaaatccatcagcaaccccccaggctccaacctgcggaccacttagacctagagacattaactgaatagatctgggggcaggagatggaatgctgagggggtgggtgggggtgggaagtagcctatatactaactactagtgctgcatttaactggttatttcttgccagaggggaatgtttttaatactgcattgagccctcagaatggagagtctcccccgctccagttattggaatgggagaggaaggaaagaacagcttttttgtcaaggggcagcttcagaccatgctttcctgtttatctatactcagtaatgaggatgagggctaggaaagtcttgttcataaggaagctggagaactcaatgtaaaatcaaacccatctgtaatttcgagtgggtggagctcttgcttttggtacatgccctgaatccctcactccctcaagaatccgaaccacaggacaaaaaccacctactgggctctctcctaccctgccctcctcccttttttttacccctctcttttttattttttctttgctctttagaacccagtgaaaaataccagggtactggggtgcaactctttcttatgataggtcattagtgctttaagcaaaagatattagcagctttgactgcagcattagc

SEQ ID NO: 82 - DNA, 6698 bp, Homo sapiens
catgttgccctggggggaacctgccagccccgtagcactgcccaccccacccactgtggtctgttgtaccccactgctggggtggtggttccaatgagacagggcacaccaaactccatctggctgttactgaggcggagacacgggtgatgattggctttctggggagagaggaagtcctgtgattggccagatctctggagcttgccgacgcggtgtgaggacgctcccacggaggccggaattggctgtgaaaggactgaggcagccatctgggggtagcgggcactcttatcagagcggctggagccggaccatcgtcccagagagctggggcagggggccgtgcccaatctccagggctcctggggccactgctgacctggctggatgcatcgggcagtggatcctccaggggcccgcgctgcacgggaagcctttgcccttgggggcctgagctgtgctggggcctggagctcctgcccgcctcatccccctcctcgtagcgcatggctgcctggaggcagatgctcagccagcattgggcagcccccgcttcctgctcccctacccccttcacatggcagtagttctgggcaccccagcaaaccatattatgctccaggggcgcccactccaagacccctccatgggaagctggaatccctgcatggctgtgtgcaggcattgctccgggagccagcccagccagggctttgggaacagcttgggcaactgtacgagtcagagcacgatagtgaggaggccacacgctgctaccacagcgcccttcgatacggaggaagcttcgctgagctggggccccgcattggccgactgcagcaggcccagctctggaactttcatactggctcctgccagcaccgagccaaggtcctgcccccactggagcaagtgtggaacttgctacaccttgagcacaaacggaactatggagccaagcggggaggtcccccggtgaagcgagctgctgaacccccagtggtgcagcctgtgcctcctgcagcactctcaggcccctcaggggaggagggcctcagccctggaggcaagcgaaggagaggctgcaactctgaacagactggccttcccccagggctgccactgcctccaccaccattaccaccaccaccaccaccaccaccaccacccctgcctggcctggctaccagccccccatttcagctaaccaagccagggctgtggagtaccctgcatggagatgcctggggcccagagcgcaagggttcagcacccccagagcgccaggagcagcggcactcgctgcctcacccatatccatacccagctccagcgtacaccgcgcacccccctggccaccggctggtcccggctgctcccccaggcccaggcccccgccccccaggagcagagagccatggctgcctgcctgccacccgtccccccggaagtgaccttagagagagcagagttcagaggtcgcggatggactccagcgtttcaccagcagcaaccaccgcctgcgtgccttacgccccttcccggccccctggcctccccggcaccaccaccagcagcagcagtagcagcagcagcaacactggtctccggggcgtggagccgaacccaggcattcccggcgctgaccattaccaaactcccgcgctggaggtctctcaccatggccgcctggggccctcggcacacagcagtcggaaaccgttcttgggggctcccgctgccactccccacctatccctgccacctggaccttcctcaccccctccacccccctgtccccgcctcttacgccccccaccaccccctgcctggttgaagggtccggcctgccgggcagcccgagaggatggagagatcttagaagagctcttctttgggactgagggacccccccgccctgccccaccacccctcccccatcgcgagggcttcttggggcctccggcctcccgcttttctgtgggcactcaggattctcacacccctcccactcccccaaccccaaccaccagcagtagcaacagcaacagtggcagccacagcagcagccctgctgggcctgtgtcctttcccccaccaccctatctggccagaagtatagacccccttccccggcctcccagcccagcacagaacccccaggacccacctcttgtacccctgactcttgccctgcctccagcccctccttcctcctgccaccaaaatacctcaggaagcttcaggcgcccggagagcccccggcccagggtctccttcccaaagacccccgaggtggggccggggccacccccaggccccctgagtaaagccccccagcctgtgccgcccggggttggggagctgcctgcccgaggccctcgactctttgattttccccccactccgctggaggaccagtttgaggagccagccgaattcaagatcctacctgatgggctggccaacatcatgaagatgctggacgaatccattcgcaaggaagaggaacagcaacaacacgaagcaggcgtggccccccaacccccgctgaaggagccctttgcatctctgcagtctcctttccccaccgacacagcccccaccactactgctcctgctgtcgccgtcaccaccaccaccaccaccaccaccaccaccacggccacccaggaagaggagaagaagccaccaccagccctaccaccaccaccgcctctagccaagttccctccaccctctcagccacagccaccaccacccccaccccccagcccggccagcctgctcaaatccttggcctccgtgctggagggacaaaagtactgttatcgggggactggagcagctgtttccacccggcctgggcccttgcccaccactcagtattcccctggccccccatcaggtgctaccgccctgccgcccacctcagcggcccctagcgcccagggctccccacagccctctgcttcctcgtcatctcagttctctacctcaggcgggccctgggcccgggagcgcagggcgggcgaagagccagtcccgggccccatgacccccacccaaccgcccccacccctatctctgccccctgctcgctctgagtctgaggtgctagaagagatcagccgggcttgcgagacccttgtggagcgggtgggccggagtgccactgacccagccgacccagtggacacagcagagccagcggacagtgggactgagcgactgctgccccccgcacaggccaaggaggaggctggcggggtggcggcagtgtcaggcagctgtaagcggcgacagaaggagcatcagaaggagcatcggcggcacaggcgggcctgtaaggacagtgtgggtcgtcggccccgtgagggcagggcaaaggccaaggccaaggtccccaaagaaaagagccgccgggtgctggggaacctggacctgcagagcgaggagatccagggtcgtgagaagtcccggcccgatcttggcggggcctccaaggccaagccacccacagctccagcccctccatcagctcctgcaccttctgcccagcccacacccccgtcagcctctgtccctggaaagaaggctcgggaggaagccccagggccaccgggtgtcagccgggccgacatgctgaagctgcgctcacttagtgaggggccccccaaggagctgaagatccggctcatcaaggtagagagtggtgacaaggagacctttatcgcctctgaggtggaagagcggcggctgcgcatggcagacctcaccatcagccactgtgctgctgacgtcgtgcgcgccagcaggaatgccaaggtgaaagggaagtttcgagagtcctacctttcccctgcccagtctgtgaaaccgaagatcaacactgaggagaagctgccccgggaaaaactcaacccccctacacccagcatctatctggagagcaaacgggatgccttctcacctgtcctgctgcagttctgtacagaccctcgaaatcccatcacagtgatccggggcctggcgggctccctgcggctcaacttgggcctcttctccaccaagaccctggtggaagcgagtggcgaacacaccgtggaagttcgcacccaggtgcagcagccctcagatgagaactgggatctgacaggcactcggcagatctggccttgtgagagctcccgttcccacaccaccattgccaagtacgcacagtaccaggcctcatccttccaggagtctctgcaggaggagaaggagagtgaggatgaggagtcagaggagccagacagcaccactggaacccctcctagcagcgcaccagacccgaagaaccatcacatcatcaagtttggcaccaacatcgacttgtctgatgctaagcggtggaagccccagctgcaggagctgctaaagctgcccgccttcatgcgggtaacatccacgggcaacatgctgagccacgtgggccacaccatcctgggcatgaacacggtgcagctgtacatgaaggtgcccggcagccgaacgccaggccaccaggagaataacaacttctgctccgtcaacatcaacattggcccaggcgactgcgagtggttcgcggtgcacgagcactactgggagaccatcagcgctttctgtgatcggcacggcgtggactacttgacgggttcctggtggccaatcctggatgatctctatgcatccaatattcctgtgtaccgcttcgtgcagcgacccggagacctcgtgtggattaatgcggggactgtgcactgggtgcaggccaccggctggtgcaacaacattgcctggaacgtggggcccctcaccgcctatcagtaccagctggccctggaacgatacgagtggaatgaggtgaagaacgtcaaatccatcgtgcccatgattcacgtgtcatggaacgtggctcgcacggtcaaaatcagcgaccccgacttgttcaagatgatcaagttctgcctgctgcagtccatgaagcactgccaggtgcaacgcgagagcctggtgcgggcagggaagaaaatcgcttaccagggccgtgtcaaggacgagccagcctactactgcaacgagtgcgatgtggaggtgtttaacatcctgttcgtgacaagtgagaatggcagccgcaacacgtacctggtacactgcgagggctgtgcccggcgccgcagcgcaggcctgcagggcgtggtggtgctggagcagtaccgcactgaggagctggctcaggcctacgacgccttcacgctggtgagggcccggcgggcgcgcgggcagcggaggagggcactggggcaggctgcagggacgggcttcgggagcccggccgcgcctttccctgagcccccgccggctttctccccccaggccccagccagcacgtcgcgatgaggccggacgccccgcccgcctgcctgcccgcgcaaggcgccgcggggccaccagcacatgcctgggctggacctaggtcccgcctgtggccgagaagggggtcgggcccagcccttccaccccattggcagctcccctcacttaatttattaagaaaaactttttttttttttttagcaaatatgaggaaaaaaggaaaaaaaatgggagacgggggagggggctggcagcccctcgcccaccagcgcctcccctcaccgactttggcctttttagcaacagacacaaggaccaggctccggcggcggcgggggtcacatacgggttccctcaccctgccagccgcccgcccgcccggcgcagatgcacgcggctcgtgtatgtacatagacgttacggcagccgaggtttttaatgagattctttctatgggctttacccctcccccggaacctccttttttacttccaatgctagctgtgacccctgtacatgtctctttattcacttggttatgatttgtattttttgttcttttcttgtttttttgtttttaatttataacagtcccactcacctctatttattcatttttgggaaaacccgacctcccacacccccaagccatcctgcccgcccctccagggaccgcccgtcgccgggctctccccgcgccccagtgtgtgtccgggcccggcccgaccgtctccacccgtccgcccgcggctccagccgggttctcatggtgctcaaacccgctcccctcccctacgtcctgcactttctcggaccagtccccccactcccgacccgaccccagccccacctgagggtgagcaactcctgtactgtaggggaagaagtgggaactgaaatggtattttgtaaaaaaaaataaataaaataaaaaaattaaaggttttaaagaaagaactatgaggaaaaggaaccccgtccttcccagccccggccaactttaaaaaacacagaccttcacccccacccccttttctttttaagtgtgaaacaacccagggccagggcctcactggggcagggacaccccggggtgagtttctctggggctttattttcgttttgttggttgttttttctccacgctggggctgcggaggggtggggggtttacagtcccgcaccctcgcactgcactgtctctctgccccaggggcagaggggtcttcccaaccctacccctattttcggtgatttttgtgtgagaatattaatattaaaaataaacggag

SEQ ID NO: 83 - DNA, 5471 bp, Homo sapiens
ccggggtcccctttcacccaagtgagccagctcaggctgtctgcaaagccggaggtgcgggcagctccgggcattgcattggtgcggaggcttttatatgccagagaaccctgagtgtgcccctgacatgacaaggagccgtcgtcgttaggactaccgaccagactcccggaaatcatgttggtaggatcccagtctttttcgcctggagggcccaatgggatcattagaagccagtcctttgcgggtttcagcggcctccaggaaaggcgatccaggtgtaactccttcattgaaaattcctccgctctcaagaagcctcaggccaaactgaagaaaatgcacaatttaggccacaaaaacaacaatccccccaaagagcctcagcctaaaagggtggaagaagtctacagggccttgaaaaatggacttgatgaatatctggaggttcaccagacggagctggacaagttgacagctcagttaaaagatatgaaaagaaactctcgcctgggtgtactgtatgacctagacaagcaaattaaaacaattgaaagatacatgagacgcctggagtttcatataagtaaggtagatgaactctatgaagcttattgtatccagcgacgcctccaggatggtgccagcaaaatgaagcaagccttcgcaacatcccctgccagcaaagctgcccgggagagtctgacagagatcaatcggagcttcaaggagtacacagagaatatgtgcaccattgaagtggagctagagaatctgctgggagaattctccatcaagatgaaaggtctggctggctttgcacgcctctgtcctggagatcaatatgaaattttcatgaagtatggccggcagcggtggaaactgaaaggcaaaatagaagtaaatggcaagcagagctgggatggagaagaaacagtttttctgcccctgatagttgggttcatctccatcaaggtcacggagctcaaagggctagcaactcacatcctggtaggtagcgtgacctgtgagaccaaagagctgtttgcagcccgacctcaggtagtggctgtcgacatcaatgaccttggtaccatcaaactgaacctggaaatcacctggtatccatttgacatggaggacatgaccgcatcctcaggcgctgggaacaaggcagcagcccttcagaggagaatgtccatgtacagccagggtaccccggaaacgcccaccttcaaagaccactccttctttaggtggctgcatccttccccagacaagcccaggcggctgtctgtcttgagtgccttgcaagacactttctttgccaagctgcaccgcagccgctccttcagtgacctgccctccctcaggccgagtcccaaggccgtgctagagctctattcaaatctacctgatgacatctttgaaaatggaaaggcagccgaggagaaaatgccactgtcgctcagcttcagtgacctgcccaacggggactgcgccctcacctcccactcaacaggctccccttccaactcaacaaatccagaaattaccatcacccctgcggagtttaacctcagcagcttggcctcccagaatgagggtatggatgacaccagctcagcatcttccaggaactccctgggagaaggccaagagccaaagtcacacctgaaggaggaagacccagaggagcccagaaaacctgcctcggccccatctgaggcttgccgccgacagtcctcaggtgctggggctgagcacctgttccttgagaatgatgttgcagaagcacttctgcaagagtctgaggaggcctctgagctcaagcctgtggaactggacacttcggaaggaaacatcacaaagcagctggtcaagaggctcacatctgcagaggtgccaatggccacagacaggctgctctctgagggttctgttggtggagaatctgaaggctgcagatcctttctagatggaagcttagaggatgcttttaatgggcttttacttgcattagaaccacataaagagcagtataaagagtttcaggatctgaaccaagaagtcatgaatttggatgatattctaaaatgcaagccagcagtaagccgcagcaggtcttccagtttaagtctcacagttgaaagtgctttagaaagctttgatttcctgaacacctctgattttgacgaggaggaggatggtgatgaggtttgtaatgttggcggaggtgctgactcagtattttcagacactgagactgagaaacacagttacaggtcggttcacccagaagccagggggcatctcagtgaagcgctcactgaagacacaggagttgggaccagtgtggcaggaagtcctctcccactgaccacaggcaacgagagcctggacatcaccatcgtcaggcacctccagtactgcacccaactcgtgcagcaaattgttttctcaagcaaaaccccatttgtggcaagaagtctcttagagaagctttctaggcagatccaagtgatggagaaactcgcagctgtcagtgatgagaacataggaaatatcagttctgttgtggaagccataccagaatttcacaaaaagctgtctttgctgtcattctggaccaagtgctgcagccctgttggtgtctaccacagcccagcggacagagtgatgaagcagctggaggccagctttgccagaactgtcaacaaagaatatccaggacttgcagacccagtgtttcgaaccctggtgtcccaaattctggaccaggctgagcctctgctttcctccagcctgtcctcggaagtcgtcactgttttccagtattacagttacttcaccagccacggcgtcagtgacctggagagttacctgagccagctggccaggcaagtttccatggttcagactctgcaatcactaagagatgaaaaactgctacaaaccatgagtgaccttgctcccagcaacctcctggcccagcaggaagtactcaggactctggctctgctattaaccagagaggacaacgaagttagcgaggctgtgacgctttacttggcagcagcctccaaaaatcagcatttcagggaaaaggccttgctctattactgtgaagcactaacaaagacaaacctccagctccagaaagcagcttgcctggctctgaaaatccttgaggctactgaaagcattaaaatgctggtgacattgtgtcaatctgatactgaagaaatcagaaatgtggcctcagaaaccctcttgtctctgggagaagatgggcggctggcatatgaacaattggacaaatttcctcgagactgtgttaaagtcggaggtcgtcatggaactgaagttgccacagccttttaattacagattaactgcctaacagctgtcttaatatctggcccttttcatcaggatggtgctgtggtttgggctggaaattgtttagagcctgagagacacgacaactgaaataaaaatgtaggccaggtgcagtggctcatgcctgtaatcccagtactttgggaggccaacgcaggagaattgcttaagcccaggaggttcaagaccaacctgggcaacatagcaaggccctgtctctacaaaaaaaatagtttaattagtcgggcgtggtggcatgcacctgtagtcccagctacttgggaggctaaggtgggaggattgcttgagcccagaagattcaggctgcagtgagccataattgccccactgcactccagactgggtgacagagcaaaaccctgtctcaaaaaacaaaacaacaacaacaactaaaaaaacatgttatagaaagaattcagagtctcgtttcacagtacctatctacttttcctttggccaatatagaatagggctatggtataattcaaatagattacatcgtcgattgtgtctaataatactcagtgaaagagtccatcttatcttaatatgtatgaaatttaaaaatagccatctttgtacttttttgcaagtttctctataagcttgaaatagtcatgtgatacttcgacaaacatcatatgccttgcagtttttctcggtcgtgttctcagggttgagtagtccccttagctacctaactttactttcaatacaaagcacaaaaaagaatacttcaaataaaagtttgcctgcagaacctggcaaaatgacccattatgagagtttagatgttttaattttatgtgctcccagctactctggagtctgaggtgggaggatcacttgaggcagaggttgcagtaagctgagattacactactgcactccagcccatgtgacagaggaatgagagccagtctcaaaaaaaaaaaacaaaaaactcccataatttattttgtttcttttccccatcctgaaaattcccaaatcatgtttccattatggaaaaatgataagtaaatgactaagaactacattaagattatgcctatacacttaaacaaaaaactcaaagcttatgctttttttttttaattaatgagagctattttttatgatattcttaccataggggtgttttgctgctaagacaaatcaaaaccaaaagctgtagattcacaaacctgtgatgctctttgaggtggaggaacctagaagtcagagaaatcctaatggagtaggagtggaggaacatttaaagtggtccctccttctgtaaaaatgaccgtgggattagaaagaaggacatcctgaggggtggttactgcccccagggaaatcactcactggtaggattccctggccaaatagttcaaacatcaggtcccattattgcttcagtatcagagatgcaagttcattaagcaaagtacaagaccattcagtagctcttattaaaatatcttttcttcctctaaagagtgtacaaggtggggtatgccaaggtatcaaaacaatatatgtgagtgtaatttaaactgtggaatatcaactgtactatggacgtgtttgtatcatttagatgtcattttaaatatttacattttagcaagacttttaaaaaggactcatttcatttcaaagtgcaaattgtttgccaggcttctggcaaatggttctttcaactgtgaacttatagtgtacatatctgtatatttataaatattatatatattcatacatccttcagtttaaaggtacattgtacagtctgtagttaggaggtatagcctatagcttatgttaaatggttgaaatggttctttttatagaaagtcaaacacagatgttacaggattttgtgtttggtttgtcatttttttattttttattttgactattgcatgagtaattaattccagatcttttgtattcacttctgtattttatgtttggttgaggggtgcttttagttgtgtggcatttgtattcattgatctttcagtcatgtaagttaaaataaaaattatttttgaattactagc

SEQ ID NO: 84 - DNA, 8099 bp, Homo sapiens
atggagacagcaatgtttgtaccagtgtggaaattaaccaacatcaacctgtataccttctcagtgaagagcatatcacccttgctcaacagtctaatagcccatttcaagttatcttatgcccatttggactaaatggcactctcacaggacaggcattcaagatgtctgattcagctacaaaaaaattaattggtgaatggaaacagttctatcctatctcatgttgcttgaaggagatgtctgaagaaaaacaggaagatatggattgggaagatgattctttagctgcagtagaagttcttgttgctggtgtccgaatgatctacccagcatgctttgttctagtccctcagtcagacattcctactcctagccctgtgggatccactcactgttcatcttcttgcttgggtgtccaccaagtgcctgcttccacaagagatcctgctatgtcttcggttacgcttacaccacctacgtctcctgaggaagtccaaacagttgatcctcagtctgtccagaagtgggtcaaattttcttcagtatctgatggcttcaactccgatagtactagccaccatggtgggaaaatacccagaaaattagcaaatcatgtggtggatagagtttggcaagaatgcaatatgaacagagcacagaacaagaggaagtattctgcttcatcaggtggtctatgcgaagaagcgacagctgctaaagtggcatcctgggattttgttgaagccacacaaagaacaaattgcagttgtttgaggcacaaaaatctcaagtcaagaaatgctggacaacaaggacaggcaccatctttaggtcagcaacaacaaatacttcctaagcacaagaccaatgagaagcaagaaaagagtgaaaagccacagaaacgccccttgactccttttcaccatcgtgtgtctgttagtgatgatgttggcatggacgcagattcagccagccaaagacttgtgatctctgctccagacagtcaagtgagattttcaaatatccgaactaatgatgtagcaaagactcctcagatgcatggcaccgaaatggcaaattcacctcaaccacccccacttagtcctcacccttgtgatgtggttgatgaaggagtgactaaaacaccttcaactcctcagagtcaacatttttatcaaatgccaacaccagatcccttggttccttctaaaccaatggaagataggatagacagtttgtcccagtctttcccacctcaatatcaggaagctgtagaacctacagtatatgttggtacagcagtaaacttggaagaagatgaagccaatatagcctggaagtattacaagttcccaaagaaaaaagatgtagagtttttaccacctcaacttccaagtgataaattcaaggatgatccagttggaccttttggacaggaaagtgtaacatcagttacagagttaatggtgcaatgtaagaaacctttaaaagtttctgatgaattagtgcagcaatatcaaattaaaaaccagtgtctttcagcaatagcatctgatgcagaacaagaacctaaaattgatccatatgcatttgttgaaggagatgaggaattcctttttcctgataaaaaagatagacaaaatagtgagagagaagctggaaaaaaacacaaggtagaagatgggacatctagtgtaacagtgttatcacatgaagaagatgctatgtcattatttagtccctctatcaagcaagatgctccacgccctactagtcatgcccgtcctccatcaacaagtttgatttatgactcagacctggctgtctcttatactgaccttgataatctcttcaattctgatgaagatgaactaacacctggatctaaaaaatcagcaaatggatcagatgataaagccagctgcaaggaatcaaagacaggaaatctggacccgttatcttgcataagcactgcagatcttcataaaatgtatcctacaccaccatcattggaacaacatattatgggattttccccaatgaatatgaataataaagaatatggtagtatggatacaacacctggaggaactgttctagaaggaaatagttctagtataggagcgcagttcaaaattgaggttgatgagggattctgtagccccaaaccttctgaaattaaagatttttcttatgtctataagcctgaaaattgtcaaattctagtgggatgttccatgtttgcacctctaaaaactctaccaagccaatatctgccccctatcaaattgccagaagagtgtatttaccgtcagagttggactgttggaaaattggaattgctttcttcagggccttcaatgccattcatcaaagagggtgatggaagtaatatggatcaagaatatggcactgcttatacacctcaaactcatacttcttttgggatgcctcctagcagtgcacctcctagtaacagcggagcaggaattcttccttctccatccacccctcggtttccaactccaaggactccaaggactcctcggactcctcgtggagctggtggacctgctagtgctcaaggttcagtcaaatatgaaaattcagacttgtattcaccagcttctaccccatctacatgcagaccccttaattctgttgaacctgcaactgtcccttccatccctgaagcacacagtctttatgtaaacctcatcctttcagaatcagttatgaatttgtttaaagactgtaactttgatagttgttgcatctgtgtttgcaacatgaacatcaagggtgccgatgttggagtttacattccagatccaacgcaggaagcacaatataggtgtacctgtggcttcagtgctgtcatgaacagaaaatttggaaacaattcaggattatttcttgaagatgaactagatatcataggacgcaatacagactgtggcaaagaagcagaaaaacgttttgaagctctcagggctacctctgctgaacatgttaatggaggactaaaggaatctgaaaaattatctgatgatttgatattattgctacaagatcagtgcactaatttattttcaccctttggagcagcagaccaagatccttttcctaaaagtggtgtaattagcaattgggtacgtgttgaagagcgtgactgttgcaatgactgctaccttgcattagaacatgggcgtcagttcatggataacatgtcaggaggaaaagttgatgaagcacttgtgaaaagttcatgcttacacccctggtccaaaagaaacgatgtgagtatgcagtgctcacaggatatacttcgaatgctcctctctcttcagccagttcttcaggatgccattcagaaaaaaagaacagtaagaccttggggtgttcagggtcctctcacttggcaacaatttcataaaatggctggccgaggctcttatggaactgatgaatccccagaaccactgccaatccccacatttttgttgggttatgattatgattatctggtgctttctccatttgctcttccttattgggagagacttatgctggaaccctatggatctcaaagagatatagcctatgttgtactgtgtccagaaaatgaagccttgttaaatggagcaaaaagcttttttagagatcttactgcaatatatgagtcctgtcgattaggtcaacatagacctgtttctcgactgttaacagatgggatcatgagagttggatctactgcatcaaagaaactatcagaaaagttggtagcagaatggttttctcaggcagctgatggtaacaatgaagcattttctaaactcaagctttatgcacaagtctgcagatatgacctaggtccttatcttgcttccctgccattggacagctctctactttcccagccaaatttagttgcccctacaagtcagtctttgattactccacctcagatgacaaatactggaaatgctaatactccatctgccaccttagcatctgcagcgagcagcactatgacagtgacttcaggtgttgccatatctacttcagttgccacagctaattcaactttgaccacagcttcaacttcatcttcatcatcctccaacttgaatagtggagtatcatcaaataaactaccttcgtttccaccctttggcagtatgaacagtaatgctgcaggatccatgtctacacaagcaaatacagttcagagtggtcagctaggagggcaacagacatcagctctacagacagctgggatttctggagaatcatcttcacttcccactcagccgcatcctgatgtgtctgaaagcacgatggatcgggataaagtgggaatccccacagatggtgattcacatgcagtcacgtatccacctgcaattgttgtttatataattgatccttttacatacgaaaatacagacgagagcactaactcttctagtgtgtggacattggggctacttcgatgctttctagaaatggtccagactcttcctcctcatatcaagagtactgtttctgtacagattattccttgtcagtacctgttgcaacctgtgaagcatgaagatagagaaatctatccccagcatttaaaatccctggctttttcggcctttacccagtgtcggaggccacttccaacatcaaccaatgtgaaaacattgactggctttggtccaggtttagccatggaaactgcccttagaagtcctgatagaccagagtgtattcgactttatgcacctccttttattctggctccagtgaaggacaaacagacagagctaggagaaacatttggagaagctggacagaaatataatgttctttttgtgggatactgtttatcacatgatcaaaggtggattcttgcatcttgcacagatctatatggagaacttttagaaacttgtatcattaacatcgatgttccaaatagggctcgtcggaaaaaaagttctgctagaaaatttggtctacagaaactttgggagtggtgcttaggacttgtacaaatgagttcattgccatggagagttgtaattggtcgtctaggaaggattggtcatggagaattgaaagattggagctgtttgctgagtcgtcgaaacttgcagtctctaagtaaaaggctcaaagacatgtgtagaatgtgtggtatatctgctgcagactcccctagcattctcagtgcttgcttggtggcaatggagccgcaaggctcttttgttattatgccagattctgtgtcaactggttctgtatttggaagaagcacgactctaaatatgcagacatctcagctaaataccccacaggatacatcatgtactcatatacttgtgtttcctacttctgcttctgtgcaagtagcttcagctacttataccactgaaaatttggatttagctttcaatcccaacaatgatggagcagatggaatgggtatctttgatttgttagacacaggagatgatcttgaccctgatatcattaatatccttcctgcttctccaactggttctcctgtacattctccaggatctcattacccccatggaggtgatgcgggcaagggtcagagtactgatcggctactatcaacagaacctcatgaggaagtacctaatattcttcagcaaccattggcccttggttactttgtatcaactgccaaagcaggtccattacctgactggttctggtcagcatgtcctcaagcacaatatcagtgtcccctttttcttaaggcctctttgcacctccacgtgccttcagtgcaatctgacgagctgcttcacagtaaacactcccacccacttgactcaaatcagacttcagatgtcctcaggtttgttttggaacagtacaatgcactctcctggctaacctgtgaccctgcaacccaggacagacgctcatgtctcccaattcattttgtggtgctgaatcagttatataactttattatgaatatgctgtgatcttcatttgatggaactgtgcaagaaaagaacaaggaaaaatggatgtttcgctgcaggattaagttacaattatcttctcagtgaaggtcatttgtgatggggtctaattcttattacttcaacaaatattgttttgacttggggggaggggctataaccctgctatttttcattgactctattgaactctttaggatgatgactgatcatacaaaacgtattataacattttcgtagcaaaattaaccttttttttttccagtcacagtatttgtgaaaagtaatgagccatagtacccagtcatgttaaatgaatattaaaagcatggagaggaaacatgaggaacaatgaatttcaacatatggcttcagaacatgaagatgttcttgtatggattatagtatctagtattcaaaaatgcctgcatctcttctcttatttattgtaagtttttaaatgtataaattgtcttatatttcttaacctcttttataaaaattttcctagaaggtttatactgccttcttgctttaaagcaattggtctaaaatatatgtaatcgtcttaattaaaaagttgcagtagggttgcttttagagtattatttttttgtaagggggtgggtgggacagtaaatttgtattgtctcgatgtacagtttaacggggatagagggggaataatgtccataccattgtgtgtggaggatttacagctaagctgtagttgcagagtacatgtacagtaatgaagttcactgtgtttataaattgaaaaggtaccaggtcttacagcattttatatatcacatctttacagaataacatgatggcaatatacaagtggtattgttaggtggtttaacttagaataaaatgagaattcttcagttatattttgtactatggtttagggctatgactaatatttcaggccatttccggtgaaagaaacttagttttacaagaaaaaccatttgctactgaatgcttaaactaattttagtgtttaatgttacatgcttaaatttttttcagttttaacagtggcatatttaggcatggaaatattattatgaaatttattttcaggatctgctataaggttgaaatttagcccagctctaggcattttacaaattatttttcaagcagtcattcttgattgtttgacttttttttttaaattaaagattgggaatgtatgtgagagtatgcatatgtatgggtgtgtgtgtgtgcgcgcaatcaaactgtggtgtaaatagattctcagtgaattctggtattcagactctattccactagtgaaagaaccattttttaaacttcccttgccttttttatttatttaattttcttggtttggagatgtcagtcccaaacaccagagtctgtacttttctataacacagctcagattaaggtagggcatatgccaaggaggttctcacctccctaaagaagggacttgaattttagggactttaattcacccctccttcaatacaactttcccccttcttgtttgcacatgccaagataactgcttttatgcaggctgtacccccttgaaaaatcctttctacagtgctgctcacaaaagagcccaagttcgcctcctacctgcattgctgacttgaattcacagtcgccgagtctacctagctttcttggaagcagtctagcaaaatttctatttgtacgttcactaattatctacaagaacaaaatcagttgtatttacaaaactctacttcagtgtttgttttagtttttttttttactgaaacttgtttttgtgaatactctgtgcttagaattaaatatcactttcttatgaacaacataacttcttcagattgtgtatatgaaaacattagcaagtcttgttttttctatgaagcaaacacaattggtgacaaaggttgtcaatcatttcttcaaaattataatgcagttctaatggtcagcatattttgatattaaatttaaagatcacctctctgcatttgtttttaaattatgctaatacaccacacattatgttggtatgttttgttctgtactttcttt

SEQ ID NO: 85 - DNA, 1323 bp, Homo sapiens
ccattgtggtggaattcccctgcgctccctaacatgcccaaccccagctgcacctcctctccctaccccctccctgaggaaattaggaacctgttggcagatgttgaaacatttgtagcagatatactgaaaggagaaaatttatccaagaaagcaaaggaaaagagagaatcccttattaagaagataaaagatgtaaagtctatctatcttcaggaatttcaagacaaaggtgatgcagaagatggggaagaatatgatgacccttttgctgggcctccagacactatttcattagcctcagaacgatatgataaagacgatgaagccccctctgatggagcccagtttcctccaattgcagcacaagaccttccttttgttctaaaggctggctaccttgaaaaacgcagaaaagatcacagctttctgggatttgaatggcagaaacggtggtgtgctctcagtaaaacggtattctattattatggaagtgataaagacaaacaacagaaaggtgaatttgcaatagatggctacagtgtcagaatgaataacactctaagaaaggatggaaagaaagattgctgttttgaaatctctgctcctgataaacgtatatatcagtttacagcatcttctcccaaagatgctgaagaatgggtacagcagctgaaatttgtattgcaagatatggaatctgatattattcctgaggattatgatgagagaggagaattatatgatgatgttgatcatcctctaccaataagcaatccactaacaagcagtcaaccaatagatgatgaaatttatgaagaacttccagaagaagaagaggacagtgctccagtgaaagtggaagaacaaaggaagatgagtcaggatagtgtccatcacacctcaggggataagagcactgattatgctaatttttaccagggattgtgggattgtactggagctttttctgatgagttgtcatttaagcgtggtgatgtgatttacattcttagcaaggaatacaatagatatggctggtgggtaggagaaatgaagggagccattggcttggtgcctaaagcctacataatggagatgtatgatatttgagagtcctggaaaaggaaaattcttctgcttgtctgcaaatgctttggatttagaagcgtcatgaaagcacgagtgacagctcctaacctctccttgttttattaaacattacttatctttgactgttattttatgcagtcgctcattaaaatattctctgatgtgaaattaatgagggtattatgtaatagatgcaccagtaggtatact

SEQ ID NO: 86 - DNA, 4210 bp, Homo sapiens
gagcccgggagccggaggtgtagcggcagagacattgttcttgccggctccctacggtgccgtgtgtgcgtgagagaagaccagtctttcctctagcatttgacattgtgcagcaaagaaatggttatggagaagcccagtccgctgcttgtagggcgggagtttgtgaggcaatattatactttgctgaataaagctccggaatatttacacaggttttatggcaggaattcttcctatgttcatggtggagtagatgctagtggaaagccccaggaagctgtttatggccaaaatgatatacaccacaaagtattatctctgaacttcagtgaatgtcatactaaaattcgtcatgtggatgctcatgcaaccttgagtgatggagtagttgtccaggtcatgggtttgctgtctaacagtggacaaccagaaagaaagtttatgcaaacctttgttctggctcctgaaggatctgttccaaataaattttatgttcacaatgatatgtttcgttatgaagatgaagtgtttggtgattctgagcctgaacttgatgaagaatcagaagatgaagtagaagaggaacaagaagaaagacaaccatctcctgaacctgtgcaagaaaatgctaacagtggttactatgaagctcaccctgtgactaatggcatagaggagcctttggaagaatcctctcatgaacctgaacctgagccagaatctgaaacaaagactgaagagctgaaaccacaagtggaggagaagaacttagaagaactagaggagaaatctactactcctcctccggcagaacctgtttctctgccacaagaaccaccaaaggctttctcctgggcttcagtgaccagtaaaaacctgcctcctagtggtactgtttcttcctctggaattccaccccatgttaaagcaccagtctcacagccaagagtcgaagctaaaccagaagttcaatctcagccacctcgtgtgcgtgaacaacgacctagagaacgacctggttttcctcctagaggaccaagaccaggcagaggagatatggaacagaatgactctgacaaccgtagaataattcgctatccagatagtcatcaactttttgttggtaacttgccacatgatattgatgaaaatgagctaaaggaattcttcatgagttttggaaacgttgtggaacttcgcatcaataccaagggtgttgggggaaagcttccaaattttggttttgtggtttttgatgactctgaaccagttcagagaatcttaattgcaaaaccgattatgtttcgaggggaagtacgtttaaatgtggaagagaaaaaaacaagagctgcaagagagcgagaaaccagaggtggtggtgatgatcgcagggatattaggcgcaatgatcgaggtcccggtggtccacgtggaattgtgggtggtggaatgatgcgtgatcgtgatggaagaggacctcctccaaggggtggcatggcacagaaacttggctctggaagaggaaccgggcaaatggagggccgcttcacaggacagcgtcgctgaagctccactgttggcaaagtcttggcagtggtacattattcatcgtgtttgcattcttgttaattttttttttggctttggaatgtgacacagcctttttgatcatttctttgatgtgaaaagcatctttggttatcagttaaattgaggtggacattatttccccaatttcacaacaggattcacattgttaatttataaatctagacttggagaattaaggactgagaaatgaccatatcttaaactatctacgacaaagtgaacttaaaaggacatgcccactgaattcaggtcctttgagtaaaaaaaaaatcttctgctgcacattttgtttaagtgttactgtttctgcctgttaatgctgggaacacaaatagtgcaatttgtgcaattggagaatcttgccttttttcttggctccccccaaaaatacaaaccaacagaaacttgttatgcactcatcaaaatgtactaatgggtactctgaactcattaacattgacatctgcaacaggaggcaacagggaaaaaatctcatcttcttttccagtagaaaatagtttgtgaaatgatgagggcattttatctgcttgctgtgaccagcgtgtgtacacataaaccttaacaagactacaagtatattccagaaggaaatcattttagttatgaactaaataataaaaattagaacttcaaatgcgatggtcttgactattagaccagatttagtagctccatatctaagatttttctacctgcccctcttcagtacagggatggctggctgctcaacacactcctcctccccttttttcctttctttaagctgtgtacagtgaaaattgtctttactgtatttttgttctctggtaatgtaataagcatgatggtgccttctattaatacatcattccagtcttgctggtaattttgtacagtatagtgtatgaattgctgtgctgcaaagccaaacagctgcaaaatgttgaaaaatcatcgaaatgtataaaaattgcagtatctttaaaatcagtaaaatggactagcatattatttatcttgttcttcagttaacaactttgtgttctctgtgggagggagggagtcctgtgtgtttgtggggagagggaaggaggaagtcagttatttgagtaagcctctagttgacttttctcttagcctgaatgtggacgttgaaacatatcacttcagggcttggaaaagtcagtcaacttgacgtacatttttagtgacattttaaaagcagtcagattctataaatggcaagtaagcctgaagtgaggatactgcaattttcggagaaaagaacagcagctctttaagtgtttgcattttctatttggggggcagggaactgtcattcattttgcacaattcttgaactgatgtcagcacccgagtggctcctgaatttaagtctgggacgacatcttttatttttacatgaatctttaaacaattctgtgagcaaagtttgtagctgctggattattgtctgtctttatagcaagttccagtaaaccacaagtatggcaaagcttatccaattttatgcttggagcagtcagtacataccagtttctgatgtttcaggcaggagtggggtaaataagtgtgaccacttaaagctgctcgttagcatggaagacttctccattctatctttgtaaaacagacaagatatgcacttgacatagtagcaaattggttctgaattatgcaactgtttgctatttagtaaactagcaaatgatgcatgtattttgtttttcatgtactgggcaatatgagtaaaatctgtccctttttccccctttgaatgaggtcttccatgtttgagggaaagtcttgcactattgcatatattttggggacacagattttcatagtttccatttttggggggcttaaggattttttttttttctgtttgaaacagttttatactttctgatatagtacttgaaattcttaccagaaaattactttggagttttgaagcctttattaatactacttttaaagaagcagttgttttattgtcaatgttttttttcccccaagcatattttcttgtatttctgtttccatatatatatatatatataatttccaattcaggatattgccctgccatccatgaaaactgttctggcaccaaaagtaatgacaaatgttaagtgtaataatagaaaagtagagcaaagagccattcagcttcagtctttacataccatgaataaaacattaaaacatcatatggagaagtttacatggtgattgttcacctgcagtactgtggagttttaacattttgtcctcttttcagtgaaacagagtaaaaatattcatctaccattactgttatttgctgattttgttttattttttgatggtaatattctatccttatgacactattgcaaccaaattggctttaccatcttggctttagtaggtatagaagacaatggattaccatctttattgctgtaatgtgttaagcattatatgctagtagaatctagtttaattgtttcaggtggaaagtattctttgagtttccatattgaatgtgtttggactaaacaaacaataaactactgatgtctgcagc

SEQ ID NO: 87 - DNA, 2103 bp, Homo sapiens
tatgtagaagaatctggtaaatatggatattaacagcaataagctcctttttaacgatttaattctaccaagtaaatatttgggattactcgctttttgccttttatttaccaaaaaattcatatattttcaaaggaacagctaccggacctgcatagccatttttctgatctgaacctggaagctcatatgtatgcatcccagtggtttctcactctttttactgccaagttcccactctgcatggtgttccacatcattgacttactgctttgtgagggtttgaacataatctttcatgtagctttggctctcctaaagacctcaaaggaagaccttctgcaggctgattttgaaggtgctttaaagttctttagagttcagcttccaaagagatacagggcagaggaaaatgcaagaagactgatggagcaggcttgcaatattaaagtgggtgtgtacactggcactgagctgcagtaggatttttccttggatagtctggtctggagctgggacagcagctgctgctgtggaaaggccagctggcaagatgatggaagaaatctccattatggtagcctatgacgcccatgttttcagccagctgcacgatgaagacttcctcactagtctggtggccatcagcaagcccaggtctatggtaccaaccaagaagctgaagaaatatgagaaagaatatcagacaatgcgagagagtcagctgcaacaggaagacccaatggatagatacaagtttgtatatttgtaggtaactccagctgttgcatttatactgggaatcttcataagaagctgagagaaagagaggggaaaaagaaagtggctttctactttcaaaaatgaaacaaaaaggaaaaatggcaaagtactgttttagctgtgcatgtcatatccacaaagacttttagcaggtgaactgttccaagactgacacaaggatgtttcaaacttgcctctgtctgtagaaaatgttaaaaataccaactcacttggaaggaaaaataaaaatcacaaagagggagaaccgaagattacaggaggccagcatgaggttggaacaagagaatgatgaccttgcccatgaactagtaacaagcaaaattgctctacggaatgacttggatcaggcagaagacaaggcagatgtgttgaataaagagctccttttgaccaaacagaggctggtggagactgaagaggagaagaggaagcaagaggaagagactgcccagctaaaagaagtcttcaggaaacagctagagaaggcagaatatgaaataaagaagactacagctatcattgctgagtataaacagatctgttcgcagttgagtaccaggctggagaaacagcaagcagccagcaaggaggagctggaagtggtaaagggtaagatgatggcatgcaaacactgcagtgacattttcagcaaggagggtgctttgaaactagcagccacaggcagagaggaccagggaattgaaacagatgatgagaaggactcacttaagaagcagctgagagagatggaactggaactggcacaaaccaaactgcagttggtggaggccaagtgtaaaattcaggaacttgaacatcagagaggagcccttatgaatgaaatccaagctgcgaaaaactcttggtttagcaaaaccctgaactctatcaaaacggccacgggcacccagccattgcagccagcaccagtcacccagccacccaaggagagcacatagttccagccttacccaagcacaagagcacaatgttcaaaccaatggaaatctgggaggattcttcctggtgtccctttgaaggaaagtcaaggaggccagaaaacaagccagaatttttcagtagctctcactctttcttgtatgacacttttcaaagggatgctatttaaactgacctgttctatgttgaatacctattttccagcttctggaaggccatgttcagatccatcatagtattacacattattttgtttgcctgatgtttagttggaaataagtaattcagaactaaatgcttttttatttagaattattcataattatttttatcttacat

SEQ ID NO: 88 - DNA, 5542 bp, Homo sapiens
ctgactgcactggtgatggtccctggcaatccaacctggcaccatcgcagttggagtactatgcatcttcaccagatgaaaaggctctagtagaagctgctgcaaggattggtattgtgtttattggcaattctgaagaaactatggaggttaaaactcttggaaaactggaacggtacaaactgcttcatattctggaatttgattcagatcgtaggagaatgagtgtaattgttcaggcaccttcaggtgagaagttattatttgctaaaggagctgagtcatcaattctccctaaatgtataggtggagaaatagaaaaaaccagaattcatgtagatgaatttgctttgaaagggctaagaactctgtgtatagcatatagaaaatttacatcaaaagagtatgaggaaatagataaacgcatatttgaagccaggactgccttgcagcagcgggaagagaaattggcagctgttttccagttcatagagaaagacctgatattacttggagccacagcagtagaagacagactacaagataaagttcgagaaactattgaagcattgagaatggctggtatcaaagtatgggtacttactggggataaacatgaaacagctgttagtgtgagtttatcatgtggccattttcatagaaccatgaacatccttgaacttataaaccagaaatcagacagcgagtgtgctgaacaattgaggcagcttgccagaagaattacagaggatcatgtgattcagcatgggctggtagtggatgggaccagcctatctcttgcactcagggagcatgaaaaactatttatggaagtttgcagaaattgttcagctgtattatgctgtcgtatggctccactgcagaaagcaaaagtaataagactaataaaaatatcacctgagaaacctataacattggctgttggtgatggtgctaatgacgtaagcatgatacaagaagcccatgttggcataggaatcatgggtaaagaaggaagacaggctgcaagaaacagtgactatgcaatagccagatttaagttcctctccaaattgctttttgttcatggtcatttttattatattagaatagctacccttgtacagtattttttttataagaatgtgtgctttatcacaccccagtttttatatcagttctactgtttgttttctcagcaaacattgtatgacagcgtgtacctgactttatacaatatttgttttacttccctacctattctgatatatagtcttttggaacagcatgtagaccctcatgtgttacaaaataagcccaccctttatcgagacattagtaaaaaccgcctcttaagtattaaaacatttctttattggaccatcctgggcttcagtcatgcctttattttcttttttggatcctatttactaatagggaaagatacatctctgcttggaaatggccagatgtttggaaactggacatttggcactttggtcttcacagtcatggttattacagtcacagtaaagatggctctggaaactcatttttggacttggatcaaccatctcgttacctggggatctattatattttattttgtattttccttgttttatggagggattctctggccatttttgggctcccagaatatgtattttgtgtttattcagctcctgtcaagtggttctgcttggtttgccataatcctcatggttgttacatgtctatttcttgatatcataaagaaggtctttgaccgacacctccaccctacaagtactgaaaaggcacagcttactgaaacaaatgcaggtatcaagtgcttggactccatgtgctgtttcccggaaggagaagcagcgtgtgcatctgttggaagaatgctggaacgagttataggaagatgtagtccaacccacatcagcagatcatggagtgcatcggatcctttctataccaacgacaggagcatcttgactctctccacaatggactcatctacttgttaaaggggcagtagtactttgtgggagccagttcacctcctttcctaaaattcagtgtgatcaccctgttaatggccacactagctctgaaattaatttccaaaatctttgtagtagttcatacccactcagagttataatggcaaacaaacagaaagcattagtacaagcccctcccaacacccttaatttgaatctgaacatgttaaaatttgagaataaagagacatttttcatctctttgtctggtttgtcccttgtgcttatgggactcctaatggcatttcagtctgttgctgaggccattatattttaatataaatgtagaaaaaagagagaaatcttagtaaagagtattttttagtattagcttgattattgactcttctatttaaatctgcttctgtaaattatgctgaaagtttgccttgagaactctatttttttattagagttatatttaaagcttttcatgggaaaagttaatgtgaatactgaggaattttggtccctcagtgacctgtgttgttaattcattaatgcattctgagttcacagagcaaattaggagaatcatttccaaccattatttactgcagtatggggagtaaatttataccaattcctctaactgtactgtaacacagcctgtaaagttagccatataaatgcaagggtatatcatatatacaaatcaggaatcaggtccgttcaccgaacttcaaattgatgtttactaatatttttgtgacagagtataaagaccctatagtgggtaaattagatactattagcatattattaatttaatgtctttatcattggatcttttgcatgctttaatctggttaacatatttaaatttgctttttttctctttacctgaaggctctgtgtatagtatttcatgacatcgttgtacagtttaactatcaataaaaagtttggacagtatttaaatattgcaaatatgtttaattatacaaatcagaatagtatgggtaattaaatgaatacaaaaagaagagcctctttctgcagccgacttagacatgctcttccctttctataagctagattttagaataaagggtttcagttaataatcttattttcaggttatgtcatctaacttatagcaaactaccacaatacagtgagttctgccagtgtcccagtacaaggcatatttcaggtgtggctgtggaatgtaaaaatgctcaacttgtatcaggtaatgttagcaataaattaaatgctaagaatgattaatcgggtacatgttactgtaattaactcattgcacttcaaaacctaacttccatcctgaatttatcaagtagttcagtattgtcatttgtttttgttttattgaaaagtaatgttgtcttaagatttagaagtgattattagcttgagaactattacccagctctaagcaaataatgattgtatacatattaagataatggttaaatgcggttttaccaagttttcccttgaaaatgtaattcctttatggagatttattgtgcagccctaagcttccttcccatttcatgaatataaggcttctagaattggactggcaggggaaagaatggtagagacagaaattaagactttatccttgtttgcttgtaaactattattttcttgctaatgtaacatttgtctgttccagtgatgtaaggatattaagttattaagctaaatattaattttcaaaaatagtccttctttaacttagatatttcatagctggatttaggaagatctgttattctggaagtactaaaaagaataatacaacgtacaatgtctgcattcactaattcatgttccagaagaggaaataatgaagatatactcagtagagtactaggtgggaggatatggaaatttgctcataaaatctcttataaaacgtgcatataacaaaatgacacccagtaggcctgcattacatttacatgaccgtgtttatttgccatcaaataaactgagtactgacaccagacaaagactccaaagtcataaaatagcctatgaccaactgcagcaagacaggaggtcagctcgcctataatggtgcttaaagtgtgattgatgtaattttctgtactcaccatttgaagttagttaaggagaactttatttttttaaaaaaagtaaatggcaaccactagtgtgctcatcctgaactgttactccaaatccactccgtttttaaagcaaaattatcttgtgattttaagaaaagagttttctatttatttaagaaagtaacaatgcagtctgcaagctttcagtagttttctagtgctatattcatcctgtaaaactcttactacgtaaccagtaatcacaaggaaagtgtcccctttgcatatttctttaaaattctttctttggaaagtatgatgttgataattaacttacccttatctgccaaaaccagagcaaaatgctaaatacgttattgctaatcagtggtctcaaatcgatttgcctccctttgcctcgtctgagggctgtaagcctgaagatagtggcaagcaccaagtcagtttccaaaattgcccctcagctgctttaagtgactcagcaccctgcctcagcttcagcaggcgtaggctcaccctgggcggagcaaagtatgggccagggagaactacagctacgaagacctgctgtcgagttgagaaaaggggagaatttatggtctgaattttctaactgtcctctttcttgggtctaaagctcataatacacaaaggcttccagacctgagccacacccaggccctatcctgaacaggagactaaacagaggcaaatcaaccctaggaaatacttgcattctgccctacggttagtaccaggactgaggtcatttctactggaaaagattgtgagattgaacttatctgatcgcttgagactcctaataggcaggagtcaaggccactagaaaattgacagttaagagccaaaagtttttaaaatatgctactctgaaaaatctcgtgaaggctgtaggaaaagggagaatcttccatgttggtgtttttcctgtaaagatcagtttggggtatgatataagcaggtattaataaaaataacacaccaaagagttacgtaaaacatgttttattaattttggtccccacgtacagacattttatttctattttgaaatgagttatctattttcataaaagtaaaacactattaaagtgctgttttatgtgaaataacttgaatgttgttcctataaaaaatagatcataactcatgatatgtttgtaatcatggtaatttagatttttatgaggaatgagtatctggaaatattgtagcaatacttggtttaaaattttggacctgagacactgtggctgtctaatgtaatcctttaaaaattctctgcattgtcagtaaatgtagtatattattgtacagctactcataattttttaaagtttatgaagttatatttatcaaataaaaactttcctatat

SEQ ID NO: 89 - DNA, 4271 bp, Homo sapiens
cggaccccccgagggcagcgctgcggggccgttttccggccctcctgacgcgacactgcccctctccgagagctgagaaggaaaagaggagcttgcggaggtgcggctgcaggccgttgttggtcgagttggcgggtcccgcgggccaggccgtggaggtgttacctcattttgaaagtcttgggaaacaggaaaaaattcctaacaaaatgtcagcttttcgaaatcattgtccacatttggattcagttggtgaaataacaaaagaagatttgatacaaaaatcccttggtacttgtcaggattgtaaagtccaaggaccaaatctttgggcatgtctggagaatagatgttcatatgttggctgtggtgaatcacaagtagatcacagcaccatacattctcaggagacaaagcattatctaactgtgaaccttaccactcttcgagtatggtgttatgcttgcagcaaagaagtatttttggataggaaattaggaactcagccttcattgcctcatgtaagacaacctcaccaaatacaagaaaacagtgtccaggattttaaaatacccagtaatacaacattaaaaactcctctggttgccgtatttgatgatctggatatagaagcggatgaagaagatgaacttagggccagaggtcttacaggtttgaaaaatattggaaatacttgttacatgaatgcagctttgcaggctctttctaattgcccacctttgacacagttttttcttgattgtggaggactagctcgaacagataagaaacctgccatttgtaaaagttatctcaaactaatgacagagctgtggtataaaagcaggccaggatctgttgtgcctactactctgtttcaaggaattaaaactgtaaatccaacatttcgggggtattctcagcaggatgctcaagaattccttcgatgtttaatggatttgcttcatgaagaattgaaagagcaagtcatggaagtagaagaagatccgcaaaccataaccactgaggagacaatggaagaagacaagagccagtcggatgtagattttcagtcttgtgaatcttgtagcaacagtgatagagcagaaaatgaaaatggctctagatgcttttctgaagataataatgaaacaacaatgttaattcaggatgatgaaaacaattcagaaatgtcaaaggattggcaaaaagagaagatgtgcaataagattaataaagtaaattctgaaggcgaatttgataaagatagagactctatatctgaaacagtcgacttaaacaaccaggaaactgtcaaagtgcaaatacacagcagagcttcagaatatatcactgatgtccattcgaatgacctgtctacaccacagatccttccatcaaatgaaggtgttaatccacgtttatcggcaagccctcctaaatcaggcaatttgtggccaggattggcaccaccacacaaaaaagctcagtctgcatctccaaagagaaaaaaacagcacaagaaatacagaagtgttatttcagacatatttgatggaacaatcattagttcagtgcagtgtctgacttgtgacagggtgtctgtaaccctcgagacctttcaagatctgtccttgccaattcctggcaaggaagaccttgctaagctgcattcatcaagtcatccaacttctatagtcaaagcaggatcatgtggcgaagcatatgctccacaagggtggatagcttttttcatggaatatgtgaagaggtttgttgtctcatgtgtccctagctggttttggggtccagtagtaaccttgcaagattgtcttgctgccttctttgccagagatgaactaaaaggtgacaatatgtacagttgtgaaaaatgcaaaaagttgagaaatggagtgaagttttgtaaagtacaaaactttcctgagattttgtgcatccaccttaaaagattcagacatgaactaatgttttccaccaaaatcagtacccatgtttcatttccgctagaaggcttggatcttcagccatttcttgctaaggatagtccagctcaaattgtgacatatgatcttctgtcagtcatttgccatcatggaactgcaagtagtggacactatatagcctactgccgaaacaatctaaataatctctggtatgaatttgatgatcagagtgtcactgaagtttcagaatctactgtacaaaatgcagaagcttacgttcttttctataggaagagcagcgaagaggcacaaaaagagaggagaaggatatcaaatttattgaacataatggaaccaagcctccttcagttttatatttctcgacagtggcttaataaatttaagacctttgccgaacctggccctatttcaaataatgactttctttgtattcatggaggtgttcctccaagaaaagctggttatattgaagacctggttttgatgctgcctcagaacatttgggataacctatatagcaggtatggtggaggaccagctgtcaaccatctgtacatttgtcatacttgccaaattgaggcggagaaaattgaaaaaagaagaaaaactgaattggaaatttttattcggcttaacagagcgttccaaaaagaggactctccagctactttttattgcatcagtatgcagtggtttagagaatgggaaagttttgtgaagggtaaagatggagatcctccaggtcctattgacaatactaagattgcagtcactaaatgtggtaatgtgatgcttaggcaaggagcagattctggccagatttctgaagaaacatggaattttctgcagtctatttatggtggagggcctgaagttatcctgcgacctccggttgttcatgttgatccagatatacttcaagcagaagaaaaaattgaagtagaaactcggtctttgtaatttttaggatgtagagagttctaatgaggaatcattttcatgtgccctgacatgtacacatgcgaaaacattcctaaaagcgtgtttatttgctttattttttttcatcatttatcccatttatttcttcttagtgggcattatggaagaatatattaaaatgtgtaatataccacaggttggtatatttagttttaaatacttaccataaagtctttcagtgtaatttttttttgagacagagtcttgctttgtcacccaggctggagtgctgtggtgttacctcagctcactgcagcctccacctcctgggttcaagcgattctcctgcctcagcctctcgagtagctgggattacaggcacctgccaccatgcccggctaatttttgtattttagtagagatggggtttcaccatgttggccaggctagtctcaaactcctgacctcaggtgatccacccacctcggcctcccaaagtgctgggattacaggtgtgagccacagcgcctggcccagtgtaatatttttgaaagaggagggacaattgtgaaatcagtaggttatctttaatctttacactacatgcagatccatagtatcctttgtagtgttgtaaatacttttgctttgaaaactttttcattgtcctaaatcaccctgactctgaccagtctttcagttctccaaaagcccaatttaattgtatagttttgtcatggcttcatataataaagagcctattttaagttgaaagtagtagtcagaaaattgttaatttcctaaagctcaggaaactagggtgtcactttttttgcactgcagcatatacactaactagcttattaaaatttacaaaatgtctttttgaatgtatcaaggatatatttagtttgagtggaatttgtcagcagatatcagtaacttattgccgcttatattgtacaatgttaaacttcaattcctgtaacctggttagtattaatgtcagtgactaaaaaacttagagttagttttagggcactttttattttgagagcatgaagtgtggaatgtgtcactacgattgttgataaagctgaggccacttgcaacttgattttttaaatgaaatagataaagtctttttgaataatatagtatgcactgctatttgcttgattatgtaatgtcaaaagtttaactatattccaagtacaaaaacatactggattacattgaggatgttgaatagcattcatgatggctttgttttggtttggggcagctgtcaccagctaaagcaatgttgttaaaattagctcaataaaaatgtctttaaaatgt

SEQ ID NO: 90 - DNA, 5742 bp, Homo sapiens
gcgcggggctgagccgcccgggatcagcgcgagcacccagcccgcctcggccgggagggcctgagaaccccgggggcgtgctgagcgtggagctgcccgggctgctggcgcagctggcgcggagcttcgcgctgctgctgcccgtgtacgcgctgggctacctggggctcagcttcagctgggttctcctcgcgctcgcgctgctcgcctggtgtcgccgcagccgcggcctcaaggccctgcgcctgtgccgcgcgctggcgctgctggaagacgaggagcgcgtcgtgcgcctgggggtgcgcgcctgcgacctgcccgcctgggttcattttccagacactgaaagagcagaatggctaaataagactgtaaaacacatgtggcctttcatttgccaatttatagagaagttgtttcgagaaactatagaaccagccgtgcggggagcaaacacccaccttagcacctttagtttcacgaaggtcgacgtgggccagcagcccctcaggatcaatggtgttaaggtatacactgaaaatgtagacaaaaggcaaattattttggaccttcagattagttttgtaggaaattgtgagattgatttggagatcaaacgatatttttgtagagctggtgtgaaaagtatccagattcatggtaccatgcgggtgatcctggaaccgttgattggagatatgcccttagttggagctttgtctatcttcttccttaggaaaccacttttagaaattaactggacaggactgacgaatcttctggatgtccctggattgaatggtttatcagatactatcattttggatataatatcaaactatctggtgcttcccaatcgaatcaccgttccacttgtcagtgaagttcaaatagctcagttgcggtttcctgtaccaaagggtgttctaaggatacattttattgaagctcaggatcttcaggggaaagacacttaccttaagggacttgtcaagggaaagtcagacccctatggaatcattagagttggcaaccaaatcttccaaagcagagtcatcaaggagaacctcagtccaaagtggaatgaagtctatgaggctttagtgtatgaacatcctggacaagaattagagattgagctctttgatgaagacccagacaaggatgactttttaggaagtcttatgattgacctcattgaagttgaaaaggagcgccttttagatgaatggttcactctggacgaggttcccaaggggaagctacacttgagactggagtggctcacgttaatgccaaatgcgtcaaacctcgacaaggtgctaacagacatcaaagctgacaaagaccaagccaacgatggtctttcctctgcattgctgatcttgtacttggattcagcaaggaaccttccgtcagggaagaaaataagcagcaacccaaatcctgttgtccagatgtcagttgggcacaaggcccaggagagcaagattcgatacaaaaccaatgaacctgtgtgggaggaaaacttcactttcttcattcacaatcccaagcgccaggaccttgaagttgaggtcagagacgagcagcaccagtgttccctggggaacctgaaggtccccctcagccagctgctcaccagtgaggacatgactgtgagccagcgcttccagctcagtaactcgggtccaaacagcaccatcaagatgaagattgccctgcgggtgctccatctcgaaaagcgagaaaggcctccagaccaccaacactcagctcaagtcaaacgtccctctgtgtccaaagaggggaggaaaacatccatcaaatctcatatgtctgggtctccaggccctggtggcagcaacacagctccatccacaccagtcattgggggcagtgataagcctggtatggaagaaaaggcccagccccctgaggccggccctcaggggctgcacgacctgggcagaagctcctccagcctcctggcctccccaggccacatctcagtcaaggagccgacccccagcatcgcctcggacatctcgctgcccatcgccacccaggagctgcggcaaaggctgaggcagctggaaaacgggacgaccctgggacagtctccactggggcagatccagctgaccatccggcacagctcgcagagaaacaagcttatcgtggtcgtgcatgcctgcagaaacctcattgccttctctgaagacggctctgacccctatgtccgcatgtatttattaccagacaagaggcggtcaggaaggaggaaaacacacgtgtcaaagaaaacattaaatccagtgtttgatcaaagctttgatttcagtgtttcgttaccagaagtccagaggagaacgcttgacgttgccgtgaagaacagtggcggcttcctgtccaaagacaaagggctccttggcaaagtattggttgctctggcatctgaagaacttgccaaaggctggacccagtggtatgacctcacggaagatgggacgaggcctcaggcgatgacatagccgcagcaggcaggaggcgtcctcttcagcgtagctctccacctctacccggaacacaccctctcacagacgtaccaatgttatttttataatttcatggatttagttatacataccttaatagttttataaaattgttgacatttcaggcaaatttggccaatattatcattgaattttctgtgttggatttcctctaggatttcgccagttcctacaacgtgcagtagggcggcggtagctcttgtgtctgtggactctgctcagctgtgtccgtaggagtcggatgtgtctgtgctttattatggccttgtttatatatcactgaggtatactatgccatgtaaatagactattttttataatctttacatgctggtttaaattcagaaggaaatagatcaaggaaatatatatattttcttctaaaacttattaaattcgtgtgacaaataatcattttcatcttggcagcaaaagttctcagtgacctattttgtggtgtttctttttgaaaagaaaagctgaaatattattaaatgctagtatgtttctgcccattatgaaagatgaaataaagtattcaaaatattaacattttcataaatataaggatgtattattgagaagtaagttgaagggcttataaggaaaaatgttttataactgagtaatatattaagagaattgtcatggttcataaatcacattatgctaatctgaaatttcttacataaaaatgaagtgtcttatgtttattttaattgctgttgtaacttactcatgaaacagtatacagacaccttgtacttttcctcaactgtaagagcagactttcaatgttagcaattaagctgttgtcaaacaatcagtcatgagctttgttaattttcaatgttttcccagcctataaaaaaaggaaggtacacgttgtccttttaaaggttgtgaggtagattggagtgagtagacaggatattgcattaaaaattgaaagctcgatctcattattgtcaggaacccccagtgtgacctcacacataggatgtgggacctttgagccgatgtgcactggccaccaccagggttgggggcgccacagctgcgagcccggcccctgctgttctcagcagccacttcccaggctgcctcactttatgccatgactgaccttaatattgggatattgttatgcaatttttatcctgtttagactgttaaaagcaggtttctgtacttaagagtcccccagacctcctgtgaggtgaggctctgttgcagtgtcgtaggctgtgtgtgtctgtaaagaaagaatgcacatatgtagacgattaagtgtatattataagctatatgctgaaaatggcttccatagccatgagaacatcttaaaactatgtgtaaatatattaaggaaagtatagctttgtaatttaaattggagcttttagcttgtttcatggaactatacaacttgtgggtaactcacatgaccaaacaaaccaaagtgcctgtgacggggcgggtggcgtctacccaccctcccttctagcagattcttattttgtttgaatttataaacaaggctggtggctgtctacccaccctcccttctagcagattttgattttgtttcaatttataacttacactttgaaccatgggtttacttataatggagtctgtagcttcacagcatatttcatgtaatcataaagaccagtatattccctcctgctgaatgacatgcgactgtaaagcctctttataaaccatttccaatgttagtatataggattatttgggaagcgtatcaatacctttatagacaaatacgaacatgtatgcacacaaaacatttaactatggtatttatggaagacaggtaacaacattaaatctagttgctttcccttagtattagatttgttgagggttttttaaaaatcaggtctgttgaaagtcttctgtcataatctataaagcagcagcactcatggaaattgtagcatgccagtaatttttaccaacatcccatacatctgagttctgcagtccagtgtgtaatccgctccatgtgtattttgcttaatggaatgctttatttaagcacttaggcagagtagacacaattaaaggtacaaagcccagaggaagtggtagagcagcaccgtgcctgccctgaggcagtggagtcagtagcgctgtccccagggccttgagtgcctggaggtgcttggcctccagtagctgcctccattctcttttaaaaaaagggggtgattctgaggcactgaagtgcctcccagatgtggaggagtgaagccaccatcgaggccacactcagcactccaggatcccagcgatgtcagacactcttgagttgtcaaaacgttaattttcagttttaaataatcagtttatctaagaaaagggaattttaacttttctaccttgagccaagccaatgaagggaaaattaattaacttagtaaatttgaagtgcagctctgttagctcgtacatgtgggttcttatcctgatcctgtgccttaaagtaggaaggtgtttccaagttcagattaaaatagaagcagctggccgggtgcggtggctcacgcctgtaatcccagcactttgggaggccgaggcgggcggatgacctgaggtcaggagttcaagaccagcctggccaacatggagaaaccccatctttactaaaaatacaaaaattagccgggcgtggtggtggagcgcacgcctgtagtcccagctactcgggaggctgaggcaggagaattgcttgaacccaggaggcggaggttgcagtgagccaagatcgcaccactgcactccagcctgggcaacagagtgagactccgtctcaaaaaataaataaaatagaagcagccttgtaactgtatttaccatgataatatattctgcacggtaagaattccttttacagacattctttatcaagaggtcggcccttctttttcaggcacataagccaaatgcaggcctgtgtgtagctgtgtgttttttctgtggttgccgcatttattccacctccagctggaccccccactgcaaatagagaacagcggtgggggatgggggttaaaaagtagagaacctcctttctgttcaactaatttcacgtgacagtgcatgtatttattcaataaaacctttatgttagctc

SEQ ID NO: 91 - DNA, 1005 bp, Homo sapiens
tctgcccgctgtgtcctgggcatggagggtcagcaggtcatcctgcacctgcccctatcccagaaggggcccttctggacatgggagcctagtgcccctcgaactctgctccaggtcctacaggatccagccctgaaagacctcgtcctcacctgccccaccctgccctggcattccctgatcctgcggccccagtatgagatccaagccatcatgcacatcttctcaagtcttaggattgcagcaacacgctcggctgcccaaacccaaggcgaagaccttgccagagttcatcaaggatggctccagtacgtacagcaagattcctgcccacaggaagggccacaggcccgctaagccccaaaggcaggatctagatgatgatgaacatgattatgaagaaatacttgagcaatttcagaaaaccatctaagtgctggaggaaccacgcttcctaactgctgcttctcagggaatccgacaccagccaaccattttaagcctctaaaagacctcgggcaagtctcacagaaactgagctgcagacggggagtagctttgtggaaactgatttgatggacactgcaccagcttccttcaggttctagattcttgctacttagggcgggctggtttggacctaacatctcgcacgtgactccctcagcctcagagccttgggatgcagagcagctggcagggttcctctcaatcctgcaaccccagctgtcccaccggtggatgcagaggggaatccgaggccatcaaccttggtgacagcagcgcagtgccaatgctgatcacactgcatgggagattttgttaacgtctgccacccccactctcacccccaagctctaagcccccgggaggcctggactgtcttcctcatctctgtagcaccaagcctgatagatctgtatatggtaaacaggggtttaaccacatgtggttaacatggattaatgtgggaatttggcttcaagaacacaaccttaggacctt

SEQ ID NO: 92 - DNA, 2267 bp, Homo sapiens
acagagctcaggacagggctgaggaaccatgtctccatccccgaccgccctcttctgtcttgggctgtgtctggggcgtgtgccagcgcagagtggaccgctccccaagccctccctccaggctctgcccagctccctggtgcccctggagaagccagtgaccctccggtgccagggacctccgggcgtggacctgtaccgcctggagaagctgagttccagcaggtaccaggatcaggcagtcctcttcatcccggccatgaagagaagtctggctggacgctaccgctgctcctaccagaacggaagcctctggtccctgcccagcgaccagctggagctcgttgccacgggagtttttgccaaaccctcgctctcagcccagcccggcccggcggtgtcgtcaggaggggacgtaaccctacagtgtcagactcggtatggctttgaccaatttgctctgtacaaggaaggggaccctgcgccctacaagaatcccgagagatggtaccgggctagtttccccatcatcacggtgaccgccgcccacagcggaacctaccgatgctacagcttctccagcagggacccatacctgtggtcggcccccagcgaccccctggagcttgtggtcacaggaacctctgtgacccccagccggttaccaacagaaccaccttcctcggtagcagaattctcagaagccaccgctgaactgaccgtctcattcacaaacaaagtcttcacaactgagacttctaggagtatcaccaccagtccaaaggagtcagactctccagctggtgagtcctgcccgccagtactacaccaagggcaacctggtccggatatgcctcggggctgtgatcctaataatcctggcggggtttctggcagaggactggcacagccggaggaagcgcctgcggcacaggggcagggctgtgcagaggccgcttccgcccctgccgcccctcccgcagacccggaaatcacacgggggtcaggatggaggccgacaggatgttcacagccgcgggttatgttcatgaccgctgaaccccaggcacggtcgtatccaagggagggatcatggcatgggaggcgactcaaagactggcgtgtgtggagcgtggaagcaggagggcagaggctacagctgtggaaacgaggccatgctgcctcctcctggtgttccatcagggagccgttcggccagtgtctgtctgtctgtctgcctctctgtctgagggcaccctccatttgggatggaaggaatctgtggagaccccatcctcctccctgcacactgtggatgacatggtaccctggctggaccacatactggcctctttcttcaacctctctaatatgggctccagacggatctctaaggttcccagctctcagggttgactctgttccatcctctgtgcaaaatcctcctgtgcttccctttggccctctgtgctcttgtctggttttccccagaaactctcaccctcactccatctcccactgcggtctaacaaatctcctttcgtctctcagaacgggtcttgcaggcagtttgggtatgtcattcattttccttagtgtaaaactagcacgttgcccgcttcccttcacattagaaaacaagatcagcctgtgcaacatggtgaaacctcatctctaccaacaaaacaaaaaaacacaaaaattagccaggtgtggtggtgcatccctatactcccagcaactcggggggctgaggtgggagaatggcttgagcctgggaggcagaggttgcagtgagctgagatcacaccactgcactctagctcgggtgacgaagcctgaccttgtctcaaaaaatacagggatgaatatgtcaattaccctgatttgatcatagcacgttgtatacatgtactgcaatattgctgtccaccccataaatatgtacaattatgtatacatttttaaaatcataaaaataagataatgcaccgtctccacccctctcatatttactttctgaaggaaatgttaggtcttctcaaggtaaagttctatatttattatagcgtttaggcatttcttgaccatctaatgagtgtaaaactgtaccactgggccaagtgcagtggatcatgtctgtaatcctagcactgtgggaggccaaggcaggaggatcgcttgagcccaggagttcaagaccagcctgggcaacatagtgagaccccatctctacttaaaataaagaagtaaaaattgttttaaaa

SEQ ID NO: 93 - DNA, 3103 bp, Homo sapiens
cgggccggggccaaggcagggagggatcttaggagagatcgtaggacatctgaagagctgccatgtctggggcatcttcctcagaacagaacaacaacagctatgaaaccaaaaccccaaatcttcgaatgtcagagaagaaatgttcatgggcctcctacatgaccaactccccgactctgatcgttatgattggtttgccagcccggggtaaaacctacgtgtccaagaaactaacacgctacctcaactggattggagtccccaccaaagtgtttaatcttggggtgtatcggcgtgaagcagtcaagtcctataagtcctacgacttctttcggcatgacaatgaggaggccatgaagatccgcaaacagtgtgctctggtggcgctggaagatgttaaggcgtatctcactgaggagaatggtcagattgcggtgtttgatgccaccaatacaacccgggagaggagggacatgattttgaactttgctgaacagaattccttcaaggtattctttgtggaatccgtctgtgatgatcctgatgtcattgctgccaatattctggaggttaaggtatcaagccctgactatcctgaaaggaacagagagaacgtgatggaggacttcctgaagagaattgaatgctacaaagttacctaccgacctcttgacccagacaactatgacaaggatctttctttcatcaaggtgataaacgtgggccagcgatttttagtcaacagagtccaggactacatccagagcaagatagtctactacctcatgaatatccacgtccagcctcgcaccatttacctttgccggcatggagaaagcgagttcaatctcttggggaagattgggggtgactctggcctctcggtgcggggaaagcagtttgcccaagctctaaggaaatttctggaggaacaggaaataacagacctcaaagtgtggacaagccagttgaagaggaccatacagactgctgaatctctcggggtgccctatgagcagtggaagattctgaatgagattgatgctggtgtgtgtgaagagatgacctatgcagagattgagaaacggtacccagaagagtttgcacttcgagatcaagagaagtatctgtatcgatatcctggtggggagtcataccaggacctggtgcagcggctggagcctgtcatcatggagctggaacgtcagggcaatgtcctcgtcatctcccaccaggctgtcatgcgctgcctcctggcctacttcttggataagggcgcagatgagctaccatacttgagatgccctctccataccatcttcaaacttactcctgtggcctatgggtgcaaagtggaaacaattaaacttaacgtggaggctgtgaacacgcaccgtgacaagccaactgcagcagagaccacactggctgtgcgcagacgcccctccgcagcgtccctcatgttgccttgctaatgatgtggatgttcaggcctcacctctccaaacgactgggatctactgaaaagcttgggatgtcagcttcacagaggctagaacaggaagttaagtgggaactggactttgggggccaccaaaacgaggcctggagaaacgtcaccatatttcctcccctcctgcctaatgggaatatcagttacactgaaaaatttaacttccctgtgcctcaaaacatttagcaacctgaaccagtgactttttgtcatctctgtgctgagtttggtccaagttggtcaatctcattctgtataggcatttaacatcctacctgtgactgtctgcatcctttgctggctcttttttgcccaaagtgcaaatgcacttcttcagatttacttttcaagtgagaaggtaagagctggtctctgccactgttccaggcgagcaggctagagtctaatatacttatgctagcagttaccatttgccacattggaagcaagagacaaatcaccaggtgaatggagggtcttctgagaaattcagtccctaaaacatcttctctgccttgatagaagaacagtgtcagtggcaaccttttcatttagagaagtttttcttgttccaggcccttcaggacaggatctgactgcaagactccccaaaatgggtacccatcttttaagttcccttttgtagctactgtacttttgacttgatgcatgtgcctctcatgcatcaagatggggctgatgtggttctcctgggtggttgggaatgtggactagacagaaaagtagagtgccatttatatcgcgtgagtaagtcaagaaagctccttgagaatcagcccgatcagggagtgttttggcttcagaacaggtggaaggagacacgcccctctgtgggctctgtcaccatgatacagtccttgagagagctgtggctgtgacttggagggcagtagtctcctgatacctgcctcttggccactggtcactattgtggtcactgatctctcatataaaagtgagggtggcggggtcatggaccagcgcctcagtgcattagtcattcgcttttccttacagacaaatcagataactcttccccagtgattgtcaaatgtatgaatgtatctctgtaaatgtggttttgacatgtcactgttactgaaggagagtatggaatccccacaggatattatatcttgcaaggaaagtctatttttttaaagaatagtatgtttttagctttacttttctttcttttccttttcactcaaatgctcacttgctgggcaaaagggtgagtagcaagaaaagtaatgatatgtagcttttctcaaatggttcttttatactgtggatgatacaggactctgttacctaagatgtgataagctgggctgcaggcggttcagcatccagcaactaggagctgcttttctacgtacaaagctgccttcaggaaggctccttaccctgtagcagatgattttcatctggctgcctaccgcatgctgtactataatgatttagttgtgatatggatttctctctgcatcgaaaactgtcttttgatgatcagacaatgtttatatttagttatttattctatccatgtaaggcatttttgag

SEQ ID NO: 94 - DNA, 4314 bp, Homo sapiens
gcgggaaggtgcgggttgttggctgaggcaagccgtggctcgggcgacgcggggccaggagggcaggaccgtctgccggcgacagcccataccgtctgccgttgcgcgacacgaaccaccctccgatccgccatccccgcgtcgtcgccgctagtccgcccgcccgccctcgggccccccgctgccgagcccgacctcctaagagctgaaagaaattattgagagtcatagtccatagccccctgcttcgtcccccaaccctcaacgacgaaaaggacttcggtcccctggcccggcgacgcccgggaaggaaaggagagcgacctccgccccgcgctcaggccaccctggagggagaagccgccccgcggccggtagagcgccccgccgccgcggagacccgaagccgcctggagcccaaggctgtacacgtgccctgtgctgattctctgcctaggaaaggaccatgcagctagagatcaaagtggccctgaacttcatcatctcctacttgtacaacaagctgccccggcgccgggcagacctgtttggggaggagctagagcggcttttgaaaaagaaatatgaaggccactggtaccctgagaagccactgaaaggctctggcttccgctgtgttcacattggggagatggtggaccccgtggtggagctggccgccaagcggagtggcctggcggtggaagatgtgcgggccaatgtgcctgaggagctgagtgtctggattgatccctttgaggtgtcctaccagattggtgagaagggagctgtgaaagtgctgtacctggatgacagtgagggttgcggtgccccagagctggacaaggagatcaagagcagcttcaaccctgacgcccaggtgttcgtgcccattggcagccaggacagctccctgtccaactccccatcgccatcctttggccagtcacccagccctaccttcattccccgctccgctcagcccatcaccttcaccaccgcctccttcgctgccaccaaatttggctccactaagatgaagaaggggggcggggcagcaagtggtgggggtgtagccagcagtggggcgggtggccagcagccaccacagcagcctcgcatggcccgctcacccaccaacagcctgctgaagcacaagagcctctctctgtctatgcattcactgaacttcatcacggccaacccggcccctcagtcccagctctcacccaatgccaaggagttcgtgtacaacggtggtggctcacccagcctcttctttgatgcggccgatggccagggcagcggcaccccaggcccgtttggaggcagtggggctggcacctgcaacagcagcagctttgacatggcccaggtatttggaggtggtgccaacagcctcttcctggagaagacaccctttgtggaaggcctcagctacaacctgaacaccatgcagtatcccagccagcagttccagcccgtggtgctggccaactgaccatctacctgcccgtggggccaggagcacccaagaccacagaaaagagaaaggaaaggccaaaaaaaagaggaaaagaaaaatgtacaaaaagattttcgatcttctcactcttacttctagaaaaaagatccagcccaggcacggaatgggagggccctgcaaagcacccaagtgtgtttcactcaccccttaccgctcgcccaccggcctgtgatttatttggttggtttgggttttatatttctttttcttttttttttttcttacatgtagttttctatataacatctttaatgagtggcttcctgtgctaagaatggtccagatgtgaactgctgctccctgctcctcccttcctccttcacactcctagtttaggattgatgtgtccaagctcatagggaagaatcagctgcagctggagcctgaccctccctggaacagggagaggctggcccgtgtcactgcctctgtcacccagctatcctcgcactcaaagccatccaacctcagcaggccttctcgggccctgccacctgaataggtctgaccccagtccccactccctttcaggctgggccacagggagttgctggctggccacttgacaccctccccctggagctgatgtctgtgactacagggagattagcacttcgtctagtgaaactcctttcatctctgtcctatggccccaccccaccattccctctaggcccagaccatcatcatggccctggccattgatgtgtatgggctttctttccctcatgcagccccttcttccccaggctggatgttgtgggtagggaggggtgtgtgtgtgtgtatttggtttgctgtccttttttaaaggattccaagccatgtgaaacttcccttctggatgtgattctgggtcgcaagtccttatttatatgtgaggctggggaatgggctgggggtattggcagtccttttgcagggcagtgtgtgtggtggggtgacaccgctgtggcttagcccaagacactcccagaggaaaacactgcagaaggaactggtttgcagactgtggaaggatctgcagttttgtttttgaccaaaaaaataataataagttagctctgaagggcagagggaatacccaagcccctgatgcctatgagaagtccctggacttcaaccctcctgttgtttggccttagcccagagggagctgctcacctgagcacccttgggggtgggcagagaggcagggtgggattttagagttagtgtctgtgcgggggcagccctgagcctggagttgagactttggggtctcttagtttggaggtgttgagtgcatttgtgcccctgcctggttgagagcttcttggtacctcttgccaccccttctcactgccctgacccaaccccactggaccttgatgctgcgaggagtggtgtcctgacggactcagcactcccgcctgatgtattggatcataggagagcacttgctctcctgcctctgccaggagagggcttgttcctccaactctaggaggccaggcaagcatggacaggagccaagggagcagggtcattaactttttcttctttgcaaagtgggcacttggcatcagggtcccaatcaccagaaagcaccaaagcccctggcaccccacccactccatcctacccagggaccccaagtaggcaactgttatggcagtgggtccagcccaggccagcactgccagcctcctctccctgcagtaggcaccagctctacctcccccggcaggcaatgtcctggcttctcagcccagcaccatctgttcccctagacttctcaggggccagcccagtctgggccaccctttgtttccctcatcctcggctcccacacaggtgacagacccagcagatagcttctctctgggaaaggttggatgctgccttacatccccttctagccctcctcccatccacacacacaggcacccacccacaccaggtcggcttgtttctcacatgtagggagagaggggagaccaacccctttgtgtcttttgaaatacgaagaaaaatgtgtgttcaggagcatgactccagtgctgcgctcttgggcccagttcagtctgtcttgtctcaaatctaggcatttttgcttcaattttattttttttaagaatacaaaaacagaaatctgcactaatttacctggtttcgtaggaaaacttttttttattttttacattttttggtgtccgtttgtattgaataatttgctacatttgtaaaatgtaagaggtatataatatatgtatatttctaacgtaaaaaacataatttttttcttttcaagattttttcttaaaaagatgagagaaacatattttttcaggaaaaacaaactttaaaaaaaaaagaggagaaataaaaccttttctcccctttccccatcctctatctatccctctttcccaggaacaaatcaaaaggtggattatcttctgaagaatggaaactgttagtccagaatgatgtgtttttctcaatgcagtgagttatagattctctagttttctccctagggatgggaagggggcattgaggcaagcctggagaggagcccggggagcagggtcatgaacttttttctttagtgaaggaggaatacaatcaagggttttgtattcagaatgttgtgcaatattttggaatgggacattggtgtgtttagagattttagtttaaaaacaaaacaaaaagattgatcaaatctgtacagtttctattgttccagatttttttaagtttgtattaaaagcatgatacat

SEQ ID NO: 95 - DNA, 113916 bp, Homo sapiens
aagcttcctccttgaggtgctgaaaatgttctaaaattgacttgggatggctgcacaactgtgaatatacccaaaaccatagaattgtacacttcaatttttatttactttttctggtttttttttttttttttttttgagatggagtttcactcttgttgcccaggctggagtgcaatggcatgatctcagctcactgcaacctctgcctcccaggttcaagcgattctcctgcctcagcctcccgagtagctgggattacaggcatgcaccaccacgcctggccaattttgtatttttagtagagacgcagtttcgccatgttggtcaggctggtctcgaactcccgacttcaggtgatccacccgccttggcctcccaaagtgctgggattacaggcatgagccactgtgcccggcctatttacttattttaagaaaggatctcactctgtcacccaggctagagtgcactggtatgatcacagctcactgcagcctcaacctccggggctcaagccatcctcccacctcaacctcccaactacctgggaccacaggcatgtaccactgcacctggctagtttttgtgttttttgtagagtcagattcttgttatgttgcttaggctggtctcaaactcctggcctcaagcagtcctcccacatcggcctcccaaagtgctgggattacaggcatgatccatcgcgcccaaccaggttgtacactttagatgggagagttgcatggtatgtgaattctatcacaataatgctgtgggttttgttgctgttgttgttgtttgagaccgagtctctctctgttgcccagactggagtgcaatggtgcagtcttggctcactgcaacctctgcctcctgtgctaaagcaattcttgtgtctcagactcccgagtagctgggatgacaggcacctgccaccatgcctggctaatttttgtatttttagtagagacggggtttcgccatgttggtcaggctggtcttgaactcctgacttcaggtgatctgcctgccttggcctcccaaagtgctgcaattacaggcatgagccactgtgcccagcctataatgctgttttttttttttaattaactggataattataaacgtgaacacgtgtgcacagaactgatgcatgtgtctgccggcgtggacactcctgggcttccttctggtagctcagccgcctctcttgaccctgaccctcactgcttgatgttaggagacaagcccaaggcatctaggttgctggcttccaccttggaaggccagggcccagcaaagtcaaggtgatgtgatgtggctgagcagggaggccatcttccttccagacagagactctgtcactttggactggactcttgtcccacagtgctggccagggacaggtgcagagttgtgcttggttggcatgggacgctgatgagggctgtgttgcggccaggcccaaccaccatgagccgagatcatgccacggcactccagcctggaagacagagtgagactctgcctcaaaaaaataaaaaaaataaaaagttataaatagaactaccctatgattcagcaatcacacacttctgggtatatatccaaaagagctggctgggcacagtggcttatgcctgtaatcccaatattttgagaggccaaggcaggaggatcactggagcccaggagttggagaacagcttgggcaagatggcaagaccccctggctacaaacaattaattttaaaccctggtatggtgtcctagctacttgggagactgacgcggggggatcacttgagcccaggaattagagactgcagtgagctatgatggcatcattgcactcctgcctagttgacaaagtaagaccctgactcttttttttttgttttttggctgtgagtgtattcaatgcaaaataatcctctctaattttacggaggtggctggccatgtccacgaccaaatctgcctctaaactggaattcggttgctgacccagcccgagcctcagctttcttatcggcaccaggggcacagcactccgtctgtaggtatgtctgtcggcttcccctcttgtgagtcttgcaggtcgcccaccctccagacctttaggccgaggcctgccagtccctggacggctgcagcgtagggtggcaggcacagtttccagggacagatgaaggtaatcacggagatactggataccctgatcggtaaggtagcagtagaaatgtctccaggcaagccaggcacggtggctcatgcctgtaatcccaacattttgggaggccgaggtgggcggatcacgaggtcaggagatcgagaccatcctgtctaacatggtgaaaccccgtctctactaaaaatacaaaaaatttgccgagcgtggtggcgggtgcctatagtcccagctactggggaggctgaggcaggataatggcatgaacccaggagttcaagctggtcttgaactccaggaggcggagcttgcagtgagccgagatcacaccactgcacgccagcctgggtgacacagcgagactctgtctcaaaaaaaaaaaaaaaaaagcaacaatgcagggactcctgacacatgctccaatgtggataaacctgaaggacattatgcccagtgaaataagccagacacaaaagacaaaaaccacaggatcccacccacatcaggtccccagagtcctcagattcagagagatggaagcagaatggtgggtgccaggcctgggggaggaagctggacatagtgtttagtggggtcaggacagaatttgagtttgggatgatggaaaagttctggagacggatggtggagatggttgcaccacaatgtgactgcatttaacgccatcaaattttacacttcaaaatggttaagatgggccgggcatggtggctcatgcctctcatcccagcgctgtgggaggctgaggcaggtgaatcacctgagattgggagttcaaaaccagcctgaccaacatgaagaaaccccgtctctactaaaaatacaaaattagcagatgtggtggcgggtgcctgtaatcccagctactcaggaggttgaggcaggagaatcacttgagcctgggaggcgaagggttgcagtgagccaagatcgcaccattgcaccccagcctgggcaacaagagcaaaactgcatctcaaaaaaaaaaaaaggttaagacggtaaattttatgttatgtatattttatcacaataaaaagtaatattttttgcagccaaggtatgctaaaagaaatggctttttaattttttattatttatttattaattattattattatttgagacagagtctcactctgttgcccaggctggagtgcagtggcgtgatctcagctcactgcaacctctgcctcctgggctcaagcaattctcttgcctcagcctcctgagtagctgggactacaggcgcccaccaccacatctggataatttttgtatttttagtagagacagggtttcatcatgttgaccaggctggtctcgaactcctgacctcaagtgatccacccgcctcggcctcccaaagtgctgagattacaggggtgagctactgcgccccaagaaatgacttcaaaaggaaaaatgtaagcaccaacataagctggtgtaatgtaatgtaattcccaccaatgtaagttggcaggaatccttgctctgtatagaaggctcacattttcttatcactgcttccaagtgtgacagcagtggcctcatggccttatctcggggaaagcacttccttccaagcaccatgaaggcctcccgtgctgagacaagatggaagctcctagtcccacctgaggactgatacggcctgtgcttctcggtctctcaggacgcgcaggcggccatgcgccccttcgacccctccgctctgctgcccacctgctgggattactggacctatgtgggctcgctcaccaccccgccgctgaccgagtcggtcacctggatcatccagaaggagcccgttgaagtggccccaagccaagtgagccgtgcccgtaactggcatgatggcgcttcatggaaggcgtctctcttgcttggcagcgtcactaagatgctgcataagagccttgaggagttatatatattctttcatgcatttggggtgttcttacacaagaagaaagttccaattgaagtaggagcttgttgagattggacagcggttccagtgatcacagcgagcatgttctgagcaacgccctaatctatcacacacagacacacaaggcatccatgggagttgtcccagcgtcatgggtctgcatggtttttgttttcttcctttttcttttctttcctttttttttttttgagacagagtctcgctctgtcgcccaggctgcagtgcagtggctcgatctcagctcactactacctccacctcctgggttcaagcaattctcctgcctcagcctctcgagtagctgggattacaggcacccatcaccacgcctggctaatttttgtatttttagtagagacggggtttcaccatgttggccaagctggtcttgaactcaggtgatctgcccaccttggcctcccaaagtgctgggattccaggcatgagccaccgagcccggcctcctttttcttatctaaatagtttcattgctttttttttttttcgaaaattagttaataatccttgtatacatttttaaaagttatactattgggctgggcgtcatggctcatgcctataattttagcactttagaaggctgagacaggcagatcacttgaggccaggagttcgagaccagcctgaccaacatggtgaaaccccgtctctactaaatctacaaaattagccaggcgtggtggtgcacgcctgtaatatcagctacttgggaagctggggcaagagaataacttgaagccgggaggtggaggctgcagtgagccgagatcgcaccactgcactccagcctggacaacaagagcaaaactccatctcaaataaataaataaataaaaatacaaaaattagccaggcatggtggcgtgtgcctgtagtgccagctacttgggaggctgaggtaggagaatcacttgaacctggaaggcggaggttgcagtgagctgagatggcaccactgcactccaacctgggcgacagagtgagactgtctcaaaaaaataaaataaaaaataaataaaagttatactatcatttttttctggaaatcttaagaatctatagcaattctgtctgtccaaggcagttcagagccacaggcatgctgcctatgccccgcccccgcccggcagacgtttctcagcagtcgcagcaggacttagcatctctggctcatctctttctgagggctccaggtgagctcttagagggtctttcagtctcctgggcctgtgaaaatattcccttatatacaaaccatggcatgatgtcatttgcacgtggagatgtgggatgcagaatatctgcctacctccaaaccagagctgttggacatggggaaggcttttgttgaaggtggccccttgtcagcaaggcccttatgctactcaacaagcatatatgtgacaagtgcccattctgggtctgtgccaccaagagagggtgggaggggggcaggtgtggaggggcggcacaggaacagggcattcgtctcagaatactgctgtctggcaggaaagtagaaacgaagccaatagtattaagccagggtggccggtgtcatataaaaatgcagggcaggagctccttatcctgagcaggggagccagggaggcacatgtcctggaaggcggggagttttccaggggaggagaaaggctgcctttctgagacagtcaacaaatgtgcagaccacaaatgtggatgagcacactgtggtcatggcccaggaggccacgtgcaccatgcgcgcgcaattctagggggcgctggatcatcatgcagggctaactggcccagtatgctgtcagcatgtagacataatctcacttctgaatttaattaaatgcgtgagttgcctcacagagttcataagtatattctgtgaacaagtgagataatacataaaaagtctttttttatttttcatttatttatttattttgagacagagtttccctgttgcccaggctggagtgcaatggcgtgatctcgctcaccacaagctccacctcccaggttaaagcgcttctcctgcctcaccctcccgaggagctggattacaagcatgagccaccacatctggctaattttgtatttttagtagggatggggattctccatgttggccaggctggtctcaaactcctgacctcaggtgattcacccaccttggcctcccaaagtgctgggattacaggcatgaggcactgcatccagccataaaaagtagtcttttagttccttgagtgaaaagtaaattcaaatgttactttagcatttacattataggtgttagttatctattgctgtgtaacaaatagctccaaaacatagtggctttagaaaacaatcatttgggccgggtgcagtagctcatgcctgtaatcccagcactttgggggccgaggcgagtggatcgcctgaggtcaggagttcaagaccagcctgaccaacatggtgaaaccctgtctctactaaaaatacaaaattaggctgagcacagtggctaacgcctataatcccagtactttgggaggccgaggcaggtggataacctgaggtcaggagtttgagagcagcctgaccaacatggagaaaccccatctctactaaaaatacaaaattagccgggcgtggtggtgcatgcctgtaagcccagctactcaggaggctgaggcaggagaatcccttgaacccaggaggcggaggttgcggtgagcaaagatcacaccattgcactccagtctgggcaacaggagcaaaattccatctcaaaaaaaaaaaaaaaaaattagccgggcatggtggctcatgcctgtgatcccaattactcgggaggccgaggcaggagaatcgcttgaacctgggaggcggaggttgcagcgagctgagatcttgccaatgacactccagcctgggaaacaagagcgaaacactgtctcaaacaacaacaacgacaacaaaaaccaatcatttattatctcccatagtttccttgggttgtgaatttgggtggctctggcttaccatctttcatgaattgtagcccagtgtcagctgggactgtagcgatctgaaagctcaactagggctagaggattcattccaaggttggccctctcaagtggatggcaagttggcgctggcagttggctgggagcctcagctcctttccctgtgggcctctcctcggggctgcttgagtaccctcccaatatggtgaccagcttccccccagagcaagtgatcctaaagaccaaggcggaagcggcaatgccttttataacctggccctgcacacaccatcacttccaccatctttactggtcatttcaggccatcctgattcagcatgggaggagaccacacaaggcctgagggacacccgggggctggctcaccctgcactcataccaagctcaccctggctgccctctattccagctctctgcatttcgtactctcctgttttctgcacttggtgaagagaagaagatgatggtgaacaactatcgcccacttcaacccctgatgaactggaaggtctgggcgtccttccaggccactaatgagggcacaagatcctagagacattaggtccacatgaatagcagaactgactttgaaggaaggaagcgttgttacccaggagatcgagaccatcctggccaacacggtgaaaacctgtctctataaaaaacacaaacattagctgggtgcgtgcctgtaatcccagctacttgggaggctgaggcaggagaattgcttgaacccgggaggcagaggttgcagtgagccaagattgcactattgcactccagcctgggcaacaagagcaaaactccgtctcaaaataaaaaggaattcttgtgaggccaggcacagtggttcacgcctgtaatcccagcactttgggaggctgaggcaggtggatcacttgaggtcagaagtttgagaccagcctggccaacatggtgaaactccgtctctaccaaaaatacaaccaaaagtaatctggcaggataaaaccagaaaacatacacaatttgatgtcaagacctatttcaaaagctatagtaggccaggcgcagtggctcatgcctgtaatcccagcactttgggaggccgaggtgggaagatcacctgaggtcagaagttcgacaccagcctggccaacatggcgaaaccctgtctctgctaaaaatacaaaaattagctaggtgcggtggctcatgcctgtaatcccagctactcaggagactgaggcaggagaatcgcttgaatctgggaggcagaacttgcagtgagctgagatcatgccactgcactccagcctgggcgacagagcgagactccatataaaataaataaataaataaaaataaaaagctatattaattaagataatgtggtacctgtcagagaaggacaaatcaaccaatgaaaaagaatagcatgtctagaaggttccacacatttgtgatccctgagtcatgctgtagggaatggatgggcttttctgtgaatagttttggatcatttggatacttatctatctatgtattgattgatcgatcaattcatctgtcgatccacagggtctcactatgttgcccaggttggtcctgaacccctgagctccaatagttctcctgctttgacctcccaaagtgctgggattacaggcatgagccaccccaccgagccaacgggatatccaaatggggaaccatgaatcttttttctcaccatacctcacacccctacctcacagcacacacaaaaattaattcctgacagactatagatctaaataggaaaggtaaaacaataaagctcctaaaaaataacataggagccaggcgctgtggctcacgcctgtaaacccagcactttgggaggccaagttccagactagcctgaccaacatggagaaaccccatctctactaaaaatacaaaattagccgagcttggtggtgcatgcctgtaatcccagctactcgggaggctgaggcaggagaattgcttgaacccgcgaggcagaggttgtagtgagccgagatcgcgccattgcattccagcctgggaaacaagagcaaaactttgtctcaaaaaaaaaaaaaaaaaaaaaagacttgatccagaactcaatgttgggtctgagtgtggcttttctgtctctctttcgtgatgttgtctctctcttggcaagctcattctttttgtggaaagagagctaccacttgtgccaggatggtttccattaattcatgtaacatttattgagtgccaattacgtggcaggctctattctagactctggggacagagcctagactgtttcaggtctgaagagcctttgcctcggagctcacgttctgatggaaggaggtagaccatgatgcatcaacacagaaagtctggggtggtaagtcacagggagaggacatggctgggtggggaggtctcttctacaggggccatttgggcagagaccaaaggaggagtgaaccacatggctacccgagggcagagaattccaggcagaggctggaggcaggagcacccttctggtgttcaaggtgcagcccgagggtgagggcagccaagtgcaggggtgaggagagaggcatgggaggcaagggtgggtactggggccccataggctgggtggagactttggagctgctgctgggttctgagcaaagggcattttcgagtggaaaggctcagtttggctgtgctgccaaagagttttccaaagtggtcgttcctgtccttgccagcaggtcattgtgtgctttctggagggtgtgcccaggtgtctcctgtggatttaatttgcacttccctaatgattaatgatgtggagcactttgtgcagattcattggccatctgcatatcctctttcaccagatacctacttgagccatttgcccatttttctcttgggctgtctgtggttttcttagtgatttttaggagttctttatatattccaattataaggcctttgtccattttacaaatctcttctcccactctggggctgcctttcaccctctttttttttgttgttttttgttttgttttgtttttgagatggagtcttgctttgtcacccaggctggagtgcagtggcgcaatcttggctcactgcaacctccacctcccgggttcaggtgattctcctgcctcagcctcacaagtagctgggattacaggcgtacaccactgtgcctggctaattttgtatttttagcagagacggggtttctccatgttggtcaggctggtctcgatctcccgacctcaggcgatccgcctgcctcgtcctcccaaagtgctgagattactggcatgagtcaccgcgtcgggtctggatcaagcttatagcaatggttgcacctgatcagttacacaagccaataggtgccctttcatgtaagccagtttgggtttctttttacctattacttgcttggaaaaaatccaaaatcagtacagtgtttttcttttccttttttttagatggagtgtcgctctgtcacccaggctggagtgcaatgtcatgatctcagctcactgcaacctctgcctcccgggttcaagcaattctcctgcctcagcctcccgagtagcggggattacaggcacccgccaccatgcccagcaaattttttttttttctttgagacagagttttgctcttgtcgcctaggctggagtgcattgatgccatcttggttcaccacaacctctgcctcccaggttcaagcaattctcctgcctcagcctcccaattagctgagattacaggcatgggccaccacgcctggctaattttgtatttttactagagatggggtttctccatgttggtcaggctggtcttgaactctcaacctcaggtgatccgcccgcctcagcctcccaaagtactgggattacagacgcaagccactgcgcccagcctattttttttttttttttttttttgcatttttagtagagatttggtttcaccatgttggtcaggctggtctcgaactcctgacctcaggtgatctgcctaccttggcctcccaaagttctgggattacaggcatgagccaccgtgcctggcccagtatttttattttcatagcattaaaaaatattcctcccagaagagagaaagttttacaatcaacctaattaaattatcttccaatgtcaccttacagtcagataagcacagaaaaataagcagatgctaatctgtttcccaaggtgataaaagccgtttcattccggggagataaagaataagtaggttaggtcaggcgcggtggctcacgcctgtaatccccgcactttgggaggctgaggtgggcagatcacctgaggtcaggagttcaagaccagcctgggcaacatggtgaagccccgtctctactaaaaaaaaaaaaaaaacgcaaaaaattagtcgggcatggtggcaggcacctgtaatcccagctacttgggaggctgaggcaggagaattgcttgaacccgggatgcagaggttgcaatgagccaagattgtgccactgcactccagtctgggcgacagagtgagactccgcctccaaaaaaaaaaaaatacaaaaactaggctcacgcctgtaatcccagcactttggaaggctgaggcaggtagatcatgaggtcaggagatcaagaccatcctggctaacacggtgaaaccccgtctctactaaaagtacaaaaaactagccgggtgtgctggcatgtacctgtagtcccagctactcgggagactgaggcagggagaattgcttgaacccaggaggtggaggttgcagtgagccgagatcgtgccactgtactccagcctgggcaacagagtgagactccatctcaaaaagaaaaaaaaaaaaaaactaaggctaggcacggtggctcacgcctgtaatcccagcactttggaaggctgaggtgggcagatcatgaggtcaggagtttgagacgagcctgggcaatattgtgaaaccctgtcttttctaaaaatacaaagaaaaattagccgggcgtgttggcatgcacctataatcccagctactgtggaggctgaggcaggagaatcgcttgaacctgggagacggagcttgcagtgagccgagatggcggccaccgcactctagcctgggtgacagagcgagactccgtctcaaaacaaaacaaaacaaaatctagccagaaatcgcttgaacccaggaggtggaggttgcaataagctgagattgtgccactgccctctagcctgggcaacagagtgagactccacccctccatgcccccccaaaataaagtgtctggctctttaaaggagatcacacttggtggtgatgcgggtgaaagaggattgggttgaaggagtcaaagtagaagtgggaaagcaccaagctgggaaatgggcacgtttctgttctgcgtctaaggtgatgctcctgacttcgattccatcgatcaagaggagtttgctgaaggacagggtgtacagctgccttgcccgctcctgaaccaggcccggggtgaagtgtgttgtgcacattcagcagctccagccccgctgtgggtcgcactgacatgctgggcccagcccacgccccagaagctcgcagcgccattggtctggggaatggtgttttatgagaaactcctgaagtgacaggatggtgtcattgggcataagggccacggcactcccactgagttgcgacaagttctacaaaatcatccctggtttttaataaggaaactgaggctcacttgacaagttgagaaagttgtcgctgacccgctaggccaagggatacgcagcatttcactcttgccttctcttatttgtgcaattagtcaaggaaaaagtgcagcaaagagagagtcctgaaccttaaaacccaggagaaaacttatcctacaatgccgggcagttcacgctgatggaagcagcagccagaggaaggcacttggctgggcttcctgcagcgctgtgagaatagcccgctcctctggtggggaaggggtgacacagtcaatggagggggtggtgtctgaacctggagcttgggatgggggcagacagcagctattcagccattctccatgggctgcccatttccatggggacctggagacagagaaaggcccaagcggccagaggggccctgggctccagttctaccagccccacattgacatcgtgtccaacaagataccaagagaagcagggagtggctgaccttcattttccatatcaacacagggggccctctgcacgcaccaacatctttgtctcctgaaaaatggcctttgtcagttatttttaaaaactggtgttaatcctgagacacggagatactcccaggaagacatccgagcctggacacactgagatgaaaccagaaacactccgagagaaaatgacattgattccagccctcaaagcaacgggacaaaaaacaaacaggaggcttccctcccgccccaggggcagcggccaatgtctgcggctctgcgggaagggctctcactgtgaccagattgtggcttctgattgtattgtagaatttctggcccagcttttaaggttcaaggcttcctccctttgcttttatgttattttcttgtttaataaagatacacctgtgtgagaagcattgcctgttcacagctgccaccgcctcctcctcctccgcttcctccccatccccagcacatccttcccatcgaccctccagagaaccaagctcaattcagagcaggccatgtgcccagctacatcccctcagccttgcccccctgagacagaatccacattcctgcccctccgcccccaccctctcctggcagcccactctgtgccgaccagaatatcggccccctcccaccccagggctcttgtggctgttctgatggacctgagggcacccttccccgcccgccccacaccacctgctcaacacctgctcctcctgttccctcagcctgagctgagcccccagatggcacctggcacacagcggtgcccagcagtaacggagctgtcattttttgacacttgtccctcctgctgaaaggtgggctgtccatgcactgctgcatccccaactctgtgcccaccaaccccgtcttgataaatggttcctccatccacccgacgccacaggcaatctcgggagcccccttgggccctcctctcccctcactccttgcacccagggcagcagcacgctctgctggaggaccctcaaactgctgcctattccaagtccgtccacttttctctgtcccttctgctgcagcctgagtgacaagctgggcttccagtttagccacttcctttccagcctcttcccctcttccctcaaatccctttttcttttaacagtgggtttttttgagaaaccgacacttggccattctgctgccctgttcaaaactgaggctttccactaggcttgggatcgagcacgagcttctcccagcaagattcgcagcctggccctcttccacgtcaccttgtgtgtgtgggcctctggctggggttgctgtccccacggctgcttcacagtcactcctttccatcctcaaccagctttcagacacttgtcccaaccacggtctccctgtgtcccctccccagctgttggcatcaggcatgtgttgctgcatgatgcttgcatcctcctctggaatgtgagcccccaggggcgggatcctcaaccattctgcttgcccatggcacagaataaacgcggtcaggcgccatgggctgcagtgctcccacttgtaagctcggggactgctgtgcactgcccctgggcctccaggcgctgctccctctcctgggctcatcctccttcgtcagtgccagccccaggcagcagcatcccctccccccacacccaggctcctgcacatcccacgttatcacaggggtgcacatgaaagggtcacccgcaggctggggtgtcatgaggacatgcattctcacaaagccaggcgtatgtctagctattgtgaaatgtttgctgagtcaatgaatgaattgcaggatactagatggatctggctacaaatgtttagaaactaccttaaatccagttaactgggggctgtcatcattgagaagtctagacaaaatgagtgacagggagcaggtgtgatcagacatggagcagacatggatcacacatggaacagacatggctcacacatggagcagcatggaccacatgtggaacagacacggttcacacatggaacagacacagttcacacatggaacagcatggaccatacatggaacagacacagatcacacatggaacatacacggctcacacatggaacagcatgaatcacatatggagcagcatgaatcacacatggaacagacatggttcacacacggaacatacatggttcacagatggaacagacatggttcacacatggaacagatagttcacacatggaacagatagttcacacatggaacagacatggttcacacatggaacagacacagttcacacatggaacagcatggaccatacatggaacagacacagatcacacatggaacatacacggctcacacatggaacagcatggatcacacatggagcagcatgaatcacatatggagcagcatgaatcacacatggaacagacatggttcacacatggaacagacatggttcacacatggaacagacatggttcacacatggaacagatagttcacacatggaacagacatggttcacacatggagcagcatggatcacacatggaacagacacagttcacacatggaacagacacagttcacacacggagcagcatggttcacacacggagcaggcaccacacacccatgccgtagcatgcatcagcctggttttcgggcccacacaatagaagtcattgttttggtggtaaacaatatccacctggatatttttcaaaatagagaattgaattataacctacaaatttccatcctcacatggaaatttgacctggttgaatggcatctgccctgcagccactgtccccaaaactgagaggcggggcaaagtagccgaagaaagcagcgctgaagctggcagctgcaaagagtgcagggccctccagtctctacaaaattcacagctgcttccagcctcatgctgggacgtgggctgagcaatgaattcttcttgtaatccagggtagagtggaagaaagttcaaggtgagcatcaactcattcaatcacttaacaataggcaggtttggctcatactgcagaggccaagcaggagaacctggctcctgtgtctctggaaatgttaaaatgcctgtcaacaggaaaaaaagatctgtctctgccatcctgaaggtaagtttgccacctacgcactaaagattaaggccatattttttcaatgttgagattattccctttgtctgcaaacaggggcttaggacaacagccctttcttctctcacagtcccggaggccagaggccaacatcaaggtggtggcagggccagactccctcgggggctccaggacccctcctgcctcttccagcttctgggggctccaggtgtcccttgactcagagccgcccactcccatccccgcctccatcttcacgctccagccactgagaccatgcccgacacagcaagtgtgggctgctgcaactgctgtccctccgtgttccctctgcacacattggaaagaaagtctgagggtggaagccaggcattcggccagccctgggagcacagttcggcagtgacggcaacaccagcagctcagggtcctccacccgccagccccgggagcacagttctgcagtgaggatgacaccagaggctcagggtcctccacctgccagccctgggagcacagttctgcagtgatggcaatgccagcggctcagggtcttctacctgctggtccccaggaggcgggcgcaggtgtctccctgcttcacagaagaggaaactgagactttgaaagctgagccgagtcactcgcctggtgccacattaaccagcaagtggtagaggtgagatctgaacccaggaccgttcgattctaggcctgaactgcttttatcttttggatgtatagttcacacataacataacattaaccgttagtcatttaaacacgtacaaatccgtggtgtttaagtcactcccagtgttgggcaaccatccccatcatctagttccaagacattttatcaccccaaagagagaccccatccactcagccctcactctccatcgccccttccccccgccctaagcagccacgaatctcgtccgtctctctggatcctcctgtcctgaacattcgtgcactcggaatcatacaacccgtggtcactgaccctttcacgcagcccagtgttttcaggggtcctgcacattgcagcgcgtcttcctgtgtgcagctgaatgactctccaagggatggcggactacgctgggtttatccatcatccacggatggacgggcctgaactctgaccccggctcctactgttgcttccatgtcatcttttttttttttttcaagaccagtctcgccgggcgcagtggctcacgcctgtaatcccagcactttgggaggccgaggcggggggatcacaaggtcaggagatcaagaccatcctggctaacaccgtgaaaccccgtctctgctaaaaatacaaaaaattagccgggcatggtggtgagcgcctgtagtcccagctacttgggaggctgaggcaggagaatggtgtgaacccaggaggcggagcttgcagtaagccgagatcgcgccactgcactccagcctgggtaacagagcgagactccgtctcaaaaaaaaaaaaaaaaaaaaaaaaaaaagaccggtctcattctgtcgcctaggctggagtgcagtggcgtgatctcagctcactgcagcctcaaccttccccagctcaggtgatccttctacctcagcctccccagcagctgggactacaggtgcaccaccaccacgctgggctagtttttgtattttttgtagagacggggtctccctatgttgcccaggctggtcttgaactcctgggctcaagagattttcccaccttggtctcccaaagggctggcattacaggcgtgagccaccgcgcccagcctccaagtcatctttcacacgcagagcacgcctgagagcagcaacaagactaacgttggggccaaagctaagaagtggggcggagcctccctggtggccggtcgtcagcccagtgcctgaaatgcatgcaaagtctatttttattttgcgtagttgaacctaagcaaaaaatctggccctataatctctaaccttgctcctaactggcacctaccctattgcacaagaagctatctaggggaggactcagtgagcactcggtgagtttgtccagccatggtggtactgtctccttccctctgcaggcacagcgggaagaatagggtggatggagggctctctgcaccttccacagcccgcagcgtggacggcagattacaagttagtatctgtgcgacctccgcactcccctgccggtggctgcctgggctgctgagatttcgcttggttttatcactgcagaggaatgcctgccataccggggggcgagcaaggtccagaatgacaagccgtggcattcctcagccgcctcctccccggggtggggcctggacattcctggctgcagctagaggtcccagcacgacagggattctgaccccccctccaccacggctattgttcagaattctgtggattccagaggcatctgcccagcagactgtcttgctgtgaacacccagctctgcaaccggtgtttgcgtgtttgccctgggaggctgaacgctcacccagaacaaaggcctccccacatgcctgctgtgagcttccaagtactcgttaggacacacgccaaggaaccccgggttggggggataccgaggagcttcctccctgacccacacacaccctttgaacaggtctttggctgctcaccagtctggtcaatctcggggcagtatttatattccttcccgtttccaggcctaggagccttggcatcctgctctcgcctctaactgaaattacctctcaaccctttttagctaagatgcctctcgcattccccaggaataacaagctttaaagccccttcacactgaagcctgcctttgaatttcccagctagatttgggggtgggggtcttatggctcccggtgaacccccggttctgttgattaaattgagctcaggcagagtgctggcttcccaaagcctgtgttattactgcttctcaaagctacgggcaccggatcgccatctttggcaagattcttttgggatacaatgggaattactgggtggcctcggttcggttcttccctcgtctcagttcgcggctcaccagccacattgatgcagcccccaggctggaaggaggctgcaggagcttcccctcaggtcatcttctcatccctcccccgtgccccaggagctggttgtgggggcggttccatcccctcggcccatccgggacaggagcctaggttcccttcggggggtaccccaaaccccatccttggcctcaggccagccctggtgcactgcccgctcccaggcttgacgagaggctgcgggccagtgggtgaaggggctcgccctgactgccaggccccgcccaggcgcacccgggaggacgggctgggatgacgcgggcgccgggggggtaggtcgcgaggccggggtctccatggcgcaggagtacgggggccttcgaggaccacgcgggcctgggaatcgcctgccaggctaggccggacgacgcacgtgctccgagctgggtcgagggggcggggctgagggccgcggccgggccacgggtcggggaggagccgcggacggtgggcggggccagtgggccggggcctaaaaggcggcgcgggcggggttcctgacgcagctgcgggcggcgggcggcgagcggcgcgcacaatcctcgctcggctgcggctcccgggtgtcccaggcccggccggtaagcagagcatggcgggtgcgggcccgaagcggcgcgcgctagcggccccggtggccgaggagaaggaagaggcgcgggagaagatgatggccgccaagcgcgcggacggcgcggcgccggcaggcgagggcgagggcgtgaccctgcaggggaacatcacgctactcaagggcgtggccgtcatcgtggtcgccatcatgagctcgggcatcttcgtgacgcccacgggcgtgctcaaggaggcaggctcgccggggctggcgctggtggtgtgggccgcgtgcggcgtcttctccatcgtgggcgcgctctgctacgcggagctgggcaccaccatctccaaatcgggcggcgactacgcctacatgctggacgtctacggctcgctgcccgccttcctcaagctctggatcgagctgctcatcatccggccttcatcgcagtacatcgtggccctggtcttcgccacctacctgctcaagccgctcttccccacctgcccggtgcccgaggaggcagccaagctcgtagcctgccactccgtgcgtgagtacggggcgcgggccgggggttgggaggtcgtagtccctgggtccctgcatccttgcatcactacgcccctggctcccacatctctacatttttgcgttcctggaccgtcccggcagttctaggctaaggtcattggtcccagaaaccaagtgcgtttctttcattcattcttttacacttctccccacaggctgggaatatcttcagtgacgggacagcagggtccctgccctgcccttcggtgggcatttcattcccccacttaagcggttcaggcaagtgccagcctcccgttggccccgctgagcaatactcccagcctcttgcgtggcacccacgtggagtaactgagcaaccggtttattgttaaagctccgattgctgactggttggtgaaaacgaaattgcagttaaaaagaaaattattcatttctgctctccacaccagctcgtcaggaatcagtgacacgggctgactcataagaaaacagtagtaataaaatcgtgtgcgggtagtgactggtgctggtttaggctaagggatcccccctgagggttgcccagtagtgagagagcggagcttggctgcagattcagtctgtgttacagtgaatggaggttcgggtcccaggttactctgggaaacagccatggggctcctattttggtgggcatggtgctggtgtgttcttcaccaggccagagagaactgcttttcaaaatagttttcttttcttttctttttttttttgagatggagtctcactctgtcgccctggctggagtgcagtggcgcgatctcggctcactgcaagccccgcctcccgggttcacgccattctcctgcctcagccttccgagtagctggggctacaggcgcccgccactacgcccggctaattttttttgtatttttagtagagacggggtttcaccgtgttagccaggatggtctcgatctcctgaccttgtgatccgcccgcctcggcctcccaaagtgctgggattacaggcgtgagccgccgtgcccggcctcaaaatagttttcttgtgggatttcagggggaaaatgacttgtaccagataccacatgatttggttgggtggcgtgggaaggcgggtcttggcaattctcaggttcatcccatggcaaggatcggcctggatctcagtagtgtgtgtacacattcaaggtgggaagggttaatttatagttggggtcttgagccatgaaatcaggggagtggcttctgactggcaggacctgttggcgctgttttctgccacaccgtactttggggagaagggggagggggaggcatttcttcataaatgtgagaatgccccgagggcaagactcagcagggctctgtgtggtttctctgaggctctgagcggagcagccgcaccaccatgcaggtcaaagccgggaaaaatcgtaggacaggagtggggagagcctgtggcttccagctgggcgttggacatgtgaatgtaggggatgactgatttcttttttttgtcattagaatttcactggttcagtctccctctcgcctaggtacatgcccgcctggtatgtaacgacatggataatagcttatgcagcctgcactcttacctttaaaaaatgaatccctgttggctgggtgtgatggcccacgtctataatcccagcactatgggaggccaagacaggcagatctaccgaggtcaggagtccgagaccagcctgaccaacatggtgaaaccccatctctactaaaaatacaaaaattagctgagcatagtggctcacgcctgtaatcccagctacttatgagtctgaggcatgctccgggacgtggagtttgcagtgagttgagatcctgccactgcactccagcctgggtgacagagcaagcctgtctcaaaaaaaaaaaaaaaaaaaaaaaaagcagcccctgggtgctgagtgtctgacttcctgttggtgccaggagtgagttgtgggaaatgcttcattggccaccaggaaggagacataggatggggcgctgcctagttttctctttctaataaaaatcacatcagtcatacatgaattcatcatcatttaaaaattcaaaccagccaggcactgtggctcatgcctgtaatcccagcactttgggaggccgaggcaggcggatcacctgaagtcaggagttcgagaccagcctggccaacatggggaaaccccatctctactaaaaatacaaaaaattagccaggcgtggtggcagatgcctgtaatcccagctactcgggaagctgtggcaggagaatcactagaacccaggaggtggaggttgcagtgagctgagatcgcaccactgcactccagcttgggcaacaaggcgaaactctgtctcaaaaaaaaaaagcaaaaatcagctgggcgtgacggcgcacacctgtagtcccagctactcggaggctgaggcaggagaactgcttgaacttgggagccaagatggtgccactaagctcctgcctgggtgacacatttctcctcctttaccaccccccagccccagagtttctgtggctgacagtgtacgcttccagagctgcttctgttacaaatatatcgctggcctatttatttaaaagatcataatgtacaacttgttctccaccttttttttaagcctaaaatggttttgccatgttcccaggcagtacgcagaggctgccctctttagctgctaagaagacttccctgtgtcggcaggaacaagtgtgctcaccgcccccaccccccgaccccccgtagacccctgtggagggcatttggggtttcccagctttgtgcaaatgggaaaaggttatgtggttttttgttttttgtttttgtttttgttttgagacagagtctgtctctgtcgcccaggctcgttgctcactgcaacctctgcttcctggttttaagcaattctcctgcctcaacctccgggagcttagattacaggcatgtgcctcagcctcccaatttgctaggattacaggcatgagccatcgcacccggcggggtgtggattctaatgtaatagctaatgtgccttccaaagaggctgtaccaagtcacacgttcctggatttattttgtggtaatagggctttaaaaagtatttttatttatttatttttattttattttatgtttgagatggagttttgctcttacccaggctggagtacaatggcgcgatctcggctcactacaacctccacctcccgggttcaagtgactctcctgcctcagcctcccaagtagctgggactacaggtgcccaccatgcccagctaattttttgtatttttagcagagacaggacttcaccatgttggccaggcttgtcttgaactcctgacctcaggtgatccacccgcctctgcctcccaaagtgctgggattacaggcttgagccaccgcacccggcctaaaatagctttccagcagtccttttggtcccagtaggtaaagcctcaaggcaggctctagagtgccaacccttctgacccagaggtgagggttaatgttaataggatccctttcagcgaaagttagggccacacttctcatgtccctaagccatttgtacttgttttttttctctgacccacctgtgtatgtggtgagtatgtgtgtatgtgttgctttttttttttttttggaaagtgattttcagtaacagaaagggatgtgctctctgcaagagtgaatctattcttgcccctgtgtgtaaggcgagaaggagaagttgtgttctctgaacaggcagaccctgctgagagagggaggtgtgttggggttcaatcattctggtgggaaagatattagaggtagttatagaaatagacacaaatcttggaaggccgagaagttggcataactttggtaattagctctggctgaaggcggcctgatccctttacctttagttaaacaaataaacatagaaataaaagaaaggcagagtagtttacctagctagcttgtttactcatataatcttaagaccctgggtgcttaaatgctttttacccggtaagtccacaatgtctgttacactctaatggtgttgactcaagcttttgttaattaatcatactgaataaatgcgcgtctgactagctgatcagggccaagtagcaactgtttacaggactcagcagggagcctataagcggctggaacactcagctggactggcagagcagaatatctgtgtgtctgtactttattcatctgtcacggggtcacgggtctgtaagggacagactccctgcagctggtgcccccttgaaaggagtgctgtcgcagaggtgggcttggctgagtctggtagaactccaagctgattctcaggtcgttctgacttcagctcggagaagggcagtggatgtcccaggaagggagaccctgcccttgtagggggacttctgacaggtgcagggggcagcctggagcccggaccagtgggcaggatgggcgctccagggtgtgaaggagaggctcggcgtttgatctgtggacattgttcctggagcagtgaaaagccatagaaagtgatttattttatttatttatttatttatttatttatttatttatttattttgagatggaatttcgctctttttgcccaggctggagtgcaatggcacgatctcggctcactgcaacctctgcctcccgggttcaagtgactctcctgcctcagcctcccgagtagctgggattacaggcatgcaccaccatgcctggttaattttgcattttttagtagagacagggtttctccatgttggccagactggtctcgaactcctgacctcaggtgatccgcccacctcggcctcccaaagtgctgggattacaggcgtgagccagtgtacccagctgattttttttttttttaaatgatcacacataaggttgggttccagaattttctgcttaggaagggaaagggcaccttttacccccttagtccttgagcctgatcctacagaaggtacagtggctttcgggtctggatcctcagccctcgggcctctgaggctgccttgggagagggtacggatttgcgaacaaggttctcagttttgctggctgtcttttcagtcgcccaggcacgtcccacagaaagtttctttttgtgaaataatcgtgtgaaatgggttggcctcggtgcttagaaccatcccactgacggtgagtggaaaaaatcccttgcttgtcagtctggttaggagatgaggtcctttcacgcgtgtcttcgtgttggtgcgcttttcacgggtcataaagatgagaggaaccagctccatgtgtctctttctggatggccatatggaacttggcatgacagtagggttgtgtgggttatttattgcttgatgaagacttggcagcgtgtactggaaattcaagcaatgctgggttttatcagaaggcgcaaaggctggagttgagattctggctgggcctggatttggtttgggcagtttatctgacctccctgggccccagctggctctgcatagcaagtagggtagcatctactcaaagtcccggccacagccgtggactggcactggcccaggcgagctctcagtaagtgggaactcacaggttcagaagatgctgtgggcctcaggggcttccacctccagggaggtgctctcagaagaagggcctgatgggctcaccacatcgtggagaagataccccggctcagtctcagtcagttccccaagcgcataggtgttcgggaagtggcctgcagacagctcctccatgccttgaaagcagaagtagccccctcctgtttccctgtcccagttgggtgaagcatgggagcctgctgggacagtcccaggcgtgccgtcacgcaggggcaggccgtccatcggtctcgcgggactctggctgcgggtggctgaggacacctggcctcatgggagacggtgccagggtccctggagtgaggtgggtctcctccccatggctgtcactcctcagcagattggtgtgggcgggtgtgcgtttaggaacctgtgagctgagacattgtccagctagcgtcaggccaaaagcaaccaaggctttgagaaatccacctggccctgccgagcctgtttctggctgtggaatgggatttgccccagcgccaggtgtctgggaatcacaggcctccgtgtgtgaaggtgccagttgcacgggctgtgaccgtccctccacgtgcttgtatctcctgctcactgtgcatgttgagcagccctcagcctcactgtcttctcctttggcaaaaagaaaggagcaagggaacaaagagagggagggaagagccagagacaggagccagggtttcctttagtctggagctctgggtgcaagatgatgtcacccacccacactcggcacaggcccagggtcggggggctgtgggtggaagtaggaatcgccacaactgtctctgagcccctccctaaagggtgaagggtgtaaggggtgggttttgatggctgtgggcttagctgtggtcagtggactcaaaggccagttggccagttagcagtgaccagagagcagagggggcctgtgtgtgttttgccccagggtcttcaggctgcctggctgcctctatccgcccccctggtgtgtccagcacccccctggggtatccagcacctgtaacctgtagccccgcttctcagtccaggcctgttccagggcccccccggggtatcaagcacctgtagcctgtagccccacttctcagtccaggcctgtgtaaaacctggccccgggttgggttttgggatccctgcacccctccatccccaaccccccacagctgggaccctggctcagctagcaaaggttctgcgtgtttaaggagctgggtgggccccagagctcaagccgtgggctcattgcaggcggcagccagtgattagtgctgaaatccgactttcccagccagacatgaaagtgccgccagcgcctgggcaggtcacgctgcatcacgggattcggggcaaggccctagggcgagttcacagaagcacatgacctgagccacacaggagagcctaacgggcacttctgaccctttttccttgggtcacagacctctttcataatccagcagaatgtgcagaatcttgcccaggaatgtgtaccagccgccttcacacagaagggtgggctgtgcagacccccgagggcccaggccagggtgagagccaccccctggagaggggtgtccaaggtagggcacacgcttgcaccacctcttggcacctcttggccaccactttccactccagcctttgaagccagtgataatccccaatttacagctggggaaactgaggcaggagcaagccaggagccaggggccacagtgcccacctctacactgaggccaccgtttgtcttcaggcataggggagcacacagccacgcctggggagtctggtgggtgccaggggtctggggaggtgtcagcaagactgggtggcccagtcggcccaggtaaggacacaggtgggtcagaggctcatctgtgttccccagcaacccctaggggctcttcgcgctcctccacccttctccatccttcccagactcacatccaggtatcctggacagccacagggttctgctccccagtaggcctggccctccctggagcatcacctggatggctggccatgggcaggccttgcctggcccgtctgcagggacagggcatgtgtatgcacgcagattggtactgtgtgcccgcgcgctccccagaggccctgtggcagcacccccttcctgccgctgcccttttccaacaggagggcccccccgcagcgtctccttccctgattgtggccaaatcctgaactctccctctggaaggcggaccctccggggtggccacagctcgtgccctccgggagcgtgggaggcgtctctttctctgcatccctggccgtcagaccgccccaggtggggaccattctctggcattgcccgcccctcccctgccctaggatttgcccactatgtgaggaatgagcaccaacctcctattccgggccttggagcgtgacgcccgcaaactcgatccctgctgagtcatcctgacctcggggtgggccagcatctgtcactgctgagacactatatgtgtgagctgcttgttaacgagaaagctagactctgtaaaatatttgaagagatttatccggagttaaatgtgaggaccaaggcctggaggccctgaggacatgtgccccagggggtgggccacagctggagttcataccttgtacaaggacagaagttacaggcagacatcagtcagtatgtgaaaggtatttgttggttctgccgagaaaggcgggacaactccaaggtggggatgggcttcctggtcacaagtgggttcaaagatttctttattctttatatatatatatatatatattttttttttttttgagatgcttttgttactcaggctggagtgcagtggcgtgatctcagttcactgcaacctccgcctcctgggttcaagtgattctcctgccttagcttcccgagtagctggaactacaggcatgcaccaccatgcccagctaattttgtgtttttagtagagacaggggtttcaccatgttggtcaggctggttttgaactcctaatctcaggtgatccgcccaccttggcttcccaaagtgctgggattacaggcatgggccaccgtgcctggcaaaagattttctgattcacaattggttgaaagagttattagctaaagacctggaatcaatagaaaggagtatctgggtaagacaggaggttgtggagaccaatattgtgttttgttttgttttgtttttgtcacccaggctggagtgcagtggcatgatctcggctcactgcaacctggttcaagcgattctcctgcctcagcctcccaagtagctgggattgcaggtgcctgccaccaccatgcctagctaattttgtatttttagtagagatggggtttctccatgtcggtcggcctggtctcgaactcctgacctcgtgatctgcccacctcagcctcccaaagtgctgagattacaggcatgaggcactgagccaggccaagatctgtgtttgaatgttagtgctggtcagctgtacctgaattccagagggagggggtataacaaggcctgtgtgacccttcttcccatcatgacctgagctcgtttttcaggttaactttggaatatccctttggccaataggaggggtcccttcagtcagttagggggcttagaattttatttttggtgtacgtgctcaaactgcagctgctacaaaaccaaggccacggtgaccctggggccagtccagctttgtccctgtgctctcgagctgctggaggccaatgcaggattctgcccacagctcacatgtgtggcttcagagcctgggagttcttggggctgtgtcttcacctggtaccgtgtaggggccctgtgagctgagtcaactggaagagcccagagcctctgcagaaggcctgagcagggcccgggcactgtccctggagctctgagtccctcaagctgtgtggcccgcagccaggcgcttgacttctctggcgtttgcttcagagctgggagcctggggtggcgtaggtctttggcaggggtcaggtaggggaggggccagccaggaatcaaacatccctgacaggtgagggggcaggtgaggagggcagggcaggagcccctgtagcacttgtgcagcagcatctggaccggtgcaagccctgagatggcttcaggtcctgctcagagctaagggctccctgtcaccagggattcttccatcactgcacctgcagagcccattgggattggggagaggccctggccttagcttggaacagctgtatccgcctgtcgggtgtgcaggctgtgcactggttaagcctgagcgcagagtctgttcaacgagttcattgtgtggtatttgcttccgcttgctgttgagttggactggcctggatgctggccaggagcccaagtggacttggtgcttctctttgacagccaggattgaaaagcccagtcaagtgggcagagcacgagggtgagatttaggagacctggatgtcctcactttgccgcccaggaactgctgtgtgactttcagcaagtgggacaacctttctgaactatgtttacaccagctataaaatggaggtgttggattggctgccacaagtgtcctccacctccacaataccgtaactggagcgggttttcactcctttttcttgttagcataactgttggagctatagagggtttggagtggggtgtgggtttctgggccacagatgtgtgaggctccgcacttagccagcagtggcaactccttatcactggtgcccacggcttcatctgtgccctgaagatactaatgctgcggtgactggtcagattaatggtgatgctttcatggggcgccgtaagacatgtccgcgaggtatttcacccatacaatgggaggcagtgttccagtctgttggagacaggaaagggaggctcagtccctgcgaaggaactttcccgagttcacacagcatttcagcaccgggtggcctggcttcagagtttcagagggaggggtggcccttcctgtcggtcctgggggtctcctggagtcaggacccttgggaaacccaaatccaccaggacgcttgcatcaggagaacctgaccacatgagaagctgcccttttctggttctcctgcttaccctcgacttggggtgtcggcaaatttcagagcttgccaaatctgcatcttcctggcctgtttaaaatgaatgtgtcagccccattctggacagcagctgacacctcttcccccgtgccagccaggacagtgtggttgggcgtaactcagccccggttaaaaatggaaaaaagtacaaagacatgtgttcaaggcctggtgacagaatttgaaaatgtgacaccagcctgttagtaatttgttttcacagaaacctgattcaacactgagcagacaggtggggccagggccttgggatcatctctgtgcttgcccagggacatctgtatgtctggcccaaagcgggggccttgtgctctgcagagactggacatcaaaattgagccattataagcagaccatcctggccaggcacggtggctcactccggtaatcccaacactttgggaggccaaggttggtggatcgcctgaggtcaggagttcgagaccagcccggccaacatggtgaacccttgtctcaactaaaaatacaaaaattaggtgggcgtggtggcaggtgtcggtaatcccagctactgaggcaggaggctgaggcaggaggcaggagaatcacttgatccccggaggcagaggctgcagctactcgggaagtagaggtgagagaatggcttgaactcaggaggtggaggttgcagtgagccaagatcgcaccattgcactccagcctgggcgacaagagggagacttcgtctcaaaaaaaaaaggaaacactgcctttgcttccctgccctggaactgcttcattttccttggggtttccggaccattttgacctctctctgtggccagcaatggtggggaggcgggtggatctggagccggcatgggcaggctcagcattccagcccattctggggtgaggttggccttgggtgaggacaggggtcactgggtcagacattcattttctggagcccagggcggtgacgtgtccatcagggaagcacgcgcctgtgctggggggtgctccctggaccagcagcgccggcctccctgggaccttgttctgtgcagatgtgttgtctccctctcccccgacctgcctgatcagaagctctgggtttccatcccactcccccaccactgcttttacaagtccccccaggggatgacacgggagatggtggaggctgtctatcagtggataaggtgggggctgtctatcagtggagaaggtgggggctgtctatcagtggagaaggtgggggctgtctgtcagtggagatggtgggggctatctgtcagtggagatggtgggggctgtctgtcggtggagatggtgggggctgtctgtcggtggagatggtgggggctgtctgtcggtggagatggtgggggctgtctgtcggtggagaaggtggaagcttgtactcagagcaggggatatttagacttgaaggggccagggaggaaggtactggttctactaagccccatgttcactgggcagccactaagttagggaccgtgtgtgtaccgagtggattccgacaaagaagctgtctcaggagccccagccagctgcagaggggggcccaagctccaaggctgggtgtcaggtttgccaggtgctggctccgctaggggccgcaggctgcgctgggcgggactgggctgggctggtacctgtgcccggtgtcaggccagctgtagttgcagcggtcagctgccgctctctggccctgtgcgaactgctgtgccaggtgcaccctgggggaccaggctgcctgggcttcctggaactggtgaagctgccgccacttcctctatgctctctccagcaggcaattctgggtaaacgatcttcatttgcctataaagctgcacagctcacaggccttggaccgtttctgccccagccccagcattggccctttggacagactctgaaaccgtgcgcagaacgcaccctgtcattacaaatgactcctggaggcagtccccgggggcctggcaggagcacctgtgtttctgtggggtctgaaaatgacagaccaatcgcttgaacccgggaggcggaagttgcagtgagccgagatcgagacattgccctccagcctgggcaacaagagcaaaactccatctcaaaaaaaaaaaaaaaaatcttcacaaatataatttgtaatggctgcagaaaatttcagctctgaatgtactgcatcctaatcagtttcctattgttgagcattagtatagtttccaggtgttttgtttttgttttgctattaataagtaaaactgagatgaatacttctgtatcaatcttgatccttattttagataatttccatttcattcctcccatttcttgagtgcttcctatggtcaggtgctgtgctgtgtgctgagtatggaggaggtaggctgagatagatgtgacctttgctcttgcaaagctgatatactaagggttggacagatgctaaatgtgcaaagaaacccaatacttgcagatggtgctgggtactaccaaggaaagaaatagggtatatgacagagtacctggaaagggcactggccagcttttatgggcagggaggtcaaagcaaacctgtctggagatgagacaggccaggaaaatcagggcaggggccagagtagggcaaatgtggtgcctagagcctcatttttttttttagacggattctcgccctgttgcccaggctggagtgcaatggcaggatctcggcccactgcaacctctgcctcccaggttcaagcaattctcctgccccagcttcctgagtagctgggattacagtacagcctcaaatttaaggagggactcactcacaggattgtgcaaatgcaaagttggcttttgcatgaccctgggagtaggtgcctccttaaattttgcaccctcagcaactccatcacctgtcactttgctagtcccaaccctgatgggaacaaatgcagggaaggcattccagatggcgggaacagcaagtacaaaaatccagaggccagaaaggcctggtgtgtttcaggaacagaaactcggctcccatgactgaaatggagtagggaaatcctaatggagccagagaggcagaaccaccaacaggaagaagaaaaaaatgttggaagttatgagagttgctcacgtttgattcatttgatttattttattgaaatggagtctcactctgttgcccaggctggagtgtagtggcacgatctaggctcactgcaacctccacctcctaggcttaagtgattctctcatctcagcctcccaaagtgctgggattacaggcgtgagccaccatgccccacctgaagcaatttctttgttgtcttttttttttttaacttctctcatagaaataattaaccctcaaaaacactcagtgttgacaaagggtggtgtgaggacacagaaagtatcacactatcattggcagaaacttcctggaaagcaacttaacagtctgtatccaaagacttaaaatcattaacagccttttccccaataactccacttctcggaatctatcctaaggaaatctgccacagccagagtgattttttccgtccccttaagaaatggtctcatcctgttgcccaggctggagtgcagaggcaccattatggctcaccacagcctgaaactcgtgggctcaagcgattctcccacctcagcctcccaagtaattgggatcacaggcatgcctccacatccatatgcctagttggataatattttgaccaataaagaaaaagagggccaggcgcggtggctcacgcctgtaatcccatcactttgggaggccgaggcgggcggatcacgaggtcaggagattgagaccatcctggctaacacggtgaaaccccgtctccactaaaaatacaaaaaaacaaaattagccgggcttggtggcgggcgcctgtaatcccagctactcgggaggctgaggcgggagaatggcttaaacccgggaggcagagcttgcagtgagccgagattgcgccactgcactctagcctgggcgacagagcgagactccttctcaaaaaataataataataaaataaaaaaataaaaaagaaaaagaaaggtagtaccagagattgtgtccagttgctcaagcaatttctaacttgtctaattttaaaaatttttaaatttttatacaaaattagccgggcatggtggcatgtgtctgtaatcttagctacttgggaggctgaggcaggagactcacttgaacctggaaggcagaggttgcagtgagctgaaatcacaccattgcactccagcctgggccacaagagtgaaactccgtctgaaaaaaaaaatttaatattttttttgtagagatgggggtctcactatgttgctcaggctggcctataactcccaggctcaaggatcttccagtctcagcctcccatcactggaattacaggcatgaatcacttcatctaaatgatttttttttttttttttgagacagtcttgctctgtcacccaggccggagttcagtggcacgatctcggctcactacaacctctggctcctgggttcaagcaatcctcatgcctcagcttccccaaatagctgggactacaggcgtgcgccaccatgcctggttaatttttgtatttttttgtagagacggggtttcaccatatttgtcaggctggtctcttgacctcaagtgatccacccacctcggcctcccaaagtgctgggattacaggagtcagccatccatggtgccccgcgttttctctttcttcttctccctccctccctaccctccgcagcccagcctggagtgcagtggcaggatcataggtcactgcagcctccacccgctggactcaagtcatcctcctgcctcaccctcctgagttcctgggaccacaggcacgcgctaccacgccgggtaatttttgtaatttttgtagtccccatcatttagaactggcaagatcctcccttagtgagggattggtggccataagcaaggagcccaaggtggaggggatatgcatgtgtgtggaggtgtcaactcctcgtaatcttcaagtacttttggtaacaatttttaattgcacaagcgatatataaagacgttttctttgcaacataaaatgataggttaagactccttatgcagataaggtttaggcacttgtttaaggagcatcctggcccaccttttaaaaaatgtgtatgcattcacgttatgcatcagatgctttagggaatttttttccctggggcatggggcatgtcatggggtagacagtcaggtacgtctcctctacccagctgattctctttttttttggagatggagtcttgctctgtcgcccaggctggagtgcagtggagcgatctctgctcactgggagctccgcctcccgggtttacgctattctcctgcctcagcctccggagtagctgggactacaggcgcccgccaccacgcccggctaattttttgtatttttagtagagacggggtttcactgtgttagccaggatggtctcgatctcctgacctcgagatctgcccgcctcggcctcccaaagtgctgggattacaggtgtgatccaccgcgcccggccttctctctttcttttctccttttctttcctttcctccctcctttccttccttcctccctccctccttccctccctccctcgtttccttccttccttcctttttcttccctccctgctttctctctctctctctcttatatttttttgagacagagtttcactcttgttctccaggctggactgcaatggtctgatcttggctcactgcaacctcggcctattgggttcaagcgattcccctgcctcagcctcccaagtagctgggattacaggcgccctccaccatgcccggctaatttttgtatttttagtagaggcggggtttctccatgttggccaggctggtctggaactcctcacctcagatgatccgcccacctcggcctcccaaagtgctgggattacaggcgtgacccaccgcgcctagcccccagcttctttcaccagcagaaggcgggcaagcctcagggtgagaggacttcaaagcacatttcacattgcagaggacagggtttggtggtcgtgggtactcccttcccttccatcgtttagtttttttcattgggaagaaatggtaaaaggtgctaggactcgatgggcacatttcaggtggaggttgggaaggtggatatccacctgtcgatctgactattttcactttccaccccgccccgtagaaagtgggaaaactggcacacgtgaatccaagggcgcgcctgtgtgcgcgcgcaccccagggcaacagcccgccccccccccccccccccaccgcaggtccttgattggacgcctgtttacacctgactgcctggccctccggtgctttccgggaagcatttgggagaaaagtgtgtggccgcagtagtggagatcccgtcttaggattcgtcaccgctacgcccagacctcttcgccgtccaagagcctggggccgtggggggcggggcggcctgctatcggccccgccccgccgacaggacccgcctctctccgcaggcacggcggggccgaccccgcctctcgctcccagcatgccgtgcgacagcggcggcgcggcgagcggagccgggaggcggggaagcagtggccgtgtgagcgtgaggagctgccgccaccgcctgttcctcgtcgtcctcctcctcgggggccccggcgacgtgggccgcgcagggccctggaagagacgtcgcctccccttcatccgcctctctctcaccgcgccgctcccgcctcctcgtcctgtgctgcgggctcaggcggaacccgaaacggtcgtcctcttcccccgcccgccgccgcctcctcctcctcctccttctcggcttccttctcagccccgggccggagcggggtgttggcggcggccggttcgggtggcgactcgcgcttctctgggcggcggcgcttggccatatcgtgtcggggaaggtaatgagccgcagagccccggggtctcggctgagcggcggcggcggcggcggcggcggcggcggcaccaacggcaccaactattcgcggagctggaatgactggcaacccaggtgggtgaccggcccgggaccccgccccgacctcccgggctccgcctcgggcgggcggaggcctagggccgcggggctgggaggcgcggcctaggccctccacccccgggagccgggcgcggcttcctgggtctcctccgccccggctgggggaggaaggccgcggggaggcgaggcctaagtgcctctcccctccctgcttgttcagcccggggctgaagccgagacccggggctcccggcggtggcactggcctagggtcgggaccaggaggtgagaaagaggcgggggtgggggggcggggggcattccacttaccgcttccccctgaccccgagttgggagattctgagagtacaggaccctccctgttactcattcactttctcggttccccagtctttcagccgccacgtgagagctcttctaacctctgttcctttctgtgacccccacgtggtaatattgaaaaaaccaaaacaaaactccagctaaggcattgctctgactttaggcagaacattcattagtggagcgtgagatgagattgtgtgactgttgatgggatcgacctactctggtcttgggcgatggaagttttccctaagtgcaaggccggttactctggtgaatcgtaattcatacctggacacttgagtgaactctgggcacccacttagaagtctagagaatttcctcttttatggaggatttgatgtcagaccgttttggggcttagttagatttgaatatattaggaacattaactttttaaataaatgtaatttcctgtctttttgatcaatggggggagggcagctgtgcctaatttaggattgatttattctaacctctcttactaaataaatgcttgtattcagagtctgtttggaatttaacccaatgcttagaactccttaaatatacagaaatatattttaggggtaattgattcatggaactctcctactttggagcacaattgtattataattgtccggaaactggccagataatgtagaacgcacaagttgttgagaagcccttttgtttcctgatagttacatgtaattccagcagtatttggaaataatttgctaagatgttagaatgtaacatttgaagactcgttagaaaaatcaataaaattatctttggctaatgggtagtacacatcttagtctgtttaatatgcctttccaaaaaaaactgtgtctgttgagaattggtgtatataactagatgactttaataattagtgcctgagtctagaattgagatgtttagtcgtaaaaaaaaatattgttcgataaacagcgttgacttgtcttgtaccacttaagagtttgtgagtgctttaaataaaattagttgattaagtattttttttcctatgattgacatgcttagttttgcctttttattgaaatgtgtgaaatttgattttctggcatctaacaaattaggtggtaaatgaatgacaatggattttctattatttttcagtattgtgatcagtataagtatataagagaatttagtaaccttttagaagaataaagtgcccttcccaaatagtcctacagcttttggaaaagtgtaaattgtagtttgtagttctaaataaatagagaagagtcgcagccacgtgctagggccagctgacttcattgctgacaggtatgaagccaaatggcttatgtagttatggaatatgtacatgagctattaataaatattatccatgttgtttctttcaagtgctttatttcttggctctggggaggggcgatgggggaagggaggagcttacaagaaagcttgcaaggtttctttgaagctgtgctttttgtaggaaagtttcaggatgtaacgccttggtagacgatactgtgatacatttggttacaggcaataacagtttgttaggatgttggaaaaatttgattttctcctgttgtagagggaacagggaagtgtggacataccccatagcataacttgatttgttgctaagattgtcatagctgatttgttagtcaataaaaatacctggggtgtttgccaagtcataaatttttattagttaaatttgaggtgattctgtcccctattcagaaagatgacagactccaggtaactgacggaacagatcttgatcttgcttcttgcttaaatgaaggtttagaacatcttcagatgcaggcacatttattattgttcatctgaataattttggtgaaaatttttttgcctcttatgtaccattttgtccctggtgttttggttctgttttccttgatgtaggctttttttttttttttttttttgtcttcctgagatggagtcttgctctgtctcccaggctggagtgcagtggtgtaatctcgactcactgcagcccctgcctcccggttacagggaaaaattctcctgcctcagcctcctgagtagctgggattacaggcgtccagctaatttttgtatttttagtagagacgagattccaccatgttggccggcctgttctcggactcctgactcaggtgatccgcctgctttggcctcccaaagtgctgggattacaggtgtaagtcatcgcactcagccgatttaggcttttgaaaaagcaatacttgttgatttcttttagtgttagtttgccagttggtgtggaaaatgactgttgagacaattttgaccacacatgatacttcacacatactgacaggaagtgttccaggtggctgaatatgtgaatgtcatatggcaagagagcaaacccgtgttccatagaagcatacctccaacagtaagcatttatatggcactggcttatagtcttccttttcattcactgtgctctcagtcaactcttctgtcaatttttttgagacggtcttgctgtgtcacccaggctggagtgcagcggcacagatacttggcttactgcagtctcgacctcccaggctcaagcctcctgcctcagcatccacaagtagctggggctacaggcgcttgccaacagcccggctcatttttgtattttttgtagagatggggttttcaccacgttgcccaggctggtcttgaacccctgaacgcaagcaatctgcccaccttcagcctcccaaagtgttgagattacaggtgtgagccactgcacccgacatttaagaatggttaagcaggccgggggcagtggctcacgcctgtaatcccagcactttgggaggctgaggtgggtggatcacctgaggtcaggagttcgagaccagcctggccaaccgacatggtgaaacccccgtctctactaaaaaaaaataaataaataaattagcgggatgtggtggtgcatgcctgtaatcccagttactcgggaggctgaggcaggagaatcacttgaacctgagaggcagaggttgtagtgagcgacatcacaccactgcactccagcctgggcagcagagcaagactccttctcaaaaaaaataaaaagttaaaaaaagaatggttaaacaaatgagtgttttaggtcagttgtattatttgaaatctgtgggttcctcaagcgtaaagttgagaaggttttgggaaccactggatgcctctggtttttttcatatgaagaaacaggggtggtggcttcttagaacaaagggatatctgacctatggaggtggccctctttactcctcttccctaaaaaaatgacctatcattgccaatagctaaagtctgtcattttttccaccttagtttggaagataatcttctagtatcaatcaagacagagatcagaatgatgtgttttaaaattaaatgtgtaattcataattgtacattttaatattctaaagtgacattgattaatttgacattggagtcaaatagattgattaattcaacaaagaagagaaggcattcaagtcaacagaaaacaagtagattttacttctccactcggggtattaggacattaattgtgtaattggtcttacttgtttagtagtagatctatattgagtgtcttactgtgcccaaacttaggatctttctatatttctaaaaggatgaaactgtataataaaaacaccttccaattttggtagattgtagacagatcagagtattcaaaagtacacacatcttctctattgtgaaagaccaaaaaatggaaatgtgttgtgaaattagaaaagctgtatactagtatgtctgatgttgtgagaagctggatttttgaaaccagagttgtctattcagccttttatcagtctgtactaagtttgatgtccataggtacataatatagggagatacataaaggataaaattaagtgaagttacatattttatacctattaggtaggtgcaaaagtaattgcggttttggcaaaaaccgcagttacttccacaccagtctaatattaaatggaactagagtcaaatagaatttagcgattgccagttctgttccacagatttcaaagtacactaaggaaaatttcagcaaattgtgtatggctgttttacttgggggagagtaaaacagccataataaactaaaaaataaaaattaaaactaaaggaacatttgtttttatgtttttcttttcttttctttcctcttttttgagatatgctcttgctctgttgcccaggctggagtgcagtggtgcaatcactgctcactgcagccttgacttcctgggctctgggaatcctcccgccttagcctcctgagtagctgggaccacaggtgcataccaccacacctggctaatttatttttcctctctctctctcttttttttttgagacagagctttactttgtcgcccaggctggagtatagtggcacaatctcagctcacttgcaacctccgcctcctggttcaagtgattctcctgtctcagcctcccaagtagctgggaatacaggtgcatgccactatgcccggctaatttttgtgtttttagtggagatgggatttcaccatgttggccaggctggtcttgaactgctgacctcaggtgatccacccgcttcggcctcccaaagtgctgggattacaggcgtgagccaccacgcctggcttcctctctctttttctgaaacagagtctcgctccattgcccaggttggagtgcagtggaaccatctcagctcactgcagcctccacctcccaggctcaataagtcctcctacctcaccctcccaatagctgggaccacaggtgcatgttaccacccccagctactttattttttttttgttttctgtagagacggggttttgccatgctgcctgggctggtcttgaatacctaggctcaagtgatccttcctccttggcctcccaaagtgccaggattacaggtgtgacccaccatgcttggcacgctaattttttatttttacttttttgtagagatggggcctccccatgttgcccatgctggtgtcaaactcctactccattatgaaataagtcattccttatgaaacacttagtaattgtatctttaagttgaaccttcccctcaccccaactttttttttttttttttttttttttttttttttgagacagagttttgctcttgttgtccaggctggagcgcaatggtgcaatctcggctcactgcatcctccgcctcccaggtacaagctgttttcctgtctcagcctcccaagtagatcagattacaggcatgtgccaccacacccggctaatttttttatatttagtagagatggggtttcaccatgttaggctggtcgtgaactcctgacctcaggtgatccacctgcctcggcctcccaaagtgctgggattacaggtgtgtgccactgcaccccgcctttttttttaaagacatagtttcactctgtctcccagggtggagtgcagtggcacaatcttggctcagtacaacctccacctcctgggttcaagtgattcatgtgcctctgcctcccgagtagctgggactacaggcgcatgtcaccaggcccgtctaatttttgtattagagacagggtttcgccatgttggccaggctggtctcgaactcctgacctcgagttcccaccttggcttctcaaagtgctgggattacagaagtgagacaccgtgcctggacccgccaacccattttgttttgattcctttataaattagtataatggaaggtttttttgtttgttttttataacaggtaatgaaatactctaattcagtaaatattgatgcttctggggagatgtgtgtgtgtgtgtgtgtgtatgtgtgtgtgtgtgtgtgtgtgtatgtatataataaatttttttttttttttttaggatggagtgtcactctgtcgcccaggctagagtgcagtggtgcaatctcggctcactgccagctccacctcctgggttcacgccattctcctgcctcagcctcccgagtagctgggattgcaggtgcccgccaccacgcctggctaattttttgtatttttagtagagatagggtttcaccgtgttagccaggatggtctcgatctcctgacctcgtgatccgcccgcctcggcctcccaaagtgctgggattacaggtgagagccactgtgcccggcgaagcagcgtctctttttaaggttgtaaggtagcttgggttagaaataaaggcagagagccactccatacctgtagttctagctactggggaggctaagaccagaggaatctcttgagcccaggagttcaaggctgcagtgagctgtaatcacacactgcactacaacgtgggcaacatagagtgagacctaataaataaataaataaataaataaacaaataaatgcaaggagaaagtcaggaacttggtgcatttaggtgtacaattagttggcataaacaatttttttttttgagatggagtttctctcttgttgcccaggctggagtgcagtggggcagtctcggctcactgaaacctctgcctcctgggttcaagtgattctcctgcctcagcctcccgagtagctgggattacaggtgcccgccaccacggccagctaatttttgtatttttaacagatggggttttgccatattggccaggctgaccttgaactcctgacctcaagtgatccgtccacctcagcctcccaaagtgctgggattacaggcgtgagccactatgccagccaagaatttttaaaaaaggagtttcattcagcccacctcattcctctgcagggcacctgtgtgcagggcaaaactgctcaaccctactcagaagccctgtgaaagctgctgaaaggatgagcagattgaggcctgaactgtatcttggatttagcagcctggaggtcataatggattttgccaagagtgatggggcagaaattggaccagtgtgtgttaaggagctagaagaagtgaagaaatgggagaggggaatctagacaactttagtttggctgcagcaagtaaaggcagattgtttgatggagggacatgtgggattgatggagtttttcctttttatatgtttttgtatttttcaatggaatacattagaaagtgttgcatgtttatgggggggatttagttcagtgggaaaagtatttgaaaagttacagtaaggtggaagtagatggaatcctcagtaaggtctagaatcgggtacaggtattttatggtatcttcctcaccccaccccgagacggagtttcgctcttattattgcccaggctctggagtgcagtggtgcagtcttggctcactgcaacctccacctcctgggttcaagcgattctcctgcctcagtctcccatgtagctgagattacaggtgcgcaccaccacacccagctaatttttgtatttttagtagagatgaggtttcaccattttggccaggctggtgtccaactcctgacatcaagtgatccacccgccttggcctcccaaagtgcggggattacaggcgtgagccactgtgcccagctggtaccttttttcttgttggtgaagtagaatgtgtgtatggggaggggaggtgataggatattttggaatttgaagagaatgggaatgtctggatagtgcatgtatagaatgggaagtaaacactggaggacctgggagtgtggtgcttattgatggatcgttgggtttatccaggattggggttttgccagatgggtgtgatgagaatcttaagagttaagggtataggcaagagtgttgttgaaatgatacacaatgaaatctaagctggttaaagaagtgaagaaggggccgggcacgttggctcacgcctgtaattccaacactttgggaggccgaggcgggtggatcccttgaggtcaggagttcgagaccagcctggccaacatggtgaaaccccgtctctactaaaaatacaaaaattagccgggtgtggtagcaggggcctgtaatctcagctacttgggaggctgaggcaggagaatcgcttgaacctggaggtggaggttgcagtgagccagtattgcaccactatactccagcctgggcaacaaagtcagagtctgtctcaaaaaaaaaaaaaaaaaatgaagtgaagaaggaggagaatacttggattgggataaagtagaaagagtcactggattaaagttaactaaaaaactcataaactttagagtggtattgagaaattgtagggtgaactgaaaaaggctcatgggattttagagccaagaaggccttgagtggcagttcctaccttagtaggaatagcttcagtggtgtgttgcaggtggaacccagattaaagtgggttaaaaagtaaatgaaggcaaggaagataaatttttcaacaggtttgtctgtgaagagtccaggctattagattgatagagggagaaaggcagttaaagggtttttttgttttttgttttttttgagtcagagtctcacactgttgcccggtctggagtgcaatggcgtgacctcggctcactgcaacctccgcctccggggttcaagtagttctcctgcctcagcctcccaactagctgggaatacaggcgcccaccaccacacccggctaattttttgtatttttagtagagacggggtttcactatgttgcccaggctggtctcaaactcctgacctcatgatctgcctgcctcgccctcccaaagtgctgggattacaggcgtgagccaccgtgcccggccttattttcttaatttttaaatttattttattattattatgattatttttgagatggagtctctctgccgcccaggctgaagcgcaatggtgcaatctcggctcactgcaacctctgcctcccggattcgagcgattctcctgcctcagcctcctgagtagctgggattgcaggcgcccgccaccacgcctggctgatatttgtatatttagtagagacggggtttcactacattgggcaggctggtcttgaactcctgacctcatgatccacccaccttggcctcccaaagtgctgggattaccagcgtgagccaccgcacccggcctttagtttttttttttgagacggagtctcgctctgtcaccaggctggagtgtagtggcacgatcttggctcactgcaagctctgcctcccgggttcaaatgattcccctgcctcagcctcccaagtagctgggactacaggtgcgtgccaccacgcacaggtaattttattttttctattttagtagagacggggtttcaccgtgttggccagggtggtctcaatctcctgaccttatgatctgcctgccttcgcctcccaaagtgctgggattacaggcatgagccaccgtgcccggccattttttgtttttgtttttgttttttttaaagtaagacttttgagagtgctcatatgttgatgatgtgataagcagtagtaaaatgggagattttgcaacgtacaaaagaaacaggccgggtgcagtggctcaagcctgtaatcccagcactttggggaggccaaggtgggcggatcacgaggtcaggagatcgagaccatcctggctaacatggtgaaaccccgtctctactaaaaatacaaaaaattagccgggcgtggtggtgggcgcctgtagtcccagctactcgggaggctgaggcaggagaatggcgtgaatccgggaggcagcgagtcgagatcacgccactgcacttcagcctgggcgacagagcgagactacatctcaaaaaaaaaaagacaagacataccttggaaaatggggggaatagacagatgatttctatggataggaggtttatttgttccattatgcgaagatgatgggaagaaaagctgtatgtgcagatgcaggtgaatttgtggatatattagaaggaagatgacaggcagtgatggagtgttgaagagctcaaacattagacagtactgggtctgagttctgactctgccttttgcaagctgtgcaaccataggccagttatgaaaccttagttatcaagttataactaataggattgtgttgaacacgaaatgacatgataaacatatgtaaactgcttggatcagttgcccactagctcttgttaggagctaaaatgttagctcttgctgagggtgctgtcaaatggcttctgtttctcatggagcagaaatctataaggtcatccactggtagtggtgggagaaggaaaaaggtgcagaaagttttacagatgttttggaaaggaaagaaacctggtgagggaaatgtgggcagcatcagaggcccacttgaagtcagagaaaaggagcattggggcatggaggtgagggggtactttcttcagcttttctctgaagacaattgtgcatgtgaaacaagggttaaaatcagatctattgccctcctggatttattggcttcgtttgctctttctggctaatttgattggagttctgaaagtagagaatattagaggttccttggaaggaaaataagcaacactgaagtcaaatctttatcatgtttgctggaaatgttattaaaaaacaaaatttatggccgggtgcagtggcttatgcctgtaatcccaaccctttgggaggctgaggtgagtggatcacttgagctcaggagtgcgagaccagcttgggcaacattttgggaatgttgtagagaatgggacaaaaaaatacaaaagttgctgggcgtggtggagtaagcctgtggtctcaactacttgggaggctgatgtgggaggtttgcttgagctcggattgcaccactgcactctagcctgggcgacagtgtgagaccctttttcaaaacaaacaagcaactttttttgagctacagtatatttaatggttttaaatatgagtgcagagtaagagggagtccagtccataagatgacccttgcttctaatactagttgcaagtttgggggttcccaagaccactcttttttttttttgagacagggcctctctctgtcaccccggtgagagtgcagtggcatgatcacggctcactgcgccctgaactcctccctcccaggttcaggcagtcctcctacctcagccacctgagttgctggatctgtgggcacacaccacctcgcctggctagtttttctatattttttagagacagtttcaccatattgccaggctggtctcaaactcctgagctgaagtgatccgcctgcctgggcctcccgaagtgctgggattacaggcttgagtcactgtgcctggccaagaccactcttaggttggatgatttgccaggaggactcactagaactcattgaaagctctcatacccgtggttagagtttattgcagtttagggattcagattagaacgagccaagggtagaggtgcatagggcagagttcggggaagttccaaatgttggagtttctaattgtcctgtccctgtagagttgtgaaaaatgacaccttcctggtggcactggtgtgcgaccatactcatggattattgccaaccagggaagctcactctattttttatgtccagcgtttttactggggttccatggttgcatgcccatgtggctaaccttagtctccagccccactggaggccaagctgatccatgtgactcaaagcccccaccataagccacattattagactgtgctgtggcctaaagcccccagatgaacaaggacactttcccccaccgccgcccccccccctttttttttggagatagtcttgctctgttgcccaggctggagtgcagtggcatgatctcagctcactgaaacctcagcctcctgagtagctgggattattacaggtgcccgtcaccatgcctggctaatttttgtatttttagtagagacaggtttcaccatgctggccaggctggtctcagaatcctgacctcaagcgatctgcccgccttggcctcccaaagtgctgggattacaggtgtgagccactgctcctggccaggaccctcttattaggtatgacatttcaagagtttagagattaccttccagaattcacaggtaaaagccagacctctccttggtgaagatacaattctttacaattttacaatagttaaatatattttatcagtctatattggctgtttagttgacagacagttaaaaattggtgacagtccagatgtggtcactcatgcttctaatcctagcattttgggaggctgaggtgggaggattgcttgagtccaggaatttgagagcagcctgagcaacataatcagacacctgtctccaaaaaacataaaaataaaaaattagctaaatggagtggcatgcacctgtggtcccagctgtttgagaggctgaacccatgaggtcgaggctgcacccatgaggtcgaggctgcagtgagctatggtcatgccagtgcactccagcctgggtgacagagtgagaccctgtctcaaaaaaggaaacaaatcacccataaatggataattaagatttggttattatagacacttaatacttaggtagctaaggtagttttaccaataaattatagtaatttaatatttcagtattgcaaaactgatgcatactcatttacaattttgacatggaatggttctgttttgttttattaaatttgaacttaaagttctctgcaagaagagatttgtataataaattccctgagcctcccaaattaatattttagccatagactcatatttagagcagtgtttctaatgtaatgatacaaggcccagggttattcatagtttcaccctttctcttattcctcattaaagcatgtttgaatccaggtaagaggcattacaggggaaaaccttgaatttatttttgaagggtaaatcatttccaagtggtattaaccattagtatggaaagcaacatatcctataactgctctgtgacagtgagactatctttgctgctttagagaataagtacattcctacttcattggctttagtgcaaatctcatttcctggtttatatccattacaaattagatctcaccatgagagcaaaatcccttaataaacctaggtaaaagcaatttgaagtaatatgatgcttattccagtgtcaccactaggtgtggtgtttgcatcaagtcattttggggtgctttatggaattgcttcctagtagggaattccctgacttcacactttccagagacgacgctctctctctttttctctctaatacttacaagaatggactgcaaggctacatttagtcaggcgataccatccccagcacatggtggcttgttggtgtgaggtctaaggattccggtcatttgaaacgaatggcctcctagatttgtggcatttttctgtatattgagaataggtaactaaaataagtggtaactatatttgcatgtgatttgtatgttatagttaacatttaaattctcttatgtactaaaatttttttggttgccacagtaagcctctttatcctgtaaggcacagagtgtctttccacctcaatttttgctttaatgtatgaaccctaatgggaccatagttcaactaaaggcacctaactcatgaatgatatttgctccatgtttgaacaacaaatgttttaacccactgtcttcactaatattgtaactactgtcttacagattgacttgatgcacaacatcacaaaggcgatttttgaggtatgagctttagaaacttacctctcatgtggcatgtacatcaggctttaacttcagtttgatcgttttggggaaatttatgcatttctttttttttctctccatgatatttttagaatattaaaggggctgtagaggtatttttggatccttgctaggattcttagacttaacagatagattttcttttttcactaaattgagacactaattctggcagatgatatccctttcagctcttctaactaactagtcttaacattcatgcctgcttcttggagttcaaatctgcagtttctattttgtggctttgattgcctcattttaagtgctcatttcccttctttaacagttctctatttattggactgggatgatcttgttggtgctaacagcctgacattgacattttttgaaaccaaagcagtcaagattgtataaaaatagaaatttcttataaatgctaaaccattttgtgcttttaggttcagaatgcttacaacctgagttctggttggggatgctttgatcaatttgtattaaaataatttggcaactagggagttttgaggtatttctgagacggtggctctattccagttttttttgttatatttctgaaaacagattttttttgggaaaaaaatctcagtgttcataacttaggggatttagaaaccttatttctaaccaacggggaagctgctcctggttttacagtttagtttgaaatcagatgcttcctagttggaaacacattgttggtagcaacagattacctgctttcttcagtgaagtatttaagttgctctatattgactgtaaaaacttgttttgattatattcatatactcatgaactgtttgtacattgtcttttagactggaaactttgagtttattttgtattatggtcataacaacttttaacataccctgcaaactaagtgtttctttataattcattatcttatttcagcctcacaacaaccttacatgttagataggtatcatcctcattttatgcaagagacaaccaaggcttggagatcaagtaatttgtgcaaaagcacacatacttttcagtgctggagctgggatttgagcccagatctttttttaacttgtattctctgctgccttatggtactactgtgtcaccagaaaatgatacaaacatttaactcttaatagtaaaggtagtgtaggagataagtaaacatgatgaaaacaggaagtgaagatacgtttaaatattggcagacttcagttatctttgtgtttctgaattagtcaagtgcttattttattcgctcatctaataagagcttactgtggcatacatataaagttcaaaccctgtcagaaaagattataagctctcttaacgtttcagtctcctttcagaaagtaatggtatgctatgatttatatagacgcatgttaagtgtgctatttttaggtacataaggaatgtcttttcattagtttaaaaaagttatggtccattgagttaatattttaatgcttatagacttagtatactcagaaaatattctcatacatttttcttgaaattccatagattttattttcccttatgttcgaagtacttagctttatgaataagtgaactctgaatattagaagatactccttatggagccttagtcattttagtatgctaggttttgaatttcatgaagtttcagattgagatcctttataagtaatgacttgtaccagttagatatccaagtttaattggacctattgtctgcattctgtattaacagtgattgcagtaagtgcagatcaaggtgtccaactgattgagctcatgcaaagttttatgtttagtatttttgggagcaaggaaagactaataaactctaaacgaaatatatacagtatacaaacactgctgtcacttttacaccatagagggaggggcaaagcgtagaggaataggttagtttctggccttgccagtgtcctaaacttttctaaaagattcaggttctaaaaggttgagaaagcatttttagtaaatatcatagaagtgattttctttttctttttctttttttttttcctcaaaattgttcctctcaggagaaaatcagtaggggaagaacttacttggatttttcatatgctataacagattattttgttgtcttctttcttgatagtttatgattgatggctgaaagagtaacactcatgagaagtcttgtaactcagctctgttttacttatgaggcagttgaagcatagagcagatacttagatgaggacacacttttacccttggctgtaccctacttgtttactaataagcatcaggtattattctaaacagtacctgaattttaaatagattacgaactacaactttctgatataactttattgcatttctgataccttttattttcttaaaatgtcttcttttttactttttaaaattttgattgctactctttacaattaaggcatcttcaatggggtcttcaatactacagtacctaatcagtacttagaaaataacttggtaagacattgcccgtccctgacatgctgccagtgttttttatttttatgacaggaaaggctgaaatgttttgactgattaaccgtctccatgggggagaatttagaaagaattattcttattatcaagtcatgtgaggagaacactggaccagagtaaccaattgtcctgttttgcctgggacaggagactttcaatgctaaaaccagcaaagtcaccctaatcccagtagttattcatatttctgaatgggtctttagaacagtagaagagagtgaaaagttggcatttcatccattgagactctcttcccagtgaaagacttcttattagacggctgagtgcttacatataatatatagtgcatattacactaaatacaatagtaatggttaaatgtaaaatttgggagaagagaggcttgtttaaagaaagatttatttatgttatttaaagttctaatcttaaacttttctctttttatagaactgatagtgcatcagccgacccaggtaatttaaaatattcttcatccagagatagaggtggttcttcctcttacggactgcaaccttcaaattcagctgtggtgtctcggcaaaggcacgatgataccagagtccacgctgacatacagaatgacgaaaagggtatatatattttcttattgctacaagcatgttttttgaacctacctatcccaccttcctgccttcttacacccccaactttctcactttcttctaatatatttaaaatatgaataacaaatgcagtgttatttctgaaaacttcataggacgtttatccactttattatttttaaaatttaaaatttttccatacataattcatcaatgcagttttcttacaaaaaagatacaatactatttttgtttttattttcaaaaatatttagctaaggttgaagttcctcttggctactgtctctaaacttcaagaaagttttaaaacaaggtgcaaaatttgatttaatttagttttcatttctttgcttattttccaatgaagggatcaaaataaaattaatttaacttcaaaggtgtattaaaagaaatgaaaatgattttcaaggcagacagtacaggaaaaaggtaggagaagcaaaggctggttgagctgcagattgagtcataagatcctgagctatcaggaaattgactgaatgaaacgaacaatcatatttaaatgacgtacacatggctgtttgtaggtggctacggtgtcaatgggggatctggggaaaatacttatggtcggaagtcattggggcaagagctgagggttaacaatgtgaccagccctgagttcaccagtgttcagcatggcagttgtgctttagccaccaaagacatgaggaaatcacagggtaaggctgggaaaacggggaccaatcacatacaccttccaaagacttgtatctcctcttattctggatgcctcttactaatgccttgcaaaggcataagttgattagtctactgtgcaggtaaaaattgtttacattcttttcctgtgaattgttaatttcccactagaaaggctatagtacattttaaaagagaattctcttaaaacaagattagaagactggataagatcttacagaaaaggtttacccaattatcgtggatattgaatgtatagtgcatagtaggctcctactacagcaagtccttgaactcttgggcctgtggaggatatagatatatgtagagagggggtacttttctgtctttttttttttttttctctcttttaagttcagggtacatgtgcaggatgtacaggtttgttatgtaggtaaacgtgtgccatggtagtttgctgcacagatcatctcatcatctaggtattaaacccagcatccattaagctattcttgctgatgctctccttccccccgccccctagagtgggtacttttctggtttttttgttgttgttgttttcaatatatttttttgagacagagtcttgctctgtcacccaggctggagcgcagtgctgcaatctctgctcactgcaacctccgcctcccaggttcaagtgattctcatgcctcagcctcccaagtagctgggattacaggtgcataccaccatacccagctgatttttgcatttttagtggagacagggtttcaccatgttggccaggctggtctcgaactcctgacctcaagtgatcacacgtgctcattacaggcgtgagccaccgggccctgccttgagtgggcacttttctaaagttaaatacactgatagcatttctgccttatgacatagcctcactgtataggtgagtgccttggaagttcagaggattggccgggtgcagcggctcacgcctgtaatcccagcactttgggaggccgagacgggcagatcacgaggtcaggagatcgagaccatcctggctaacacggtgaaaccctgtctctactgaaaatacaaaaaattagctgggcgcggtggcgggcgcctgtagtcccagctactcgggaggctgaggcaggagaatggtgtgaacccgggaggcagagcttgcagtgagctgagtgcgccactgcactccagcctgggcgacagagcgagactccgtctcaaaacaacaacaacaaaaaagaaagttcagaggattagaggtaatgataatttttttccttaaagagaaacttatcggtaaagctgagttatgggctttgtcagatgtaattactttttggacgtttagtttttgactttttttttttattttttatactgtgtgtgtgcttcgtgtatcttggtgaaaatctttgtgcctgtagcttttattgttggtatataacttttaaaaaactgatttctttttatgttttcacaagtggaatgaattcaaaggctatgtatgctgtttgttaaaatagagtgtttgaagccttagacttatgatattatagaagctaaacagcgactctaaagtagttcagtagagaattcctcttcttcaaaggctcagggtcatgtagtttgctagtgacagaattgtaagtagagcctaatttcccagctggtaacttgatgacatatttggtatctgtccttattgaaatactctatgggctacggatttgtaaaaatcctattcttctctcagtcattgtagtttcttttttttttttaacttaaattcaggatacaagtgcagatttgttacagtggtaaacttgtgtcatgagggtttgtagtatagattattttatcacccaggtattaagcctggtacccattggttgtttctcttgatcctctccttcctcccaccccccaccctccaaaaggatccagtgtgtgttgttcccccttgtagttatttatttatttatgagatggagtatctccctgtcacccaggctggagtgcaatggcgcgatctcaggtcactgcagcctccacctcccagattaaagtgattctcctgcctcagcctcccgagtagctgggattacaggagcgtgccaccacgcccggctaattttttttttttttttttttttttttttgagacggagtctcgctctgtcgcccaggctggagtgcagtggcgggatctcggctcactgcaagctccgcctcccgggttcacgccattctcctgcctcagcctcccaagtagctgggactacaggcgcccgccactacgcccggctaattttttgtatttttagtagagacggggtttcaccttgttagccaggatggtctcgatctcctgacctcgtgatccgcccgcctcggcctcccaaagtgctgggattacaggcgtgagccaccgcgcccggccccggctaattttttgtatctttagtagagacgaggttccaccatgttggccaggcaggtctccaactcctgaccccgtgatctgccctcctcggcctcccaaagtgctgggattacaggtgtgagccaccatgcccagccttctggtttcttttattatcaattttttctcataccttagaaatgaaactgtcagaccctttgtgatttgttgtttacgtatgtattggctaattatggtaaatagcacagttgaaaatgttttgcaaaaattgagttttttgttttgttttgttttttgagacagtctcgctctgtcacccaggctggaatgcgctagtgtgatttcactgcaacctttgcttcccaggctaaagcgatcctcccacctcagcctcctgagtagctgggattacaggcatgtgccactgtgcccagctaatttttgtatttttcgtagagatggggttgtaccatgttgccaaggctggtctcgaactcctgtgctcaagtgatctgcctgccttggccttccaaagtgctgggtaattacaggcaagagccacctcgcccagcaaaaatctagtttttaaaggcatcgttaatatactaatagtattcactattgtttgcttgttcttgtgattaaaaaataaagggagaaaagttgtggtttgctacctttctagtggaggcatgccttgcatgtggtagatgataattagacatttgttgaactaaatgtgtgattatggctccccaaaacttcatcccagggaaatgatgataatgtgaataagaggctttcctccagtgggatacctagatgataagtagaagcctatatcctgtttttactcgattgagactttatccataccccttggaagttgtttaatttacctacacccgggctctttacctgcatgttgaaaacagtttggaatggacccaaagaaagttgttactaaggcctttcttttttctctcccagccagtcctctggaatgaggtgttcagttggcctagggttattcatttcttgtttccttcagcaaatatttttttgagggtctgttatgtgccaggcactctgctgggatttggaatacagagttgaacaaaagagcgataggacctatattccctgagcttttattgaccagtggactgtgacttttgatgtaattttatttttgagagagggtcttgctctgtcacccaggctggagtgcaatggggtgatcttggctcactgcaacctccgcctcacgggctccagtgattctcctgcctcagcctcccgagtagctgggactacaggtgcaccccaccttggctggctagtttatgtaattttttgtgtgtctgtggagacagggtttcaccatgttgcccagggtggtctcaaactcctgaactcatgtgatctacccgccttccaaagtactgggattacaggcatgagcccccataataatttaattattatttaaataatttttaattttaaaaattttaaaattattttaaaatttaaaatttcctttgcttatttatactcagtggacaacaaaatgtttatatattcacagagagatcaatgtcttattgtgatgagtctcgactgtcaaatcttcttcagaggatcacccgggaaaacgaccgagaccgaagattggctactgtaaagcagttgaaagaatttattcagcaaccagaaaataagctggtaagtatagtatgtttggaaatatgaggatttttgtgtttccataataaactaggtaatgctaccttgagtagtttaagaatggggaaagtctgtattatgatgatcaagaacttaatgctctctaatatgtaatttctttttcttcttaaagacaagatcttgctctgtcgcccaggctggagtgcagtggcacaatcatagctcactgcagtctcaaactcctggattcaagctatcctcccgctgtggcctcctgagtagctgggacttcaggcatgtgccactacacctggctgaggtggaagaatcacttgagcccaggaattcagggttgcagtgagatatgatcacacctctgcatgtcaacctgggcgacagagggagtccttgtctcttaaaacaacaacagaaatgtaacaaagtataggaagggttaaatttttttcttcactttctttacaccaattaagaacttgatatgggccaggtgtggtggctcatgcatgtaatcccagcattttgggaggccaaggtgggtggatcacctgagttcaggagttcgataccagcctgcccaacatagtgaagcccccatctctactaaaaatacaaaattagctgggtgtggtggcacatgaccgtaattccagctacatgggaggctgtggcaggagaatcgcttgaacccaggagacggaggttgcagtgagctgagatcacgccattgcactccagcctgggcgaaaagagtgaaactccatcttaaaaaaaaaaaaagaacttgacaatgagcaggagaaaattaatgaaaatggtctagtgaggcagatgacacttggatcaaagcaagtttctcctccttccaaattttattatgagtagtttcaaatatatagcaagttgaaagaatttgacattgaatctgttaaacccatcatctaatttttgtcgttaacattttaccctaaatactgccttgtcacatatctctccatctatccctccatccgtcagtcaatttttcaaatggatttcaaagtaaatgaaacaagctttttgagtttatttttttgttgatgatcacagctctatgtttccagtgggtgaatttctttcataggctgaaaggaaacatgacattcctgatacatgctcattggggagtgggaataataaagaaagtaaagtactgttgaattagaatttggagggaagacaaataaaaaagtacacaatgctattcttaaaagtataggaatttgaagtttttataaatgtgttttcttttaaaggtactagttaaacaattggatatcttggctgctgtacatgatgtgcttaatgaaaggtaagtaactaataatggttcggtttaaatgactttaaaatatatttttagaaattacttaacaatacacaagaagacaaacccactggctttgtttatgaacatttattgacattacagtgggtcttgtcatttttatctgcattaattatgtgttaattacggttgaatacaaatggaatccacttgaaaagaatatttattttttgagccggagtctcaccctgtcgctcaggctggagtgcagtggtgcgatctcagctcactgcaacctccacctcccgggttcaagtgattctcctgcctcagcctcccgagtagctgggactacaggcgtgcaccacaactgccagctaatttttgtatttttagtagagacagggtttcaccatgttggccaggctggtctggaactcctgacctcaggtgatccacccaccttagccttccaaagtgttgggattacaggcatgagccaccgtgcctggctggaatattttatttttttaatttgctagtctcactggataactgagtcttgacttatggaatggcataaactcttgatgcaggcatgaagaataaaattagtttttgtaaacaagagaatttgaaactgcttagagaatagaggtaaaaaggaatttccttctttgggtaagagtggatccaaaccatatattctctggctattagagtctccagaggtgtgtggtcattttttgttatggtgattcccaaagatttgcagtgttggcaagtacccaaaatttatctcagctggtcataaaccttagtgccttttgatggttttgttttatagagttacttattaaagttctatgtaaatcattactgttatccttttaagtttctgtatttaactattaccattttttattttatagtcattacatattggatattatgtagaatgtagttatgtatagagtgttttatctacttatttgttgctgcccttttctgagagttatttaatacagtttgagatggaatttagcatttttgggccttccctcactgtttgtaaataattgattttgtaaaaagaaagtgatgtcagacagatacttgagggcaatgcaggctagacagaatgtagtatttagagtggagaaaatttcaaccttttatgtagtttgaatagaaatttaaaaaaccacttaagacattcttttgtaagatgtattactcgtgtcatcatagaaaacttaagccttttgtgtgtgttttttgtttgcattaaaataaacacagtagcaaattgcttcaggagttgagacaggagggagcttgctgtctcggccttctttgtgcttctctgagctatgaggctgagaagatcttcaagtggatttttagcaaatttagctcatctgcaaaagatgaagttaaactcctctacttatgtgccacctacaaagcactagagactgtaggagaaaagaaagccttttcatctgtaatgcaggtaagaatgaagggggaaaaaatgcatgatatacttgggaagaaaattgtccctttaacacatgtccttggaggggagcttgaagaagggaatcatagaataggggttatctactgataggaaatatgttttaaaaattcctctttctcagtttgagtaaaggatacactgttcaaggatcagtgctacatacatatatgcatatatgtggagagagagggagagatttcttctaaaaaattggcttacacgccaggcgtggtggctcacgcctgtaatcccagcactttgggaggctgaggcaggcggatcatgaggtcaagagatcgaaaccatcctggccaacatggtgaaaccccgtctctactaacaatacaaaaattagccgagcgtggtggcacgcgcctgtagtcccagctactcaggaggctgaggcaggagaatggcttgaacctgggaggccgaggttgcagtgagccgagatcgcaccattgcctgggagacagagccagactctgtctcaaaaaaaaaaaaaaaaaaaaaaagatttttttcccctttggtttttagaaatgttttttttgagattgcttaggaccagaatttgcaaagttgaaaataggaactccactagtaatgccggatagaagagtgcttcacatttgtagagggagacaagaactaaatatcacaacttctttctgagccttttggtttgctaacgtgccccaaattcttattccaaatggtataagataattatgtgtaaatgaataccggctctacttagttgtatttcatatttgtgtatctgaatatattaaaatatcattctttttttttttttttatgcagtgtcttgctctgttgtccagcctggagtgcagtggcataatctcggctcactgcaacctctgcctcccaggttcaagtgattctcctgcctcagcctcccgagtagctggtattgcaggagtgtgccattagcctggctaatttttgtatttttagtagagatggggtttcattgtgttggccatgctggtcttcaactcctgacctcaagtgatcctcctgcctcggcctcccaaagtactgtgattagtgtcatgagtcaccacacctggcctaaaagatcattgatttagttttgagtaagattttaagtgattaaattatggtattgttgtgtttggaatatctgatattagggttttttttttttttttttttttttttttttacagtttttgatatgctttattttgggtatgtagtttaaaaaatataaaggaaatataaggaatattctttttttttttttttaataaaaaatgtatttttaactgggcatggtggctcactcctgtaaccccagcactgtgggaggctgaggctggtgaattgcctgagtccaggagtttgagaccagcctgagcaacatggtgaaaccctgtttctatcaaacaaaaaaaaaaaaaaaaggaaaaaaaataagttgggcatggtggcatgcacctgtaatcgcagctacttggaggctgaggcaggaggatcgcttgtgcctgggaggttgaagctacagtgagctatggtcaagctactgcactccattataggcaaccctgtctcaaaaaagcaaaacaaaatgaaacattttccccttgattatagaggtttgagaaaaatttgagggaagattcagaaaattacctgtaactgaacagaatgccaccagcttgggcttattctgcatgcataattatgaacattttcccagctcttgtgaaaattctcacattcatagaaagatagatgcaccagtaaaataaatacctgtaaatacgataataatttcacaatatatgcttcacctagatttaccagttactaatattttgccacagttttattttctcacacacttttgttgagcatctgaaaaccatacacatgatgacagttcaccccataatgttttagtatgcatctcccaagaataaggtttttcttctgtataacaagaatattgtaatcatacctaagaaaatgaattttattacatatgtgttctatattcaaatttctgtaattaccccaagatgtcttttaaatgatttttagcattgatagtctgtgcctgtgtagattataacattggctattgcaaaataatggttttctttttctctttttttttttttgagacgtaatcttgctctgttgtccaagctggagggcagtggcacgatctcggctcactgcaacctccgcctcccaggttcaagcagttctcttgcttcagcctcctgagtagctgggattacaggcatgtgccactgtgctctgctaatttttatatttttagtagagacggagtttcatcatgctggccaggctggtcttgaactcctgacctcaggtgatccacctgcctcgtcctcccaaagtgctggggttacaggtgtgagccactgcacccagcctaaaatgatggttttctgattctagcatttctttgataagattgctatgtaaagcacagcttttccttttttagggaaaaatgttttttaacagctgcaaaataaatattctttcaatggaatgacaaatagttatttattattttatttttgccatatatttattttaaaaatttatgtataatggtaacctgagcctgcatgttattcatgtgtggtgccatactgatcttccttaattttaatatgaagcaagtactaatatactaaagcataaattatataaaatttgctttatattttggattgcaaagtaattgttgtactttatagaaaagtttcccaaatccattttacttttttgtatttgaaatttaatcacaggtagaatcttaaagagagcatttagggatattgtaaacagatgttattaaggactaatgttaactgatgtcaaaggactaatattaacaaacattgaagaagagaaaacagtatctgtttttagcttaacagcttagtggagcgaaatattttcagtttatttattttatttatttattaatttttttttttttttttgagatggagtctggctgtatttcccaggctggagtgcagcggtgcaatctcagctcactgcaacctctgcctcctgggttcaagcaattcttgtgtctcagcctcccaagcagttgggatttacaagtcaattctttttttttttaactaaaactacagaatctatttttcttggtctcatactcaggtttttatgtaggcacttcgtaaataatgaacctaatttgcttgttttctccctattttgttgaatgttcacggtttgtaacttttatttttaagcttgtaatgaccagcctgcagtcaattcttgaaaatgtggatacaccagaattgctttgcaaatgtgttaagtgcattcttttggtggctcgatgttaccctcatattttcagcactaattttagggtgagttcctcattccgctgttcagatcatggggtgagggggatggttgtgtgtgtgaggaactgaggaatcagatggaaaacagtgcctctgctcctttgaatataatcagtgatatttgaggttccagggttaaatgccgcatttttctttctgacgttcgtaccttaaaatatttgaagaaaataaactatttcattgttgtcagaaatgtagttcttttattttcctgcccctctcccctttctaagtttctagaatgtcaagtaggtagaacatagatgctccttttaggatcttttgctgtgaaatggtccacaggtggattgcagtaatatcttaaaatgattggccccctctctctttgtttccatcaaggatacagttggtatattagttggatggcatagagatcatactcagaaaccttcgctcacgcagcaggtatctggtaagtcttgcagcctataccagttatttaaatactgtcggggaggagcagtggtcccccagtgaccatctatcaataccatttctttaataatgcaagaaaactaattcagagaaatgttttattgtaaatgaacatgacttgttagctaaatatatattttcagaggaaattactagtaggtgggtagagtaagtacagacaggacttacccaagttatttgtagtttgtactggtaggaaagtatatggtaagaatatattgcagtggcaataccctgaagtggacaatggaagatccaagttatttgtcacattttattgtttttctggttatttttttaaaaaaggaaatatagggttaatttggagaattgtcataaatgagaagtggttttgtttcccacttttttggagttaagtgaatgactagcgtggctcatttgcacatttcagcttgtttcaagtgtcatagtttctcgtaacttacttggtgtaataaacttttgaaaataagatattcaggtgatagtggtctgtttcattttcactgaggagatgagtatacacctttaatggttagatgtggccctgggattagccgggccaatggtagattgtggcattttagtcttaagtcatgtgtagtgacaatatagatatgaaatttactgaaaaagtaaggaaataacatttacctgttaatttctgcagaaattaaggaggtattaattaaagaggtattggttaatcgtgatcagcatgtttagcagtcttaattttatgatataggacatgttttagggtatgctgcttgaaaaccagatactttttaaaagaagcctcttattttttttaatttggattttttggtgttttttctcccccctaccctttcacaatttcttacgcgattccaagggtggttgcagagtttggagccattttgggtagctgatcttgcattttctacgcctctacttggtcagtttctagaagacatggaagcatatgctgaggtgagtatatagaaagctgtttcttaaaattttggttaagaaaaaatcttaaattgtgctagatttattttaaaatggctcagacctcctgacatttaagcagaaattacaagcccattgcaatattttgaaaaattttttctttttgagacggagtctcgctctgtcactcaggctggagtgcaatggcacgatctcagctcactgcaacctccacctcctgggttcaaatgattctcctgcctcagcctcccgagtagctggaattacaggtgcccgccactacgcccagctaatttttgtatttttagtagagacggggtttcaccatgttggccaggctggtctcaaactcctgaccactggtgatccagccgcgtcggcctcccaaagtgctgggattataggcatgagcccccgtgcccagtcagtattttaaacatttatttcagatgtgtttaagttaccaggagaattactggagagactaaaagaaacgttgcaagcttcgtatttcgcaaagctttacatactctcggtagctggtatttttctaaagacatattttgttatttatttttattttttgttcccagtcttcagagtcttaaagcaaattgatgttgtgttataaaaaaacacaaaacaccaaaagctcctaaagattttcctcttacatatgtacaggagatcttgaatcgtactttggaggacaagccttggcttcagccagcttttgtggctgtacgaatatagcataggagctttaagagcgctgctgaagcctctgttactggtacttggcttttctggccccactgtcatggcttaactctgtgccatctcttatctgaatctctttgtgtttctcccctattcagatcaaccagtcaaggctcccataaagattttggcctcatcttgtttttttcatctttgctgcttgtagtcaacaggaattcagtacctttagctgtactgatgtgtttactctttcctagaaaagcaaggaaatgttttgcttctgcgttgttttttctttgcccccacacctagaatgtcttttttcacagcccacgtttaaagctgatctacctctcataagccacacattctagtttgtagagatgcttccccttgttatccttaagatctcattctcttctgttattttggtgcttaattttaggtagatgtatacattggttctggtatcctagtttttgcgaatcttgtccttttcatatatcgtacttcttcagttacacatctgtagaccaggtcttgtaatctccctttgctcttcatgtgcatgctcttggtttggaggacttactgttgagctgagtggctcaaagaatacctagaatgagatttttagccaaaaactaattcaggagtggcaaaagcttccgtcttcatttatacctacatataactagagcatatgtgctagaatttatttttccccaacagctttctgagttgatttaagagattatttccttaatttgttgtctattgggtttaatgttggctttttgaaataattaggtaaaacccatttttatattcagagtcatgaatattctcatgggccacagttctctttctaaaagcctaaaaatctattctaaaatgaattgattgaaatattttagagttttttttttttttgttttgtttttttaaacaatgtactacttattaagaatgctgtgaattcacatctaggacctcagccatgtggcctctggggaatcagtggatgaagacgtccctcctccatcagtgtcattaccaaagctggctgcgcttctccgggtatttagtactgtggtgaggagcactggggaaagcctcagcccaattcgggccctccaattactgaggcatacgtaacagatgtaagtgcttttgggcatttgaagtgtcattcaaaaataaaattgttttacattgtaaatgcttctctttaccaggtgaactgttattaatccttcatttgtttagcatgtatgtatgtatgtatatatgtatatattgtctgactgctttcttaaacaaccagaaaagcagggaatcctgttatagctcatcctcctttcatccaactcccctaccctcccatgacaaaaggccactctgaatttttaaatctcattctttcatttttaaataatatttcttataattttacttttaaattattgggtttccttttagtttttcaacatattacgaatagcacactataggagaagcctcagaaagtaatcttctctgagcataagatggaactcatatgaaaacttgtgtatctttatattctttgatagcctgatatcaaagaacataaacaaattaaaaatgaggtagctagattgccacacttcagcagcctcagacattagctgcactgtatatagcacatccagtgagggttcagtggaaaagacacaagaaatgaaccccaggcattgtactctgctttgaataaggagaaagaagcatgtgtgataccgtcataaaaaatttaatctaactgatgaaaattttaccgttaggataaaacttgcttttaggagcatatacttttgctgaacatgttgctaaataaaataggatactgattatatagtaagttgtgtacttgagcagaaatgtcagaacttaaagataaatgaaaccagcatatcggtattttaaaccaatatggtttcaaaatggtttaatatctttgcttcatttttaatgtctaaaaggtggttgtttgaagactgtacagagttgaaataaaaagccgttaattcagacataaaataaaggggacataatttataggataggtgtatattgatttatgaggatcttttaggcctttgagaatggtagaatggtggggtttttattttttttatttatttttggagctggaacctcactctgtcacccaggctggagtgtagtagttcaatcatagctcactgtagtcttgaactcttgggcccaggtgaacttcccacctcactcagccctacaagcgggtgtcaccatacccagcttttttttttttttcctttttaaagtggggtggtgccatcacgactcagtgcagcctctatctcttgggctcaagtgatcctcccagcatagctcctgctaattttttatttttgtagagatggggtctcagtgtttcccaggctggtcttgaacttttggcctcaagcagtcttcccacctcagcctcccaaagtgttgggattatagacatgagccactgtgcatgcatggccaagaatgcttccccctccgccctctcccccccactcttttttttttggagacatggtctctgttgcccaggctggagtgcagtggcacgatcttggctcactgcagccttgacctcccaggcttaagtgatcctcccacctcagcctctcaagtagttggtgggactactggtgtgagccaccacacccaactaatttagaaacaaatttggtagagatgaggtgttgttatgttgacatggctggtctcaaactcctggactcaagagaaccttccagctaatcctctcaaagtgctaggatgatagatgtgagtcactatgcccaacctctaaggatacttttaatgaaaactatgggtagactaaataaaatcctgtatgtattggttgttaaatattatagaaatattttttaacatttgctctgttttctcccctattttattagaaatttagtacacaattattggccattatagttaagtgggggattttgtgtgtgtgtgtattggaaataatatgatttttgaagatattatgtggcaagcatgagagtgcttatctttcaaaagagaccatcagtagatagaaactttaataagcttaaagtgacttgtatgttcagttttgaaagattgattcccaaaagcccaagagctagcttgtagtatgtgtgggcaggctattcccatgctgtcaataccattactgtcgtggtgtatttcatgataaagattctgagcttcagccatttagtgacattgggagaaacgaagttgggtatgtgggaaatagaggatggcagcttccatttcctgtcatagtagcactttaggattttttagccaagatcatgtttacatattgtagtaaaggcatcattattattcagctactgagaactagaatattaagagactgctggcaaggcaagcagttaattttcagttgaaattgcattaaatagaaagtattttcttgctttgtggaagcacgtgaatttttttaaaaagctgctggttttccccatttacaggttctgtacagagtaatgagatgtgtgacggctgcaaaccaggtgtttttttctgaggctgtgttgacagctgctaatgagcgtgttggtgttttgctcggcagcttggatcctagcatgactatacattgtgacatggtcattacatatggattagaccaactggagaattgccagacttgtggtaccgattatatcatctcagtcttgaatttactcacgctggtatgtgaattattcttttcctttttaatgtgttggtttattcaggcccttaaatggatatgtaagaaattaagggctttgtctgggtatggtggctcatgcttgtaatcccagcgctttgggaggccaaagcagaagggttgcttgcatccaggaattctggcacagcttgggcaatgtagtgagaccccatctgtacaaaaagtcaaaaattagcttggtgtagtggtgtgcacctgcagtcctagctactcgggaggctgatggaggaggatcgattaagcccaggaacttgaggttgaagtgagctctgattgtgccactgcactcagccaaggtgacaaaaaaggacctgtctccaaaaaagaaaaaaaataagggctttgctttattatataatttttttagagtacattcatcagtcttataatctgtgctttcattttagtgtctatttacttttatttttaatgcaattttttttttgagacagggtctcactccgttgcacaggatgaagtgcagtggcatgattttggctcactgtagccttgacctcttgggttcaggtgatcctcccacctcagccccccaggtagctaggactacaggcgtgcaccaccacacctggctaattttttatattattttgtagagatggagttttgccatgttgcccaggctggtcttgaattcttgggctcaagcaatccacctgccttggcctcccaaagtactgggattataggcatgagccactctgccaggcctctatttttagtggttgatagctagtctcattgtagctttactcgttttttctgaggaaacattgctctacgcaccagattctttctttttttcttttcttttctttcttttttttttggtcacaggatcttgctgtattcccctggctggagtgcagcggtacaatcagagctcactgcagcctcaaactcctgggctcaagtgatcctcccactcagcctcccgactatctgggactacagatgcatgccaccatgcctggctaacctttatattttttggagagaaggggtctcgctacattgtctaggctggccttaaattcttggtctcaagtaatcctcctgccttgccctcccaaagtgctgggattacaggtgtgagcaatcatgcctggcctcctttaattttttttttttttttttttttttttttttgagacggagtctcgctcttttgcccaggctggagtgcagtggcacaattgtatttttagtagagacggggtttcaccatgttagccaggatggtctcgatctcctgacctcgtgatctgcctgccttggcctcccaaagtgctgggattacaggcgtgagccaccgcgcccggccggcctcctttaatttcttaaccataaatatcctccccccacttttattatggacgttctgaagcacataaaaatagggagcatagtataataaatttgtacatatttaacactcagcttctataattagaaacaaatggcccatctggtttcatctaggcctctttgctatcctttcatctccaactggattattttaaagcaaattctagatgacattctgctgagcatttctgccagaattacacctctctttgctaatgtgaaaaaatgcccatgataactgtaaaatacgtgtgtcctatttaggtgtctaaacactttaatgtcacagtattaaggccttaaaatatagcttagatatatttttctaaattaaaagacttcattttttagatatacagaaaattgagcagaaaacagtgagttcccatataccttcttcatcccaacagtttccccctcattaacatattgtgttagtgtggtacatttattacaaaggagtgaatattgatatattattattaactaattttatagtttactttgtgttatgtattctatggactttaacatgtgtaatgacatgtttcccctattaccagtatcatacaggatagtttcacttccctaaaaatcttttatgttctacccactccttcctcgttccctctccccactcctccctccccccatcttaagcccatggcaacccctgatctttttactgtctccatcgttttgccttttccagaatgccatgtagttggagtcatatagtatgtagccttttcagttggcttctttcacttaccagtgtgcctttaaggtttctccatgtctttttgtaatttgagaagctcattttttaaaaattttattcttttagattgttgaacagataaatacgaaactgccatcatcatttgtagaaaaactgtttataccatcatctaaactactattcttgcgttatcataaagaaaaagaggtaagtaatacactgataatgaattttgacaacttgagtcactgaagagttggacctaatgttgcttaccccaggctatataagtgaaattgagtgaaatgtgaaatgtttgatttagaatatagtgattgtatttgttcttttaaatttatatttcttgataatcatactgaatactttcatgaatggtgtgccagatactcttttcagactatgcatcttttgctgttattaaatttattaaattttcataagggtaaaacaagttgacacatttataaagttataaattaagaagtactgtatatttggtaaacaaaaatgactggcttttcaaccaccccctagtcaaatccaccacagactttcctggtagatttaagaaacccagtcttaaactgctgtttgcatatgtcttttgatgttgattattaaaaaaaaaaaacaaaaacggccattttggaaatttcctattgacagttttcatttatagtactctttatttgtgataaaacttaatagatttgaaatagcatactgatctgtgtcagttttctgattggtttttaaaaaattaaaatattaaatgctacagacagtgaattgatcgatcttaaatttatttgtatcatcagcactaatacagatagtgatttattttccatataattttagaagatttattttccatttatcacttccttgaattttttgtttttcaggttgttgctgtagcccgtgctgtttatcaagcagtgctcagcttgaagaatattcctgttttggagactgcctataagttaatattgggagaaatgacttgtgccctaaacaacctcctgcacagtctgcagcttcctgagtcctgttctgaaataaaacatgaggcttttaagaatcatgtgttcaatgtagacaatgcaaaatttgtagttaaatttgacctcaattgactacaaaatttgtagttaaatttgactacaattggaaatgccaaaaactcactaataggggtgagtctttaattgtaatgactttgttttatccacattacatatttatgtatttcactgttatgtcaacatgtctgcagaatcactgtatgtaacaaacagccatatttaagacatgcctggataaataaaattggtaggaatgttttcttgccattatatttaacttttcttctttttccttgacaaatcttgataagtttttttatattagttttattttctagaaaatgtcttatgaatttctcctatttgctctagcatgcttacagaaaatgtcagtgtttcttacagctcaaatttgtatagttgttttaaaatgcggtctctttcttcttcccctggtacttttttctttctgtgtactgaagttagttcttatacatggtcttatattttggctgtctgtttttccctaggaacattcatacaggttgaatattccttatctgaaatacttgggactggaagtgttttcgattttggattttggaatactttttttttttttttggagatagtgtttttactcttgttgcccaggctggagtgcaatggcgcgatcttggctcgctgcaacctccgcctcccgggtacaagcgattctcctgtttcagcctcccaggtagctcggattacaggcatgcaccaccacccctggctaatttttttgtatttagtagagatgggttttcaccatgttagccaggctggttgtgaactcctgacctcaggtgatccacctgccttggcctcccaaaatgctgggattacaggtgggcaccaccatgcccagccggagtttggaatattttcataacacttactggtgagcatccctaatctgaaaatcctaaatctaaaatgctccaaaatttgaaactttttgagcaccagtatgatgccccaagtggaaaatcccacacccgacctcatgtgatgagtccaaactgttgtatgcccaaaattatttaaaatattgcataaaatgaccttcaggctatgaatagaaggtgtctatgaaacataagtgaatttcgtctttagacttgggtcccatcccccacatatctcattttatatatatgcaagtattctcaaatccaaacatatacaaagtctgaaacacttctggtcccaagcattttgaataagggatactgaacctgtagtcttccttttggtggtggtggggggactttttttttttttttttttttttttttttttttttgggggggagacagagtcatgctgttgtcaactgggctggagtgcagtggtgcaatctcggctcactgccacctctgcctcccgggttccagcaattctcctgcctcagcctcccgagtagctaagattacagacacttgccactacgacgggctaatttttgtatttttagtagagacttggtttcaccatgttggtcaggctggtctcaaactcctgacctcaggtgatccacctgcctcagcctcccaaagtgctggaattacaggcatgagccaccgcgcccagcccgtgtggtttttttttttttaagtaattcgacatggccctgctcttgatttgtatttattgtttatggtttgtgtatttcttcttcctattggaccacacagagttgaaaaacatcatttttaatagaaaataataggtgtaggctgggcacggttgctgacacctgtaaacccagcactctgggaggccaagtcaggctgatcacctgtggtcaggagtttgagaccagcctggccaacatggtgaaagctcgcctctactaaaaatagaaaaattagccaggggtggtggtgcacacctgtaatcctagctactttggagggtgaggtaggagaattgcttgaacccaggaagtggaggttgcagtgagctgagatcacaccaccgcactccagcctgggctacagagccagactctgtctcaaaagaaaaaaaaaaaaaaagaaagaaacaaagaaagaaatggatgtaattagggaataaagtttttaggaggaagaaggtaaaatttgatgtttgcgcttcaatgtgctccgtgttgtttgattggattgccttgtataattccatagctgcttcgcttattaccagttacagtttatgtttgaagtcacaataaactcttcttcaaacatgaaagcttgatttttgaggaaaattattcacattatttacagattcaaagatgtttatgtcctgtactctagaaataaggagaaagtgggtggggatggggcagtcaggtggagtggagtgtcttggcagtgtaaaggaaaaagatggatggaaaaggtgtagggtggcagggtgtgcctctgtttccttattgaacagggcaccttgccatttgcagtatatggaaaattgaggaaatacagtctacttccgcaaaaggcacatacaaagggctctgtttagaccagagatcagcaaactatggtctgtgggccaaatacagcccagcacctgttttttgtctgttattttaagtgtataattcactgatttttactatattcacagaagtgtacaaccatcacaacactagtgcctgtttttgtaaagaaagttcttgttgggctgggcgcagtggttcacgcctgtaatccctcgggagactgagacaggcagatcacccaagctcaggagttcaagaccagcctggccaacatggtgaaaccctatctctactaaaaaaatacaaaagttagcagggcgtggtgatgggcacctgtaatctcagctacttgggagactgaggcagggagaattgcttgaaccccggaggtagaggttgcagtgagctgagatcgccccattgcactccagcctgggcgacagagcgagagactccgactcaagaaagttttcttggaacacaggtactctcattcctgtgttttgtgtgtggctggtgttttgttttgagagagagagtcttaactttgtcatctaggctggagtgcattggtatgatctcgggtcactgcaacctctgcctcccaggttcaagcgattctcctgcctcagcctcccgagtagctgggattacaagtgtgcgccaccatgcccagctactttttgtaattttagtagagatggggtcccgctgtgttgcccaggctggtttcaaactcctgggctcaagtgatctgcccaccttagcctcccaaagtgctaggattacaggtgtgagccacaacacctgacctgtggctgttttcttactgtagcgatagacgaggagttgctgcattgcatagagatgctatattgcacgcaaaggctttactgacttcacaaaaaagtatttgtcccaggtgtagtgtactagatcccttccaatctgtaattttaatttaaaaatgtccaaatacccctgttttgaaggataaactctgtatgcttgtgcttattttggagaagccataaacttactttgttttgtacatgatcagatgtgggcgctatctccaactgtctttgcacttctgagtaagaatctgatgattgtgcacagtgacctggctgttcacttccctgccattcagtatgctgtgctctacacattgtatcctcattgtaccaggtactgtattcacaaatttttcttaagaaaagaaccccacaaaacattttatttttttaatggatagattttgaagatgtatgttgatttaactttggacttgcttgctttctttgattaaagatgaaaagataatctatgctttgtctttcaggcatgatcactttatctttagtagcctcagttcttcctctccttctttgtttgatggagctgtgattggcactgtaactatggccacaaagaaacatttctcaattatattaaatcttctgggaatgttacttaagaaagataaccaggacacgaggtaacagatattatatagtattaaccattcctaactttgttaatttgcctttataatttgagaagaagaaatgtggattacaaaaaatttaaaaaaatgtggattatagaggtgaggtagagcagcttctttattgtcaaacaccttataatttggttttattatttaatctaggctttcttattctttctgaaaagaaatacatgaaaaacctcaatcccccacgcccagtgtttcatagaagaatatatatagatttttaatattctttgcttttttttttttaagacggagttttgctcactgtaacctctgcctcccaggttcaagcaattctcctgcctcagcctcccaagtagccgcgattacaggtgcccgccaccacacctggctaatttttgtattttttttttttttttttttgtatatatgttaaggtttaatacccaaagtatataaaaaacttctacaattcaacaacaaaaagacaaaacattttaaaacaaaatggttgtaaacaaacaacaaaaagacaaccatttttgtccatcttacaatggacaaaaggcttgaataaacatttctccaaagaagataaacaaatggccaataagcacttgaaaagatgtcaacatcattagtcaatggagacatacaaattaaaactccaagctatcacttcacacttactatgatgactattattaaaaaatggaaaataacaagtgttgttgaggatatggggaaattgaaatctttataagttagcaataggaatgtgaaatggtgcagctgatgtggaaaacagtttggcagttcctcaataatttttgtatttttagtagagatggtgtttcaccatgttgttggccaggctggtcttgaactcctgacctcaggtaagccaccacgcccggcctctttgctattatcatgctgcgttgggaggttttcttaaaaggcacacaacaattttgacagtaatttctatagtttcattttttatttttattttttattgtttgagatgtttgaaaaaccaagagaaaaccaatgtaagaagactaggcttttaacttttttttgtttttgttgttttttttttttaatgtacagtcaactgtatattttgtgtttcaggaaactgttaatgacttgggctttggaagtagctgttgtaatgaagaagtccgaaacatatgcacctttattctgtcttccgtctttccataaattttgcaaaggccttttagccgacagtaagactctggttttttttttctattttgtttatcagtccttaaaagggtctttggtaatgggagatggtcatgaatcgagctcttttcctgacctgaagatgtgtaatcctcattttaatgacagatacacagtcttgattttttttcattcttagtattagaaaaatgttttgaagtgattgtcacatttttaagctaacgtgaatgtttatagtttacatatacttttacattttctctcagaaaaagttttgtgtgatgacccatcagttacattacgtgggttttgttgaatgtgtcatttttccaaatgtgacagtcaatgaggattctggacaagaacagtgcctagtctatagtaggcactcactctttgttgaatgaatgaatggattcagataattatgacaaactgggatataatttcttttggccagctgaaagtaactgtcttttaatgtttaatagctctcgttgaagatgtgaatatctgtctgcaggcatgcagcagtctacatgctctatcctcttccttgccagatgatcttttacagaggtatgaaattaagatcatgtcttttgacattaaccctaataacctggaactgttaacacacctgctttgtctatttcgttctttcatagatgtgttgatgtttgccgtgtccaactagtgcaccgtggaacttgtattcgacaagcatttggaaaactgttgaaatcaattcctttaggtgttttcctaaggtataacagttgttttgaagcaaagacgttctgtgatatttacagcctctactggttgtctactttaggagaagacagatcacctattagagcattaatgacacatcttttatggccctgcttgtcagtgattgaagtgatgtcaaataaccaaattttgcaggtctgcaagaaaattaaaaatttttaatgagctttataggctcacaataattagtatagaataactcatgtagtgccaaaatatgtttcttagtagctcagatatttgaaaaactaaacagtaatcttttattgtttttgatcaagttgatttgggagcttttaagagcctaaacttgatccttttgtaatagataagcataatgattgggtttttatgttcacatgtttgatatgcctccctcaaatcctcttatgatgtcggcacatgacccatctgaggtgaataaaaaaaggatctaaagttgtaatcacatctctgtatccatttgaaagtctcaattttactatatttttacctccagtgagttaataagtaaataatccacttacagtatgtgctaaccttttaagctaaaatattttgcataacaacaactttattttctgtctacagcgataacaatcacacagaaattcaagaaatttctttagcattaagaagtcacatgagtaaagcaccaagtaatacattccacccccaagatttctctgatgttattagttttattttgtatgggaactctcatagaacagggtaagacatttctttgactattttatctgggaaagaaaattttaagattcccttgactttacatgcagttttgaagagaaaatatgtttgggggtggcagagtatcaagtaacattcttctcatatgggttatttcagttttcatcaataggaaaattgctttgaagatagcatctgtagaaacaaaaatgggctttgaaattgagtaatgaaatgtggttaacagttaactgatgtgatgtcattaacactttggggagtggggtgggggtggagatattctagagatgcttagttgcattgaatgagtttcattcctgactggcatgagccgtttaccctaatcatccttccacactgtacctcatcctgttaactatacaagacctcaaaatgagagggggggacataatgcttctcaatttcataggttttgcctttttttggagtagggaaaattacagttccttattcccattccccttgcatttttttttcattattaaaatgaagttgtcattgtcttttaaatatgaaactacttttcccaggaaggacaattggttggaaagactgttctatagctgccagagactggataagcgtgaccagtcaacaattccacgcaatctcctgaagacagatgctatcctttggcagtgggccatatgggaagctgcacaattcactgttctttctaagctgagaaccccactgggcagagctcaagacaccttccagacaattgaaggtaactcgctcaagctttatgatgtgaatactttcaaagccttattgagaaataatggatttttaaatctttgttaaagatttgagggtatatgattttttttgaaaaaagtcaataattttcaggtttgtttgttagaataagctttcattgaataattgcattggaaatatgtttgttttttttccaaaacttatgggagttgtgtggaaaaaatatatatttttttcccctaaaatgaaagatctttcatgttgggattttttatttttaaatgatgggtagacagaggatacttgataaatgtgaattggtcataaaaaactcacacttattctaggaacttttaagatttttaaaaattcagaatgttgtctttgctttcaggtatcattcgaagtctcgcaggtcacacattaaaccctgatcaggatgttagtcagtggacaactgcagacagtgatgaaggccatggtaacaaccaacttagacttgttcttcttctgcagtatctggaaaatctggagaaattaatgtataatgcatacgagggatgtgctaatgccttaacttcacctcccaaggttggtttccgggagatagtgttgttttatagcagtttaatggtcacagctggcagtatgtgcagagctgaaatcacaatagacttgtgtatttggtttatatataggtgagacatccttacctacaaattgaaccagtcctgagcttttctttctcttatcgtaaaggtcattagaacttttttgtataccaatcgccaaacttgtcaggactggctaacgcggattcgactctccatcatgagggtaggattgttggcaggccagcctgcagtgacagtgagacatggctttgacttgcttacagagatgaaaacaaccagcctatctcaggtaaagtggtgtgtttgaaattcattttaagtctgttaataagaaaaacatggtttaattcctttggtatgatttaatctatggataaaataagttaaagcttggattcattttcaaaggttttgatcctgtattttgtaaaagcaacaactgccagagttacctattttattcgtgttaaaacagtgttagaagtcaaaataatgttcatgtttttgttcatgttaaaacaatattcatgttagaacacgttaaaactctatttcttccgtgcaaagtttagaactttaaaggtaattctgaaaatttgtttatgggggaaaatttttatttatttatttatttttttgagacacagtttcactctgtcgcccaggctggagtgcagttgtgcgatctcggctcactgtaagctccgcctctcgggttcaagcctcttcttgcctcagtccctgggattacaggcacccaccaccatacccggctaagttttgtatttttagtagagacagggtttcaccatgttggccaggctggtctcgaactcctgaccacaagtgatccgcccacctcggccttccaaagtgctgggattacaggcatgagccattgcacctggccaggagaaattgtttttataacgtatgacaaatgcttgagtaattcctggattgaaagtgggctcacaataaataactggaatccaaaaataacaaaatgtttagcaattcaggtaatgtcaagcagtattcaaacacatgaagttaatcattccttaattcctgtttatttatatttcatttttgctttctttttactccatgtgttattcctacagaggtcacaggttaaatgtttttgggtaactttggggtgggggtacaaacatccatgtgctgctaaggttctgttagtcaccctttgtggctattttatatgtaacattttaaagaattctgagctaaataatgtgaaaattgtgacaataattgttaaatacatttggctttaagcaggcacagactgtgatcagttgtaaattttatagggatttatgttttaatggtattgggtgactaacttttctgaatgcgttttcaggggaatgaattggaagtaagcattatgatggtggtagaagcactatgtgaacttcattgtcctgaagctatacagggaattgctgtctggtcatcatctattgttggaaaacatcttctgtggattaactcagtggctcaacaggctgaagggaggtaggttggagggaaggaaatgggtgatagaattactttatgtttaagttctttgtattactcactgacattgtagccaaatcttaaaacagctttgtttgctttcagcattgaagcttgctataaatcccttcaccaggaggcatcttcagtttgttcttcagttagcagcaatactggagtgcctttcttatttaagaattagtggcaaatcacactgtaaaacaagacctgtcagttgttttataaatgcttttgaacttgatccctagttgagctccttccccctcagagtctgatacaaattaccctttattgtcagagtatttgctcgttagtcctgtgaactctacattcagactcattgcttcctccgggtagaggagcttgtaccataatattctgtgtccatttatgttagtttaatgaaatcttgcgaacttaggaaaataaaagaactgctcatacttccatatctttgtagtaacttctgttgtgtgtccttttgtagtcccatatttccatatccatacgctttgtaattcttttttctttcatgtcgttttctccattcttcaccaaaacatcagcgtacataggcacatggttttatgatctgtttttcccactcaatatttaaaaaaacaaaatttgccatgttaggtaggctgggttcggtggcttacatctgtattcccagcactttgggaggccgaggcaggcggatcacctgaggtcaggagttcaagaccagcctggccaacatggtgaaaccccgtctctactaaaaatacaagaaaattagccgggcatggtggcgagtgcctgtaatcccagctactcaggaggctgaggcaggagaatcgcttgtacacgggaggcagaggttgcactgagctgagacagtgccattgcactccagcctgggcaagaagagcaaaacttcatctcaaaaaaaaaagtaagtagttagataaataaagaaataagactgcttcaatttgcttttcaggtttgaaaaggcctctgtggagtaccaggaacacctgtgtgccatgacaggtgttgattgctgcatctccagctttgacaaatcggtgctcaccttagccagtgctgggtgtaagagtgccagcctgaaacattgtctgaatggtgagcgttcagcatttttaaataaagcaaaagttatagtaatatatttcgtactgatgatcttatcatgtttttaggtttctgtgctctttgaaatatttctaattgatctgaatctctctcttcttattttataaaatactttcaggtgaatccagaaaaagtgtgctgtccaaaccgactgactcttcccctgaggttataaattatttaggaaacaaagcatgtgagtgctacatctcaactgccgattgggctgctgtgcaggaatggcagaacgctatccatgacttgaaaaagagtaccagtagcacttccctcaacctgaaagctgacttcaactatataaagtaaggctttctgtttccagttataaaacaaatttccaataactatgatgtttttcctatggcaaaaaaaatattaaaattggtcatatgcagtaatactcaaaatggttatatttctaacttactgccattatgaaaatgacaacaggaaactgacatcagagatgagggaaggtatttgtataatgggaaaacactgctgagatagtcatttggtattaattttcagaacctgtcgttctaaaaccttaatacagtttgaagattatgccagagtgaatataaagaaaaatttgtactgctttagaaagaatcacatttgatggctttgtttcgaaatgaggtctgaatatatcaaaaacatttattctaatgaggacagagtttgtgaacatctgtaaattaaactttcttctcattcctctgtgcttttattaattctgtaattcaaaactgagcactcactctgttgcagacacttggctgggaagataaaggtcattagactttgtctgatacccttgccttctactgctaaatgggttaatgtgtaattgcttcactgagcatgtgctgtgacccaggcagcacataaaacagacacaaattccaaccttttaaagcaaagattagataaagattattgatagaaggactaattggacctcactcaccttttctgtgccataaggaaagcagttaggtaaagctgaccttctttggagggaagacacaaggtcaagacatgcccatcaggatgccctttgggcctagacctgatgtgagaatgatgggcttggagtgttctggaaatagctgggaggcctgtgtgtttaggagcgccttaaacagtaggatataagggcagagaagtagctgggaactgagaaaagaactttggctgttattctagtaagactgaaaatttcaggtgggatttgaacagagttgtgttgtgatctgacttggttcattctgctgtggtgaagagactggaggtgcggggcaagtatggaagcatggagaccattaatttatgggggcaatggtagagggaagagaaacaatgctattaactggagtaggagcacacagagaacaagccatgttttaagatttctaatgaaatgtgcagatgagattgttgggtaagctgttaagaattggattttgaactaaggagacagtctaagcttgagagatttgcagatgattagtacacagaaaaggccctctttccttttcagtctctatactctagagcctttgtaagcaaccaaaccagagagaagcctctggagaatagtgagtgaagaggaaggaaggcctgggtcagaatcctagtttagcatttttgtgaaaggatagaagaggaagccattcaaaaaaatacagggacattgagaagggaagtgccctagatataggacatccagatgggagtagtcagccttgtcagatgctctagggattataaggaaaaagagttttgtagagagacagaagaagctagattgaatagtattgagtggtagagacatttgaaaatgaaaagcttgaggtaagttatttggtcagtgagtttttcttgaagtcgaggataggaagctgttgctggagggaaatatgagatgtttattttaaatgttggagagattatgttcttttggccaaggggaaggagccactagaaagcagaggttgaagaaacaggagaaagaacattgatagattaactggccctcaccttttctctgcctcaaggaaagcagtcaaagttggtatagacagaatttcggcagtgtatggtggattgggggtaggggtagaggaaattaaagcctgtgtttttttgtttatttgtttgttttttctgaggactgagtcattagctgaaagcatagggcattatagagcatagtggggacttggggaacctgccactggagaggacttaggaccttttaatggcagaaatgatgactgtgttggcagcagttcatcagtgcccagtactcaagggtccccctgagaagccagtggttgcactgatctaggtagaatcaggcacagaataagtcaggtgatgtgcctttctagcactggcctcaggctgagttataagggaagttacacagcgagagggacaggcaaagatggaaaagagagagagtgagaaacagtgtcttcttcctggctggagagcccgtgtcatgaaaatggggacagggtaagggatctgaaaggagcagcatagaagctgggaggatgaggcctgtcttcctggcattgatgctgcagaactacaggaaagaatttcagaggtgtcattatttttcatataagcagatgaaagagaagaattctttgaaaaaagaaaagtaggtgaaaaagggagagacggagggatgccagcagtgaaagaagccaggactgagatacaagattgtgatgctgggagagctgtgcaagggctcatgctgtaggtgaggagtgaggctgcacagggagctcactggcagcttggagagaactgggtgtcaaagttgtcctgcagaggtctactgtcagtgtgtcaggctctgaagagaacaggctgcaacacatgaaaacaggaaggagacacaggggcgagtcagctccactgaaagtctgtagctgtgactttctggtttgccactccaatttgagtactaattaagtggtagtcacatcttcaacataaaaaccaaaataatggcatcctcgtggaaggaattttgtcagaaaagtgctgtgtactttgctgtcttcctaggatttgttctgtttttgtttgtttgttttttttaatggttccacaggctgcataggaatacaagctaaccaatattttaattacagatcattaagcagctttgagtctggaaaatttgtcgaatgtaccgagcaattagaattgttaccaggagaaaatatcaatctacttgctggaggatcaaaagaaaaaataggtaggtatttgagaaaatagttttaaagttattttagtggacaagttgctcaaaatgtttggcttagtatattttactggaaaatctggaagttattttacatttttgtgggggcagaatcccatgtgaagcaacaaatttagggctgccctatttatgtttgatttgggaaatgaaaagcacttaaaattaagtcaaataaaaaaaatgaccaccttaatactttgagatttatctagccattttgtttgataaaggacaaagtagtgtttcagctaaatatttttcttgattttcatcttgatgtggctcgttaattaagttctttatcacaaatggaacacttgataagatgttattaaaaagtttaatgagtattctggattgagcaagatttgctaatgcaggtctagatttgtccccttaaatagtagattgacttaccgattttcttttttgttgagacagagtctcactctgttgcccaggctggagtgcagtggcgcgatttcggctcactgcaacctccgccgccctctgagttcaagcgattctcctgcctcagcctcctgagtagctgggattacaggtgtctgccaccgtgcccagctaattttttgtatttttagtagagacggggtttcatcatcgtggccaggctggtcttgaactcctgacttcgtgatccacccaccttggcctcccaaagtgccgggattacaggcgtgagccaccacgcctgacctcgacttactgatttttgagcctttgaaggcaactgctttttaggggtctgaggtacagtaattttgtatgaagtatgatttttatatagctctcagtaatgcttatagtgtttaactgcctgaaatattaaaggagctgttcattggtgattagtttttaataatgccaaacataaatcaaaatttataataaaagcacattaacttaatgacatttcatttaacttctgtagacatgaaaaaactgcttcgtaacatgtgaagtccagatccaagggaacctcagaaatccattgaagttccattgttaagaagttctgtttgtttggcaactgctttaaacccgatagaacaagatcagaagtggcagtctataactgagtaagtttactcttacggaggtaaatgtacattgtgtatatcatgtgataaacatacatggggtgaagagggctggaaggagagttactagattactaaatactagtgctaatagcttcattttagttgtagaagtcatatgatatatgaatgctgcttgccaacaaaaactgaggttgaaatgaaataaaatgtaaaaatccccaaaagcaaatgtcttgacttgctgataccattttattatagagcaggctgctcctcttactgccccctaactttggatgtcaatttgatagcatcttatcaattgctttattctttgagtggttatgaattgtaatttttattaattgacagtaaatattttgtttcagaaatgtggtaaagtacttgaagcaaacatcccgcatcgctattggacctctgagactttctactttaacagtttcacagtctttgccagttctaagtaccttgcagctgtattgctcgtctgctttggagaccacagtttctaacagactttcaacagaggtctgtatatttttacaagcacactcttatgactattaatggtcattactgtagaacaaagaccttattttttgagttttttggaataggatttgtagttgggcaagctggtaaatccagaaatctaacatgctgttttcaggcagtctttcatttgggaagtacatggggcagatggaagaacctgagataatcgcaaggatggcaaattgctcagttttttcttctatttttggggtgggaggtggtgtatgtaaagacagttcctttaggcagatcacgtaaattttagatttgctgcaaacaaagatctctcctcttcatcctaaatggggtaaagttcgaccagagatgggggcttctgaatgaatggtgatcttcgagaacttcataataaagcattagttgtaatgtttttctgcagtctgctttatagtaaatgtgctgtgacttttttttttgtaatgtgctttattaagtatattgataaattagacttaatattctgaagaagatttcccttcaaaacaaaaggctttctcttactgtgtgcttgcctcttgtgagtagaagataaatgatgtaagggtatagtgtaatagataaaactactgcaatcaatctgaagtagccaaactatattgcagtcttggacttaagacttgctatatatctgcaaacatatcaacagcctgttttacgttgagtaattttggtttttctctggcaggactgtcttattccactcttcggcgaagctttacgttcatgtaaacagcatgacgtgaggccgtggatgcaggcattaaggtatactgtgtaccagaatcagttgttggagaaaattaaagttaagtggttttccttttttttttttgtaagagaaaattaaaggtggttttttttttaaattttgctttattgaggtttatattacacattctaagtgtatggtttgatgagttctaacatgtcttcacttgtgtgaccaccaatacgatcgagatagagaacagcgtcttaccccagaaggttcccttgggatcatctcctcatttgcccctgtcagcagttactgatttgctttctgtcactatggattagacttgtctttactaaagtttcatgtacgtgaaatcataacaacatgttctcttgtgtttggcttctcttgctcagcatgatatttttacggttcacccatattgcatgtatcaggaatataatcctttttattattgagtagtgttctattgtatgtatataccacagtttatttctcccttcatcctttgctagattttggggttttttcacattgcgctattcagtataaacctgctctcaacattcatgtgcaagtctttgagtggacatatatttgcgtttctcttgagtgaatgcaccttgttgggtcacgtggcttaacttaaaaaaattttaatcactgtggtgcatatgtagtgattattagtgattatctcataattttattttcttgtttaatgatgttgagtgtatttcatttgtattttagtttgcaaatgtttgttcaaattcttcacctgtttttaatgaagacgtacgacttatttttgtgttctgaacataagttctttgtcacataaaatgtgctatgaatgttgagttttaaatactccaaatgaatggctagagaattactatttgtagaaatatttatatgtcaaagggatgctaacaatttactttattgctctaaaatagaaaagttgccagaatgctgtggagttttagtggaaaacatgatagctggtgttactgagtaaatttgagtgttaaatgtcaatgtaagctaacggccaagatagggaccactgcagggtggttacttgcagctatgactcaactggtccttcactgccaaacatacctggggttggatcattggcctgacgtttgcaaattgaggaaccttagggcaaatcaatgaacttctgaactgccttcgtcttcagttatatggggatttccccacttttgaggtacttgtaaggattatatgagatgaagagatgagacaaggtatataaaagtcctagcacagagcgtgtcatataatatggcttcacaagtaccctcatctcctttccagtcgttttttgtttttgtttttgtttttttgagaccatctcactctgttgcccaggctggagtgcctcttcatttttatttctttattcagcaagtattgatcaaatgtgctttgtaccaggtactgagctcttcgttgggatataatggtgatcaaggagattgtagattctggcagggaaaactgacatcaaacacggcgacccgacatagtgagaccctgtctctactagaagaactttaaaaatcacctaggtgtgggccgggcacggtggctaacgcctgtaatcccagcactttgagatgctgaggcaggtggatcacgaggtcaggagatcgagaccatcctggataacacggagaaaccccgtctctactaaaaatacaaaaaaattagccgggcgtgggggcgggcatctgtagtcccaattactcgggaggctgcagcaggagaatggcatgaacccgggaggcggatcttgcattgagccaagatcacgccactgcactccagcctgggcgacagaatgagactccatctcaaaaaaaaagaagaaaccaaggatatagaataaaacaagagtgtagatttgggcattgaggccttcaaattggattgttctcaatgtccagaagaaaaaaaaaatttagaagagacccaaatcagaaaacaaaagttgggctgaattcaatgcgaattattttctagctcaatattaatactgcttatgtcagctgaatttcagcctttcaataacagctagtcaagtatttttttagttggttcctattgatcgtcatcttattttagtggaatccattatattgaagatgtcaagttcctcatttcccatacaaagaatgtgagattcatctttcttgaatctttgctaagtgttgaaggggacttttggcatcttttcaggaggactataattgggccctctaactaaaaagtctcctatgccccttagatagatgagatttttttttttgaccttgtacccaccaacattggtgggaggctcagaagggactgtgtttgtaactttgtagcactttctaaacagtgacctgttgtatgggcattataggacagtccgtggggtggggcgggggatgggggagatggacaaatgaggtctggtttaaagaatgagaagtgtgaccaggcatggtgactcatgcctgtaatccagcactttgggatgctgaggcaggaggatcacttgagcccaggagtttgaggttacagtaagctatgattgtgccactgggctccagcctgggtgacagaactagaccctgtctctaaaaaaagaagaagaggtgtgtatccttctaaatgataaaacagatcactcccctgcttacataaaactttccggtggctggccaggcacggtggctcacgcctgtaatcccagcactttgggaggccgtggtgggcagatcacgaggtcaggaaatcgagaccatcctggctaacgtggtgaaatcttgtctctactaaaaacacaaaaaattaacccaggtatggtggcatgcacctgtagtcccagctactcgggaggctgaggcaggagaatcgcttgaaccagggaggtggaggttgcagtgagctgagattgcgccactgcactccagcctgggtgacagagactctgtctcaaaaaaaaaaaaaaaaaagaaaaagaaaaattagatgggtgtggtggcatgtgcctgtaatcccagctactggggagcctgaggcaggagaatcgcttgaacctgggaggcagaggttacagtgagccaagattgcaccactgcagtctgcctgggtcacagagctagactctgtctcaaaaacagaaaaacaaaaaaacaactttccagtggcttctcactgctctgagaataaactccaggctcttccattgcaaccaacaggatctggtgattcgaccccagcccctctttccaggccctcatcaccttgatcctcccttaacctatcctgctccagctgcactggctgccttcctattcctccagcataccaagattgtttctgccacagggcctttgcatctgctgttctcttcgcctggacacctcttggttctttttttttttgttctttgagatggagtctcactctgtcgcccaggctgaagtgcagtggcgcgatctcggctcactgcaagctccgtctcccaggttcatgccattctcctgcctcagccttccgagtagctgggactacaggcatccgccaccacgcccggctaatttttttgtatttttagtagagacggtttcaccgtcttagccaggatggtctcgatctcctgacctcgtgatccgcccgcctgggcctcccaaagtgctgggattacaggtgtgagccaccgtacccggccatagagcagcctcttccttttcctgttgggtctctgctcagatgtcatgtcagagaggcagacctctggggcggtctatctgagggaatgcacccatctcccttcctctgaccagttagttaccttgcttattctttcaaagctcttaccaccacctgaagtcatctatctggtttggttattttattgtttagtagcagtctttattttattattattattattttttgatggagtctcactctgttgcccaggctggagtgcagtagcatgatctcggctcaccagaacctctgcctcccaggttcaagcgattctcctgccttagcttcctgagtagctgggactacaggcacgtgccaccatgcccagctgatttttgtacttttagtagaaacggggtttcactatgttggctggtcttgaactcctgacatcaagtgatccgcccacctcggcctcccaaagtactggcattacaggcatgagccaccacgccaggctggtagcagtctttcctagaatgtggatgccttggaaaacaggggctctgccttgtttccctagaacctagaatggcatctggcacacagcagatgctacatctattgtaaatgaatgaatgaaagaagtgtccttgcagccacactggcagccgtaacatagtggttataaatctagactctggagtctcaagtgcaaatgtcattggcctctcctccagcctcctcaaggggcactcaatgactggaagcgccttgatatgactgtggttggactgacatgactgccagatggtgggacttggtctggagcagagactacttggaatggtagaggcaaaactcaacagcccctggagctgcgcttgtggtggagctggaccctgattttagctggaccttgtttttagagacagggtttccttctgcagtctcaatctcctagccttgattgatcctcctgccttggcctcccaaagtgctgggactacaggtgcatgcaaccacacctggctaattttcttctcttctttctttttttttttttttttttgatggagtcttgttctgttgcccaggctggagtgcaatggtgccatctcggctcactgcaacctctgcctcccgggttcaatccattctcctgcctcagcctcccaagtagctgggactacaggtgtgtgccaccgtgcctggctaatttttgtatttttagtagggatgagacttcaccatgttggccaggctggtctcgacctcctgacctcaggtgatccacccaccttggcctcccaaagtgctgggactacaggcacatgcaaccacgtctggctaattttcttgagttttagtagagactgggtctcgttatgttgtccaggctggtcccgagctcctgagttcaatcgatcttcctgccttggtctcccaaagtgctgggcctacaggcgtgagccaccatccccagcccaatttttgtatattttgtagagacacagtcttgctatgttgtccaggctggtctcaaactcctgggctcaagggatcttcttgccttggcctcccggagcacttaattacaggaatgactgcatgtgctgttgtgcctatactttctggagatacgttgttaggaatttatgtagttggccgggcacggtggctcacgcctgtaatcccagcactctgggatgccgaggcaggtggatcacctgaggtcaggagttcgagaccagcctggtcaacatggtgaaaccctgtctctactaataatactaaaatcagaggttgcttgcagtgagccaagatcataccattgcactgcagcctgggcaacagagcgagactctgtctcaaaaaaaaaaaaaaaaaggaatttacatagttgaacaactattctttggacatcttttagtccagtagacggtgttaaacttgaagacaaataacgatttgacctgtgatatttgtttttccctcttatcttctaagcccattcatccagatcattcatcacctttaaaggcatccccagagggaggcaggtctggacagagctgaagattgcacaggccatttgcaggctggattagttctgtggtgacccacctgtctgactcgagttatttttttcccatgtctggacaagactgacctctgcccagcaactcaggcctggatttagtccaagggccctcagtggcttttttgtttgtttgttttttcaggaagtgaagaatttagagggataaaaggcggaaataacttttcagcctctgacctttgtaacaatctagtttccttttaaaggagcattgtttgggcctggggccacctagaccttctgatgctctttccccacccttggaggaggaggaaaggaagaaaatgggccctgagcgatcaccacataccaggccctgggggtctagtggcgaaggaggcaggtagggtctcttgctttcatggagcttctagtcaagcgagacgcactaaacagtaaagggacaaataggattactggaggtagccctaactactgggacagaaacaagatggtaagatagagaaggaagagtggcctgctcagatggggtggtccagaggcctctcgggggaggtgactcctttttattttattttttttgagatggaatctagctctgtcgcccagcctgaagtgcagtcgtgtgtttcatgcgcgtccgtgtgaagagaccaccaaacaggctttgtgtgagcaacatggctgtttatttcacctgggtgcaggcgggctgagtccgaaaagagagtcagcaaagggtggtggattatcattagttcttacaggttttgggatagggggtgaagagccatgttttgcaggcaggggtggatctcacaaagtacattctcaagggtggggagaattacaaagaaccttcttaagggttggggagattacaaagtaccttcttaagggtgggggagattacaaagtacattgaagagttagggtggggcagaaacaaatcacaatggtggaatgtcatcagttaaggctatttttacttcttgtgtggatcttcagttacttcaggccatctggatgtatacgtgcaagtcacaggggatgcaatggcttggcttgggctcagaggcctgacagtgtgatcttggctcactgcaaactctgcctcctgggttcaagcaatttttgtgcctcagcttcccgagtagctgggattacaggtgcccgccaccatgcccagctaatttttgtatttttagtagagacatagagtttcaccagattggccaggctggtctcgaactcctgtctcacgtgtctgtgtgaagagaccaccaaacatgctttgtgtgagcaacatggctgtttatttcacctgggtgcaggcgggctgagtccgaaaaaggagtcaacaaagggtggtgtgattatcactggttcttatagatttggggataggcggtggagttaagagcagtgttttgggggcaggaggtggatctcataaagtacattgtcaaaggtgaggagaattacaaagaaacttcttaagggtgggggagatgataaagaaccttcttaagagtggggcagattacaaagtacattgatcagttagggtggggcagaaacaaatgacaatggtggaatgtcttcagttaaggctgttttcacttctgtggatcttcagttgcttcaggccatctggatgtatacgtgcaggtcactgggatatgatggcttagcttggactcagaggcctgacattcctgtcttcttatgttaataagaaaaataaaacaaaatagtggtaaagtgttggggtggcgaaaatttttgggggtgatatggagagataatgggcgatgtttctcagggctgcttcgagtgggattaggggcggcatgggaacctacagtgggagagattcaactgaagaaagattttggggtaagggctgatactgtggggttgttagaaggagcatttgtcatatagaattattggtgatggcctgaatatggttttgtatgaattgagaaactaaacagaagacacacggtccgaataagagaaggagaaaaacaggtattaaaggactaagaattgggaggacccaggacatccaattaagagagtgcccaagggggttcagcataattatttgcttggttggcaagtttttggactctatccttgagtttttttatgttgtcatataccaggccagattgatttaggtaaaaacaacactcttcatttaaaaatatacagagtcgtcctttttcagcaatgagtaaattgaggccttggcgattttggaggaaagagaattgcaaagccagcaattgtttctttttttatttatttatttacttatttttttaaattatactttaagttatagggtacatgtacacaatgtgcaggtttgttacatatgtatacatgtgccatgttggtgtactgcacccattaactcgtcatttacattaggtgtatctcctactgctatcccttccccctcccccaccacacaagaggccccagtgtgtgatgttccccttcctgtgtccaagtgttctcattgttcaattcccatctgtgagtgagaacatgcggtgtttggttttttgtccttgtgatagtttgctgagagtgatcgtttccagcttcatccatgtctctacaaaggacatgaactcatccttttttatggctgcatagtactccatggtgtatctgtgccacattttcttaatccagtctatcattgatggacatttgtgttggttccaagtcttcactatcgtgaatattgccgcgataaacatacgtgtgcatgtgtctttatagcagcatgatttataatcctttgggtatgtatccagtaatgggatggctgggtcaaatggtatttctagttctagatccctgaggaatcgccacactgtcttccacaatggttgaaccagtttacagtcccaccaacagtgtaaaagtgttcctatttctccacatcctctccagcacctgttgtttcctgactttttaatgatcgccattctaactggtgtgagatgatatctcattgcggttttgatttgcatttctctgatggccagtgatgatgagcattttttcatgtgtctgttggctgcataaatgtcttcttttgagaagtgtctgttcatatgctttgcccactttttgatggggtttgttttttttcttgtaaatttgttggtgttctttgtagattctggatattagccttttgtcagataagtagatggcaaaaattttctcccattctctaggttgcctgttcacactgatcctagtttcttttgctgtgcagaagctctttagtttaattagatcccatttgtcagttttggcttctgttgccattgcttttggtgttttagacatgaagtccttgcccatccctatgtcctgaatggtattgcctaggttttcttctagggtttttacggctttaggtctaacatttaagtctttaatccatcttgaattaatttttgtataaggtgtaaggaagggatccagtttcagctttctacatagggctagccagttttcccagcactatttattaagtagggaatcctttccgcatttcttgtttttgtcaggtttgtcaaagatcagatggttgtagatgtgtggtattatttctgagggctctgttctgttccattggtctatatgtctgttttggtaccagtaccaggctgttttggttactgtagccttgtagtatagtttgaagtcaggtagcatgatgcctccagctttgttcattgggcttaggattgtcttggcaatgcgggctcttttttggttccatatgaacattaaagtagtcttttgcaactctcatcagcccagtttaatattacctatttattataatgtaatgctgctcgcacaactgagaaaatactgttgctttaccccctccagctctgtagcagccacgcagaaatcatagaactgtaaacatatgctaattacacaacctatgtaggcaatcaatattaagaaaaatttttactgcccggtatttctgtggttgaaaatgtagagtctaattttgatccgcagtaacatctaggttaatgttgattcagaaggaaaacgtttgttgttgccatgagaagaggcattgaaatgctgaatcaccaccacaaatgttaccactattaatataaggagatacataggaagatggaattagaccatctcggaccaccaggtttacaattccacctgcagatacatgcaagaagtattgtcacaatacttatgtcacgttattccgttgaggtcatcaccaactaagcttataattaatgtgtggtcaatttggtcaatgtcaccagcgtagcatactaacaaaaacaagggttgcaaagtcaaatgcctataaggcagaacgtaagacggtaggaagcaaagtctatagggagctatataatagaggctgcagattcatggcagattctaaagcacagcagtccccaacatttttggcaccagggaccggctttgtggaagacaatttttccacaggcggcaagggatggggcgcaggatggtaatggtcttgggatgaaactgttccaccacaaatcatcaggaattagattctcataaggaatatgcaacctggatccctcgtgtgtgcaattcacaacagggttcatgctcctgtaagaatctaatgatgctgctgatctgacaggaggcagagctcaggcagcaatgcaagcaatggggagcagccagaaatacagacgaagcttcaattgttacccaccattcacctcctgctctgtggcccagttcctaacaggccacagaccagtacatgtccatggcccaggggtcaggcacccctgctgtggcacattgcttaatagaggactgtagcagccatgtgccctgacctttcctttttttttttttttttttttttgagatgccagaaacccagaatttttttttttttttttttttttttttttttttttttaagacaaggtctggctctgttgcccaggttggagtgtaggagggcgatctcagctcactgtaacatcaacctcccaggctcaagcaatcctctcacttcagcctcccacgttgctgggattacaggcacactccactacacccagctaatttttttgtattatttgtagacatggggtttcgccacgttgcccaggctagtctggaattcctgaggtcaagctgtctgcccatctcagcctcccaaagtgctgggattgcaggagtgcaccaccacacctggcctgaaacccagattttatttatttattcattttttgagatggagtcttgctctattgcctaagcttgagtgcagtggcgcgatcttggctcactgcaacctccacctccctggttcaggcgattctcctgcctcagcctcccaaagtgctgggattacaggcatgcaacaccacacccagcctgaaacccagatttttaatatgaaatcaaagtcttcagaccttgtaggtgtcataaaaagcacgctgaggaccactagtttgcaactgccaatctaaaatatcatagacattatatcacttcaaccacgaaaaaaaaagtatgtgaggcagaaaatggaagcaaccatgcctaatttattgttgaatactttttccgtataccaagagcttcctttgcactagcatctgaaactatatccagaatgacactggttttcataaaagtgttgatcctcacacctctttatagtcttgcacctagcacagtggagtgaaacactttaaatagcacttgttccttgagtatatatggaaaaaagtgaagtattgataagtgctcagctaatatgagcagcatctcaggagtctccaattcttgaattaccagggagtatttttaccattttcccccagtgaaaggcctattttgagagacttaccctccaaaatgaatgtattaagtcatgttccttttttttttttttcttttttttttttgagacagggccttgctctgttgcccaggctggagtgcagtagcatgatagttacaggaaaggggtcccaatctagaccccaagagagggttcttggatcttgtgcaagaaagaattcagggtgatgccacagtgtgaagtgaaagcaagtttattaagaaagtaaaggaggaggggcacggtggctcactcctgtaatcgcagcactttgggaggccgagacaggtggatcacgaggtcaggagatcaagaccatcctggttaacacggtgaaacctcatctctactaaaaatacaaaaaaattagccaagtgtggtggcgggtgcctgtagtcccacctactctggaggctgaggcaggagaatgggatgaacccgggaggcgaagcttgcagtaagccgagatcgcgccactgcactccagcctgggtgacagagggagactccatctcaaaaaaaaaagagagaaagtaaaggaataaaagaatggctaccccatagacggagcagccgtgagggctgctggttgcccatttttatggttatttgttgatgatatgctaaacaaggagtggatttttcatgcctcctctttttagaccatatagggtaacttcttgatgttgccgtggcatttgtaaactgtcatggtgctggtaggagtgtagcagggaggatgatgggaggtcagtcttgtctctattttggttttggtgggttttggccagctccttcactgcaacctgttttatcagcaaggtctttatgactggtattttgtgctgaccttctatgtcatcctgtgacttagaatgccttaaccatcagggaatgcagcccagtagtttcagcctcatttttcccggctcctatttaagatggagttgctctggttcacacacctctgacatgatcattgcccactgcggcttccacctcccgggttcaagagatcctcctgcctcaccctcccaaggtgctgggactacaggtgtgtgccaccagctcagctaatttttgtattttttgtagagatggtgtttttccatgttgcccaggctggtctcaaactcctgggctcaagcaatccttctgtctcagcctcccaaagtactgggattacaggcatgtcccaccatgcccagactaatatttacttttaatcagactaagatagggttactacttgagttgctatggctccagctgaaagaaagcccgtgcagtcatatcacgcgtaaacatttgctttatgctaaaaatatggtggacctggcattacagctattacaaatctcctaagatgtctcgggtagtgtattagttacttttcatactgctatgaagaaatactggaaactgggtaatttataaagaaaaagaggtttaatgtactcacagttccacaaggctggagaggcctcagaatcatggtggaaggcaaagaaggagcaaaaaggtatgtcttccatggcagcaggcaagagagcacgtgcagggaaactgccctttataaaaccatcagatttagtgagatgtattcactatcacgagaacagtatgggaaaaacctgcccccatgattcgattacctcctaccgggtccctcccacgacacatggggattatgggaactacaattcaagatgaaatttgggtggggacgcagccaaaccatatcgggtagcaacaacctagggtcagttttgcaggtggtaaagccatttaccaagatagttgtaggtaaagaagggcagatttattagagaaattgtgaaaatatgttgcagtgggcagctcagcagagaaggggctacctgcaaagaggcaagggctggaggaaagttttatagggtcctgctgaagggtgctacgtgtggaatgaggtcattgtgcccgcaggttgtttgtgattagctgtctctaacaattgttcatacaataattgttcattattgttctcaacttggggctctccccaacctggggacccttccttattgttgcttacttatcaggtctccacataaaggtgtggaaacttcattcattcatatcttcaacacaaattgtaggtagcctgttttttaaaacatttattcaacaaatatttagtccaagccactattacttactaccttctctactattgtatggacttttaactatctctgacactattcactattcttccacattctctattatttatacctatggtaaaatttgccagtttgaccatacaactaatactcacagggaatatatagagtctagaagaaaatatacaggtccttaaaggctgccctgccaacaaaaccataacgcaggaacaaacatcacaactatgccaaataatcaatcctacaatgtccaaaattttactttaaaactggaattaccagacttcctttctgcattaaccagtttaactagacagtaacgaaatattcctactttatgctgtgatagtttgtttgtttgtttgtttgtttatttatttatttatttatttaagacagagtttcgctcttgttgcccaggctggagtgcagtggcacgatctcagctcaccacaacctccgcctcccaggttcaagcgattctcctgcctcagcctcccgagtagctgggattacaggcatgtaccaccacgcccgggtaattttgtatttttagtagagacggggggtttctccatgttggtcaggctggtctagaactccagacctcaggtgatacccctgcctcagcctcccaatgtgctgggattacagctgtgaagccaccgcgcccggctgctgtgatagttgagatgtaaaccaaaaataaaattctaagccacccaatccgactgaatggacccttcctgttgagcaaggacattccaaagtaaactgaaaagaccagcttaggccatgatgggaaggggaggtgtcaacatgcctcattctaccttcctccctctggaatccagacacaactgaccagcattaacattaaaacagagatcttaagctgggcacagtggctcatgcctgtaatcccagcactttgggaggccaaggtgggatcacctgaggtcagaagttcaagaccagcctggccagtatggtgaagccatgtctctactaaaaatacaaaattagccggacattgtggtgcacgtctgtcatcccagcaaggcaggcgaatcacttgaacccaggaagcagaggttgcagtgagccaggatcatgccattgcactccagcctggtcaacagagcgagactccgcctcattaaaaaaaaaaaaaaaaaaaaattagccgggcgtggtggcgggcacatgtagtcccagctactagggaggctgaggcaggagaatggtgtgaaccagggaggcggagcttgcagtgagccgagattgtgccactgcactccagcctggacagaagtgcatttcataatgcattttaattgcattagcagtgatttaatttttttagatgctaaaacttatgggtgaaagtggattaaatgtagccaaatgcaacatcaaaatcttcaggcacaaaaacccattaactttttcatactctcagaaggtgaacctaatttcaaatgaaagctgcctccagaatatattgttaagcgtattctagatataattcattttggcaaacatactgtagaaattcacataacattttactgtactaaaagtaaattgcccatgtaacaaaaaatatcttttcagagcttgaaatgaattttaaaggatgactgatggtccctggaagagaaacagtaaacaaataaggtttgtagcaatgatgtatgagttagaaattgcagttccagatgatctctttattaaagagacgatctacacttaatttgatcaagtgttatgaacatagttcatgttaagtctccatttaaatacaacctgaaataccaaagttaattttcttttctttctttctttttttttttttttagaaggagtcttgctctgttgcccttcctggagtgcagtgacgtgatcttggctcactgcaacctccacctcctgggcttgagcgatcctactgcctcagccccccaagtagctgggaggacaggcgcaagccacggcactcagctaatttttgtatttttcgtagagatagggtttcaccatgttgcccaatttggtctcgaactcctgagctcaagtgatccgcccgccttggcctcccaaagtgctgggattacaggcatgagccaccgtgcctggccagaaaattgtaaacacacacaaactctcaagtggcctaattccctctcaccaaaccaatcacaatacagataaaagagaataacttgtgttcatttttgtacaaacaaaaaagatataaattgtgaatgatgcatgatttttaattacaagtaaactgggcaaatgcttctgcattatttaaagctaaaaggtgatcagtggaaactttcctctgttagtactctaatactttttatatttatcggctcactacaacctgtgcctaccaggttcaagcgattctcctgtctcagccacctgagtagccgagaccacaggcacgcactaccatgtccggctaattttgtatttttaatagagacagggtttcaccgtgttggccatgctggtcttgaactcctgacctcaaccgatccgcctgccttggcctcccaaagttctgggattacaagcgtgagccacagcgcccagccttattataattgttactatttaaatctcttttgctctctccttcaagagagacctcatcccattcagttgcttccatttatttattcatcttctgcctcctgggctcgagagatcctccagcgtgagtctcccaagtagctgggactacaggctcacaccaccaagcttggctaaattttgtaggttttggagagacaggctcttgccacgttgcctaggctggtctcaaactcctgggctcagatgatccacctgccttcgcctcccaaagcactgggacatgagccaccacgcccagccgcaagtacttttacacaaaatgcaaacaccattcttccatcataaaagtgataccacagcttccgtgaagttttgccaggtagtactcataattaccttgggtaaactttttgatgttaaactgtatcttcttattacgagtttttccattgtattaactgcttttacaacaacacaaataacaagttattttacaaaccatttagaaatttctgtactatggtcccagtaatgtaaaatatattaatgcctattacattcagataaattatacacttggaaaccacatacttatgacttacagaaacttacataaacaaattatagaaattacatgctcaatttttaggtatatagtcttaaattaagcttaaatatacattctcaagataaattaacagttcagggcttcacaacttgaaatctgtggaagatgacattggagacaacagaactctggtggaattcttagatggaatttgccgaaacttttttttttttttttttttgagatggagtgtcgctctgtcgcccaggctggagtgcagtggcgcaatctcagctcactgcaagctctgcctcccgggttcacgccattcttctgcctcagcctcccgagtagctgggactacaggcgcccaccgccacgcccggctaattttttatatttttagtagagatggggttttactatgttagccaggatggtctcgatctcctgaccttgtgatccacccgccttggcctcccaaagtgaaacttttctttaaaatagagatgggatcttgctgtattgcccaggctggtctcagactccttgccttaagcagtcctcccacctcagcctcctaaagtgctgggattacaagcgtgaagcattacatccaagtgaaacttcttgagatggttacataatgtctaaatctgctggtgtagaagttaataaagtgtagaactgaataaatattaaatattagatcaagtttctcatgtttatcttaacgtataacgatttatcttaaagcactgattttcacaaaataacatcagtgtgaaattggaaaagaagccaaatattttatttcacgtatctgggaaatgaggtgctttagtcaactgaatctgcccaaaactaaaaagcattaattaaaaagtacttaactcagaaattataaaaataggagacatcaataaaatacattctacacagaatacgccaaccatacactactcttttttgataataaaaaatgtatttactgagccagttgtggtggctcacgcctataatcccagcaccttggaaggccaatgagagtggatcagttgaggccaggagtttgagaccagcctggccaacatggtgaaatgccgtctctactaagaatacaaaaatgagccgggcacggtggcacgcacctgtaatcccaggtactccgaaggatgaggcaggataattgtttgaactcaggaggtggaggttgcagtgagccaaaatcatgccactgcactccagcctgggtgacagagtgagtctctgtctcaaaaaaaaaaaaagaaaaaagaaaaaaagtcagttgcagtggctcacgcctgtaatcccagcactttgggaggctgaggcaggcggattacaaggtcaggagatcgagaccaccctggccaacatggtgaaacctcctctctactaaaaatgcaaaaattaggctgggcacggtggctcacacctgtaatcccagcactttgggaggccgaggcgcggagatcacgagatcaggagattgagaccatcctggctaacacagtgaaaccctgtctctactaaaaatacaaaaaattagctggatgtggtggcagcacttgtagtcccagctacttgggtggctgaggcaggagaatggcgtgaacccgggaggcagagtttgcagtgagccgagatcccaccactgcactccagcttaggcgacagagccagactgtgtctcaaaaacaggaaagaaaacaaaagaaaatttggactattgccaattacaaatatttttagagaagaattcaaaacagtaactgtggatgatggaaacaatagttatgataaaagtctgatgaaacttcccagttcacaaggaaatttaattacttatgtgcagcattttaagacagtaatcagaatcatgactgacagcatcatatcagggccagcagacttttataaatttcatacaatcttcagaaataataacttttttttttttttttggatagattctacctttgtcacccaggcgggagtgcagtggcatgatctcggctcactacaacctccgcatcctgggttcaagcagttctcctgtctcagcctcccgagtagctgagattacaggcatgtgccaccaggcatggctaatttttgtatttttagtggagacagggtttcactctattaggctggtctggaactcccgacctcaggtgatccacgtgcctttgtctcccaaagtgctgggattacaggcatgagtgacggtgcccagccattcgtgacatgtttatacaaatataactttagcaaatatttagcataactatcaaaattacaaatcatattaaatttgtataaatgtatgcaatttttggaacacgcatatcaacaacatacccataaatataactgagatgagatctaatgtcacctcacttgacagtgccctcccatgcagtatcgccacatttgacaatgcctgcccatttaatctaccaaataaatcgaatcacttaatacctctacaagatgagagatacattctttagactccccaagggatgcagctgaaaaaaatcccaaagttagttttaagccaaaaagacttgatttaggattttgacactggagaaacccatcaaagatgtcaagtttgaaaacacttgatcaaaacagaatcacaggtcactattaaaagagtattaatttaaccagagacttccaaagcaatacagaaacttacatggatataaaaaccctaacccttttaaaggtcagatttgctaagtgatcaaaaggggtacttgaattgaatcgacacaggaagagtgtgtacagggttatgagtgtaggcaggtggttactttggtcatatctccatttgccacctgattacacatgagaatggcatctttactcaccagaaagccagtattataggaggtgtaggaggcattcttggacttgagacaagaacattgttgtgtagaaatttcattgactgtgttaaaattattctccatgggctggagaacacataacatggcctttagaatgagacgggcattgattggatgcaaggtctccacacttactagctgtgtgacattggacagagtgcttcatcattccgagactcagtttttaaaggaaaaacaactaactaccttgcaagctt

SEQ ID NO: 96 - DNA, 60966 bp, Homo sapiens
gatcacaccattgcactccagcctgggcagcaagagcgaaaattcatctcaaaaaacaaaattagtaggacctggtgagatgcacctgtagtcccagctacttgggagaccgagccaggaggatctcttgagcccaggagtttgaggttacagtgaggaccactgcactccccctgggtggcagagggataccatgtctaaaaactacaatcaaaaaaagccttttttttaaaagttactttggttttaaggaataagaagccttgaaacactcagccctggactgaatcctccaggcaccagagctgtgctggtctggacccttccaccccacttgaaacctgttggccctgttgcaaccctctcttgctttccctgagaaccctaaggtgaccccaggggctgctgatggagacagtcacctccttgccctgctccctgcagcctctcactttggctgctttgctatcataaggaaggaaacataaaagctactttttagcattacaaagttaaaaaaaaaaaacacccgggcacggtggctcacacctgtaatcccagcactttgggaggccgaggcaggcagataacaaggtcaggagaccgagaccgtcctggctaacatggtgaaacccgatttctactgaaaatacaaagaaaaattagccaggcgtggtggcgggcgcctgtagtcccagctactcaggaggctgaggcaggagaatggcgtgaacctgggaggtggagcttgcagtgagctgagatcgcgccactgcactccagcctgggcgacagagtgcaactccgtctcaaaaaaaaaaaaatcacgtagatgaggtagcaaccttgggtaaggcattctacatcctttatttgtgagatggatatatttttctgatttccaaatatatgctacaagtcatacagagggctgggtgaggtggctcacaactgcaatcccagtactttggaaggctgaaatgggacgatcacctgagcccaggagttcaagaccagcctgtgcagcatagcaagaccttccctgtctctacaaaaaaaaaagaaaaacaaaactctaacaaagatacaaaagtgaagtcatttagtaggtgtcagattgatggccctggggaattgactggctcaccctgacaccaggcccatactgcccttcaggaatgtgtgtcctcatgcagagagatccaggtgtcactgatgtcccagtgaagaagcagtggcatttaaagacagggagaaatcccatgccatttagggctttgtgtctgaaaggcatacgcctccgttctgtggccatttgcacttacacagaagccctcactttcctctaatgaactctactcattatccaagtggataaagccatcgttcgatcagcagatgtttcccgagcacctactggatgtcagcttgctgcaggcattgcagccacaactttaaagtcaaacatcatggggcttttttttgtaagagtcagggtcttgccctgttgcccaggctggagtgcaacagcacaatcatagctcactgcagccccaaactcctgggctcaagtgatcctcccacgtcagcctcccaagtaactggcattacagcatgcaccaccatgcctggctgattttttttttttttttttttttttagagcgagagacagggtctcgctgtgttgcccaggccggtcacaaaaagaggggctttatctaatgtcctctgtttgtatgtatttgaagtgggcgataaagctacatgggaaacggatgttaaaaagcgctaggatgtaatttctccagtgccttagagcatcgctaactcacagtggatccacaccttgaacccaatcctctggctcccagtcagcgctcctgacacccactgacgctagtggacgccttccacaagagaatgcttgtatttggagcctttgggcacattacttcccagctcaccagtgctcactgagagcctccccttcctcaggggagatgggatcctctctgtctagcccacccgtggacggacggagctggcagagaggcgagcccgttagcagcaggcatatctggcttgtaaagaagagatgtcttggccagccgctgcggctcacgcctgtaatcccagcacttcgggaggctaaggcgagcagatcacctgaggtcaggagtttgagaccagcctgaccaacgtagagaaaccccatctctactgaaaatacaaaaattagccaggcatggtggcgcatgcctgtaatcccagctacttgggaggctgaggcaggagaatcacttgaacctgggaagcggaggttgcggtgagctgagattatcccattgcactccagcctgggcaacaagagcgaaactccatctcaaaaaaaaaaaagaagagatgtccatggggtcaggagaaatgaggtccagtccaactgtgtgctgaatagattgatgttagccacatcatggccccaaatggagaagggacacaaagctgttgctggccaagcacgatgtccaacgcctgtaatcccagcacctttgaagcccaagacaggagaatcactcaagcctaggaactcgagaccagtctgggcggcgtagccagaccccatctctacaaaaaataaaaaaaattagccagacgtggtggttcgcaccagtagtcccggctactcaggaggctgaggtgggaggatcacttcagcccaggaggtcaaggctgcagtgagctctgattgtactgctgcactccagcctggacaacacagtgagactgtgtctcaaaaaaaaggaaaagctgttgctatgaggagacattgttggacccacatgggcctgagctcggtggcataggccaaagctttgtagaagggggtgtagtattctgaggcatgaagtgactggacatgtccttttgaagtctacccgccacagacatgcacgtgtgggctgtcgtcagctctggggagagcatcccatggccacagactggaaaggaaagcttctccgcccaaagggaggagggggaattcacgtgttgactggtcgccttgcttacctctgctgggatgcagtgacagaaatggggccagctttgtcacaggtgccaggcttagctgcaggtgccaggtttgcaccttgctcacccaggctggggctgctgcttgtgtgtggcagtgctgtctaccctggactgtgtctgaagagctcccccttgccagccccatggtgcccaaatcagaaccaccaaatctcagggttcagggagacctcagcccagctctagtacggctcctctgtcacagtcccctctctcctgtgtgattgggcatcccttccagttggtggccttccagagcttcttgtgttagacccggcttctcagtgggatgcagcagcttctgtggaaaaaagcccccaacttctgctcttctgttgcatcacacacgttgccactgtccccacacacagcctctagctgaggagcctcacctctggggccacacttctgacggcaggtgctggccccgccactctgaggaccccgagcccctcctgtccgtgccacaagaggggaccacaggaggcagacgcttgggctggcagagggcctgtggtctgggctcctgcgtgtgggtgcatgtgtgtcaggggctcgggctctctcccacagctgtcctcctggccccctgtgtcttggcagtagctgctctcgatgcagctctgtgctttcccagtgcctgtgacattcccagctgctgctcacccttgccctagagatctccagccccaaggctgcccccagccgtggatctccaggcctcactggctcctccgcactcccttcgtgaatactctctgctgcatccaggatggtctgaaaactcccatctgggcaggtgctttcattttccacccctgactgagtcagcttccaggggtgacaccagggcattctgaccctcagctaggagtggccgctgttgccgcatgagtggcagagaccatcgggcttcagcctcacctccctggccctctgccttttttatgggcttttcagtgcctggagcacctcctgctcccccttttcctggagaactggcccctcacttcccatacttgccacacatgctgccctgccccatgcagtcctcccacagagtgcgatgagttagggtctcctgctgtgctccggatccaccttccagcaaccaccgaggctcttgtcaggtgcaggttgctctgaatgtgtgtggcacatgcgagtcgctggggacagcgttaggcttgtgtgcttgggaccctgggtggtctgatgggctgtggtcagtggcctggactagcctgggaactgttggaacatggaactttagggcacagtggtccctgagttggagcctgttgtctgaactgccttcctggtgtgcatcttcagtgccatcccgcagttctgcctgtgtcagcccttcctggagccccctccctcccctctgagagactgactttgcttatagccaagcatctttcaaatgcctcttgctcagaaggactaaccttgccccccaagacccattctccagttgaaactgatttctcgtgttatgctttgctgaacgtccttcctctctgcctgacctctgactgccagccctacttccgtgtgacacctgggggccttgctgtggccaggtcacctctgagctctgttcctttctgaagcagctcccacccatgggcctgtggggtctgactccaagtgcgagcccctcctctgatgtcagaagggcatgtcccctcctgcccaggcacccactggggctctatagcttccattcccctggctggattggaggggagtaagcctaccctctcaggccaagcgggccgccttcttgttacctggatacctggcagcctctgttctcaggacaacctgtggaagccccagagcgagccagtaaccaggtgccaggtgtttgcctgagaattaatcgttgttttctttctttttcagtggttgatatcacagcaagtatcctttccgtgttggtatggttccctttaaggaattctccacttaaataaaaagaatgtatcaaagcttgaatcccacctcccgacatgccctgtgagttgaggctcggcccacagagcacctggagtgtcccccacctggccctctgctgcccttgggcgctgtgctcctctttgtgcttctcttcgtaccttgcatccagctccaagccctgccctgcagcaagctcaaggttcactgggggaacaggaaaacttggaatttcagggcaggcagggacgtgtgtgccctgcagaccttggcagggtaggagccccaagctgtggccctttcaaaccgacctttttcgcagtgtctgtacttccttaactggacgtcactagatcccgcagttcgaagatgttaaatttgaagcagcaagtctgttgtctgaattgtactgtcaagaggtaagaacatattaaggtttctgaaagcaaagtgtctctccgtgtcgctaagacatgacagcacattggtaaattggggttccgggagttggaatccctccggctttttttgtttttttggtcggggtgggaggacagggtctcactctgtcgcccaggctggagtgcatggcacaatcatggctcaccgcagccttaaactcctgagctcaagtgatcctcccacctcagcctcccgagcagctgggactataggcatgcaccaccatgcctggctaattttttttatttgttctagagatgatctcgcccaggctggcctcaagcaatcctgcctcgacttcccaaagtgccaaaattatacacaggaaccactgtgcccagcccggtggcttttaacactcagattactttcctgcctcttatgccccagccccagggctttggtgggtagccacctgctaaggagggccagcagcttccttttctacataagactgttggaaagatcagcctgttcctcacctgacaagtctgtacagtttctcttcttaatctggttcctaatttcaattgtagccgaaatctgccttcctcccacctcagaatgatgacgggtaaggtggcattggcagcagggaatgtgtgtgcttcacaccctgatgcctctctctggtctgagaacataaaagaagggaactggcgtctgatttgagtgtttagaattttgaactgaaactactttcagtccagttgaatgagaagttattttaagagtgatgcagaaacttcccagccagtgagtccaataaaatatctttttttacttttaataaagtaaattggcaaccccaaaaaatcctttggtaagcatgaacaggaactgccttctggcaccacagctgctgctaaggaatccagcttgattgccgccttgttttttttttttcttacattcccaaacgtgactatttcctttcagaattccgttgatgcagcaaagccgctgctgcggaaggcgatccagatctcacagcagaccccatattggcactgccgcctgctcttccagctcgctgtgagtaccgcggcccgggaacgagggtgcccggcagggaccatgaccctggggcacacctgccccatttgcaaagaacagcagagtccacgatgcgcagaccccctcgggctggcacatggagtaggtggggacatgggaacatttccttaacctgcacacaagcccctttcagcctccatccttgagagcatctctggcttgagcctggctctcggcaacacccaggggtgagtggtgggagtgcggggcttccccggggccaacactgacagcgggcctgctgcttgttgggtgtctttgggttcccctccctcccagccgttctcatctcatctttggcctgcactcattgaaatcccaggaacatttcctgccagagacccactgtgggttttttttaggagctacactgagactccaaggggctgcctatcaggccacaaatggccatgtcaagcattgtgtcccacatggggcccctcacgttggaggctgctggggcacaccctcatcctgggatccacacagttcctcctcatgctccctttggcccccccagatataggtgaagccctggtctctgagctccacagtgctcggttgttgggggactctgaactcggccttcccggctgcagtggaggggccggcaggctccaccacgtggggcacctctcctgtcctgggctccacccatacttctgcactggggaccctcaggcgggtggccggcccccggcctctctcttccatgacccagcctgccttccgggccaccacttagccacctcccatgacacctatgcagtatgtggaccctgggttgggagttcctccagctgagtccctcaccccaggagggtctggctgagaaaagtacgcacagggaagagctcccccagcagccaggagttcccgaggccctcctcccccaggcctgatgagaagctgcatacacatgctgtgtccttccatctccccacgcactcttgtgcccattagcagacaaaggagcaggccaggccgtgagtcacctcccctgggccacagagttggcaggcaccatgtgcacgcacacccaagggccgagctcttcaccacagccccataggtattgccttgcagggtcaagccaggcatgtgcctccctttcagcctgttcagactttgacacttgcctctgagggagtccctccttgtcggccctggaacacactagggacaccccactgaagacagaccccacaaagcactcagaacagccttaggtgctcacacagccttgggggtctgtgccgtgagccttggctgctggttctatgctccattaagtttagatagtgtccactgcaggcaccattcagtttagatgacatatatactacaggccaactggagctgtgtacccaaagcaattagcgttgataagataatttggttaatttagctcaaaactgacacaggcagtttcactgacgtggggaggtttggttgagtttgctaacagagcacgaaggcaggtaccgtaaaactgatgggtttggcagcaaaggtcactgctctctttcctttttagcaactgcacacgcttgagaaggacctggtgtcggcctgtgacctcctgggtgtaggggccgagtacgcccgggtggtgggatctgaatacacacggtaggcacccactcccctccttccctcctgctctgttaacaggaggggcttggccatcttggtccaggacaaataacagaaatggcatttcaggtgaagtacagtagctcacagtatattcccagcactttggaaggccaaggtaggaggatcacttgagcccaggagttcaagaccagcctggggaacatagtgaaaccccatctccacaaaaaatacaaaaattgggtccgggcacagtggcttacgcctgtaatcccagcactttgagaggctaacgtgggaggatcacgaggtcaagagattgagcccaccctggccaacatggtgaaacctgtttctactaaaaatacaaaaattagctgggcgtggtggtgggtacctgtaatcccaggtactcgggaggctgaggcaggagactagcttgaacccgggaggcagaggttgcagtgagccaagatcatgccactgtactccagcctggcgacagagcgagactccgtctcaaaaaaaaaaaaattagtcaccatgaggcgcgggtttgagcctgagttcaggcacccaagcctgcccactggccccaacgctgtgtgtccaccgccgcgtttttttttgttgttttttttttgtagagatagggtctcaccatgttgcctaggctggtctcaaacttctgacctcaagtgatctgcccaccttggtctcccaaagtgctgggattataggcatgagccattgcacccaaccgccttctgggcttttcacgtgagtgcgtctaagccatgtaagaaaaataaatacaggccaggcacagtggctgacacctgaaatcccagcactttgggaggccgaggcaggtggatcacatgaggtcaggagtttgagaccagcctggccaacatggtgaaaccccgtctctactaaaaatataaaaattagccaggcatggccgggcgcagtggctcacacctgtaatcccagcactttgggaggccaaggtgggcagatcacgaggtcaggagatcaagaccatcctgtgaatggtgaaaccccgtctctactaaaaatacaaaaaattagctgggcatggtggcgggcgcctgtagtcccagctactcaggaggctgaggcgggagaatggcatgaacccaggacgcggaggttgcagtgagctgagatcgcgccactgcactccagcctgggcgacagagcgagactccatctcaaaaaaaaaaaaaaaaaaattaaccaggcatggtgccaggtgcctgtagtcccaggtgctcaggaggctgaggcaggagaatcgcttgaacccgggaagcataggttgcagtgaatcgagatcacaccattgcactccagcctgggcaacagagtgagactctaagaaaaaaataataaaaaaaataaaaacaggccgggcgcggtggctcacacctgtaatcccagcactttgggaggccgaggcgggtggatcacgaggtcaggagatcgagaccatcctggctaacacggtgaaattctgtctctactaaaaatacaaaaaattagccgggcgtggtggcgggcgcctgtagtcccagctactcaggaggctgaggcaggagaatggcgtgaacctgggaggctgagcttgcagtgagctgagaccgcaccactgcactccagcctgggcgacagagcgagactccgtctcaaaaaaataaataaataaataaaaataaaaataaacacagacacaataggataaaacagagcagtcttgtaaggggactgttctctgttgtccactgaactgtcccctgaggtggcatattaggtcctgtgagccttggggtaatcacagtcatcccaggaggctcctgggcctgctaggacctgacccctgcctcttgttttgcagggcgctgttcctcctcagcaaggggatggtaagttgaggctgggcatggctggatgcagctggtgttgtggaggtgaggcagggcccccacagagtctgctcagaccccacccactctccatggcatggccccttaggcgcccagacccttaggcacagtgagcagcctggaatgtgaggcccgggccctgctgggttcaggagggaaactcaggctgcaccctatgggattcatgctgaggcaagagcctggttaggagctgcctgggctggggtttcaggctggccttgccctctggattggtggcagcagtcccagggcaggtgggcaggtgaccctgtgctcccggtcctgggagggcccctgcaagccctgtaccctacacctgcgcctctccctccccagctgctgctgatggagcgaaagctgcaggaggtgcacccgctgctgaccctctgcgggcagatcgtggagaactggcaggggaaccccatccagaaggagtcgctgcgtgtcttcttcctggtgctccaggtcacccactatctggatgccgggcaggtgtgtggcgcctctcaggcgagctgctggttgtgaccagtgggtatgggtggtacccaggccaatgggtcttgggctgtgaggtcagctgtgtcatcgccttaccttgccacacaacagggctgtcataccagtcccggacacacacactcctgtcctgctctgccacgagtgctggtatctgggaacagggtctgtcctggccaccccacctccctttgggagtactatgtgtgacattgcatacactcgctcagtgtatggatgctcagagattccaatggcagttcagggaatcatgagaataaaccacagaggtgctgggatggcacctgcacacagcagatgcccaggtgctgtctgtctggcccccggctgtggggttgagtagggactgatgtgctcagccatgtccgagactggactcatgaccctgccgtgggtggggagcggctgtgtttgagctccttgtctctgtgcttgtgtgacagtctcagcccttcgggggctgggggctgccctgtgccactcagacccacccctgtcgcagtgggccacaggcgagtctccacagggcttggtaagggggttgcccagttcgtccatccatacccatcgttgcccattgggtgaagcactgcactcggcgcatagggacacagagcagactgcagccacgcttccctcagggtgcaagggctgcagagacatccctcggggcctcagggcgagatggaccacagcgcctgcctgattcctgggccaggaagccacctcccaccccctcagagcacagcctccccctgccgtctcaggtctggctgcgtgaagaccaagtgcagctccagcagggtctggataggcctctcctgggccttggtgttggacccaacactgggcagtggacaagcctcagtcccacagctgcccgcctggctgtgccccatgccccaaaagcctggctgattcatgggagtgcggcaggggcggcttcatcttgcaggaggtggccctggcagaaggggaaggcagatgctccctagaggaaggagcaggggtggctgggctgggcctggcttcctgagaggccaggctcaggtggatgctcgggtgtgggtgctgcacaggtgaagagcgtgaagccgtgtctgaagcagctgcagcagtgcatccagaccatctccacactgcacgatgatgagatcctgcccagcaaccccgctgacctcttccactggctgcccaaggagcacatgtgtgtgcttgtctacctggtgcgtccccaccagggcccgggccagggctgggggcgggggcagggagagggagagggccctggtaacccctgctgtctggtcttgtcgctaggtgactgtgatgcactccatgcaggccggctacctggagaaggcgcagaagtacacggacaaggccctcatgcagctggagaagctcaagagtaagtcaggtgctcggctggccacatggccacagcgacccctggcggacggcctggccagacgctagctgtaccagggcccagtgaccctgtgtgaccgcagcgcccagccaccctgcctggtgggtctcgtcacccctagttgataaatgctggtgtccaacgtcagagcagagcagacaggcctggggtcgggggtacctccctgactggtcaggtcccttgtgcccagtcatgctcagttgaaacaggtggtagctgcttttcccaattattatcagtgttgtgacagggacactcgggatgaggccaggatcagaactcagccctcactgaccaccagcatgtcctttggaggtcgtgagttctttccagatgctcaagtgtctaatccatccagggacctttgactagcacaaacccagagcagacgtccctggctggtatagtgtgcccattagtcggtctgtttgctccctcgtgagtgctgctgggggagaaggcatcagagccaaggcagcccaaagccggataggccctgtgcttctcttattcccatatgaggatggttgcttggggctgttgggaggtggggcccagcccaggtccccctacccgactgcctgaggctctgctgcatggtgtcatgatccagggtggtttccacatttctacatttctagaacctgccatgtccacaagctcttgagcacgtagggtgagggtgagggtgagagccaacccttcttggagcactgtgggaaccaacctctggctccagctccgtctccccacctggacagcaagacacactccttcactcagagggtgcagtggggactaggggagatgacggggtgggtgcctagccagtgtggcaggagacaggaacgaggtgggggcacggtgggctgggggtggcgcctcctctggcctcccctgcatgcttacccctgactctcacccatagtgctggactgcagccccatcctgtcatccttccaagtgatcctgctggagcacatcatcatgtgccgccttgtcacgggtcacaaggccacggcgctgcaggaggtaaggctggaagcaggaggggcgggaaggcccaggagtttgttgggtctcagcagtgtcagacaagagactgaattcgccaagtgcatactggcaggccagcccatcctgctgtctcgctgtcggccagcgttttacagccctgcatgggcaccactgatcagagaatctcatacaaaaaccagtggaggccgggcgcagtggctcacgcctgtcatcccagcagtttgggaggccgaggcgggtggatcacttgaggccaggagtttgagaccagcctggccaacatggcgaaaccccgcctctactaaaaatataaaaattagccaggtgtggtggcagacacctgtaatcccagttacttgagaggctgaggcaggagaatagcctgaacccaggaggcagaggttgcagtgagccgagatcgcactactgcactccaacctgggcaacagagtgagactccatctcaaaaaaaaaaacccaaaaaactaatgggccatggcccaaaagcttgcacaccaaggggatagcgcacatggtctctggggatttggggggtcctttgacagtgattgttataccccaccctgccattaggaacactctacccccagtacccaccctcctgagagggcatgggggccctcagtaggctggaggtcctttacaacccagacacctgttggacagagtggaagagacgagtaacagacaagggtccctgtccacgatgggatctgggctgccctttgccctcatggtggacgtgtctgctggggctttgtaccccagtttggtcagacaggacatgggctcacccaccagctatggggtctctccattgctgctcagacgccaggtcccaggttgcagtcctgtgatggcagtacactctctcccggcagatctcccaggtctgccagctgtgccagcagtccccccggctcttctccaaccatgcagcacagctgcacacattgctggtgagtaaccctgtgacaacaccccgggagaatccagaatgttctcagtaagtaagtacctaaccagatccagaacattcccagtgaaggaccccctgacagcaccctaatcagaatccggaatgttcccataggtaatcatataaccttcccaggcacgatccggaatgctcccagtgagcatcttgtcccaccccacattggcttgggtctgaaaggtggggacagtgagcatattacctgccttgcagctggctcggtagagccattgtcatactcctccagggcagccgtgcaggccccgggcacaccacgtgtctctgatctgagccccctccccaggggccggccctgatgacaacaccaccttcttccagggcctgtactgtgtctctgtcaactgcatggacaacgcggaagcccagttcaccacggccctgcgggtaaggtgccggccctccttgctgctcggggcgggccacacttctgagtaaggagtcgggcgtggtctgtgatgaggacagcagtcgcgctaggtcagctatgcaaagccgcagccccagaggcaatgcacagtagtcagcccatgccagccttggcagtgacgcgctgtttatctggataagggacagctatggggccaggggcttcctgagctgacccaagggcagacgtgagggagaggtgcgacgcgtccggggacaccactttcatgcctgagtgggaacttttgcggcacccacccccaaggctggattggctcaagtgtcagctgacaactcagagccatcctgggttcagggctcccatggggagtggtggagctgggccatctcccaggtgctctttggacagaggaggactcttggtcctgctgggccggagagggtgaagcagcaccccaggctcctggccttagacgggggccccgccaggccctggaagaaggctggtgccacatcctcacggagcgccccagcccagggctggaccattgtgtccccacctcagcctcaacctcctcacaggaaatggaggctgtggacacctttttcctggtggtgccaggaagggccctgaggagaggtgtcagggagcagaggctgctctgtctgccactcgggcaaggtcaccagggagtcctgtgtgcgccctgactgttggacagggttcccattccacggcaccccgcaggcctgtgggtgctgccacccccgccactggcctcagagatgcacaggagccctgacatgcagacagcatgcttgggagggaagggctgactcagcacccactcctctgcctcctcacctcgctcccaggaccctggctcactctgactgcagcagggccaggaccctcctcgtggccctgccatcctgccatctccgtctccgtctcactccccacaagtggttgctattgctggtttggttccgcgtcaaagttcccaaggccatgtaccctaaggagtcctcaccccgaggccaaaagagagcctctttttcatggcccacccaggagtgatggagccaggatgcaaccccaacacccctaaccccaaacacacacgcctcctgtggccctgaaacaaacatctcccaccttgctacgtctcagagcatctgtgcttgattcggaagatcctctgggcctcctgggtgtgtgccaggaggggatctgtgcaggtggggtctgtgcttcctgggctcactccacctcttgcccagccccactgggaaccagggtctgagcagggcttgagctacatagattggaccctctcttgacgaacgatctcatttgccaagaagagccagggaccatggcccatccaccacctgtcatcagcagcatttctggtctctgacacagcatcacctacctggagcggggcctgtgctggccccctgtgggacaacagctcccctcttccccacttccccctatgaagagtgacccccgcctaggaccagcatatgccttgatggcagtggacacctgggtcccacaggttgctggctgtggcctggaggaagggtccaccaggtctcagtcctgagagacagtggaaaatggaccaaaacccgacatgttctgagggtaggattggggtggctggttttcctcttctgtgttctctaactgccccgtaacgcagatgatggttttataatgagaagaagtaatagctgtgttatccttgagcttaggaggcaaaacaagtgtgtttgaaatgaaaagaacaagtcttttccaaagtagtctccgtggagattgtgggtgctctgacactgccacatgggtcacagcacccgacccagccccctaatgtccccgcctcccattccagctcaccaaccaccaggagctgtgggccttcatcgtcaccaacctggcgagtgtgtatatacgggaaggaaatagacaccaagaggtagtaggtgacatgcttcatgttcggtatcctttctctctgttctcttctttttggggaaccagggggttgtcctgggcaccagcacatctcagcagaccccagggtgttcaccttttgagggatgggcggcacccgacacagacacacaaggcgacccagaggtgaatcgggctatggccgggggaggccaggtctgggacaaaaacattcccatagccacagaacacttctctttatcacaaacaaaccaagctgtatgaatcacacagacaaggtcttatagcccaagctgtctgctctaggatgtcggccaggcattgaggctcagtcctaaggggcagcagccagagcaccttgtccccaggttgtgctgatgcccctgcaggatcaggggcactcactggctgcagtgttgggtggggatgcccagggttgccctcacgtggcgcttctgaaccaatgcttgcataagagttaggttccctcttctgtcccttttagccctgggatccccactcagccctgggatccccctcagccccgggatcccctcctcagccccgggatcccctcctcagccctgggatccccctcagctctgggattccctcctcagccctgggatgcccactcagccctgggatccccctcagccctaggatgtccctcagttctagtatctccttcacctctgggggtctacctccaaagtgtatcaggccaggtgcttggctcacacctgtaatcccagcactttgggaagcaaggcaggaggatcacttgaggtcaggagttcaagaccagcctgggcaacatagggagacccccatttctacaaaaaaattttttaaaaacttggtggggtgcaggcctgtggtcccaactactcgggagactgaggcaggaggattgcttgagctagggagattgagggctgcagtgagccatgatccagccactgcactccagcctgggcgacagagcaagaacctgtctcaaaggaaaaagaaagcccagccccggcttagtcatccgatgccatacgtgggctcgcagtgttgaggaggagtttggctcccctgtgcctctgcagctagagggcagctaaattatcagtcagatcacgcccccatcagagcctcccggggtccctgcacctccagagaaatcccacccactcacccccacagcccacagggctcacgggccccagcctgccaacctacccactgccaggccagcccctcagcaccactctgaccatacaaaggccttctggacgcccaggcccctgtcacctactgcaggacagggtggcacaggcagggctggctgagggtgtggaaatcttgcccccggcccttctcaccagaggctgctcttgctggtcagtcaccaggctcagcctggaggccacagtcccgacgggggtgtagagaaattcccatgcactgcagtgtgtcttggggacctttctcctgtgaagatgcagaatggtgctgactggctctttcccccgcagctctacagtctgctggagaggatcaacccggaccacagcttccctgtcaggtgagccgctccaggcaccactccacgcacggcctaggctccccgtgctctttggttggggcccctgactgccccttgcaccctgacaccccatacccctcctcacagacagtctgcagtgggggctctcagaaatagcccccagctgcccactgccgttttgtaaacctgcttctcaaaatcaccaccccatgtgatactgcactctccctgcagctcgcactgcctccgagcagccgccttctatgtgcgtgggctcttctccttcttccagggacgctacaacgaggccaagtaagtgtggggcagagggtggcgtgagggccatgctcagggtagcccaggccccgtcctgcagttatcagcgtccatgttctccttgtcaggcgatttctgcgggaaactctgaagatgtccaatgctgaggacctgaaccggctcacagcctgctccctcgtgcttctgggccacatcttctatgtgctgggaaaccacagggtgagtgccctggcctgggcccctcgcttgggtgcctgtggggcttggctgagggacaggagccggccagcaccctaagggtggcatggcactgttcatcctatgcccctcgaagagcacgtctaggtggatgccctgactcccacagcctgggcaggcagggccagaggagctgggcacccacagagggtgtggggggaaggcaggaggcctgatgggtgtggcctcagacattgggcaggcagagccccagggctcaggggagctgaagccagaaccaaaggagctgccctgagctactggggatgacgcagccaccccatgctatgtgttgacacctgaggggcagagaggtgtctcctctcagccggacttccaaacatatcatccttggccaacacagtgtcctctcagggtacaagtggcccctgggattggtccccacccaaggtcagccagtctctggtgggactggccgcctcagtccttcctgtcaattcctcgcctactctcacccactgatctcacgaggtcttgaattttttttttttttttttttttttaagaagatattttgggcaggcacaatggctcacgcctgtaatcccagcactttgggaggccaaggcgggcagatcacctgaggtcaggagttcaagaccagcctagccaacatagtgaaaccctgtctcttactaaaaatacaaaaattagtggggcgtggtggtggacgcctgtaatccaagctactcgggaggctgaggcatgagaatcacttgaacccaggaggcagaggttgcattgaacggagatcatgccgctgcactccagcctgggcaacagagtgagactctgtctcagaaaaaaaaaaaaaagatgtttttgggacaggcacggtggctcatgcctgtaatcccagcactttgggaggctgaggtgggcagatcacttgaggtcaagagttcaagaccagcctggtcaacatggtgaaacctcatctctactgaaaatacaaaaattagccaggtgtggtggcacacatctgtactcccagctattctggaggctgagacaggagaattgcttgaacccaggaggcagagaggttgcagtaagccgaggtcgtgtcattgtactccatccagcctaggtgagagcaagactccatctcaaaaaaaaaaaggccgggcatggtggctcacgcctgtaatcccagcactttgggaggccaaggcgggcagatcacaaggtcaggagatcgagaccatcctggctaacacggtgaaaccccgtctctactaaaaatacaaaaaattagccgggcatggtggcaggcgcctgtagtcccagctatttgggaggctgaggcaggagaatggcatgaaccaggaaggcggagcttgcagtgagccgagatcccaccactgcactccagcctgggcaacacagcaagactccatctcaaaaaaaaaaaaaaagatatttttggccaggcacagtggctcattgcttgtatccctttgggaggtggatgggggagaatcccttgatcccaggagttcaagaccaccagcctgggcaacctagtgagaccctctttttttttaatttaattttattttttgaggccgagtctcactccgtcacccaagttggagcgcagtggcatgatctcagctcagctcgtggtaaccttcaccccctgtaggctcaagtgatcctcccacctcagcctcccaagtagctggggccacaggtgtgtgccaccatgctcagctaatttttttatttttggtagagactgggtctccatgttacccagactggtcttgaactcctgagctcaagcgatccacccacttcagcctcccaaagtgctagattacagcatgacccactgtgcctggccctagagatgctatctcttaaaaaaaaaaaaaagatattttccagccagacacagtggctcaggcctgtaatcccaacactttgggaggcagaggtggaaggatcatttgagcgcaggaattcaatatcagcctgaccaacatagtagatctgagatcccatctctacaaaaaccaaacaaaaaaattagctgggtgtgtggactcatgcttgtggtcccagctaattgggaggctgaggtgggaggatcacttgagcccaggaggttgaggctgcagtgagctgtgatcatgttactgcactccagcctggacaacacagtgagatccgtctcaaaaaaaaaaagttatttttctagattataaaatatgacatgttcataattaaaaggctgagaagcaaaacagaaaaaaattgcatgtctctgtcatccatcccttcccactgcccacgtctcccacgtggaggttttgcttgtcagcctgtttggtaatttttttttttttttttttttttttttttgagatgaagtcttgctctcttgcccaggctggagtgtagtggtgtgatctcggctcactgcaacctctacctcccaggttccacggattctcctgcctcagcctcccgagtagctgggattacagtcgagcaccatcacacctggcttatttttgtatttttagtagaaatggggtttcgccatgttggccaggcttgtctcaaactcctgacctcaggtgatctgcctacttcagcctcccaaagtgctgggattacagacgtgagccactgggtaattttatatttgcctttctccacacctctgtattggaagcttttttttttttcttaatggcaatgagtgttttgaagccacatctactctgtagtttaaccattctcactgtagccatttccacaggacagataaagcaagatgtgtgtcttggcctgtaaagtttcacgtgatctgagggctccctcagcatggatgctgttaacaaacgtggtgcccgcccaccgcaacacacagacacataactgtgtggtaagcctttgcagaggccagcgaatgggccctgcagctcaggccctggtgggccttggcctcagcactggggatgccactaccccgtcaaaacctgtagctggctccttctagaatgtgctatcaccctgccctcagcctctgagcacagtgagggctgtatgtccccactggacagtgcaagtggcctgggggtgtgtcagatggggaggttaaagtcacacagccccagaccgcagaatcaggactggaacccagacctcactggctctgatttgtgtagaaacccctggaagctgcctggagcagggcaaggagggttgagcagctggttcactgctgctcctggcccatgttttaggtgttgtgggggcatcttacagagctcttttgggaatccccctctgctccctgtgtccctgggcccttgtcgggtgacaagcggcgcccaagaactctcagaccaaggtcctggccttaagtgactccagatctcggggagacacagccagacacagccaagccagtcctgtgaggtcaggctggggacatccagaaaggtggcagccttgggggccgggatagtgttggtgcaggcagggcaaggttggctaggcaggggctgccacagagatgggcaccacagcagtcagagcacaagtgccggagcagacggctgaatggccacaatgggctcaggtgagggtccaggggcccagaagagcttgggatgccctgtcctgagcctgttaggctagagtgtccacaagagcgggacaccccccaggatcactcaagtcttcaaaaccagattctgtggggtaccccaagctggcattgggggaacctacccaggagcgctgaaggaggactctccttccccaggctgctttcagacagaggtccttggctttctacagggagcccagccaggctcacaataagccaggcctagcggaagagagcagtttttcttgctctgaggtttcaaaagggcttggtgaattttaaaaagctccaagacccacctggagctcactttcaaggtgcagctacagggcagtgtagagttgttgggctttgtgtctcaggaggagcatctctgcactctggagaagtatctggtggcgtcaaagccaggtctcaggagttggttttggggatgtgtccatcttggcttcccaagtgctccctgggctgccaggagccatcatctagggaattttccaggtcttacctgaaccccacatccaggcttacagggctttgagtcctcggtccagacagggtcagtccagcactgctggtcgcctgtgtagcacaggctcctgtctgccgtctccaggcccttgccatagcaacagggatgggcatttatgggccctgatggctcttactgagctcttcctgccacatcctgaggatgctagggctgcaactggggtggccctgtgcagtcacaaagcagggagtccggattggaggattcttacatgctggtgcccccagagcccctgcgtgtctgcgggggcctcccatgagagccaactcaattgtggaagacaaaccggaggggctgctgcccttctcagaacctgaaacctggaaccctatatgaatctgcatttctgatcagcccccattgtgggtctagggctaacggccatcagtgctttttctctgcttgaacaggtagaagcccccaaagttgtccattggccatgcccctgtgagggcatgagccagaagtgagggcagtttgtttttcagtgatacttcagagagggccatttgagatgggctctgaggtaagcataggagttcaccagacgcagaaggaggtcacaacctgggctgggttcagtaggtgggttccagattatccccaccccaacctgggctgggttcggcaagtggggtccaggctcctcactcccccttgctgctcttggttgacaggagagtaacaacatggtggtgcctgccatgcagctcgccagcaagatcccggacatgtcggtacagctgtggtcgtcagcactgctgagaggtgagtgcaatggccacccctcttccccagccccagcctggccctccccagagatcaaggctgctgggcatgtcctgctcagccttagctcggactaggcctccgtgggccgcagccccagttctagcatgggtagggggtgctcctcaggagaccctggttgagggcagtgggtgcatttgtggcatccgcttgactcggggtctggttcagtctctataggacacagaggctgcgacttggtatctggtagacttgggctgttagccgtggcgctctcagccttgcttcttcccggaaaggcagacagcagccatacctattgggtagggctggccagctagctctgggagcagggcgggcactcagcgggtatcattgctgttaccgcagctcccccatttccagattacgaaactaaggtccggagactcgcctggggccctggggaggtgacaggagacggggtgctccatgtgcagtgggctgcctggggctgctgcctcaggatgggcattgggcgtcctgccccaatgagcgcctgtttgcctgagggctggccatgggctccctggagggctggcgagaagcctggcattgggctttcactgcccagccagccctgttctgccctatgagggcggctggcgcatgggctttgtgatcccaagacagggctcaggtccagtgacgtgccaggcacccagagatccaccagtgcagctgggacttgaccttagggctccatctgcaccgagtgggagggcctgggcagtgacagggcaaggcgggcccccatgctcatgtcccactctcagacctgaataaagcctgtgggaacgccatggatgcccatgaagccgcccagatgcaccagaacttctcgcagcagctgctccaggaccacattgaggcctgcagcctccccgaacacaacctcatcacggtacgggtgtgggtgttaggggacgggatcaggactagcgggctccccacctgcaagaggaaggggcaccttggctgtatttctcttttgtccaacaaaccctaactcagcctcaggtgatcccttgatgggggagatggccatgggcacccccacccaagcaagggacccaggtgtctcctcggggcccattggactggggcatggagaacagagtcccggctgtgtgagcagcccaaggaaggcagcattccaacctcttcttccctgggaacggtccacagtgcctcactcgcatgtcctctcctccccacagtggacagacggtccaccccccgtgcagttccaagctcagaatggacccaacaccagcctggccagcctcctgtgaggccttgatggggccatccagctccgcagggcctgcgcgtctccggcttccacccagacggcactcaagcctgcccccgaggcgtgcttccttcctgattgtctctagagcttccaagtcctgggaatgtgcggggccagtccctgccctcccaggaggggtggtagccgttcccacctcgcagcaggacccccagtgcagaggctcacaggtggcacacaggcgctgtctctccagagccatccttcagagtggacctcagtgccagtcctgcctcagcatctgggtcacgtcggccaggagtagggtgcaggcctccagcaggtcctaatcctgtgtgccagggcaggcagtgccccaggggcaccacgcctgactctccatcacccaggccttgatgccgagcgggagtagagtgtttcctctgctcaaggcaatttccagagcccggatgccagtttctggcctgaatttggagggaagaagtaatggcgctagtgtgggacgaagcacagatcccagcacttttcccagctttctctccagcatcagtccctgcagcagctggggcctctggtcaggaaccctcagggacccaggaactcagcttccaaacatctgcaccttgaccggactcgccatcccgccgtgggggtgcaggtgattgtaaacacgggtgtgcatgtggatgcacacgggtgtgcggtgaagatctgtggagatggagctgggagctgaggctcctgttgcaccagccaccttcccccatcttgtggctgctgaggggcaggaagcgggggagtgggctcgtctcctaaatttaagatcacctcctcagctagcttagagtgcgtggcacgggccccccgcccccgagatctggagcccagggactttcttcctggcagatctgtggccttccctgctcagcctcttggtccccccactccctccaccgcctcaccttccctgctgggtctctggggcacagtgtgaaacccgcaccctagccaggccccagggagcctccgctgggcccagacagcagcgtttggttttatccacttttcttggataatcaggaggtgccccagtggtcacagtgtggcattccgagttggggcgggtggtcgggtcaagatagcagcagcaggtgtcagggctcaagacaccaccccctccagcttctggggcccaggagcctctccctgctacagggggtgggggtcctgctcagcagggtaggtggtggttttaggtcttgtcaccctcactcagtggaactgcctctgggagctttggcgtctgtgactaaagggacgctggattgctcaggtcagctgcttggggctcccaggctgggtgtgccttagccacaggcagggctgtcaataacccccttcctcactggccaccacctgacatcagcaccagtgacaggctggtcagagggcggggctggtgagggtttgtcctaagaggaccaccgccatctctgggtctccagggggagagcctggccctgtcctttgctacccagggctgcccccaggcccatgaagccaataggagagcgtgtggcactggcccacaaactgtccctgtcctgtcttcctcccgagccatggcctctgctagctccaccttgaaggagccccccacatcctcccctacatcccagagatgccaccacttgtgtctccacaatgtgctcctgcccacccgggttccgcactgtccgacccctgcacaccactcatgtcaccacggcgtgcatcatgttcatccccatctatttatttaagcctttctttgcttgtagggcattttgtatgtagagcagttgaaaacagaacctcagaacttaacatctgtcctgatgttaaagtgcttttcatgaccaccctgttatctatgtatatgtaaagttaaggatgagatcttaagtttacaattaaaaactcagtactcaatatttaatattctactcgagctttatggaagccaaatcatgtgcatgtgtgtgtgtgcgtgtgtgcaagctttgaacctccttccacagccgcatcttctcatgacacaaagcttttgataagtactttcctgtgggtcgctcagcgcctcatagcatctcattcaattgcaagaatagaggccagacacggtggcgcatgcctgtagtcccagctaactgggaggctgaggcaggaggatcacttgagcccaggagattgaggctgcagtgagcatgatcgcgacactgcactccagcctgggtgacggtgagactttgtctcaaaaaaaaaaaaaaaaacaatggaaggcagacagcaagtccctgaggacacatcacacagtgtcctgtagctaagtgtctaggaaaaaacaaaaactccaaacccttcagtggatgaggacaaggtcgcagaaaggcattctgttgacagatgaacagccgaaagctggccagaccctcctgtatgcctctgcccttgtcctgtgggttgagggggtctgaccaggaggccacctacagcaggaagtgaggctgccatgtttccttgagacacagctgcctctccccagctctgtccctgtagtcacctgccggtgggcgaggatcctctccctgggataagcactcccagccccgtttatcagaaacacaggcaaggaaattggaactgccacccagcccagcatggtggctcaattggttggttgcgttgtcagttgtctcttcgttttgttaaggtttttaataagtacgtttggcataatgtcttttaatgggtttgtaatatttgtaacggttttagcagcctataacttttcagctggtgcttttacttagggaaaaaaacaatttgtaaatacagaacattgtttaaaagacataaccatagaacatagcttcctgtttgtggattttgtttcctatatattcaaagtaaaatgacttacaggagccacgtgctgtgtctttgttgtttcctctgtccgctttgtgagccatcccaaagacggctgccacccttgctgccatgcccacaggggccccctctgtggcggggtcttcagcatgaggatgcagtccccaaatcctgagccagatgacgtgaatggaagcctgagtccccatctcctccactgatcattttcctctggtctggcctcgcctagagaggaaggaaccccatgctccatcagcatatgaggccttcagcagcctgctcctggaatcctcccttcccagccctctcaggggcagactccctcatgcacccaggtgtcctggtccctgtgtttttttttgttgttgttgttgtttgagatggagtcttgcactgtcgcccaggctggagtgcagaggcgcgatctctgctcactgcaacctccacctcccaggttcaagcgatactcctgcctcagcctcccaagtagctgggattacaggtgcccgccaccaagcccagctaattttttgtatttttagtaggaacagcatttcactgtgttggccaggctggtcttgaactcctgacctcgtgatccacctgccttggcatcccaaagtgctgggattacaggcctgagccaccgcgcccagccggtccctgcattcttagaggggaccagcctccatacacctgggagtgaggggagttatttgcccagatttttttgtttggaggtgaaattaccataacaaatttaactttttttgcaggttgtgctggcttacgcctgtaatcccagtactttgggaggccgaggcaggaggatcccttgagcccaggagttcaagaacagcctgggctacatagtgagacctagtctctacaaaaaatgtataaaaattagccaggcaaccaggtgccgtggctcaagccagtaatcccagcactttgggaagccgaggtgggcggatcacttaaggccaagagttgagaccagcctggccaccatagtgaaaccctgtctctactaaaaatacaaaaattagccgggtgtggtggcgtgcacttgtagtcccagctactcaggaggctgaggcaggagattcacttgcaccagggagtggagggtttcagtgacccaagatcctgatactgtgctccagcctgggtgacagagtaagactctctctctcaaaaaataaataaatacaaatacaaaatataaaaattagccggtatggtggcgcacaactgtaatcccagctactcgggaggctgaagcaggagaatcgcttgaacccggaggcagagtttgcaatgaaccaagatcacaccactgcctgggcgagagagggagactctacctcgaaaaaaaaaaatagccaggcatggtggtgtgttcctgtagtcccagttacttaggaggctgaggcgggaggattacttgaacccaggaggatattagcagagacagagtcttgctctattttatatgtatataaaatagtattatctgtaaagtggactgctcagtggtattcagtacgttcacagtgttgcacagttatcatctctatctagttctgggacattttcattcccccaaaaggagattcattgccatcagcagtcactcctcattcctcctccctccccaagcccctggcaactagtaatctgcttcctgtctgtgaatttgcctgttctggatattttatatcaatggaatctcataccctgtgacctcttgtagcctgggatctctcagcactatgttttcaaggttcatctgcactgtagcatggatcattgctttgttccttttatgagtgaataatatcccattatatggatggaccaaactgttgatcttttttttttttttttgagacagggtcttgctctgtcacccaggctggagtgcagtgggttgatctcggctcactgcaacctttgcttcctagggtcaagcaattctcctgcctcagtctcctgagtagctgggactacaggcgcataccaccaagcccagataatttttggatttttagtagagatgaggtttcaccatattagccaggctggtctcagacccctgaccttgtgatccacctgcctcggcctctcaaagcgctgggattacaagcataagccactgcacccggcttttttttttttttcttgagacaggatcttgctctatagcccagtgcagtggtatgatctcagctcactgcaacctccacctcccaggctcaagggatcctcccacctcagccccccaaatagctggaatgacaggcaccaccatgccaggctaatttttctatattttctagacatggggtttcaccttgttgcccaggctggtcttgaactcctggactcaagtgatctgcccgccttggcctcccaaagtgctgggattaccaccgtgaaccacggtgcccggccttatccatccttttatggacattcgggttgcttcccccttgtggcgactgtgaatagtgctgctctgtgagttttggctggaccacgtgttttcaattctcctgggctttccctgtgtctttattgtggacagacagggccgctcagcacacacatatggtgtgaaggccctcatgtcactctcaggttagttccccatgagagatacacaagccatcttagcctcgagccccaaggggctctgctggatgtgcaacgtttttgtattttgttttgctatgtgtcgtttagagacagagtctcactctgttgcccgggcaggagtgcagtggtgcaatcacttgagcctcactgcagcctcaaacgccctggcccaagcgaccctcctgcctcatcctcctgtgtagctgggactatagatacgtgccaccacacccggttaattttttttttttttttgagatggagtcttgcactgttgcccgggctggagtgcagtggtgtgatctcggctcactgcaacctctgcctcccagattcaagagattctcctgcctcagcctcccgagtagctgggattacaggcacctgcctccattcccagctaatttttttgtattttttagtagacacagggtttcaccatgttggccaggctggtctccaactcctgagctcaagcaatcctcccaccttggactcccaaagtgctgggattacagtcgtgagacaccacaccggccctgtgcgagtgtttgagtctcaacatggtgatcacagcaccccaaccatcgatgcctgggctccttctgccccatccccaccagttcagcaccaggcagccttttcactcaaggtagactctgcttatccttcatcatcagcttggacatcatcttctccagacagacaggcaggggcccatctggcccatctcatacctctccagcccctgcatgggattcacatcttgaacctgagctggaccagagcacagcatgacgagcctgccatgggaccagccacctttccagcaggtgtgcagcccccagctgggaggtgtgaacctgcatgtggacagcaggtctatcctgggttgaccaatgtttcacacaaagcctacacccaggcagtcaccttggcctgggcgcccggcagactagggtcacacagctcctcctgttgagtcatttccgagtaggctatgccctgtgcagcatccatgggaccctgactcaggaagtgagtgaccttccttttcccacaagccatgtcctcatccatgtcatccctcatccacttagaggatgaggcgggagggaggttgaggcaggaggatcgcttgagcccaggaggttgaggctgcagcaagctatgatcgccccactgcactccagcctgggtgacagagtgagacccgctctctaaacaaaacatagtgaaacaaaaaacaaatgatagaagccagatgtggtggagcatacctgtagtcccagctccttaggaggctgagatgggatgatggttcaggtccaaaagtttgagactagcctgggcaacgtagcaagaccccgtctctataaaaaataaaacatctgcctgtaatcccagtactttgggaggccgaggcaggcgtatcacttgaggccaggagtttgagaccaacctgggcaacgtagcaagactttgtctctataaaaaatttaaaatcagctggacgtggtggctcatgtctgtaatcccaccatgttgggaggccgaggcaggtggatcacctgaggtcgcgagttcaagaccaatgtggccaacatagcgaaacacagtctctactaaaaatacaaaaatcagctgggtgtggtgctgcacgcctctaatcccagctacttggaggctgaggcagaagacagtgaccccaggaggcagaggtggcagtgagccaagatggcaccattgtactccagcctgggtgatggagtgagactccatctcaaaaaaaaaaaaaaattaaaatcagccaggcatggtgcctcacgcctgtaatcccagcactttgggaggccaaggcagggagatcatttgaggtcagcagttttttttgttttgttttgttttgtttttgttttgttttgttttgtttttgagatggagtctcgctctgtcgcccaggctggagtgcagtggcgcgatctcagctcactgcaagctctgcctcctgggttcacgccattctcctgcctcagcctccttagtagctgggactacaggcgcccgccaccgcgcccagctaattgtttgtatttttagtagagatggggtttcaccgtggtctccatctcctgacctcgtgatccgcccgcctcggcctcccaaagtgctgggattacaggcatgagccactgcgcccggccgaggtcaggagtttgagaccagcctgaccaacatagtgaaaccctgtctctactaaaatataaaaattagccagccgtggtagcgggtgcctgtaatctcagctactcgggaggctggggcaggagaatcgcttgaacccaggaggcagaagttgcagtgagccaagatcacgccactgcagtccagcctgggcaacagggcaagactccctctcaaaaataaataaacctggcagggcgaggtggctcacacctgtaatcccagcactttggggggccaaggcagatggatcacctaagctcaggagtttgagaccagcctggccaacatggtgaaatcccatctctactaaaaatacaaaaaaattagccgggcatggtggtgggcacctgtaaatcctagctactcaggagactgaggcatgagaatcgcttgaatccgggaggttggaggttgtggtgagctgagatcaggccactgccctccagcctggaccacagagtgagattccatctaaaaaaaagtaataataaaataaataaaaataaaaataaaataatgcaaaaattagccagccacggtggtgcacacctgtaatcccagatacgtgggaggctgaggcaggagaatcacttgaatccaggaggtggaggttgcagtaagccaagatcacgccactgcagtccagcctggttgacagagctagactccctctcgaaaaaacaaaaaaaacacttttttttttaaatttaaaattgccaggcggccgggcatggtggctcatgcctataatcccagcactttgggaggccgaggcaggtggatcacctgaggtcaggagttcgagaccagcctggccaacatggtgaaaccccgtctctactaaaaatacaaaaattagcagggcttggtggtgggtgcctgtaatcccagctactcaggaggcttgggcaggataatcacttgaatctgggtggcagagctgagatcgcgccgctgcactccagcctgggtgacagagcgagactccgtctcaaaaaacaaaaaaaaaaattgctaggcatagtggtgtgtgcctatagtcccagctactcaggagtctgaggtggaaggattgcttcagcctgggaggtcgaggctgcagtgagccacgattgcagctctgcaatccagtctgagcaacagagtgagaaccggtctctaaaaataataataaaaataaaaaagaaaatggacaactttcttttgaacacagcttctagaacccagcacctgaggaaatatacgcaggcagaaatcctcgcagtggccacctcacatcctgtctcctcctattccggctgctttgacaaattaccatagactgaggggcttacaaacaacaaatacttatttcttactgatctagaggctgggaaattcaaaatcaaggtgccagcagattcggagtctggcgagggcctgcttcctggtttgcttcccgctctctagctccaccctcatgacataatcatctcccagaggccccacctccaaaatacaatcacaggctgggtgcagtggctcacgactgtaatcccaaaactttgggaggccaagacaggagaatcacttgagctcaggagttcaagagcagcctgggcaacatggtgacaccctgtctgtacaaaaaatacaaaaaaattagccgggcatggtggtgcgcacccatagtcccatctactggggaagctgaggcagaggatcacttgagcccaggagttcaaggctggagtgagccatgatcccaccacggcattccagcctgagcgacagatcaagaccctgtctgaaaaataaataaaaaacagaggaccgagcgcaatggctcacgcctgtaatcccagcactttgggaggccaaggtgggcagatcatgacgtcaggagatggagaccatcctggctaacacggtgaaactccgtctctactaaaaatacaaaaaattagccggccctcgtggcggcagagcttgcagtgagccgagatcatgccactgcactccagcctgggtgacagagtgagactcagttaaaaaaaaaaaaaagaaaaaacaggccaggcgcggtggctcacacctgagctgagatcgtgctgttgcactccagcctgggtgacaacagcgagactccgtctcaaaaaaaaaaaaaaatacaatcacatttcaacataagaatattgaaagaggagggacacggtggctcatgcctgaatcccagcactttgggaagccaaggcgggaagactacttgaggtcaggagttcaagaccagcctagccaacatggtaaaactccatctctactaaaaatacaaaaattagccaggtgtggtgacaggagcctgtaatcccagcactttgggatgcctaggtgggcgaatcacctgaggtcaggagttccagatcagcctggtgaacatggtgaaacctcatctctactaaaaatacaaaaattagctgggtgtagtggcaggtgcttgtattcccagctactcgggaggctgaggcaggagaattgcttgaacctgggaagcggaggttgcagtgagccgagatctcaccattgcactccaacctgggtgacaagagggaaactccacctcaaaataaataaataaataaataaataagatgaagtttcttatttcgtcccaaatttatgctcacatggtgagattacaatgaaattggctgggaaaggaaaggaaaaggttaatttccacatgaattttattttcttagtactctgatttttttgattttttttatttttattttttttttttgagatggagtttcgctggttgcccaggctggaatgcaatggtgcaatctcagcttacagcaacctctgcttcccaggttcaagcgattctcctgcctcagcttcctgagtagctgggattacaggcgcacaccaccacgcccagctaattattttgtacttttagtggagatgtggtttcaccatgttggccaggctggtctggaactcctgacctcaggtgatccacccgcctcggcttcccaaagtgctgggattacaggtgtgagtcactatgcccggccagggatagtccactttgtcagtgtgtgtttgttgtgaacgtcgtctctaaccacagttccttacactcagtgtttctgcagcgcagggttcaggctccatctgcagttaggcacactctgtccagagtgagtctctgtgtggccttggcgctgtcctgctattccagggttctgagcacaaatcctcccctaaagggttaagcacaaactgttcagaagtcctgtcgtgaaccggaagtgtatctcccactctgtcttcatctgcaagtgtcctcagttgctactggcggcccctggcctgctctggccttggccaccagggggcatggtggcccaggagcagcaagggctgcccaggcaatgtccccaccaggtaggacaggtgggaacctacaatccagctagaaagactgggctggatgttgccagaccccagtctggccaggctttgctcatctgcagggatgtggggtgaccttcacaccactcctgtaactgttggagaagacaatggccagggttctccgggcgtcagggtgacaccattccctcctttacttgccaaacatgtattaagcacctactgtgcgctggatgctgggaacacagcagagaccacatcagacaatgtctgatgccctcagagggtggacatagttcccctgatgacgggtttcagaagggagggagtgttgaccatctgtgagaagggagtgtcgcacagtaggtgggggacaaccacaggggaggaggtgggggacgctgtgacaagaccaaaaggagggctgggagcgatggttcatgcctataattccagcactttgggaggccgaggtgggcagatcacctgatgtcaggagtttgagaccagcctgcccaacatggtgaaaccctgtctctacttaaaatacaaaaaattagccaggcatggtcgtgggcgcctgtaatcccagctactcaggaggctgaggcaggagaattgcttgaacctgggaggtggaagttgcagtgagccaaggtcacgccattgcacacagcctgggcaacaagagcaaaactccgtctcaaaaaaaaaaaaaaggaggcaagcaggccccccttgggccagctgatcagagctggacaacattccagcttcggcgatggggccaccaagacccaggcatctggggaattgtgtcccctactggcacagttgagtgactcgggtggggactgcaggctctggtcctggtcccctcctgtctggccacccctcaggggacactgggagggtatcgcggctaccaggctgcctgtcgcatttatggagggccagtccaccaccaccttgtactcagctgacatctggaagcacatccaggaggacactgaaggctcagaaagtgcctgggcccctgtgttcaggtgtgaaatcaaatctctgaggccccagaccagagccatcatccttctgcccccactggactgagactcacatgcccagaactgcacttgtggatgatggtggtacatccagggcagaatacacggcagacaggtcagctgatgacagtgtctgctggccagggtcagtccctgactctcttgtataatgtgtaacccaacagcgcgtgcccagggggctggggcactccagacaccggcccaggccctggcttgactcaggcctgaccctaaaggaacccgagtaagtgtctcagagccgggtcctggatccaaatgcccctaatacttcacacaccggccaccatgctgcttcctgagcaacctgctccccaggaaaagtgacctaatcactccaggctgttcttctccggagcatcctctggtacccaccgaaggaagtgacccctgagtcctactcagctcctccactcacgggatttttttttcttggcaactagttctccctatacccaaaacctatatgacaagaggatcctttttattaaaaaaatttttttgccaagtgcggcaaaaaatcccagcacaggccgggcacggtggctcacgcctataatcccagcactttaggaggccgaggcgggtggatcacgagctcagaaggtcgagaccatcctggctaacacggtgacaccccatctctactaaaaatacaaaaaattagccgggcgtggtggtgggcacctgtggtcccagctactcaggaggctgaggcaggagaatggtgtgaacccgggaggcggagcttgcagtgaggcaaggtcacgccactgcactccagcctgggcgacagagcgagactctgtctcagaaaaaaaaaaaaaaaatcccagcacttcgggagtctgtaatcccagcactttgggaggccaagagtttgagaccagcatagccaacatggtgaaaccccgtctctactaaaaatacaaaaattgggcacggtggctcacacctataatcccagcaattttcgaggccaaggcgggtggatcacctgaggtcaggagttccagaccagcctggacaacatggtgaaaccccatctctacaaaaaatacaaaaattagccgggcattggtggtttgtgcctgtagttccagctacttgggagactaaggctggagaatcacttaaacctgggaggtggaagttgcagcaagccaagattgcaccactgcactacagcctgggcgaagagtgagaatctgtctcaaaaaaaaaatttttttctctttggtcatgtgcggtagctcacgcctgtaatcccagcactttgggaggccaaggcaggtggatcacttgaggtcaggagttccagaccagcctggccaacatggtgaaactcccgtctctactaaaaatacaaaaatcagctggatgtggtggtgggcacctgtaatcccagctacttgggagactgaggcatgaaaatagtttgaacctgggaggcagagattgcagtgagctaggatcatgccactgcactccagcctgggagacagaaagaaattctgtcttaaaaaaaaaaaaaggggggggtggcaggcgcagtggcttacgcctgtaatcccagcactttgggaggctgagacaggcggatcacatgaggtcaggagttcgagaccagcctggccaacatggtgaaaaccctgtctctactaaaaacacaaaaaattagccaggcgtagtggtgggtgcctataattccagctactcaggaggttgacgcaggagaattgcttgaacccgggaggtggaggttgcggtgagccgagatcgcaccattgcactccagcctgggcaacaagagcaaaactctgtctcaaaaaaaaaaattttttttttttggccagcgtcaatggctcatacctgtaatcccatcactttgggaggccgaggcaggaggatcacttgagcccagaagtttcagaccagcctggcaacatgatgggaccctatctctacataaaatttaaaaattcaccaggtgcaattaggcctggtccccctcctctctggccactccaatctaaagtcaaattgaaaaaaaatgttggggctgggtacggtggctcacgtctataatcccagcactgtaggaggccgaggcgggtggatcacttgaggttaggagtttgagaccagcctggccaacatggcgaaatcccatctctactaaaaatgcaaaaattagccaggtgtggtggcgggtgcctgtagtaccaggtgctcaggaggctgaggcacgagaatctcttgaacctggaaggtggagattgcagtgagccaagattgtgccactgcactccagcctgggcaacagggcgagactctgtctcaaaataaataaataaatagataaataaataaataaaaataaaataatttttgtgtgtggagacagggtcttactctatttctcaggatgaagtgcagtggcatgatgtagccaggaactggagcttcaaactcccaggcccaagcaatcctccctcctcaacctcccaagtagcttggaccataggcaggtgccatcactcccagctaattttttaattaatttatttatttttgttgttgttgttgtttgtttgttttgagacggagtctcactgtcgcccaggctggagtgcagcagcgcaatctcagctcactgcaacctccacctcccaggttcaagtgattctcctgcctcagcctcctgagtagctgggactataggccctcaccgccgagcccggctaattttttttgtatttttagtagagacggggtttcaccatgtgggccaggatggtctagatagaactcttgacctcgtgatctacccgcctcagcctcccaaagtgctgggattacaggtgtgagccaccacgcccagccttattttaattttttattgagacagggtctcactatgttacccacgctggtcctgaactcctggcttcaagcaatcctgcctcagcctccaaaagtgctgggattccagccctgagccactgttcctcgctgaaggggattctttttcagggcattctttgtgacacactccttccctgggtgtgtcctggaatgtccgctggccacacccaggcctggtctggctgtggggacacccacatgcattgtcagccgggtacgagaccggggtgggctttgcacacagatcccacgactgtatacactcagccccgtgacaggaactgtagcccatggccacagcatctcttgctagaaactttttcaagaaacttacctcagtactcaaagccactgcggtcagcaagtgctgaacatgccccaatccctaacctcagaaaaggacactttctcttaactcctgtgtaaagggtcaggactggtgtctggctgccgaagaaactaaacatccagcttcgctttcccaggtaacatttgctgtatcatctgtgatgcaggagatggcaatggtattattattattattattattattatttttggaaatggagtctcgcgctgttatactgttgcccaggctggagtacacaggtgcgatctcggctcactgcaacctccgcctcccacgctcatgtgattctcctgcctcagcctcccaagtagctgggactacaggcacccagcaccacacctggctaatttttgtatttttggtagagacagggtttcaccatgttggccaggctggactcaaactcctgacttcaagtgatcctcctgccctggcctcccaaaacgctgggattataggcgtgagccactatgcctgtccggcaatggcattttgaccaatacaacatgggcatctaactagaattggggacacccacacgggtcataatttggggccaaagtagagttttttttgtttttgttttttttttggtagcgatgaggtctcactatgttgcccaggcagttctcaaactcctgggctcaagcgatcctcccacctcagcctctcaaaaggctgggattacaggcataagccaccgtgcccagcaacatttttaactctttttttttagagaaagggttttgctctgtcacccaggctggagtgcagtggcacaattgtagcctactgcagcctcggcttcctgggctcaagggatcctccagtctcagcctccagagtagttaggactgcaaatgcacaccaccacacttagacagtttttaattaattaattaattaattttgagacagagtctcactctgtcacccaggctggagtgtagtggtgtgatctctgctcattgcaactccccatcccagattcaagtgattctcctgcctcagcctccagagtatctgggattgcagacacatgccaccacgcctggctaatttttgtattaatatttttagtagaaatggagttttgccatgttggtcaggttggtcttaaactcctgtcctcaaatgatccatctaccttagcctcccaaagtgctgggattacaggggtaagccaccatgtccagccaatttttaaattattttttgtacagatggagtcttgctttgttgcccaggctggtctcaaactcctggcctcaagcgatcctcctgcctcagcctcccaaattgttggggggttacaggcatgagctactgtgcctgacctggaagtggattttgaagtggattttgcagcctgtttgtgtctcccaagccacaaaagactctgaccttcgtgtttgaccagttccttggaaggcaccagtctgtgtattaagtggattatccaaacccagactgactcctggcacatggaagatgctttgggatacacttatactaaaagggtattcattcgtgactgatctgaaatccaaatctaatggggcatcctatattttcacttgctaaatgtggccaccctagatgctcaatgacatccttgaataaaggaagctgatgaagttcaaacaaataattttaccagcggggtaaaaaaagctcaaagctcagtgcactttgcgaaacagtcatttcctcttccggtcagaataaactcctgactcctcccaggcccaagtgatcagccactccctcctaccagctggctgggctgctgtgctcagtcccaactcaggaaggacaagagtagctcctgtgaccataatgcctgtccacaagctgaggccccaccccactccgcctccttttctttttctttgaaatggagtcttggtctttttgcccaggctagagtgcagtggcgtgatctcggctcactgcaacctccacctcccaggctcaagcgattctcctgcctcagcctcccaaacagctgggattacaggcatgcaccaccacccccagctaatttttgtatttttagtagagacagggttttcaccatgttggtgaggctggtctcaaactcctgacctcatgatccacctgcctcggcctcccaaagtgctgggattacaggcgtgagccaccgtgcctggccacccccttgctttttagacacaaggtcttgctctgtcacccaggctggagtgcagtggcataatcttggctcactgcagccttaaaactcctcaagtgatcttctgtctcagcctcccaagtagttaggactatgggtgcgtgccaccaacgcgcctggcactgagacctggatttttttttttttttttttggtgagatagagtcttgctccgtcgcccaggctggagtgcagtggggtgatcttggctcactgcaacctccgccttccaggttcaagcgattctcctgcttcagcctcccaagtagctgggactacaggcgcccgccaccatgcccagctaatttgtgtatttttagtagagacagggtttcgctatgttggccaggccggtcttgaactcctgacctcgtaatctgcctgcctcggcctcccaaagtgctgggattacaggcgtgagccaccactcccggcctgagacctggatcttaaaaagggctcagctgggtgtagtcacacacctgtagttccagtgacttgggaggctgatataggaggctagcttgaagcccaggagttcaaagtgagactagcaacataatgagacctcatctcttttttttttttttttttttttttttgagacggagtcttactctgtcgcccaggctggagtgcagtagtgccatcttggctcactgcaagctccgcctcctgggttcatgcctttctcctgcctcagcctcccaagtagctgggactacaggcgccctccaccacgcccggctaattttttgtatttttagtagagacagggtttcaccatgttagccaggatggtctcaatctcctgatctcgtgatctgcccacctcgacctcccaaagtgctgggattacaggcgtgagccaccgtgcctggccgagacctcatctctttaaaaaataataataataaagttggctgagtgtggtggctcacgcttgtaatcccaacattttgggaagccgaggtgagaggattgcttgggcccaggagttcaagggcagcctggcgaacataataagactcccatctctacaaaaaaacttaaaaattagctaggcgtggtggcctgcacctgcagtcccaggtattcgggaggctgaggtgggaggatcgcttgagctggggaggttgaggctgcagtgagctgtgatcatgccactgcactccagcctcagcaacagagcaagaccctgtctctaaaatcagaaagaaaggaagaaaaggcaaaaagaggggaaaagaagccaagagaaaggcttgaaatgcatgtggatgaaagccctgacctgtattttaggctcagttacactcagatgtaactgtgtgtctgggatgcaaaagagctcagatcctacagaatctcaaggtgaattcttttccctgagtagcataaggcatctttttcccatctaacactgggttgggctcctcccttctgtatgcaaagtggccacaagtgcccaaaatgaactccctccagttcagaaatgcattccttcctggttagggaagtcactgttttgacttagaagtcttctatacttcaggcgtctagtgtctacctaataccttttgcctcagaaaagggtctaatcccacttaattacaagaagatttgctgttaggtttttgacctagagatctaaaaaggcctggctgaaagagttcctgagctccatctggacttaattccagattttctagccaaccaacactaataaagctatactctgctccccacctctgtataattcaggtgctacctgactttctctggtgaagcagcaggagtatttaggccaacctgttggtttggctgtgtctgtttctctctggaaatagacaatgactttttcttttttttttcttgtttttgagacagagtctcactctatcgcccaggctggagtgtaatggcacactcttggctcactgcaacctctgcctcccaggttcaagtgattctcctgcctcagcctcctgagtagctgggattacaggcgcctgccaccgctcctggctaatttttgttttatttatttatttatttatttatttatttatttatttactgagacggagtctcgctgtctcccaggctggatgcagtggctcaatcttggctcactgcaagttccaccttgccaggttcacgccattctcctgcctcagcctcccaagtagctgggactacaggcgcccgtaatttttgtatttttagtagagacagggtttcgccatgttggcaggctggtctagaaatcctgacctcaggtgatgcgcctgcttcggcctcccaaagtggagggattacaggcgtgagccactgctcccagagagtatctcattcttaacagttctttaactgttatcaaaatattggtctcaaagtactttaaggcaccgaaatgaggcacacataaacatatcatcaacacgctgaaatgtcatgaaaaaaattatactgagagacgtatataaaataagattttttttcttttctttttttttttttgagacagagtcttgctctgtagcccaggctggagtgcagtggcgcaatctcagctcactgcaagctccgcctctccggttcgcaccattctcctgcctcagcctctggagtagctgggactacaggcccccgccaccacgctctgctaactctttttttgtatttttagtagagatggggtttcaccgtgttagtcaggatggtctcgatctcctgacctcatgatccgcccgcctcagcctcccacagtgctgggattacaggcgtgagccaccgctcccgacccaagattatttttttaaactgaaaaaatgtatagtaattagccaataaaccagaatctgtaacattagatatatatatatatatatatatatatatatatatatttttttttttttttttttttttttttttcctgaggcggagttttgctctgttgccaggctgcagtgcagtggtgcgatctcggctcacggcaacctctgcctcctggtttcaagtgattctcctgcctcagcctcccaagtagctgggactacaggcacgcgccaagaccagctacttttttttttttttgagacgaagttttgcgttttgctcttgttgcccaggctaggagtgcaatggcgtgatctccgctcattgcaacctctgcctcccgggttcaagcgattctcctgcctcagcctcccgtgtagctgggattataggcaagtgccaccatgcccggctaattttatatatatttttttaatagagacagggtttctccatgttggtcaggctgatcttgaactcccgacctcaggtgataggcccacctcagcctcccaaagtgctgggattacaagcatgagccaccgtgcccggccaatttttgtatttttagtagagacagttttcactatgttggccaggatggtctcaatctcttgacctaatgatctgccggcctcagcctctcaaagtgctggggttacaggcgtaagccaccgcatcctgcctagacactgactttttcaacacattttccctggaagaaccaagaccaattctgatgggcttcccaaaggatgcaggttgtaatggattaacagttaacatatgtgaacctgaaagtgcttggcaaatccaaataaatatgttttcttttttggggtatggggggacagggtctcactctggccaggctggagtgtagtggcactatcatagctcactgcagcctcaaattcctggactcacgtgatctccctgcctcagcctcctgaatagctgagactacagacatgcaccaccacgcccagctaaattttttattttttgtggagacaaagtctcaccatgttgcccaggctggtctcgaactcccaggctcaagcaattttaaagtgctaggattacaggtgtgagtagctgcacccagccccaaatgaattatgcagtccaataatcttagggggtaatgatggagggcaccttgctttgtgcacctgaaccgccactgtcattgacaccagagtgctttagctcttctgcttattacccttcccactggtattaattagccatcattcctcattgccagtgggcactgcttcctttgtccaagggtacagcatcaacaggaggtctcacaggctagcaccagggaaccctcacttttctagctaccactgaggctccgcctcccttgtctcttgtggagtggcctggctccgttcccatttccctatttggatgtgaatgtcacttagccagtttgcccacatgatttcccagagccaggaagggaaacgccttggtgcagagatgcaatcacggctaccaccaaggaaaagaaggcacatccttggcgattctgtcacgtggtatctctttcttctttctttcttttttttttttgttgttgttgttcttgtaggttgtttggtctgtttggtttgtttttgagaaggagttttgctcttgtcgcccaggctggagtgcaatggtgcgatctcggctcactgcaacctccttctcccgggttctagtgattctcctgcctcaatctcctgagtagctgggattacaggtgcctgccaccacgcccagctaattttttgtttgttttgagacggagtctgggtctgtcgcccaagctggagtgcagtggcgccatctcggctcactgcaagctccgcctcctgggttcaccccattctcctgcctcagcctcctgagtagctgggactacaggcgcccgacaccacgcccggctaattttttgtagttttagtaaagacggggtttcactatgttagccaggatggtctcgatctcctgaccttgtgatccgcccgcctcggcctcccaaagtgctaggattataggcatgagccaccgcgcccggcagatgcctggctaatttttgtatttttagtggagatggggtttcatcatgttggccaggctggtcttgagctcctgacctcaggtgatccatctgcctcggcctctcaaagtgctgggattacaggcatgaggccctgcacccggccacttacagctgaatcctaaacttgtattgtctgaatctaaaattgggcccatgtgcaggaatggtgacatgaagggaggcgaggtctaagccctgttgagtccttgtgcaaagcggaaccatattaagaacctaaaacttaatatgttaatatgagtgcagtggctcacgcctgtaatcccagcactttggaaggccaaggcaggcggatcacgaggtcacgagttcaagactagcttggccaacattgggaaaccccgtctctactaaaaatacaaaaattaggttcatgcctgtaatcccagctactaaggaggctgaggcaagagaatcgttttaacctgggaagcagaggctgcagtgagccgagagcacatgattgcactccagcctgggtgatagtgagagactgcgactcaaaaaaacaaaaaggtcgggcgtggtggctcacacctgtaatcccagcactttgggaggctgaggcaggcagatcatgaggtcaggagttcaagaccagcctggccaacatgatgaaacctcatctctactaaaagtacaaaaaattatctgggtgtggtggcgagtgtctgtaatcacagctactcgggaggctgaggcagaagaatcgcttgaacctgggaggcagaggttgcagtgagctgagattgcgacattgtactccagcctgggcaacaagagcgaaactccgtctcaaaaaaaaaaataataataataattagccgggtgtggtggcatgtgcctgtagtcccagctgcttgagaggctgaggcacgagaatcgcctgaacctgggagacagagaatgcagtgagctgagacatgacactgcactccagcctgggcaacagaatgatattctgtttccaaaaaaaaaaaaaaaaaaacaaatcagaacatcagtctctaaggattgcactgagaattgtgagctcaaagtgtccacagtgcctggtacacagtagaacacagaaaatttcagtttcattccagtctctgggattctttctgagagcaggaatttaaccttattcatttaagtaatccctcagtgctctgcacatgactttactttatagttgttgaattgaaccaggatcaaagagcagctcattgtccagcctcttcacttcatacatgagaaactgagcagcacagagggcaactgtaactcatccacatcccacttgtttgtttttttgtttgtttgtttgtttgtttttgatacggagtctctctctgttgcccaggctggagtgcaggggtgcgatcttggctcactgcaacctctgcctcccaggttcaagcgattctcctgcctcagcctccggagtagctgggactacaggcatgtgccaggacgcctggctaattttttgtatttttagtagagatggggtttcaccatgttaaccaggacggtctcaatctcctaacctcatgatccgcctgcctcgggctcccaaagttctgagattacaggcgtgagccaccacatccggccatcccacttgtattttatggctggatctttttttttcctgagatggagtttcactcttgttgcccacgctggagtgcaatggcgcgatctcggctcactaaaacctccagggtagctgggattcccagcttcccgagtaggtgggattacaggcacatgccaccacgtttggctaattttgtatttttagcagagacagggtttctccatgttagtcaacctggtcttgaattcccaacctcaggtgatccgcccgcctcggcttcctaaagtgttggaattacaggcatgagccaccatgcccagcctttcttttttttcctgagacatagtcttgctctgtcgcccagagctgaagtgcaatgatacgatattggctcactgcaacctccacctcccgggttcaagcaattctcctgcctcagcctcctgagtagctgggattttaggtacctgcaccatccccgtctaatttttgtatttttagtagagacggggtttcaccttgttggtcaggctggtctcaaactcctgacctcaggtgatctacccacctcggcctcccaaagtgtcaggattaccggtatgagccaccgtgcctggccactaattttattttatttttttgtagagagggggtcccggtatgttgcccaggtgagtctcaaattcctgggctcaattctcccaccctggcctcccaaagtggtacaattgcaggtatgagccctgatttcttatatggtaaagacagtaactggcctctctagggactggcaggtgtgggttcgaccccagctctgccaaccaccaaagtccaagtgtttattgtccacctggactgcctcagacacttgcaggatgtggtaagtactatgacacaggtgcacagaaggtgctctgggaacagcttgtcttcatgtttacaatggcttctttccctagccaaggactctatcagccttgccacttggggacaggttgagctcgctcagggagtcaggccccacagggctccctgccaacctcccatcattgtgattgaatttattctttatttttcttccaggaacatcagcgcacttgtaacaataataatcatcttttctactgggtatactgtttcatggtttacaaagcactttcacatccattatctcatttaatcacttcctcctctacattcctacaacagtttcttggtacctcttcagtataatattctgcctggtataacaagcctatttccctttactgcatttatttttactcacaagttccagcatataattcaggcatctttgcaccttggacacttctgtgtacaaagtaagcacaataaaagtttgacatgccagtcacagcagccttcgaccacagtaccagctacttgggaggttgaggcaggaggattgcttgagctcaggagtttgagtccagcctgggcaacatagcaagaccctgtctcttcgaaaaagtttgccggctgggcctgctggctcacgcctgcaatccgagcactttgggaggtcgaggtgggcggatcacttgaggtcagaagttcaagaccagcctggccaatatggtgaaaccccatctctactaaaaatacaaaaaaattagccgggcattgtggtgtgtgcctgtaatcccagctactcaggaggctgaggcaggagaattgcttgaacctgggaggcggaggttgcagtgagccgagatcgtgccactgcactccagcctgggcaacagagaaagactccatctcaaataaaaaaaaaaagaagtttgccatattgaatcatcagtgttgcaggtctttctcattcattactgccatcttcactcctttcattcaatgggattgcctactaaggacaaagctgggttctttggaggggaaatgaggcaagaagttcagaatcaagtgaagggggaagacacaagtgaaggccctgatccctggtaggccacagtacatgcttcatgctttagcagcggtgcaaacacagttggggctgggcacggtgactcacacctgtaattctagcgcattggaaggtaattcggccacactgggaggctgaggcgggagaattgcttgatgccaggagtttgagaccagcccaggcaacagaaggagaccttctgttttaaattttttttttttaatgtaaaaacttaggttgccaggcgcggcggctcacacctgtaatcctagcactttgggaagctgaggggggcagatcacgaggtcaggagtctgagaccagcctggccaacatggtggaaccccatctctactaaaaatacaaaaattacccaggcgtggtggcacgcgcctgtaatcccagctactcaggaggctgaagcaggagaatcgcttgaatctgggaggcggaggttgcagtgagccaagatcacccccctgcactccagcctgggcgacagagcaagactccatctcacaagacaaaacaaaacaaaacaaacaaaaaaacccctaggtcttgtggcatgcactagcggtaccagctactcaggggctgagtcaggaggatcacctaagcccaaggaatggaggttccatcatgatcttgccactgtactccagcctgggtgacagagcaaaatcctgtctcaaagaaccaacaaacaaaaagaaaaaaaaatactcttgcttcccagagtttggggtgactttttttttttaagacagggtctcactgtgtcacctaggctggagtgcagtggtgcgatcatggctcactgcagccttgacctcccaggctcaggtgattcttcaagagtttggggtgactgattttatctgggggtgactgtgaagcaggaatgcttcttggaaggatcttactcagcagagaaggaaactgcagggctgaagaggcaaacgggacacatttgggaagggccacaaatgtgtcccttgggaaaaagtggacagctgcatggaaaaattctcctcaaaaagaataggaggctgggcgcggtggctcacacctgtaattctagcactttgagaggccgaggcgggtggatcacttgaggtcaggagttcaagaccagcctggccaacatggtgaaaccctgtctctactaaaaatacaaaaattagcttggtgtggtggcgcatgcctgtaatccgagctgctctggaggctgaggcaggagaatggcttgaacctgggaggcggagatggcaagatagtgccactgcacaacagagtgagactgtgtcaaaaaaaaaaaaaaaaaaagggaaagggggcaaaatgggctgcttttctttcgttttcttttttttttgagagggagtctccctctgtcgcccaggctggagtgcagtggcgccatctccgctcactgcaagctccgcctcccgagttcacgccattctcctgcctcagcctcctgagtagcttggactacaggcgcccgccaccacacctggctaattttttgtatttttagtagagacggggtttcactgtgttagccaggatggtctcgatcttttggcctcgtgatccgcccgcctcagcctcccaaaatgctgggattacaggcgtgaaccaccgcgcccggcctgggttgcttttctaaaaaggtctaactcaccgcattgtcctagggctgaggcgtcagaaagtcgaagtttcaggaaaaggggaccccttcctcccacactcagatgctgcttagaaaagcacatggagcacaactccctcgcatttttctttttctttctttctttttgagacggagtctcactgtcatccaggctggagtgcagtggtggatctcggcgcactgcaacctgcctcccaggttcaagcggttctcctgcctcagcctcccgagtagctgggactataggcgcccactaccacgcccggctaatttttgtatttttagtaaagacagggtttcaccatcttggccagactggtctcgaactcctgacctcaggtgatccgcccacctcggcttcccaaagtgctgggatacaagcgtgagccaccgcgcccgataactttcttttttcttttttttgagacagggtctcgctctgtcgcccaggctggagtgcagtggcacgatcttggctcactgcagcctcgacctctcggttcaaacgatcctcccacctcagcctccggagtagctgggactacaggtgtgcgccaccacccctgctgattttttcattttgattttaatttttgtagagacaggattttgccatgttgcccaggctggtctgaaactcctgggctcaatcgaccctccagtctcaaccttccaaagtgctgggattccaggcgtgagccaccgcgcccggtcgcatttccttagtaaaggggtgaggggcgcccatctcctgccatccttctctggagagaggcgaggtgcttgaagtcccaaattcctcgtgtagtgagaaaacaggggaggcagaaaatccccaagatatcttcagaaacgaaggtggaggggggcgcgcagccctcactttcctcagataaaggagggacagggagagcggcccccaagagtgcttagaaaaggagtgtatgtgccccaaatattcctcggaaaaggcggtggaccctggattctccaaatgctccttagggatcccgaactcccatgttttcttaggaaacagagctggggtcccgaatctacaacataatcgtgatcccggcaattgtcctcagaaaaccgggcagggcaagaaacccccaaactctctcagaagaggggtcggggcaagatttccgaagatcctcctcagaacgggggccagggaaaagaatcccgaagcagagtcttctcagaaccggggcgcgcgccagaatctccaagattctcctggatagagagggtcgaagccacaagacgaggcagaaagagcgcgcggccaccggagccccttagaaacactgccaggccacgaagcgcccgggctcctcagaggcgccgctcgcagcccgtcgtagctgccccacgcccgcctggccaaggccgcctccggtgcattatgggtggggagcccctgcagagcactgcggggaaccccctgcccagccagttgccggccgccgggtggcccaggcgatccgccctccggggtcccagggagccggccacgaattgactcgtccccctaggccccgcccctcgcggggttcccgccccgaagtttaagtcccgcccccgcatggccttgagtggctctgcggcccgctcccatctaccattggcaggatgcctgtcagtcattccgtcccgcctcctcggacccgccccggccggcggcgcgatcccgagaaccagccggcccgcgcactcactggtcgtcatgcgctgtctgtcatgaagctggccacaccttccatggggtgcgggtcctgggagtcctggctggacctcattggcttgtggcgccttcactcggagagacgcgcctcaacccggaagtgtgcgaggcgaaatctgcctagcaaccggggaagccgggctgtgaagcgggcaatttcagtgtgagactgagccgcgagactgagctgcggctccgagcgctgcgcggcggctcctcccgcccagggtcagcgccccggcgcgcgcacgcgcacccccgccgcccgagcgcgccccgcgccgcccgcgcagtcggtcggtcggtcgtctgtcctgtcgccgctgccgccgccgccacagcggccgccgcgggcgccacctgagggagtcgcctccgcgggacgccacaagacctgaccggactgcgccgcccgaggccgtcggccgccgtcagcgagggcgccgagcaacttcggtgagtaaggggcaggcgccgctggcgggtccccggtttccggtgccccaggctctctggggcttccgcttctcccgcactaccttggccgagtttactcccttctccacagcacttccccctcaggggagcccctgctctgggcccccccgcctctccaggggacccccgcctctctaggagaccccgtctctcttagggaccctcgcctctcttggggacacacccgcctctctaggggcctccctcctctccaggagacccttgcctctctaggggaccccgtctctcttggggaccccgtctctccaggcaggggatcccatctttctagcgacccccacctttctaggggactttcttcccatctaggggacccttgcctctctaggggactcccatctctccaggcaggggaccccgcttctctaggggaacgctgcctctctagaggatccgtgcctttctagaggatccccacctctctaggggaccccgtctctctaggggacctcgtctctagggaacccccgtctctccgaggggagccctgtctctctaggcgaccctgcttctctgaggggacaacccctcttatcaggggctcccccgcctctctgaggacccctgccggagggaacccccacctctctgaggaatcctgcctttgacaggaactaactcccttctttggggatccccaactctttgagaattcccgcttatctgaggggactcccttcttcactgagggtccctctacttttctcaggaacccatccttttgagggacccctgcctccctagagaccccttcctatctgaggacccccgcctctgaggggagtccctttctctgagggacccctgcctctttgaggggaatccccatctctctgagagaccctctgcctctctgagggtcccccgctttctttgaggggccctggcctctctaagaccctatcctcactcctctaaggagagacccctgattctatcagggtgtactttctctgagggatcccccaccttttgtggacccctggggaaccccttcttccccgggggacccctcttttcagaagacattgctgcttctcggaggaagccttgcctctctgtggggatctccccacccccacctctctcagctgtggtcctacttttctgacttgtccccctttctttttttttttgagacagagtctcattccgtctcccaggctggagtgcagtggtgcgatctgggctcactgtaacctctgcctcctgggttcaagcgactcttctgcctcagcttcctgagtagctgggactacaggcacccaccaccatgcctggctaatttttgtatttttgtagagagggggtttcatcatgttggccaggctggtctcgaacttctgagctcaggtgatccacccgcctcggcctcccacagtgttgggattacaggtgtgagccaccgtgcctggcccccgctttttgatgagtgccttcactttcctgagggggtcccccacttctttgaaatgcccatctgactggatcgttagttttctgaggtatacccctactttaccagtatccttcttttctatttcttctgggcccccaaatgctctatggatcctgcagttttctgaggggtccccagtttctccagaggttttccccttaacttgagatatcccactcctgtaggctcctcacatctctgaagtgtgtctccccttttccaagatatcccgtctcccgatgggagacactgtggatcttcttcacttccctgaggggtccctctgaattccgtggggttgcctcccacttgccctctttctagaggctttcctcttgattttctaagggagaaactctttatttatccttggagcactcacatcaagcttctcctccttttttttttttttggagatggagtttcgctcttgttgcctaggctggagtgcaatggtgtgatctctggctcaccgcaacctccgcctcctgggttcaagcaattctcctgcctcagcctcctgagcagctgggattacaggcatgtgccaccacacctggctaattttgtatttttagtagagatggggtttctccatgtgggtcagggtggtctcgaactcccaacctcaggtgatccgccggcctcggcctcccaaagtgctgggattacaggcgtgaaccaccgcgcccggccaagcttctcctctttctgtctgtggcacccactttcccccaactgtggaggaagagagcagaaatgtacccctccttcagtctttgttgccactctaggggtattctctggacttttatttcggtttccaggagcctggaggattttgtggctggaggggaaagtcaaaaagcatgatttcctcatgtccctctaagacctgctagatttgggggagcaggagctgctactagatgaccaccttagttactccattttccagccgtgaggccatcacagtgttgtcaggcctttgtgaagacaaaagggacaagggagaaacattgtatccccattatcacactgtcaagctgtgggagtgacccacttcctgtcccatccctcagtcctccccctgcatagtataacttaaccttccctccccgtgctgaaaaaaaatcaaaataaaaaggaaaagaaaactctccttcatctcttcctgttgcattttctctcccgagaccccctgattcaatccttgatcaaataggatccctagttcgtaggccagtttggtttgaaagacagagcaagaagcaggaaatggatcaccttagatccagaaacaggggaagggaggcaagggacaggatttgacgacatttctgtaagttttaggtgactttggcctggcccaaaaggaactttttacgtggcgtttacaaatctcatatgtactttttttaatggcccaccctggattccaagttcactccagtagctaattttatctgctttgccaaatgcagagctctgtggagcccaagtagatgaatgctggcattgagagatggtccaaaggacaggaatgaactcagtttgaaacctgagtaacttgtaaccacttcgtgtccacgcacaagtctcaagctaaaaatgtggggagagtttgactgaagtagagttctgaagtataggctgcgctagtgtttggtttagcatttcaacaagttcttccctctgactccattggaactgcagttcactttacagtttgactgagggcagtctctctcctgttcatttccatctgggtcttgcttaatttgagtcctttgtgaagactcctgccgaggctataatttgagttctaaatctgtcggtggaccatgtggacacaagtttcaactcgagctattttcttctggggagaagtgcttggagactttcctgggccctctgctgctgggctaagtcaagtccaggcaggaggctgctgcagacttggttgctcttctcctgcctcttcctggtcagctgtaggcactgccctcaggggaagggaaagttggaggggagtttgggactgagatgagggtagagaagtgcctgaggtgagggtagagaagtgcctgcacgtatttactattttattttatttttttgagacagggtctcactttgtcactcaggcgggagtgcagtggtgcgatctcggctcactgcaacctctgccctactggctcacgtgatcctcccacctcagcctctgaagtagctgggaccacaggcgcatgccaccacgcccggctatatttttgtatttttggtagagacgaggtctcaccatgttgcccaggctagtctcaaactcctgagctcaagtgatctgcccgcctcagcctcccaaggtgttgggattacaggcgtgagccactgtgaccgacctattattttaaataaaacctataggaccagcagatgggatgttaaaaagggaatggacaactttgaagtcagaaggagccagttcagattctggtgctgcccttcttagttatgtggccttggacaagtgatggcacaaaattggcatgttattaaatattcgagggaacacattgctgtgaatgtgtgtgtcaagttgcttactgatgatgggaggtgcttactagatggatgaatgaatgaatccgagatgatgaactggaggtggacagcacagctcctggcacacagttggtgtgcagtaaaggctgcttgttgtattcctggcctggactcacagaccaggaagcgcttgatattctgccaaggctaaaaatgcccaaagagaaagaaacttggtatgtctcttggaaaacccactcccctactgcgtctcttagcaagagttttctgtgttctgataccagatgtgagatgggtttactgtatggcagggcatttgtgtttctcttggccttggtgtctccccctgtaaaatggggtaatttgtgaattaagggcaagtagggagatgtattactctaattagaccacaggcaagatagaagattataatggacttgaagaattgtgggaagaagaaaatagatgaactatgtacgcctaagggatcacatgcgtattatgagactgcttgagtgagtgagtccagcagttacctggtgagtgatctgttcttacactttagaaccttgaaagaagagccattctttcattgtaatagatcagatttggggacaaaagactgggaaagtgatgtacaaagccatttgacgccacacaataatagtactttgagagggccagtgtgtggcttagtgcccacgaggagatcagaatgcacctcaagctcccaaggcccagagggctgtggagatgctaactcagcttagaggctggggcaggggtcggggggcagtggaatagaggggagtggacaggacattttacaaaatttttttcttgagaggatttttttcttaacaattagtaaaagccatagaatcatggctggtgaattaggcccagccttcttcacttactagtatgggaatagatggcattctgcccctgacggctaaaacccaggaggaaataatgggtgaaaatctgaactaggcccctggtgggctgctcctatgtttgaagaaagggttgtgggtttttttgtttgttttcttcctggaaatataccctctctcttcctccttccctcctttctttctctctttcatgcacacatatatagacacacactgactttggtattgaagcaaagaaatatgcaccaatcttaaatttctttcaattcttttaaggacagttattccattacatgggaaaggagcaaaatttattatatttaaaatataagaactaaggtaaacaactttaaagggatcactctcccctttaaaattatgctatgtctcttgtgtaccacagacttcactttggtggatggtggggccaccaccaagtctctatctaacaggaagttttttaaacttgtttttttttacttgaaggatc

SEQ ID NO: 97 - DNA, 47066 bp, Homo sapiens
gatccacctctcctgcttgtctacaaaaaacaaaaataaataaagtaaaaattaaaacaaggccaggcacagtggctcatgtctgtaatcccaacccttcgggaggccaaggtgggagcatcatttgagcccgggagtttaagaccagctgggcaataaagcaagaccctgtcgctgcaaaaaaagaaaaaaaaaaagcacaaaattagttgagtgtggttcctatggttccagctactcgggaagctgaggtgggaggatggcttgagcccaggaattggagactacagtgagccatgattgcacgattctcctgcctcagcctcccgagtagctgggattacaggcatgcaccactgtgcccagctaatttttgtatttttagtagagacgggtttcaccttgttatccaggatgatcttgatctcgtgatccacccacctcggtctcccaaagtgctgggattacaggccggagccaccacgccccgccgatttttttaaataatgttttttaaataatgttggaggccggcctcagtagctgacgcctgtaatcccagcactttgagaggccgagacgggcagatcacctgaggtcaggagttcgagaccagcctggccaacgtggtgaaactccgtctctactaaaaatacaaaacttagctgggcgtggcggctcacacctgtaatcccagctactcgggaggctgagacaggagaatcgcttgaacccgggaggcagaggtagcagtgagccgagatcgcaccattgcactccaacctgggccacagagcaagactgtcgcaaaataaagaaagaaaataaaaatgaggttggaggaaactctggaggcacagcaggtccttggattggactccctccctccctcccaggataaaatgaaatccaggcctcgttcacacggccctgcacggcccggccccgctccgtggtcctgccccagggccttcgcacgggcctgccccgcacacggttctctgggggtcgctggctccccgctcaaacggcccctcctgccgaccaggcgggtccccggggccgccctccctctggcctgggctcggggtcggtggctcgcgcctgccacctggcggccagcggggctgcggcgccgcacgctctggcaccagcctcctgccccggccgtgccctccgccgggagccgcggaccaggagtcgcaccgcctccggggaccgcaccccgcatgcagcctccagcccctgcctcttgctgctcgagggcacacgacccaggtcagctgcaacccccgggcggaaatcccgacttttaaatgaatgctccctttttatccctttttaaggggttggcaactaattgcacattttaaatcatactgtttttaggccggacgttgtggctgaagcctgtaatcccagcggtttaagaggccaaggcctaagcccaggtgttggagaccagcctgagcaacacagtgagaccccccatctctactagatatatatttagtataaataaataatagatatatgtttttctttgagacagagtctcattcgcccaggctggagtgcctgggatctcggctcactgagacctccgcctcccgggttcaagcgattctcctgcctcagcctcccaccacgcccggctttttgtactttttgtaaagacggggtttcgccatgttggccagggtagtctcgaactcctgatctcaggtaatccacccacctcggcctcccaaagtgctgggattacaggcctgagccaaagcgcccggcctttttttttttttgaatgccgttttcagacatggtccgtgacgggcagccgtgacatgaagttagaccctgcttggctcggacagaactggcgacttgtttgacctacaccaagctatccgactaataatttagatgttgaggcccctaaagaggggtcaagggggaggcagatgtcgaccaataaggaaacactgggccgggcgcggtggctcacgcctgtaatcccagcactttggcaggccgagctgggaggatcacttgagctcaggagttcgaggccagcctgggcaggacagtgagaccctggctctacaaaactaaataaataaggaagcagtgaattccaatgtattcatcgccaactagccatgttgctgggtgtgcgctctctcttttaggcgcaatgtgtcatttaggcctgtgacgtcggaactttattatttgaacatttaaaaataaatgaatccaagagcttgagtcacttggccaaaaatgcccaggaggaaaaggccaagtcaggtaccccggctctagagctactaactgatcgccggagaccctgggccttggaagaagtcgcctccccagatctctaagcaggccgcgcgaccctcgagtctcaggtaagcgggaaatcccacttcacaagaaagcccctctctccgaggcacgggcgcatgcgcgggtcggccacccgctggggccgcggggccgccgctctggcccgcgtggggcagtcgtccgcgtctcgctcatgatgacgcacgtccggggcggtggggaaggcaagatggcggcgcccatggaggtggccgtgtgtacggactcggcggccccgatgtggagctgcatcgtgtgggaacttcactcgggcgccaacctgctcacctaccgcggcggccaggcgggaccccgcggcctggcgctgctcaatggcgagtatctgctggcggcgcagctgggcaagaattacatcagcgcctgggagctccagcggaaggtgcggcggtgcggtctcgctgctggggtcatggggcgcccgaggctgaagtcgggggatgggttggtgggggccgcgtgcacccttagtcggaattggcgtggggaggggaggtggtctccgttcgggcgctctgcgcatgcgcgggtctgggggctttggggagatacgtgcgacctgttaggccgctctgcgcacgcgcggggctcaggcctgagctgctatgggggcagtgggggaaaatgggagacgctccggggggtcccttggggcaattgcgcatgcacgagttcttggagcgcgaaatttgattaaaaggggcctatgagctctgtggatgttgtggttctggaggaaaagggagaaggaccaaggtctgggggagtctcccatgaaggggtggcgcaggaaactcatgtttattcctccaataaagcaacagatactcaccgtcgcccacagtttcccctctactcccaagcccaaatgcagccagtccctgaagctactcgcttcccccgtgtgcccgctgagatctcttgggactggctctgtgctccagcattgcctgatggagtctacacacaactcataaatttctcccattttattttagttttgagacagggtctcactctgtcgctgaggctggagtgcagtggtgcgatctcggctcactgcagcctctgcctctagggttcaagcgattctcgggcctcagcctcctgagtagctgcaactacaggcccgcaccaaccaccacacccggcccacatttgtattttttgtagaggcagggtttcaccatgttggccaggctggtctcgaactcctgacctcaagtgatctgcccacctcagcctcccaaagtgctgggattacagccgtgagccaccacgcccggctgagttttcccattttagagaggaggaagctgaggcttggggtcttaggttggacattatggatagaaggattggggcacaagcctactgggctcttgggccccagtgtccttctggatcctctttgttctgttcctgtactcctcccacccagggcccctctgaccctcagaggaagcaccaacctcacatctaccacctccagcctcgaagcctcttgcaggggcgaacacttccttgctggaccatgcatttgctcaaaccaccctgctcccgactcctcttcctggttctctgacttagccattgcccaggcgtcccctcccctcgccctccactgctgtagtagctcccgtgtcctgcatggggctcacgaggctgactgtgcatccttaggaccagctccagcagaagatcatgtgccccgggcctgtcacctgtctgactgcatcacccaatggtctctacgtcctggcaggagttgcagaaagcatccacctgtgggaggtaagaggagcaaagcgtgagcgtttcccacaggacatctcagcccatctgagctttgcctgcagggcaccagggaacaaccatgcggcctggggccctgggatgggtgactgctcaggggttatagcctaagcttcaccctgctgcctcctttctccaggtcccctcgagacttgcgaatcccagaccagccctaatcctgccttgagtgcttggatagagcccggtgcagcccagtccccggcactcacacaccgcagcatcttccagggctagcgggcatctcttccacgcaggcggcagcgcctggcacttgtgacttgaaagttataaagggcggccgggcgcagtggctcatgccggtagtcaatgcaacctctgcctcccaggttcaagcaatcctcctgtctcagtctcctgagtagctgggattccaggcgcccaccaccacacctggctaatttgtttgtatttagtagagaagggcttcacaatgttggtcaggctggtctccaactcctgacctcaggtgatccacccgcctcggccccccagagtagtgggattacaggcgtgagccaccgcgcccggccagtgcctcctttttcttaccgctggaccaaccaggtgacagcaactcctagacacactcacagcccggatcctgccatgctctcactgcgagacagagtgaactgttcaggctttgcatttaggccagcttctcagctctgccctggtgaggggaagcagccctggatgatgtgtgagtgagtgggcacagagatgtgccagggagacttcattcacaaagtcaggcctcttggagtttggcccataccgtagctgtggcgttagatcaccggctgtgttgtcacaaatggtccattatatttcgggggagacctgccctcaaccccacatagagcagggcagacagtacaagatctggggccagaagacccaaaggtaaccatgtttctgcccttcctgaccttgtccttgcttccctcagtgggctgctcagagaactgagagggctgggtgggcatgagcattctcggagagataaaaaagccaccaggggatgggcatggcggctcatgcctggaatcccagcactttgggaggctgagacgggcagatcacttgaggccaggagttcaagactagcctgggtaacatggtgaaaacccatgtctgcaaaaaatagaaaaattagctgggcatggtggcatacacctatagtcccagctttttgggaggctgaggcatgagaatcacttgaatccgagaggcggaagttgcagtgagatgagattgtaccactgcactccagcctgggtgacagagcaagaccttgtctccaaagaaaaggggggtcgggacaggcagcacaggaatgacaggaggcatcattatctcaccctcaggacacgtgtgtatgtatttaatttttaaacttatttttgagatggggtctcactacattgccgtagctgctcttgaactcctgggctcaagcgatcctcccaggtagctgggattataggcatgtgccaccatgcctgggatcccaaggcttttacatctcactccatgattttgaaactaggatgcagttgctgagagggaaactgaggcagggaagcagtagctcacgagtcacccctaacagtagacctcctagccctggttgctgtcagtctggtgcagaggggcatgtgggtaggaattaaatgtgtcatcgccccatgggggatgtcttaggcgggaccccttcctgttcttggctcgggacagtgtgctgggtggcacccactgccagacccctgctcccctagccgcctccagtttttttttttttttttttttttcagatgaagtctcgctctgttgcccgggctggagtgcagtggctcaatctcagatcactgcaacctcaggctcccaggttcaagcgattctcctgcctcagcctcccaagtagctgggaggcgcccgccaccatgcctggctaatttttgtatttttattagagacggagttttgccaggttggccaggctggtttcgaactcctggtctcaggtgatccgcccttctcagcctcccaaagtgctgggatgacaggcgtgagccactgcagctggccctcctggagagtttctgacccgtgagctgtgaccatgaaggggtgtcccacatagccagagctcaggccgggactgcctccactgtacccccctgccacggtcgaaatcctcctcctgttctctgtgtaggcgacgggtgtgtgagcggtgagtcaggagtgggctggaaacctgagagccagggctgtggggcgggagctggtccgcccctcccacgccacagggacagggacctcccgggaggcactgatgttctgaagctgcccggtctgtcccggccctgggcagtggtggtcaccagagctgccctctgtggtttggggctgacctggatcctgcttcctctggtgccatttaaccctccccagccaccctgggttttgcatgcgaggaaagcgaggcccagagagggcatggctgtcagatctgggcccagcaggctctgcctgccccaacaaagcacgacgcacagggactttcgacaacagaaactcggcccccatccttgaggccagacgtcctaaatcaagatgtctgtggggccacgctgcccctggaggccctgggaggagccttcccacctctccggtggtggccggcaccccttggcacccttggcttgtgggtgactgtcccctgcctctgctgccaccactgccgcgtggagcccctgtgtgtttgcacttctctcagcttacaacaaccgggacacatggatggatgcccccgctccagaaccacctcatcttaacttatgatatgtgcagagacactgcgtctaaatgaggccattcacaggtcccaggtcgggacttttaacatgcttttggggggaaacacgattcaatccacaacccccaccagagcatctcagctctcgaatccacaaccccccacagagcatctcaggcctcgaacccacaacccccaccagagcttctcagccctcgaacccacaaccccccagagcatctcagccctcgaacccacaaacccccccaagagcatctcagtcctcgaacccacaaccccctccagagcatctcagtcctcgaacccacaaccccccccagagcatctcagccctcgaacccacaacccccaccagagcatctcagccctccccaggtgtcctggaaggggctccctgtcctcttcctcagatggagctgcctggcttcctgccggagcttaagctgccaccaccctgggtcaggccaccacagcctgcccagaagcgacttcctgttgaatggtgggagccgcctgcaggtcctgagtgcagccgttcctacggggcccacacaggacgcctggggtcaggctcacaggggaccagcacctccctgaggcagcagggaagggcaggaaacttgccccttcctgggccatcatgcaggtggggacgaggcgggaacaggtgcccacccagcccaggcaggggcgcgacgaggccccgctgtacctgctggccgctgccctgacagggtcaccccgcagtcctggggcagggcaggcagggggcgacagtgtggccatggccgtgcagtggtgggttcctggggctgcagcccccctttcctcccctggggctttcctcccctgacctggataccctctgcccctcacaggtctccaccgggaaccttctggtcatcctgagtcgacactaccaggacgtctcctgccttcagttcacaggggacagcagccacttcatctcagggggcaaggactgcctggtgctggtttggagcctctgcaggtagcgccttgcgcactcaggcctgcacctggaactgcacccgggctcaggcggggagaggaggcgccaaggcccctggcgggaaggggcttctctcttgggggctggagtgcagaggacggagtgatcatcccaggggtcctggctgcccacactggggtctggtttgttctgggggccgtgggggcccagccttgagtttactcaggtgaggcaggccaggctgctgagtggaggcaggtgtgtgcgtgaggtgggtgctggaggcgtggactgccctgttccctccgctccccgcctgctgagcacctgccccaccccgctcagcgtgctgcaggccgacccctccaggattccggcgcccaggcacgtctggtctcaccacgcgctccccatcacggacctgcactgcggctttgggggccccctggcccgggtggccacctcctcactggaccagacggtgaaggtacgccgcccccaccccaccacggtccatgagcggagcccagcagccgcaggtcctcagccaggaatgcaggaatcgcctcctcccgctccctgctgtcaggactccagacggcttttaatcccctggtgctctgagcccaaggacgtccagggaggtctgccagcctggaaattcctactcattcaccgtttctggcccggctccctggccaagcctggggaatcggaggtcatcactatgcttgagtcgtgaccggtggtcctgggagggagaaccaggggtcatcagccggagaccaagctccatttcagcacaggccatgtcccctggcccccaagacccacatggtgacggctttcacccaaagtcgcaagccctagggccagaggacagccgacgcctgacctccctggtgcccctgttcccatggggtcctcgggttccccctgccgggccgagccccacgccctttgcccacccgcagctatgggaggtctcctcgggggagctgctgctctccgtcctctttgacgtgtccatcatggcagtgaccatggacctggctgagcaccatatgttctgcgggggcagtgagggctccatcttccaggtcgacctcttcacctgggtgagtgccgcggtctgcgggctgcaccctgccctggggctgagggcatcgggcctgcggctcacacacgtctcggccttcgcagcccggacagagggagaggagcttccacccagagcaggacgccgggaaggtcttcaaagggcacaggtggggacgtgggaacggggcgggggctcccaggcacgtcctgtctggcacgtcccaggtgacccctgtctgtctgtccaggaaccaggtgacttgcctgtcagtgtccactgacggcagcgtgctgctctcaggctcccacgacgagaccgtgcgcctctgggacgtgcagagcaagcagtgcatccggacggtggccctcaaaggtgggcgcgcctctgctcggcccgcggccagcgcgcaggggaaaaagccagcaggagctccgggcttggcttgggtgggggcggggactggtttgctgtggggcggggccgggctgggggcgtggactggctgtggggcggggcctggctgggggagtggactggctgtggggcgtgggctggctttgctgtggggcggggcctggctgggacggggcggggcctggctgggagcgtgaactgggtttgctgtggggtggggcctggctgggggcgtggactggctgggggcgtggactggctgtggggcggggcctggctgggggcgtggactgactgtggggcggggcctggctgggacggggcggggcctggctgggacggggcggggcctggctgggggcgtgaactggctttgctgtggggtggggcctggctgggggcgtggactggtcgtggggcggggcctggctgggggcgtggactggctgtggggcggggactggctgggggcggggactgccctggatggggcggaacttggcttgctgtggggtggggcctggctgggatggggcggggcctgacctccgcgccccccaggcccagtcaccaatgccgccatcctgctggcgcccgtcagcatgctgagctcagacttcaggcccagcctgccgctgccccacttcaacaagcacctgctgggcgccgagcacggggacgagccgcgccacgggggcctcactctgcgcctgggcctccaccagcaggtacggcccccagcagggaacccccactgcccttttgtcccggaagaccccgcgggccctgggctccttcgctcccttggtcctggcgcccgtgcggcggttccccacaagcccggcactggagggcgcgtcctgtgagtgggatggtgatgctcggtggggcctctgcccactctcagtatggacccagaggctctgagaagttaaccacccctcttcccccggccagcagggccgagctgcacgccccacacaccagccttcctgcggctggatatctgacagtcagttaggtctttctgcaaaaggccgatgccccatacttcgggctgtgagagccaaaaggttcacgtctgggctgccgaaggtgcaggagcagccgtgagggcagggagcgggtggggccctggtggctgcaggtggctcccacgtgggctgggggcagcctctcggcctggccacagtcacgccctcactccctgcagctcagcaccgacccccgctctgtgcaggtactagggtgggctcccttaccttctgagggtagagtgacttccggaacacttcccaccccagccccaagaccctcatagaagccagtgtggttggctgggctgggctggggtgggggctgggggttccttgggcctggggaggcttcccagtgtgtttccgcctcactccccgaccttcgatgagctgcctgcgtccttggtgtctcacgtcactgtctgtgtccctcgctgggctctggcgcttggcacttctccccacgcgccctcttcttacctgagtacagattgatttttttatctggagggtgcccgacagcctgatggcctgacaggccctgcaccaggagatgccgttatctcccttgtccgtgcttcctcatggagtgacactctgttttcccacatctaccagtgggcttggggcgggcaggcaggggaccgccaccgtctgggcatccgcaaggcccctcagactgcaaggaggccaggagcacaggctggactgactgctaacagcgtgggcgcaaggaggggcgagctttttgttcagaaagtgccggaactttcggagtgaaaacaggcctccagcggcagagccagctccacgctagggcgcctgcccggccactgcctcctcctagggcagcagcggttcccacgattcctgcccagccaagcgctctccctagaaccccacctagttggccacagtgggattccggagggggccaggccatgcctccggtaatgccgccacctttccctagccgccccacctggctcccttcctcccgtgacggctgctagtcctctgtgacccttgttccaatccagctgacactggaatgttggcctgtcccacagacaggcgctgctggggcccaaggcgcttcgtccaggaggcgggttcccgacctctgatcccccagcaacgtccctccatgtaactggttcctctgtacagggcagtggccttgctgggccggccaggctctccccatggctggaggtgctcactgtctgtgaggccctcgccaggccctgtgtcccagagccttccctgggcttgcgggtccttccaggtctggcccaggcccctgtctgtggtgtggccatctgcacccccatccccagccacatccttgggcgcagtcgtggaggatctgaggcgctgggtaatgactgcatggccagggtcagggttgtcatctgcaggctcgacggaggtgaacgcccccgtctcagtcttcccttctgtctgtgggcgtcacggtggcccctccctggctgagtggctgcccacgctggcgggggtgggatgggcaaagcgtgtggtgtgtgacaggacgcgccccgaggtcacgtggctccctgtgttacagggctcggagcccagctacctggaccgcacggagcagctgcaggccgtcctgtgcagcaccatggagaaggtgggcggggcctcgggaggggcggggcctgaggctggggtcagtcctggccagtgggggtgagtggcccccctccagcacaccccaggccacttctgccctctgaccccgacttctcccgcagagcgtgctcggcggccaggaccagctgcgcgtccgtgtgacggagctggaggacgaggtgcgcaacctgcgcaagatcaatcgggacctgttcgacttctccacgcgcttcatcacgcggccggccaagtgaggcccggagaccccggcccgaggcgcccaggcctgagccccatgcctcccagcaaccagggcccgcgggtgtggcccccaccagcccaggcctggactctcctcagttctgtgtcgtgttcgggtttttcctctgtgactgggccgtcttggtgtctcgtggcacgcgtcacagtggtgctagtctgtttttaacaaaagaggatgaaaagcccctcctctccggcctccttgtgtccgggtgtggcctggtgctgcgtgcaacacagctcccctgctgctcggcccagctgggaccccagccccactcggcaccctctgtccggaggtgggggccttaaccaacctaggcctcgcgggggcggctttaagagggagccccgagcacctgcagttctgactctgctctgttgcccgagggcctttgcatggccgccccctcccgagaaggcgctggaccggggtggtgggattgaggaaggaaccgggaagccaggcccctccggtctgctgtgcagggggtctgagtggagacagccctgtggggtcccggaaggaggtggcttggtgtagagagacgggcctggggacgtttgggggtggacccagccgccagggttgaggggtttccccgggtgcaggacccagctctcagggagggtttcgggggtccctggtccctgtggaaacgcagggctcaggaccaggcaggaggagggagctggtgtgggtggggccttggagcacaggctcctcccagtgcatccctcgggtgccttggggcccctgctggcttccccagggcccagctggagccgcccaagggtgaacccagggtggttctccgggcaaaaggtgccacggcctccccaggcagaggtggcttgccccacccagcaaaggtggccactgcaggctgggaccgtcagatgggtcaggagcaggtctgggggtggtgtcccgatctgagccggtccccagagggagttggacccctgccacaccacaagccgtgcttgtgggtatcaagggcttgagggaggtcaggccctgctgccctggggacgctgccacccagcgcctggatcccagcccagaagcccagaaccttccagaaagctgctcccgactgacagtcctacctaacgatccagaaaatccgtgtgatttagcgggcgtggtaatgaccgcagtccagccagccgccagcgctgagttcatgcttttaggctaatttgtgttcttgtcccctctatggggctctgagtcctctcggctggcagcctggccacactgcatcagggcagctgggccctcacctggcactgacatctgcctcggctgctccgagccctgagaaccactccagggtcccttccccctgggcgcacggccagcttgttccttttccatcatgaaccactcactctgctgacctgcaaggctgggtcctgcctgcggggagcacgcggatttggggtgaggcagctggggggtcccttggggttggctgatctccctgggtctgtacctactgttcccctggagccattcccacgacccctgcccccctccgcatcaccacccaaaggctcccaaatttccctcccagcaccaatcaggacccccaaccaccaactcaagggtatcggcacaaccctgtggctggtgccagggcggggtgagggtgcgcagagccgtagagggacagctgcctggggctcccagggcccggactcggctccagccgctgcaagagcccaaggtgagccaggcacgaacatccaggtcacttcgcagctgcctgcaccacgcggccgtccggggctgaggtcggctgccctctccgcaggctgcagaacagggttagagttcaccgtggggcagggcccgaaaatcgcccggtggcctcagacaggcgacacctggccgggtcggactcgacgttcttgtctccagaaaggggtcgtcccccggcgggtcggctgggagctgggcgggggcggcaggagctcacgcctcattccctgcgtttccctccatgtgcccctgcacgctgggtccttggacacaagccccctcggtgcctctccacgcccgctcccgcaccgtcatcaccctctcggcccagagctcccagacgtgctcaggcaccgcggctccaccctgcgtcgtaattgccggtctgggtgcgatggaaacagtggtgacgtcatcgttcagaccccccgcccccggaggccccacagattctcagagggacggcgccgggactggggaggccaaggcgttgacgagcggggacgccggtgtgcacaggtgacctggcggctggcggggcttgactgtgcagaccacagtgaggtgcgcttgcgggcgccgggacagctgccagcaaagctgagagcagaaaacatcatgcgcgaggaggtggggaagccacagccttcccgtgccctggtgcggacataaaatggggcatccactgtgaaaatagtctggcaggttttttgtttgtttttgtttttgtttttgtttttttgagactgagtctcactctttcccccaggctggagtgcagtggcccggtctccgttcactgcaacttctgcctcccgggttcatgccattcccctgcctcagcctcccaagtagctgggattacaggcgcccaccaccacatcaggctaatttttgtatttttagtagagacggggtttcaccatgttggccaggctggtctcgagctcctgacctcaggtgatccacccgcctcagcctcccaaagtgctgggattacaggcgtgagccactgcacctggccattctgtcaggttcttaaaaaattaaacagcgttaaggttggacccagcgagtccacttctgggtatatacccaagggaatgaggagcagggtttgggaatgaggagcggggtttgggaatgaggagcggggtttgggaatgaggagcggggttttgaaatgatccacacaccaagctcacaacagctccatccccacagccaaaaagtgggggaaggccaggcgccgtggctcacgcctgtcatcccagcactgttggaggccaaggccggtagaccacctgaggtcaggagaccagcccggccaacatggtgaaaccccatctctactaaagatacaaaaattagccaggtgtcgtggcacgtgcctgtaatcccagctacttgggaggcttaaggcagaattgcttgaacctgggcggtggaggttgcagtgagctgagattgcccccctgcactccagcccaggtgacagagcaagactccgtctcaaaaaaaaaaaaaaaaaaaaaagttggggaaaccaggtgtccatcagcggttggatgggtcaccacaacacgagtcctctgcacagtggaatattattcagccttgtaaaagaacgagaaggctcaatgcagtagctcaccctgtattccagcactgtgggagctgaggcaggataatcgcttgagcacaggagtttaagaccagcctgggcaacatctctacaaaaccccatctcttcaaaaaatataaattttagccaggtgtggtgtgcacctgtggtccccgctacttgggaaatcaaggcaggaggatcgcttgagcccaggaggttgaggctgcagtgagctatgatctcactactgcgctccagtctgggcaacagagcgaggtgcagtctcaaaattaaaaaaataaaataagtgaggctcagacacaggccagagcatggttgcaccttgaggacatcacactcagtgagagacgccagacacaaaaggacacgtcctgtctgattccactcctaggaggtccctagagttgtcagattcacagagacggagaggataggaggcgtcagggctggggaggggacggggagtgagtgtcccctggggacagagtttcagtttgggaagatgagaaagttctggacaggagggtggtaagggctacatagcaaggagtgtgcttaatgtgcctgagctgtgcacctagaaatggccaagatggcaggtttcatgttatgactattttcccacaataaaacattttttaaaagtctcctccacgtggccacttgttccacatggcagctgggagtaggaacgcctactgttgcccgtgtacagatggggaaactgaggcagggcacgagggtgagttcccggagggcagacacagtctctgcccctaggaactcttgctcctcagagggagccgaacccagggagggacggggccccagtggtccctgaggacaccaggacccagcacctctcgcagacccagggaggggaccccttgtcctgcccccggggacacctggccagggggctggagggggtggcctgcgggttcctggaaccgagccatccctccctccgtccctccccagtcgtctcaaaatccaatccattttactggctggcacttggcattttattcatttcatggaggatttttttcctacctctccaacgctggctccaaaaggagatgacgtttggggtgtgtgtgtgtgtgtgtgtgtgtgtgtgtgtgtgtgtgagaaaatcgccggagtgtagatccattaattagagctgaatgttcccaacacagcggctgttctgctgccccgcgggatctggggagacaccgtcgggaggacaggatgaggaatgcctgggcagggaggaggtcctctgctagatggatagacggatgcagccgcccccatctatcaggcgcctgtgggatgccagggccccagaaggcaccccccgaggcccagaggacataggcaggcttggggactggtagacagcggggagctatggaaggctctagagcactggaggaggggcatgtgagcaagcatccttgtctgggccgttgctcaagccacaagcaattatagagtgcctactgtgtgccagcaaccaaaccagacccaccccaaccctcccagagctgagttgaagagatggtcactaaataagaaggaaatgaacaaaaagatggtaggccgttatggaaatgtgtggaggttgggggtgggtagcagcaggactgaaatggggcagggagtggtgctttctgcattttctcagtggcaagcagggaacgtttttcagggcagggcatttgggactgggttttgaagggtgaagaggagttctgtggcccaagttgcctgcccactgctggagggcagatctactctataggtttccatcagacatgcctgtctcagtttccccagggtgcactggatgttagaacacacccctgggctggcctggttagaaactgacagctccctggatgtgcgagacaagcaagacccttcctgggcctcaacttccctgcctgagcaatggtcgacattggtggaaggggtcagggatcctggagaggaacggggtgggcgtccgggccaattttattttcttattttattttattttttttgagacggagcatcgctctgtcgcccaggctggagtgcagtggcacgatctcggctcactacaacctccgccttccaggttcaagcgattctcctgcctcagcctcccgagtagctgggattacaggctcccgccaccacgcccggctaatttttgtatttttagtagagacgggctttcaccatgttggccaggctggtctcgaactcctgacttcgtgatctgcccgcctcggcctcccaaagtgctgggatgacaggtgtgaaccaccgcgcccggcaagtcggggccaattttaaagcgcagtcttttcctggcacctccgttccatctgtggcctgaatcagagcagggatgggcagtggttaggcgtccccggcccccgccaggtgtcaccgccgccggcctcaaacaaccactgggaggcactgtttcccccccatcccgccctgggcagggcacgtcccactccccccgcgcggttgctgggaacccggaggccgcccgggcggagcgcggagggcgcgtcggaacctggccggggccctccacccgcgccgtggtcccggtggttgcgccccgtggcgagcgacgccgacaactttgcgatggagtttgtgcgggcgctgtggctgggcctggcgctggcgctggggccggggtccgcggggggccaccctcagccgtgcggcgtcctggcgcgcctcgggggctccgtgcgcctgggcgccctcctgccccgcgcgcctctcgcccgcgcccgcgcccgcgccgccctggcccgggccgccctggcgccgcggctgccgcacaacctgagcttggagctggtggtcgccgcgccccccgcccgcgaccccgcctcgctgacccgcggcctgtgccaggcgctggtgcctccgggcgtggcggccctgctcgcctttcccgaggctcggcccgagctgctgcagctgcacttcctggcggcggccaccgagacccccgtgctcagcctgctgcggcgggaggcgcgcgcgcccctcggagccccggtacgcgggacgcccggagtcaggacgagggggacccggggcgggagcggggtcgggagccctggggacgtccggagtcaggatgggggtgccgggactacgcagggaagggggatcccgggacgctggacgggccccagggatcagggatggggaagacccgggtgtccccggagcaaggaaaccagaacccagaggaagagacccaggggcagggacctagacgcggggttgagagctccagggacgcccctggaacgcccctgcagaccccttcccagcgccctggtgatggggaccccgccactgtggcctctgccccttccttgcccaggccccttccctccttccccacagacccttccctggtccctgggacctcctggtccccacccggctctgggtggctgggctggaggacaggcggtctccctcctcactctaggggtgcagtttcggggtctgcaggtctggatctccctccttccagcattctccccgtcccctcccagaggcctccaagatcccagagcagcctccatcattccaaccccgactccattcccaccccccaacccctggcagccttcaagttcctctcttctaaccccaccccaggcccagatcccgggaggaaacggaagaagagaagggcgattgactgggttctggggtccctgttgtcccccccaacagggctcactgcgccccagataacaagccccctcccgtggccagcaaggaggtcccaactccggacatgggcctggctgagctctatgccccagctgcccctccttcccaacccactcagaggcccctccagcccctccctctcctcagggagggagaccctgacgctagagggggggtctcttagcccagctctccaggtgtcaaggggacccctgtccccccaccgccctagggctggtgggagaggcggggcccaaacccaggcctggggcgccctctgctgccgtctccaggagctgcaccgccgcaagccggggcgtgggaccgacctagcgtcttagggactggcttggccccctggggactgagccccatcccaagcccatcctccagcactgggcaccctgcttccaccctgggaagcgccctgccaacccgaggggcctggcaaagctctcccacctttaatatactaagttaaatccagggccgggtgcggtggctcacgcctggaatcccagcactgtgggagcccaaggtgggaggacagcttgagctcaggagtttgagaccagcctgggcaatatggcgagaccccatctctacaaaaaatacaaaaattaactgggcgtggtggtgggtgcttgtaatcccagctactcaggatatatatatattggctgggcactgtggctcacgcctgtaatccctgcagtttgggaggccgaggcgggcggatcacgaggtcaggagatcgagaccatcctggctaacatggtgaaaccccgtctttactaaaaatacaaaaaaaaaaaaaaaaaaaaaagctgggagtggtggagcttgcagtgagctgagatcacgccattgcactccagcctgggagacagagcaagactccatctcaaaaaaaaaaaaaaaaaaatccaggagaactttctggatggcactgggcacaagggggcccctcagccctccatgtgcctggcacggggcagtaatgtgtgaaggggatgctaggggaagctacctggtttggctctaagcacaaggccatcggtgggctcacctttatgagccacagctcttggccctagaggggttcccaggcaggtgggtgccaggtgaggtcaggactgtaaaggaatcagggagggacctgaggctggaggcgttccaagctggagcctgggctctgcctggaggatggagaagtctgaatagaggaggagcaatgtgcttgggttttgaaggatgtgtaggagttggtgggcatagagagagaaagatattccatccggggaatggcacatgcaaaaaaaaaacaaaaaacaccaagtgtgcccatgacaagggtagctggagccaagagaggctgggagactgagctttgtggggatggtgatggggaacgatggaagggtttagagcagggctggggctggggggaggtggaggggaggtgcagccatccagctggcatctacttgcggatcacccgctgctggggtgggaagggttttgtgggggtggaggtcgtcaaccctaaccgtggccacccctctcccagaacccattccacctgcagctgcactgggccagccccctggagacgctgctggatgtgctggtggcggtgctgcaggcgcacgcctgggaagacgtcggcctggccctgtgccgcactcaggaccccggcggcctggtggccctctggacaagccgggctggccggcccccacagctggtcctggacctaagccggcgggacacgggagatgcaggactgcgggcacgcctggccccgatggcggcgccagtggggggtgaagcaccggtacccgcggcggtcctcctcggctgtgacatcgcccgtgcccgtcgggtgctggaggccgtacctcccggcccccactggctgttggggacaccactgccgcccaaggccctgcccaccgcggggctgccaccagggctgctggcgctgggcgaggtggcacgacccccgctggaggccgccatccatgacattgtgcaactggtggcccgggcgctgggcagtgcggcccaggtgcagccgaagcgagccctcctccccgccccggtcaactgcggggacctgcagccggccgggcccgagtccccggggcgcttcttggcacggtgagtggggaccctgcttcccttaggagggtgtccaggccactgagtctgcactgctcatggatcacaaaaggcaacgtgaggccagacgcggtggctcacgcctgtaatcccagcacttcggaaggccgaggcgagcggatcacttgagctcgggagtttgagaccagcccggccaacatggtgaaaccccatctctaccaaaaaatagaaaacattagctgggcgtggtgacacgcacctgtagttccagctactcaggaggctgagatgagagaatcgcttgagcctgtgaggtccaggctgctgtgagctgagatcgcaccactgcactccagcctgggcaacagggaccctgtctcaaacacacaaagtcaggatgctttgttagatgtcttaggtccccggaagcagtgcccacctggggaactatctcagggacagcagagaacgagctgaacaactaggagggagggaacgggtctctggctgagccctggaggagttcctgagaatgaacaactcctggaaacaggtgaccccagctgggtgcttgtgtgtcagtcactggcttcaggcgtatgtggagtgggggcacagccacggcatcgggcacggatgccccgggatcaaggggttaggcttggggactaggcttggggacaccaggagcgtccacgtttgtcctcatgatacggacaagagcgaccagtgggaatcgggcacgtgctgggcaggggtgagaggatggaggggtgtgaacttcgacacctgacaccccccccgccctgcccctaggttcctggccaacacgtccttccagggccgcacgggccccgtgtgggtgacaggcagctcccaggtacacatgtctcggcactttaaggtgtggagccttcgccgggacccacggggcgccccggcctgggccacggtgggcagctggcgggacggccagctggacttggaaccgggaggtgcctctgcacggcccccgcccccacagggtgcccaggtctggcccaagctgcgtgtggtaacgctgttggaacacccatttgtgtttgcccgtgatccagacgaagacgggcagtgcccagcggggcagctgtgcctggaccctggcaccaacgactcggccaccctggacgcactgttcgccgcgctggccaacggctcagcgccccgtgccctgcgcaagtgctgctacggctactgcattgacctgctggagcggctggcggaggacacgcccttcgacttcgagctgtacctcgtgggtgacggcaagtacggcgccctgcgggacggccgctggaccggcctggtcggggacctgctggccggccgggcccacatggcggtcaccagcttcagtatcaactccgcccgctcacaggtggtggacttcaccagccccttcttctccaccagcctgggcatcatggtgcgggcacgggacacggcctcacccatcggtgcctttatgtggcccctgcactggtccacgtggctgggcgtctttgcggccctgcacctcaccgcgctcttcctcaccgtgtacgagtggcgtagcccctacggcctcacgccacgtggccgcaaccgcagcaccgtcttctcctactcctcagccctcaacctgtgctacgccatcctcttcagacgcaccgtgtccagcaagacgcccaagtgccccacgggccgcctgctcatgaacctctgggccatcttctgcctgctggtgctgtccagctacacggccaacctggctgccgtcatggtcggggacaagaccttcgaggagctgtcggggatccacgaccccaaggtgggcggcctcggggggctgcgggtggccttggggggctagcggtggccccgggctgggctgtgtggggcaggggtggtcagctggacgtggaggacgtccactaggccaactctggtcccaagagacatttattcaattaatttatttatttaaagaaaaatagccgggcgcggtggctcacgcctgtaatcccagcactttgggagaccaaggcaggcagatcacctgaagtcaggagtctcgaactggagcctggccaacatggtgaaaccccatctttactaaaaaatacaaagaattagctgagcatggtggtgggcacctgtaatcccagctactcgggaggctgaggcaggagaatcacttgaacccaggaggcggaggttgcagtgaatcaagatggcaccattgcactctagcctgggcaacagagcaagactccgtctcaaaaaacaaaaaacaaaacaaaaaacacagagatggggggctggctatgttgttcaggctggtctcaaacgccggggctcaagcagttctcccaccttggcctcccaaagtgctgggattacaggcgtgagccaccgcatccagcctatttttcttttcttttttgagacagtcttgctccatcgcccaggctggagcgcagtggcacgatcttggctcactgcaacctctgcctcctgggctcaagcgattctcctgcctcagcctcccaagtagctgggattacaggtgtgcaccaccaagcctggcttttgtattttcagtagagttggcgggtttcaccatgttggccaggctggtctcgaacccctgacctcgtgatccgcccacctcggcctcccaagtgctgggatcacaggtgtgagccaccacatctggcccgtattattattatttttttttgagacagagtctcactcttgcccagagctggagtgcagtgatctcagctcaccgcaacctccacctcccaggttcaagcaattctcctgcctcagcctcccacagtgctgggattagacgtgagccatcgtgcccggcctccccttgtaatttcttggcaaagtcgggttttctgccccgtagtgtctctgaacttttggatctgcccagtggtgtcccctgggggtgcctggcctgctccccagcccctggtgtcccctgtgaaacggtagtaaagcgtagacgccatgctgtcaggtgagccgactgctgccggcggctcttccaatgtaaacgctgcacagctgagccgtcaaagccttttcatcatacggaaacttccatcagatgctgctgacccacaggcacgatgggattcaagtttgggtttttggtggtgctggaatcccgtggggaggccgtggctggtgtgacctcagcagccagacccacctactcattaggggtctgcaccaggttgccctggcagctgtggggagaacagaccacgggtggtgcagggaggaccccgcagaggggcctgggctggtcgaggatgttgatggggaaggaggctgggttcgacgctgggccccaacctgggtaggagctgtggaggggtgagcagtgggcagttccctgtgttgcaggtggcgccccccagggttttcgggagaaacagggtgtcagaggcagtgacgacagagctgcctccgcctggggtgggaagagcgagtgggggcagatcaggagtggggtcatggacatgttagagtggggctcccgtgggacccccaggggagaggcagaggaggtggtgggataggcgtccagcccagggcgaggtccaggtggagatggacttgccggcgtttagaacagagggtctccacccggggtgatcctgccccccgccccaggggaccctggacagtgtgtgtctagagacagctgtggtggtcacgcctggggtgtgctctgggcatggagtgggtggaggccaggaatgcagcctcggcgccctgcagtgcccaggacggccccaccccggagaacggcgcgcccctcaatggtcaggggtcctgaggggcaggcagaggcgctgacggggtcccccgcgcagctgcaccacccggcgcagggcttccgcttcggcaccgtgtgggagagcagcgccgaggcgtacatcaagaagagcttccccgacatgcacgcacacatgcggcgccacagcgcgcccaccacgccccgcggcgtcgccatgctcacgtgagcccgggcgcggggtgaggcgggggcggggcgtggggtgggcggggcgatggctgacccccgcccccggccccagcaggagcgacccccccaagctcaacgccttcatcatggacaagtcgctcctggactacgaggtctccatcgacgccgactgcaaactgctgaccgtgggaaagcccttcgccattgagggtgagaggcacctgggcgaggcggggcgccggggtctctggggacctcctgggggcagtggggagccacggagggttcgaggtgggaaggggcgaaatcccacgtgtgcgggcagagttcccctggggctgtcccacctggccccaccgcctggccccgcgcccccaggctatgggatcggactgccccagaactcgccgctcacctccaacctgtccgagttcatcagccgctacaagtcctccggcttcatcgacctgctccacgacaagtggtacaagatggtgccttgcggcaagcgggtctttgcggttacagaggtggggcagggcctgggacagagggtgggggtgggggtgggcgtggggggccctgagccttgtctgaagtgaccaaccccagtgctcattccccagacgtgcgtttgtctgcttctgcgcacttctattcaccctacaaaaccccggctgcagtgccccttcctccatgaaacctcactccccccagccatggagtccctgcctcccaacctggctccactgccccaagcccctctctctggcccaacctgttctcccctagttcaaggctccccaggggcctgccattacgtgaccgtgcggggctcctgctgtgttgcccccagaccctgcagatgagcatctaccacttcgcgggcctcttcgtgttgctgtgcctgggcctgggcagcgctctgctcagctcgctgggcgagcacgccttcttccgcctggcgctgccgcgcatccgcaaggggagcaggctgcagtactggctgcacaccagccaggtggggagcgggtgggcggcgggcggccccaccccccccgcctcctcgccaaccgggtctgtctggggtcttagaaaatccaccgcgccctcaacacggagccaccagaggggtcgaaggaggagacggcagaggcggagcccaggtaagtggtggtcggggcggaccacgatgcaggaccacccagacccaccaccccaccagctcgccccgaagccggccgcggggtgcaggaggttcccggaggtcccccgcccacccccggacgtgcacaccgtggctccctggttgtgcctgtcggccatcctctgccgtcagcggcctctgcagaggcccagggcgcgagacggctgccccggcggacactgaccaggccggttccgtccccagcggccccgaggtggagcagcagcagcagcagcaggaccagccaacggctccggagggctggaaacgggcgcgccgggccgtggacaaggagcgccgcgtgcgcttcctgctggagcccgccgtggttgtggcacccgaagcggacgcggaggcggaggctgcgccgcgagagggccccgtctggctgtgctcctacggccgcccgcccgccgcaaggcccacgggggccccccagcccggggagctgcaggagctggagcgccgcatcgaagtcgcgcgtgagcggctccgccaggccctggtgcggcgcggccagctcctggcacagctcggggacagcgcacgtcaccggcctcggcgcttgcttcaggccagagcggcccccgcggaggccccaccacactctggccgaccggggagccaggaatgaggcggcagccgggccgtttgggctcaagacacacacacagcgcagtgagccgctgtcaacagacagtttattctatatacaaacacaattttgtacactgcaattaaatagaatggaatgagcgctcctccgcattcctccccgagtgactggtttggccgccggcccactccatccccgagtgggactggaccacggccctggctgctgccactgatgttggcgcctgcaccccacgtccctatgcccgaggcgcaagctctgctctcccggggaccccaagcctggcgcacacgcggggagggcggggccatggagaaggcactgcagggagcaccaggcagagccgggctgaggccggccggcactagggcgcgaggccccaccccaagccggcctctcctccacacctccgccttgctcagagacctgcaccatgggaccccactccatcctcaggacggttcactgcagacctaccaagacccctccagaaccttccgcggaaccccaccccctctccttgctgaccagctcaaacacctcactagcgggtacaagcctcgggcgcgacctcacaccagggggaggaaagccgccttccgggcaaaccccacgaaaccctgaaagcccccgacacaggctgggcagtcccagaggaaggaggtggctggcctcccccacccccacgggctcgggaaggtcaggcccagccagcaggggtcagaggcggctcagctgtgcggctcaggaccccacctccgagggcgcctccgttggggccatggaggccgggctaggcccgcctaccgcagcccccaggggagttgtgtcagaagctgcggagtcactcggggggacactgtcctggggggcgtgggggaggcccccagcagggcccagcgggctggctggacgccgctccaggagggaggcgctcaggccggacaggaaggaggcgtctgtgatgatggcagcggtctctgccatccaacccaggtcaccaccggcagctgctgccactgaggctgccgcggccaccagggagctgggcgccgctgccacaggcccgggactcccgctggccccaggcgagacggggcccagggcggggggctggccggcagagtcaggggctgtagccggggcgcccgagttgttgttcatgtcatcgggcagcgccgtgggggtcccggggcccagtggcggcgcctgaagcagcatctcctggatgcggacctgctgcaggatggcaggcagctcgtagtggtggaagaagtagatcatggaatgctgcgggagggagagtgggagtcaggacgggcccgcccctgccccacccagccgctgctcccagagggcagcccacccgggaccatccacgctacctctgcccgcttgggccgaccccacagggcatcctccccggctgcagcctctcctgcctggaaaggcacggctggcctgccccctgcttgccgcccaggcctcacctggatgaagagccaggaggtgaccagggccaggctgctatactgcccattgaagcggtagtgataggcatagaaggcgaagtggtagagatagaagaacctgcggggcggggtgagggcgtcggggctgcaggtcccaccctgccaggcccagcccctggggttcccgcgtggcgcagccaccacccccgcctccagcgcccctccctctggcagccccctacccctgcccaccagcacccactccaccctgcccccgcgccacgctcaccgcagccaatgccgcttgctggtgctggtgtggcagcagatggcgtcatactggtccgcgagccacacgatgaggatgatgtagaaggcggtggtggtgtcgttgaagaactccgacatgatggcctccatccctgcagggagaggcggcgccggttgaagcgggcggggcggggtgcagcgcggggcgggggaggccgggtggggtcctcaccgacgagggccaggatgacggtcagcaggggcgctgcggggaaggcgatggccatgttcatctccagcatctgcagcaggtccactgcgggcacagggcggcgggcgcccggtgagggcctggaggacgcccgccccgccctgcgccggcgggacactcaccgatgaagacgaagatctggtggtgtgagtaccgcagcagcatggacacgctcagcgtctgcaaggggcgcgcaggaagcgctatgaggggctgcgagggcctgcttggctcccgcccggccagcccccgcacccgccccgaggcactcacgaagatgaccatgatggcgaaggcggccaggtaggacgtccgcgccatccacatgctcacaaagcggtagtgctcgcccgacaccacattccgcaggaagcctgcagcagaaggagccgtgagcgcccgcccccacccgcgccctcgcaccctcggccccggggcatgcctcacccttgttctcctcgttctcggccaggcccttcacgctggacatgaggatgtcatcgtagcccaggaactcatccagcagcaggcggctgaagcggtccccgaagcactggtcccgcgtggggtctgcgggtgggtgaatcagggagccgggagccccgcccaggccaccccctgggccctgccccagctggctccattgctgaggcctggcctgcttcctggccctgcccattcttaggaaacccatccaggaccccagccctgggaagcgtgcctggggcggggcagaccccagtgcttcctgcacagccccccgtcccgcaccagcaggaggagacccgagggaggaggggaggccccgccatggagctccccaagcccagcagctcagactcacccagggtgaccaccatgacggggatgctcaggcgctggcgggtggcctgcgacaggcgaaggaagccatactctagtgagtactccacgatgtactcgtcctgcggccacactgcagggcagaaccagggaccaggtcagcgcccccacacacgtcccccgcccactgccagcaggcaaggcaggcgttgaggggtggagggtgagacctgctgagccctgggccccaggtgggtgctgggaggacccctacatggacacttgggatggtgcccactcaagctggtgtcctgccctgtgcactgcagaggctggccaggctcctcctcccgtggccccctctccctggctggggctggctgggtgcagggctgccccactgccctggcggcccccagcacacccccaacacttcagaggccccggccctctggatagaccctctgctgccagatgggcaggggtgggggcgggggcgggggcttccctgagcacagcccgctagaactctgagctcagagccgaagggatccatcccctccaagtcgccgttcacgaggatcccagaaaggatgagctgagccagttaccccaggctctggggtgtccccacagcctcctgtgctgacagatggggaaatcgaggcacgggggtgccctcaacggtccaggacatgcagccagcaggctggggatgttcggagggaccccgcctgcaccccagcaccccatgactgaggcaaccccgtgaggcagtacacctttggtgggtggcctacctttggtgggcgtctcggggaaggggaactcctggctgtcattcagggcctctgtgctactcggcggcttgaacaccttgggctcgatgtccagctcaaactgtgggcgaccagggacctgggtgtcagcagcgccagcccgggctgtgagggcccagcctgaggatacagtcctgctaatgggaagggactggaagcctcagcctctgccccaccactgaccaggccagggtggactacgtgtgcctcccgcctcagctgggaccccacctcaacaccaagcctgccctgctgtgaggccatctccagcacagctctgaatcctgaagctgaggcaagggccagctacaggcagtagaccccatggaagggtccatgatgctctgcccaaacactcaaactcttggggttggctctgtgggaacaggtgggaccccaaaccctgactgctgaagcaaaaacatctcccaccaggctgtggggcccaacacagccacctggtcccaccagtgcccaaggccaccacaagctgaccgggaacccagcacctctgcaggcagtggggccacctcaggacggccaggatgggcccagagctcttagctttcagcccccaggcctcctcagctattgctgcccactgcatccccagccccagccaatcccctccccggaacagctactctcaaaggcccgagtctgcccagcccaagtcctccccgagatccccctgccctgcccaggcctctagcagggcgacaggccgagggtcttgcttcagagcccccaggccaccaaaaggccacggcaggcaggggcggccttgtctgcatgccaggtccctgaaagtcaagaaccccaacatcctgtcgatgtcaggaaccgccccttcagcgaccagcatctacggggcgctggcctctgctgcagctgagcccaggcctggctcaccttgatggagctgttcccaaacatctccatggtcagctcttcctcctcctcatcttccatgtccaggttgctgcctggttccacggccaggcccgggaagctcccgcggccgccgctgtcacagaactgtaggaagacgggcgcgcggctcgagttgtgccgcacttccacacgcaggatgccctcacgcggccacttgtcacgcacatgctccaggcagttgatgggcgagcgggagaagacgatgtggatgtaggccaggacgaagagcacaaacagggcctagggggcggccggcagtcagtggggcgccccagggccagctgcagccgacacccaagggcctacgtgatggggcgtgatggggcgcgctgggacgcccaggacggggaaaggaaggaaaccccagaagccgaattgggctctgaggaccctgggtccctcccacgctgactgcaccgggccagcccctcacatagtccaagtgactgaggatccgggggacgccccactccaaccccggaggggctctgccacctgcagcccggctctgacaggccctggggcttcggcaaggcctgtgactgccccgcacctcctcaggggtgagccggacgaagccagcaggccggggccctctcagatgcacacaggaccccccaaacctgggaggagacgaggctggactcagacccaccaagtggagcacaccagggccctctgccagccaacggctcccgccctgcaagcagcagcatgggtgttgccgccaccccagggccaccagctggacccactgtctacgaaagagggcacagccctccacagcccaacctgctgcttcctgcctcaccttccgctgcgtccccagcactcccctgatctcaccacctgaaaatagcttctctcacctggcggggcgccctgtgcaaccctcccaggcctggcggggccagccgcagctgctggggacacagtggacctccgtggctgggcagagcgccccacggcagggcgaggctgccgtgcccgaggcacaacctatgaactggggtgccagcagctctcacctgggggctcctgcccaggggatgcttgggacatctgtggttgtcacaattgggggagctcctggcatggagtgggtgaggccagggatgctgctcggcaccccgcagtgcccaggacggccccaccccgacgtccacagggcttggggagcccacgccccagcgtgctgcaggcacaactcagagtggggcccctctaggggcagttcagggcagcccctcttccagggagcccgcctcaccgtctggcggtttggctgcccactgtacctcccaacctgaggtccaggcatcacccccgagcctggtgagggtcacgtctacctgctgccccgatccgcaaaactgaggacccagctgggccaagggggcgcccacggccacatggaaccccagactctcagggaagaattgatcagactcaaaatcacaagccagagagcctggagcacagggcccctccgtgacccgtgacctgctggcaggtgcaccaatgcccggggtgcagtgagccacctgtggccgcacagccataggcaagaccaccaggagcctcaactcttccacgcccacagtgagctggggcctcctctccagaaccctctgtagactgagcaaagggccgagtcagcaaagcaacccacttccagcccggccgcagtgctgtgacctgtgggaggccctgagtctgagcacggataaagccctgggtctagccgcacgtgcacctggggcgagccccatcacactccccagccccaggagctggagaatcccttgggctgatctgaactgcatttctagtccttacagccaaaagagccgcaggggatgaaggctggcccggcgctgagatttaagcagaaacaggcaagagcagaaccctgaccgccaggcattcaggccccgcccacagacgccggagctacaaatgaggggtgggcggggggagggggcagggccctctgctggggagggttcccctgtgtcctggggaagacagggagggcagtgtggaaggggggcagccccggagcctgagatgctttcaaagcctagcgtttccccatatggcatctggggacaggagccacggaggctgggcccagtggtgggtcacggtcagagacactgaccccacagcccctcggctcagcactctcaggagagaggggcccgcgaggcccatggtggatgctgctggtggccacgctctgccttccaggcccacacatccagcaggagctgtgcccaggacagcaatggaccctgtgccaagatgttccaaaaagtgctgatacacagtgggccgaggtcggggctgtccaacgcttcacaagggacgcacggctgttaccatccctggtttatatacgaggaactgacacagaggtcccgacagacctggacctgctgaggtcacatggccaggagggaggggccagggcagtgccagtctgcacaattaaggccccacggggaagagcagctcctggggttgccctgggcagggtcagcttggtccagggtcagcgggagagggcacaggacacacatcctgccacacccagcactggtgtgagtgacccgtcccatgaagacagcggacgtgatgagagggcaccagtgttttcacacaatgtgcacacactccagtcaaagacttcaagtccaccagacgctatgactcagacgtcactgtgtctctgccccatcaggtgctccgtgctgaccgagctcagggcccctcttccctgactgagcatgaccagaaaaatgccccactggacaaggcccgttgccgccaaagcctcagctccccttcagtctcccaccacaaaacaaggagcaggcaccacccagccagacgcaggctcatcccgagtcccgggtcctcctccccaagacctgtctgtcatcagccaccctgcagcagccacctcaccaggcccggccctgagccacacgcccaggcagcctcgtccacgcccacagtaaccctccccagggagctcacctgcaaatgctcccatgggcccctggccaccctctgcccgcaacctggctcagccactcgcatgccctgggtggtccagtcccctacactccatgaccctgtccctgacccaggctccccagcaggcacccacatgctccagccccacggccttcccacacgctctccagctgcctggacaccccaccccatcccactggctgtggctcacctccaggaggccctgcccacccagcacaggagtcaccccacccctatgacccttccttcctccgggtcagcccacacacggctgcacccacaggagcacctcccccagcctggggccgtgctcaccgcctcctccaggaagcttcctggatgttctggccgaggctctcagggcaccccaacactcggccactgggtgggcctttcctttcctgtctccccacagacctggagtgccaggagcagcctgcccgctctctgggtatttgactgacccacagaccgacggacacacaagcccgcggagccacactctcctcccaggtgggacacagagccctcagccccagccaggaaacactacctggggctcccctttgtccacccggggtgcttcctgcctccaggccaccggggcctctccttccactgcagcctcacagtggcctcaatgtgacaggtcccccattcagagcagggcccctggggtctcacataccccgtctttaatcgtcacgaccccacaagaggagccccattactccctgtggctaggcgcgggcccctgcccatgtccaggggtgctgagtcgagaccccttcaccctgtgggcatccacttggtggtcacctgggtccagagcccaaccgcacaggtgcaggcacccagtgccccaagatggacagtctctgccacactgggctcagggccatgaaggccagcagaggtggatactgaggctggatggaggtctcccgagggcccctggaacacaggcccctgccgcctcctctctccccagcacctggcactgcctggcatttcctaaagccacccaggcatggatgagggaccggggggctccatgctggctcagagctgggagatcctggcatttcctaaagccacccaggcatgggtgagagctgggggactccatgccagctcagggctgggagctcagctgcacagatgccacaggatgaagccaccttgaagggatcataccagggaggacctggctctctgcagggagacccccggaagccaggcaggcaggaagcagaggagccttctggaactcaaggcagcctctgaaatcaggcagttccagcctgcactttgcagataagtaaaagtgaaggcagcagggtcagattctgtgccaccagattaccgggtggaaaattcacaaagaacagatttccccacccaggccaggcatggtggctcacgcctgtaatcccagccttttgggaggccgaggcgggcagatcacctgaaatcagcagtttgagaccagcctagccaacatggcaaaacccagtctctactaaaaagacaaaaaaattagccggttgtgatggtgggcaccggtaatcctagctactccgcaggctgaggcagaagaattgcttgaacccaggaggtggagtttgcagtgagccgagatcaaaccactgcactccagcctgggtgacagagcaagactccatctcaaaaaaaaaaaaaaaaaaattcaccacccagagatctcacagtccaaagccctctgctgagagaggagggattggggttactgagaacctcccaagagtctccaccctacacagaagacggggaactccagctctggcccagccccatctgaccacctgtgagtggtattggcctggagatggagccgggtaggcttgatccctttccaaaccgggacatggtgggaccagggcccaggcgacagggatgcacctcccaaggaggctgagctccgtcgggggaacctggcctggcacccagcacacaccctccacaagcctaaggacacagtggctccatcctgttcccaggctactccatggaaggaaaacccacgtccacagaccagcctccgtccacagtttcaggccccgtctgtggaccccagagccgggaaaggccgcctgcctgcgtaacccttcacagccctgctcaggtgcctactgaggcgaccatgccactctggggggctgcagggaggaaggtgggaaggatgatgggctgagctctggcctggggaggcacggatctggaggctggggggccttccgtgaagtggcagcaggctgggacccacacccaggtccgcaggacggccaaggtccagctccacttgccgagcccaaaaaagcagccagctcctgaccaacctgtgtcaggctgggaacttgcccacgatcgcagcctggcccgccagcatcggacccctctttgcaggctagatccaaaaagctcacggcgcaacttcagcagcccccaagccccggcgcggcggtgttctgatgcagaacgaaaacggccacgtccccatttcgccaggtggcccaggaccccggccagcttgttttctgaggggctgcagctgctactgagcccctcttgtcacccaagcaagactccttctcagagggagtcaggccgatgcctgtcctgcacggctgagacctctgccatctgaggagggcgggagggggacagagcccaagacgcggaggccggtgcctcataggggaggcacgggcgacagacccacaacctgagctcctgaagcaggaagggagtggggacccagcggaggaagaggccggggatggggtggtacgctgctgccggtgactttgccgctaaccctagcgaggtgacctcagctaagtcacattcccctgaggctcaggagcggggaacgcagctgaaaggctacaaggagggagagaggggagtggggagtcgacttccaggacaggggttggtccgagggagacctgcgtcaggctgggttctgggccagcacattgggaggggagagaggcctcggaactgagggtctcaggcggcacagtcaggggtcaaagggcgggaggtgctacctcgcaggccaggaccggactccaagcctgggtaggtggggacctgggaaaggcggtcgccggggacaggatgggccctggagggagctgacagtgaggtttccagagtagagaacagcggcttctagtgcagcgggatccggccttcccgggtggacgtccccgggcgggatggggtcacgagacggtgtccctggccaatcccagggtcagaggtcgcgagggagagccctaatcggtagggccgggtataggcctcagggtgcagggtggcgctcgctgtccccagcggggccaggggtcgcggtcggaggtagcagacttgggggtcgggacagccgctggggtcaagggtcgggggtcggggccgcggtcaccttgagcagcacgaagaactcgaagagacggcggaaggcgggcgggaagagccgcgaataggtgacagccatcttgaagaacagcgcgtggaagagccggtcgcgcacgttgatgagggggttggggttgagattgggggtgcgaggcccgcgcgcgggggccgggccgccgccgccgccgttgggcccgggccccggagctgcgggctccacgtgctccgacatgcctcccagcgtcgcgccctaacgacccgcaagtgtccgagggcgcctcccggccgccatcggccgccctcgcagccgccgctctcctcacggcctcccggccgccgccgccatcttccgctttctcgtccggctgcggcgctgctgacgctagcgagtcgccacgccgggcaagagcggcccccctgcgcccgcagagaacgctgggatgccagcggcgcccgcggaggcctcaccccctacctcggccgctccagggggcgggcctgcatctgggccacctcttttgcatattggcacccacaatccaccgcggctatgaggccagtataaggcggtaaaattacgataagatatgggattttacgtgatcgaagacatcaaagtaagcgtaagcacgaaagttgttctgcaacataccactgtaggaaattatgctaaatatgaaaccgaccataagttatcctaaccaaaagatgatttgattgaagggcttaaaataggtgtgacagtaacccttgagtcgtgctcgcttcggcagcacatatactaaaattggaacgatacagagaagattagcatggcccctgcgcaaggatgacacgcaaattcgtgaagcgttccatatttttgctgtagtctacagctcgtcacctcgtttggcttctcttgcccggatcctgccatgacgtcacagggccagtaacgtcatagtcttcccgtgtccatctcctgtggcgccactaaggttggcggtagaacaatctggcagtctctactcctgcgtggcgctgtgccacctgcccccgtagcttcgcgcagcaatgaataaataagtgctcttcaggggcacttactgagtgccggctgcgtacacaagaggatactatggtttttgggttttttggttgtttgtttgagatggattctcgctctgtcgcccaggctggagcgcagaagcgcgatctcggctctctgcaacccccgcctcccgggttcaagccattctcctgcctcagcctcccaagtagctgggattacaggcatgcgccaccactccaggctaattttatatttttagtagagacggtttctccatgttggtcaggctggtctcgaactcctaactttaggtgatttgcccgcctaggcctcccaaagtgctgggattacaggtgtgacccaccaagcccgccaaaaaaaagttttgtgttgttttttttttttgagacgcagtctcactctgtcgcccaggctggagtgcagtggcgtgatctcggctcactgcaacctccgcctcttgggttcaagcaattctctgcctcagcctcctgaatagctgggattgcaggcttccgccaccacacccggctattttttttgtatttttagtggagaccaggtttgatcatcttggccaggttggtattgaactcctgacctcgtgatccacccgcgtcagcctcccaaagtgctggagttacaggcatgagccaccgcgcccggcccccccaaaaaaatgtttttaaaagttaactgaggacgttggtgcatgcctgtaattccagctacttgggaggctgaggtgggaggactgcttgagcccaggagttggaggctgcagtgagccatgatcgtatccctgcgctccaggttggatgactaagtgagaccctgtctctaaaaaataaagtgtaaaaaagccaacagtcagtatttttagcttttttgggtagagtaactactccactctgctgttgtacagaaaacgcagccgtaaatgatacataaatggatgggcacagctgtgtgccaataaagctttgtctgcagacactggaatttgaatgttatgtaatttccacgtttgatagaatggttttcatattttgggtttttttttcaaccacttaaaaatgtaagagccattcttagctcacaagccatacaaaaataggctgcagctggatttggcccacaggtcaagaacacagctttccaagagaaagataagcaaataacaaacataactttaagtgttctggtagccacagtaaaacaactaaaaaagagcaagtgaaattaattttaataatatattttacacatctcaagttatccaaacaaggtcaggcgcggtggctcatgcctgtaatctcagcacttttggaggctgaggcgggaggatcatttcagcccaggtgttcaagaccagcctgggcaatataatgagatcctgtctctacgaaaaataccaaaaattagctgggcacggtggtgtgtgcctgtggtcccagctacttgggaggctgaggcaagaggattgcttaagccaaggagttggaggctgcagtgagctgtgatggcaccattgcactccagcctgggcaacagagcaagaccccacctcataaacgaaaaaaaagtggccgggcgcggtggctgacacctgtaatcccagcacttgggaggccgaggcgggcggatcacgaggtcaggagatcgagaccaccctggcaaacacggtgaaaccctgtctctactaaaaatacaaaaatattagctgggtgtggtggcgggcgcctgtagtcccagctgctcgggaggctgaggcagaagaatggcctgaacccgggaggcggagcttgcagtgagccgagatcacgccactgcaccccagcctgggtgacagagcgagactacttctcaaaaaaaaaaaaaaaaaaaaagtaactgagatgtaccaagtcttcagaatctggtgtgtttcccatccatggggtgttccaatatggataccagtgcttcctcagaaatacttatctccacagtatttagatttacagcgtttatactgaaaaggaaaattcagaaacgctaaggtatttaaaatatacacgaggctgagcacggtggctcacgcctgcaatcccagcactttgggaggctgaggcgggaggatcacttgaatccagactgggcaacatagggagaccccatctctacaaaaaatttaaaaattagctaggcatatggcacatgcctgtagtcccagatactcaggaggctgaggcaggagattacttgagtccaggaggtcgaggctgcagtgaactatatttgcaccactgcactccagcctgggtgacagagcaagaccctgtttcaaatatctatatatttacatttatatgtataatgtgtacatatgtgtgtatttatgtatttgaaaactttaatgtgtgtgtacatatatatatagtcaaaaacggaaatcatgtcagtttttaatttttaactgaaattaattgaaatagcccggccacggcagctgacacctataatcccagcacttcggaaggctgaggccggcggatcacttgaggtcaggagttcaagaccagcctggccaacatggtgaaacccgcatctctactaaaaatgcaaaaattagccaggcgtggtggtgcgtgtctacggtcccagctactcggagtcccagctacatatatatgtgtatttatatatatgtgtcttcaaaaaatggaatctagtgccagtttttaatttttaattgaaatttaagaataggaagtatttgctgggtgcggtggctcacacctgtaatcccagcactttgggaggctgaggcgggcagatcacgaggtcaggagatcgagaccatcctggataacacagtgaaaccccgtctctactaaaaatacaaaaattagctgggtgtggaggtgtgcctgtagtcccagctgctggggaggctgaggcaggagaatggcgtgaacccaggaggtggagcttgcagtgagccaagattgcgccactgcactccagcctgggtgacagagcgagactccgtctcaaaaaataataataaaataaaataaaaagaacatgaagtatttgcttccctgatggcaccagccacacttccagtgctcagtagccccatggccagtggctacagtagtagatagtgccacattgaaaatttccttcatctcagaataacagaaatggtcagcactggtctaaaatgacatgggtcggccaggtgcagtggttcaagcctgtaatcacagtactttgggaggctgaggcgggtggatcacctgaggtcaggggttcgagaccagcctggccaacatggtgaaaccccatctctactaaaaataaaataaaataaaataaaataaaataaaataaaataaaataaaataaaatgtgtcaaactcctattgatgcttcaaaaccccatctcccttgcctcctcttacatgcagctttccttgattcctccgacagagccccaactctccctccagttcctccagccccaagcctctcattctgtcctgtacttgctcatatagggaaacagggtgggcggggtgggggggttccgcctgtgctggctcatacagggaatccgggttgggggttggtctgtgccagctctgtcttcctgggcatgggctgggccagagctaaggtctcctgagagccagcactgcctggcaggagactgtcccggagactttttaataatttattattattagggtttttttgtgttttttttttttgtttttttttttaagacggagtcttgctctgtcgcccaggctggagtgcagtggcgcgatctcgacttactacaacctccgcctcctggcttcaagtgatcctcccacctcagcctcctcagtagctggaattacaggcatgtgcccccatgcccggctaatttttgtatttttagtagagacggagtttcgccatgttagccaagctggtctggaactcctgacctcaagtgatccgcccgcctcggccttccaaagtgctgggattgcaggcgtgagccactcggatttttatttttatttatttatttatttttagagagaggctcttgctctgctgcccaggctggagcgtcatgttgtgatgataactcactgcagcttcgacctcttgggctcaacggatcctcccccttcggcctcagcctcccaagtagctagaactccaggtgcaagctaccgcacccagtaagaatcctattctcttttggactgacaaactcctactcatccaacaaagccccagctccaatggccccttctctgaggaacctgccctggttccctggtccacctcccagctagtagagttccctgggaaggggttagacgcctctaagtggcagagaggggccctcattcctgccccaaaggtagccttctcccctcccctttctggcagaagagaagtctgagatggagaaagagtgagagccgcccacgagctctgagcagagagcccgcaggagtgccacgtcccggcggcctcggcccctccctgcctcagtttcccgtggcatcaaagggggcgaggggcccctccaggcctctggtgacgggggtgctgtgcccaggcgggggtccgggggcgaccgagggggctcaggaagtccgcggccgcaggaattcggcgcctccaggccttataaggacatttgcgctccgggccaatcagcggcgggggcgtggcgcgcggagcccggcgcgtcccaaccccgcgccagcccggcggtcccgtcccgtcccgtcctgtgcggccccgtcccgccgcccgcccgccagccatgagctccacgcagttcaacaagggcccctcgtacgggctgtcggccgaggtcaagaaccgggtgagtgaggggcgccccttgtccccccgacagcgcggccgtcgcacgctccgaccggtgcaggagcccccaggcgcccccggcacctcccgggcagggagcttggagacccggggcggacgggcccttgttctccctgacgcctggtggggggatgtctgcgggcaccccctgaggctcccgcgaatcttggggagcacccaggtctgagatctgggggacgagtgacccattcccccccccaacatctaggggtagttgggtctgacttcgtcccctcgccatggccccaggacccccacgtgtgaagcccctggcgcccactcaaccttcgagaaggtccgttcaaggtccgacaacgctctgggggtctgggggggaccccagcaaccccgtcatctcctggccacacttctgcttttggggcctcttagctttgggaggggaaggggcatggccgagtggtttttgagaagtgttacccccccacaaacaggaatttcctggcctctgggacaccttgggggtgtcttggggggaggggcggtagccgctttgcacggtctttgtctcccatctgactaatttaaacggataacaaagaggttctctgaaggtggccctgagatatgtggggttttgcagcctcgaaagaagagctggggcccggcagggcgcgggggctcacgcccgtaatcccagcactttggggggcggagctgggtggatggcttgagcccagcgagttcgagaccagtctgggcaacatggcgaaaccccatctctataattaaaaacaagccagggctaggggagacactttttaagagagcacttgtggttctagctcagagaggaccagacacttctgcagggtcacacagcagggtcctggacaggattcccagggaaagtggggggcgggggttgtgatgcgagacccacggacaggaccgggacctgaccctccaggaccttccagctggaggggggtgtcgtccccgcccaccccctcccccgacgcccactgggcacctgggaaggtgtccttacagctgacttctgcaggggaaactgcctctgcacgctctgagggcaccggccctgccagccccaacagccacctgcccggcggcactccagggccggcagactggagggagaattcctgcttccccgctgtgagcccctgcaagccttcagaccagctcttggccaaaaagggaggctgaggcttggggtggtcaaggcctgagccagggtccccagcccggggctcacgactcctccttcaaggggccatctgcaccctgcattcatagagccccccgtgcagtggggtgggcaccctgccgcaccctgcatacagccggctaagggcaccggtgtccacagggacccagagacgtcgttccagctgcccagggccacacagcccacaagtgacagggccaagaccggaacccagtacctgctgggcctgcggaagtgggagcgggcacaggagggtggggcggcttccggagacggggtggggtggggtgggggcaggttgatacctgccctggcgggggtgaggacagaggctggaagagccgcttagcaggctccccgcgcaaccctcagtctgtccgtttggagggtgggcgaggcgtcggccagcttgccagggtcacggaagggtcgcctcccaattagaaaccagcttccccctggcttcccgctcacacccgctttaccggctgcttgaaacagccagagacccgccccccgccccgcttccccgtggctcagttgactcccggctggacggcacggaggcagctcggatccacagtgtctgcggccttgcatcccggcttgggggtccggacccgctgggaacagctggttcagatttagccggggaggcagcgcgcattcctggcagtttgtggtgaacaggaatgtgctggaaggccggcggccgggcagcgggggggcgggggtgggggaggacggcagcggctgggggtggggccaggggacctgggcccctgagccggcagagacgcggcgcagctgggcaaggcagggctgtgtacccagcagccaccgttctcattcctcgggatc

SEQ ID NO: 98 - DNA, 126579 bp, Homo sapiens
gatcatatgataggccataaaatgagcctcaataaatttaagaaaactgaaattatatcaagcactctctcagaccacagtgtaatgaaactggaaatcaactccaaaaggaacctttaaaaccatgcaaatacatggaaattaaataaactgctcctgaatgagcactggtcaaaaacgaaatcaagatggaaattaaaatattctttgaactgaatgacaataatgacacaaactatcaaaacctctgggatacagcaaaggtggtgctaagaggaaagttcacagccctaaatgccgacatcaaaaagtctgaaagagcacagacagtttaagtcatatctcaaggaattagagaaacaagaacaaaccaaacccaaacccagcagaagaaaggaaataaccaagatcagagcagaactaaatgaaattgaaacaaaaaaaaaattacaaaagataaatgaaaacaaaagctggttctttgaaaagataaataaaattgacagaccattagcaagattaaccaagaaaagaagagagaatattcaaataaccttactaagaaatgaaacaggagatattacaactgataccacagaaatacaaaagactattcaaggctagtatgaacacctttatgcacataaactagaaaacttagaagaaatggataaattcctggaaaaatacagccctcttagcttaaatcaagaagaattagataccctgagcagaccaataacaagcagtgagattaaaatggtaattaaaaaattacaaacaaaaaaaagtccaggaccagacagattcacagcaaaattctaccagacattgaaagatgaattggtacttttgacactattccacaagatagagaaagaaggaaccctctctaattcattctgtgaagccagcattaccctaataccaaaaccaggaaaggacttaaccaaaaaagaaaactacataccgatgtccttgatgaacatagatgctaaaatctttaacaaaatagtagctaaatgaatccaacaatatatcaaaaagataatccaccatgatcaaatgggttttataagagggatgtagggatggtttaacatatgcaagtcaataaatgtgatataccacataaacagaattgaaaacaaaatcacatgatcatctcaatagatacagagaaagcatttgacaaaatccaacatttatgattaaaactttcaggaaaatcgtcacagaaggaacataccttagtgcaataaaagccatctatgacaaacccacagccaacaaaatactgaatggggaaaagttgaaagcagtccctccgagaactggaataaaacaaggatgaccactctcaccactcctcttcaacatggtactggaagtcctagccagagcaatcagacaagagaaagaaataaagggcatccaaagcagtaaagaggaagtcaaactgtcactgtttgctgatgatatgatcgtttaccttgaaaaccctaaggactcctccagaaagctcctagaactgataaaagaattcagcaaagtttctggatacaagattaatgtacacaaatcagtacctcttctatacatcaacagcaaccaagcagagaatcaaatcaagaactcaaccccttttacaatagctgcaaaaaaaaaaattaaattaaattaaattttaaaaaatttaaaaaaccttaggaatatacctaaccaaggagttgaaagacctctacaaagaaaagtgcaaaacactactgaaagaaatcacagatgacacaaacaaatggaaacacatcccaagctcatggatgggtagaatcaacattgtgaaaatgaccacactgccaaaagcaatctacaaattcaatgcaatccccttcagaataccaccatcattcttcacagcattagaagacacaattctaaaattcatatggaaccagaaaagagcccacatagccaatgcaagattaagcaaaaagaacaaatctggaggcatcatactacctgatttcaagctatactataaggccatagtcaccaaaacagcatggtactggtataaaaataggcacatagactagtggaacagaatagagaacccagaaataaacccaaatacttacagccaactgatcttccacaaagcaaacaaaaacataaagtggggaaaggatgcccttttcaacaaatggtgctgggataattggctagcctcatgtaggagaatgaaactggatcctcacatctcaccttatacaaaaatcaactcaagatatattaaggacttaaacctaagacctgaaactataaaaattctagaagataacattgaaaaaactttctagacattggcttaggcaaggatttcacgaccaagaacccaaaagcaaatgcaataaaaacaaagataaatacctaggacctaattaaactgaagagcttttgcatggcacaaggaacagtcaggagaataaacatacaacccacatattgggagaaaatcttcacaatctatacatctgacaaaggactaatagccagaatctacaacaaactcaaatcagtaagaaaaaaacaaacaatcccatcaaaaagtgggctaaggacgtgaatagacaattctcaaaagaagatatacaaatggccaacaaacatatgaaaaaatactcaacatcactaattatcagggaaatgcaaatcaaaaccacaatgtgataccaccttactcctgcaagaatggccataataaaaaaaataaaaaaacagtagatgttggcgtggatgtggtgaacagggaacacttctacactgctggtgggaatgtaaactagtacagccactatggaaaacagtgtggcaattccttaaagaactaaaaatagaactaccatttgatccagcaatcccactactgggcatctacccagaggaaaagaagtcattatttgaaaaagatacttgcacaggcatgtttatagcagcacaattcacaattgcaaaatcgtgcaagcaacccaaatgcccatcaatcaacaagtggctgtagtgtgtgtgtgtgtatatatatatatgatgtgtgtgtatatatatatgatgtgtgtgtgtgtgtgtgtgtgtgtgtgtatatatatgatggaatactacacaaccataaaaatgaatgaattaacatttgcagtgatctggatgaggctggagactattattctaagtataatgtaactcaggaagggaaaatcaaacattgcatgttctcactgatatgtgggagctgagctatgaggacacaaaggcataagaatgatacaatggactttggggacttgtggggaagagtgagaggggatcgagggataaaagactacaggtatgttgtggtgtatacatgggtgatgggtacatcaaaatctcacaaatcaccactaaagaacttactcatgtaaccaaataccacttgtaccccaataacttatggaaaataaaataaaataataaaaataaaaataaaaaaccataaaagagaatgatttcagtaactttcttctgataagagattgccaaccatagactggttctggcttgtttacagaggctgcacacctgagtgcctccatgtccctgctttagcttttgatgtatacggcctaatagtaattcatttaaatgttaagtctctaccctaatgttaacttgggttgtatgttacatacatgtttttcaatatgcatatttcaggaacccctttgtgaatattcataactcctgctataacccattaaatatgtatacttggccaacctgttcaacataagttcctcttctgctctctcctcccttaaagtgcctgtttccagtctttgctgagcggagtctatacttcacagcctgtggaatggccaccctgcagactataaacccttatacaaaataaagtcccctttctaaattaaaaacaaaaaacaagtagatgtcactgaacatatacttaaaacactcgagcaaaaagaagacaagattgaaactactagcaaagaattaagtctacaaaatgaaccaaacagaaattttgaatccgagaaattctgataaactgtactttgaaatagtgaactcaatgaataggtttaacagtagattaaacaacacagaggagaaattttaaggaactggaatataggtcagaaaaaaacccagaaagaagcatgcagaggaaaaggatggaaaatatagacgaaagagcaagaaacacacaggatactagcagatagtctaaaatataggtaactgaaatctaaaaggacagcagagagatgatggtgctacatcgaaagacatcaaggtatagattcaaaaagccctatgaatccaaaaggaacaaagcaatcagacatcagagaaaaaaaaaaagacaaaaacaacatcatcatccaatgaaggaaaaagctagcttaccttcaaaggagcaagagtcatattgacagacgacttcttaacacaaacagaaacaatggaagacaagggaatgagaacttcaaagtgctgaaaggagatatctgtcaacataaaaatatgctttaagaatactgttgtccagaggacttcatgactaaaacaccaaaagcaatggcaagaaaagccaaaataggcaaatgggatctaattaaactaaagagattctgcacagcaaaagaaactaccatcagagtgaacaggcaacctacagaatgggagaaaagttctgcaatctacccatctgacaaagggctaatatccagaatctaccaagaacttaaacaaatttacaagaaaaaaaccaaacaaccccatcaaaaagtgggcaaaggatatgaacagacacttctcaaaagaagacatttatgcagccaacagacacacgaagaaatgctcttcatcactggtcatcagagaaatgcaaatcaaaaccacaatgagacaccatctcacaccagttagaatggcgatcattaaaaggtcaggaaacaacagatgctggagaggatgtggagaaataggaacgcttttacactgttggtgggagtgtaaactaattcaaccattgtggagacagtgtgggattcctcaaggatctagaactagaaataccatttgaccccattactgggtatatacccaaaggattataaatcatgctactataaagacacatgcacacgtatttttattgcggcactattcacaatagcaaagacttgaaaccaacccaaatgtccatcaatgatagagtggattaagaaaatgtggcacatatacaccatggaatactatgcagccataaaaaaggatgagttcatgtcctttgcagggacatggatgaagctggaaaacatcattctcagcaaactattgcaaggacagaaaaccaaacactgcatgttctcactcgtaggtgggaattgaacaatgagaacacttggacacagggcagggaatatcacacacgtctgtcatagggttggggggcagggtgagggatagcattaggagaaatacctaatgtaaatgacgagttgatgggtgcagcaaaccatcatggcacatgtacacctatgtaacaaacctgcacgttgtgcacatgtaccctagaacttaaagtataattaaaaaaaaaaaaaagaatactgttgcccagacattgcagtttgccagcaccgtgaatatctgaacatcatggcaagtttttagctactcaggtgttacaatatctgcaatgcaaaaacactgagatcttatgaaccagagtataatcagagttgatgaattagacagagatagatcagcacagccttccattgtgaagtcacttattttgcagaaaggatcaaattatctacgtagaaacatttttttttttcttttgagatggagtcttgctctgtctcccacgctggagtgcagtggtgcatcttggctcactgccagctccacctcccaggttcatgccattctcctgcctcagcctcctgagtagctgggactacagatgcctgccactacgaccagctgatttttttgtatctttagtagagacagggtttccctgtgttagccaggatggtctcgatctcctgacctcatgatctgcctgcctgcgcctcccaaagtgccaggattacaggcgtgagccaccatgcccggcctctatgtataaacattcttaagaataatgaacttaaatctgctaatatgtcatttacaaaatagatgtgagactatatcctcaaaccccaagaaaagcaattttaaccaaaaaagctataattactctgtaagagttagcctcaagagttatctagaaggaggaatggaaagtacaatgtcttcagatgctcaaaaagattaagtaacagtagaataatgtgatataaattgagtctgaagagtgtttagtttcagcaagaggaaacaataagagcagtacttttagagaaataatcaacattaattgtataaaaccttgagtcctgccagtctatcctatatggcagtatatccatttgtatttctttttatgaattaaatggattttaagaaataagcagcttagagaaaggctgtgacttttgatcaaaacaaaggaagggtgaagggtttccaaataaatgaggataaatggaaataatgttcattgacgaggcatctaacattgatgattccactctaagtgtaaatattcatagtaaacactggaaaatttatgttaatttaaaaactgatattacctgttgaatctccttaaggtaaaatgttaaagcttttcaggcgtgagtctggtttttaaccaacaccagaatgaaacagtcatcttttatacatacttgtcctgctgcatttaattttagcaacttgtatctaagaactcattcaaagggataaaattacataatttttaaagccatattaaattgcaccaaaacaacaacaaacccttgctctactataaacagccctgaaagtcatgatatttttgctactcaaatgatatttttgtagtaaaattatcattaaagtaatatatggctctaacagaaaaaatcttattgtattacagaatgtcatattgacagtcaaaattttataatttgatacaggtatcatctaacttggatttgtacttccaaaagtcatcatgatttagaatgctgtattacggactggttatattaactaaaactaaactaaaattaaattaattttaaaataactggaaaagtcataaatgtttaataaacagtagatgtttgtatttttaagaatttcacatttgcctaacttatacaaattgccacgtgataaactcatgcttctctaatagctaaattctgagctgtctggttatgtgaatgaaaaatggttaattgcaacttctttttgaagtaattgtgatagctgatatatattttttacatgagtaactgtatattacttgactaatttgttatttagaagaataaatcccatgttaatgtctttaaatacgatagcatagcaaaagtgaccaaaacgaaccaatatgtaaaatgacactgtaactatttatttatttatttatttatttatttatttatttatttataatactgtaagttctagggtacatgtgcacaatgtgcaggtttgttacatagttatacatgtgcaatgttagtttgctgcacccatcaactcatcatttacattagatatttcacctaatgctatccctccccctgccccccaaccctatgacagaccctggggtgtgatattccctgccctgtgtccaagtgttctcattgttcaattcccacctatgagtgagaacatgcagtgtttggttttctgtccttgtgatagtttgctgagaatgatgttttccagcttcatccaagtccctgcaaaggacatgaactcatccttttttatggctgcatagtattccatggtgtatatgtgccacattttcttaatccactctatcattgatggacatttgggttggttccaagtctttgctattgtgagtattgccacaataaacatacgtgtgcatgtgtctttatagtagcatgatttataatcctttgggtatatacccagtaatgggatcaggggatcaaatggtatttctagttctagatccttgaggaatcgccacactgtcttccacaatggttgaactagtttacactcccaccaacagacgacactgtagctttaatttaggggaaatacttacttcacgtgtcagggggccaattctaaattcaaaaacaatcaaaaaatgcattttgttttcatttcagtgttgattactgtcaccacccccagacagagtttttgatccctggggctattgcttgcacagttcaaaggtaattagaggccgggcgcagtggctcacacctgtaatcccagcactttggaaggctgaggtgggtggatcacctgaggtcaggagtgtgagaccagcctagccaatatggtgaacccccgtctctactaaaaatacaaaaattagctgggcgtgatggctggcgactgtaatcccagctactctggaggctgaagcaggagaattgcttgaacccgggaggcagcggttgcagtgagctgagactgctctgctgtactctagcctgggcgacagagcgatactccgtcttagaaaaaaaaaaggggtggggggtgggaattagagacttcttctttctgctaggatagagtagttgcagcacatgaatgcttctacagctaactaagtaagctgattttaaaacaaaatgtttccaggcactgcagagcagtggaatctcagataggactaaaacttctagatgagaggtttctggtaacctgtaccccctttttcctggtggctcactagatggggcgagagttacagcacaggagatctcaaatacacaactggtttcccctcagacattcacaaatactgaagctttgagggcaaaagactaaaaatctaatcatgaaaacatttgaaaagtagaggcaaaattttccatctcttggtattgaggagatctggcagggagaggggccccactgaaagcccttgagaggggtcctaaggaacatgggatagccagagggagactgtggcttaccagaattggactgcaccccgcggagctcccctcttattggacaaggccatcagcaccccaactgcctagctgaggacatggcaaaccctctttgggagaagatgtcatcacctaaagtaactcaagtgtataatatttcatacccaatgtatggcaattgacagaaaattaccaagtacagcaatagatagaagcagggaaacagaatcctgatgctgaagtcatctggcaaagactttaaagaagcaatgatgtacatagaaaatggatatattaagtacagcctttgccagaaaattaaaaccaatagaaaagaatcaaatgaggattttattactgaaaaatagaatagctgaaattaggaactttatgcatgtgtttagcaggagatcaggtagagcagaaagagggttcgtaaaccgggagataggtcgactgaaaatatccggattgaaagaaggtagaggaaagaaaggggagaaagtacatagagaaaaaggaacagagggacacaatggaatgatccaccgtatgtaattggagttccagagaatggggtaaagccaacttttgagaagataatagcttctcattaagcttcaggataagccgtaggataaaaacaagaagctctggtaagcacatcatagttaaactgatgaaatccaaagacaaagataaaagtcttagaagcataagatgggggaagatagttaccttcaaaggaatgacaaaaagactaaccattgacttttcagaagataaatgacattcctaagtgctaaagagaaaaacacctaactttgagttcccgctatatatattgtgaaattactcttcaaaactataggtgaaatagtgatgttttcagacaaacaaaaactgagactatttatctccagtgggattgcactaaaagaaatactaaagggaactctttttttttttttagaggaaaatgatcccagacagaaacacagatgtgtgagaaggatgaagagaaacagaacagattaaaatgtgagtaaagctctgcttcttgatttgagcgctgtttacgtgaaagagttccctttctgaaaaattcataagctctgcacttaaatttgtgcacttttctgtgtgtgtgttgtgcttcagcaagaattttaccaaaataaagcaaaataaaaactgcttagaggaaaattgacagtctcattgcatacattagacaagaatggctacaaaccaacgagctaagcagcaatctcaagaaattagcaaaagaacaacaaattaaatccaaggaaagtagaaagaaggaaatgataaagaataaagagcagaaagtaattaaacagaaaacaaacatatatagaggatcaagaaaatcaaaagttagatctttgaaaagactaataaaataaaaaatccctggtgagggatatagaaggcaagagtgaagaatatgaagtatgaaaacagggcatcacacagcactgacgctgcagtcccctatcctggatggaaccagctgagtactttctaagcctatcccaagcattcaggctggaggcagggtatcccagcagtgtctcccaggccaacgacaagagcagcagtaatatcatcactgagtctagtgccttctgtgccacaaaagtccctaatcctagatcactggagtaggtctctgtgtttcaatctaagtggagagaataatcttggctggtcagatggtggaggactgagttgcctgaaaccagttttagctctctggcacacaggacatggcaactcaaagcacataaatatgccaggccatctggcatggtgcatattcaattggtagttgcttctcccagttgcagttgattcagattcagggtgcaggaactggatgtttgttccttctaaggggcccctgacactgcaaatgcagccttcacagcaagtgagtgtcttctataaaaaaaaagacattgtgctccattggtgtgggatttcatgaaactataatgtctgtaggtttagaatttgctggaattgttgcctcttgggagacaatgatcttggctattcggctgagttggagaggccatccagcaagagcatctgaagacactgagatgctgtgatgaagcaggttagtgtcagactgttagaagaaaaggtgagaaatgaagtacatgcacataccatcctgtaacacctgggaaatagtgtgtgccttcccacaacatgttgcagcatgcactggccacttggctgacctagagatgtcaccttggggctcttggccacttgactgacctagagatgtcaccttggggctctcaaatatatctttgtctgggtaggctcagagatgagtctatatcagatgactcaaacaactcaacaagaaaaaaacaaccacattaaaaactgggtaaagggcatgaacagacattttgcaaaacaggaaatacaagtggtcaacaaacacatgctcaacatcactaatcatcagagaaatgcaaattaaaatcacagtgagatattatactagtcagaatggctattatttaaaaagtcaaaaaacaatggatgttggcatggttgcagagaaagggggacactcatatacttttggtgggagtgtaaattagttcaacctctatggaaaacaatatggagatattccaaataactaaaaatagaactaccattagatccagcaaacccactactaggtacctacccaaaggaaaagaaatcattaattaaaaagacatctgcactcctatgtttattgcagcactattcacaatagcaaagtcatggaaccaacctaagtgtcaccaatagttgattggataaagaaaatgtatatatacaccatggaatactacacagccataaaacataaaatcatgtccttcgcagcaacgtggatggagctggaggccattatcttaagtgaactaactcagaaacagcaaatcaagcatcacatgctttaatgtataagtgagagctaaacaatgggtacacatgagcataaagatggagataatagactgaggaccccaaaagtggggagattgggagagggataaaggttgaaaaattacttattgagttcaatattcaatatttgggtgatgggtagattagaagcccaatcctcattattatgcatgtaatacccttataacaaacaagccatgtaccccttgaatttaaaatgaaataagagaaaataaacaagaaaagaaaaagtcatggtctgcacagagtcctgagagggaagctggattttctttcaaaagtccaaatcttggctgggagtggtggctcacacctgtaatcccagcactttgagaggctgaggtgaaggaccactagaggccaggaattggagactagtctggataacatagtaagaccccatctctaaaaaaaatttttttttaagtagctgggcatggtggtgtgtgagtgtggtcccagctactcaggaggctgaggcaggaggatcacttgagcccttgaggccgcagtgaggtatgatcccaccactgtactccagcctgggcaatagagtgaaagagagagagagagagagagagagagagagagagagagagagagagagagagagaaagagagagagagagagagaaagaaagaaagaaagaaagaagaaagaaagaaagagaaagaaagaaagggaggggaagaaagagagaggaaggaaggaaggagagagaaagaaagaaaaagaaagaaagagaaagagaaaggaaggaaggagagagagagaaagagagagagagggaaaggaaggaaggagagagaaagaaagaaagaaaaagaaagaaaggagagagaaagagataaagacagaaagagagaaagaaagatgaagggagaaagagaaagagagagatgaagggagaaagggagtcaagggagaaagaggaaaaatgaagaaaaggaaagagatggaaggaaggaaggaagaaaggaagaaagaaaaaagaaagaaagaaagagaggaaaggaggaaggaaggaaagagataaaaaaggaaggaaaggaaaggaaggaaggaaggaaaaagaaagaaagattccaaatattgtaagaatttgttttgtgagtatctaagtcattttggactgctataaaaatatcatagactgagttgcttaaactacagacatttattcctcacagttctgaaggctggaaagttcaatgtcaaggtgctggtggatcaggtttctgctaagggctctcttcctggtttgcagatggctgccttcttgctgtgttctcacatagcaaagggagagaaatcatgtgtctcttcctcctttataaaggcattaattccattaggagggcccactcacaaacattagtctatagcagcgaggttgtaaggtcaccataaccacttcatatgtgtcaagcagctagacttccatttaactggttctgatatttgaatattaattttttatattgagtttgcctgaaatgtatttttctctaatttgggaactgctggtgattaggctagcagtaagggtaaggcctgattgtggattattttgactacttttttctgcatgttcctgaactctttctgccttttcccttctattattgactgtttaaaaagaattgacataatctactcttccccttctgaaaaatatttcatcatattattttaatacttaaccttttcattgttgaagggttaggcaggttttaagtgtttaattttcaccagaaatttatgttctgtgttatagaaaattcatattgtaaaataagcctcttcttttcgagggtaaatatgaagaaaagaacagaagttccaagaaaaggctgtgtctgtaggtccaaatttctagactcggtatagagatagagtatttcatatgccattctctggtagagggtagactatttgtaactgtattttccccaaaggatatgagaagcataatgtcacaatttctcccctctaaggtgggttctctgatttgggatttaaattcataagccttggataacctggaagagactgacattcattctaatgacaataaaacaaggatgactttctcctttttcttttctgctttttgtctgcttactttcctcaggtaacacagctggcaacagcaatgtaagtctaaatatgtaccaggttctgcaaactctggttttgcttagagagaaggaacaaggcttagattagtagctgctgcaacggataagggttgtttgtgtctaaattttgtgggtgttggcggatttttcaatattcttaggtaccatattgactctagaattttgggaacgtgtgatacatgagacagagacatctgcattaacaacattttgggagaggttttgtatatttttgtattgtttggactctgaacactttcctggttgttgaaagctggagtggacaatgtagctggcaccatttgacaatggccttgcagttgactagagacctatcttgactgatgtcagaaagtcctgagagtgacctccgaattggtcctgggtagataagatgcacagaagctgcgaaagtactcaggaaggcacacacaatgttcaggcaggactttctgaagctccacagatctctgtcctcaccaaaaacagctgtggctatgcacaaccattgacttggctgaaacactcaataggttaaaagagagaggtataacgtaggaataaagtggaaaaagtgaaaattctccctttccactgcttttctaacatccgtttcctggtcccagtggagggaggaggagttgctaaactggttggtcagattcccagtgtggattgggccatgtttgacagagagcagagtcctctgttttcaaaggtggtaactttctgccacctctttattacaaggggaaggtagataggtcagttgactctgttatctccctgtggctgacccagagaccatctggccccttccctctgcccgcatttccctgtctcttcctctagcagggaaacccaacgttttgggctcaggggcatctataggaaagacaagatgtaatggctgctgtccttcagcataagtctcatgcttcctgcactggaatactgagcaccagcttaattcattcattatataattgaatacatacttattaagccttctaaggggaaatgctactagcaataaaacactcttctaaaatgttatctaggtgttgaaattatagacgatttttgctttgatcttttcctcaaattttctgtagggaataagtaatacttttataaatgcatatacaaatggaatccatccatacataacaaatgcaccaaaacaggggcgattctggatttacctgtgaggaagcgattgaaatcctgtgttgccttttcttttaatgtgactttctctacagctttttataggaggcacactgagctccccacttgggatcatctggatatgagaaagactgtatactaaccaccttgatcttccttccagacctccattttggtagaatgtgatagtctagtgatgtctgtattctctgatgccccccacatttccttgcctatcataccagggaggtaaggcccccaggaatgactcctacttcaaagttctatccagtggataagccagtactgagctctctatgggaccagaattttgcaccaatcctctgccttagtcatgggacccctactggcctactttggtctattggctaaagagcagtctctgaaggcaggctgtcttggttcccatcccagtcctatcacttgtttgttacctgtgactatgggaccggttgaattatcttcctctgcctcaggtttctcattaacaaaaaggaaaaataaaaatatctgccatctagggttccataaggattaaatgaggcaatatatttaaggtgctcagcatgatgccaggtacattgggatggctcaaagaagtttagctgctggtattattagtgttattcctctactcaggacagtagccttaccccaaacaacagcccaggggtcggaccttgcagcccatgtactgttccccagggatgagcacaggccacactcctgaagtgaccgcagccgcctttgctcccatctgctgtgtctgtctgtgtaattggacaccgtggtgatcagcttgccatgcccttcagacactgcctcacccacctggctgcaggtccagacacagaatcttagttaggtcagtgtcccttgtctgccccatattcttgcctgccaaatttggcctctcgccacacacacctgcaacaggcctttagagcaaggccccatttcaagaatgtggcctgtgcgcatgcctggggatctgtatccatctcatggagatcaaaatgggttaacagtcccttccttgggttgttgaagtctttagagggtctcagcagcccgggttgaggttccagctccgtgtgtctgtgattttgagcaaaagagattcattttgtatgtagagtggctttgaagaggaagaggagaagctttttatttatttatttatttttgtagagatccaatttcactgtaccacatctgtgtagatgaaaatcactcctgagttcttccaatttcttcttattatttctcttcttgttaggaaagcgggcactgtagaatggtcagcagaaacacatttcttcctgtctctttgttcccatcttgcacctgccacctgcgtcacccacacttctggtcatcccacccctagccagtcaagagcttctaggaaagtcctgtcccataactgttctctggatcctgttgcctactgactcctcatggccttcaatccatcaaactgcccttcaatgtcccatatctctgacattcccatgggctctgccatggtgctgaagcacaacagataatcctgacctcaaatcccagctccaccacctaccactctgaaccttaggcaagctgccatgatgctcagagaataagatttctcactggatacaacagtgatggcgtccacctcatggtaacatccttgccaagaacgttgatacctgtaagcactaagttaatgagagtccctatttttatggcctattccactcagtctataaacatgtgcaagctcaccctgatcttttttttttttttgagacagagtcttgctctgtcgcccaggctggagtgcagtggcgcaatctcggctcactgcaaactccacctcctgggttcacgccattctccagcctcagcctcccgagtagctgggactataggcacccaccaccacgtccggctaattttttgtattttttttagtagagatggggtttcaccatgttagccaggatggtctcgatctcctgaccttgtgatccgcccgcctcagcctcccaaagtgctgggattacaggtgtgagccactgtgcctggccccaccccgatcttacatggatgaagctagaaaccatcattctgagcaaactatcgcaaggacagaaaaccaaacaccacatgttctcactcataggtgggaattgaacaatgggaacacttggacacagggtggggaacatcacacacgggggcctgtcgtggggtggggggagtggggagggatagcatcaggagatatacctaatgtaaacgacgagttaatgggtgcagcacaccaacatggcacatgtatacgtatgtaacaaacctgcacgttgtgcacatgtaccctaggacttaaagtatataaaaaaataaaataaataaataaataaataaataaaagacttccctttgattttattcctcatttggttaccttctcagagccactgtcattgccagccatcccacaggactgctgtattcccctggcctcttctttatcagtgcagactcaccagagggtcaccaaccactccagcatgttcacgcctgagctttttcctgggacacagaactattagggcccaaaccaggagagttccagcaaaccaggatgaaccagtcactctatacctttcagcctacagtctttctcaccaactcctcgaactatttagacaaagcccatagcccccacatggccaccctccacaggtgacttctgtatcttctgtgactctgtggcgctcagcaggtcatattgatgacatccttgatggtttctcctcccttgacttccagggccttgctcttgatggtttctctggtgctctggttactatggctgtataatcatcaaaccaaaaacttgacagcttcagcagcaccctcttattatctctcaaagttctgtgaggtgtgggctcagcatggcagttctcctgcggatctcacatgctgttgccattgacagcagctagggctagacgtatgatgtggcctcttgcctggttgaggatggctggaaactctgggcctgccagcatgctcttgtcacacagccccgaacacagctagccagggcttctcccagcccagctgtctcagggctttaagagtgagtgtcccaggagggaggaagtggaagcttccaatatcttgaggcctaggctggaagttggtactttagtttggaaaccagcccaggtcacagcacccacccaggctcaaggggaggcgacatggaccccgcctctcaataggaggagcatcagggaatttatggccacccttaacctgcctaactccatgatctctctttctcttcttcttcctcttgctcctcgatggaattccgtcctcaactctcctcttctcacagtctgtatcagtcatcttcacatttacaggcatatcagaataacatggcatgcttattaaaaagaaaggctcttgcctatggaatctgcatttctaataaccaccctgggtaaacgactgccttgcaattttcagcaggctacactttgagaaacactactttacactccccctacacaaagtccttcacaccctcacttcacacagcagttgcttgttcctttcccatctctgtttcaaagccgggttcttctccttagcacgccgtgtccgggcaactgtgtgctgcatctttccagcccacagacacttcagcctgaacttggtgtcttcaatccccaaactcgccccctttctgacccctcagtcttggatgatgtgccgtagaggcagctgattctccttctgcccctttcctctccccaggcacacatccagttcctcaccaagccatgttgatcttacctcctaagcctctttctgaatcagccccttccatttttctcattccaggtgttctttgtttctcacctgtttttatgccatagtttcttggtggtctcaagcctctaatatcagcaccttacagtcttctcgccacacttctgccagaatgcagtttctagaatgcaagcctaatcggaatgctttttctacttaaagcatttgcatagctctgtgtgctctgcaggcatatgtctaaactgcctagaacctctgaccctgggctccttccctggaatgtttcttttccaattctgtctcacctaccccagcctcaccccttcccacccctgtatgccacttggccctgagcccagaccttccttcccaactggccgagttcctgtaacttggaggtgattaggtctttgccccaaggtcaggctagggctcctcctcttactatttcacacaaagcacaaaaagaagtacatgcttgtctccccagtgtaatgccagaaccttggcatgcagggacggagcctgcatgtctagatctgagcccctggagaccagcacgatccccagcaggcctccagcacaatagggctaagagagacagctgtatctgttatgttctcacaccgacttggcaacttaaggttaatccagaaaagtgtgactttgggttaatagggccttgaccctttatttatgtcgattgagtgttttcttctcattgggaagatctgacatgtatctgactggaagccggcaccatcgttttgtattgctgcgaatctgaatggaatgttccggttatatctttctggctgttttctgtaataacgctcagtcatgctttgttatttaatctgagggactgagacctccatgcactgcaggtcaattttgatgtcccccagatgcaatggaatccttgatgtgctgagaagtgactgcacgcctgcgtcttgtcttcccacgtgggctgggccctccactgccacacgccattgtctcattggccgtgttcagtcagattggcctctggcagccccatgcagttcagacagggaccagcagcaaccgcagcccctctagttcactgcttcttctgtgtcccatgttgcaggccttgactgggattgctgaaggtggatatgtttccctgaagttgccttgcacgaatagtcacaaacccttgttttttttgttttttgttttttgtttttaatttgagacaaggtcttgctccatagctcaggctagactgcagacctccccagctcaagtgattctcccatctcagcttcccaagtagctgggtctactggtgcatgccaccaaacagagctaacatttttaaatttttattttttgtagagatggaggtctcactttgttgcccaggctggtcttgagctcctgggctctagtgatccttccgccacttcctcccaaaatgctacgattataggtgtgagccactatgcctggccccaaatccgttttatcatgtcatcctaaaactaaaataataatgataataataataataataataataataatataaatggttcatagactacataaagtctaagcacttatctttcctgtacttctcagctccaccctgccgtgcctttaatcttgctctttaatcactattatgttctttctacatcccattagcacacaggatgcataatatctaatatatgatatcacatgatgcatgataacctcaaagggacaaaattatcactgtatgaatatttccaaccctttcacttggggctgctagagagtgcctatggacttggtagcttgggctccttcctctacccaggggatgcctctctagcaagattaattcttttgggattttaaagcaaaactggaaggaaataacgaagggaagaccaacatgagtacgaggtataaccagaggtaggtttatggagaagtttaggtggtagggacagcagggaggggaattaattgtgtggtgaaaggataaaaagaatttcaggagtatcactgtgaactctatattattttcctaaaatttaagaaacacaagtaagaatataagcaacacgaattacttcacgaccgttacacagtgcaattttaaccatgatttcaatttagcgtagtgctaaagtgggtgggcagcggtggggggagtcttggtttccacggagctctataaaaaaatcagatggcacaataatataaatacgcctattatcttgcagatatgtatatggagtcatactttttcctaacagaaaacctgtgaagcagtgcaatgatcacacctttacgttgcacaggtggggttcagtctcctcatgtagacttaaccttcttaagggcttagcgcctatggcccaagtatttattgtagcacagattgagacatctccttggaaataacacaacagtgattgaaaatggcagcccgcggtgcagtccttagccacactggctctaaaggcagagcagtcctggtgaaaacatgcccaagttgaaataaaaggctctaacaacatgtcaccttaaccatctggactgtggcctgatgaagcccctgtgtctagtcttggtgctggtgcctctggtcccagcgagcttgttctggctctggctgcttcgccgcagggaaacattgctctgaatgtcaagggagagaaggccaccggctcccctggagccctgcttttcctccagtgccctttggtctccagctttggctgcagagcagagggtttccccacagaaaactctcagcataaagccattcatgtctcaattgtcaccaagacaccaatatgttcatttccagagcagaaataaaaggtggatgtacgatcctgccctgtttcctctcagagtgacacctgtaattcctaattcacagccctctaattatggcagggggtctggtgttgactgagctcttactgtccctgacacatggctgggcacttctcctgagttttttcaggtcatcttcatggggccgccttgtggaggacatatatcactttcattttatagatgaagaaacagaatctcagagtccagagggcctccctgggcgtggggttgagccccaagtcaccgtggccatcatgctgcctctggcttagaagccactggctgaagcccagagtgaggaggcagatcccgacagcccctacctgtgtgaggttcacctcaccatggtcaaggggggagtcattacaaactgtcagtaaggttggctgcttagattttctgttatgtatcatcaggagcccctgtgtgtttttaaaatatgggatgatgatttaaatgggattaatgcccttgtaagagaggttgaaggggcaccccagcccctttggcccctctggtcctacgcagaaacagcaagagggcactgtctttgaagctgagcaggccctcagcagaagcagaatctgttggcactgtgatcatggacttcccagcctttagaatggtgagaaataaatttctattatttatgaattccccagtgtaaggtattttgttataacagcctcaacggactgagacagatggcatgatggaaaaggattttaaaatgaggtgctaaaaaggttgaggggcgttcttctgatgggtgcagggaatgatgagaccacagcgtgcagcaatctgggtgtgcatccagccaggtttccacacgaggaaacgaggggcaagacaggccgagcctaagactgacccgggaggtgaggtgggatccgggatgagtggtgctgactggcgggggcaggacactagggcaaggcacggaggttgaaaatgactcctgatttctcatttatgcctggacagctgtgaggaggcggtgcctacgacagtgacgacaacacaagggcgggggagaagggcagcccctttggcagtggtctctttttgctgtaatcagaggtcagtccagacacactgcccagttcttcctactaaaattggatgaacaaggaggtacacagagcagatcttggccagagatcaagacaggataccttcttttcaggatcacctcatctcagtgttctggggcaatccaagccctgacttggaaggattctgacaaaatacacaatgaacaaggactgtgctagctccctctgaaggtctgaatgggccagcggagcccaaatgcatgtattaaaaaatgataattgagttactacaataatacagtatcatatgactttataggatgggtcaacttaagatttcaccagttctgtcttctgtcagtgttcaagtttgtatctttagagttctcatgttatagccattgacactatggtcaaatagccaggtgcccactggagaaaaattatgccagagaataagaaatgattcaggctttattttctttagtatttttatcaggtatgttactccttggagagtgcagaaaatatttgtttaaaatattcctaatttgatggtactttcaaaatcagatttagtcagaccattaaaaattgtataaatcaatagcaattacctacttctaaattgaatcattatccccaaagaaaagtgctattagaaccctgcagactccaggtcatctgcaatatacatccaatctcataaaaagaaataacaaaaggaaaaaataaagggaaaaataaaaaccaaaataaaaggtacacctcattttattttattatgttaatttaatccccaggtagaaagaatgagcttctgttgtacttcaatgtttaaaatctggccaatttttaatgtttacaaaattatttttaattttaagagagtataatttaccaattagattaattgtgtttattactgccgggagactgcaaagagtcttatttttagttcataatagaagcttctgtaaccctttggatcatggctgggattctgcatttttattatagcaagagagctttgatgcttggatgtgttagggaaggatagccatatgagaacgtttcgtagagccaatctctccctacttgttaatttggcacctctcaatcatacatttttgaaagcactaattatttcacataacatgtaaatttatatagcatcttatatacaattttaatgcattcagatccctaaagctataattcattatagcatcttattttatttatattaatatatgtgccttgagttaatactctaatcatttgcaaactgaagctttgtctcaataaatttttactttttgacaaattatactacattagtttgatatatttgcaaaatgtaagtacctgcctttcccattgcactttcattgatattcccaaaacactgggacattgctagtccaacaggtatattgtggaccaacatcttctcaagtctgcacaaaaacattttacaatgtcattatctaaagtgttcaactttcagttatttggaatatgccttctgcaagcctttttttttcttttttgagatagagtttcactcttgtcgcccaaactggagtgcaatggtgcgatctcggctcactgcaacctccgcctccctggttcaagagattctcctgcctcagcctcctgagtagctgggactacaggctcatgccaccgtgcctggctaatttttgtattttagcagagatggggtttcaccatatgggccagggtgaaaccctaggttgaacttctaacctcgggtgatccccctacctaggcctcccaaagtgctgggattataggcatgagtcaccgcgcacggtcaagccatttgttttttataggatgctgctgcttgaccaagtttgaatatgctttcattccattatgccaatgtttatgtattataaagagatggttttatattataatgtatttttgtcgttgttgttgtgtttgttttatgagacagggtctcattctgccgcccaggctggagttcagtggccaggctagagtttagtggcactatcatagctcactgcagcctcaacttccacggtacaggtgatgcttccaccgcagcctcccaagtagctgcgactacaggcatacatcatcatacgtgactaattttctgcagagatggggtttttccacattgcccaggttggtctcgaactcctgggctcaagcaatctgcctgccctggcctcccaaagctgggattacaggtgtgagctaccttgcccggcctataatgtatttctaataatacttaaagtgtgttttcatactgcccatgaggacaattatatgaagtggttatttggaataaatatacaagaaatgttctatatatgttacagaaatctttcaaaactgctttgaagagaatggcactagggctggattaatttacaacacaaattccccattttttggtgtgttgggccatgcaaatgaggagatagtcaggagatcatatagtatcaaagtgtagaagagatgtggctttatgggatgtggtcactgccctttgaatctgagtcaggtatattgaaattcccacctaggatttcctcttccttaatatttatcttctggacttaaaaaagataaaaactttcaagttgtgtttgtgccagcaccattgagaactgctactttactgtgaccttaaaatgggttcttatgtctatttctcaattaattagaggccaaagggaaaaaattggtgcatggtgagagagaaaaacctctcttaccaaacttccattgtaggtttgtgcacacattcgagtattatgtctaacaatcactactcatgcaagtttgtatcctttccattcttcttgaactttaggaggtttatatcaggtaccacttgctggagccatctttacaccccaaataagcccatatttcctatgctgaatgatgctatttgttaggtaatgggagaggtcaacatgaccagggtgaagggtgtctgctggggaggatggagaagtagggctgtgggctgagggcgagtttatgttggggcttggcagctgagcagagagattgcagctgatgcaataggaaagaggatccatggagctttggggcagatggtagcaaaattgggtttaagggattttgcctggcatggattagagaggagaaaagccagagccagggagataagtaaagaaaagaaattctggccaggtgcggtggctcacgcctgtaatcccagcactttgggaggccaaggcaggtggattgcctgaggtcaggagttcgagaccagcctggctagcattctgaaaccccatctctactaaaaatacaaaaaatggtggcaggtgcctgtaatcccagctacgcgggaggctgagtcagcagaatcgcttgaacccgggaggcggaggttgcagtgagccgagattgtgccattgcactccagcctgggcaacaagaacgaaactccgtctcaaaaaaaagaaaagaaattctcttgctgggagttttattatgcctatctcaaacacaagagccagaaaccatatcttacaaaatcatgttccctctacaccctgatagcataaaaatttcctcgttgtctattcattctgcatgagccaacacaagaaagagctattggtgtcattgccgggagcggggataccataagtttcttcaaagacagacaccaggactttcatcttcacatctatagtccttgaaatacagcaggtcttacaaaaatgtttgtcaagggagtgaatgaaaataagagtgaatgaaaatgaaagcaaaatatacttgaggatatagtttttcctggaccacaagtcaaatgccaatggataacttcagattcctagccatgcatctttttctctgagaactggatagccggaataacagatcactccatttcctttctgacatgccacattgaatgaacatctgctaacaaccagaaagtgcatgaagaagtttgtccatgaaatcactccatacccaagtggaggagaaggagctgtggactgaaggtaagctgtgcattccctcagctggcaaatgtcaagcccataatctgagcttcgtatgtaggaaatacctacacacgaagcccacctaggtatttcctcatgcaatgagaaatacaccagtatggggacccatgaaaaaagcctgccataactctgataatgatttattttcaaaggcagaagaaaattttagaaaacatataaataagatatatgatagaaagtttatacattcagaaatgtcagtagattaaaaatcaaagaaacaggctggtagtaccaatgtctcacagccctccgggggagctgtggccagagccaaaggtcagagcaaaatgtggaaaatcactgacagactgggaccatgggcaggaagccttgaaggatttggtcaagcaaaggcaaaactggagggtaggatgcctgttgagaagacctggtctaactatggccacattggagatgcccccggaggagccatggagtgaaagttaagggacctgagccaaagggtcccaagtccagaggcttatgaataggaaccaactctttcttggtattaaaggggcagccctctgggctggttggctggcttttatccaactgccctagacctcaccacttactactgaacatctttttaaggatctctttaaatctacacctctcttttagagggcccatttcttagtggaggcagtgcaacgggaacaaataatgaaacagttgaattctgcttcatccatgtctgccaagccacaagaatggtaaaggtactcacgttccacaaagtacgagctggcatcgatcttccagatgatctggccccgatgagaaccattgactccacggtttttatagtccagaaagttttcggacaagacctcatctatattcccagaggaagaaagcagagcagagaaacatatcagtcaacagcatatttaggggaataaaagaaaagcaaaggatacaaatgctgcttccatctcaacagaagaaaaagcacctggaaccagagaatcagagagcaggaagcaccccaagacgccattgggaccaaacgctttttatgccgggatcgcctcccaaccccatagcactgctggcaggagatcatctagctggttctggaacacctccagaaacagagaaataattactgctatcgcggttcacttcacttttaaatagcttttctatgtgtgaaagctcagtgtgaaaatcttcctcctaaagcttctatgaactgatccctatttgagcctaagggcgagacataaagaaaaaatctccctttggggtctagttctcacggactccacttcgaatcatctctcctcccacctgggcatcaccaccatcctatacatggtcgcacccatgaacttatccatccatccatcatgcactcatgcattcattgttcattcagcagctgaaatctaaccatctgccagatgctggggaaggtgcaggggctgtggtgttgggcaaaaccagtatggtctcttctgaaccaaagcttacaaacaattgagaagacagactgtaaacactaagcaaaggaataaatgtttgattgtaacttgtgataagagatggaaaggaggcggggtgcagtggctcacacctgtaatcccagcactttgagaggccgaggtgggaagatcacctgaggtcagcagttcgagaccagcatggccaacatggtgaaacattgtctctaccaaaaaaaaaaaaaaaaattacaaaaattagccaggcgtggtggcaggcacctataatctcagctatttgggaggttgaggcaggagaatcgcttgaacccaggaggtggagtttgcagtgaaccaagatcatatccagcctgtttacatagcgagactctgtctcacaaaaaaaaaaaaaaaaaaaaaaaagaaaagaaaagaaaggaaaagaacagggtgctgtgatagagagtgacaaggaaggaggccggcgggtggggggcgggtggtcaggagagcactgagggaggagacgaggcctgggaggagctctgggtgacagtgtgctttcacctcctgctgttctctgctcatcactttgcaacctatcgatgttctctcttttttttttttttttgagacggagtctcgctctgtcgcccaggccggactgcggactccagtggcgcaatctcggctcactgcaagctccgcttcccgggttcacgccattctcctgcctcagcctcccgagtagctgggactacaggcgcccgccaccgcgcccggctaattttttgtatttttagtagagacggggtttcaccgtgttacccaggatggtctcgatctcctgacctcatgatccacccgcctcggcctcccaaagtgctgggattacaggcgtgagccaccgcgcccggcccgatgttctctttaaaaccagtgcctggagagaaatgcggcattcttgaggaggacagatctgagaataccaagctgcctgtcacctccttggttccagaccccacactttcagtgcagactaagacagggatgtggctttcaccttgatcttctatggagcccttgtagtttccacttcaccagaaataatctgagctaggtggatctgaggctgtggggaaaaccaagttttgagagtccaaatccaccgtaggggctggagggacaacctgggcaagggcacctgagggcaggcccagagccccagctctgcagagagcccttttcatgattgcccttttctctcctgacaccctgcagttcacatgctgcatctggctggactgagaaaacagacaagagatgaagtgcaaaaagcactgagcttgaagccaaagggcccagctcttgccttttgtgccatttgccaatagtgtcacttctatagtctttcttcatctgcaaagtggggagtacttacaggggagcactaaatgagataactggtaagcctacttgtaatctgctatgtggattgcacattttaggctgccccttctctggcaaaaaaatgactgggcaaatgaacactcattaccgataagaactgtttgtatcctttggaaaatcgcttgtttgcaaaatttgcctgtctttttattcacagtgtgtgctcacagccctgtttgggttaccatgaagattgcataatacatcttttacagtaattgcctcatttctgcaaaaaggcataatattttcctagctccctgggtcttcagcagagatataacaagtttcacacccaggtagaaatttgcctcattatagcagttctccaagggatagtatttccccgaatttctccactctgatcactgggatattccctttaatagtcagggtcagggatttatagacaataacacctggaagaaggatgtccattcatgcatgagataatgggtattgggtactttgttctgttccagacatagtgctaaaccctggggatacactggtgaacaagtcacggtctatgttctcagggagtttctaatatatttggagatttattcaagaaaacaggtaatttcattagaatatagaatgtacaaaagggggttaattatcaaggaaccacaggaacatgaatgagaaaaggatgaaggggaggtgggaagaatcagcaaaggatgacgaggatggcaaacacacacacacacacacacacacacacacacacacacacacaataatgagaaaaaagtatattttgctgtacacatttaaacacaatatattttaaaggactggctgttagtcctgataagcatccccttccctcacactaacaataacacttaatcacaagtatcacacaagaaaaatagagtagtcagtattcttgcctgggctgagaggtcaaacccttccccaaaggcatttgttaccagttgttagaaaagttactagtctttgcttaggaatcaaactgcattgacagggtcagctgcagaaatccaaaatcagtctacatattttatgcagaaagggatttaatgcagggaattcagggctggagaagtggactctaggcagggcctctggaatcaggataactgcctaactggctctccaacgaggctgatgcctttgcctcactcgcaagggctgccctgggacctgctgaatatgaaaactcagtacagtcactgcaatctggagggcaggaggctgctgtccaggccatggcggctgtctctccaccggcgaagacagtgaccagccagtggcaagcggagtaggtcactgcctgcccccacccccactgcctgttggtgtccaggaagctagagagtagacacaggatgctgctgcagaaaagctccatttctcaaggccatgcttgtagcagccacaggcccaagagcctggtctaagaccactagctgtattagctcaaggaatcctttcaacaagattttgaggtaggtgcttatagtatttatccctattttgtagtgaatgattaaataaactgcctaagatcacatagtaatggtagatgtaagcttccccacatttcacatattcaccttcccgatcttgcacaggtgcagctaaatgaatcgaatttgcatccagaacatggctgcatgggagtctgggaaatgtaaatttagaggaccagattctgcactaggggaaggcacaggagatgagaggaaagaagagagtagaggggaggagacgggacgggagaggagaggagaggaggggaggggaggagagaaaaggggaggggagaggagaactggaatggatgctgtgggccaagccacactctccacctcagtgtggaatgggtgctctaggctctctaccaggaggctgttattttctgcattcttgtcatgatggaagcctctttgtgggagcaatattacatcccctttgaggcaggaagcttacatctaccattattatgtgatcttaggcagtttatttaatcactcactacaaaatgaggataaatactataagtacctacctcaaaatcttgttgaaaggattccttgagctaatacagctagtggtcttagaccagtgtccaacatctaataagcagctatttctgcttagaatctgggccaaaaatagggccctctattgcaaatccctatgacacttactatgtaaaaccattaataataacttgaagcactagctcacatcagtactgttcaagattttgtcatcgtacattttgtacataacatgtacagaaaagttcctcaggaaaagattacattttctgagtggtatgcatttcttctggtgtgtagaatcctaccacctgctcctcagtttataatagagaaaggatctttgtggattattataattttaatcagaaaggtctaataaagcttacagaaacagacatacctaagaaacaagtaatatattttctctggatttgtcttcaaaataaaaatcatagctatgatttccatgccataatctataatagaagagtggacaacaaacatgctattgctgttaagagtggaatgagcaagtgagcccataactgattaaaagagagaatcaatatactacccaggtctcctacacccatcagaaaaaagatatggcttccatttttcagagtaattcatgctttctgacaaccaaatcttgggaaaaaatctcccaggattctcccactgtggctggaccatgacttcactaaataatgggacagggccaggcgcggtggatcacgcctgtaatcccaggagtttgggaggccgaggtgggtggatcaactgaggtcaggagtttgagatcagcctggccaacatggtgaaaccccatctctactaaaaatagaaaaattagccaggggtggtggtgcatgcctgtaatcccagctacttgagaggctgaatcaggagaatcgcttgaacctgggaggcggaggttgcagtgagctgggatcgtgccattgtactctagcctgggcaacagagcgagattccatctcaaaataatagtaataatgataataataataataataataataataacaataataatgggacgggagatatggggagaatctacttgtctttcttactactaggccaatgatgtagaagcgccattctcttgcagaagcaggaactctaagcataaagtgatagaggagctcctaaaaatcaatgccactttctccccttctgtggcctttccttcatattgtttctttggacacaagaattctgtttgtgccttatacagcttctgctcttctagattctaatagggtgcctgatgtaaaggaaaaactttaattcttcaagagttgggttccataaatcagcagccacacttcaccctctacatccaggtatcttccccctcttatgtcagaacagtcctatttgctttgagagctctagaagtcctaccatgctgaaagcatcacaaccctggcctctgctggacatttgatggcacacggatgtgccatggcccatacccaacactgcaccacaatgctgtgctacccctgtggcagcatgagtcctgagccaggggaggcagctgtgtgactgtgggagccactgattcgacatctcctcattcatgaaatgacagatgagatgaaatcaccatctctacatttctcagcctagatctctgatttgatctctggcaaagcacggaaaatgtggaagataagctactaaggacttacacattattgacttttaagattcacagacaatttcggatttggaagttatttttgaaatgctatgccgttgaaagtgttggcattttgcattacataacttcacagttatatatgtgtagctacaatgagaataacaaactgtcaaattaaggttctaggatgataagttgtggttacttttgtctcagtcaaaatgtcatgttaacaccagatcttattcattcatggagtttcgtaatacctgatatggctacccaccccctcctctactaccctcttctttgttctctctagtctcctggttatcctgccccttcaccacctcctcttcttctgtttgagttcctcgtctgcctctcccctgccccctctcactgtgactatctggtgctctctttctatacacaacactagagtgagcttatccacccccaaggtgtctgttatcccaaatctacaaccctagctcggatccctggttgagcttcagaaccattcattcattcactcactgtggacgcacgtccctcaggtgttccacactcagtaattccatcttgagctcattaccttctccccaaacaggcttctcttccagtgggtacctaacttgaggaataacatcagcactcaccagctgcgggaagatgcccttgagttgactcaaaactagatctgggctgggcatggtggctcatgcctgtaatctcagcattttgggaggctgaggctgaaggatcacttgagccctggagtttgagcctgggcaatatagtgagactccatttcaataaaaaaccaaaccaaaaaacaaaccaaaaccaaaaccaaaaccaaaccaaatcaaaccaaaaccctagattcggagcctaaacctaattgcctcaagtgctaaacaaaagacactcatgatgaaggtccgaatgggtgggaggggactgtggcaacactgaaggttacaggccagtctagggagggtgcagacgcttaactccagctgattagaaccatgtggtatcacaggctcaggctgccaaattggaggcttttgtgaaagaagctagaaagttgtgtttcaacttgaaacttctacattttaagtgtggataatcaatcaaatttaaaacaaaacaatgtaaatgaaacaaaatatgcggccgagggcagtggctcacacctgtaatcccagcactatgggaagccaaggcaggtggatcacctgaggtcgggagttcgagaccagcctgaccaacatggagaaaccctgtctgtactaaaaatacaaaactagccaggcgtggtggcacatgcctgtaatcccagctacttgggaggctgaggcaggagaatcacttgaacccgggaggcagaggttgcggtgagctgagatcgcaccactgaactccagcctgtgcaacaagagcaaaactccatctcaaaaaaaaaaaaaaatgctctttaggctgttattttgcaatctctgttcttaatctatagtatctacttttattcaagaacaattttttttcagaaataaattgaattttaacttttggaaatccagttcagctagtcacagctatttgtgtaaaaatttcaacaatttatgtacctccatctttacattaatgtgtgtattataaacgcactaaccaagctgatggaaaaacctttaagagacccaagaatatttccctgagaactagttagtcagctaagatcccttttattttatcagaaaaactgtgcaggttgtaaactactcataacaatccattactttctgtgatgttaaatccggtgttgtgtgtctgaatgtgcaaatgttgcagagcacagactgaaggcagaaggcctggcctcggatgacccggtgttgaatctgttgactcttgtggccttccagcaattataactcgacttttgggtaaacacatcaatttccatgacagctgattctatcacataaaatagatgaaatacatttttcatttaaattggttttcataattataagattttcaaaaccaatccgtgggaatggtgaaactttcataaaaataattgcctcagcatccaacttatttgcataatttgttttgtttgcaaagacctgagaaaattcacatagaacaatttcttctagtaaactttcaactttggaactttcaaaattttgaataaatctccacctaaagtaaggcaagtcaactttctccaacaccatgcctgtatgcctgtgagtataatcccagcttgtctgttgaatacaaagcagtaagaatgttggaagagctggcaaagattatgctggaaactaaagtgaaattacctctacatacattggttgggcatatggtgttactttgtcttataagcacatagacttaaaaacaggctttgatattaacttattcacaagtagaagagcttctatagttgcaaatgataatgacatttgtgtttaaccacacctgactctgctatatctcatgattttcttccatggaatggagatggcaagagagaccttattgtccattttgcagaaaaacaaggtcatgcaacagtggtcttcagtgtgttagaatctggcatataacacagttgcttgtatattttaattatattgtagagtttattaaaatgtgacagcatatgtaaaagtgaattatgaataatacacttggcacattctactcaccaatgaggtacatgccaatccagtccccagcgtccacttcctcctttatgtcccagtggatgaccaggtcctgagagtgcccgatggaatagtaggagctgctgaccatgagcgtggagcggctgtccgaggtgaccaggtcagtgtcgctggtggagcggggaatggtgacgccatcgtgggggccgcccctgaggtccatgttgtggaactggtcggggttgtagctgtatcggagcggctccttgcaccggcgtcggctctgggagtttctagaaggagacgccatggcggccaggcctaaaaacctgttctggtacagattctgtgggagcaaagagacagtgagcagggtcagggcacgccggcaactcagtcaccgtcatcacacgaaaacgaaagatgtgctgggagacacgcgctgtgagtgagctgccctgctgggcagatatgaaacatggcatagagcatcttcctcgtgacaaaggctgcagctctgggttcacacggggacagcaagaacaaaaacacaagtgcaccagggtgtcctgcgtttccatgttttgttggagtctctgcctctcccggctctaacccacttgataccagaaggactgggatgtgcagaatgaccctgaaggtgtgactattccccaaccaaatgccatccctcgagttctccaacgtcaattagattggatctgattttatccttctttaaggcaaacgatgattatcattattaacctctgagtgatccctgcagcattcaggtccctacacacagcccagaattaggagtggtccctgctgggtgaggcagtcactcctccatttacatctttcactctacagaatgccttcgggctgtatgaagtttctatgaaggatttcaaacatcctagtactctttgaatacgatgattttcaataaaatccaatctcagaggactgtatctcccttggagccaatgttattgtagaaaacattgtacctgatgagaaaaaatgcatttttgtattgtttacaactttgagcacttaaaatgagccaacctgatgcagagcactaactcgttttgggcacagataactttgaaaatacagaaggacaggcagcaaatagaactcatgcagaaacaagcaagggtgattctgacttcatcaaagtatattaaaattgcgtttaaatgaacatttttggggggtcctggttattgaagttcatgttgttctatatgtagttttcaagaagagaagattaaggcctaaaaaagtgttgactcatgaagtttagatcccaggaactgtaacttcttatgcacctaatcaaatgcaaattattgactttttgtttaccagctatgatgagcagaccacagcaatagtctactctttcagttagatcaatctagttagcagtaatttaggcctgcactttttccatcctccaagaccaggatgttgtaaaaagtctattagcctgagaaagcacagcgttggcattctgagtcttggtcctctatggccatggggcaggcaggccctttcactcatctgtgtctcctgtttggaattcctttggccctactgatggttgctgcagaattatgacaggcagacaagacagactccaaaaagcatctcatcaccttattggggccatatttcttattttttcaaaatgcttgtcactatagcagtatgaaaatagatggaccatggtgttgcctggaaaccatccctcctctcaggaagactggcaaagcgctgaaggccagggaagcaggaaccacccacctatctcaaggcaccatggctattctgggcagttcagggaggatctcagtaaactgacagccctccaggaggctctgtccagagacctttgtaaaatccccaaacagaaaggctgctgcaagagcacaaggtttgtttagttcccacatactttaagtgggctaataccatcttacagtattacagagattcaaaataattatgaattagaccataatcaaagctgaggcagcatctaccagcttcccagctgtgggtctatcactggacaatttaatctttctggacctcggtttcctcctctgtaaatgggctgttgtcagaatttaatgagacaatgcaagtcaagttcttagtacagtacctgctcaataaataaaaatctcttgctaagatattactggtaatgctttaggaaggaaacctcactgagacatagggcctgggcactcagccaggctccgtcactgaacaggcttccttcatgtcaccccagagtcctcactcttatgaacttgcattaaattcaagaaaccttcaggttttcttacaaaatcaaagtgccaagggttacacagcctagtgtgtttgtaaaggtgctctatatactggtgctcaggggagaggctcctttatttgtaaggtttacgattgagtaggatatatttgcattcatgatgaagagcctaagataaagatttttatgtacgtggtttcaatcagggcctcaaaaggattgtagggtctttctcttttgctgaagacaattctgctattgtatttttaccaaaatcccctggaaactagagaactctcctgaaactgtcaaattacgccagtgatcactgtccacatggtgagagcaaagatagagaaggaaacattagtcaaagaagacgtttgtcagtgattactggattggaacgatgacatttgtccggggtaagcagggcagcctcaaagccgtcccttgcaccccaccctctcccaccaccctgtctttgcacacatcctccccattcctacttgcaggcaggatctgcacttctgcatcagaattatgctccagcaccaactctgctgtaaccgctccttgcctccttcccattcccaagagtggaactttctgctccatgatgcacaggaatcccattcccctgcagggattcttaggtactgttgctagttgatctgtccatgttcactcctacactgtgaagttttctcctctgtatatcccctgtacctggcataattcctgccatgaaaagcccccaaagctttaatttatagaaattattttattcagtgatatcccttcttgttccagaaagggtttaagatggcttataaaaatagataaaatggctgggagtggtggttcaggcctgtaatcccagcactttgggaggctgaggcaggtggatcacttgaggtcaggagttcaagaccagcctggccaacgtggcgaagccccgtctctactaaaagtacaaaaattagccgggcgtgttggcaggtgcctgtaatcccagctacttgggaggttgaggcaggagaattgctggaacccaggaggcggaggttgcagtgagccaagattgtgccactgcactcctgggcaacaagagcgagaccccgtctcaaaaaaaaaaaaaaattacagaaaggcatgataatttagtagtagatggtacatagaagaaaataaagatatgaacacaaagttatgtaggaaggagatgaacttaaaattgtattccatcatgtcctaaacagatgttttattaaagactcacaacagttgctcctttttatttttaatttcccagctttattgaggtataattgacaaataaaattgtatgacttttaaggtgtacaatgtgaagattttatatatatataaatatattatatgttatattatatataaatatatcatataatatatataaatatatcatataatatataaatatatcatataatatatataaatatatcatataatatataaatatatcatataatatatatatattatatattattatataaaaatatatcataatatataaaaatatatataaatatattataatatataaaaatatattatatataaatatataatatataatataatatattatatataaatatattatatgttatattatatataacatatataatatataatatattatatttatatattatatgttgtattatatataatacaatataatatataatatattatatatactgtatattatatattatatattatatgttctataatatataagatatacagtatatataatatataataatacatttcactatatgtgtgtgtgtatatatatatatatatatgtgtatatatatatatatatatagtgaaatgattaccacaatcaagttagctagcacatccatccctcacctatttaccccatttttattttattttgttttggtttgtggtgagcacatttgagcaaatgtcaacagttgcttcttgaacacagcaggtggatagagctgattgctcaacatgcaattcgtttgtggctatgtttctcccagacattcacaagtgtttctagcatatactatagactcatcagtctggaagaagcaatttaatcattctctcttcacatctgaactgtgggagatagatgaagctctgtcctgtttttaaatagccctggataaaaggccactgtcttcctagacagtgattccaatgtcttacaactccaccattcttcctaacctctaaagcagatctccccaacaggagacctcctttctctttcctctctgcaaagggtggccctcccaatctctgtatgtatgggaaatcaacggatatcactaaatttctcccagccttttctccaacccactaataactcaagtatcttttgtcttcttttccctttggtgatagacaatatgaactgataggaggaccacaagaatatcagcaatagtttcaataacactgtaattttccagttattggttgtaatcacgtggccctagttacgggctatgtcaagcatagattttagttgacgcttgaaaaaatgggtctgataagtgagcctctgagagcaatttaaatacactgtacaaagtgccctgctatgggagtaaaaaccatctgctggtttttttgtttttggttttttttcctatttgtagcagaagagccaccaatgttttgtttatttgttttgctttccaacttaaatgacatcgtaattgttgaaatgttttgaattaagtgatgtgctctttgttgtttttctttttttcttaatcttggaataggccttgtgggtttaatatgttttaagatagtctcatggagtatagcacattaacaaaaacaaaacctgtaaaaaaacagaatcttaaaagcagaaaatcatcacttctagggatggaacatgttattatgcatggattttttttttaagaacctggagacaaaagattctgctctgtcagtttttatctaactaagtcattaatagcatttctgtcttggaatataaagccgtgagtgagtgccatctcagaaatgaaaagaaagcagacaaaggcatgtctataatagagaaaatgactcttaaaaatggcctctacaccaaggaatcaaaaattgtaagcgaaatacacagcccttgaaggaagcttcattaaagtatataagatgaggttatagaaactggcattacttagttggaagaaagaacgtaatacttttttagtccatgagcagattttactttgatcaagaagatgcctgcagcttttgctatcctacactcggctttgttacgccaccaggtgggtaatgggatttaaaaaaaaaaaaaatcaaagcttatctttttctacaaaggatttgagaaaatttacaaaccaagaaatgtataataaaataggaaaatacaaaacagacagaaatcaggaagtagcaatatgaaggaagacaaaaatagttctgagcatttgctctatgcagcggactgttgtacatctcattaaaacattatcaaggccagacatggtggcttatgcctgtaatcccagcactttgggaggctgaggtgggtggattacctgaagtcagtagttcaagaccagcttgggcaacatggcgaaacctcgtctctactacaaatacacaaaattaggctgggcagggtggctcacacctgtaatgctggcactttgggaggctgaggtgggcggatcatctgaggttgggagttcgagaccagcttgaccaacatggagaaaccccgtctctactaaaaatacaaaattagccaggcgtggtggcacatgcctgtaatcccagctacttgggaggctgaggcaggagaatcacttgaacccaggaggcagaggttgcagtgagccgagatcgtgccattgaactccagcctgggcaacaagagcgaaactccgtctcaaaaaaaaaaaattagctgggcgtggtgacgggcgcctgtaatcgcagctgctgaagctgtggcagggagaatcgcttgaacccgggaggtggaggttgcagtgagccgagatcatgcactgtactctgtgacagaatgagactctgtcccccccaaacaacaaacaacaacaacaacaacaacaacaacaaaacactatccagtttcactattctcaggttgctagaaaacccagctcagaatgttaataaaaattctgaggtcatccatcgtgtggcaggaaatggggatttgagcctgtttatgggcgattataagagggcacttttatcattcttaagcattctctccaaattataaaacagatggacagaattgcagtaattgagattcagatacttctctgagcttctcggcagccaagaagataaaaggaaagcttagttcttatgatcagaatacagggacttttttcttcctccaagttcttaacgaaatgtttcatcttagactttctgtaggaaacacaatgaaatgtggtgagtaagatcttaagagacttttaatcacgattatagtggcagattcctggtacaaggctttgacaaaagccaaggtcatcgcaggaagagagttcattagggactgagcgactgtgctgtgttgccttccgaccacattccaaagtctacctggctcagtcacttctaggggaagctttaccccaaagcttccactctgaactcagtgactgttctcagtcccgcagcttcctctctggcctcaatggagatttcgatcagagcctgaatgagatgttctgtctaaaactgccttacctgtcaacttattttttgtcagtcccctctacttagaaggcaggcaccaagacagcagcccagcctagctcctttaggtctgcatttccagcaaaagtagtgcctggcaagaacatagatgatgctcagtaaatactttgttgaggctgggtgctatggctcacgcctgtaatcccaacactttgggaggccaaggcgggcatatcacctgaggccaggagtttgagaccagcctggctaacatggtgaaaccccgtctctactaaaaatacaaaaaaattagccatgtgtggtgacacgtgtctgtaatcccagctatcccaggaggctgaatcaggagaatcgcttgaaccagggaggtggaggctgcagtgagctaagattgcgccactgcactccagcctgggtgacagagtgagactccatatcgataaataaataaataaataaataaataaataaataaataaataaataactgtgttgaatgaatgaatgcacttgtgggtaacgtgtgggctggggtgcacctggacatggggctctgctccttgagctcaggaattcttgtaagcactaggcttggtgcccagaattgctcgaattgagttcctggttcctggactgcactgggatgggtcaggtgtccggatgcaggaccagcagaagcaccgggaatccctgaggcagtacaggagaagtggggatggcctgggttggagggtttggagacaggccagggcagctttatccagagctctacttgctgctgggccctgctggtcctaacagtctaaaagcagaaacctcctacccaacccaatggcaggcacaagagatcacaaaaatcactgcagcccacgcatttcctctgagtcacgactgttaagggaaacaattcgttaggctaaaaagaagggctccacctctctgggaattgccttcatcacctgtcaaataagaagaaagtgttgggatgagattaaatactgcccctgggtcctcctctccctctcacatcctgagatttgagtcctgcttacccatttgtacctctgcttgggaactgctgtgtatgagggatgttgtgggacaggggcgggtgtaggggctctcaggtgtaagggaggagagtgggaggtggctgctaaaccaccatctctgtctaactcttcagctcccagacacctgttcctgaaacctgtgcctcaatttgtgctttcagcctcaaagccatgtgctaaaaaagctttcttttgtgctggccattgtgtggaagaatatcacagaattacataaactaaattgtgtgggcttcttttctttgaaaaagaaataaaatcccactcattgctggctgaaagggaacattagggggagaaaattttaataagcaaatcaagccaagccagataatatccacacaggaagtcatgatttaaaatacaaggaacttgttaaaatgccagtcagacacattattttaggaacacataatgccttatcgctcataaaaaaaaatccaccaataagtgtaaggttgaacatcccctcccacttttgactctgcagccctttgatggcaggtgttggggggcggggggtggggtggtctttgctccttgtcgctcgcacaccattctcactcacacgtaagagaaaccagctggaggccaggctccaggaggggcatgattggaccattcactgctttgctcaagtctaggactgcttggtgcagctctgggttatttgggaggtttatgtttggaggcgttcagcagcgaagttgctgaaatctgggtggtttgtatgggcagaggaatgggcagggggctgtgggtgtgggagagggaggaaggtggcagccaggagggcctcgtcaggttagctggggcaaattcctgttcataatatttagcacctcctctggtttacacagaaaggaaaggtgagaactggtattcctgtgtgtgtgtgtgcgcgcatgtgtgtgtgcacgtgtgtgggtgtgtgtggtgtgtgtgtaagacacagagacagaatgaatgggaacttacagatgtgagaaagagacccatttttcccttctcaatgttaggaaatactgtttcttcctcaggaaggcactagcctgattgaaagtggaaaagtttcctctttacctactgatacctgcagaggaaaaggatatgtgttcacctcccagaaccacagtgcggctccaggggcccaaggcgcccagctccaggagccctgcggaccatacaggagagaaagggaggtggagctgctgtgagccagccacatcatcctcccggggcggccccgtaccgggcatttgtgaggagcccccatgatgacctcagcctcactccatcctgagcccagcagggcttgtgctgtgctgagtggggtcactgtgcctcttcccgtaaccagggcaccaccacctgcttggctacagtccagtctccaaaagccaacccacaatactgtgaatcacacaggaacccacagtgacagtcatgggagggttctgggccagcccctcctcttattcaccgggaagctgaagcctgagaagggcagctgcctgccctgaccacgcagcaggggagcagcagggccccaagtggaccttgagactccctgcggccagttagctgcctcatccatggcctgagctgcctggcttgggagggagcctcaggcttgttgagaagcctgaggagcctcaggctgttgtaagccagtgtgtttccctcctccattcatggtcgtgtcctcatttgcctgctattaggtgatggggccagacagggattacagttctaagaaatacacttaggagggtttcagatgcagtgctgagtttgtatcctcattgaaattaatactcaaaagcatgttatcatttgtcatggaggatcaaggtgctgtaaagatgctctcttttaaattcttatatcccctgggtggtttgacccagcatctttgggtttatttttaagtaaatcctgtctttggttttattctcctgcttcttttttttttttttttgacagagtttccactcttgttgcctaggctggaaggaaatggtgcgatcccagctcactgtaacctctgcctcccgggttcaagagattctcctgcttcagcctcccgagtagctgggattacaggtgcgtgccaccgtacctggctaattgttttgtatttttagtagagaaggggtttcaccatgttggccaggctggtcttgaactcctgacctcaagtgatccaccttgacctcccaaagagctggaattacaggcgtgagccactgcatctggcttcttcttccttcctttagcccagtcaatcaggaaatgtggatggagtctttagtgtgtaccaggccttgtgctaaatgctgagtatggatacagagaggacttaaacagtgctcatagcctcggagagtttggtgcaggaggcagacatttaagcagtcaactatgacacaatggtgagggcaataatggggtggtgggcatggtcccccctagaagggagagagatgctgggaccaccttcccagatgggaggacatggaagctggacctggaaggaaggggcaagagctgagggaaatccaatctaagcagaaggaacttctcgtggaaaagcgtatctttactagaagcatgctgagcttccagattcagcagagctcctcttagctgtctgccagacagtgttgggggcagctggaagtgtgtgaaaggggtctcccatggcacaccaagaaataagaccttctccattggagagtggggggccacggaggttttgttcaccttagaaacttcacactgcagcaatgagggggagagcaaggtggacagagctgctgtgtcttggggagcccaagtatagctctcctgaatgccaaggtctacatgcagggagaagctttaccaatcaagtggtccctcaagtctaaacaagtggcaccgtggcagaagttactgacaaagtagcaggggcggctcctgggcgggtgcagggacagtgtgcagctctcacatcagtgtgggaggtcatcgtacctgcttttccagatcacccatcaagccagaagaaggccccatgttggactgcagctctgataagtgtgccagtcattgggattatgaaccataatgcccatcatcagtacacagtggggttgaaccagcagcagcagcactttccttttgtgatcaaagtgccccggatgaacacggccatatctgatataaattcagtgttgatgtctcagagcatttatgagagcaacttagagccatgatgaagagtgaagcaggcatggccgttagcaatataaagtcatctctctctcctacatttcatacctatattggcaatataaaggaatctctcgctccttccacccttcttccaccctcttctatccctcttccacccttgaaaggagacaaagccagttcatattccagatggggccacaggtagcacgttccttcccaggttccttccctgtcatcactctgcccactcttgtgctctttctagctctaactgtcactcagttccaattctggctgccacacgccttagccacaccaggctgcaccatctcagcagcaggctgtgataggaggactggcagaggtggtttacctcaagagattcctattggaagaggaaggaaataaggaagaactggcaatatatgtatagaataggcctatctgtagtgatttaggatagaatgggggaattgaaaggataaggaggagaattaacccaccagcacctccgtcaagctctcaacattgatagaagaaagaaatcacaacgaggcaaagacaaagccttgctttttaagtgagccacagcagaatggacacctgtctaacagagtaagagctccatggggaaaagtccaacagcatcaagatatccctgtgatcaaaaccagcaaatcaggtgacctagatgagtggcatattgctttattagcaattattcaggggaatggtaaaagaaaggaacaattctattttgaaaacaaaaaaatgggatttgatactcagctctgacagcaaaggagaaatgatcactaagactctgtgatgtgggctgggagtgtggaggaatcacctcagtccaaagtttcactgggttctagaagaacattaaaaggaaggggacacttagctactatgatttcttaaacgtctcaggcgacacttactgctgaaattctttaacatatttaacagaaagtctcttctgacattttccacacagctaatctttctgatttttcagagctaaaaggaagggacaacaattgaggcagtttggaaacttttttttttaagtctttttctcaattatgcaggactaaacttggaacctttgaactcacggacaaaagctatagtctgctgtgggattttggacagtattttcaattttacagatgagggaaaaggcacggttttcgtgcagtccatctctattgcttagatgcccgtgaccatctcctaagcttgtctctgatacaccaaagatgcaccaaatatacaccaaagataccgggaaggtaccagccccacggcctctcccaccgattccggcctcgtggaatctttgctcaacagtgtagtataggttcacattaaattccatgagataaacagttgaattggtactacctccttgactctctgtagcaattatcagatggcaaaccgatgattatcatctcactaagacatttttcacttgtaagctgatgcttagacatctctggcctcgaggatacggtaatagattcaagggcactcactgccatttccactggttacaagacaagccatctatgtccagactaatagaaactcagaagtctcaatgatctggatattttagaatttccttttcatttgaggcttgaattaattattcagataacatctctaattttccattttttaccttgtatgcggaaaacagcagagattaaagtgcggtctcgctccagagaataagagctgtgaaaggagcctcgagatgtgggggcggcagacagagcctgcacctcgtggtaagtggtggcaacggagaccagctcattgcagcgaggcccctgacttgccattcacactgcttctcaggctttctacaaagctccaagagactaagtattaaaaggaaagtgagacaatgaaagtaatttgggtttttccaagaggaaacatcagtgctgaggaagctagagccacaggtacatgctactgagtcttaatgcctcacacactgcaagactagggctttgctctttgcaaaggacaggtctcattgccatcggttatcagagataaactcatcatgtcagtgcctcaattatgatccccagtcggaggctggcatatgactactgctttattaatactacttggaggcagttagaagcacatgtcagggggactgtaaactgctaagggtgcatttcccagcagggcttcatttatttattcagtcaacaaatgcacatgccaaaccctggaaaatgaactgaaatagaaatcatggcctctgccctggagatttaggacttattcgcgtgaaaatttaataactccaaatattctatggagttttccatacctaattgccaaaatgaggttgttagaagaaagcaccactgcagggagagagtggggtgaatattccagacagggcgaatggtgcactctattccaactagaatataaaggtaccagggcacatactctaagtcctatccaatctaaattgttttttttcctatttttccccagaaacagggtctcaccctgtcaccctggctggagttcagtggtgccactaaagctcactgcaacctcgaattcctggctcaagctatccttctgcctcagctttttgagtagttgggaccaccgtcatgtactatcatgtctggctaatttaaaaaaatgtttttctagagacaggtctctctatgctgcccagattggtcttcaactcctggcctccagtaatcctcctgctttggcctctcaaagtgctgggagtataggcgtgagccaccatgcctgacccaatttagtttttttttagaaaaatcactatgttgttttctagtgactccactgtatatatgtttaaattgccatcttataaacacactggagaagaatccttagagccaaacccaatgcagctgtatttttcagtcttagagtgtccatcaaaatctgggcagtaattttcatctcgattacaggagcagcggaggcatgatggatccttgctgtgactggtgcctggacatccctgccaaccaccttggagaatggcaccttctgagtgtgcctgaaccactcttctccttggctaccactctgagtactatccctagagactactggccacacacatccacagtctcaatgtccacagaagacattgttttgcagcatgcaaaaacaatctgaaagatgataaaaagcaattttcataattaataaatttctacctgctgattaggaagtgttagaaataaataaacaaacaaacaagtgtaattgtgacattttggcaagggttccaacttaaggactgaaatgtgcccttgctctgactgtatctaattcagttcaattgaacaaacatccattgaatatctattgtttgtaaagctctgggctagctgttgttcagcatatgatctctgttctcaggtcaaaacaaatgaggcagaaaaagctgaatgcatgagatgaaaacaaaattaaaaataaaacagccttcttcctggagattctaattcaataggctggatggggcccaggcagctatattttaccaagcatcagctcagcctggttctgaccagcaggcaagcactcagaaggaggccatcactgtctctaattggtggttgtcacaaaaagctgcaaaggggaggtatagtcaccttgagatatttcaacaacaactgcatgttaagtgccttgaaggcacaggtcagacttgggcaagtggaggacacagaagggggatgtttccagcaaggagcagagctgtggaggccgcaaagtgcaccctgaacggctggccctcttgagagatgtcaagaagaacgttgttggaacagttcatttctaaatgaactcatcagccttacttttttccattagttcgcatttggcctcatttctcaatccagaatgatgcaaaggagccataaacctgaattaagacaaacaaaagtgacatggataaattttccttggacatcagagcaccagggttgagagaggagagaggagggctcatgtttcaacttgaggcttccgcagctgcgtccacagctgcgccgccaagttcagagttgagcattcatgagtgtgtgtcttgtcatgaaccaggggcctcactgtcaccactaggaggacacaccatagaccttcctgggcaacaagaaaagctgagccacactctgcaaattccaaaggcctgagagaagtccagagtcgggacttttgaggaaaaccagtccatgctaaaaatttgaaaaatacagaaaattaagaaaaaacagcaaggccccataattatgtaacacagagactaccagaataattatgcagaaatatttcctgcatttttccttcatgcgttttacaagatagttgggaccacacatttttgtattctgcttttttaaatggttaactattatagtagaagaattcctcttatgtgattacaaatatatcacaaaattatttcaataaccataacattttaacacatgaatatttataatataattagcaaggtaattctatttttgtaactttaggtttctttaatttttctccattataagtaatgctaattaagcaggcatgaccatgggccaatgaaaatatctaagtcaaaagcagcaatttgtctatagatttgagtttttaaaaaatgattaaaaacaatacgtcaatgtcatagatgccactacttttggaaaacagtttattgcatctttctctgtttatctggtatgagtataaatgggcttacaatgaaaaagctcccttaccaaagtgatgtaggaattattgcttagagctatgagactgagagatagtgggatataaacaaaggtctcttctaaggtctttaaaggagctggaaaatacgtaggtcatgcagatgttccactgccgccaccagcccctcctccaccactcctcccctcccccttgggcctcttgcctccctgccctctggtcttgtcttcattctagggaaagtctccctccaacagcaggctgatccaggcccccctggggagtgggaccttctccgtattcagtattggtgtctgcatcaaggatggcatgacagtggaacatccctgaacataaagattgggagagtgaaaggaaaataaatctcaggactttaaaagcactaagccacagggaaaattcatgctgggaattgtcttgggccaacctgcctcctattctattcctaaataagatagctacaaagataaaaaagccatatacccccctcacaattataaaaaagctatatacctccctcacaactataaaaatgatatacacctccctccctctctcacaaaaggaaattccttgtggacaaataacaggcagaactcaaagtcgtccctctgctcacacgagacaatgcatacctgatttttttctttttttgccctattgtttcactaagccagactaaggcataagtgactattcctgtaaattgtgtattcagtgaaaagctaatcagaaactctaaagaatgtaactgtttttttcttatctgcctgtgacctggaagccccctccctgcttggcgttgtcctgctttccggactgaatcaatgtacatcttacatattatacaatgtacatcttacacatatagattgaagtctcacgtctccctaaaatgtataaaaccaagctgttccctgaccaccttggctcatgttgtgaggacctcctgaggctgcgtcacaggtgcatccttaaccttggcaaaataaactttctaaattgattgagacccgtctcagatactttctggtttatggggacaaaagcttttgaagtcagactgacctgggcttaaactctcttccacctgctgcacaatcctgaccaaagactaggctctcccaatgtcagcaggttcaatcaaataagtcctgaccccttcaggaaatgttgctacagccacaaaactggaagctgggactgggatggggaccgaggagccaagtattagccaggtgaataatctgcttttttctgactgcatccagtgagaccgggaggagctagttttacagcaacagtggcagctgattccccaggacttctggaaggctcctgggaggctgagtcacttcacctctctctgccaagaaaatgctatcttagaaacaccctccctctctcatcctcccccctccccccatgggaacagctagttgcaggactattgccattgtcttggagatcttccctgttgtggtcaggtcacctgtgtggatgtacacgttgctcttaaagccagttagtggacatgccaaaggcaccagagcctctgtggtcctaggagatgcagcaccctttttccttttgggagtgagcagctcaaagtgtttggaaaacagtgcatttcactgagaggtttccactgcaatgcacatgagagtttgcccctgcagcagcggtccccaaactttttggcacgagggatcgatttcatggaagacaatttctccaaggacagtgtgtgtggtggggggtgttttcaaaatgaaactgttccacctcagattatcaggcattacttatgttctcataaggagcatgcaacctagatccctcagatgtgcagttcacaatagggttcatgctcctacgaaaatctaatgtcgctgcttgtctgatgggaggtggcactcaggtggtaacgcttgcttgctgctgctcacctcctgctgtgtggcccagtttttaacaggccatgggctggtaccagtctgtgccccaggggttgaggacccctgccctaagggtttaaaggttatataatgcactaaaattaaagtttctaatttaaaaaacaaaatcctaccaccacactagaggctttcttcagatctggagcactcctttaggcatgtgatgctgaaggttgaggactgaagctacaagaaatggcgcattatttgatacacgtatctgaggcagcagaatagggtctggagacagggaacctaaggttgtttcatgccgacttcctaggactaaattgaaaggaaaaccctaactttccatgcttaagtaacaaaaggaccagaggctactccctttgaccttgtctgcactgcagatgggaatttggctgtttgtaaccaatcagactgattgtgggctaccacttcagttacaggaggtgagcatgaagtggccaatgggaaacctctagggggtatttgaacccaagaagattctgtattcgggcccttgaaccgctgctcgggtctgctcccacactgtggagtgtactttcattttcttttttttcttttcttttctttttttttttttttttgagacatagtctcgctgtgtcgcccaggctggagcgcagtggcacaatctcggcttactgcaacctccgcctcccgggttcaagcgattcttctgccccagcctccagagtagatgggaccacaggcgccttccaccacgcccggctaattctatttttagtagagatggggtttcaccgtgttagctaggatgatcttgatctcctgacctcatgatccacccgccttggcctcccaaagtgatgggattacaggtgtgacgtactttcattttcaataaatcccagctttcgttcttttgttgcttcattctttctttgcttttctgggcattttgtccaattctttgttcaaaatgccaagaacctggacaacttgcagtcacaaccctctactagtgacatatccagattttgccttgtactatcataggggctgagctgaagacaaagccctcacaccctgctaggaaagtttgcctcacatgcataacttcagagaagagccccgggtgctgggtgacatgtgctgaatggaagaggtatgtcaccaaaggtcaccttcctagctctgttcccagtcctcctctcctcacaccttgccacttactgctcagctgtcccctgagctccctctcaggctctgggccacacttgtgcttagtccttggtggggaatttcaggtgacacagcaaaaaatacaactggcttctattctactctgactttgtgaccctgggtattagttgggcttcagttgttcttataactacacctttgccctgatgccttgttatcaaggctggtttccaggggccttgtgatacagaggagagagcatgggctttgggtctggacagacctttgcacaagtgctggccgtaaaacttaactagcaatgtgttcttatgaaagctagttggcctctctgagcctccatttcatcaggtgaataaccatcctggctggttgtgatggggcttaggacacattatcctaagatatgattgtaggagaccagaatatgccaccccaaaatatgcctctttggcataaggattatttcgagctgtttattttgagaaactgcagatgcagagaagctctgaaactgttacccttttgtaagagaaatttacatctataaaggaaatctccatttgtaagagtttctctctctcagccccaggaagagaagggtgaccctgaatcactagagactgaattaatggagaaggcagggacttaaaactgcataaaaagccttacctttgtttaaagtgcttttcctggcctcctaatcttaactgggcctttccctaggcccttctctctttgtattggagaacgatgttatttaagcctgacttctaagataatactttgaaatctactcgagatttacccatttctctgagttttcccccatgaacagatgagatatacattattaaacttctgtttgtttttctcttgttaatgttaatctgtcttttgttagagggagtcccagctaagaattcataaagaactgtagaaagtaaaaagtttcctcttcaaagtttcctttgttgttgaagaataaatcgtaagtgttagaaatagtagtttcttttaaagactaacttccttcaagtttccttgctttgtgctaataactctttgttaagccctatcctatgtagctgctaaatataaaggaataagtacattctatgtccttgtactttaaccaagatatttgtgcaggacatgctcacaggaacgttccagcttgcagcctatgtcccttccctacttggcataagcaacttcctcttttcctttgttctcccttgcctttacctatttaaaaaaagttttaaactgttagccaatcaaattcagtttagattgtgaagtctagctccagccaatggatgcaagacacagcagtaaggatgatccaaatgcgtaaaggataaatatgtctgcttttcctttgttcagtgtactctcgtagcaagactgctagcaggtgtaccctttctgcagaaagtaaaaattgccttgctgagagaactaaatttatgttcgagtgctatttctttgcagcaccacggaacaagcattctgtttctaaataaacattgtacatataacagcgtggaggagaaaactatttttcccccctgcagatctaaacagtaaagggaactgaggtggggttctcttggcaatggttcatgttaccactgtgagtattctccatatgcagtcttctcttgatggaaacttcatcctggctcctctgggatggggtccctgcctcgtcctgctattctccctggactgaaaactgctcctggaacttcgttccaccatggctcttaggtctccaccatgacaacagctggcttggatcccaagcactgcctccctgggccccaccatgggcactcatgtgggggactccctgttggcttcagagaccctctgactgcatggactatcccctactacttgtcactggggctctggacgttatgacgtccctgtcaagctcctagggactgtaaaccaaaaataaaattcagacattgcccaactgacgggatggaccccctcttggccaggatgaccccagaggaacctgaaaaatggaattcccatccatgacaagaagggaggccagacatgcctcgttataccccctcccttctggagtttaggcacagctaaccagcattgaggttaaaaatcacaagacctctattttatagacagaacaggctctttgtggcaataagataccaataccaaattataaacaaaacctaaagccatgcaatgcaagtcacaccctacaaaccataaaatctcattaaacaggcttttaaaatttatcttggtgtcatgtggcttactttccaaactgactgtggtataacatcacatgacagatagcagaccctggagaaaataaaaatattttacccccaaatatatgtctttgacatcttttgaaatggccctgcaaagctgtcttttgagggggaaatctgcatctgtagagaatctacatgaatgcagacaggccttcactttccagacctttcttagatctaggagagattaagtaagagtctgacaccttaagttctgaaaagagacatttacaatctgtctttctgaagccttctaccgataaggcttcatctacataacaaaggccttggcctccacaacccgctttatcctaactcaagctttcctttctactgacttcaagtctttagacaaagctcaactctctcaaccaattgtcaactaaagaatccctaaaacccatctatgacttgcaagcccccacttcaagatgtcctgccttttcctgcctaaccagtgtacaccttccatgtactgatttatgtcctttcctgtaactcctgtctccctaaaatgtataaaaccaaactgtaaccacctgggccacactttctcaggacctcttgagattgttttccaggcagtggtcacttatattggctcagaataaacctctttaaatattttacagagttctgttcttctgttaataagaccacctatgggccaggccaatgggcatatgcctgatctaccaatggtggctggattactgtccccagggtcctcgttcctcctcttccacactagcccatgacctcctaaagtccaagctatcattcagacaagtaagaacatcagggaggtctcataaagagtctggaacccaacccctgtaagggtagagctgccactgcatgtagggacagcattagaaagtgctggaggctgggcgtggtggctcatacctgtaatcccagcactttgggaggccaaagcaggcagatcacgaggtcaggagattgagaccatcctggccaacatggtgaaaccccgtctttactaaaaatacaaaaattagctgggcgtggtggcacatgcctgtaatcccatctactcgggaggctgaggcaggagaatcacttgaaccagggagtcggaggttgcagtgagctgagatcacgccactgcactccagcctggtgacagagtgatcgatactctgtctcaaaaaaaaaaaaaaagaaaagagaaagtgttggagatggcactccattctttcactggatgggaattgggaaatgcctagtaccagccaggcactgttgtaggccatgggataaattggtgagttaaagagacaaaaggccctgcctgtgtggagcttgtatttgactgcgtatagcgcacctggatatccccgtaactaaaatataagaataaggcaagagaggtaggctggggccaggtctggggagccctgaatgtcagcagaagaatttgtctttgagctgaattaccaacagtgggtgagatgaaccactgcacatttgtcagaagagtggagaataacagggcaaaatggacttttagaaaaatgtctctgacaagagagggtgggtgaataatgacaacaaaacctttgcacagcattttccaatttataagaggctttatcagctatcacatctcacaatcctcctgggctctgggagtcaaataaaggctccactcagagacaagcctgggcactgagggaggaactagcctggggccacaggatgagtgagtggagagcggggcctcaaagctctgccttgtgacatctcatcttctagtctgtatatttccctttcctagcaaagactgtatttaccaaacacagtgcacattttctctttaaggagggtgttcaacttaaaattatggaaagctttattacaatgtttgcagaaaaatgtcaagagagaagaatactaccagtattgcctggggatttttttcaaatacacatggccaccttcctccctccctgctcccggattttgacagtgtcacttagatgtgtctaatttgcaagagctcctgtgactctactacctacagccttcactgcagcatgtccagctaattcccctcctcttctcattgagaaagttcagtcctggtggtttgggctgtgtgtttaattgaaaaagccctagagaaagaagagatgttaatataacactcttgatgaaacaagacaaggggaatatgtttcccatttgtaacacacagaaaatctaacaatgagtgctggtgggttgctttcctcaactatctctgtctacatggatatctaatatgcatctcaagcccacctccaaaaacaagttcttgattatcccagccttaaatgtgctcttccccatctccgtagatggtaactctattctttcaggtaccagactgaacacctagaggcatccttaatgattcttcacactcctcaggtacaatccagccaatgctgaaatgcaagctgtctaaatccagacaatgctggcttcaaaatctgccctgtcctctgaccacttctcagtctcccactgctatcttcccagcctcagccaccagtatctcttacctggtctatcaggtctcctgacttctatcttacattctgctctccacagagcagccagagaaacctttaaaaaacctaaatcagggatgcacatggtggcttatgcctgtaatcccagcacattgggaggctgaggcaggaggatcactctaggccaggagttggagaccagcctgggcaatatagtgagaccctgtctccaaacaaagaagaaaatgaaaagaactctaaatcagatcacatcccctctgccaaaccttccatgacttccttctcccaccattgcctccttttcccttgggtccagcaaccctggactcctggctcttcctcctgcccgcccatcacaaccctgcctcggggcctctgcactccctactcccactgccaggaatgtgcacccccagacatctctgggcctctggctctcccttcatcaggcctccattccagcatctccacagtacctgctcatctactcctccctaatcccctgtgtaacatcctttgccatgctcactctctttccctattccctgtattatttctctttacagaatttaacaccactgaaaacaaacatacactccgttagtttattgttcatttcctctcacaacaaggtacattccatgaggactttgttacgttcactactacgtacctccccaccacccccaaccatccttaaacaactccccgctacccccaaccatcattaaacaatgcccgggacacagcaaattactcaataacttttgagtggatgaatgagagaatgtcattgctatcattgtatgcaaattcttcaaatctattgactttcacatttcattagtatggacaacttaaatgatgacccatgaagttcagggtgcttcaacaaaaggcaggcattcatgtagcatatggagcttcctgaactctgtccacaattttcaaagtctatgtaggccgagactatgactttttagtagttataaggtgtgattctgggtgaggccttggttggtgatatccctcctcccaaacacctttgggggggtgggtggcagtttgaacttttaccgggcacaaaaatcatttaaaaagtgacaaacgaaaactgcatttgccaatagaagtagtaaagaaaaaataatagctgccatttttgagagcttatcatttgccagcacttttactaaatattcctttaaatatttactataatgaaactggcattaaatttactttcccagggtaaaaactgagcaatggtcaactggacaatcaggagaaaggaaaatgcagaagtcagcgatcctggttgcactacatctctgaaggtttgaggacccaagctagcctcaaaatcaaggaaggctgtcatagggcacccccatcataggcttgggcagtcttgatggcattatcactgggctgcatgctctgtgcttcatgtggtcccaatagttggatctcagaggtctcttttcttcaagggaaacttgtctgtttggactgtgctgatttctcatcatctctctgttcaattcatttctctacctgccctccctccaagtcatccaccctctcagggtcctgagctcctctcttgaaagcaagggcaataatgtacttaccctctggcttgtcctttccatcttggacatggctcgaaggtctctctgatctatctctgtggtctctgattttttgcaagccatatgacttactgacatagactaagacgtccctaactagttcttgtgtttagaccactggcctttgccaaaacttggattcctagtactttcagtataatctattacttcatgtctaagcattttcctgggattaaaaagagttagcttgctatctagctcactgtcatttatttattttgcccactcagtttctttattttattttattttattttattttttgttgagatggggtctgtcactcaggctggagtgaagtagtgcaattacggctcactgcagccttgacttcctgggctgaatagatcctcccacctcagccacctgcatgagccaccacacccagctatttttaaaaattttttaataaagatggggtcttgccatgttgcccaggctggtctcaaactcctaggctcaagcaatccacctgccttggcctcccaaagtgctgggattataggtgtggaccactgtaggttctttattttttatgactttgggtgggctcattcccgactgcactcctgatgaatggttacagtccaagtggcatatgactcatgaacttcagagatcctcatggacctatgcaggctgagttttgatttcctagtccagtggttgccaacctgggatgcatgttgaaatagcttgaagagcattaaccaatgcagatgtctgggtcctagcctccagggattctgacttaactggccagtggtgaggtctgagtatcacggtttttcagagctccacaggtgagaccctgatccagtttgtctacatatctaatcccaggaagctctcacaacaacctgttccatttcccccttttgtcttgagctgcattttactgtgtctataaatattgtcctagcaagacccagttagcagtaagacttgctctttttaaaaagagctggtccattttttacccaaaagttataataagttaatataactacacttaataaattcaaatatgagaaccttaaagcaaaaaaaaaaaaatccatacagaaagcacataaatgtgaataaagcacaaaaggaataaaatcagagcccttcaaagtttcacattataagacctggggcagtcctggctctgccacttgccagatctgcaaccttgggtgtttcttaacctttttcctccacaatttcctcattaataacatcaaatgtaaattatatgatttcccatgtttgttgtggaaagaaaatggaataatacttgtaaatgtacctcataaggttattattttattaagaatagaataaaaattatttcagggaagggaaattggggagatgttggtcaaaggatacatttgacaggatacattagatagaaagaatgagtaagttcaagtgatctattgtacaacagggtaactgtagataataacaaggtattgatcttgaaaattgacaagggaatagattctttctttcccttccttccttccttctgtttctgtcttttttttttttttttttttttgtagaaatgggtctcactttgttgcccaggctggtctcaaactcctgggctcaagccatctgctggtcttggcctcctaaattgctaggattataggcataagccactgcacttggccccaagagaatagattttaagtgctctcgccacaaaaaaataagaagtgtgtgagataatgcatatgttacttagcttgacttagccattctacaatgcacacatatttcaaaacaacatgtacatgataaagaaatatgattttcatttgtcaattaaaaaatgtttaaaaaagaaaattatttcagatctgggaaaaacagtcctcccatttcctataagattacctgtcactaggcagcctgcagagaaccaggtgagaagggtccccgccccacggtcctgctttagagtcacgtatctcaaacacaggagagccctgctgctggagaccccattattagcccaggcccctgactcaatccccacatctctacttcccttgtccttgaatcaaagggcagacgcatcctggtgctgggaagaggtgtggctgttccactcctgacactcaaggcagccgcagctgggggaagatttcagaaatgacacgctcaggtaggagaaatgacaatttaattaacttgtcaactgtttctctcagaaaacatggaggaaatagattgctgcattaaaaaagcatcctttcccagctgtgtccagtcttatgtttttcctcttccaagtcaaggtcctactttggggtcccactttgagggacgttttgcaatattgaacaatatatgttactcttacatcgatatatctgtaggtctaaatcagtgcttggtaaacgttttggtttcaggactgaccaacaatcttgaatattattgaggatgctaaagaacttttatttatgtggcttatatctatcagtatttattatgttagaaattaaggcaaaacatgcaaactatttatattggttcatttgagaacaataagaaacccataaaatggataacatattttatgcaaaataaatacattttccaaaattaaaaaaagtgagaattatggcatcatttaacatttctgaaaatgtctttaagagctggtttaacagaagacagctggattctcacacatacttctgacttcaatgggttgtgattatcacacttcatggagcttctgaaaaactccggtgttcactcgtgagataatgagagtgaaaaggtcaaataaaatcttaatattgcaatgaaattagttttgattagttttgaccttacagaccttactgaaggctctgggggccttccaggggtccccaaactgtacaccgagaatttctttctttctttctttttttttttggagatagtcttactctatcacccaggttggagtgcagtgacaagtgacatgatctcggctcactgcaacctctgcctcccaggttcaagcaattctcctgcctcagcctcccgagtagctgggattacagctgcttgccactgcgctcagctaacttatgtatttttagtagggatggggttttcccatgttggccaggctggtctcgaactcttgacctcaggtgatctgcctgccttggcctcccaaagtgctggtattacagtcgtgagccaccgcacccagccaacactgggaatttctgttcaagatatgctgtgaatatcatgctgtgaagcataatattgattctatacattgtcagttagatgactgttggatgctagagaggcaaatggtcttataataatatttaataaaatataattattgaaagtgtttaaaatcagctttattagtgacttgcatttaaatttggtattttatttaacaattttaaaagatatatttaatgatatctatttattatattttcttgaacagtttgtgtctcactttataacttccaaatacttaatcatatgttcggtctctcttcttattcttgctctgctctgggcctggcatgtagtgggatttgagacagcctgtgaacactgaacactaggcaagaaacatgcccataggggctggaaacgactttacagaaggcagatctgacccttgtcgccagctcctgtcatccggatggcatcacagggaaggaagttctcagcagatgagtgaagtcagcgaaaaagagtgtgatgcggggcccttgccacagcagcccttgccttgtcctgccacctgcctttcctcctgctctgttcattaaagtgatgcaccagccactgaactgggtttgcccattaagcatcctggctggagggacataagtgacccatgcacacagccgtaagaggcacattcagtgatctaagctgagcaagacattgctcctgctgtaaatacatgtccttcaatctagcagtagaaattagacctgtaactaaatagctgcacaactaatatctgaggcagagtgcaataaagtcacattgctctatgacagctggaaaggaaacacagttaagctggatgagggactcgaaaaaggctcatggagagagtgtcagacatgttgggacttaaaggatgcagggcaggactttgagttcttgcacatgcaggatgccataagaatccaattctgagctaagcatggtggctcacacccataatattaaatcccagctacttgggaggctaaggcaggaggattacttgaggccaggaatacaagagactagcctgggcaacatagttagaccttgtctctctaaaaaaaaaaaaaaaaaaaaaaaaaagaaagcaaagaaagagaacagaaaaagaaagaggaggatctaattctgaaggcagagctagaagaggcttagcaagcagtctggttgttagctgcagtgcatttgagggagagtggactgagagaaagaagagctgaggctggagaggaggctacagacttgaaagagcttgtgtttgaagtcaggtctgggtttaaactccagctctccccttgctattgtgatattgcacaacttctgaataacaggttttctatctgtaaatgaggaataattgtatttccacgataaagttgtttgaaaatcagggctaattcatgtatagagcttggcacacagcaggtgtccacccaatgtcagctattgttggacaccagctgtggagagcctggtgcaacaagtcgcagagaggggctcagtctgcaggaaacaggagataggagatgccgttttggagctgagcctgagacagtgatggccatgacgcaaatgattcgggctggggcttcctgcagtgacagggccaaaggctgctgaagggactctcagcagtgctctttgccacttgcttgggtgggcggaggtgaggggtgcagaactgctgtgatgagaagcagcgggtcagaaatcgcctcacctccactcccccagtcaatgagtgcaggatcctagaatcttaagccatcaaaaatcttaaatgccaattttcatggggggagaaacagccccaaacaaaacgggaaaagagaatactgtgtcgggaatgcatgaaaacctcagcatttgggttacatttccagtcttcctctaactggagacttcccctctcttaactgccttctccctgttcctcaaacccatttgctcctagtgagcaagagtgttattgtccacctgaggatatagttggctggggttcttttcttcaagtgtctcaaagtgttcttttctggcagtgtcttgaggtcctttgtgtgttcgttctctttccaacaaagttgtaaagggaatgagccgagatccatttcagatcacagaaacggggtgctggctttctcattgtactgggattatcacgagtactcatcctcctctcaaaagtcttctaagtgtgctattgtgctcttgcttaaatttgtaaaactttttctccttgtatttctgctcaccaggaactacaattcatcaaataaaagacaagctggcaaaacttgtcttacgtctcagtggcctgggattgaggtaacttaggttctagttgtcattctgcagttaactagctgtgtgactcggcattttaatcgcccttttttggagtggattgctatttcctagagtaaatttggaccaaatccacaaggtcctgcccctccctgacactggacgggtaaggtcacaggtgttcagtggtggaatcgccactccatcttgtgaccctgcactcctgcacgatgctatttccatgaggatcttggattaaaccaaaagtgcagatgggctctgtcaccactggtgttacctagaggaggcactctctccttggagcatctgactcctttgggaaaaggtgataagaattcctagtcctgacccagcatctgggacagagatttatcagaggatccagggtcccttcactcaccactccctttccatgctgagaccaccccaatcccattctgaccttctcctcttcagcctccccagtgagctgtgaagaccatctgtcttcagcagatgctctgtctcagaagatggtctaactcagaagagttccccagtgaagggagctcttggtgattcttgaccaaggggaaaggcccactgagcatctactgtaatagtcgctgcactgctgtggtttagacaaaacaagcaatggtccctgttctcaagcaacatagagtttcagggagacagtcaaggaaacaaatacaccaataaaaatatacttacaaattactataccccatgaaggaaaaaaatcaggtgccataagagaatcaaggtgggagatattttggagaaggtggcagaggagctatctgcagagaaaacacatcagcttcagaacaaatgaaatggggacaaggagggcgcacattctaggcagacgcatagcctgtgcaaaggtatgaagatgggaattcccaacaggttcaaggaactaagtgaagactagtgaggccccagcatagtaaaaaagaagagcgtggatggtcgggttaggctctagatgaggcagaaccttgcagctcaccgagaggatttgcaatttggcctaaatgccatgggacactttagagggcaacaggatctgatgaaagtgcagggcctctggcttatgaacaaatattttatttaaaatgcttcttctcactcaattgaaactgtaaggtaatccctcccacaccctaaaaaaaaggacacagagaagcattttgctttgtctgctacttgttcaaaattagttcataaaaataaaacttattcagtcagttcattatcacagagtccccacagctggaaggggaatgcccttacacatagcacaaattgaatacccaacctcaagcccacaccaaatgttgaatctgaaataaatgggtaggaaatataatctaacccagctcaaagaaataacactgtccttgctctcaatcactgaaaactgctggatgtattcatttatgcaactgacttcctgtaagccagggactatgctaggcactccagatacagcagcaaacacagacagaaatttctgtcctcacagagcttgaatcctaatggggaggagactacaaacaagacagttaggtaaattataatctatattagaaagggatgagggtgtggagtgtgaggcagggaagggagttagggagcgtgggtggttgcaattgtaaatgcggtggtcaggaaagacctcctaggggtgacttaggaggaggaggagaagtgacaacttagacctcaagggaaaaagcactggaagcagaggggagaccaagcctgacacccttaagcaggtgcacctggggagtggcagggaggccatgtgactggagtggagagagaggaggggaaggggaaagaaggcaaaagggggatcagatcacatagagcctcggaggccatggttggggctctgggagccatctgaggctctgaacagggaagtgacatgttccatgctttgagaaggcccatgctggggtctgtgatgagaacgggccgcatgggtgggaacaggaggagcaggtgggaagccgctgcagtgatgggggagctgccgcttgctagaaccagggtgggagctgcggatgtgccgagagacgatcagattccagatctatttttgaggctagaggtttggatgtggggtgcagagaaaggatgagtcaaggatgacaccacaggttttggccggagaaacaggaaggagggaatcgctgttcactgacatgaggaagattgaaatggctgatgatcagataaggatgttggctggaatattttaagtttgagatgcttataagacatcccagttgaagacctcaagcaggagctgaatattcaggggaacattcaggggcagggtctgaaatgggcatatacatttgggggtcacctgccaatatatgttatttcaagtcacaagagtagatgcgaccaccaggaagggtatggatagcaggagagggccaggtctgagcccaggggcagcccacagttaaaggtctgggggagtcagggaaagagcccaagaaggagcacgaatttggaaaaagaaaacagggaatgatgacttcctggaagcacatcaagctgcatttcctgggaggtacagtcaaccgtgtccagcacagaagatgagggctgaaaatgggccaggggaatttccaaagtggagatccttggtggttctaacaagaacaactttactgagggagtaggaaggaacttcaggcagtccagatgcttcttggaagaagttctgctggaagaggggagaagacaatgtgtggtaaatggagaaggaagtgggagatgacaagatctgggagaaattgctggtggatgcctacggaaatggtctaactgagggagagagaagctgctggaaagacatcctagcaggtggcaaagggcaaggcctggtgtgcaggtgggtcccagtcatggcggagaatacagtcatgggttcttagtttctatttttggttgggccagtaaagccccttcctcatccctcttatctgcttatcagtacagacagaaacgaaaaaccatggcttcaggctgctaaacacctaaaacaaaaccaaacggaacaacaacaacaagataaggtgggtttcacaagcttggacatgcgggccgttcacctgtcatataaaggcagggaggcagcgtcatggcggcaggtggcagtgggagtcagtggaagctcttttctgatccctgcaattgtctcaacaaagtgtgaagtagggtcatccattgcctgagtaggaggatggagaggagataagggaggtttgttcatcttcacattttacctaatgaatgaactgatttctctttcacatatattataaaatctgttcttacattagatagagaaagaagaggaggactagagaaaggaggagaccaaagagccctgagcatcctgaaaatccaagagaaaacccaaatgaggcttctggccaacactgagaagatccaacacatttctgagtacaaatataatctggcgaagtgggattagagacgcctgtatttctgctgaacgcactttctaagctccgtgagtgaaggagggttgcagagcattctgtatggttcaggtggttgacttcactttaggaaaagtaaaactaagaaaacagagaagctggagcatgtgccaaataaagaacttgctcctcaggagacaggaaagctgagctaattttgtacgtactataaatcgtcagtcagcttcagtttcagatctagtttcaaacctggagtgtgccagtggacagggaagactgcattggcctaaagcatttaaacttgcaaaaataaatagtatcatcaaataaataaggcacattttatcaggattaggcataatttataatgacataaagatgatggaattccacatgacacaggaaaagaacaggctacttatgatttttaaaagtaattgtaatgtgaatttctacctgcattttattttgaccagtatcttattacctatatattttttaaaatgtagtctctttttaaattctacaaacgactgtgtgagaaacttatccttttaaaatcaatgccatactgggaccagcatcactggaggtctctatttacttgctgggacataaggggaattctcaggggacccccacacacaaagagcttatgagtcttgacatggaaatcaatgtccctggccttttagtaactctaaagaacaggctatgctaggagtcagtctgctagattgatccaaaataaactgtccctggcatagttgttatgtaagatcatttcttaccatttctgatatcccttacacagacaagaaaaaaaatgaaaaggtcacatcttcccactgggcccccatcaacaggaaccagagcagagccatctgataaggggccttctgcacaattgattctttaaacctccttattccttaaacctctgcctctgtcttccagtacaagtattgaatgccatacactataatagatctcaatgtatgaaacaattttaaccacaaaaatctagtaagaaaattcaataagagctgacactataaaacaccataaatcaccagaggtggcctgtggatcaattagcaggatattggcaaaactctgtaaagcatttgattgaataaacccacagccacctatccagcaaattaacaatgactgaaattgttgcagggagtgagtgggggagggtgggagggtagtgtgtgtgtgtgtgtgtgtgtgcgtgcgcataagaacagactacttggtgagtaaatagtggaggaagatagtgtggatgaattaatgaccaggcttcaaggcagctccgtaatttggggaggtgattagtgcatttgcatctacattactctccctcacccctacttttctaaaacttaataccatttcttccatattcacagtttttatgataaaaacaatgcttactaattacaagtagtttataacaaattttttaagaagcattcagagaaaaccaaaaaccacctcaagcgtcatcaccccaagataagcactattattatattagagatttccttccattctattttcaatgcatgcatgtgtatttttcagccaacaaatactatgctgcatataccattaacattgtgatttacttatgtaacattatgttatgagagatttttattttattaaatagtcttaggagaattctttcataaaggctacacattattccatattatggtattactaaataggatttcaagtaaactttttgttggatttttaaagatattcttaattttacactattttaaatatatatataatgctgcaaatgaacatctgtatagcttattccttgcaccaatttctgagtactttgctctgttattctctgaggaccctgataactcagtgacaccatggatgctgagcaccaaactgcttgcaaagcacacgtagagacccctggacacttccctctgcactgagtgcccgtctcaggacatcttcaacagcattgagttgtatagtttttaatttttttaatatgataggcaaaatgacagtacttttcattagtttgtggtttgttttctagcatgagtaaatatcttctcattgatttcacagtctttttaaagtttttacatgtcctcacgtgtgactcacatctatcacattggctggtacaccataggtgctcaataagtgtgtatcaaataaaaacaataaatggagagatagttcgtgtctatttttgtaataggattttactgcgcgctctctctcgctctctctctctctctctccctccctcccccggggcgttcctgagtttatttggggcacacccggggcgaggaacctgcacctaaaagaagatgttgggcctcttggtggtgaagcgtggcccggcggcacttgttggctgcgatctcctccaccttcatgatctggatgcagtgggcctgggtgcggtgccggcccatggtggtcaggtcccagtattccctgtatgtgttgtgggtgcagctccgggagtcatagagcagccagacgctgaagttctttacccgcagggggaccttctcaaacacctgtccacagtagacaatccagcctgaagtcatcttcatcttctttaactgagatacaaagtaccagaagcgggacttggcgacgacatgatttaggcgcaaagattcgcatgcagtagaggggcagtgtgtggcatttgggggtgggcaaagagagaccaccaccttgtactcttttagtgcacccgaggccttcatggcgtcctttccgtgcctgccgccacccgcgcttttctccagcactttgggaggccgaggcgggtggatcaactgaggtcaggagttcgagaccagcctggtcaacatggcaaaaccccgtctccactaaaaatacaaaaattaactgcgtgtggtggtgcgacctgcaatcccagctattcaggaggctgaggtaggagaatcgcttgaacccgggaggtggagattgcagtgagccgagattgtgccaccgcactccagcttgggtgacagagagactccatctcaaaaaaaaaaaaaagaatcatattttacaacttctgtcatatattaagggaaaatgggaaattatccaccgttgttgtaaatatgacacaatttcccaatatttgcttatctttttattttgcttatttttttaacttacaaaacttcaacattttatattgtcaaatatcctgatttcttttccattgttatcattctgttattttaggcttaaaagatttctgtctctaacttatttatccatattttcttttgagtttttatgatttcatactttatgtttcactcaaatctatcagggattgaggtatgggtaaaagaggaaatatatcttaaagtttttttcaaagtagttaactaattgtattagtaatacttattgtttaatatattctttactcaaatattttttattctatcactattatttacgaaatttatattagggtcaatttctgttcaatttatatagttccactaatctgtcattatgttgctgcactcataccatttcaatctatttatttatttatctttatttttttcaacttttagattcaggggtacacgtggaggtttgttgcttgggtatattgtgtgattctgaggtttggggtacacgtgttcctgtcaaccaggtactgagcattgtacccagcaattagtttttcaacccttgccccactccctccatcccccttctagtagaacccagtttctactgttgccatctttatgtctgtgagtacccaatgtttagctcccacttgtaggtaagaacatgtagtatttggttttctgttcctgcactaatttgcttagtattaatggcctcccgctgcatgcatgttgctgcaaaggacatgattcattcttttttatggctgcctagtattccatggtgtatatgtaccacattttctttattcagtccacaactgatggacacctaggttgaatacatgtctttgctattgtgaatagtgcagcgatgatcatgcatttgcctgtgtctttttggtgtaacggtttgttttcttttggaaatacacagagtaatgggattgctgggacaaacgatagctctgttttaagttcttttggaaatctccaaactgctcttcacagtggctgaactaatttacattcccaccagcagtgtataaatgttcccttttctccacagccatgccatcatctgttttttgaccctaataatagccatcctgactgatgtgagatggtatctcattctggttttgatttgcatttctctgatgattagtgacacggagcatttcttcatatgtttgctggctgcttatatgtcttcttttgagaagtgtctgttcatgtcttttgcccattttttaatggggttgttttttgcttgttcaattaagtttttatagattttagatattagacttttgttggatgcataatttgcaaatattttctcccattctgtaggttgtctattcactctgttgatagtttcttttgccatgcagaagctctttagtttaataggttccacttgtcaacttttgtttttgttgcaattgcttttgaggacttataaattctttcctaaggctgatgtccagaatggtgtttcctaggttttcttctaggattcttatagtttgagaatttaaatctttaatccatcttgagttaatttttgcatatggtgagagatagggattcagtttcattcttctgcttgtgactagccagtttttccagtatcatttattagggtctcctttccctattgtttatttttgtcaattttgttggagattacatgactgtaggggggtggccttatttctgggtgccctactctgttgcattggtctgggtctgtttttgtagaagtactgtgctgttttggttactgtagccttataacacagtttgaagtcaggtaatgtgatgcctccagtgttgttctttttgcttaggatttctttggctattcaagctctttttggttccatatgaattttaacatagttttttccaattctgtaaaaaatgacactgatagtttgataagaatagtgttgtatctgtggattgctttgtgaaatacggccattttaataatactgattctttcaatccacgagcatgggatgtttttctatttgattccgtcatccatgatttattttatcagtgttttgtagttctccttgtacaaatctttcacttctttggttagatgtattcctagatatctcaattttttaatctattgtaaattggattgcattcttaatttggctctcagtttgaacatgtatagaaatgctactgatttttgtccattgattttgtaccctacaaccttgctaaaatcgtttatcagttctaatagccttttgacagagtccttagggttttctaagtacagaatcatataattcgggaagaaagagttcgacttcttcttttcctgtttggatgcccctttcatttctttctcttgcctaactgctttggctagcacttccagtactatgttgaataggtgagagttgtatccttttcttgttccagttctcaaagggaatatttccagtttttgctcattccatatgatgttgtcaattactttttaaacatacattaatgttcaatgtggatgtacatacatccacacttctttccccaaagtttcttggttaagttttccactcagtcttctagataatttgtggaattttagaatgaaatatatatacatacaacacatgtacatcaaattatataaatctatctccttgacatttttagatttgcattaaacctgtatattaatttgtagagaagtgaagttatctaaagctcagtgtttccatccagccacatgatgtacctctcaatttcttcccatctttcaggtcctttagtgaaattttatggttttcttcagagagtttccacatacttcttttcaaagttatctctaggtactttataactaagattttcttactttcatattttccaatttgatatcactggtgtaagtgaaatctattgatatctaccatacttattttgtatattgccacattatttaactctttttaattctaataatatttaagttgaatcagtgcaattttttagttcaataattaaacatctgcaaatgctatattgattttttctaataccttggtttgttttggtagagtttttgccagcccctgagatggtctcaattatccttaccacctgatgttcacagcattatgaagtgcccttccacactgaaccagagcttgtcagtgtgaccagtagaattcagcaggagtaacaatgtgtgacttctcaggctaagtcataaaggcactgcagcttctacctcagtctcctggctcccttgtttgtggagaggcagctgccatgctttgaggatgcacatgcagtcctgtggagagcccgagttgctagctgatacctccatctgacagtttccctagtttgccagccacactagtgagacacattggaagtgggtcctcctgccctagtcaacccatcagatgacagcagccccagctgacatctgacttacaaccttctaagagatccgaagtctaaacctgccagccaagctgctgctgaatgactgaccggcagaaaccacgagagactattaaatgattgctgttttgagtcactaaattttagggctgatttgttatggtttattattaagcaacagataacacacagaatttcaaaagaatgtaagtgaaaaaaatccaacaattattgagcacttactatattctagtaacagggcttacaacaatgctaatgtggacattcctatttcagagatgaagatatagaggctgagaaatattaagttaaagcacggcttctcaaccttgttttacattttgagccagataattctttgttatggcggttgtcccatgcattgcagggtttctagcttctacacatcagatttcagtagcagtcacccaattgcaaaaaccaaaaaatgcctccagacattgccaattgtctcctcagaggtaaccctaccctcacttcccgcccccagctttgtattcttgcatgcattagactacttgtgtgttatcagacagcctagacttttgacaacagttaaaaaggctctaggaatgccccagttttctacttcctggttattctgtaggctctgtggtggggtattcccagatggatggtcttgcctttcaattcgtttatttcctccagcactccaatcatcctctccagcttccttcactcctatattgaaactgtcttcctaacccaaatatgcttcaagtgtgaatttcacatgtgtctttctggttccgacaatagagtgttattctatgttagtgaaatgccatgggcgtgcatttgaggggcacccaggccttgtctcatagaaaacctcctggaggaatcaactcatccagtgaagtgtgtgtcagggaaagggatcgggggcaacttcaaactgctgcagacaaaaagagcagaatatgtgagggttctgtggccaataggagcatggcacatgccagctgtgctgtattcagtacaactaaaacagagaatatttccagcatgcttgttgtaggagatggcaaggtgtatgaatggcaggcaaactgaagaagtaagtagaagcctgacaaaggaaagcagtagatggtttccagagatgtcaagaggtagatggtcagaactttattaaatatttcagtggtgagggagaggatgaattaagaatggcactctgagctctgacatgagagagtgggtagagggtggcactgtttacttaaaaaaatgaacataagcctaggcaacataccaagaccccatctctacaaaaaatagaaaatagaaaaatcagcaagggttggtggcgcacactggtagtcccagtagctactcaggaggctgaggtgggaggatcacttgagcccaggaggttgaagctgcagtgagccatgatcacactactgcactccagcctgggtgacagagcaagatcttgttaaaaaaacaaacaaacaaacaacaacaacaacaacaaaacacaggtcaggagaagatgacacatttggagtttgtcatgcctgaggcacatgaagtggaaaagcccagtggacagttagaaatgtggatctgactctcaggagcccccagggattcatcatcctacagaggagtgtttctcagtgttggcactggtaacattttggggcagatacagctttgctgtgaggctgtccagggcacagtgggatgtgcagctgcatccccggcctctgcccactaggtccagtagcatgtccaagtcatgacaatgaaacatgtctccagacattgccaaatgtccgcgggggacaaaatcacccccaggtgagagcctctgggttaaaggtttcacagggaataaggctgctaggctgcagatctttgattcaaatcttggtggcctatctctaaactacagcccttctccactgagccatgtgtaaggatccctgccacacactgttacagaacactgcgagtctccttctaggatttatctcattggcttatgtaactaattctgtagctgagttggaaatgtctgtttccccgaggagaaagtaaccaccctgagggcagagactctgcacacacaggatgcctagtagagtctcttgcactttagagagactcaatgaatattttaaaataaatgcgtaaattataagttgttggttttgatttactaataatttaaagggattctagcaccaatatgaagtggcaagtgttctatatttgtctgtgataactatcaggtgaattttgtactgcttgaaagtttatcagtattcatttgtgaaatggtgtggttctgaaaacttcattaaaaattatctggcaagttttatagttatgttcataacttcagtgttttgaaattttctacttcttaagtatggtaattttctaaggaaattaactcatcaagtctttcaaatatattattaaaattctgaacataaaaatttctattaatatttctctttgaactatacataattttatattccttttctgattctaatcatgaatatttgttttctcttaattagctatgccagagtgtttggtcccccaagtaaatatttttagatttatttatcaatgccactgtttcactatattttgtttatagtttattaatttcttcttatattttagttatttaatttttctttccctaggtttctttggctgagggttttctaatttttttttacttgaacacagttattttcttttctttcatcttaaataataaaaacatacagaactgtgaatttttccctgtaaataattttagtcacatctgctaagttttaatgtataattattatattgacattatttcctaaatagtcaaattatggcttcaatttcccctttggccaatagtacttttcaatctgaaaatgtttgaaattttaaaaatcattaatgtctaattgtattgtgatcggaaaatgtgccttcaataatttctcctttttgaaatttattgaggatgttctcatgccccagtagtatattgctaattgtatagatgctttatagatccttgcaatgatgacatagtctatttcatggcaaaatggtcagtacaagttttaattgtaaatattatttgattttatgtaatattatttatcttttttatgtgcaaaataatgaattaaaactcccaacacaattacatacatttctgctaacttctagcagtttttgctttacctattttgattctatactattaggagtgtagaggatcatggtcctttgtcactgtagattataacttcatcaatacagaataatcaactttgtcccattaaacacttctcctcctcaaatctcactagatttcatattaagctgacatttatttattttacttttatgtctttacttttaatcattccttttgcgtgtctcttttaaatagaatatagatgaattttgtagtttggtccagtttgagaatttttctgttgttaggtgatatttatttacatttattcttgaaggaggtgtgcggtataataaaaatatatattttatttggtctttatttgttcctagttcctggcatagaagttcttaaaacatttcctgaggccgggcacggtggctcacgcctgtaatcccagcactttgggaggccgaggcgggtggatcatgaggtcgggagttcaagaccagcctggccaagatggtgaaactccgtctctattaaaaatacaaaaaattagctgggcgtggtggcagatgcctgtaagcccagctactcaggaggctgaggcagagaattgcttgaacccgggaggcggaggacgcagtgagccaagatcgcaccactgcactccagcctgagtgacagagtgagactctgtctcaaaaaatgaaaacaaaacaaaacaaacaaaaaaacacttcctgagtgagagaagtgtcttttgttactcataatcagccccttcacccctaccagagtttatggtaatgaggtagctcttggtaggtccctagacagcttcaggatggggggctgtcaacagaggaaacaaccatgtgacaagagggtggaaatttttagcccgccccttgaccttgggagaatgggaaggggtagagactgatccaacaatcaatggccagtgatttaatcaatcatgcctacataatgcagcctccataaaaaaccctaaatgatgtggcccaggggtgctcccgagctggtgaatacacctgggtgctgggagggtggtgcaccccaccctccagaatccacaccccccctcaagtttcctcttcatctggctgttcatttgtacccttgatgagaagctgtcatagtaagtatagttcttccctgtgttttataagtcattctagcagatcattgaacctgaggggggagttttgggaaccttcaaatttgtagttgcttgggcaaaagcatgggaatcctgggaaccctgttttcggctgatgcctgaagtgggagcagccttgtgagaatgtgcctttaacctgtaggatttgggctaactccaggagtgagtgccagaattgatttgaattgttggatacccagttggtctcagggaactggagaattagtgtggaagaccagatgtttggtgtcaggagtggtgtcagaaaaaagacaacaaaaggtgttttaaacttattagcatgaaccttatgaaattgccatttttgtaggtcaagatagcaaagtatgaacaattttatacatttcaacataaacttatgttatctgatattatagcttctctttttatgcttctgtaataaaatctgtgctcttctttaggctgtctgctctcagctacccagcacaaggcaggatgacacttcctggcccgctgtggttaggagggccatgggaccaattctggccaatgagttgtaagcagagtaggtgtagctttcatgctgaggtgtttaaatggctgtgcagaaccccagaattctccttacctctgagatggaaactggcaacctcagagatggtggctgtcaccaggaccaagagcggctagaatgagcagagctaccctcccgacccatagactaggacaatgagcaaaacatggtcacctgtttaagccactaaaatatgagggttgtttgtttccatgatagaagctagtgcatcctgacctactttctgtccattttgttttcctaatttcttgactatatgaaaatatacttttgcatccatattatcaagttttcacggtaaataagaaaaaatggaggagcaaattcagtattccaagtcatctagactaattatcctcagatattttagaaggggaagcagactgcaagaactatttctcgacaatagcaatttttttttttttttttttttaaaccgagtctcactctgtcgcccgggctggagtgcagtggtgcgatctcggctcactgcaagctccgcctcctgggttcacgccattctcctgcctcagccaccggagtaactgagactacaggtgcccgccaccacacctggctaattttttgtatttttagtagagacggggttcactgtgttagccaggatggtcttggtctcctgaccttgtgatctgcccgccttggcctcccaaagtgctgagattacaggcgtgagccaccgcgcctggctgacaatagtaattattttttacaaaagacagatgctctattgaagaaaaacaaacataaaagcaaaatgtagagatttatggctaaagtcagtgtggtatacatagaaaatggaatactattcaatctttaaaaggagtaaaattccgttatttgcaataacctggatgaacgtggaggatgttcaggttatatgttaagcaacatagccaggcacagaaagacatatgctgcatgatctcacttatatgtggaatctaaaaaagtcaaattcacagaagcagagagtagaatggtagttaccagaggctgggggaagggggagggatggggagatgttggtcaaaaggtataatgtttccgtcagttagaataagttttagagatctattgcgaagtatggtgactgtagttaataataaggtgttgcatatttcaaaactgcaaaaacagtagattttaaatgttctcaccacaaaaaataactatgtaaggatggatatattaattagcttgtctgaatcattccacaatataaacgtatataaaaacataacatttcatcccgcaaatatatatttgttgggataatcccacagttattatttgtcaagtaaaatttttaaaaattagagatttgtgcatttttatcattactttgtgatttgtgaatggtaaataataaaattaagaggtaaggagtggagaaacatgaacttaaataaaaacaataataatgctagaaagaatacaacaaatcctgcagcctcttcttctttctctttctttggtcccctctctctccctccctcccttccttttgtctccttcccaccttcctccctcccttcttctctgtttcctagtatttctccttatgttttccttcctattaacagagctcagggccaggagcagtggcttatgcctgtaatcccagcactttgggaggctgaggcgggcggatcacaaggtcaggagttcaagaccagcctggccaatatggtgaaaccctgtctctactgaaaatataaaaattagccggccatagtggcacacgcctgtagtcccagctactcgggaggctgaggcatgagaattgcttgaaactgggaggcggaggttgtagtgagccaagatggcaccattgcactccagcctgagtgacagagtgagactccatctcaaacaacaacaacaacaacaaacagagctcagattattttagcaattccatggcttgttctgcagtgctatgctgacaggaatatttgtaattttctttaattcttttgtgtttaataagttaatgaaaacccccatctctatgtccttaagaggcaaaaatctttgaagttttgaagcttttagatgcttcaataaaattcctgtttcctctctgagaaaaataacaatttttctctctttagaatgtggaaattgaactgtattcttttcatcgcacaggtaagtaattgcggaaaatgcagataagaagaaattatgcaaaatcctgctagccatcataaccactcttgtcattttgatatcaattcttttaaatataactattacatacaaatgtgtagccttctgttttcaacagacatgtgatgtgactgttcataaatgggtggaagcgacctccttgtactcagatcaagccatatatgtgtcatgtaagagtctgaggatgtgattgaatggcaggagggcctggggactgggaagtagggagaaggtggaagtgcaaatggacaaggatagtggcccagggctgtatactttacttatagaacatctccggtctatttatagtagctattcagaggaagcaaaggaggaaatggcattttaaatggtaaagttattatttttaatagtttgtttccccctaggaatgcatgttaacctcattactgcattgaagactctttggaggagaaaactacttttcatagcttagtttttgtgaggtaactgctaagtaagtaattatagattcatttgaaggcatcataacaccagggaaagaacatagttttaaaatcatgaagactgggtctgaatctcatctctgcctccatagctatagggtcctgggaaagcccaggacttatccctgcagcctcagtttcatcatatgtgaaataatatcatcaataccttgtaagctgctgtgaatgttaaattagatgaaatctataaagtggctgatatacagatatcattcaatgaattatagccattgttttcttttttcttgtagcctcaatatttattgatttctttaggttatacacacacacacacacacgcacacatacatatatatatattttttgagacagtgtctcattctgtcacccagggtggagtgtagtggcgcaatctcagctcactgcaacctccatctcctgggttcaagcaattctcatgcctcagcctcccaagtagctgggattacaggtgtgttccaccatgcttggctaatttttgtgtttttagtagagacggggtttcaccatactgtccaggctggtcttgaactcctggtctcaagtgattctcctgccttggcttcacacagagctgggattacaggcataaaccactgcactggaccaggtttgtaattttttactgactaatttggttaagcaagaaataagtaacactgaaaaattaaaaaaaataaaaaataaaaaataaaaaacaaaacaaagcaaaaacctgccagttactcttttgttatgagacagaagcactcattgatgggccccttactgtcacaataaagatatgattgatatggccaaaattcagcaaccactgaaatctgaattttcgctttgtcagtagccacttggtaaataacatcactgtcacagaacaaaacgctttccagtttgtcccctgctggtgtgcttatcccgtgtgtttaactgaaggtaccatgtaattggggtggagtccgtgccacatgttcctggagttcagagctgcccggtcctgtaccaggggcagccaggtcactctgcaccagctgcatttaacccccaagggtttaaactgccttgcacttggggcagagcttccaagggccactagggggcagcaaacatgtgagaaagagcaaatagaagagaacaaatccgacgaggaagacatggaagtcatactcctcaggaaaaaggttctgccctcttcaaagaacatgcttgggatgctactcacagcacagcaacagaactggagctctagacataaggctcctgtttaaggggaaaaaaaggcaatttctttacatcaagacaaactacttttcctatgccaataattttcaaatattcatcactagccataacttctcttatcagttccaggtccctatggccacttgaatgcctcagtctcctgcgactcatcctcattatacttccttgtaagcaacctagtgcagagcccaagaacttgttccctggagccacactgtctgggttccaatcctacttcagcatttaccaattaatgctttgggcaagttaattaatttcttaatttcctcatctgtaaaactggggcaaaaattgtaccaacctctcactcttgtaaaagaggttaatgtttgcaaactttcttagaatagtgcttggcacacaataggcactatgtgaatgcttgttgaataaaaataaataattcttgctccttttcacagtttccttcatcagtaaatggcaccttcatccacccaactagatgaaacctacaagtcagtcttgatacccctgtgtccctcatctcccacatccaagcaatgactaagtcctatgacttctatctactaaatcactaaatcaaccttacatctgtccacctctctccatcttcacagataccatcaactagtccaagccaccatcatttctcacctgagccactcctatggcctcctggtatctcctcagctactctggtgcctctctactttatccagaatttttcaaacacaaatttgctgcttcatgacagcagaagtgatctgcacagcttaaaacacttgaaaatcttatttttcttagaatgaaaacaataatccatattgtgtcctataatggctagtgtggctcatctcttttccttgctccctgtgttgcacctatcttgccacttttcggtctttccacgtgaagtgttttcttttgcaatgggggctttgcatataccaggaacatcttcccttctcagtgcctacttaacatctcacgcttctgatcttagttcagatagttctttcttcagaaagcctgtcttgatcccttaaccagattgtaccctctattatctgtcctcagagcatggtgtatacatcctccacaaattctttctcaactggggatgcctttccattgcctttaggcattcattgttctgataagaagtcagccataattttttgtcattattcctctatatgcaacatatcattttttcctgtggttgcttttatattttctttatctttggttttcagaagtttgactatgatgtgcctgggtgtggttttatttgtgtctctactacttagaattcactgagattcttgaatctatagattgatattttctcattgtatcccatatatttcagctgttatttctttaaatatgttttctggcccattctctctctcattattctaggattgcaactactcacattttaggccatttaataggtcactgattgatgatgggtaaagtgtttttaaatattttttttccctgtgctttagtttgaataatttctattaaccattctttaagttcactaatcttttctttcagtttctgttctgctgttaagcctattcaatccattatttacatcagatgtttatttttactctagaatttcatttgtttcttttttatggctcccatttctctgttgtaatcccccaactatttattcattctggccatctttttctgaacatccttgaatatatttacagtagatgttttaaagtctttctctgctagttccagtatctgatccatctgtgggcctgcttctgttgatagtattttttctatttatttatcatattatcttgcttctttccatgttttataactctaaaaattatatattgaacggtttttttttttggacatggagtctcactctgttgcccaggctggagcgcagcactgcgatctcagctcactgcaacctccacctcctgagttcaagtgattctcctgcctcagcctcctgagtagctgggactacaggcatgcaccaccacacctggctaatgtttgtatttttagtagagacagggtttcgccatgtcggccaggctggtctcgaagtcctaaccttaggtgatcccccctcctctgcctcccaaggtgctggaattacaggttgagctgctgctcctggccaaagtggacattttttgtagaagaatagtgcagactgaagcatactattgtttgttttgttttccttgagagtgctgactttttcccatatctgggggctaaggtaaaagagatcattcatatttcactaagagttgaattggtaaaaacaaaaacaaaacaaaacaaaacaaaaaaaacaaactggggtgcacttcccactgctagatgtagggattttctatccaagctttcaccctacagaagccattccctaccatcagcaatgtaactgttgcccaactcaagacatttgcctctgttagctccaacaaataaaaatatgtctctttttgccaaccaaaaacgacagggccaacaacaactctataagcacaggcaatttaacaagtacgttttcagttagtgccatttttaattctaattatcttctgttaggtaaagtggaggatttctagctttgctgggccaatacattaaaaaacattccaagtctgtcctggttgtctatattcccattcaagtacactggcttaatccagttttggagacattcttgaccaggatctacctgtaaatgaaatatataattagttccataatctggtatccatacgcctctcagtcgctttattggcacgctacactagaaaaacatggggcttggggttaaactaatgtgggtttgaatgctagctccactactttttaatgggtaattctttttttttatttttttattttttttattttttatttttttgagatggagtctcactcttttgcccaggctgaagtgcagtggtacaatctcggctcactgcaacctccgcctcccaggttcaagcgattctcatgccttagcctcccgagtagctgggactacaggccatgtgccaccacacccggctaatttttttgtatttttagtagagacagggtttcaccatgttggccaggctggtctcaaactcatgacctcaggtgatccacctgccttggcctcccacagtgctgagattacaggcgtgagccaccacgcctggcctttactgtgtaattctaacatcgcattaaactttctgattttcaattttattatctataaaatagagaagacaatatcagattcataggattgggaagactaatgagcatttaataattaatgagcacttaatgaaaacctgccaagtgccaggaatgtgaagagtgcttcacccatgttatcccactgaataccactattcttcttcttatttctaattgcatatgaataaattaagacatagagaggcaaaataacttgcctcaagtcatctaagtcagcagtggtaaaacatggatacaaacctaaaaactctgagctgagagtctatactctttagcccttgtgctaaaattcctggtactctgttgagggtcacctcaacacactgcttttactagtaataattaatagtgttaacattaaccacacaaataaaataaatcccccatcaagtctgcttggtctagaggatggtgcttggttttggtttttcacctcctctccactggaggtttgctgctacccctccatcagagtgggaatctgacccacccaaaccccatgcctcttgcttcgggccctaatctgccttactaatatcagccttcttaccttgaaggcagaaccctgttttactgcctacgttagtgattcccagagtgtacccaactaatcatgagttactaggtgataggttagaaaaatgtgatataaatgctgtgtttcaaaatccccttcttgccacatattagactcagagaggtcctgcagcaaatacatcagatcaattctgtttaacttggtgtttcccaaatttacttgaccacagaactctttcatgaccaactactaatagctcactttggaatattaattaacatatacactgtatttgtgtgaacatctctttgtgtcttgtgcattcgggtggccccacagcccttagtacaataatcagttaaggctcacagaatgaatgaatgaatgatgaaaaggatgagtgagtatctaataacaatcattgtgacactaactgttaatttgggaacggagagagagtgggcatttttcttttttgtttcctgatttctgtatcaatattctaaaatgcttagctctcaagttaaaattaagtcttacttggcataaatagagttgaataagtgattgtcaatacatggtttatataccttactttctttcttttttgtgagggaggttgttgggggaggggaagccagatgcagagaagggggatgaagaatagcaggttctgttctaggaaatattgcttttagtgaagtagcttttacttatcttatcactcccttggcacacattaagctaatgtactacttattaattattccagtatttcaccatgatattattaatcagaaattactttgatgttcatcttttcttttctttttttttttttttttgagatgaagtttccctctttttgcccaggctagagtgcagtggcgcaatcttggctcactgcaacctctgcctcccaggttcaagcgattctcctgcttcagcctcccgagtagctgggattacaggcgcctgccaccacggctggctaattttgtatttttagtagcgacagggtttcaccatgttggccaggctggtcttgaactcctgacctcaggtgatccatctgccttggcctcccaaagtgctgggattacaggtgtgaaccaccgtacccagccgatgttcatctttactatgtttttacttggcttgaactataatgctcccttttcacagtgctccatgagatcttcaatgacaaacacagtttcaaaacccacatactcacttttcacatttactattttggattgtatgataaagcaaacagccaatcattattctttgccttaaagaatctcaaaacatttacgagggcctactatggacctagagcgtgagttacctatccaataatagaagatggtgtgtgagatggtgagcagcacactttaaagattaaaaggacagttttagccatgacaaactttagcttgttttatttttcatacctcttcatattaaataattaggtcagattttcttggaagcagatgacataactttttataataaggaaaagaaatccttccttctcacctaattaactacaactcacattttagttccttaacttcagtccaaataaagtcctccctcctccctcatgcatgctcatagagctgtcttctttcccttcagaatatccacatttcctgtgagtggaatggcttttctccttcactaaactggagtcctgttaataagctggggctggcttggctcatcatgtcatctcctgcacctggcacagtgcatggcccagaagagccacgtcacaaatatttatgaataaatctgttgaaaaatacatatttattgaataaatcttgtttttttttttttttttagacagagtttcactcttgtcacccaggctggagtgcagtggtgcgatcttggctcactgcaacctctgcctcctgggttcaagtgattcttctgcctcagcctcctgagtagctgggattacaggtgtgcaaccatatccagctaatttttgtatttttggtagagagggggtttcaccatgttggccaggctggtcttgaactcctgaccttaggtgatccacccacctcagcctccaaaagtgctgggattacaggcatgagccaccaggcccggcctgaataaatcttattttatgcaacggtgactgaagttatcaaaataaggtaatgtagtacctggaacagtacttgactctctccagctatttttatttcaaactcttttgcttggaagtagaattccagatgaggtattagcatagttgggttagctccttggatcacattgggcacacttgtcaagtttttgatgccctaattcttaaataacatagagtttgtgttctaacatctaattgtcttaattgactagggcattgtgtttcctcttctaaacttgtaattatggatcactggactgagtgtaaagtagctattgcacagcccagcaaggaatgacaaagctatccttagtcaacaatagaaaaggtgatgaggggagcaaaccaagatggcagcccctagtgggggtgattcaacatcccttcttctagtgacataaaagaaggttagggtgtataaatgactctagcaaagacaagtttagatagatacagttacagttggttctgtggttttcaaaagtagagagtagccatctctctgggcattacgaccagtgctggaagcgaagagagatggtaattaaactgaggtgcagctgaggaaattcctggctcctcatacactttcgtatatcatatctaagaaagctggaaggctgaactctctgctgacaatggtgggggaggcaagggggcttttgttgaggttcctgctagtatggtgtcagcagattgtatattgacttaatgtttgatttgtgtgttttccagtacattctcctgaactccttgacataactttccagtaaaagtgcttgtctagtaagtcagatatttccaggagggctgggaaagtggaaccatgccacctggcattatttcataaaattaattacctgaacgaattcatgaaaaattgcaaatacaagtgctacaatatagagttactgggccatgccatatttcttctctctaacaattacctgtgttattttcacttaagtggggcttcattattttactctcagtggtcattgattctccactggaaaaaaaagatcttctgtgtttggtctcctgggatttgaaaagacctgacgataagactaaattggagcctgactcaggaaacaaagacgcttcccaggcaattgttcatctaatctggggatattcattaccagtcaatcaagatttgcctggaaaatttcccttaatatgagctttagatagaaagactagcagtcagcacagactcagagtccagagatctaaacctcactcaaggttgcacagtgggcagctttaagcaagcccctcacttctctaagcctgtttcctcagttataaaatgaatgtattcatgtgatatctctgcatatctgtctttttttttttctgagacggaatttcactcttgttgtccaggctggagtgcaatggcatgatcttggctcactgcaacctctgccttccaggttcaggcgactcttctgcctcagcttccccagtagctgggattacaggcacctgccacaatgcctggctaatttttttgtatttttagtagagatggggtttcaccatattggccaggctggtcttgaactcctgacctcaggtgatccaccctgctcctcggcctcccaatgcacatctcttaacattggagggaatgtcaaagttgatgatatatttaaagctcttggaaaactgaaggcacggaacaaaactaagtcagagttattaaaaggtggaatcaagcttagaacagagctatcagcagccataataaaataatagggtttattctgacaatctatgtttgtgggcttctaaacagatgtgtacataaagtaaggcttgtatttgagaaataaaggaggctagatttgagtttattcagtgagtgtgtaaatggagcctgcatcctcgccatcaccaccaccatggtcatcaccgtcatcatcactaccaacaagtgagcaacaactatgtgtaggcatgtggcaggactcttccttcccttcatgctaccgttcagttctctcaaaaactcaggaggcttctctgttactgtcctcattcaagaaaggaggaatgagaggctccaagaggttgccagtggttcccgaaacgggctgtgcatcaaaatgaccaggatttttttttttttttaaagtgcggatgtttgagccttgaccagctactgaaccaggtaaatcccaagcagctgaaaatccatgtccaagctccacagatgattttactgagcagacagacttgcaaatgactgggctaaataacttctccaaggttacgcagctggaagcaaagttgaactctaaccaaggttggccactggactcccgtgtcagctcttaaccacttttgtcttgttcgattggtggttaacagtgtatttaacaacaactgtcttttattgactttaattagtttttccacattctacatctactgttaaactacactgcaagactactttcccccagtaaccatttaggtgttttataataaatgacttagcccccaaggatcttttatagtctggccaactgctagttatatttacctatagatggagagtgtaactatccatgatgaaggttacaaaatgcgtgggtatgactatgggaactcataaccaatgatcaaatgacatctgtacattggtgaagggagtttttaatgagaggctgggatcaatgggcccagaggtagctgtgaaagcctctgcatggcttgggccatggtataagccagggtgttcccaacttaaatgtctgcatgaattacctggaaatcttattaaagtgcagatattgattcagcatttctggagtgggctctggagtttactttttggagctcccaggtgatgctaaagctgccagttcttgggtgtaagtacacatggccctaagacagctatgaagagatccactctcagcagaagaaccacaagccctgggagtgagcatcagacaactcctcactgacacggatactgactgggggcagaaacctgggaaggatgctcagaggtgagctactgaaagacccacgtagcaggggaaggcattgcccagagaaaaacctattatctatcatggagtaaggaagggtgatgagtgtaagtgaaacacttatatgctgagtagagggctcgcaggtgtatggttctgatagtgatgcacatttggaaatattctgtgtgttaagggagtgaattctagaccaacattggttgaatcagcagaaacaggaggaggatactgctggatgctgagattcttacaagtcaagccaaggaccccgtggaatgtacccccccagagcactgggtccagcttggatgaatgacactgcctcttgcgattgctgaatttctacacctacctgtcaggtaatagcattctactctgaacagccacatggaaataaataaacagtaactggagcaaaataacatgcgcttcagctaattccatttggggaagaaagagtctgagaaggactttgtgggtggaattgtataagggagaaaagaggaaataaccagagcatcggctgggttttaattaggcaggagtgtaatgaacccgtaactccaaaagcatcttagctatttagacctgtgaatataataagtagaaagaaactagattttgtggccaggcatggtggctcacgcctgtaatctcagcactttgggaggccaaggtgggcggatcacctgaggtcaggagttcgagaccagcctggccaacatggtgaaaccccatctctattaaaaatacaaaaattagctgggtgtgttggcaggcactggtaatcccagctactcaggaggctgaggctgaggctggagaattgcttgaacctgggaggcggaagttgcagtgagccaaggccgcgctatcgcactccagtctgggtgatagagtgagactccatctcaaaaaaataaaagaaaaaaagaaagaaactagattttgtgcatccacattcagtcccctgtcccactaggctaggcaaaaggaatctgggattgcagaaggacagggctcattcttcgacagacagcttctgtgacttggcctgggactctgatagcttggcaccttcaccaccccttgcagccctcaaggagaggcaaacctcaataaaatgactgggagagaaagccagaggaggaagcatccacagggcccatccagtaaggggggtggggtccctgacaccagaagcattgctgccctgggagaagtaacgaatgattgtagggccagcaacaaaataggctaaaacacagctgccttcagaggaggtgagctaagtaggagttgtgaggatctgaaggtcatatgccctccggcctaacagggccctcctcactcagctctgtggctaagcagagggtgggcccaggactgtaggagcttttgatttttttcaagagaagctaagattctgaatttttacataaaattgcctgtttttatttaaaaaatcattaataaaatcaaacctaaaaaatcaaaaagcaccggcagccaaataaaataaacttgcaagggagcatgagttggtgacctctgggctatttttttacgcaagttcagagagacagcatgggtttttagattgtacccagaggcggaagtacaaggcagggcaggtacacacaggacgttcctggcgctctcttctccaccttccttcccctgtcctctcttcttagcacttcctagggctttacattgtgttctacacttgtgtgggttcttcattttctgacactccttctcacagctagaataaaacctccaggaggccagagacctgtttgctaacagctgtatctctcattttttgactatatctggtacacagtaggcgctcaataaatagtggcccagttgaaaaggaatgactggtccatgctcccatctacaacatccaagccaggctgagttggtgtcacagacccctcatttcagggtctgtcatcgaattcagagtagttcatgaggctgctgtggaccagagtgacccagcataatccctatccagaattttaagacaaatacaatgctaccaaatccagttttattttgtatttctgtgtgtgtgtgtatgtgtgtgtgcgcgtgtgtgtgtgtgtgttttggttaaaaaaaatctgcaagagaggaagaaaaatacacatccatccgtggcgtatattcagctgtgatcatgaaaatactgagttattgtctgaaatcgtgtaaagcaagaacctgcattaagaaagcatagctaagcaaacaggcccgggacccatatctgctgacataccgtgctatcctgagactgccgcagaacatttgcaaagccgtgttctctaagaattctgcacagtgcaaacaggcatgaggggaaaaaatactactagggaacttctagttcttgctgaaaaggaaaattttgagctctaaatctagcactaccaagcaagagaggcatctgtggctgcatataaagctggtactcctttgcttgaacaaaatccctcagtatacagtacttaaaataaacaaagctcaaaacagtcagctacacacgcatgttttttggccacatgctgcctgaagaaaatagctatgcagtgtgcatgccctagtttaaaccaagcctgaataccgcacagtctcattcctctcccggtctccttttctagacagaaatacatttccctttaatgtacaagtgagaaaaaaatatgtttaaaagacagtccaggcccttgataaaagcacttactttgaaagaacaggacagactacgtattcaaaacaagagcgccttcttaaagtgcaggctcagaagttgttcaatggccaggaccttcatttgtgctggcagctctggtcctgctgggcatggttaagggcgaggctcgcagcccgcacggcgtggtccttcaggggtgctgcgtcaggctgacgctccggaacagttactgggacaggctgtgagcgactcaccaggacagttttatttctgtgctgagcttgctgcttcctgctgggaaaatgttagtggcggagtcacacccaggtaccgggccgcagccaaggctccgcagatgacccgagttctgatggaggtggggacgggcggcgcccggcacctagggggcagagggcgagcaatcccggaagaagactcacgctaggcgattggtctcctcacgggagctcctcgaccctgccaagggcatgactcagctcacccagggcagtgctggaccacactatttatcccctaaggtccaggaaagccgagttcaggcaatgactggcgaagagctagaggggaggcagggaggcccctaagtcactggggtctagaggttgtggcctcacatgcacacagattcagcccctttctctttggtagctgttgcaatagagtggcctaggactccgaccctgaaaactatgaggagggggaggggaaacaggaggagaacggggagatgggggaagagggacaggagaaggaggaggaaaaggaggaggaggaggaggaggaggaggaggaaaaggaggaggaggaggaggaggagggagagtaaagcagccggccttacaatggaggttccaaatcaataagtgtagagaattaatgatgtcctgattttctgttggtgtcaggatgacaaactgcagagttagaagagaggcttctcatgactttgtcaatttatatctgcacaacattataaccaaaagcaagccggagattagtggaagtttagggaagctggctgtggttctacacctctgtctcctgatacgttctagacccaggatgtgtctagatgaaggatgtggtggggcggggtatggtgtagggaacctcaggatcgttttcagtttggaagatttaagcaagaacataaaagttctggagccacagattttctttattgtgtagagtatggggtgaaggagactgatgtaacaatgcccattctgtgtcaggagaggggtgttgctgtcaggagccctggggctccacctcagccctgcgatctctgggtgatctctgatgacacacaacctctctgggctcctctctctttcttcttctttctctcctctcctcacctctcctcctctcctttgtctttctcttccctccctctctccattgttttccctccctccctcccttccttccttcctctctccctccctcccttcttgcttgctttcttctttctctctttctttccttccttccttcttccttccttctttcctttctctttttctttccttccctccttttttctctctcttttttcctctttcccttcctccctccttccttccttcctctctccctccctttcttgcttgctttcttctttctttccttccttccttcttccttccttcttacctttctctctctttcttttctttccttccctccttcttttctttttttctctctcttttttcctctctttcccttcctccctccctccttccttcctttcttccttccttcttccctccctccctctccccttccttcctccctccctccctccctctccccttccttcctctctctctctctttctttccttccatagcatcttgctctgttgcctaggctggagtgcaatggcacgattatagcccactgcagcctctaactcctgggctcaagcaattctgcctcaaccaccagagtaactgtgactgcaggtgcactgccatgcctggctaaaattttatttttattagagatggggtctcaccatgttgcccaggcttatatagactggtctcaagctatcctcccgctatccccctcccaaagtgctggattacaggcatgagccactgtgcctggtctgggcttcactttcgacatgagaagttgttatgatccctcaaattttagtgccctattcttccatgtcctgccatctagcacatgccctaaacagaaggaaatcaaatgaaccaagttttcctgcatatttcttccattgtcctcccttcattcctctaccttaaggcagtaaattccaccaaaggatcacaccttggcattgtagtcaaaacagagctaaactctgaacagcccagaggaactgattttctagtctttggagagtatagcagacatggagctgtgcttctcttttaagaacagattcattgcctagttgtcaggatgctgtcagctgacagcttccagccaccaactccttccactccacctatgtatggaggggtgctcaggctctctttagggtgccttggcctaacattaagctagttggggatgcaggggtctagccattcccacccaacactgggtctctgaacaggcagtttttgctcctgagagtccactgggctggcagaggctctgccaggctgcagcccccacacaattccacttcctccctttccctgtcacaaacgttagttctctcttgccctctcaggggacctaacagacacagagatgccagtcatttgcaatgcatgttttgttttttctccacagagggcctttgataggcttagaaagccatctttgggtgacaagatacttgtctttgtagcataaagatcttcagcacagatttctttctcattctcttattcacagatgtggaaaggcttagttcccgtcaggtctagctagtgtttctcaaccaggagtgcataccagaattacctagagaccttttcagtgtgcaactacacaggcttcacgtgcagagctagacttggtggtttgcgatgtacccctggttgagaaccggtgtttatagcataaaattcttccttgtatgagcctctcccagagataagcattcatcctgctaaggatcattccagaagctgaaaatacattaagtggtcaattaaatgatccctagtttatttcctttcttttttagagacaaggtcttgctacgtcacgcaggctggaatgcagtggtgccatattagctcactgtagcctggaactcctgggctcaagcgattctccctgttcagcctcctcagtagctgggactacaggcacacaccatcatgcccagctaatttttttttttttatttttcatagaaatgggatctccctatggctcgggctggtctcatactcgtggcgtcaagtgatcctcctgccttagcctccagagcttatttccagatattttcataagtccacctagtagtgctgcagactcatttcagagcatgatgaatcttcttataaaatattaggggaaggtgtagggaactttgagattatttttaattttgaagatttacatgaaagcacagaagttatggggccatagattccctttactgagtaaggtgcggggtaaggagctttgcatttaacttccaggaaacctggaaataaggttgctgcatcctgtcctttcaggttccctgtgtcattgcaggaggctgtactgatgctcatgttttgtttcacaagctaagtccttgacagcatcagctgggatcccagtcttctctctcatgttacccagtgagaactcactcacataaatgtcaggggagaatacttggccttctgtttcctggatcactgaataaaatcccctatgatgatctgtgtgcgtatttggctttgctgtttggttccaggagttttatttcaaggcaaagcttgtatctgaagatgccatgagctgagattgtctaggactgagaagccctaacttcccaaggacactagtcctggaaagaagaaagaggcggcattcttcctgaatgtgaaatgcactcagaaggaactgcttggtatttaaaaactacttctcattctatctttaaagccaaagagaaaacaccgaagtccaaggggaatgcaaacagactgagtgctatggaaactttctcttagcaaaattaacgccttccccaagggatggctggagggtggagtaagctgagtgaactggggaaatcaaggctttgctgagctctgagttgtgaaaatggtacagaggaagtggctcctgagcgcacaccaagctgggatactcaaggagataaaggggaatttaagtgactgtgctgacactgttcctggatgtttggcagcacaggattaagtattaatttaatgcttccttaatccaacacatgctatgctcattctttaagtgcattaggcagaacttgtgaattaagagagctgccctctgcatgagtaggcagcagggccctgtggcagaggagaagctgcctctgcatgtgagcgtggcctcatcttcccgcccgctgacgcgtaccaaggcacacactgaacatctcagggcgtccctctccttcttgcagggttatttcaaggattagctgaatatgcatgtggatgtgcttaataaatttgcaaagtgctatgcaaatgtgggcttttatttcctttttagagaaaagcctcacatcaggattggctgagtattacccgagcagcacagggcccagtggatggactccagctcagacaggcagacctcagtgggaatcaatgctcctcagttacccactgggagacttcagagcagccactcaaccctccatgacccagttccctcgtacatcaaatggggacaatgatcatacctacctctcaggagaggagctcatggggagctcattcggcacaaaccatgattcatggtgcccagtaaatgtgagctgtgatgactgtaaacctgggctgtcaccaaaagtaaaaccatgacacagaggaaggaggaccattggcaggaagtcttggggagctggtggaaagtacttccagggaaagcaaccctgctgcaagagcccatcctaatgagccatcagcctcccagaggatggcctggctctgagtcaggaggagaagctgttgctcttgtctcaaggcctatttctgtctgtccatatcaactgtacagcaattacccatagacagcggagctctcagctgtaattctggaagtagcatcatagaatgtttccaggtacaaattcacttgtaacaactgtacgttcacatcacacaaggaggactccacatgcaaaaacatcatctcaaaatggagcacagtcgaattctggggtggatgcaggtggtggggagggagggtgatggatctcaaatgtccagccacacttgagataattcctgggctgggcaaccgcaatggccctaggctgaggcacattccattatgagtggagtgggtttataatggaatgacatggatggtttcttataatcagaaaagcacactgaccttcacactacacaggtgcagcagcataatgacccaccacgtgtacgcgcatcaattcctggggaaaagtccaacgaggttaacttagcgtgtatcccaagcaaacaaaatcagcaacattacccacacaaacaacattgtttcccccacccccgccaagatacctggcctgggcaaccgacgtgcaaaaggaaaaatcacacaaggaccacactcattttgataaagtggataaaaagttgcaagcaacattattctgtgccataagtaatttgatttgattttaaattttaatttaaggaatgagactcatgagcctagaatttttttttttctttttcaagaaacaaggatctggtgtgggtgtttgtggggaaagagaagttctgctctcccagccgtctgagaaggccagcgaaaagcatcctcacatatgatccactcctgaagctccctcaaccacaaaggaaggggaatctacagttaaactgctgaaaattcactgcctgtttcagtgcccttactccctcaggcatttactcagatgggaaagactcaagaagtgccatccccttccacttgttgtcctgcggagtgactgtcaccacaataaacttggcatcactggtctcaccattggcactttagagctaccatgtccaaaattagcatacaggacttgagcagagatgccaggcatgggacagttgctgacggcatcatctgtcagggccctcttaatccaggtattgttttggttcatacgtctttattctgattttataacctcatcttccttgggagttacagtcaccatgaaaataatcaatgtggcctgattccagaaaaaagcagtctatgatgtcagcattcccaaaccccgatgaaacctgaagctttgctgacaaatgaagtcgtgtaagaaacaagtagcaagcttgcattctgggtgcagagattatgttctcaaccctggtccaagcagatctgaatagaagacggagagaattcaacatctacgtactgagatcctgctctgtgtccaacgccctggtggacgctactggacttctcagtggtgacgcacaccgtgcagcacccttgctccttcccgctccctgccacagccactggcttcctggatggttctcaggctgccccagctctgccccatctgcaggctcccctgcactgccttcctccttggagaaggtccaactaggaaaagacgcaagaaggaacacactagggccatgtccctgcctctggccttagttaccatgtgaacatcgccaactctccaatttctgtgataggtcagagcactcatctgatgtccagacccagtccccatccactggagctttgcgcagccacccaagcaccatgcaagaaaaactcaggatctttattcctatgcccaagcttcccttaaaagtctagccttagtcatggttcctctgccgcttagagctccctgtcaggaacttggacagctttctttctccagtcctctttcttcatcctttttgtccaaccaagcactgagttcgtctgctcctacctcctaacggttctagaattcatctgcctctcaccatttctgcctcctccagcgtggtccaaacctccctctcccactcaactcccatggagcctaaccggcctcctcgtctgcacctttgctcttaatacagtctccataatggacagaacactttattgaaaaaggaaacctgatgtcgcccttccttgttttagtggcttcacacttcctttaggctaaagctctaaataccagtttgagacttactttatacaaacatgcaaagtggatctggtcctccctcctccctgacctcactgctgcctccctcctcctgacctgtgacactctggccacttgggaatcctacagtctccagaggcacttatttaccccttccttggagatgtcagtgtgctgtccctgctgcctgacctgagctgccgtcagcccttcttcctccacaccccccactccttggcctcccctgtgcttccccttcccccatgacagaggcctgggaatagtaccctgtagttattattttttgacagttttaaaaataattctaatgaactgtttatgtatatatttgtttaatgtctatcttgcaaaattgactcagaattctctgggagctggggctgccatcctcagcacttagcacagagcctggtatagggtgtgctcactgtcctaagccaaatattgatccaattaattaaacacacacacacacacacacacacacacacacacacacacacacatacattaggagagtaaaaagaagaggaaaaaagaccactcaaatgggctgtttagacattatctatttagcacttagtactggggataccggtgtatttcactttacagtttactgtaaattatttctttacagtttactaattgtttaactgcaaagcttgactctggaaataaaaaaagaatgagagcagaagtggagacttcataaagaaagtgaatggggatcaaaaaggatccagctccagctcctggaagcttaccccaccccaccaaagagaacctggatggaaccctctttcatcaggaataaactggagcccaaggaaatgaaggaatcagatggggaccaagtgacctgtccacacaaaagccatctgatgagtgcttctactccctgctcgcagcccaccttcagctacacagatctgcacggccccttgcttctgccatatgggatccagcctgacagcagcgaatgagtgcacagatttcaagtagaggaaatccccaggaaatggcaagggacagtattaggaatcgacaaagtactactttaaaataaccttagattagatgattcttccttcaaaggcacaactggtttacacacagctatacacagccagttcctctgttggactcaagtggccatgaccctcaggaaaatcctctaggagtgctcggcacagggcagcaggaagtcacgtggggagggtccctctgcagacccttgtggcacagcaataggagagcagggcggtgttggaggcccagccctgcctgaggccacttcttcataggtcctggctgccgcaccctgcttatgccctgcaaacccctggcacctctctaaagccctgtgaatcaaccatctgacacggcctgtcactactcatcaacgctgactggcagtgacaccacctctgaggcctgatgctctgccacagctgctaggtcacctgagtagagttaggattattaaaaatcaaatgaaccaagcaggatgtttctcctgggcaaatatttatctgtccctacccaaatgaactaagattaaaaaccaaatattagaaagcacgttacccttcagaccatactgtgatttatcataggctaaaacaaattgtttcattgttttgcttccctcctctttcattcggtctgtcgtctgataagtggaggattttttgaggaagaggtcaagatcattcatgggtggaatacataaaagctagcaatataaaagatgacatttatttatttattattactttatttgagacggagtcttgctctgtcgcctaggctggagtgtagtggccagatctcggctcactgcaagctccgcctcccgggttcacgccattctcctgcctcagcctcccgagtagctaggactacaagcgcccaccaccatgcctggctttttgtatttttagtagagatggggtttcaccgtgtcagccaggatggtctcgatctcctgacctcgtgattctcccgcctcggcctcccaaagtgctgggattacaggcgtgagccaccgtgcctggcaaaagatgacatttaaaaaaaactttttttcctaattatagaaacaaagtacatttgcttttgaaaagccaagccatacggacgacaaacaatatgatgaaaggtcactcagaaccccaccctagaagaaagccagaagtcctggttcgggtaaggttctcttttttatggggtggtttgagagaggcccagccagtgtgccgccttctgggagggacatgtccctacaggtctggggctgtaagagcgcatcacagctaagaagccctggagtggctggtcctcaaagggggcttgtgatatttaaaaataatttacacttattttaagtgggtgtatctgacatccccagaaatctggtcagctggggcaagtgcccctcacaaaagactatcattgtgactgtcaattattttaagttgtcctaagtatggacaattggcatttaggatttgttgagttccagcaggaggtgccaagctgtagagatatttaaagacatacaattcctatttcagtgaccccaaacccctcaaggaaatttacggcccgcctcttctatctttgccctctagggcaaagaccctagcacagtgtgcgccatctaataactatttgccgacagaccaaccaacccggtacatgaaggaagggaaagcctgtgtgtgcattcccatatatgtggttaattcctgaaatgtcacactagacacccttgcaaagacaaagtaagctcagttgcacatattttgaaggggatttttaaaacttgcttcttcttagagaccagaaaattacatttgctaatttaacaaaactattctttgttgcaagagcccaagaggtgggatgaagagtttcactagatcgtctcccttttggctgatgtcacagcaaatattcatcagccatcagccagactggatagcaggccaaaaacgtggccgtctggtctcacgttggaagttctgttttaaactttgtgaccttgattccatcagcatgagttggggtctgactgattttgttttgtcccaatctattgtctttcagtcccttgttttgatccaacatcaattttcaggagatataaaatttactgttatataacattatggtgttattgtcactgaattcattttcctgggaggaggtctctttatgatccaatacctaatagcatcatttcctgtcagcaatgacttacaatgccttccaaattcccaggcccctcctctatgacagaaaaaccctcttacattagagggaaaaaaaaggctttgacaaatagtccaggctttacttgaagagcatgaacttagtggtatagccagtgggctattcctttttaaagatatttattttactcatatatttttcattttcattcattcatacattttttcacttctctagcatatccatacggcgaaacaatgacacacagggagaacataaagatggcttcactttaaacttccacgttccctaacttcccatttgacactttcttcccaagctgagggagccatccttgtttgtagatagactggtccaaagatccagtttgtccctagaggaacagttctaactccataccaggcaacataaatatgaccacctgtgggtgtggccacctcctccccaggccttactcctcagactccaatttctgagcaccagagggaaaagtcacatgagaagtcaagctgggtcctggagccaaggtggtaagaacagggatggggacagcttctggacagcacccactctggtgccagcatcatggccatgagctgggacccctccccaccagtgccatccctcccaatgcagcgctttattgctgctcagcccagagctgtttgctttcttccctaaccttcatgtttcatctgaggcacatctgtggtgggcaaacacacgtaatagaactccatccttgaataactccacaacagagctgtcttctaagaataatagctaatcctagggtgttttcattaaaaacagatttcagtgacagactatcaaaacattttccttttacaaaaagcaatatgatggggcagaattatgcaaaggatacaggcttcactctgccctgagcaaccaagggccctctcccatcggcttcagtatctcatttaactttcctgtcatggatatgcaagcagactaagtcctactcagcgcttttgcaggctccaagtgggggcggcgggggggaaagactggtgaattgcatttctgcctctattttcaaaatctgtcaccagttatccttgaggggtggtttgcttgtgttcttagggagttggagaggtattatctagcaaagcaggctcagagtcacccaacatgcattgactgtctcccacatagctggcattgttttgggagctgcagatacaatggtaaatgctcatcttgctttacacatattaacccatttgatcctcacaataatctagcgaggcagttcctataactgtctacactttacagaggaggaaactgaggcatggagagtcactgtaatatgcccaatgtcatgcaagtagtaaggagcagaaaagcagattcagagccaggcacctggctccagagtgccaatgctcagtggtccactctgcaaagattagtgtggtccctgcccttcaggaggggagacacaccgaacagatgagctgaacacacaacaagatgttacagcattccatttaagagccgaggagggctccaggcaggtcttctccagtgatttacattttattttggtcagaaatacctttaagacactggcagcaatgtcccttttccccagaacctctgaagccccagcttccattaggcaaacagtcacactttacctacctacctacctacctacctacctacctacctacctacctacctacttccttccttccttccttctttttttctttcttccctccctcccatccctgcttcctccctccctccctccttctcctccctagttttcactttacctttatagtctcttctttctgaaattaatcattgggtatagttagtttttttttggtttcatttactattgtgaaaggaaaataaatctcgggacccccaaatcactaagccaagggaaaactcaaggtggcaactatggcaggcaaacctgcttcccattttattcctaaataaggcagctacaaagatttttaaaaagctacacaactccctcataatgtgcccacaaggaaatttgttgtgggcctcatgatctttaccctaaaacagttctgttgaatttcaccctggcaatgtaaactgatagctaatcttcacagctcacctgagacaaatgcatatttgattgcttcctctgccctactgtttatgtaaaaatgcagattcaccgagccagactacattgagtattcagcgaaaggctgatcaaggactcaaaagaatgcaatcttctgtctcttatctacctatgacctggaagttcctgcttcaagttttcccaccttttgggaccaaaccaatgtacatcttatacatattgattgacgtctcatgtctccctaaaatgtacaaaagaaagctgtaccccaaccaccttgggcctcaggacctgacaccgtcaggagtgcagccttaaccttgccaaaagaaactttctaaattgactgacacctgtgtcagacactttgaattcacactatttcatttgagcttttcccccccatgaatggtttcccaaatcacttaataattttagtaattacttaaataatgatatagattaagtaatcacttaatatatcataatatctgaaatttcttattaacttgtgtctatttcaggactttactcctattgctctttccattcatatgcccacacatgaagttttagtgtttgcatgtgtgtatatacacggactagtgcatataaacatatttactgtatatttattatatatatcacattgggtagcacaggtacctccttcattaattttaatttctcatttctataaaagaaacggagtctcactatgtcgcccaggctgttctcaaactcctgggctcaagtgatcctcccctcttggcatcccaaagtgctgggattactggtgtgaaccaccgtgcccggcacttcattaatttttgaaataagttctcttagctgtgcttgcatttttatccatctagaatccagagagctggttactgtgggcccaggggagtgtgctgggtgtgtaggagaatgccacccacacccatgcccacactcaggactccccaccaagatgccagtagagcccaatactgagacccactggccatcctccagaacataaagattcacgtatcttgttagtgggattaaattaaactaacaaatgactatgggaaagttttgcacattaagttatcccatccaggagcaccatgtctctgtatggattaaattcctgttttcatttttaaaatgaatcttcatagatttcctcatgtagctcacacaaagtcctggctgcttggtagtccatgttttctttttcttgagttcaaaatgttttctgaaattatcataggcttgggccaaggatgcctctcttattccgcagttttaaagaataatagtcccttattcccttctgttgtcttttatcagtctagtatttgttcccaagtattatctttaaacacttttcctggtctgaagtgcaggctgggaggacagaggtcccccatcaaggagggccaaacctcctcctgctgtggccactcctcagagcagggggtactctctgtggatttcaccccaagtaaggtgatgggtgtgggggccggggaactccacttcttcctgcagggtccccagggacagagctccgggctcccttggatatggctctgccagttccaggggaggctctcctgacctggccagccccaggtgtgctctggctggcttccaagggactagtgccatcaagacttgggtctggaccacgggtctggcaggggattggccggatttgctggtgattcactattgtgaggcaatgagatagggaggagaggcctgcacagggacccagatagtcatgaaaggcgaccttattcagcatttatttcatttgctgtgcacatatttcctttcagggcctcatgtggagggggcttttcattcatgcattcactcagcaaatgtttgtggtgggccaacttcataccaggcactgtggatcaggcaatacgtgagtgagcaacacagcctacaggccctggctgtggagctcgtgttgagggaaagagagcaaccaaaaacacaataaataagtaaactgcacatgttagagatcatgcaacttcaagaaataacaaatgagaaatgaaatgttaagacgtgggtaggagatgaaggtttccctgggtctccaggaaaagcttcaaagataaggaggttttgaataaagacctgaaggaagaaaaggaagtgtccattcctgcccaagggaagaatattccaggcaaaaaaaaaggcctgaggtgggagagcatctgcagaggccagtgtggccagaacatggggaacaaaggggaggacagaaggaaataaagctggggatgtcacaaggggccgggttgtgttaggcttctagttcactggaaggactctggtgttcacacattgcaaggtgggaagtcactggtgagccctgagtggggaagcgacatgatctggctggcagcgagcaggggctctctggctgctgctttaggaacacactggaaggatgaggagggaggaagttgggagaccttgcaagaatctaggccagacacggtggtgtgaacagggtgggagaggtgtgggtggtgagaatttggcagaattgtagacagaagagagctgtcactggcagggcggtattgcatgtaatttgtaaagtctgtggataaccttttgcttgtttagcaacccgtatattgcacgctgctcttgcagactgtggagagaagctggctgctcctcacctgctcatctcgctacctgcgatgaagcttatttctggatgatatgaagtatcttatctttcccgtaccagaagctgcaatctatttccatgcctctctctctctgaatctgcctttttctattgaggctatcacagcttctattatgcccattgtgttgctatacctacttccagctttgctgcatttttgggaactggagagctccaataaacacaggaagagaggagcaagtggaggctttgagactgactggtgcaggcctggagctactgaggacaggtgaaatgtgcaggtaggcagaggtctgggctgatcttcagagtccagttgcacctttatcctggaaatcagttgtggagtcagatataccgatccctatttctagcttccacaaaagtattattttgcaccattttggaagctttcataaaactatttttatggaagttattatttgggggaaggagaggcatccaggaaaatctatcatcggcctgctaaatggactgcaccaccaccttttccaattacatatttttccactggataatattttaagattctacagacacatgagtgtctaagacattgaaaagcaaacagcagcatctttcaacataaatatattaaagcccataggcatgcactgacttggatatatgcgactgtctgtggtcaactcttgtctttaccataatagaatctaaaaagtcctggagactaaataaattatgttagttggtgataggatatggagggctaatgaggcaagaaaaattataatatccaaattgtgattttttttagtaactgttgtttctacattgaatatatatgaaaacattaagagtttccagatgtgatattgaacatagaaatagaggttctgggagatagtaacaaccagctagggagaaggagagaagttagattttggatccagtctctatatgtcagtcaaaggagaatatgtgcctgctgagaactatgagccagaggggcactcatctccacaactctgaaaactgggtctctacaactaaacacagtaatcagaatattaaaaagcatgagtgtcatgaaacaatgttccatgaatatttttgtgtttttggtgttaatgatttctgagcaaaggcacatgggttaaaggacgattattggctatcctaaagatagagacttctggagaaatataaagtcttctctcttctggagatggtgaaagcctagagtcctttgcctcctctccccagagaggattattttacattccagagcggaggtctggctttggccaattaaatgtgatgttcactgtaagcaagaagttttaagaggtatcatgagtttcaccatccctcttgctactgccccttttcccgcaagaacatcatgttcagttctagattgggctatgccttcagcctacacttcagaagcacatctgagcccaaaccacaagaggaaggaaagctgcagctgacccacagccaaatgtgatgtgagtgagaaataagcttttgttgtggaagccactgagattgtatgggtatttatttcacagcataaccagcaaaagcaagctaatgcagttgcacagccagcctccatttctactcttcttctgaattaaattccactgctcggggcaagatggcatgtcctgattcttttatgccaccagcacttggcttttccctaaattgacctactttgaaggagggttcttatagttcaccagtggaggacgggttctggcacaaatagagacttgtaaggttgcatttaaggatgtctttcttctttcctgtggcccattcaaactatcccaatcaaccaggtcctctactttttctttttgtatttgctggtttctttctttcattgaaattccaagctctttccttacaatcagttttctccaattactgtcaactctgggatcaaattcctccaagaggttcctttttttttttttttttttttgagatggagtctcgctctgtcgcccaggctggagtgcagtggtgggatctcagctcactgcaagctccgcctcccgggttcacgccattctcctgccttagcctcccaagtagctgggactacaggcgcccgccaccacgcctggctaatttttttttttgtattttttagtagagacagggtttcactgtgttagccaggatggtctcaatctcctgacctcgtgatccgcccaccttggcctcccaaagtgctgggattacaggcgtgagccaccgcgcctggccccaagaggttcttatgtcagaatacattttgtgtgccctcctcaatgctgccaccgggacttggttcctgctgacgacagctgaggatctatgttactggtataagcccacagctgaattcctatatcttcaccccaagcattgaaaaccaggggaagtatgtctctggcaccatccaaggtctacatagtcaccttgaatctactatcttgggtccttttcaatctctttagctggcaagcagtgagtctccgtgaaggcactaagttccctaactggcatccaatagtttgaggaattctaaggtggaacatgattttaatggtagcacactgagcaaagcagataacatgccttggtggaaatcaattcagtgaatccacgtcatgtgaaaacaccaacagggatgctttcagatttgtaaatgcccagaaaaaaagacttacattcaaggggctgtgatgggagggacatatgattcccagctgtggaaaggacagaagtgcagagggaggtagagaagccccagttcaagtctcattctgctactttctggctgtgggatcttatggaagttagttagcctctctaaatgttagtttcttacttgtcaatgagaattagaattctatctacttcatagtgctgtcaacagattttggagggaaaataaatgcagaggactaaagaatagcaccagacacatagcatctattccctacagaacagacagaggattcagtgttgaaaaaggcatgtcaaactcaggagctggagggccctgatgatgtgctaatgcttggaagagctgcaaccaacagtccctttctgctttaatttattttttttaaatcttggcatactttcagacttacagagaagttgtatgaatatgacaatgaattccctaatatatttcactcagattctccaaatgttcacattttgctgtttgtttttcctttttctgtctctctgtatgtgagagacatataatttatatacgtatacatatttatacatacatatgtgtcatgtttttctgaaccattcaagagtaatctgttgacaggatgctcccatactcctaaatactatgatgcatatttcctaaaaacaggacattcttttatatacctacagtacaattataaaaatcaggatattaatctcaacatggtcctattatctaatctacagaccttattcagatctcatcaatgttctcaataatgtcctttgtgaaaaagaaaaatccaagatgcaagatcttgtgttatattgagttcagttgttttctttgtattccatgacactggttgtttttatttatttatttttgagacagagtctctctctgtcacccaggctggagtacagtggtgcgatcttggctcattgcaacctctgcctccagggttcaagtgattctctggcctcagcctcctgagtagctaggactataggtacccgccaccatgcccagctaattttttgtatttttagtagagatggagtttcaccatgttggccaggctggtctcaaactcctgacctcaagcaatcctcccgcctcggtctccccaagtgctgggattacaggcgtgagccactgtgcccagcccactgatggtttttaagggtataggctagttactttgtacaatactgcccactttaaatttgcctgatgtttccttgtgataagagtcaggctctgacttcagcaggagccacagaagccacgatgaaccctcaatgccctgtaacaggaggtattaggctggtgcaaaagttaccgtggtttttgccatcaaaagtatggcaaaaaagacccacaattacttttgcaccaacccaatacaagctgcactgatgatggcaactcttggttaaggtgctgtctgtcagatttctccactgtaaagtcactattttatcctttgtaaataatgagtatcttgtggagagacactcggaaattacataaatatactgttacttctcaaaatttcacccatttcctttaccatccattaactagtttttgcttgaatcagaggccgctttatttatttatagcccattaattttttttttaacttttattttaggttcaggtgtgcctgtgcagatttgttgtacaggcaaacttgtgtcacaggggattgtggtacagattatttcatcacccaggtactaaacctagtacccaacagttatcttttctgctcccctccccctcccactctccaccctcaagtagatcccagtgtctgttgttcccttcttatgtgttcatgagttctcatcatttagctcccacttataagtgagaacatgctgtctttggtttttttctgttcctgtgttagtttgctaatgataatggcagaggtctctttttaaacagagttttgaattctatcgtttaagaaatattttccatggcaatggatcttaggagactcatcaaagccattatggtgtaaagcatccctccaaaaaaatgaactcctatttggtgtcagctgattgcaaagacttcaacatagggaaggaggagagagctcaacaccggaaacgtatctaatttaccagaaagcgaatacaaattaaatgtctcttgaccttaaggtacagcagctatctcacatctggtttaaacagagcattaattgttcttcctttttattacaaaaataattcattcgtactgtggaaaatctgaaagctataaaaagcagaaaacagaagaaaaaaagacactcatgatgcagaatctaccactgttaaccaatttggtagattcctcgttgtcatttgtttttccttttcttttgtcttaagacatattgtatacgcaattttatattccaattttaataactggaattcattgaaaattctaacatagtttcataaattttaatggatgccttttataagcatactaccatttagttttttgataccattttggacacgtagattgtttatatttttgctattaaataatcgtggagaagcatctttgcacacacacaaaatgtgtactgcattttgcttcatttgtgtaagaaatattatggcctgaatgagcatagctgagtgaaaggctatgaatacatagccaagtgaacttacaaaagggcctaatttatacccagctggtgatccatgcaagtgttcttctcccccaaactcaacaacattgagtgttcccatagttctttgcacctcctgacggtacattttcaaccttctcttagccaatttatattgccctgttgtgagctgtctgatcttgttctttaaagccttatctactcaagcttgctattattttttacttaagtatatgagctctgtgaattctaaaatatcaagctgcttttttttttttgattttgtagagatgaggtctctgtatgttgcccaggctggtcttgaactcctagactcaagtgattcccctgccttggcctcccaaagtgctgggattacaggcgtgagccactgtgcctggcctacaagattttgtctaacatacttgttgcaaatattttccctgggcgttatttgctttttaattttgtgtatctggctgttaatggaagatttccaattttatgtgttaaaactattctttctggttcctcctaacactttaattttggaaagccctgcttactcacccttcccagccagatagaggtaaacattatttctacacccatctagcatgtgatagcactattttgaaaacatcagctcttagatccatttgtaatttatttgggtgcatgtgaataacatacttcttccttactggtaacctgcttcccccttatcatgtatcagatttttctgtgtgccagaatttactctgagttgtgcagtttcatggatgtattgctttttctgtagtcaggatcacattttgttcattatggtagctttaaaatacagtcgtattaatcttatttcattcctcttctttgccctcttgaaatgtacctcttctggactattcattatttcagaatattttaaaataatgttaataatttcaagtaagaaaaaatgtcaattaacagaaaaatagaggatattttattaataacatcataaactatatatgaattaacataaaatgtaactttacaatattcagttttctcatgaaagaacatggcatattggtagattaaattaaatcttttatgtttcttagtaaagttttgtacttttattacatactttctgcacttagtgattaaagtatggatagtttatattttcattatcattgaaacccagacgctttttaaatgacttaaattttatatttgaatactgttagctttgtaaacttatattaattcaaataactagatattttccttacactttacaggtataaactcacacccctaaaaaaaaatgaccatttgttctccttaaaatagccatccctggagcttttgcttcacatattatttcagtagcctgaatttcaagatcaatgttaaataatcactaaaaacagtggtcaatttcatattgtttctgtcagtgacaggaatgcatttaacataaagcaggacactgggcattaaataatgaaataattaatgttaataatgagacattaatgagagaggcattgacttccagattatattgtctagatgaatatattcttttaatatgtcattttgctaaaaataatggcaaccatggtcatccaaatatgacaggcagttttcatgacgttgtgacagccgtgaaaatgtagtgcgtagattttggacggctggagatggcccccatcctgtgttctggagcccccacacgcaggccatcctctgcaggctgccctgaccaatgactgaacacagcagggatgcagagggcgcccatgtgcgggagacgccaggctcttcggagggcagcattttagaaatgatgttgctgcctgggggcttctgctccaccctcctcccttgcactctctttcaggagggtcaggccttttcccctcacaggctctttcctcacccatctcctgcatgtccagtcccaccctggcacccgcttcgtcaaggatctggaacgacacagaccctaatggtttggtctgtgaatagaaaagccaggctgctttactgtcgttttcgacctgtcagttgagtgacaatgttattttgaaatctcttacttccacgagatgaaaaaagtaaagcatttagacagtgaattattagtaacaagcgctggagggcacttacatgtggcagagcccctttcctgataccatctcgtgatcctcaacatcatcaccccactggggaggcagggtagatattcctgacttcattttaagacaaaccaaccaataatagaagtctcaggttgtttaaaggatatgagcaaaattacggaaataagaaggacagagtcaaggctagagtttgtaacatttgaacttttatcaaaattttttccattttaaccccgatgttccgaacctaaattcatataaagcatgatattattatttggtttacaaaagcacatatggtatttagtggcattttgaattttcatgtaggcatctaaaaataataagatgcaaatccaaatcaaaggtctattcaactggccaggcatggtgacacctataatcccagtactttgggaggccaaagcgggaggattgcttgagtccaggagatcgagaccagcctgggcaacatactgtgacctcgtctctactaaaaataaaaaaaaagttagctgagttggtggcatgtgcctgtggtcccagctactcaggaggctgaggcaggatgatcagtcgaagctgcagacagctgcgatcatactactgcattccagcctcggtgacacagtgagaccctgtcccaaaaaaaaaaagatctattcagttaataatcatggcatcctatgtagattctatattgatctcatagaaaatcagcagcattttctatcattattcatggtttttaataattttttggtagcatgaatagtttcataatcataattttaaaagttcctcacattataggaataaaattcttatttgggatacttacctacattaatataggcatctcgggttttctggtttaatctttctataatatttccttgatgtatattccaaaatttatttatctgttctcctacagatgagcatttaggttgtttccagtttttttattttgctatttcaagcaaatcgctttcttacctacaactggttatacatatgagtggtttccccagggtatgcacaagcccacgtctcttggtgcagtaagtcagcccatcctccactttgctaggtggggccttcgtgctcaccaaagggaagggaagagttgattctcccaccatctgtgcagttcacctatttttacactctttccagtacttgctatcgccagccttctttgtttttaactcgatggttgtaaaataatttaagtctccagtcatggcttcaaccatgaaaaacagtccagccaccatctgatagctgggtgagtccctcgatctggctcagtccatctccaggatctccaggcccctgacaaacctccaatgtgtcacctgtcatcttcccccacacctttgctacaggatttacctgccaccaatctaatcatgtcatttctttgctcaaaacactcaataggccccgagttgcctgcaggatgaatacaaactcaccagcacagcaaacagcctgaaaagctggccttatccctgccctttttccaggcctctcccagccactccctccactacacccacgtccctcctgctgtccagcaatcccagagacacttcctacgtgggtcctttttctttctttgtttggttttcatttgagacaaggccttactctatcatccaggcagtggtgcaatcacggctcactgcagcctcaacctcctgggctcaggtgatcctctcacttcagcttactgagtagctgggatgacaggcgtgtgccaccatggccggctttttattttctgtagagccagggtcttgccgtgttgcccaggctggtctggaactcctgggctcgagcaattgcccacctcagcatctcaaagtgctgtgattacaggcgtgagccactgcgcttggccttacctgtgccccttttcacatggcacagtctttgttaaaggtgcattctttttctttgcttgggactcccattctgcacaagtacaaatgccacatccccgaactcagctaggttgtgagtgtccccctgggctcccagggcatctgattttgagctacaagtacacggatcattttgtattgtgcttgtttgtacatcagtgcctccactaggctatgaacttagagatgcagggataatgtcttactgatattccccaactcctggcatgggcctggtaagcactgggtgagaaatgcatgatgttttacattaaatgcagttcgatgttctttggaatagcaaatacatctattcattcattttatgtgccttttctagatgacagaagacagcagtgactaaaataatcaaagctcttttttccacagtcacagagcttacattctagagtgagaagacaggcaacgaataaaactaatggagtcctgtagtatagtagaaagtgatgtgaactctggggacaatgatacatgaatgtgggagcgggaagaggggatgggaggctgttgaaagggttgaatctcagaaggggcaatcaaaggagagagaaggtggcatttttgcagatttgaaggagggaagaagtgagacctggggattcacagccagggtaggggagctttcaggcagagagaatggcacaggcaaaggccctgaggcaggagtggctggagtggccagagcggagacccagcagcaagggcagagaggcagagtgagaggtaaggagagagcacattaggtggcaccttgtaagtcacagcaaggactctgattctactcccaaggaataggaaaccactgatgggatttgaacagagaagtgacacaacttggcatatttttttttttttgagacggagttttgctcttgttgcccaagctggagtggaatggtgcaatctcagctcgcttcaacttccacctcccaggttcaagcgattctcctgcctcggcctcccgagtagctggcattacaggtgtgcatcaccacgcctggctaattttttgtatttttagtagaaatggggtttcaccatgttagccaggctggtctggaactcctgacctcaggtgatctgcccgcctcagcctcccaaagtgttgggattacaggcgtgagccatggcgcctggccttgacaaatgttttaatgggctgtggatatactgaagatgaccaagagcaagcacaagagacagattaggagcctttgcaataggtctggtgagaaatagtggtggtctgaaccaggatggtggtgagaagctgttgttggattctagatatatcttgatgataaaagcaaaggatctgctgctaaactgaatgtggagcaggatagaaagagaaggatgacttcattttttaacctgagtgaactggaagaatagattggccacgaactaagatgaggaagtagtcaggggaggtttggagaagaaaaacaagagtttggtttcggacattttctgtttgaaatgcttcttagacatccaagtggtgatagaaaaacaagtctggcattcaagaaggagatgtgggatggaaatgaaaatgtatgtcaccaatgcacaggtgaaataggtcataagatgggatgggatgaccagggcagggagtggagacaggagagaagatcacagccctgagccctgagacggcccaatggtaagagctcagggaaaggaggagcctgcaaaggaaacaggcatccacatggtgggggaaggtcacctgtgaccatgggaagatagactgaatgctacaaatctcacacatgtcaggtttccagactaattgaataatttgaaactccggtgttagcaagcttccccctactgaatttggctctctatggaagaagaacagtatctttagactctaattcagcagtagcagctgaagaaaatatgatcaaaagatctcaccccagaaagatgcattgtacatttcttgtgctcttcctcaaggcacttcaatcctcttcagagtcaacattttgaaaacatctgatcctagattagaaaggccccaaatgcaatccctcttatacaaagtaccttctggacatagaacagtccataatctttcaaagattgtttgcataatctt

SEQ ID NO: 99 - DNA, 159593 bp, Homo sapiens
tgttttgtacaaaaagggccttgaagcagacaatgcctaactcatggaaatgtgtcaccatcagtgggggcttctggcccagtggccacagggacggctaggcctgaggtggtggtatttttagaacatggaggtccctaagattcctttaccttatggacatgaggcccagcacataaaacaagttgtcttagaagatcttaaagtgtcccttgattgcctagttccatctgccacctccctccactcacccagatgctcagagggtcgatgactcactcaagatcacacagggcagatgcaaagtagccgcagcttaactgtggcatgggctgtaaagtagagggggtcctgctccttccttgggtccagctctcagggacagggtgagcgtcatgcccacaaatggatatcaaaggacttctcggtgctaggcactgggcatggagcagtgaccgtgaccagcaatggcttctgcccttgagaacagagagaaaaccataaccacatacacaagcaagatcatttcaggccacggtaggtgccacaggaatgagataaaatagcctcagagaggggctgggggccagaggccacttcaacctcattaccagggaagggagacctctctaagaggtggtgtgtgggctggcacctgaatggcaagaatattcaagagaagaaacagagaatgcaagtgaaaacagctgataccagctgggtacagtgggtcatgcctgcaatcccagcagtttgggaggccacagtgggaggatcagttgaggccaagagttcaagaccagcctgggcaacatagtgagacccccatctctacaaaaagaaacccacaaaaaatttaaaaaaacagccaatagctttacagtgttccaggtactcttcaacgtttttttcatgaattcgctcatttaatctcattccaatcacatgaggtagtaagattatcactgccattttacagatgagaaattgaggcagaggtcaagtaactttgctaggttatagaacccggacccaaacctaggtagtctggttccagagttggtgggcccactcctatgccattctgctctgagaggtcactggtgtgggaacaagcttgcctaccgaatctggactctattttagctctatttggggtggaaatggcaacccatccttcccaagcgaagtccccaggctcctgccagctagtgccagagccatagcaggggccccagcacccctccggccctcccctcccctctgggggactcctgaggtcccagctccctgcccccagcctctgtgctcacagctatctgggccacctcattctaaagggatttggctcttggagacaactggagactggtgagaaagggcttagggattagacagtgatacccaggaaggtaagggacttaatcaggggttcgagtgtgggaagtggggtggggagaggattttgtttctttgcaaagccaggctggactgcagaagtgaggaggaagtggggctcgggggaggagccagacaggcttagtttctcactctctgttgtgccttcagaagcaacatgatagaataataatccctcacctgtgtgcgcccaccacttccccagccattatttcacttggaattctcacagtggcgggattagttctctccccagatcacagacacccagaggaggcaggtgacttgaggcagctgcaagccccacagggctgggctgggaggaggggaggaggttggggccagggcttttctgcatggctgcccgcaggcacaagggttttccagagagttcgcgctgccctggccccgtggaagtagagtgttccacaaatatttgtgaagagtttaaaagactgttctttccaactctcaaatcacaatgccaatctctgtgccacccccttccccctggcaccacagattctgaggccagggcacgcaggaggcctctgatctcaaggccagtgccctcattttagtgaggaaacaaccaaggtctagagggcacggccagcagccctgaggagacccccaaatatgcgtcttgtggaatagtcacggcagcacattaagcaagaacatggtctccagcccacacaccagactcccggtccagtgctccttcctgtgcccagagctgccccccagaagaatctgaagcacagggctctgtcaacgctaggactgccatcccaacgcttctagatctctgcgtgccaccagccttctttaagttgttcacactctatgttcccctaagcaaagtccccagcaagatatacccagagcaacacacccatcacagaaggttctcccctccagcctgcctgacccaggaggcctggttcttcctgttgggccatgctattccctgagagttgccactacaatgcaaaatagtccacatcaaggccaggaaaggggacttctggttggcagaggtcgtgttgcattgggtagctcagggagaagctcctggaaacagtatttgatcagagtcttgagggctggggaagacctggcaggaggatacaggacacagcagcagctctcacagaggcaggagggcagaggtgtgtctaagggacagtgggaagcttctcagattgaaatgaagtgtgtggagagggcaagtggccgttggtgccacaaggaatgctgggctggggtgggggtaggcctcaaatgcagatcagtgggattgagtcaactcaggaaggaaccggggagccattgaagattcttgagcaggggtgcaacatacctagcagggaggaagaactgtagggcagggattaggggatggagaaaaagtggggatgggaaggagggactctctcttgttagccagctccaggacttcaccagattatttatttatgtgtttttgtttgtttgcttgtttttttttttttttttttttagaccgagtttctctcctgttgcccaggctggactgcagtgacgtgatctcggctcactgcaacctctgcctcctgggttcaagcgattctcctgcctcaccctcccaagtagctgggtttacaggcgcccgccaccatgcccggctaatttttgtatttttagtttcaccatgttggccaggctggtctcaaactcctgaactcaggtaatccacccgcctcagcctcccaaagtgctgggattacaggcgtgagccactgtgcctggctaggttttttttttttttttttttttttttgagacagagccttgctttgtcgcccaggctggaatgcaatggtgccatcttgggtcactgcagcctccacctcctgggttcaagcgattctcctgcctcaggctcccaagtagctgggactacaggtgtgtgccaccatgcctggctaatttttttttttttggtatgtttagtagatacgaggttcaccatgttggccaggctggtcttgaactcctgacctcaggtgattcacccacttcagcctcccgaagtgctgggattacgggtgtgagcaaccgagcctgggcctatttaggatttatatgatcaaattaactagctgttttatggtgggccagaagtaggttaagtctcagtggaggaagaagaaagaggcagctgttgaacctgggaagggcaggcctggggaagggttctttaccgaggcttttatttgggtaacttcagatgcggggagggctgtatcctgctgggtgaaggtgatcttgtactttcgtgggtaactttcgcaggcagttcccaggcccgtccacaccttggcctgggagcatacggcctagaaaccacaaacttgggtttaagtcccaactctgcacgtgcccacctatgaccacctctccctcaggctcctcaataagtcacctgacctgcctaccttagaggattgtcccacacttaagtgacaagctagatctgaaggtaccttgtgagctctaagttgctgaaccaatataagaggctgtgcttcttgtttttattttttgtttgtttgttttttttttttagagggagtcttgctctgtcgccccagactggagtacaatggtgtgatctcagctcgctgcatcctctgcctcccaggttcaagcaattctcccacctcagcctcctgagtagctgggactacagatgcacaccaccacgcctagctaatgtttgtatttttagtagagacggggtttcaccatgttggccaggctagtctcaaactcctgacctcaggtgatctgcctgccttggcctcccaaagtgctgggattataggtgtgagccaccgcgcccggccaagatgctgttcttctataatagtttcctttgagtaggctctagcctggaaagaatatcctggccctggaagggtcttatataaagatcttagccatgtatccagtaaggaaggcagccctgtcctgccccaggccagaagccagcgagcctaactagggcagaactgcctgaaaactctctgtagaggtgggcgttgggggcctcaaccctcactctgcaccctgcagcaggcgtctatggagggggccacaccaagggcagagcaaagtccttaaatgtctttaacaggcctggtgcctttgcctccaggtaaggagagagactggggacattctgctttgtctctcccagagacttgagtgttgagggggcagaagtatggctctgggagacgagatgcccacagactcctggacctagctctgcattaattccaggccataaggggagggcacagctgagcactttccatgtgccaggcagtgggcactccacatatgtcatgccactaacaactttgggcaagccatgccttatctgggcctcagtttccctagctgttaaacgaggtaagttgcatgatccctgaatgatctatgtttctctctccctctcagggttctgccagccccgggatctgtgtctctattggagcagttcttacattcattcattcattcaggatacatttattaataatccctgtaggctgggcaccgtggctcacatttgtaatcctagcactttgagaggccgaggcggatcacttgaggtcaggagttcgacacccgcctggccaacatggtgaaaccccatctgtactaaaaatacaaaaattagcttggcatggtggcgtgcacctgtaatcccagctactcgggaggccgaggcaggagaatagcttgaacccgggaggcgaaggttgcagtgagccgaggtcgtgacactgcactccagcctgggtgacagagcgagtctccgtttcaaaaaaaaaacaatgcaaaaacaatccctgtgtgcaggatgctgtgctgtcctgcactatgcgagcctggttagaagagctcattagatagcacctttcaatccctccttgttcagaggcccagagagctcaggtgtctcttccaaggtcacacaatgaggtaaggataaatttggaactaaaactgagactccctgcccttctgatgcccactggcctcagtcccagtgggcacacttgctcgcctcctgcctgggtctctgacttcaggagggcggagggggcccgtgtcagagccttccgcgccccagcgcatcgctccctactccgcctctcgggatcctttaagaggcggggcttggctgccagctccgcggcccgggcaaaaggctgggactttactccgggtggcggcgaggacgagtctgtgctccatcagctgccgcacccgccgcctcccgcccccaaaccccatccccgcggttgagccacgatgagcggcagagtcggcgatctgagccccaggcagaaggaggcattggccaaggtgagctgtagccctggcccgggctcccgcctcgggctgtggccctcgccctcctgcggcagcgagaagggacggggctgggtgggggccgagggtccgtggcgggcggcggagggaacagaggcggctgtcccagcctggcccgcgcccgcggatggctccttcctccctttgccaccctcgaggtcccaggaagtttggccaccccccgcccaagctctgagcagccgtggcggtgccacctggggacaagtggttgcttgtgagtccccggaggccgctgagggcacaaaggcaacattcatcctcgggactggcagccgggccctggggcaggggcaggggcaggggcccaagtttcctcccatttccgggaggctttcttcttgtagggtcagtggcacgatggaaagggctctggatagctccttgggagacttggatagctcctgccccggcaccaagccgctgtgcgaccttgggcaaaaccctgcccttctctttgctcctcgatgccatggaatgaggaggttggaccagatgatgttgaagggaacacctccgtgtgtgaattccaggctccccccatgaggcactgggttggtgttagtttgagctgagaccagccgtcccctatcttgcatcccagacccctgcctggttcaggacttaaggtttatgctcctcagaaggcaagaaggtgagcctggctttgccttggcatctgtgacaaggagggggcaacagtttgagggcgggaccttcctcttcacgaactaaatctcttatctgtcacccctggggagtgaggaggtcggctcttctctgggcaagagccgatagggtctggccccaagatttggaggctccacagctggggagttttccatggctgggaaaggtggggcggggggcagatgtatcctgccactggcagcagtggggaggcaccagctccataaagcctctgtcccaggctgggcctcccccatcccaggaaggctggacagggaggcttcagattttactgctgactcgcaggagaggtcaggcagagaagggattaggtggtgattaaactggagaccaggggctggttagggtccttggagaggggtagcttcatgcctgcagtttggaggagcagtttccctggtgcactgggagctgctttgtggggtgggatggtctgagtccctggctgacctaggcaaggggcagaggtggccagtcctcattagtgtcctctgggactgccctctaggtcagtggtcagggaaaggtgaatggctgggagcaggaggctcagggagggcatataggggcctgttcgcctaccagggagtgagaggttggaggtaggtgtggctgtccattgaggtcactgtccacctcctttgtttggcactacctgcactttcccgcttcctggcttcccctactggaactgttccctccacctgagttgcccacctctctcccccgctgcctttgaagtccttcaagcccagcacaaatgccatgttttataggaagccgtgtgagaccacctctttcttccctctgctccccagcaaactcctcatccttccatggggcagaagaccatggtggaaagagtgtgtgctctggactcagacagacccgggtttgcatcccaactctgctaatgactagctgtttgaccttgggcatgttacttagcctctctgagctttaattccttcatctgtagaatggggacaatacttctacgggttgtgagtgaggagtaaataagctatggtgccaagatcagcgctgagcgacaggaaatgcttggtaaactgacagcttttactgcagtccgtatcagagtgcctactatcacgattagctgggaacacatctgcctgcccgcagactggtgtgtgggagcccttgttgtggggcaggggcagtgtctcactcccttcccacttcctgccctgcaacctggcaccccctgacaagacagtgctccaggcagcatgagtgcccagggagtgtctgcagagttgaactatgttaaagagaagtccagttggccgggcgtgggggttcatgcctgtaatcccagcactttagaccgagatgggcggatcaggacgaggtcaggagatcaagactaccctggctaacacggtgaaaccctgtctctactaaaaatacaaaaaatagccaggcgtgttggcaggcccctgtagtcccagctacttgggaggctgagtcaggagaatggtgtgaacccgggaggcagagcttacagggagtggagatcgcccaccgcactccagcctgggcgagagtgcgagactctatctcaaaaaaaaaaaaaaaaaaaaaaaagaaacaaagaaagaggcgtccagcaaagatctcagtggagagtcctaggcagagggcagcagtcagggcgggccctaccactcaccccgatgcctctccctacagtttcgggagaatgtccaggatgtgctgccggccctgccgaatccagatgactattttctcctgcgttggctccgaggtgagggaagaggggctgcgggaggctggggcaggggcttgttctgggcaacagaatagcaccctctgaaaaccctgcccttggcaattgaggcatctagagtgtccaacctttagcgccaaagggcccttggcaatgacataagctcaaccctcctagtggataaagacactgaggctcagagaggtcaagtgacttgttccaagccacacagtgagcgaactgcaggcagagaaaaggggagagtccaggtcggctgacccttggcccacagccttttccatctactcaagaaatctgctctgctgatggagttggggaaattggctgaagaaaaagtgagaaaggccccagccatgtggggggtcggaggcagagccaagtgtagaaccagagtcctggcccctgctatgccctagtgtgatggcaggtccctgcagaccacagtttaggcaacttgagggaggggcagagtgcatggggaacctgaggggcacagcctgacctagagtgacaagagtctcctcaaaccaccaccaggctctagagcccaggtcctggttccagctcttccccagcctggctgtggtgccttgttcagggtaaatacttccctaggatcctcctctggaagagcaggacaagacctgcctgctgcaagacgtgacatgacagaactctgcatgtggtgttgaaatgcacacatttctactggcatgagggtcaaattcagcctggtgccccaatccctgagatgtttccattccttcccctcctctcctttcctgtgattcaggtcatgtgccaccctccctgattcttctgacactttttttcccctctatatagaaattttattaacagacatagaaataataaagaaaattccattatggccaggtgcggtggctcacgcctgtaatcccagcagtttgggaggctaggcgggcagatcacttgaggccaggacttcgagaccagcctggctgacatggtgaaactccacctctactaaaaaacacaaaaattagccgggcatggtggcgggcacctgtaatcccagctactcaggaggctgaggtgggagggtcgcttgaacccgggaggtggaggttgcagtgagctgacatttcgccactgcactccagcctgggtgacagagggagactccgtctcaaaaaaaaaaaaaaaaaaaaaaaaaaaaagaaggttacctttttttttttctttttagtagagacctaggtttcacgttggccaggctggtctcgaactcctggcctcaagtgatctgcctgccttggcctcccaaagtgtggtatagaatcatatcctaaaatattaaagtacaaattatgccctattattttaattttaatttctttttttgagacagggtctcactctgctgcccaggcaatgggcatgatcgtaggtcactgctgccttgaactcctggtctcaagtgatttatttatttatttatttatttatttatttatttatttagagatggagtcttgctctgttgcccaggctggagtgcaatggtgcagtctcggctcactgccacctccacctcccaggttcaagcaattcttctgcctcagcctcctgagtagctgggattataggctcccaccaccacaccggctaagggtttcaccatgttggccaggctggtctcaaactcctgacctcaggtgatctgcccacctcagcctcccaaagtgttaggattacaggcgtgagccaccacacctggctgttatttttattttatatttttatttttattatttttattttttttgagacagagtctcactctgtcgcccaggctggactgcaatggtgcgatctcggctcactgcaacctccacctcccagtttcaagcaattctcctacctcagcctcccaagtagctgggattacaggcatgcgccaccacgcccggctaattttttttttttttgtatctttagtagagacggggtttcactatgttggccagcctggtctcgaattcctgacctcatgatccatccgccttggcctatttttacttttgaaacagggtcttgctggcctcaaactcctgggatcaagtgatcctcccacctcagcctcccgagtagcttggcctacaggtacacaccactgtgactggccctattatttctttatggacacataaagacatgcacatgcacaccctaggagtcttggggcagatgaagagatgtattttccttttctttccagaaatttcacagagctggcacgctcctgagaggctgcttgtaaacatctgagggcagatccatccaggagcctctggaagtgtcacttgcccctttccccaaaaaagcttccataccatccccctaccccagtccaccgcccagagatggtggaggggtagtgtgggggcggcagtggaatcagttcaggctggaggaaattttggcccagcatttgctaaagggctgcagctagaagcaggtgggtggagagagtgggaagatagtagccttcttaaagggccagttgcaaaatgatccagcagactagggagctgctgttgggggagaagcatggtttctgagagccactgaacagcaacacagctctcttactgaggcaggggccagccaggggtcctggcagctggtctcctgattcctggggagcctcatacttcaggcacaccctaccccctcacagtggcggtcattcaaagaatgtggtcggtcattctcatttgccagatgagaaaacaggctcagagaggggaggggacttacctgaagttacagttaatgcgaagcagaatcagggcagaaacctaggactccagactccaggccagtatcctttccaggaagccacccctgctccttaaagccaagctcagcctcttacaacagaggaagtgtctcctctgcatttcatttgtgcctcacatttcctgggcaggagctcaggcctggtcagaacctaatatgaatctcaattgggttttttttttttgtccctaaaaaaaacccaaaacccaaaaaacaacaaaaaaccaaggcctggcatggtggttcatgcctgtaatcccagcactttgggaggccaaggtgggaggatcacctaagcccaggaattcaagaccagcctgggcaatatagcaagaccctgcctctacttaaaaaaaaaaaaattagctgggtgtggtggcgtgcacctgtagtcccagctactcggtaggccgaggtgggaagtcacttaatccagtagtttgagactatagtgagctatatcgcaccactgcattccaacctgggcgacagagcaagattctgtctcaaagaaaataaaacaaaacaaaacaaacaaaaaaacagccttttctctttctctccttcaatctgacaaagacctttcataaaagtcacacacgggcagaatgtctgtccctaacccaggtgtgtgcttggggctcctctccctccctttctccactgagggcttcagttttctgctggcttccaggcatggagagcaggtccgcaagtctcctctgcttccccctgactgaggctgagttctgggcaccccagcaagaaggatcagagagcaggataaaacaaggaagtggtggaagccctgggagggaggcagagcgggtctgagtctctgcattttacaggtctagggaatgaatgaaccaccaccacccagacagctgctcctgagctgggttcttgcagtgccccaagccatgctttgagttgcccctgaccagggcagcaggagcctggagaggcctcaagcaggcatggggaggcctcaggtgtggtactgccaagagcaggtggcaactctgggagagccctcacagaagatgctggatgttgggccttggcagataagggttaactggagagcctccccaagataaggggctcacagttcgccaccactcctgttccctaagaagataagggttctggctgggcgcggtggctcacgcctgtaatcccagcactttgggaggccgaggcaggtggatcatgaggtcaggagatcgagaccatcctggctaacaaggtgaaaccccgtctctactaaaaatacaaaaaattagccgggtgcggtggcgggcgcctgtagtcccagctactcgggaggctgaggcaggagaatggcgtgaacccgggaagcggagcttgcagtgagctgagattgcgccactgcagtccgcagtccggcctgggcgacagagcgagactccgtctcaaaaaaaaaaaaaaaaaaaagaaaaaaaaaaaaagaagataagggttcttctcacaatagtggtgtccttcctatggaagattctcattttcatggcccaactcccccaccatgagaggacagtgccttgcatcttccaagtgtttctatcttatcagatgatttggtcagagatgtacagtatcttgtccaaggtcaagcagagaaatgaagagctgggatgcaaacccagaagatattcctctaaaagctgtcccatgctgccatggcagcacacaaaaaagggtgggattcagttctgccaggacgtgtccggcacctgtgatgggtgtggcattgttcaaatctcttgagggagcctatgggcccaggagaagggactgattttcataacggcagagtcagggaatgtgctcggcactcccagagagcgatggttaagggaccggtgacagtccagagggcagcctgtctggcccaggttccacaactgtcagcaaatctagatgccaaatccacagaggacatacaactgggagggacagttcataggtcagatggcaaaattgatctgaatctggatctcaaaactctttgaaggatggactgaagttgactgtaacaagaggaaatttgatagggaaggatctaaggtctctcctctccatgtatgcaatggaggcttagcagtggcacaggtgaaaaggatttggggggtttcagtgcctataagctccacctgagttaagggtgttgcctgttgccaagaaagttcttaggctgggcacaatgtctcatgcctgtaatcccagcactttgggaggcccaggcgggtggatcacctgaagtcagaagtttgagaccagcctggccaacatggtgaaaccccatctctactaaaaatacaaaaattagccaggtgtggtggcgtgtgcctgtaatcccagctactcaggaggctgaggcaggagaattgcttgaacccgggaggcagaggttgcagtgagctgagattgcaccattacactccagcctggatgacaagagcgaaattgtctcaaaaaaaaaaagaaaagaaaagaaaaagagagttcttagacaacacttggggctctgcgtggctcttagagcacactctgagggggctctggaaaattggaaaacactcaaagggaagttatttgcatggacttcagaccaagctgtggggcttcgtaaagtctctaaggatgggcagcacgatggtaggggagatgcagagtgaaagcacagaattttccagtcttggaagtgttgtcatgaggctaaggaggcaatcctactctctgagtgtctctgaaatgaatctcaactcagtatcaatcagctgagtgcaaattgcagctatgattacctgggagcaagtggccttgggggtcagtgaggtctttgtgttcaagcttgagcaggacaacttttggggcatcatgcataaagaggtgacccaggtgaaactgaattctgaaacttgtcaggagccctgggaggcaggccctttgtgtggctttagggaatgtgtgggccctttgaggacatgacaaggttgggtggaggctcatcaacccctctatcccactgggatgttctgccagctctgccacagattacaggggcagctatattcatctttgttttttgtttttcttgggatgggatctcgctgtgtcacccaggctggagtatagtagcgagatctcagctcactgcaaccttcacctcctaggctccagcaatcctcccacctcagcctcccaagtagctgggactagaggtgcatgccaccacctgtagctaattagtttttttgttttgttttgttttgtttttttggagagacgaggtctcactgtattgcccaggctggtatgttcatctttgaactgtggtgtcaaggtctcaggattggatgtgagactgtggaggagataaactttgtgcaagggggaaggccaaatgataagaggatccggggttcattttcactgagaggacggaagacctttaagttgattataaccactggagtaaagctctcttgaccctgaagttacaatagctgcccccagctgccctgaactttgacctgctctcctcgcaaacctggggcctgtggtgccccagaagttctcagtaaaggctctcatgttagcttctgcttgtaggatggtctgagggttagctggagagatgactgagaggaactggccctatcatgggaatatgggaatctccccatccttggacacccagtcctgctaacctaaccctgaccagaactgtttccctgttacagccagaagcttcgacctgcagaagtcggaggccatgctccggaaggtgagacacatttggctgttgcttcagttcctccccatcagaatcactccttgcgtggacttcttttgccgcacctcccatcccaatcacagcttttggctttgagtattagccgaccactgttgccttatccctctgggacaaattgcattcccttccctggcaacacaggctttcatagctctgggccagccaagaatgataatctgttctgctaagacctctaaaacaggcagggccttcttttccattcctgcctaatgccttctggtgaccacttatgatctggtggtccattcacgctgtcgcttattgctacatgcctattaaacctcccccaccatccctgctttttgttttcttttttatttttttctttttggagacagagtctcgctctgtcacccaggctggagtgcagcagtggcgcgatctcagctcactgcaacctccgcctcccgggttcaagtgatttcatgcctcagccacctgagtagctgggattacaggtatgcaccaccacagctggctaatttttctatttttagtagggacgggattttgccatgttggccaggctggtcttgaactcctggcctcaagtgatccacccgccttggcctcccaaagtgctgggattacaggtgtgaaccaccatgcctggctgtccatccctccttttaaaaatttccccattgtatctttgtagcatgtggagttccgaaagcaaaaggacattgacaacatcattagctggcagcctccagaggtgagcacaaattatcccacctcatccctatgctaggcctttcagacccacaacctgggtcctggatccactggatttggatccttagaggaaaggtctgacaatgcccactgagccctgatggtctccagaatgggcatctgttggtacccaggagagggaggtagagaaagatactgatgaacctggagtaaggccctgtggtccaggcaaggtatggatgcctgctgaccaggtggctcctctgtgtctttgcccaggtgatccaacagtatctgtcagggggtatgtgtggctatgacctggatggctgcccagtctggtacgacataattggacctctggatgccaagggtctgctgttctcagcctccaaacaggacctgctgaggaccaagatgcgggagtgtgagctgcttctgcaagagtgtgcccaccagaccacaaaggtgagtggaccaccatggctagaaatgagttgaccacagcagaggcattccagcagaagcagggatgtcacacaggaatataagcacagcttcagggccaaggcccagcctttttttttttttttttaatttttaaaacttttttagtagagacggggtttcatcatgttggccaggctggtcttgaactcctgacctcaagtgatccacccacctcggactcccaaagtgctgggattacaggtgtgagccactggacctggccgaggcccaggctttgggatttcctagaccagtgacatttccaagttttagaatattcccaaatatctattttgccatgtaaggactttaaaacaatgaccatctattgttgccatcattaacacccaaaactataagaatggcaataatctcagatgaaaaagcagtcctttaggaagctgcagtgagccaagatcgtgccactgcactccagcctgggcgacagagactccatctcaaaaaaaaaaaaaaaggagtcctttaaattgaataaatttagcttcataaaaaactcactacattattgttatttttctgatttatatggggacccagtgaaatcttactgtggaccaacccatccttgagcaagtatttgggtaccactggtgcaaatgatgtcagattcttgcttctctaattctgtatttaaaaaagataaggatggctgggtgtggtggctcatgcctgtaatcccagcactttgggaggctgaggtgggcagattgagcccaagagttcaagaccagcctgggcaacatggcaagagcctgtctctacaaaaaaaagtaaaaaattagctgtgcatagtggcatataccagctactagggaggctgaggtgagaggatcacttgaacttgggaagtcgaggctgcagtgagccgtgatcgcaccactgcactccagcttgggcaacagggctagaccctgcgccaaaaaaaataaggatagctgattcccttactgagaaaaagactgaagaacaagcaggagctgccacttccctcctgccctcctctcagcagttgtaaagatccagtgaaatgatgtcataaagtctaggaacattcccacactcatctacaaatgttcacagagagcctactgtgcgcagagaccctgcggagctggggatgcaggaagcattagacgtggatgcacccctgagggttcagggtgcacagaacgtctgtcctcgggcataagtggctctacgggtaccgtgcacagagcacacagtgactcaggaagggggaggccatcaggccaaactgcagaaccaaagccatctcagatgtcatctagatccacccagtcatgtactggaaaagaacacagagacctaggcaggaagagtgactcgcctagaccacaattctggcctggggtgattatctcagtttggaaaactctaggtccggccctaactagctctgattgctctctggatgcacagtgcaatcatttggcctggactggaacgggcttctgaagtaggacagcctgacaagacttcctgctctctgttccctgcagttggggaggaaggtggagaccatcaccataatttatgactgcgaggggcttggcctcaagcatctctggaagcctgctgtggaggcctatggagaggtgaggggcaggggtggggaggaaggggacagagggaaggggaggaggagtagacccctctcctaggctgtcctgtgggatgggtgaggcaatgggggcagattctgagcctgctggaatcaagagtgattttgtttccacagtttctctgcatgtttgaggaaaattatcccgaaacactgaagcgtctttttgttgttaaaggtaagttgggaatttcttgtgataaagccagatggaaaagaggggtcaaaaacatgactgcggcagatggagggtcaaacagtgagccaaaagagggggtctgaggacatgttcagaagactgctgcccctgctagtgtgctggctcacgcctgtaaccccagcactttgggaggccgaggcaggaggctctcttgagcccaggagtttgagaccagcctgggtaacacagcaagacctcatctctataaaaaagttaaggaaatgagctgggtatggtggtgcatgcctgtagttccagtttctcaaaaggctgaggcaagagcattgcttgagtctaggagtttaaggctgcagtgagccatgattgtgccactgcactccagcctgggcgacggagcaagtctccatctcaaaaaaataaaaatagggctaggtgcagtggctcactcctgtaatcccagcactttgggaggctgaggtgggcagatcacttgaggccaggagttcaagaccagcctggccaatatagcaaaaccccatctctactaaaaatatggaaattagctgggcgtggtggcccacacctgtagtcccagctactcaggtggctgaagcacaaaaatcacttgaacccgggaggtggaggatgcagtgagctgagagctcactgaggctgaggcaagagcactgcttgagcccaggagtaaaaggctgcagtgagctatgattgtgccactgcactccagcctgggtgacagagcaagactctgtctcaaaaaaataaaataaaaagaacactgcccttcacatacgcagactactttacaactcacagagctttcagtatttataatctcctttgagccacccagcctgatgagatgggaagagaccatttgattatatccactgtaaagatgggaaggctggacctcaaagatgcccatgctgagctgcacaccctgggctgcctatgtgggctccagagccctggggaacatgtggcccagcatgggctggcaggagggtagcaggtgctgcagaggacgctgttagggacagactgggcactgctcccagcctcacattatctggtctctgttccagcccccaaactgtttcctgtggcctataacctcatcaaacccttcctgagtgaggacactcgtaagaagatcatggtcctgggaggtaagtggtccagactgttctcaactccaaaggagggtctgtagcctaaatcgggtccagctttaggggtgtggccgtagccaccagggtgaaagctccctctgctagtttgggagcagtgggacccaggagcaagctggggtggagctagtgccttcttctgttttcctaagaactctttctctcagacactctagaagcaagcactgggtccattattgtagattcaaagatgaatgagactccagtccttgccctcaaggaacttacagtataacaggagacagaagacctagaaagagaggctgggtgcagtggctcatgcctgtaatcccaacactgggaggctcaggtgaaaggatcacttgaggccaggagctcaagaccagcctgggcaacaaagcgagaccctgtctttactaaaaaataaaaaatagctgggcataatggcgtgcacttgtagtcttagctatttggaggcttaggcaggaagatcccttgagcccaggagttcaaggctgcagttagctatgatcatgccactgcactgcagcctgggcaacagagcaagaccttgttttttaaaaaaagacctagagagagaaagctatgatataaactagaaaagacagtagactagtcatagagagggtgccatagaagttgcaggagcaaggttgctttcagttggggaaaactaggagcagcttcatttgacaagcacatagtatgtgccaggcctgagctactgccaagactacaaagatgaataagacagagtcctggctgggcacggtggctcatgcctgtaatcccagcactttgggaggccgaggtaggcggatcgcttgagcttaggagttcgagaccagcctggccaacatggtgaaaccccatctctgctaaaaatagaaaaattagccaggcgtcgtggtgtgcacctgtaatcccagctacttgggaggctgaggcaggagaatcgcttgaacccaggaggtggaaggttgcagtgagccgagattgcaccactgcactccagcctgggcaacagagactccgtctcaaaaaaaaaaaaaaaaaaaggggtcccttgaaggtcttttggcctctctgggaaagcagacacaaacaaatctatcagtatgctgtggtaaatgtacagaaggggaaaccacaaagtgcatgggagcactcagcgggagcacccactccacctgagctaggaagggggtgatgcctacctaagctgcgtgctatggaatgagtaagagtctgccagatggagcaaggcaggaagctgcttggcagaaagaagagcattgaacaaagaccttacatagcatggcagaggcagctgttatagaatgtgaggcagggtgtggcaaggtatgaggctggagagggaaccaggagtcaggccccagagaatcccgggcactaggttgaaaagctgggatatgactctacaggccactgggaatcagagttttcagcaggggagtaccacaaattttaaaccaagacacagtactagcaagattgcgaaggctaccagtttgcacgagcctctgtctctacaaaaaaaagtaaaaaattagctgtgcatagtggcacataccagctactagggaagctatagatttgtttgtatctgccttcccagagaggccaaaagaccttcaagggaccccctttttttttttgagacagagtctctgttgcctaggctggagtgcagtggtacaatctcggcacaatgttgtcacagtccacgcaagaggtgttgcaagcctgaatcggggaattggcaacagggatagagaggagaggatggatttaagaattatttagggccaggcgcagtggctcaggcccataatcccaaacactttgtgagtgtttgggaggcccaagtgggtggatcgcttgagcccaggaattccagatcagcctggacaacatggtaaaactccatctctacaaaaaatacaaaaattagccaggtttggtggtgtgtgcctgtagtcccagctacatgggagggtgaggtgggaggatcgcttagcccaggagttcgaggctgtggtgagtcatgatgggtgccactgcactccagcctgggcaacagagcaaaaccctgtctcaaaaaaaaaaaacaaacaaaaaaacaaaaaaaaaacaaaaaaaacttatatagaaagtaaaacagcagaactcaattgactagatgtaggaagtaagggagaaagctagaatgagctcctggtgtctggcagaggtgactgagagatggtgacgcattagttcaactggggaaaacaaaaaagcttgaagttgagcttgaggagtctgtgagatataaaaatgttgggaatacctgagtttgaagcttaggagaaaactctggtctggagatttgggagttatcaaataacagcagcagctaaaaccttgtcagtacgtaagactgcctacggaggaacagaggcagaaccctggggaacatccgagctcaagagcaggcagagaaagcgaacccagcagggagactgagaagtgattaatgaggttggcagagaagcaagtcaacagggaatggatatgcagggaagtaggggcaacatcagggtacaaggaaaagtgtgacccaaaacccagcaaagaggacacacaggcatcaagccagccagggacaggcaggagttcagttttgctgaagtggagtggagggagaaaaggctagaaaggtagattgggcatccaggtgtggtggctcacacctgtaatcccagctactcgggaggctgaggcaggaggaccacttgagcacaagagtttgagaccagcctgggaaacatagtgagacaccgtttcaaaaacaaaacaaaaaggtatattgggacaggctcatgaaagggtgaatgccacctatggcactgaactttgggggtaggtaagagggattctgaaggcttcacaatgttcatcttttggtgacacacgagaattggagattttccaaatgtatgctagtgagacccggggagtgaagtgaactcatcagggaagtgtaggacttctgggttccagacttagctctggcagcaacaagctcaagctctgttttttttttttcttttttaaatttaggtccccacaaaagcattcttttttcttttttgagggagccttgctgttgctcaggctggagtacagtggcgtgatcacggcttactggagcctcaatctcctgggctcaaatgatcatcccacctcagtctcctgagcagctgggactacagccagcacacccacctaaatttttatttttggtagagacgggagctcactatgttgcccaggttgatcttgaactcctgggatcaagcaatcctcctgcctcagcctcccaaatcactgggattacaggcatgagccactgcacccagccagctctctgctttttgttgcctcagttattctctctgtaagatgggaagaatcctcctggccttatcccaactctccagctggactgggggaagaactataaaagctgagcaagaggtttttatgatttttgttttttctgctgctaccacccaccatgggcatgagacggtttggtttcctggcagcagagctgtgtaggaggttcagtctgttcccctaccacacctaaaactctttcaaccaaacctgcctcaggctgggaagatacagaattttcaacagaggggggagattcactcgggctggtcactggagcttagcagtgcagattaaatcaccccaagaccacagacactgtgttcccaggagttgcatggtctttggtccctaaaaatctgagggctggcagactctggacagtttctgcgggtctccagccagcatgacactggcttgtaccccagggcctggagctgctgcctatatatgctctatatagtaggcataggcaggttttagtatcaaaatattgtacctggctgatatttgtgaatttggattggtgaagtggttcttagcattggctgtgctagagtcaaactctcctagacaggaaggagcttgggtattttaaaaaaaaaaaaaaagagccaaattactggtggctcaacagctgaaaacaatgggagcagaagtgaaatggtggctggggtaaagccaagaatccatttaaggggtgactctacagagatgcatttacttattaagtcacgacttagctgtaggggaaggtgggggaaagacacatagttctgccctcacagtgttcagtataatcaggacagggtatgtgcattcaggccttcctgcccgccacacgtgctgtttcctctgcatggaatgtccttctaccctttctttgtcccctctcctgctgtacttcaatgtatcacctccatggggtaataacatactcttaacgtgtataaggcactttatggtttaaaaagccctctcggccgggcgcagtggctcatgcctgtaatcccagcactttgggaggccgaggtgggtggatcatctgaggtcaggagttcgagaccagcctggccaacatggtgaaaccctatctctactaaaaatacaaaaaattagctgggtgtggtgtcgggcgcctgttgtcctagcttctcaggaggctgaggcggaagaatcacttgaacccgggaggcggaggttgcagtgatccaagattgcgccactgtactctagcctaggcaacagggtgagactctgtctcaaacagaaaagccttctcaagtacttagttcatttcactcccaccataaccaggcagggcaagaatgtcacttagctgttcagacacgagggcaggaaccagggtctcgatttctggcctggggcagagccatcctctggctcctgctgaaccccctgcagtactatgcatgcactgtgtgctcctaatgcaggaatttgaggcggggtgttgtggggtgcaatggatgggttttttctgcctctttagtgtagaccactagggttatggcgaaatcttacctagtgttgagatacatctttatccttccttccctctcctgccagcaaattggaaggaggttttactgaaacatatcagccctgaccaggtgcctgtggagtatgggggcaccatgactgaccctgatggaaaccccaagtgcaaatccaaggtatgagccgccagaggctagaggtgaacagggatgcctggctcaaatgcacattccagttcactccatgccatgcttctagatcaactacgggggtgacatccccaggaagtattatgtgcgagaccaggtgaaacagcagtatgaacacagcgtgcagatttcccgtggctcctcccaccaagtggagtatgagatcctcttccctggctgtgtcctcaggtaggggcctgggcccttccaggagacccgagctttcatctataggtcctgataggtgggctggaataggagaagccctggtgccaggaccccggagagggcacacacagacagaattatgtctcaattggtgatatcccctgcaggtggcagtttatgtcagatggagcggatgttggttttgggattttcctgaagaccaagatgggagagaggcagcgggcaggggagatgacagaggtgctgcccaaccagaggtacaactcccacctggtccctgaagatgggaccctcacctgcagtgatcctggcatctgtaagtatctctgccttggcaatgccttgaagccccatgtccagctttctgcctgtgaggttcctcttcctccatggatttttggctctgagtgttagaactagaagtggaatgccatcagttcaatcctctccttgtatagatgaagaaatctagccttggagacttgtttatggtgacccaactggttaacagcagggtgggactttgatctcatactcctaggtatgggtgagtcacagtcctaggcgatcacaggggttcaacacgtctgctttctggtccaggtctaactgggtctgtgactggacagatatttcttggggatgctccttcccagaggtcacagagacagaactggctgggtgggcatgggatcacaaggtaagcagatgctcaaaagtgcagccttcacccctgagtttcactcatctcccagctgaccaaagaatggacacagactatgagcaggcagtttacacaagaatataagaatgggaaacagacatttgaaaaggtgcttaatctctcttaactttgtaataccattaaaattccccttgactcagcaattctacttgtgaaaatttatcctacagaaatacacaaatactcaaagatacaggaacaaggatattcccggtagcctgggaaactggcagtaaaccatatgaccatgataaggtctgttaagtaaattacagtccatccatacaatgttaaagagaataaactgacatgtaaactgtctgggacatgttaaacaaataagcatgaaacacagcatgtatggtatgtacttactttggttaaggaagtgtgtacacagaaaagaactctggggaaatttatgctaactctaacagtggttatctctgggatgataggatgtttatggagggctttcatttttacagtatttctgcaaatatattttatgatgactacgtattaatattacatttataagcagaaaaaccatacctacactcccttcaacacccacaatcaaatctccagtttctttttgtcagagccaatggaaaatcaatcagagcaaaggctttatcatcagagctgagctggacttgactaaaggctagctccatggcctttggcaagtgacaaaacctaagcttcggtttccggactgctacactggggtatctcacagggatacctgatgatttgatgtgataggttctgtgaggcacttagcataatgcctggcatagagcaagcactcaatgcactgcagtcaccactattattgttaggacaaggcctgtgggagaagggccatcctgcagacaatgccgggagatgggagaagccctgtgccccatttctacggtagtaccagcactaccaggagatctgaactagcctcacagatgtcttggcctctctgcttgtctacatggtcacccaacctgagattttgcctccttcctcacatcccaggcacccttcatctccactgccccctcctcacagatgctctgtggtaccatatagctcctgggggaggcggaatattcttattagtgagcagccgggtcctgggggagaaggtgtatactgtgtgcttcagcaagaacaaggcttagcaccagcccagacaatgtcacccacagaggagaaagcacttaatacatataagcttgaatttttttgtctgtttctttgtttttagtagagacgaggtatcgctgtgttgcccaggctggtctcgaactcctgggttcaagcgaccctcctgccttggcctcccaaagtgctgagattaccagcatgagccaccatgcccagccttgaattatttttttaatggatggggaagctggggcatagagaagggatgttctcccataaagtagcttatgtagacatcaagacagaagacatcagagaatcctagagtcctgatccagaacctcttggccattgactgtcctggatgtgtcagagagtgtggaatcccagaccagggaagtaattgacccaaggtcacagagcctgtaggagagccccaaaccattttccagcatctgcccattacccctctatcttctctttagtatctgaaggacattgcccaagaagggaacatgaaccttttaacataatcaggcttgggcttgcaaacccccaaatttattttagttccttctggatacattcccaaccagaacctttacctgcctgcagggtcttgtctgggatctgctccttgcccattcccaagaggagcagaggcaggccacaggatccattcccccttcccaggtacaaagacaatgaagttggaatcagctgttacctggtgccacagctaaggttagatgtgagcccagagagaacccagtattagcttgcaagctcatctgcgggagggcaatgcccttggagaaccaggagacccctggaaagcagaacagtcatccagtggagaaattaaaactgtgccagcctccaatggcaagagcacattaaccttccccaggcttctctggtccttatcccagtgcactaaattaccaaggaggaaaaccaaagtttgaattgatttcgcttttgttttctcacctaatatttaccaagggcctactgagtacagaatactcaactaggaatgaaaagattcccaaagaaagatctggactttgtccactagaagtgcacaatgtggtcagaagactggaaacactatagaaagggtgagcagtgctgtggtgaaaagagcccagccaggcaccaggaggcctggtttctgagtccagctttgccaatgactctcccagtgttttcagcaagtgtctctattaggtttggttttccttctccttaaaatgacagaagtgatggccgggcgtggtggctcatgcctgtaatgccagcattttgggaggtcaaggtgggtggatcactcgaggccaacagttcgagaccagcctggccaacatggcaaaaccccgtctctactaaaaaatacaaaaataagctgagtgtggtggcgcatgctggtaatcccagctacttggcatgagaattgcttgaacccaggaggcggaggttgcagtaagccaagattgcaccactgcactccaacctgggtgacagagagagactctgtctcaaaacaacaacaacaacaaaaagagaggagtagaccagagcagatcttaatgtggggtcccccggagcagtggttctaaatcgtaaagaccaaacacttcctctttacagcaaatagtgtctaaaatgtcccctttactattctgaagtgaaattcaaaatacagaaattctgaatattatatcccaataatataacccatcctacctacacatgtaatttaaaaatcaatataatctcctatggtaatagaaaagagatataaaagggaactaatttagaatatatattttttcaatacatgaatgagagggtaaggttgtacctttcccattgggaaccatggccccagaggttctacagtgggctccaggaaatctaaaattatgtgcctttttttcttttcttttcttttctttttttttttttgagacagagttttgctcttgttgcccaggatggaatgtaatggctcgatctcgactcactgcaaccttcgcctcccaggttcaagtgattctcctgcctcagcctcccaagtagctgggattacaggcatgggccaccacgcctggctaattttgtatttttagtagagatggggtttctccgtgttcgttaggctggtcttgaactcccggcctcaggtgatccacccgcctcagcctcccaaagtgctgggattacaggcgtgagccaccacgcccagccaaattgtgtgctttcatcagattctcaagggggtcagttacccaactaaagttaaggagccttatcctggagggtgtctgggggctctgtgagtctatgattagtgtcaaaatgaaccatgcagactctggagctgcaatgactccacttccctctggcctgtggttctctgatcaacccctttcttgtttctgaggccaagtatcttgctaggcagggccattatcgacctagtacttggtgcaatgaatgcaaaggacctctcctccagcatggctgattctggttgctaagactctatcatccagggcagagatgaagcttcactcttgccagagggactattggctctgaaagacctctagtacaggggaaaaatagatgactaacaccttcaccatgaggaaagagtgggtggtgtgtctaccctttgtctaaactatgcattttgtccagggtcaggaaaaggttaagtcttaggattaaatacaggatattttttttcttgctgagaacagtgagagaagaccgggatagggatggggcagaactagtgtttttgttttcacattcagttctcctgaagcggtgtttggctgaaatggaacaacttctcaaagaaacagggttagattaaaagcagcctgttcctctgccaaagtgtggaagctttctctgccaagtgcatgcccattttctctttccagaggaaaccactgctaatgtctattatcctatcaaatatcttccatctagaagcattacatgtttccataataaacagggcatacagtgctcgctttgtcagcacatacactaaaattgaaacaatacagagattagcatggcccctgcgcgaggatgacaatcaggttatcttaaataaataaatagaaaacaggacatacacaaacacacacacacacacacacacacacacatattcacaggaattgtctgtcattcactgtatgtttgaaggaattttgaaactgtcaaactcatcgcaggatttcaggaaactttcccattaggacaagcaccagagtggtatcatcagagaatctgggagtctaagcagacaaagaagtaaagccaaaagtatttttacctatgtagttacaaaaaagttacaaactgtttacatactgttctgcaacttgttttggcctcaggacacattgtggacagtttcctgtcacttctgtggagctaacctcttttttaaaaaatatatcagtattctatcacatggattacaacataaaattgttgaagcaattctcctttgatgaacatttgagttttcccaatctcttattattacaaatagggatgcaacgagcatctctgtccatttacctttttgcaggataaattcctggttcacaaagtttgcacattttaccttttgtcagaaattgaagagggccaggttttccagggtccaagtcaggcagaacaaatgcagcaatgtggaacagacggaaactccagctctgtcatttcctcactgtgtgtcaccagagtcacaccacctcctttttatcagctataaaacaggactactgctgaactcgtagagttgggggaaagagtgagataacatatagattaccaacccagtgctgcgacacacagctattattgttattacaactgctactgctgctgctaattctcctccctcctttcaaagtccagttcaagctctaactcctttaaaaagcgtttcacatgatttcagtctaccaggccctcttcttccaagctggtacagacgagatggtctctgtcactcatctggcacttggcatgttctgcctatttttttctctccatgaatgtcttgtcaaccccgctagattaagtttcagaaggtcaaggatcattacctaggctaccttcatccccatgacctgccacactgccttgctcagtcactaaacatcaacaaaaatcactgtccccaagccctttgccagaactgcctgaatgtctgtctggtttctgccttccctcagatgtcctgcggtttgacaacacctacagcttcattcatgccaagaaggtcaatttcactgtggaggtcctgcttccagacaaagcctcagaagagaagatgaaacagctgggggcaggcaccccgaaataacaccttctcctatagcaggcctggccccctcagtgtctccctgtcaatttctaccccttgtagcagtcattttcgcacaaccctgaagcccaaagaaactgggctggaggacagacctcaggagctttcatttcagttaggcagaggaagagcgactgcagtgggtctccgtgtctatcaaatacctaaggagtccccaggagctggctggccatcgtgataggatctgtctgtcctgtaaactgtgccaacttcacctgtccagggacagcgaagctgggggtggcggggggcatgtaccacagggtggcagcagggaaaaaaattagaaaagggtgaaagattgggacttaacacttcagggaagtcagctgccggggagaaacttgctcctaaatgaacacataagtttagatcgcaatgaggagtagcagggtagctggttgctagagttacggtggggatcagaaactcttccaaacattttagcactgaggctggggtagcttttggcttttcccaggtctcaggaggtggcctgagtcagcacacatcttcccactcggtagacaggctggcctctccctcactttgagactttggcaactcctgggccacacggcctgcctctttgattactaatgattgtcagtgactcagagcttcctgggacttcgggtacccacccgctgttctccatgcaaacaaagcgccagggaaatgacccacagggatcgcagctgcagggagggccagggaggttgggggtgggagtgaatgctaaaagcagatcgtccagtgcccttttcagtgctaccggcctctcaccaagcagtcctccatgtgagcaaccccgagacaaaaatgctaagtgggatcaagagagcagcactcggagagggtgtttgccagtctgagtgtcccgcggtgcccgccaacccgcttcctgactgacctgagcaaggtcttactaagcagtcccatctctgtgggaggcatgcaacgcgtgcagggagttcaggtgccggtcggcgtagccaggcctggaggccccccaggcaggaggccgcccaaaggcggggccggcgtctcgcagactaggggctgggggcggccacagacggcctcgaaaccacagcccttaccccaatcccacgagccccgccaacgaaccacaggtgctgggctttagagaacatgggaaggcggccccagacctgcgggaacgcctttccctcagagccaggccccggccccgtctgggaagctcatcttgcgaagctgagggagctcagggcaaaggccaggctagcgcggaccggaaggggccgaggctgcacgggcctctgccagaacgctcaggacatcccggcctgggtttacaacgctgttaggaaaattaaccaatgaataaagcaacgttcagtgcgcagggagtgaaattcaatgcccaccgctaggctcctcgctgcctctcactcaagaggcccaaactcagacggcgtcagggacccggacccagcagccgtttcacgccaatagatagggcgcatgcgcagaaatcctcctcggctctctagcgtgagctttcccaaggggccacgcccagcttgccttctgattggtccagctggtgggttgtcttccgccatctttgatcagggcactaaggatgctccccacggccttcacagtgacggcggagaccctgccccgccagctgctcagtacgtgccgcgtagcccgtgcgagccaagtgtgagtccgggcgagcgcctgcggagctagcactgggcccagaatgagagggaggcggaggagcagcgatcacgtggttttagggactgtctaataattccacgccagcattgccggtgtttcagggggtgggaaccgctgcgttccccatcaacttttctcccacccaccaccctccccaacctacaagcccagctcagcttgaggtaactgctgaccggactgtcctatacagccctacaagacagaggcgcctagggctgaaagcgggggcctccgtagggagccagcgggggcctcaatagttactcattttctctacctttgatgaaaataagagctaattcttaataaggcctaccgggtatcacgcaaaaaccctgtgcttactattacactttgggttgttgcaaagattaaaggaaataagccgtgcaaagcgcttaagagcttggtataagtaagtgctcgtcaatgttggctactctcattttttttgcagacgtgggaactggggctcagggaggctaacagccagtaggcggcacagctaggatttgaacccaggattgtctccaacgccgctcaattatacccgccaaggagtcacagagacttagtgaagtgcacacattgctcacctgggtgaactgaggtccagcgggggaaggcttcctcctgttgtaatcactaaccccaactctgtctcccttgcccgattcattcattcgttaattaattcatccaacatcctgtccccaagaagctcagtctggggacatactgatccagttaaatgcgagtgcttcctagttatacatggcgactgctgagaagggactccagagtccaggcacctacctcccaggggctcaccgttcactcctctagcctcatttagagctcgcattaagagcacgggatctggatccacactgtttggattcaaatcacaacttcaccacttagcagctgtgtgttctgggaaaatgacccaccttctctgtgcctccattttctcacctgtaaaacgggctcccaggctggtgggagggtttcaggtgtaagacatggagagtcctttagcgaacatgtagactggcaataaactcaataaatggtgactgttataattaatcctcggaaccatcctagggagtggacactattgtgttccccattttatttattacattaattttttttttttttttttagtagagacgaggtctcgctatgttgtccaggctgttctcgaacccttgggctcaagagatcttcccgcctccggcctcccaaagtgctgggatcacaggcgtgagccaacgggcccagcctgtgtccctccctcgtttttacaaatgaataaagagatgctggataagcccgaggtcacaagctttgcagtgtagcatcccccaacttgatcccctgtctctttggctccaaaacctacactcagtcctgggagcgattagcgccaacagctcagagaaaacgtgacgaaaaccagtctgtaaaacccgagcctgggagaggggcttcggtgcgcggggggaatttgcagacgctccctgctggcggagatttcctgacctgtccttcggcgcgggactttcggcgggtcccggccgggcagacccaagtgccggcggcggagactgcagtggagccagtaccggctgtagtggccggggccgtggcgggagagtcatgtcagagccgcagccgcggggcgcagagcgcgatctctaccgggacacgtgggtgcgatacctgggtgagcgcggggcgacgggcgcggcgaccccaccaccactgggctggagaagcaggggtcgccggacgcccgcccggggcctggaggaggcgggatgatcttagttctcattctgcttttgggccggagactgggctcagacagggctagggacttgcccaaggtcacactaccctggtgggtcgcccagggcggaagctcccatggggtgagcgggctgcccgctctggcatgcgctctggctggctgtggagtcgggatctccactcccatttcggtcctgacacgcactggctctgtctgaacctcagtttcctcctcggcaaaaaaacaaaaacaaaacaaaaaacaaacgagatacacacgagggcctctctcattgggtggtggttgcgagggtggaatgggataaagcgcagaaagccctggcacttggcgagcgtctggtcagtggcgctgccctcgatcactctgcccctctgggtgcctgtcacctcattagtgcagttactcctgggaccaagaccaggaaatctaaccaataagcaatggtaacagtgactcagtgctcagtccgccctcagtggcccgagtccgaggtgggcatcatggcaccagtttacatctcggaaagggaggctcagagaggtcaagtcacttgcctaaggtcacccagggactgcttagctggctaggatgagaaccagcctgctccaacgccccctcgtggaacagttgcgagcctaggaattaaatgttccctcccccaggctatgccaatgaggtgggcgaggctttccgctctcttgtgccagcggcggtggtgtggctgagctatggcgtggccagctcctacgtgctggcggatgccattgacaaaggcaagaaggctggagaggtgagtgttagcctattttccaacccccaaccctagctctcttcttgtgtggttcagtccacagccttgcatgtgataaagtccctgtggacactccagtccctacaaccttgcctagtgcagtccatagacagtcctgtttgtaggacagtgtacccctgcccccacactcccactccccgaactggatgtggcagactgtaccccactcctgggtgcggacaagtccactggccacttgcccctcccggtctagcctcgtgccccttgtcgcaggattttctgcctctgccccagctggattaagtgtctctgcgcccaccaggtgcccagccctgaagcaggccgcagcgccagggtgactgtggctgtggtggacacctttgtatggcaggctctagcctctgtggccattccgggcttcaccatcaaccgcgtgtgtgctgcctctctctatgtcctgggcactgccacccgctggcccctggctgtccgcaagtggaccaccaccgcgcttgggctgttgaccatccccatcattatccaccccattgacaggtgggtaccttcttggcctcagggatcatccactctccagtgatgagagtggatcatccagtctccaggtagagctagactctgtgaagtgtggggtatgcccactttgctggagcaatagcagggacaaggctggcacttggctcctgggttagaaaggacagcctgtacccttgtcatatggtatggcaggcactttagcaataaaagaagaggggtgcgttgagggtatgggacacaggacaagtaaattcccagaaagaaagtctagtgttacaaaacaaccagagagaagcaggagcaggtgcaccctagaggggatgcattttgggaggtattggtgacagaagcctaactcaaactgaatatttgaataaaatggagtaaaagtccagggctgtgttgcattcaggcatggctagatctaggtacccaaattatgtcattaggggtctgggtctccccatcctgctgcctttctccccaccccaccctatttcttgctggcttcacctgctttctccttgtgggagtagaaatggccctagcagctcccaagttctatcccaccagcttagcctcccccagcagaagcttttaaacagtaacaacaaaaatcccaaggaagggtgtcattggtccattctggactgcatgcccaccctatgagccagtttccctttgctgattggccaggcttgggtcacgtgcttggtcttagaactagatatgggctcaacccaaccagaccaatgtaagagtgagaggagcagtctttctccaggagaagatagctgaccctgaggccctgagcaagtcttttacccagtacctcagtttcctcctgaataaagaagaggatggcttctattctgggagtttgattctagcttccccaggtagcccaaggtggaaggatcaggataagggtgggtctctggctggatggcatttgtatcctgcatctaagcgcccctttccctaaccctggccttctgccttctgttccctcatgaacacccttggtcacctgctcaccacccttccactccctacaggtcggtggatttcctcctggactccagcctgcgcaagctctacccaacagtggggaagcccagctcctcctgatcatactctggtacctggcctgtgcatcggcctcctgcttcatgtcaacctcctactcctgccagggaatgtggacacctggctccctggtgtccaaagaccctggcacctgggtgggtttgagctggacagaagcttagagacaaaggcttcaagaagcagtggctgcagggagtcacagaagggcaggacctgaacgctgtctgcttccctggaatccaagatgctgagtggaagtggaccctgggtgggcccggccctgtctttttcaggaaaattacatcctcccatggaggatgagagactgaggctcagggagggcaaggaataggcccaagatcacttggcaagctgggcacccaggacccccaggtgcttgacagagtcaccccatggtggtatggctgaacaaggagcggcagacaactcagggagaaactcaggagtgcagtaccagggacacctcaggacagattctctggccaggcccttccctgacccaataaatcctgaagaggttgttatgtcttcatttctgtttgggaggagcagggatgtggtggtggggaggagggatgggtagcagtctccccgcccattagtgcttccctgcaggtgcctggcatcccacgttggtgctgccagcctcctttggggtaggcattaccctttacttacttacttttaatagagatgggggtctccctatgttgcccaggctggccttgaatgcctgggctcaagcaatcctcccacctcagcatcccaaactgctgggattataggaatgagccactgcactcagcctggcattgccctctttttctagcctcctaaagcaccaacccctctgggaggggagcctgttgggcagataccacctgagcctgaaggtggccaagatggtggtgtcagccccatatgagggtcacatgagacctcctcatgaggggactcggcagcctggagaaggaagtgaccagggggcttcttacactcagaatcagggaatggcctgttttccttgtggcttcccctgagctgctgggctcgagagtgctagagggggccattcctctgatcctgggccatccccctcaacagctcagagaggtagagaggtgggagcacagggctgaagcagacctgggcccctctcagccctgccccaagcaccaaatcagctcccaccaagaccctggccccatcccttgcagcccaggtgcagtcaggtaggctgaccctgtcctggtgggactcacctgcacctgggctgggacttaaaggggctgcagggctgggtaggggtgctgccagcaagacaggatgggggctccggggtggtggcccctgctgctctgggggtatccatggctacaggatgagtctgatgtgggctgagcctttctctgctactcttattgtcccacactggcaaggtccccttcccaagcccctatggcctctgcccagtcacctgtcactccctcccagctcccttaaaggctttaagccccgccttgttctctagcccccgaccccaccccccattccctgtctgagctggcactcacatccttctccagcccagcattttcccagctcatcttctcccccggcagtcacagccccatgcggggtacattcacacctgcatccctgtgacatctcctggcatctaccaccaattccttgctcactcactctccactttccactctgcaggctctccctcaagctgggatctgtgcaggccacatataggctttgtgctcatgggcctaagcgcccagccttgtccttctccccatcacctgccctcctgtgcctctatgcctttcctcacaacacactgttcctcagctgcaaatccttttcctcttggccagctatgagcacccttcagaaccagctccagtgccccttctgttgttgccccttactatgccttactgtgggccacctctgcccttgactgccccgttggtggtaacttgtgaggaaataccggggtgcaagtttgcagatgcctggcacatagtaggtgctcacagaaggggctttgaggcactcccaggccaggctgatagggatgaggtcggtggacatcctgtctgtagggggaaacaccaccatctccacaaccccccaacattttaccctgctccatttattattattattatcattttgagactgagtctcgctctgtcacccaggctggagtgcagtggcacaaacttgtcttactgcaacctctgcctcccgggttcaagcagttctcctgcctcagtgtcccaagtagctgggactagaggtgcatgccaccatgtccagctaatttttgtatttttagtagagacggggtttcaccatgttggccaggctggtcttaaattcctgacctcaactgatctgcccaccttagcctcccaaaatgcggggattgcaagcgtgagtcactgtgcccagctccctgctccattctggagatgcagggaattaattgaaggtgggggatgctgggggaggtttttgggcaccctctgctggccatgttctcgctgagtctggttctccgcctgagctagcctgggctggattgccaggagacagcctcctgcaggactgtaatcagacagatgtcctcctggcagtgaggaaggagccccaggtggatgcttgccacctgtgccttggcacctgcctgccctccccagtccctgccatacctggctatgaggtcttcactgccccattcaaagcttatggcttcatccaactggtgagggggctgttggaggctcacgaggacaaggctgccaagagccagggagtacccgggagattcgggggagaagagctggggtgtctgggctggaaagaagggtagaatcagatcatactgatttgcaagtcacagcctctccgagtgtgagtttttctctcaaagatgcagagccctgtatctctgcagaattcagtagctaaggatttgatgcagatttgccatttagcatctgtgtgtttgtacgtgccctttacgtgcatttgtttcttgcatcctcaacagccccgtgaggagataaaaccatcattcccatattccacatgaagacactgaggctcacagaagggaagaccccactgtctaccaccagatgcaactcagcacatcattcttcaaagcagaattggctttttttttccttgagacagggtctcgctctgttgcccaggctggagtgcagcggtgcaattatggcttactgtagtctttacctctcaggctcaagtgattctcacatctcagcctcccaagtagctgggaccacaggcgtgtgcctggataattttttgatttttttttttttttttttttttttgcagagactagatctcgctatgttgcctaggctggtctccagctcctgggctcaagcgatcctcccacctcggccttccaaagtgctgggattacaggtgtgagccaccgagccctgccagaataggcatttaagcaagacagggacctcgaatgaggcctagcaggaaattgaggcccagacagggcaagtgacttcaagaccacccagtgaggtgggggcccaagctgggagtagacctttcctgccttttcccaccatcctaaggagcaagtatcctcgcagatctcaggaaagatagtggaattatttgctgacctggtctatgcaccaccacccagttcagagcagccctgcagtgctgcctcccgccattgggtcagcagtgtggtcaaggcgtgagcaatgcctagcacccctaagcctgtctagggccctgccacctggaggtctgcaggaagagggaatggtaggttggatgggggctgcccctccagaaaggggccaccaggcgctgacctcctggcccccacttggtgtgagcctggggcagggctggaaatgctcacctgggggttggaatttggaattcctggccttttccctcctgttcttcctcctcatgggctgccctgggggacttggcatgggcctttagtgtttgttttctgggccccctcacatgccagagttgcaatgttccccgccccccccttatttccctgccagcccaggagctcccatctcacctcccacctccttggtcactgactctctggctgcgtttggaaatctggacttcagcatgagactttggcctggttctttgcctcccacaggtgggggacattggctgggctgaagtaatgtcccaagaggaaggtcttctagctcagggactcctgtgcctccagttctgggccaggttacccctggagaaataaggaagtgagggaggaccagtaacagagtgtgagggcactgggcttctggccacctggccctagcttttcctgcttctcctcttgctgtgtggcctcaggcaaacccttcagcatctctgggtctcgtgtcttccccatcttggtttcattccacctcagggtggggccatactggaggatccagaccccaccaacaccagcaccattttcctgggctctgagctccacatggagtttgctgtggttggcagctcccattagcctttacaggtatatgtggacgagtgtgtgatcagccccagccaggatatggaagtggcccctgcacactacagccttgtcaggaatcatgggtactgaacctggaggaggaggatagggtaggatgggtacaattcagtgggtgatatctctggggaggctgggacaggggctgagagccttccagggctggaaggcacggatgcccagatagtgctccctgggcgttcttgagtagtcctttctaggccaggggagcaagaatgctttactggccctttcacctctggagcctctgtttgcccttctgtgaaatggggatagtgccagaatcttcaaagcctgctgtgtagactgaatggggtgacgcttagctcagtgcttggcatgcagaattctcaacaaatgatggtgtatggtggtgttggggctaggaccagatcccagttcaggggtctgaccctgatgaccttccaacctgtgccttccaggtgcctggtgaacggcaagaacttccactcccacttcgtgccccaagaggtccccaagagactggagctctccttccaggccttcagctttactggtactcctgctgatgtgagtggaaacagataaccccctccccactctgccaccccgtaggaacagagacccaagctgaggaatctttggaagttacggggtgcaccacaagctgttgctctggaatctaaaggtcccatctgatgctaccaagaaggcctgttccttccacaggggcactcatggtgagtcatgttcaccaaaggtgtactgcatgccttaccctgtaactggcatttgaggtacatgacctcacttaattgtgtgggaggtgaggaaactgaggctcaaaatagctcagattgaatttctgcaatagttccccatgcttggctggaccacaagcccaactgctttggcctagagtgggcagtgtgaggtatactgggaatggaggctttggactgtgacctagacccaggttcaaatcccagctccagctcttgctggctgtgacatcatgggcaagtcactgaccttttgttagcctctgtttctttgcttgttaaatgcaggtctggtccatgccacccctagctcccatctctggtgcactgaccacctccatccctcacctctaggtaagaacttctggatgcctccctgggagtatgagtgacagttgtgagattacctgcctggccccctgattaccctatcaaaggtccttggcaggtaggaggcccctgttttgggtgtggagggtggaggtaggctctgaggcaagggaggcagctggcccggggaatcagtcacagccttgcatgaacaggcttatagaagacatcatcttgctactaaaggcctctgaggaaactgacactggcctggaccacaaagacccactcaaggtgcccattgatcagaaccaaggagggtcctggcttctggatcctgtctggagaggcttctactgtgtgggaccttgggcaaatcctttccctttctgggccttggtttccccaagtgcaaaatgagagcattagattggcctgccacttttgagcctctcatgtaatctttattaaacagatatctggagaccccttcacctccacccacataacccttgatatatgcccttctgagagtttcatagaggagagagaaggcttgtagtcactcacaccatagtataaacaacatgttatcttttctgtccttggaaaaaaaatagcttcatattctctcaactttcagtatcagtaaacaaatagtagaaggtcagaagtttatagctgtgtgtgttgggggtgtgaggggatgttgtgttgtggcttaaaactgtctttgatgtctttggcttccagattccaatcaggcctctgagaaggcttcccatcaggcccctgagaaggcttccaatcaggtgacagagaaggctgacttgtcctctgaactgagtcaggcttctgactctagggggcctggagacgagcaagggagccctctcctgtagcctgggctcttctccaggtccccttcacagtgagagacactggagctctgcatccagtggtctttggcagtccctgtagaaccaggctctggcttcctccttctcccctccctctcctccctgggcccccatttgtggcctgccagggcagagcctgaaacctcaggcaatctggctgtaagcttgcttacctcatgaccttggaagccacttacccctttgagcctccttatccagaacagtaactgctgcccactgcatattgttaatacatgctgcctttgttgcctgcctgcctgccaaaggaggggccagggcttccatttttctgtttaatcctcccaagaatcctcccaataatcccatgcagtagacacaatcaggtcccattctatagatggggaaactgaggcttgaggtcacataggcgtcgttcaaggctggtatacctgcaccctctcccatgtgaacaacatggttctgggtaatgggggctgtcatccagtctcctccctgcccctgctggtgcacttcctgcctctgctggtgcactttctgcccctactggtatatttgctgcctctgctggggcgcttcctgcctcggctggtgtatctcctgcccctgctggtgcactttctgcccccgctgatgcacttcctgcctctgctggtgcacttcctggctctgctggcgcacttcctgcctctgctggtgcacttcctggctctgctggcgcacttcctgcccctgctggtgtatttcctgcccctgctggtgtacttccttcccctgctggtgcacttcctgcctctgctggcgcacttcttgcctctccaggccctacctagcctctccctcttatatatggaagtcttcccagttcactgacactggtaacagggactctgctcttggtgttgctgtctgccctggggatgggcatctgtgtcttcctttactactgctggctcaggacccagagctttgaagcatgtccagatgcaggtccgggcaccagagtctaaggagcccctacacccaccaggattttccaataaagagatgttcaccaatgagtttagctctctggttttcctgaggaagggctgggaacatgaggtccccagaacaggggccactgttggggatactgtcttaggcatggcaggactcagacaggggtggggaggggtggaaagaagtgcgtttttcctccaaacctgtggctgccttgggtaggctgggctcagagcactcctgcctttgccccttaatgtttgagaagcccagcagccccctagggcggaggttgagcctcttgaggatgacagagaggagggcccattggaggtttactttgcatatcctcttgcctgtagaccagtaagtggcatgtcacagctggccagtagggatgacagccaattgttagcttttcaggaattttatgagctcgttgttagacacagccattattaaaaattaaataatgtaggctggtgtggtggctcatacctgtgattctaacactttgggaggccgagggaggtgatctgcttgcgcccgggagttcgagaccagcctgggcaacacggtgaagccctgtctctacaaaaaatataaaaattagctggatgtggtggtgcacgcctgtagtcccagctactcagaaggttgagatgggaggatcgcttatgcccaggagtttgaggctgcagtgagctgtaatcacaccactgcattccagcatgggcggcagagtgagaccctgtctcaaaaaaaataaataaataaacaatataaaaagatcaaatgatataaacttagatttaaatacattttactaaaaacaaagtaaatgctcaaaacttgttgcctcgtaatcattttactatcttaatagtaaatattttactatcttactatcttactatccttactatcctcactatccttactatcatccttactatccttactataccttactatcatctatgctcttgggagcttatttacatctattctgtttggtggaaagaccacattatcatgtgctactgtgtatcgctttatgtgggaagcttgaaataggccatagtggacacatttataccatggaaattgacaaggcagggtctccatacctagaaagtcctgtagtttaccaccattcttctgaccctcttgctaacccagagggtaggtagtgtgaaccaaaagtatctgagacaggtctcaatcaatttagaaagtttatttttccaaggttaaggatgcacctgtgacagcctcaccctgatgccatgtgcccaagatggttggggcacagcttggttttatacactttagggagacatgagacatcgatcaatgtgtgtaaaatgtacatgggtttggtctggaaaggcaggacaacttgaagtggggtgggggcttccaggtcatgggtcgataagagataaaagtttgtgttcttttggatccttatcagcctttcactgaataacaatttacatgtgagccggggtggcgggtagaggaatagtcacttatgctttagtctggctcagtgaagctgcatttttacataaacaataagggcagaggaagcaatcagatgcatttgtctcaggtgagcagagggatgactttgagttctgtcctttgtcctgcacctgtgaagatcagctattcatttacattgccagggtgaaatccaacagaactgttttagggtaaaaatcttgaggcctacaaggaatttccttgtgggcaaaatgtgcatgaggtatgtagctttttaatccttgtagctatcttatttaggaataaaatgggaggcaagtttgcctgatgcagttcccagcttgtcttttccctttggcttaatgattttgaggtccccagatttatttccctttcatagtagataaactgctccccattccagacttacattctaagaatcagagaaggcaagtgacctggcaaaggcctcccagcatatatggtcacaggtaaaactcaagcctggtctgttattccctccccaaaactgcctggtagggagaagggaaagccagcctcagctgtgactgactcctggctatctggagctctccctccagattcctttctacctctctggctgtcaccccagtgctaagagcctgggctcaggccctcctctctctaccctggctgctcccgctcattcctgtggcttctgtccccagtactctagcaccacatctcctatctgtcccctctagacatatatcatggtagcagcctctagcttgttcctctccaaatgttccctctggccaaccacttcttacaatgttcagaacagagtccagaccctcacagtggctctcagggcccttggtgatctggataacgcccctatcatacacacccttctcactgccccaccccaaatcttcatttcagccattctgtcctttttgggtccttagatctggtgtttctcctgcccaggctttctcatatactgttccctcctattgggacactcccttccatgcctttcccccagcccgtcctgcaggttcaccagccctaccctgattacagctccctcctccctcagttcctgctccccaacccaaggtgacctctgaccccctctaactggcttaggaagctcctcttgtaaccgccaagtgggttatcaaggcaggggaattgcagtggagaaagagtttaatttatgcagaaatggctgaacaggagaccagagttgttttttgtttgtttgttttggtttttcttttgagatgaaggcttgctctgtcgcccaggctggagtgcagtggcgtgatctcggctcactgcaacctcctcctcccaggttcaacccattctcctgtctcaacctcctaagtagctgggactacaggcatgcgccaccaggtctggctaatttttgtatttttagtagaaatggggtttcaccatgttggccaggctggtcttgaactcctgacctcaggtgatccttctgccttgacctcccaaagtgctgggattacaagcaggagccactgagactggagtttttttattattcaaattagtctcttggagcatttaggggctagggtttttcaaaggtagtttaagggaagggtggcgggggtggctaggcaatggggcctgctgctgactggttgggggtgcaatgataggggtgtgggaaatgatcctgtatgctgagtcacttctgggtgaggccacaggagcagttggcaggtccaggtggaaccataggtgtcagacatacaaaaagcctgaaaagatacctcaaaaaagcccgggcgtgatggctcacacctgtaatcccagcactttgggaagccgaggtgggtggatcacctgaggtcaggagtttgagaccagcctggccaacatggtgaaacctttgtctctactaaaaatacaaaagctagctgggcgtggtgatgggcatctgtaatcccagctactcaggaggctgaggcaggagaattgcttgaacccaggaggcggaggttgcagtgagccgagatcgtgccattgaactccagcctgagcgacgagagagaaactctgtctcaaaaaagaaaaaaaaaaagatacctcaaaaggccaatcttcacgaagggccaggggtcccacaggtgagtggagccccagcagccccctcagctctgcgtgcccatgtactggtcttctccctggctctatactcagtgttcaaggggttgcagtgagacggggcttgggccgcggagctgcgcctggctttgctgctccacaagggcaccgtggctgtcagcctgtccctgcaactgctgcagagccacgtagggttacaggtggtggctggctgtgggatccacttcttgtgcatgacacttctaggcatccggctgggtgcggctctggcagtcagcagggcctctgcaccagctggcccagtctgtgctagagggcatggtggctggcaccttcctctataccacctttctggaaatctttccaggagctggcgacttctgagcaaaggatcctcaaggtcattctgctcctagaagggtgtgccctgctcactggcctgctcttcatccatatctagggggctttgaaatagaggccgctgttctccctccctgccccagtgtgtggggaaaaggaaggaatgggaagggaggttctgaggacgaaagctttctctaggagctaaggatggagcctttggcactatctgacccatgagagggaagtgggcaggcaagagagactggtctcagccccaaggaacgagagacggctgagtcactagagacatgatcagggacattagtgttactagaaaggggtcccgatccagaccccaagagagggttcttggctcttacacaagaaataattcgaggtgggtccataaagtgaaagcaagtttattaagaaagtaaaggaaggccagacgcggtggctcatgcctgtaatcccagcactttgggaggccaaggtgggcagatcaaaaggtcaggagatcaagaccagactggctgacacggtgaaaccctgcctctactaaaaatacaaaaattagccagctgtggtggcgcatacctgtaatcccagctgcttgggaggctgaggcaggagaatcgcttgaacccgggaggcggaggttgcagtgagccaagattgtgccactgcgctccagcctgggtgacagagtgagactccgtctcaaaaaaaaaaaaaaaggaagtaaaagaattaaagaatactccatagacagagcagcagcatgggctgcttgactgagtatacttacagttatttcttgatcatgtaactgcccagcgggttctccttgcccactgcctagacagagccgattgatcaagacgggaattgcaatagagaaacagtaattcacacagagcctgctgtgtgggagactggagttttatcattactcaaatcagtctccccgagcattcggggatcaggatttttaaggataatttggtgagtggggggccgccagtgagtcaggagtgctgatgggttgggtcggagatgaaatcacagggagtggaagctgtcctcttgtgctgagtcagttcccaggtgggagccacaagatcagatgagccagtttattgatctgtgtggtgccagctgatccgtcaagtgcagggtctgcaaaatacctcaagcaccgatcttaggctttacaatagcgatgtcacccccaggagcaatttggggagggtcagaatcttgtagcctccagctgcacgactcctaaaccacaatttataaacttttggctaatttgttagtcctacaaaggcagtctagtctccaggcaagagggaggtttgttctgggaaagggctgttatcatctttgttttaaactataaactataaactaagttccttccaaagttagttcagcctgtgccgaggaatgaacaaggacaacttggaggttagaagcaagatgagaacgggcatggtggagcgcctgtaatcccagcattaagggaggccgaggtgggcagatcacttgaggttgaggtcagcagctcgagaccagcctggccaacatgatgaaaccccgtctctactaaaaatacaaaaattagctgggcatgatggtgggcacctgtaatcccagctacttgggagtctgaggcaaaagaatcagttgaacccaggaggcagaggctgcagttagccaagattgtgcgactgtactcctgccagggcgacagagcaagagtcgatctccaaaaaaaaaaaaaaaaagcaagatgtagttggttagttcagatctctttcactgttataattttgcaatggtagtttcaagcataagctgagtgtgatggctcacgcctgtaatcccaacactttgggaggccaaggcaggtggatcacctgaggtcaggagtttgagaccagccaagccaacatggagaaaccctgtctctattataaacacacaaaaaattacccaagcacggtggtgtgtgcctgtaatcccagctactcaggaggctgagggaagagaatcacttgaacctgggaggcagaggttgcagtgagctgagatcacgccactgcaccccagcctgggcaacagagagggactccatctccaacaaacaaacaaacaaacaaaaaacatatattaaacaattactcatcagttttggaaagaagtgggcagttcccctaactgacggttcctcctctttttagaccatatagggtaatgtcctgatgttgccatggcatttgtaaactgttgtggtgctggtgggagtgtcttttagcatgctaatgtactataagtagcatatcatgagcaacgaggatgatcagaggtcactttctttgccatcttggttttagtggttttcggctggcttctttaccacatccggttttgtgttatgttgggtttttggttttttttgtttttttttttttgagacggagtcttgctctgtcacccaggctggagtgcaatggtgtgatcttggctcactacaacctctgcctcccaggttcaaacaattctcctgcctcagcctcctgagtagctgggattacaggcacatgccaccatgtcctgctaattttgtatttttagtagaaacggggtttcactatgttggtcagactgtctcgaactcctgacctcaagtgatccacctgcctcggcctcccaaagtgctgggattacaggtgtgagccaccgcacccagccaccacatcctgttttatcagcaaactttttgtgacctgtatcttgtgccaaccttctatctcatcctgtgactaagaatgcctaacctcctgggaatgcagcccagtaggtctcagctttattttacccagtccctactcaagatggagtcactgtggtttgaaagtctctgatgttaggattggggaagacgcttgactgccagaatcagaggttggacactaaacatagggacaggctgacatgggaggctggaggtgggcacacggctgctgtgggatagagggatagagaggacataaacccagagtcagtgtcctgttggttctaccccatttcagcacctgtcacttggagtggacccctcgtacttttcttagctcctactctcgtatctatctccctcttcccttctcccaggggacgagtgccaaatggtctctccctgccattttgatatcttctctccagtcctgctcactctctctctatatatattatttttcatgagaagcagtctcgctctgtcacccaggctggagtgcagtggtacgatctcggctcaccgcaacttctgcctcctgggtgcaagcgattcttctgcctcagcctcccgagtagctgggattacaggcgcctgccaccacgcctggctaatttttgtatttttagtagaattggggtttcaccatgttggccaggctggtcttgaactcctgacctcgtgatccgcctgctccaccctcccaaagtgctgggattacaggcgtgactcgccgcgcccagccttgctcactctatttttaaagtgccaaacaaatcccctccctctttctcaaagcacagtgatgtgccactgagccctgcccagcacctcagtggagggggcctgcttgctctttgttttggtcccagatcctggggtgggagagaaatgtttgctgggccagggttgggagagggttggagagctgcagccacctaccactgctgtaccccaggaatacggcacatggacatggcacccccctgcccagatgataaacatgagctcccaaaacattcttttaaataaattagaggagcgcaagggggaaagggaattcctattcccaaaggttattttcggggagggaaggctgtgcatagggccatattctttagaatctgttttattaactgacctgttttgggacatgttacccaaataaaaggtgtttctaaacaaaacaagacaaaaataacaacaaaaggccaatcttaggttctaaaatagtgatgttacctgcaggagtacttggggaagctgcatatcttctgacctccagaataatgactggctatcatttatgtctacaccttaggagaattcagccttctctgttctcctaccctggtggtctcttattagcttcgcaaaggtggttgagttttggggaagggctattatcatttaaactataaactgtctcccaaagttagcttggcctaagcccaggaataattaggggcagcttgaaggcctggggcgagatcaggacttggctagatcatatctctttcactgccataattttctcactgttataatttttgcaaaagtggtttcactctgggctccctctaggccaacactccccccattgctgtagtagctgcctcctctgtgagcatttatcctggaggctgcacatcatctgtgtggctttcagacgccattggcctcatggtgaagtggggttagcaacagagactcctcccaccagcttgggagggctgaagtgagacatcccaggttcctggcccagaatgggcagtcgccccctcccaggcagcccagcccctgcctctgccccaaacacccaggggtagttgctgagtttagcaaataacagggtgctcaaatgtgaatttcggataaacagcaaaggatgttttagaagtgtacccctaacattgcatggcacatacttatactaaactgggcatcctgtattttacctggcaaccttacttgaaggggtatccacagagctggaatacctccttcaaacactctagccatgtacaactgggaagctctttctccagggaaagcttacctctttcctgggcaggggaccagaagcaattctttggggctttgagttctgtgctaagtcattcatatgggtggggaaacaggtacagagaggtcaactagacaggaggtggcagatggtggttgtgatgggaaatcgccattccctgtgtaagaggatggagcggacctcagctgggatggggcggggtcttttcccacccccgggttttgtggcctttgtcctagtgcatgctgggagtcgggccccaagtggccatcttcacgcaatactagcaataaccacaaggggggagcacctcccaacgtgcccatgttggccgattcaaactgattattgataaactcttagtgaattgctcatagtgggcaccgggtcctgttctaagcaattcatgcgatgtgactcatttaatcttaacaaccttcaacagaaatggggtacaaaaaataataataatcttcataacctcatcttgagatggatgttgttattaggtctctgtttcctagagttaaaatcactgacccaagctcacgcagtcccctaactcccgatacctcccccagcctaggactgcttttgcccactgcccttccagcctatgaccctctacacagtcaggggatgattcataggctgtgtgaccttgggcaagttacctaatgttctgagcattggttttctctctgcacagttctctgtaatgacctgaagctgttgtgaggattacagacaaaatgattcacaaagcatccaggcagagtggggctcacagcaagagctccacaaatactggccattatttttgtggcaagagacatccacttcaagggcaaatgattgaatcgttccatctgtgtctaacccagatataaaaaatgccaattacatggttcaaggattccacttttaagaatttattcagaggaactaattggacaattgtccagagatgtgcatctgaggattgttggggtcttatttgtgtgagctaaaagcttgggaattccttaattgcccattgcataaagaaacattctgatctgatcacactggtggctgaatctctccaggtccctcctctgtcccaatacttttcatggcttatgacggtccccaggatccagtctgaacacatcagtttggcattcaaaatcccctggcctcatctctcaccacacacatccctgcacccatgctattgcctcccctgaatcctcgtcattctctggatgtgccctgcccaccctgcctccctgcctttgctcaggccatgtcatctgccagcaatgcccgccccccatcccatttcccttttttcccagccttcaaggtccagctctaacggtacccgctccatgaaccctgcttggctccctccccaagacggaatcatcttgccctacagtcccctccatcacgcgctcagccctccccttggacacccacagagcacgtggatggagctctttctgtgtgccatgcactgagctaagcatcgcattatgtaacctccatcgcattatgtagcctcatgagacaggtgccatcattatcaccttcctgcagatgagaaaatgaagtccactgtgcagtgacccttcatcagcattaactctgtgaacccaaaagtatctgaaacaggtctcaatcaatttagagggtttattttgccaaggttaaggatgtggccatgacacagcctcaggaggtcctgacaacatgtgcccaagatggttggggtacaggttgcttttataccatttgggaggacataagacatcaatcaatacatgtaagatttacattggtttgatgtggaaggatggggcaactccaagcaggggcttccaggtaataggtagatttaaaaattttctgattggcaattggttgaaagaattatcaatagaaagaaattatcaatagaaagtctgggttagcgggaggtggaggttgcagtgagctgagattgcgccattgcactccagcctgggtgacaacagcgagactttgtctcaaaaaaaataaaagaaagtctgggttaggataagggtcatggagcccaagggttttttgtttttgtctgtttttgtttttttgagacaaagtctccctctgtcacccaggctggagtgcagtggtgcgatcttggctcacttcaacctctgcctcccgggttcaagctattctcctgcctcagcctcctgagtagctgggattacaggtgcccgccatcaggcctggctaatttttgtatttttagtagaaatagggtttttccatgttggccaggctggtcttgaactcctgacttcaggtaatccacccgcctcggcctcccaaaatgctgggattacaggcgtgagccaccgcgctgggccaagaccaaggttttatcatggacttagggtctgtgtcgatgttcatgttggtcagcttttcctgaattccgaaagggaggagggtatcatgacgcacgtccgaccccactcccttcccatcatggcctaaactactctttcaggtaaactttgcaatgcccctggccgagaggaagggtccattcagatgtttggtgggggatcttagaattttatttttggtttacaactcttactagtgttagtaaatccatcgtgagtgaggaggactttggagccttccttaaaatcagggggcattgcagataggtgtgtgtgtttggcagggctggggtgggtgtcgctggaagaggactgtggaagtgtttggcttgggcccagctcagccatgccctaggcttatctgtgggctccaggttccttccccagcctcttctgggcctatttaaggaggctttggggtggcgggcaatgttttttttttttttcatgatggctgcccccaagggtcttctgctggttgctctagtcttgctacttggtaagttctgggcataggactcccttgggagagggggtggtggagcaagggccttcctcctgccctctctgcccatgaccaagcctcccttggccagctgtgcacctggtaaggccgctccgggataaccaccaccccaggcctgggctgcaggtcttggcatcctgaagatacaagcaagaggagacttctttcctcatagcctgtgagtcactctgctgggtgccctctgacagccctacccccccaatgcctctgacccctggggtcccttgctccttcccccaatgagatctgaagccaccaggatcccaggtcacccatttctctcccttgaccgtcacagtgcatctggggagcctttcagtcttgtcgcaggttgagcaggggcctcctggggtccagggcagtcctgcttcctgaggctagggctccccagccaggccaaaccccaggtgcagggctcactcctatcctgctctcttggcctcctgagcagagcttggcatgcagtagatgctcagtaaacactaaacaaatgccttacattctcctaaaaaaaaaaaaaaaaaaagcccagaccaggagtggtggctcacacatgtaatcctagcactgggaggccaaggtaggaggattgcttgaggtcaggaatttgagaccagcctgggcaatgtaacaatacctcatctctaccaaaaaaaaaaaagaaagaaagaaagaaagaaaaaaaacccaggcatggtgatgtgtacctgtggtctcagccactcaggaggctgagaggggagaatcacttgagcccaagagctcaaggttgcagtgagctatgatcgcaccactgcactccagcctgggccacaaagcaaagccctgtctctaaaaaacaaacaaacaaacctccaaaacttctttcccttccttggtctgccctaggccctctgagtatagataacccctcttagaagcagcatggcaaggcggtcaggagcccaaatgggaaaaagaattaactggagaccacgtagggggtgagtcctcttacacacaggccagttactcacacagacaaaaattagttactggcagggaggggtaaaggcctacttagcttgcattttcgtaccatttggtatgccatcacttgcgagtttgagtgtgagttctgtagctcatggctgcatataatcacgggcagatgacagcaagacttcccagactcactttccacatctgtaaaattgaggtggttatgagaaaacaaaacaaacaaaaagaaatgaaaatcctgaactccagagggtcaccaatactaaggcatatgctaagttagtgttttataaaataggattctatgtgtcattctataatagaatgacattatacaataacttaatcaagtactttttcatgcataaaaggtattttgtgaaagttcacagctccacagaaccctacttgtctggtcaagctgtaacttagccagtacctgattacagaagctccccaagggttccagtctgtccgttcttttttcttttcttttcttttcttttcttttttttttttttgagatggagtcttgctctgtcgcccaggctggagtgcagtggcgcgatctcagctcactgcaacctccgcctcccagtttcaagtgattctcctgtctcaacctcccgagtagctgggactacaggcttgcaccaccatgcccaactaatttttgtatttttagtagagatggggtttcaccatgttggccaggcttgtctcgaactcctggcctcaggtgatccacctgccttggcctcccaaagtgttgggattacagatgtgagccaccacgcctggccccaatctgtccctgttgtaaatcagcgctgtggtgaggaaatactcctggatcagggagaatcaggagaattgtctctcctcagagggcctgttctggactgggtgtgatagtcacaggctggcctggcttcctgatgtcagttgctctctgtggtccctccccgctactgctgtccaggttcacggacacttgttcttggttttgtcccactgccctttctggtctcagccacacgcttgcttttctaggccctcagttgatgggaaataaatgggcacgatgtagttcaacatgggatggctatgttgaggtagcgggggcatggagtccaggacgagccctctcacccagctcttccacggcccctacttctgggtttacctcatctgctggacgagggtctggagctggacgcgatcctttgagcctggctggaaatcttatttttattttttttgagacggaatctctctctgtcccccaggctggagtatagtggcatgatcttggctcactacaacctccacttcccaggttcaaacaattctgcctcagcctccccagtagctgggattacaagtgcgtgccaccttgcccaactaatttgtatatttttagtagagacagtgtttcaccatattggccaggctagtctcgaactcctgacctcaagtgatctacctgcctctgccttccaaagtgctgggattacaggcatgagctcccgtgtctggctggaaatcctatttttacaacatctcctcatacaagtaagacctctccgtttcaagttatgggaccctgggcaaattccttcagctgaaggaatttcatggtcctgaaaggcatgctgtgtgagccctgctggctcaaggcctgggttctggaagctgggtaatagggggaaatggaaggccttggctgaccttgtgccaggatacttcatccacacggtggggaatccttaccctgaaactgtaggtgggctcttcctagcacacataagccaaggaaaggaaggtccagagaggccaagtgaccacctgctgctgcacagagcagagatggtggccatgctgggattgggatttggggcaggccccttgcccgggcagaatgttgtccccaaccctcctgactgggcaggtctttctgcctgggctgttggcagctgacagcttgcaggtgattagtgggaaagctcagtgtgtgactgctgtgactttggctattcccacacagagaaatgtggcaccaaggtacagtgggggcaggccaggtcaggggggctgccgggggtggcgctgctctggggacctttggcgtgtgtgggcagatgaacgccactgcacccaccatgagaacaggttctgggctggaagatgcgtggacaagatgaggagttggggcaggggagcgtgaagagatcatggcttgggtggggttagtcggggaggggatggacactgaccttaagcctcttctgtcttgcaggtgctttggggaggatgcacaagtggcaggtccgatgacaggtgctccaacaccttgtccccggcccccccttaccaaacaaacataataaagcaaatagacaactgtcctggtaaaccaggctccaaagagttaaagaaaccaaagactaaattcttggacttacagaatagcagataagaaaagaaagaacttgctgaaaagctgaaactaagactgtgccccgaagagtaagaaaccagtaacagaaattcttgagtttgcaggatagcagataagaaaagaaacagcttgccgaaacacggacactccctgcacttacgagatcaagaaaaaaactggctgatggccgggcccggtgcctcaagcctgtaaccccagcactttgggaggccaaggtgggcagatcacttgaggccaggagttcgagaccagcctggccaacatggcaaaactctgtctctacttaaaatacaaaaattagccaggcatggtgggacgtgcacctgtagtcccagctactcgggaggctgaggcacgagaatggcttgaagccaggagacagagcttgcagtgagccaagatcgcgccactgcactccagcatgggcaagagagtaagactccatctcaaaaaaaaaaaaaaaaaagaaaaaagaaaagaaaagaaaagaaaagaaagaagaaaggaaaagaaaaatccggctggaattggttggaaccaagatggccaaccagaatctgtgcagaatgaacttggtgacgttgtagcctgaatttccaccgcgtgtttcatactaatgccccttaaattttgcacatgcgatccatgaggaggcatgaagagataactgcacgtgctcaaggaattttcttttctttctttcttttttttttttttttttttgagatggactcttgctctgtcacccaggctggagtgcagtggtgcaaactcggctcactgcaacctccgcctcccgggttcgattctcctgcctcagcctcctgagtagctgggattacaggctccggccaccacgactggctaattttttgtatttttagtagagacagggtattgccatgttggccaggctggtctcaaactcctgacctcgtgatccacccgcctcagcctcccaaagtgctgggattacaggtcaaggacttttccagacctccccttcccttcttcctgtcacctactaatctcagaatctaccacccgcacattttctaataaaaatactgccttgaagccagcacggggagacagatttgagctggactcctgtctccttggagttgacgagttgacttgcaataaaagctcttcctctttctttctttctttcttttttttttttttttgacaggttctcactctgtcacccaggctaaagtgcagtggtgtgatcttggctcactgcagcctcaaccttctgtgctcaagtgattctcccacttcagcctcctgagtagctgggacaacaggtacatgccaccatggcttgctaatttttttgttgttttttgtagagatggggttttcaccacgttgctcaggttggtctcgaactcctatactcaagcaatcagcccacctcggcctcccaaaatgttgggattacaagtgtgagccactgtgcccagctgcaatgaaagtttttctattctcaagagcccaattagtattggcttctagcacactgggcagtgagcccgttttgcttggtaacactagaaaattcaggtacctcaacaggatacaatcctaccacctagatcatcgttaactaacatcttagtattgtcatatccaggtggcttttgctagacatacacattaatataatgtagttttgtaacattctataacgtgcttctacagtactctctaggcagctctgtaggttgatacctcttttgcatttgtgatggcacagtagtctaggaatggaagtaggagaatttaaccagtcccacattgatagacatttgtgttcttcagtttctctgctaggtgacacctcattgccacagcctcctttcatttatttatttttttgaaatggagtctcgctccgttgcccaggctggggtgcaatggcgcaatctcagctcactgcaacctccacctcccgagtccaagtgattgtcctgccttagcctcccgagtaggtaggattacaggcatgcaccaccacgcccagctaattcttgtatttttagtagaggcagggtttcatcatgttggccaggctggtctcaaactcccgacctcaaatgatccacccacctcggcctcccgaagtgctgggattacaggcgtgagccgccgtgcccagcccagcctgcttttagcagctgaacacaggcctgccttgggaagttaatggccgtggaagaattttcctccttccaagcaggaaagggaggagagatagggctgacagcttactctcttcagagtttcctggggaaggggacacctatatggtggcccggccctgctgaaggtcaagatgctatagtgttatggtttaaaggtaggtgcagggtctagggggcctaggcactaacagaactaatctctcctccccccaactgctgtccaggttcatggatagtcatgcttggtcttgtcttactgttctttctggtctcagccatacccttgcttccccaggcactcctggcctttgttttcctacctctggactcaccctagctgtcctgtacaacctgccccgcacctctgggcagtcctggggtgctcttggacctctccttcccagcctcctgcaagatgctgaaggactttttgctggttgcactggccttcactggtgtcactctgttgctgctcctgtgaccctgaggaaggcactcgaggtcttccagccatcctgccctctctgcagcttaagaggctctgttttggtgccctgccagctgggaggcccacaagatggggctggtgacttgcgcaacagagagactctcttctgaggaggaaattgatatggaatctcagtctattttggaggaagacctggaggcagtggccccttcagaagacaacgaaaaaataacccttgtttctctctctatataatctataataatattattatatataatctataataatattattatatataatctataataatattatatataatctataataatattatatataatctataataatattattatatataatctataatattattagatataatctataatattattagatataatctataatattactatatataatctataatattattatataatctataatccataatatatattattatatataatctataatctataatatataataatattattatatataatatataatatataatatattattatatattatatattattgtatattatatattttatatattataatataatatataataatatataatatattatattattatataatacataatatattattatatattatataatagatatataatatattattatatattatataatagatatataatatattattatatatcatataatagatatataatatattattatatattatatattatataatagatgtataatatattatatataatatattatattatataatagatatacaatatattatatataatatataatatattaaatatttaatatataatatatttaatatttaatatttaatatatattatatttaatatttaatatatattatatttaatatttaatatattatatttaatatttaatatataatataaattaatataaatattaaataatataatatataatatttaatatattatatataatatattatatatatttgagacggagtctctgtcgcccaggctggagtgcagtgatgtgacctcggctcactgcaacctccacttcccaggttcaagtgattgtcctgcctcagtctcctaggtagctgggattacaggcatgcaccaccacgcccagctaatttttatatttttgtagagatagggtttcaccatgttgccaggctggtcttgaactgacctcaagtggtccagctgcctcagcctcccaaagtgctggaattacaggcacgagccactgcacctggcctgtgttgccttaaccttgtgctttttggtactagttgttaggggaaaaacctgatgtcttaactttgtgacatgcatttgtggtctctgaaggggccagtgtggtggtgggttcttggggaaggagtaagaggcagggctggggcctcattagcaccagcatagtgttgcccaccggtgtccctggcctgaggtctacacggttgggagcctcgccttttggcctcagcagaaatttgactcctctatgggaaatggcctgtggccaccaactctagcttcccaagaacagtgagacttttccttccctggctctgccttggcatttctgggctgttggaacaggaacttctaagttaactttccttctcacacaatggggggcctgcaggccttggttttcctgccctatgctgctagcttatcacttctggaatgagggggctgtgttagtccattttgtgttactataaaggaatattgggccaggtaaggtggctcacgcttgtaatcccagcacttcgggaggccaaggtgtgtggatcacctgaagccacgagttcaagaccaacatggtgaaactccatctctactaaaaatacaaaaattagccaggcatggtggcaggcacatgtgttccctgctacttgggaggttgaggtgggagaattgctttaacccaggaggtggaggttgcagtgagcctagattgcaccactgcattcctgcctgggcgacagagtgagaccctgtctccaaaaaaaaaaaaaaaaaaacaaacaccaaacacgaaaaaaggaatattggaagctgggtaatttacaaagaaaagaggtttacttggctcattgttctgcaggatgtacagaaagcatggtgccggcatctgctcagcttctggtgagggcttcaggaagcgtttactcatagcagaagaggaaggggagccagcgtgtcacatggtgagaggaagggagcaagaagaggggaggggtgccagcctcttttaagcaattgtagaataagaactcactcattatggcgggcaggcaccaagccattcatgaaggatctaccgccatgacccaaacacctcccactaggccccacctccaacatcgggggccacatttcctcctgagatttggaggggacaaatatccaaactctattagtgaccattggccaaagctacaaagtgggtctctttccttccccaatgctgcctcctggagattcaggactggagctgagcatctagaccctgagtaagactggaggctagaagctggagcttgggaagcctgcctcttactggctgtgtgcacacagtgggagctggcttgccaggggtgggcatcagcggatgctgatgggcactttgcagatctcagctctggccctggccttaggttctttgcactgctccacctcctggtgcaagtcccctccactcagctgccacagaggagctctggcaacagcactgctcatcttagtcccaaaggcacaaagggtccacactctctacctcagaccctgcttcaacatcgaggcctttcctttggtggtcaagggtgagaccaccctgtcccccgaccctgcatcacccacactaagccatcctctcccaaggattccatgacatcattggcccaaattgtgggtgctgccaccgtcttccaagaaggtgaacccatccccctctttccatcctcctccctttcctctctcttccctccatcttccctcattggtaggattgtcagataaaatataagatgcataggtcaattttaattttagataaacaatggatacattttaagtatgtcttttttttttttttttttttttttagatggagtcttgctctgttgctcaggctggagtgcagtggtgtgatctcagcccactgcaatctccacctcctggattcaagagattctcatgcctcagccttctgaggagctgagattacaggtatgtgctacctccccaggctaaattttgtatttttagtagagacggggtttcaccacattggccaagctggtctcgaactcctgacgtcaagtgatccgcctgccttggcctcctaaagtgttgggattataggcatgagccactgcacctggccatgcttttttttttttttcctttctaaatctgacaaccctcattttctcttctcttccttcctttttcctttctccttcctcctccctcctccttccctgccagctcaggaagaaggcagtcttgtcccattctgacaaattgttatagaagagtggtgggggtgaagaggtgacggggtaaggggcagccttagctccaggactatttctgtcacctgtaggctgaagatacaaggccagtgcctttgggagctcagtttcccatctataaagcagatatcagattttgcacccataagtgcatgtgggaaagtgcttgctgctgctgaatatttgcttgactagcctgagtcagacctcatagcctgcccacggatgagctcagccctccgtttgtttgtttccaaggagcctctcatggcaccagcctttggttcccattcatccccattcccgggtgtgatccggctcccctggcaagagttgtgtcagggactggggctcaagccagcctcttcacgtccccgaatcacagcagaaagttgggaaggaaactctggagtcctggcctttgccctagtcacccagggtcatggtgagcgtcagggggttgtgcttcacagatgccatgtgagcagcggacaggatgctgagctgaggaacacaagccctgccccactctgctgtgaatttccttggacaagctgcttcagtattgtgggtctctatggcctatcacctcctctacccacaaacagggactggagagggtgacatgcaggacacttctactggaaggtctagaacaaataaatcatgccttctcactgcctttgtaaaagtggaatcttaggaggtcatattcttactatattaaatttttttgatagagatgtggtcttactatgttgcccaggctggtctaaaactcctgggctcaagcgatccgcccatctcagcctccccaagggctgggattataggcaggaggcggtattacaaggcaactgagagcaatgtcattggagtaaacaaagcaaaaacaggccaggcatggtggctgaggcctgttatcccagcactttgggaggctgatggggggtaaatcacttgaggccaggagcttgagacaacatggggaaaccccatctctacaaaaaaatacaaaaaaattagccaagtgtggtgatgcccacctgtagtcccagctactcaggaggctgaggtgggagaatggcttgagcccaagaggtcaagactgcagtgagccatgattgtaccactgcactccagcctgggtgggcgacagagcgagaccctgtctcaaaaaacaaacaaacaaacaaataaacaaacaaacgaacaccccctgccccaggtcctggatctgccacccaagctgtaagatgttgagtgagtagcttcacccctctgagcctccatttccttatccataaagggccttggggatggcatgagaataaaacatgctaaactcacaaagctcttggcacagtttctggtacacagagagcactcgccaaatgatagttgttttctttattatgattatgccagatgtgactgcctttgcttccaggaaagtccctaaaacataagctatgtgcaacaagggaagtgggttagggtgggaagctgagcgtgcaagtcagacaaagcctgatgtaggcagctcctatcagaggcatgtggcctttgtggctggggccctcaaaagacagccactgccagaaatctggagactgaattgtctgggtctccagaagagagtccaaccccaccacacatctgctcctgtccaaggtgctgaaatccaccccacataggctcctcctaatcatgtacagctgttgagtcacctgcaccctaccttctggtcctccattcaatgccacaaatatacactgagcatctactatatatagggagtggaagtaaaaaggatttagatatgtctccaacccaagttgctcacagccatacggaaggaattcaagcatacacacctgccttagggtaggtgaggacaaaggctaggggattcattttgctatttattgagtttcatgacacccacttcttgcctttacccttgctttttcctcttctgcaaccttggtaccctccaaggttgtgcctctcatacctttcttgatctgaccacagtagatgagttttccccagggcatctctttctgtactcactaacgtcacagagtcaggaggactaacaatcaatttcagggagggagggagtgtaggatataaacagagaaatcaaagggttaggaggtctctgagaaatgagggagccacctagacaggggtgagctccttatcatatttctgcatgccctcgtcagggagcaggacctccactgtgaagctgaccttcttggcgtggacaaagctataggtgttgtcgaagcgtaggacatctgggggacagatggaaagaggggcattgggcttggctttacacactcttttttccacccctggccatggaggaggacaggcttgtgttcccactggctttgtttgccaagctgggccaagctcccaccacgcctcttcccttccccatgggaactgccaacccaagcaggtcctgtaaacagacaccaacctcctcttggcatgtgcccaggcatggctttactggcatcgagaacaatggtcattacatcccattgtctcacacctggagacgcacatgacggggctgtgaaggcacatggttgggttcatcagagacctcccagcccccttggatgaagtggggttctggggcaggcctgctggacactgtttgcctcctcacaaccaccccaaaaagcaggtgttggccgggcacagtggctcacacctataatcccagcattttgggaggccaaggtgggtggatcacttgaggtcaggagttcgagagcagcctgaccaacatggagaaaccccatctctactaaaattacaaaattaagtgtggtgcacatgcctgtaatccaagcgactcagaaggctgaggcagcagaatcgcttgaacccgggagggggaggttgcggtgagcagagattgcaccattgcactccagcctggacaacaagagtgaaactctgtctcaaaaaaaaaaaaaaaaaaaaaaagagaaaaaacaggcattgtaactcctggctcacaggtgagcaaaccaagggtccttcccagattggtcagacttttgcccaggactatgtagctaccctgaggctcgggtgggaccctggaaccacactcagctttgtggctctgcacaagttgatttatttttcagagcctcggtttcctcatgtggaaaactacacctgccctatcacttgttgtctgtgttctgtggtccaggtgtccccaattccttcagggcctgtatgtctctggctcctggtgcacagtaggtgctcatgaatatggactgagtgagtgactgtatgaatgaatggtgctaacctaggctgtgtgtccctgaatgggggaggtgtgtcactgcccctctgtttccttctctaaagcatgggacaggtggctctagcctttcagagccaggtcccagctggggcagacttacagacgccggcctctgagcaggtgaggttcccatcctcgggcaccatgtgggcgttatagcgctggctgggtagaacatctgtcatctcccctgcccgctgtcgctcccccatcttggtcttcaggaaaactccgaagccgatgtccgcaccatcagatgagaactgccacctgtcagggggagggggaggagacaggttgctgctcagcctgatgggtctctgaggggttagggcctgcccctacctgagaacgcagcctggaaataggatctcgtattccacttggtgtgatgagccgcggttgatctgcaccgagtgctcgtactgagtcttcacctggtcccgcacgtacatggacttggggatctccccgccatagttaatctgcggacatgggatgagatgggcttgcttccgtctcctggccattgttcatgtttcttctgcctgagacactttcaccacctcctggaagtatcctcttcatcctagccccactctcccacctcctcaagccttctatgaccctccaaactgggccagtgcgtctgctgggagcttcccctcccagctcatccctctgggttaaaattcgcctatttcttgtttgcctttacagctgctgagagctctgtaagggcgagggttgtattgactagcttaacacccagttcttggcatctctctataggtaattgtggatgaatgactgagtggaaagggaatccagcttaattcttgaacctctcttgtcccagggaagggctctttgtaccttggttaaacatttggggttcccatctgggtcagtcagggtgcccccaaactgggcaggcagttcctcaggactgatgagtttcagcaaaccttccttccagttatctgggagcagtgggattcaagggtggttagcaagcatggggggcaccaattagcctcccacacccaccaggatgacctgaactgggggagaagccctataggaggtaggctgccaggaccaattccccagtgtcctaggcctggggctacagtaagtgtctttctcagcattgtgttgctgtggaaatgtgtttcccgccttgatagatgaatcagcactttttttttctttgagacagtgtctcactctgttgtccagtctggagtgcagtggaatgatcatggctcactgcagcctcgacttcctgggctcaagtgatcctcccacctcagcctcctgcgtagctgggactacaagcatgtaccaccatgcctggctaatttttatttggttttgtttggtttttttttgtagagatagggtttcactatgttgcccaggctagtctcaaactcctgggctcaaatgattgtcttacctgggcctcccaaagtgttgggattacaggtgtaagccaccatcaccatgcccagcctatggcacattctttttttttttttttgagacggagtcttgctctgtcacccaggctggagtgcagtggtgtggtctcagctcactgcaacttccacctcatggtttcaagcagttctctacctcagcttcttgagtatctgggattacaggtgcccaccaccatgactggctaatttttatatttttagtagagacggggtttcaccaccttggccaggatggtcttgaactcctgaccttgtgatccacccgcctcggcctcccaaagtgctgggattacaggcatgagccaccacgcccagccaacagcacattcttgaagatcttccagtcatgagcagtgaaactaagagttatctaattgcctcaaggagagtttagagctcaatgacgtcaacggccttgttgggatcactctgtaagtaagtggcatgcccaagtcagacctcctagtgggggatggacagccctgggcttttggagggaccctccccacttccctctgcctaatcaccatgaccataatgttcttcatgccctatgtaaagctctaagagttctgggtcctggctgttaccatgccccagccttatggctaatccaggctacccggtcccccaaccccctcactttggccatgggaggttccttctctacagtggtattaaggggaagaccacaatgtgccacataccagagccaaatgagcagagtcacatggggcagaggctgtggacttaaggcctggactgtgctggtaacccacactgctctaggctttggaaggcgtagaaggcatgagcctggacccttcaaaccaggccctcataatctatcaagttccccatcccagtggaattgggtagaggcagaggctcaggtaccaggaagaaagagaaagtaaggatttataagctccccctcacccctggatcctcagttctcctaattctgtgatctgactatcctgcttgggagaagttttcctccaagccagggtcattggtttgggtttaagaactatttcccttctctctctttctctcagcctgtcacttgtaaacacaactattctcctatttgtaaaattaatacatattattatacagtttagaaatcatagacaatacaggtaataaaattaaaaaccacacgatctctcactatcaacaaaaaatattttgttgtttttccttgtagaaatatgtatttattgtacatatgttttcataaaataagattatacttttagtttaatcttattttagtttatgcttatgaagataagtttataatctacttttaaaaacttaaagacatttccatggcattaaatattcacatatagccttatttctcatggcggctccagaattcatcaaatgcatgcaccattatttatttatccagtcctttcttgttgggtctcctttctctgaattgtgactactctttctgctcgtctgcctcatcctcttctgccaaggttgcctttggaagcactaagcttatgagtgttgaaaagaaaccgaggcctatataccagaaattgactgcaaccaaactgaaaccagtgaggtggtaggtgtggaggccttgtccaccaaaggggtatggcagggaaaagagcaaaggtaacactctttagggtaaaacccacttcactgttgggaagaaggagcctctgactaggtgatgtgtagagttctgttgtttttgagataggttctcactctgttgcccaggctggagtgcagtggtgtgaacacgactcactgcagcttcatactcctgggctcaagtgatcctcccacctcagcctcctaagtatctggaattacaggtgtgcaccaccacaaccagctaatttttaaattttttgtagagatggggtcttgctatgttgctgtggctggtctcaacctcctgatatcaagcaatcctcctgcctcagcctcccaaagtgctgggattacattcgtgagccactgcacccaacctaatgtgtggagttctagatggggtaatgggacaacctcactccaaaggtcatgtatagaggtcaggaaattgagctggcactacttacttcccaacacaataattttcctgcgagtgtcctcactcaggaatggcttcatgaggttgtagcccacagggaacagtttggtagctggagagatagaagtaaggataatgggaagaaaagaattacattgggcaaccccctccataatggttatagccaatgatacagaggagtcatgactaaccctggtcaattccagtgtctgtcctgcacccaacaaaccatccaaccaaccagtcaaccagccaacaaacagccaactaaccaatcatgcatcaatcatgcaatgcaaccatcaaccaaccattcagccaacaaaccagccagtcattcaaacttctaatcagccacctattcagtcaaccaataaaccagccaacctaccaaacagccaaccaactatgcaacaaaccaaccaactgacaacaaatagtcaaacaatttaacttctaaccagccaacctaccaaatagtcaaccatctaacaaatcagccaaacagcaaagcaatcagccaatggaacagccagataaccactcaactaactgtgttctctagccagccaaccatccaaataaccagccagccaaccatccaaataaccagtcatccaaccatccaaataaccagccagccagtcagtcaaataaccagccagccaaccatccaaataactagccagccagtcagtcaaataaccagccagccaaccatccaaataaccagccagccaccatccaaataatcatctaagattcagccaaacaacaaaccaggcaaccaactaaccaacctgctaaccaggcaaccaactaactagccatcaaaacaacctaccaaccaaaatgccaaccagccactcaatcagtcaaccaagctaagaactagccaaccaagcagccagccaattctccaacgaaccaccagttagtcaactagccaagcaaccaactggccagtcagctgaacaaccaatcaagcaaccaactgatcaaccaactagccaatcaccaaacatccatccatcctttcatctacccacaacaattacccaaatacctatggagcatccaccatggacccaggcctgtgagggctacaacaaaagtggagaatcacagcccctggcttcaaggagcagaaaactcagccagtaaagcaggatgagcacaaataaaacagctggagatccctaaaaggcagcaaacagggaaggctgcaccagttgccagtgccagaagcagtctggggagggagagatcatcatggacaggagaaataagggaggatccctgggagagctgggactggagctgccttctcttgcagtaaggccaaccctagaagttaccatttattgagaacttactctatgccaggcattctaagtgatttgcatacagccaagaaaccaacctgcctcacaacaatcctgggacaaagacagtgttatcaccctcagcgtacagatgaggaaacagaggcacaagtaagtgaagtcatttgtcacatacctttcacgatgagcatgaacttcagggtctctgggtaattctcttcaaggaggccaaagaactgtggaaccaagagagatcccttcagagagcacatcacatcttctcctacctccatctcctgtgcaatctcctgttgggaggtttcagatggctctggagggtttcccttcatgccatcacctcccctggcctctggagggaaccttctcacctcatactattataaccatactctaataataattacataataattgtttttagtaaatattataataatggtagtataataataatgactactgttgattaaatgttcactatttgccaagcagtgtatatacactttacataacaacttgctgaagtatccctacattgctatccccattttgtaggtcaggaaacaagcatggagagggtttggtggaagctggaacgtgtggtctcagtacagtgttgtccctgaaacccattctgtgggatcttctaggaaaggtattaaggccttctggagtttgagtcacaatgagggagcccaggacatttttaaactaaatcttggctctcagtaagcagctgggtcatggcaggccaagctggtcatcaaagcaagcggggggtggccctaggacttctccttacctcctggtacacttctaccagaggtttccagaagtgtttcagtcccaggccctcacagtcaaatatcatcacgatggtctcaatcttcttccctagctgcaaggatgagagcaagaagtagttctggagttcagggtgtaggcttgggagatggtaatccaagtacatgaccccttggggcttcttctagaccccgactctgtcctcagaggaacaagtagactaaccagtgaatgcatttccccactcatccatccatccatccacatccatccatccatccatccatccatccatccatctatccaaccatccacccacccacccccgtatatatcaacttactcatcaattaattgaaccatccatccattcattcatattgtcattaatttattcatcctccatttttccataatataaatataaactgataaatataaactgatatttatcaagcacttttttgtgtgtgccagacactaaagtgtaatgaatagtgcctaataacccacagtttttgtccttaaaaagttcactgtctggctggggagatgacaagcaaccaggtcatttggatcctatgataagtgctgcaataggtcagcacaagagcttcagggatacagaagaggttatttaacccaggcgggggactcagagaaggtaacatctaagtttcagacctaaaggatagataggagaaagtcagggaaagttgtgggaggtaggtgtgtgtggtgggaactagggttgttcagacagaaggaatagcaagggcaaagaaaggctcagagggaatagcaatagctaccattgttgagaaatatatattaggccctgtgtgctaaattgcatacttgcattatttcatttcacttttgcaaccattatttattcatatccctgttttataggtgaaggagctgaggctcagacaggtgaaatgacatattcaaaacactgaagcaaaacaaaacaaagcaaaaaaacccatcaaccaagaattctattcccggcctggtacggtggctcacgcctgtaatcccagcactttgggaggctgaggcgggtggatcacaaggtcaggagatcgagaccatcccggccaacatggtgaaaccccgtctgtattaaaaacacaaaaattagccctgcgtggtggcgggcgcctgtaatcccagctactcaggaggccgaggcaggaaaatcccttgaacctgggaggcggaggtttcagtgagccaagatcacaccactgcactccagcctaggtgacagagcgagactctgtctcaagcaaaaaaaaaaagagggttctattcccagcaaaagtatccttcaagaaactgtctttctgtgactgtgacttttcaaggccacacagctggtaagcaacagagctggtgtttgaccccagagccctctgactgtggttgtagagaacacaggtgtgtttctgagaccaatccccccggcagcctcacctgcccccagccatccaccccacctggcctggacctcaccctctctgtctgcaggtcacactcatgcaggatgcgctcacagtccctcatcttggtcttgagcaggtcctgcttggtgactgagaagagcaaccccttgggatcaagtggcccaatgatgtcataccacacggggcagccatcacggtcatagccacacaggcccccaggcatgtacttctggatcacctgggcatgaaaagatgcacagaacttggcattacacacctcccttgagaccccagaccaggctgacctgggtggcccaagcctacacacaccatggtataaaaagcactgtccctccctggaagacagtgctattgtctcaggtgagaaagctgaggtcctgcaggggagggccttgctcacagagggtaaatggcaaagccaggtctcagcaggcccttggacttcttaggtctgcccctgatgtctcccgtgtccctttctgtggagaagagtcgggtttagtgatggagaacacagattctgaaggttaacagagctggttcaaaaacagacactggctgggcatggaggctcatgcctgtaatcccagctactcaggaggttgaggcagatgggatctcctgaggccaggagtttgagaccagcttgggcaacagagagagaccctgtccctacaaaaataaaagaaattagccagctgtggtaatacacatctgtagacttgggaggctgaggtgggagaatcacttgagcccaggagttcaaggctgcagtgagccatgatcatgacactgcacaccagccttggcaacagagtgagaccccatccaaaaaaaaaaaaaaaaagcagatactgctgcttctgtactgtgtgtccttgagcaagtgacaccacctctctgagctccattctacctactttttttgtaaaatggtttggataacccctcactcttgggactgttggggaaagtccctgagataaagttggcaaagcagagtgcccagatccgggtacatgccctacaagtgaagacgtgaccattactctactaagatgccagtggtggcactgtcctcatcagtgccttgatgggctaaacttctttcccacccagacaggatgctttaggcaatgccttagggggcaggggtgcagaagcacaggctaaccgtggtggttacgagcctgggtttgggggcccaaacaggcctgagcataaatcccagccctaccttgggctatgggactgtgggcaagttacctaatttttgctgggcttcagtgtcctcatccacaaaatggggacaatagcatccatcattgtgatgattaaagaagctcatgctgctaacatcttaacctaggcctggaccttgcaagcccccaggaaacattcattatgactgtaggaaaggagactgcaggcctgcgggttccacaggcctctcaggcttgctgcccctcattcatggtccccagtgaccttgagtggtacgtccgtgaaagactgaggtgtttggcggtgttggctcacctctgggggctgccaatcaaggatatggtcaatatccatggtcttccggaactccatgtactgaaagggaaatgagtggtaagatcccactgggctcccagtgccctgagaacagggatggaaggaggggcttgaggcatggattgcccctgacaaatcccctccataaatttccagagtggataggtctcaccttgcggagcaaagcctccgacttctgcaagtcaaaattccgagctgtgggaaaacagaaggaaggtgtgagacaggaaagatgccttgtcttactcctggccagtgggagctatggaggacactgggggcctgggtgagaccttgctcccctacccccttccctcctctggacctgaacatgtgaagcaagattgtgtggatggaccctgagagccatgagacactctggagcagttgagaccaggcccctcttgatgccccctgatcccaacctctcccacctctgccctcacctcggagccagcgtagaaggaaataatcatcagggttgggcagggcaggaagcacatcctggacgttttctcggaactggcaagagagatgctggttaaagtggctctctcacattgagccttggcctccagactcaaagactgttttcacaacctctcctttcctcccacatgcaaaatggcccacattgatgaaaggatgggttaatggttgaatagaagggcagatggatcactggataggtggatgaatggaaggaggatagatggatgaataaatggttagaaagaagaatagatgggtgagtgggtaggtagatggaaaaagggagaagaaatcaatggatgaatggatagatggatggatggagagtgggtgggtggataaatcagtgaatggacagaggagagatgggtgggtgattgagagaaagaaagatggataggtggctgcgtgggtaggaagagggatgggtggatgaaagaaaggataaacagccaggtatggtggctcacgcctgtcatcccagcactttaggaggctgaggttggtggatcacctgaggtcaggagtttgagaccagcctggccaacatggtgaaaactcatctctactaaaaatacaaaaattagccaggtgtggtggcacatgcctgtaatcccagctactcaggaggctgaggcaggagaattgcttgaacctgggagacagaggctgcagtgagctgagatcgctccacagcactccagcctggatgacagagactccatctcaaaaaaaagaagaaaaagaagaagaaaggataaataattgggtggatgaataagtggattggagtttggatgcattcttagttccctccatgtgttagccctcaaaacatctgctttttttcatcccatcttctattaaaacatggttaataattatatgtcctcttcttcctttagctctttgaaagacaacactttctgctctgtctcttgggcttttacagactggtcatctttcaggatcccaaagaggaaggggttaaagggcagaccagcagcatctttcagctcctacctatggtgcctgggagggaggaacgggggtacctggctgccaggtaaacctctctggttctggctcctggatgagaagaagtcaggcttgacttgggtgggcaccacccacgttattgcctggaagtggtgctagtccctcaacccccgcccgggacagggttgatgttactgggcaccgtggggcttgaccctttgggaggtaacaccaaagagacaatgtcaaggacatgctgaatcaactgagtggggcaggattccagccacttctttccaccccccagcccctttcccctggtcttccggaactccagggggaggggctctcaccttggccagggtctctgcctgtttggggctcaggtctccaactcggccgctcatggtgctggctggggcttgaggagtggtggccactataggcaagaggccaagcctagtttgtcagccctgacccagctgggtccttttgcccccactcctgggcgtggctccaagcgcctcctcatgggccaactgtttaaattgcagattacataattgggattaagtgaggtcccctgcttggcttggggacagatctggaggggcaggcgggcatggagcgtgtgccagaggtcccctgccaggaggaggcagctgggaggaagggaggctggcctcccgtgaccttggagcccagagtgagtgcctgtagaacccgctgaccctcccaggcctccagtgaccactgccctggagaagggggagtttcaggagaatgaggaccgctccttgtgggtaccctttctccctgagccccagtcttcccacacttaggattctgcaaagatcacccccctctacccagctctgaaagggtaggattctgaggcttggtcagtgtagtaaacagttcattcactttgttgggggtgggaggcccaggtccttcttttgtgtccacagtcaagaagaggacagatggcatcttttgaacgtcacttgcttcatttataaaatggggccgttaatgtttgccttcccctccttatgtggttagagggaagatctaatgagacatagggactgtcaagggttgtgtgcatctgagggatactctccttcagctctcctggtcccccctggagctgtaagcttcagctccaggaagggagagaccctgttatccatgactctctctgaagaaaccatcagcttgaggctgcagcatggccacatggccacatggccacatctcagccttgagggggtctgcatgggctgaaaccaaccccgggctagcctcggccccagcagctgggctagcccacaccattctgcctagggcttttctaggtcccctactcctggggcatcctgggtacccacccctgagctacagtgggcctctattctgggctaacccagggtctctttaggctagtagatgttggtcagtatcagacatcttctcagggacatcttccttgctctgggctcctcacagagttggatccagaaggagaaggcagggctaatgctggccatttccctctgcctggggagcccgtggcatgtactcaggaacagttaggtaactctccacaccccagccctgccccatttcacattccagcctcaatttctgcaaagccccagctgctgtctacacccacttcctgccaggccagtaatgtacagagattgggttcctccactgccctttcccgagccactaatcctgcccatttctcaccagtctcctttctcaccctaatccctataatgtgaggtgtgctagttacttctaggggcatcggagactgtgaaggagagccaggagggagggttgggggtctcctcaggagttgtgagccttcacactgagctcttttcctgacccagaccacagatttgtcaagtaccttgctatgttcacaaatcctcatcagctacagtgccactccacagaacttcctgtgatggtagacatcttctgtctggggtgtcctgttagacatatctggtagccactagttacatgtgaaagatggttagcgtgactgaggaactgaagttttaattgaattggattttgatacattttactttaaattgttcaatctggctagtggttaccatattggatggtgcaggtggcccatttttattttattctactttattttattttatttttgagacagggtctcactctgttgcccaggctggagtgcagtggcatgatctcggctcactacagcctcgacctccccaggctcaatcaatcctccccacctcaaccccccggagtagcctggactgcaggcacattccaccacgccctgctaatttcttatattttttgtagagatggggtctcattacatgcattacctcattttggcctggtgaggtggctcacacgtgtaaacccagcactttgggaggccgaggcaggtggatcacctgaggtcaggagttccagaccagcctagccaacatggcaaaaccgtgtctgctaaaaatacaaaaattagccgggcgtgatggcggatgcctgtaatcccagttactcaggaggctgaggcaggagaatggcccgaacctgggaggcggaggttgcagtgagccgagatcatgccactgcactccagcttgggggacagagtgagactccatctcaaaaaagaaaaaagcagtgcattacctcatttaaacctcagaacatacctgtggtgttgggtaggtactattacgcccattatgcagataagcaaactgaggtatggagaagtaacttatccaggggtaaacccatgcaattaaccactctgccattgtgctgttatgctatcccatagtcttggctctaggagcttccaccttagttagggagagagcctaagcatgaaagtcacctatatgtgatgcagttggcatctgagccaggccttgaagaaaggaaggattttgatttatggagagcagaataaagggcatcccaagtggaggggatggcatgggcaaaggcatggaggtgggaaagtgagaagcatgtggagggggtagattacagcaaacaagacagattaggacccagcttgcatagagctcacagtctcccattggtgagcataccctctgtgctgggagctttatatcattatcaaatcattcagaagcaggtatgggtattcccattttacagctaaacaaatagaagttcagagagatcaagaaacttttctgaggtcacacagccagtaaatgaggagccagaacttgaacccaaacctatctgactctggattgcacagcccaccctgctttcccctgtagggcttaatattgtgtccagaatatagtaagtgctcaataaatgctttaaatcgtcattgtgtagaagcctggatctgcctggattcaagctggattcaggctgcagggtgtcttggggccagaagggttaattttgcctgccttgaaacaaaggccttggggaaggagagacccccagcctgccccctaaaccccagagcacactgtctacaggtaaggtcccatgtgtgtttggctcctcatttaccaagctctcaggggaccatggcaacaaccacaacttaaacaaacaaccgcaggtgggtagatagagctgcttgcgccccaacctctcctgtcagccggttactaggaaatctgaaacagccacccctttcagtccatccctggcacattcctgatcaccctccctcccaggatggatcttgccagaagcagttgggtaggtctaaaggggcccttcccgggggtacaggagcctcgacatagggcaggcatcactgggaggaggtgagtagggggcatttagaccacacagatgtgaagtgggtggcctgaaaaggggagatggaagccaggtgccgaggctcacacctataatcccagtgctttgggaggctgatgtgagaagattgctggaggccaggagtttgagatcagcctggcaacatggtgagaccctgtctcttcaaaaaatttaaaaattagctgggcatgatggcgtacacctgtagtcccagttacttgggaggcagaggcaggatcgcttgggcccaggagtttgaggctgcaatgagctttgatagggccactgcactccagcctgggcaacagagtgaaagcttatcctttaaaaaaataaaagggttgcagggagatggaaagggattggggcacacgtctccagaccccagtggcgctctcagtggcacctgggacagtccactttctatctttctttgggcagtttcatctcctttaataaataaaaaaaacttaagtgtgatataattcatacatcacaaattcattgtttttaaaaatagaaggtatcaagttttcttacctttttattaaaaaaaaaatcagtaacagacaagagtgtgagagacagctacagagaggtgctcactccaacaccgcctgcggaaaaggtcacccggggtagaagagaacccctccagtggggaccctgggttggggtggtgatggcagctaatagccagtgggtgcagcaagggagggtcattcctgttaccccagccagtggggtcaggaggaggcaccgtccacccaggctgagccaggctcaggtaatagtagcctaaaacaatagccaaggaagttagtcagatgtttggttcctctatggaaactaaagacaacatcttagcatatatttccaagtcgtttttcagaaacctgggcccctccccagaaggatccgctgaagactgaactctttgttgtaaatttcttcctgaagggcttagagggagtcacacccaccagcccaagtaaccgggaccaccagcccaaccaggcctctcctctctggagaagcagggtcccagataacaggccccagctggaacctcatcagcccttccccatctcccctccccttgcccagggaaagggtcatccctgcacagctgaggctgtgacttgtgaagccagttgcattctctagaacggtgctgtgcgaaggatggaaatgcgctctctgtgtggtcagcacggtggccacgagccacgtacggtgaccgagtgagcccttgaagtgtggttaatgcaactgagttagatggagcagggatctctcttaggggcctgctgggctccccacaagcatggaaataaaggaaaaccttgagttccttccaaggaaattccaagcccctacctagccccgggaagtaaataagcaacttgataaccaagaaggtaatagtagcctaaaacaatagccaaggaagtcagagtcagaggtttggttcctctacagaaactaaatacaacatcttagcatatgtttctgagttgttttttagaaacctggacccctccccaaaagtatcgggagaagactgaactctttgttgtaaatttcttcctgaagggcttagtgggagtcacacccaccagtccaagctaaccttcttttctgctgatcccaaatttttaaacaaaccttctttactttaaccaattgcaaatcagaaaacgttgactctacctatgacctgtaagccccaagctgcgtgatatcccactgtttcaggccaagaccagtgtgtaacctccatgcaacgattttgcctataacttctgctctcctgaaatttaccactgcctttaaaaacccttacctgcaaaccatcggggaggtcagagtttaagccttagctgcctggtcctctttgctgggtgccctgcaaataaacactttcctttctattgctgcaaaaatctcagaatggatatctggtcttactgtgccaggtgagcagactccagttcagttccagcacatgaggaatgaattaactttatgtgattttagttgacttaaatttaaacagccacacgtggttactgtgttggatagcacaggcctagagcttagagaaagcaaaccaaagaacgccagctgggtcccaggcagaaggcagaaagagggtagaatgggctacctcagctattccagccccgtgaaaaggcaccaggggccgggtgtggtggctcatgcctgtaatctcagcactttgagaggccaaggcaggtggatcatttgaggtcaggagttcaagaccagcctggccaacatggtgagacccctcccgccacaccatctctacaaaaagtgcaaaaattagccgggcatggtggtgggtgcctgtagtcccagctactcaggaggccgaggcacgagaattgattgaacgcagtaggtgagctgagattacaccactgcactccagcctgggtgacagagcgagactctgtctcaaaaaaaagaaaaaaaaaaaaggcagcaggaatggggcaagaaaagaggtcaaaatgcacccagccacacaaaaattcgctcactcagccaggtgcggtggtttacccctgtaatcctgtaatcccagcactttgggaggctgaggcgggtggatcacctgaagtcgggagttcgagaccatcctggccaactaaaaatactaaaaataccgtctctactaaaaatacaaaaaattagctgggcctgatggcacgcgcctgtaatcccagctactcgggaagctgaggagggagagtcacttgaacctgggaggcagaggttgcagtgagccgacatcacaccactgcactccagcctgggcgacagatggagattctgtctcagaaaaaaaaaaaaagtccgggcgtggtggctcacacctgtaatcccagcactttaggacatcgaggtatatggatagcttaagcccaggagtttgagaccagcctgggcggcatggtaaaatcccgtctctacaaaaaatacaaaaaattagctggtcgtagtgatgtgtgcctgtagttccagctacttggaaagctgaggtgggaggattgtgttgatgtggacaggaagcaggaaaatgctaggcagaaaatggcaagttccctggagaggcccacaccctcaagccttggaccacggcacaacgtgttctcactttgtctctgttttccagcttgaatgttgctttctggcctgcccccagcccccatcttttacctataaaaaccccaggctctgttggcagaggggtggcacagtggcagagtggagcagcagagaaggagaaaagagaagcagcagccaggtgtcggagagaagcagtttgacttcagagggatggcttgacagcgagacttcagagaagagttccgccagggacagctgaactctgggagaagactgcctttccactccatccctgttccagctccccatcctgctgagagccacttccactgctcagtaaaatcctccatattcaccacccttcaattcatttgtgtgatctgaatcttcctggatgctggacaagaactcaggtaccaagagggcaggtgcaaaaggctgtcaccctcaccatccactgagctggtaaacatttaagccatccctgggtggcaaagctaaaagggcacactgtaacatatgtcctctgaggctcttgaggtcacaggtacccctgctagatgctgctatggagctgcacagagttctacttctggtgcccagaagcattcatcccagcccttgcacccactcacctgtgtgctcccccaccatgaggggttgagagctgcaggctaagtaaaccagccaaccccttcttgagtccctcaaaggggtcagggggactatcttgtttcagcttgagcctgggaggtcaaggttgcagtgagctatgatcacaccactgcactccagcctgggcaacagagcgagaccctgtctcaaaaaaaggagtatctcctctgattttatcttattttcaagaaacaaacaaagcaaaatttaaaaaaaaaacattaaatacaaacttagcaggtgctgtggaaatgtacgagagaatgaagaacatcttggattctcaaagtcttgctcaggcagagacactctgcacaaaggaatgaaccattcaaaaaatccactgaatatagatttatggatgggcgtgttggctcatgcctataataaaatcctccatattcacaaccaagaagatccaagcaggacagcattttgggaggctgaggcagaaggatcgcttgagctcaggagttcgagaccagcctgggaaacataatgacaccctgtctctacaaaaaacacataaaataaaaattagccaggtgcagtggcatgtgcctgtagtcccagctactctggaggttgaggtgagaggatcacttgagccctgcaggtcgaggctgtagtgagctgtgattgcaccactgtactccagcctcggcaacagagcgagaccctgtctcaaaaaaataaaataaaagtagatttgcaaatattccacaaatccacttcaacatgaacttctggctctttttctcaccctccctccccagataaaaaggttgatttccaaaaggcacttgaaggagcctagaatgggccaaggtataccatatactatggagactcctgtggcatgatcctaagtactcatttacagacacatctcaaggtgcagatggttctagctccttctcccaattcctgccagagtgtgagcctgtgagagcagattatgtcgggggcagagtgataaaaatgttcggcagttagatagtggtgttgtgagtcctggctgatgggagcacatcctcagccaggactcccaagaccccttcctccctgacttcaaaggggctctggatgaggcatgttcagtatgggtttgaagctggacctggattctaaactggaagttaaagaaataatccaattctactcttgccttcagaaaggccaagtttaattctatttttcttcgggggcaactgaggcccaagaaatcaagaagagccaggcaagctaggcccagtggctcatgcctgtaatcctagcactttgggaggccgaggcagacggtttacttgagtccaggagtttgagaccagcctggccaacatggtgaaaccccatctctacaaaatatacatatatatataaaatagctgggtgtggtggcgcatgcctgtagtcccagctacttgaggggctgaggcaggaggattgcttgattcttgattccatgtcgagactgcagtgagcccttattctgccactgcatatcagagtgagaccctgtctcaataaaaataaaaataaaaaacacacaaaacaacaataacaacaacaaccaagaagatccaggcagaacagtagaagacgatgtttctccagacacttaaaggtaaccagaaggctgggcgtggtggctcacgcctgtaatcacgttgctttgggaggcccaggatcacttgaggccagaagttcaagaccagcctggccatcatggcaaaaccccgtctctactaaaaatacaaaaattagccaggtgtggtggtgcatgcctgtggtcctagctactcgggaggctgaggcaggagaattgtttgaatcggggaggtggaggttgcagttagccaagattactccactgcactccagcctgggcaacacggcaagaccgtgtcttaaaaataataataaatatatataaagataaccggaactggagatactaacaagacactattaggttgtcctcccgcatcctaatggccactctgcaaaatcctccgacttccctatcccctaaagtccaaaccagtgctcatagaagaagcgtaataactccttgctaggggcttttttgtagatgggcttcctgctcaggtcgtttctgccttcatccttcttcatatggttcaccagaagcaggatcaggaaaacagcagagaggatgcccgcgatgctgtccacaatcaggactgccacgacctccattctctcaaagatgttgctgccctgggcagtgttggacatgggtgccttattggacacatcctggtcccccgcagagagtgagatcctcctggggatgacctcgttgtcctccagttccttggtttcagtgggaccaggttcccaggccctgccctctcagggatgtggttatctagaagcaccaagggttggatcacttcagggatgatcttggggtcccttgactcatcaatatctctagagccagagagctcagagtcatcaggttcctgcccccaacacccacatccagagtcttccagtagggatctggagaagtttggcccctaggcggtcctgggttgatgacctcagtttcttggattgactcaggggtggtgggggtgcctgcaaaaagcagcagcagcagcaggagcaggagggcgggggcagtggtaccgccatccagagagggtgaacagcctgcggtgagtcagagcaatcattcccaaagtgtacaattcagtggtacttaatatattcacaaggttttgcaactatcaccactatctaattgcagaacattcgcatcacctcaccctcaaataattctgtactcagcagcattcatttcctatttcctgctctgttccagcccctgacagccaggaatctattttctatctctacagatgtccatattctggatatttcatatgaatggaatcatatagtacgtggtcttttgtgtctggcttctttcacttagcataatgtcttcaaggttcatccatgccgtagcatggatcagtgtttcattcctttacatggctgaataatcttctattctatggatagaccacgttttgtttatctgttcatcagttgatggacatttgggttatttccgcttttttggctattatgaataatgttggtatgactatgttttgtatcagtttttgtgggaacataggttttcacttcttttgggtataaccttaggagtggaattgctggcttgtatagtgattctatatttaacctttgaggaactgcctttctattttccaatgtggctacactattttacattcccactagcagtgtatgagggccgcaatttcttcacatccttgccaacatcgttcacatcttttgttattttccatttgctttttttttttttatcatagccattgtagtggctgtcaagtggtatctcattgtggttttgaattgcatttctccaacaactatgcaattgagcatcttttcatgtgcttattggccatttgtatattgtctatggagaaatgtctagtcaaactttaaaaatgtctatctattggaccaggcacggtggctcacacctgtaatcccagcactttgggaggccgaggtgggttgatcacttgaggtcaagagttcgagactagccggaccaacatggtgaaacctcgtctctactaaaaatacaaaaataaattagctgggcatggtggtgcatggtatcaccaggttgcccaggatggtctcaaactcctgagctcaagcaatctgcctgcctcggcctcccaaagtgctaggattacaggcatgagccactgtgcctggccttgatacagattctttattgcttagtttcatctcccttcttctctcagaaattaaaattaagtatgatcatgatgacgatgttgatgatactgctgctgctgctgtctgtactacgcaataccaatggccaccaagaagtcaagacactctggagaagactccaaagacctctgaggtgggaacacaaatcctggtcaagttcataaggatttccctttcctctttcatacaacacccttgctatttattacaggaatgggttgctatggttacaggaacatgggggaggacagtgaatgattctataaagtgaaagaggccttaatttgtatgttgtctagggttggagctggcacatctcttcccacaatgcctggggttacccaaagggcatcaagtgtcccaaattcttcatgccaaactggtctctgttttcattggcatttgtggaaagcctgtagtgcctaaggctactggggagaggacctgggtctgagggtgatcaccaacaaaagagcccaagcagttgtcattcctctcccaaccctgggcaaataatccacaaatagttcagaaatggatgctgctgaaacatgggcctggctatctggatttgaatcttaacttcacctctaatgtgttgtgtgatcttgagtctcacaaggaaattgaagctggtaacatctccttcttacagggtactgagatgaccagtgtagaagagaccaataagctacctcacctactgcctagcacatggtaagtgatcaacagtgtaggcctttaccgctattacgaggctagtcacccagcctgctttcagctccaagactaggacacagctaggcgagcccattctttcctgttgcttctcccctgttctgtggctaccctgctctaccctcttcttgggtctctctgaagtagtgggtcatgctgccagactctgccctttggcggtgctcttggcatgacccaacctgggtgtggacggtccagggaagcacatggctctggtggtaaatggtccaggaaggcacatggagtctctggagtcagacatcctgagttccaaccctggtgccaccactgagcaaatgtctgtttctgagccttactttcctctcctgtaaaacaggaataattatgtttattttattattttattttattttattttaagacagagtctcactctgtcaccaggctggagtgcagtggcgcgatctcggatcactgcaacctccacctccccggttcaagcaattctcctgcctcaacctcccgagtagctgggattacaggtgtgtgccactatgcccagctaatttttgtatttttagtagtggcggggtttcaccatgttggctaggatggtctcgatctcctgacctcatgatccgcccgcctcggcctcccaaagtgctgggattactggtgtgagccaccgcacctggtctatgtttattttataaggctgccatgaagattaaacaaagtggcatagatagagccacaagcttatgcaggtgcttagtaaatggtatctggtttttttttggaacctctgggaagtgcagctggggtgtggggaagggaccctaactgatagggcctgggtggcggtgtggcctagggaaggcctttcaagacagggttccagtgcccttgagcgtgcatttaacaaggttggagagggagtcctaggctgaaggtacagcatgagcaaaggcagaggggcaggaaagagcttgatgaattggtgaatttaagtcatgggatgtgtctggaactggggtgcagtggccaggttgcagagggccttgcaagctaccactgaggctgattttacccaggggtacgtggggcactagagaagggcttatgcagagaatgatgtgatcagatttgcatttcagaaagattttattctggctgccctgcggaatctggacaggagtgggtagaaatgggcacagagagggtacggtggctcacacctgtaaccccagcactctgggaggccaaagtgggaggattgcttgagtccaggagttcaagaccagcctgggcttcataacaaaaccctatctctacaaaaaataaaaaattagctaaacatggtggtgcacacctgtagtccctgctactcaggaggtgaggtggaaggatcacccgagcccaggaggtcgaggctacagtgatgattgtaccactgcactccagcctgggcaacagagtgacaccctgtctcaaaaaaaaaagaaaaagaaaaagaaacggagcctgcaagtgacagacccaggatctaaaacgaggtcaggctgcctttttccgccactccaggtggccccacgaacagcctgggcctggtgaacttggcttcaaccggcctggaaagtaaccttccaatgagcccatgctaagggccaccccagttcacgctcctggtggacaggggtgcggctggcccaacactgccccctggtggttaaaagcagaagtcccctgagcatcgctcagtttgggccgggcctcctccctacccgcacaccaagtgtgcggtctggtagatggacacagattcacggcttacctctcccgctttgtgttgtgtgatgtgataattcacttcctgccctgagcctcactttcctcatctgtaggctgcggatggtgcttcctgcctcagcttgggcctggctcacagtcggtatttgggcatggagctggcaccatcacttcccaccgagatgcacaaacgtctgagcagctttctcccaatcctgggccttccctccaccccaggaacccagcacctcactttgtcccactgtgtggccccctgccccacactggccttccctgcaggggcccacacgccatcaaccctcgtctcccctactgcaggctgggggcaccagcggcagctgacctgggtactggttcactggacacagaggctttggccaaggcactgccccctgctgagcttcggtttcctggcctgtaaaatggggctataatctctgtctgcttcaggacttaatgtgaagcggctgtgcaaactgtggagtgctgtgccatgaagctctggtgaagacctactctgagcacctgcctagactttcttacagtggtgtcctccctagcttgggctccttgggcagtgaggtgggctggggcaggtgagcctctccaacagccattgaaacacccgcaaccctggggcctggggtggtggctcacgcctgtaattccaacactttgggaggccaaggtgggaggaccacttcaggccaggagttcgagaccagtctgggcaacatagtgagaccccatttccaaaaaaaaaaaattagccaggtgcagtggtgcacacctgtggtcccagctactcaggatgctgaggcaaaaggatggtttttgccggagttcaaggctgcagtgatctatgactgggccactgcactccagcctgagaaacagagtaagaccctatctcaaaaaaaaaaaaaaaaaaaaaggaaaacacgcccatgggtccttgacctgctgccctcctcacctgcttctccccaaagactgtggggacttccagggaggagatgggctagggagagcaggtcccacctccattatctggacaggtgaggcctgggtatttccaattgcctcattttgagcaagagttttgatctgtggcctcctgccaagattttgccattctttcctgacaaactacacggctgttttgtaaccggcattataaaatggttttattaattattaataactatttaatgtgtacacagttatccatgaagaaataggaaataccagtgagttgttaccagcgttgccccaggctgggagagcccttccagctttcctttggcctctgacacccctgccccactgaccgcccaccccccattcctgtctggaaggctcgcctgccatcatcccgcacatccgacagctctcccttcagggtcacctcctccttggacaaagcatacgtgaccccttgtcaggtttcttggctgggtgctcccccagagtttggctcctgcccccaaccaagcatgcatggtgacaatgcacccacttgataactgatcactggtgtcacttccacctccctccctccatgagcgcaaacctccggttaatacagttgggtcagcccagggtcctcggtgtccccagagtctgccatgcctggtgctgggcagatactcaataaacacccaaaatcaggccgggctcagtggctcacacctgtgacctcagcactttgggaagctgaggcagggaggatggcttgagcctagaagttcaagaccagcctgggcaacatagcaagacccctgtctctacttttttttctttttttttttgagacggaatctcgctctgtcgcccaggctggagtgcagtggcgtgatctcgcctcactgcaagctccgcctccagattcacgtcattctcctgcctcagcccctcgagtagctgggactacaggtgcccgccatcacgcccagctaattttttgtatttttagtagagacagggtttcaccgtgttagccaggatggtctccatctcctgatctcgtgatctgcccgcctcggcctcccaaagtgctgggattacaggcgtgagccaccgcgcccggcctgtctctacttttaaaaaattaaattaaattaaattaatatcaatgagtgaataaatgaagaaacaaactttgggcaagccactgcccctctctgggtgacttttttttttcagttttgtaaaaaagtgacagtgttaaaaattagacatggaggccaggcatggtggctcatacctgtaatcccagcactttgggaggctgagccaggcagatcacttgaggtcaggggtttgagatcagcctggccaacatggtgaaaccccatctctactaaaaatacaaaaatcagccaggtgtggtggtgcatgtctgtagtcccagctactcgggaggctgaggtgggagaatcgcttgaacctgggaggtgaatgttgtagtgagctgagatcgcgccactgtactccagtctaggcaacagagactctatctcagaaaagaaaagaaaaaaaataattggaaatgggttgctgaggacatgtgcccctgctccctgctgagctcccagtgtgcccctcccctcctgaattggtaggagattctgctctcacctctgcaggcgatcactgctcactgcaattcagtcactagtgcctgcacctgaccccatttttgtttgccacccccgcagccagcccgtatttgtgatcacggccctgtgatcagagtctcaggaaacacttgtgcatggggcagagcaatccttgctgcctgcaaggaaaccagacaaggctgtgctgatggaaaatcggctgtagttacatgggcaagaatcagagttcaagtctaggaacccctggtttttaggcagaggacatcaaggcagaggatgtcaaagctgaagtgaggcattacaatcccccatcatgacaaccggtgggccttgtgaaatttagcacaggtcctcccggctccagttggccacagcctgccatggaagcccaagtgcctctgggcactccaaatatcactgcatctgggaaagcagcagacagcgtggccatgcagtgcaacagggtagtggggatgcctgtcacatctccgatgcagaggcagcccctggacatggggatgtcctgtgactcttgcccgacagcccaggccatctccttggagccagcgcagccatttttttttttttttttttttttgccaatctgctcaaacacccagttggaacaggaatgcctcgtggcactggctttaggagtttaatctagatggtttgctgtttctagcagcagagcacctgttcagactctacgtatatgcacccatgaatggtgcagctgccaagagaaccaaagctaaatgttggcaggatcacagcaggtgtggaggggaggtcactgggaattccctggagactcagtcgttacccactcaactggaaggctgagcatggctttttcctctgatggttacccatgccaggccccacctctccatgtccaatgttctttctttatttgtttgtttgtttgtttgtttgtttagagacggagtctggctctgttgcccaggctggagtgcagtggcacgatctcagctcactacaacctccgcctcctgggtacaagcgattctcctgcctcagcctcctgagtagctgggattacaggtgcacgccaccatgcccggctaatttttgtatttttagtagagacagggtttcaccatgttgcccaggctggtcccgaactcctgatctcaggtgatctgcccaactcagcctcccaaactgctgggattataggcgtgagccaccacgcccagtccatttccaattttccatccagtggtggcagaacaaacttggatgggccccagtgctctgctggaaccaggaccctcacccagctgcctccagctgggcctgcccacccctgctgacctcctacatgcagagaacagggcttctctgctcttcaggcctgaagctgtgatgtccacaggacctaggaaccacgcacaccccctgaagctggaacaccaggcatgggtgagtcctgggtggctggatcttgtcaagatgggtgaaagggcagcttctgcaagcaggacccatcctcagtggactggatcatcttcagcgttctcattctcagccgcattctctgggaacagggaaagaggttcctgtctgaatcttcagcatgggctatgcactggtggccccttcctgcttggccactgtgccaggtgagcctacaatgagatgaaatggtgacgtgggacaagtggctctctgcagccacctccagcaccaccctgcctgggaaggcaggggtcagaggggtgggtgtgaaggggttggagtgcacaggtagaggtggctggggtcttcactgtgttggggagggtctcatcgccttgagactctgcagcgtctcctcagaggccttgtcgggaagcagcacctccacagtgtagctgagcttcttggcatgcatccggctgtaggtgttgtcgaagcgcaggacatctgcagtgatggagaggtgatcagggagcacaaaccccgcacatctgcaggaagagccagccctgcatgggtgcatccctggaacccttgggaatgagctgcatccctggaacgtcctgcatccctggaacccttggaaatgagctgtccaggacagtgggtggggcctgagggccagcctgtgcccagccctaagcccattgctcgctgccatctccatggtggcttgcgctacatgaaggaatcatgatggtcatcagcatatagaacagcacacagccagggagcaggcggcctgggaacgggatctcgagctccacctgcagggaggagctgtggcccacggacacagtatgctcgtactgcgtcctcgcctagttgcggttgcacaggtagctcttgggcctctccatgaaccatggattccatcacacattatagcccctgaatcctcaaagcagccccatgtggaaggcaatgtcatcctcattttacagaggagaaaactgaggcttggagaggtgatatgatctttcagcggtcacagagcaagggaggggaggtactgggattcctttatccagatgtcccaacccagggaggagccctgctaccccaggaggaatgggctgggctacataagccgctttccgtctcacagaaggcatgtccttcaatgccaaggtccaacatgaactcaggtgtgatgagtcgtgcagacttgtctgtctctactctcctaatgctccctttccacaaaatgaaataaggtaatgtgttgacttaagcataagccacacccttctcctccataggaaatcaaccttgggttccccttctcctagctctgttcccaatagatgtggaagggcagtggtgtccctgagcaatgctacttctggtaaagctgactgagctgcatctggcctggaaggcctgggggtgaatgataagcacctggaggaagtcacctctttgggactcctggagtggggtggttcatgcaactgggtggtccccttgccaagacccctgactctaagtccatggcctcttacttacctgtctcttagtccagtgatcccggtataggggcttcttaggagctgagcccaaggccctaggttctgaataccagctcttcccccacaatgaatctctgccctcatacctacaggtaggggccactcatctgatccatggccccaaagctggctcccctggagcttacagagatccccccaccctcccgagagctggaaagagagggcaagcagaggggagactggcagggaaaacaattccagtaaaccccgcagctcttacagacgccagcctggaggcaggtgaggctcccatcctcaggcaccatgtgggcattgtagcgctggctgggcagcacctccgtcatctccctagcactctgctgctcccccatcttggtcttcaggaaaaccccaaagccgatgtccccaccatctgaagcaaactgccacctgcagtggatagagccccattggcgaccccctgcctgggctccaggcccctcccagatgtgcccaggtgtagagtggctgccatccctacctgagcacacagcccgggaacaggatctcgttctccacctgcagggaggagccgcggcccacggacctcgtgtgctcatactgcagcctcacctgctcgcacaggtagtagctcttgggcacctcacccccatagttgatctgtgggtgaagggggtgtgtgggcactagatcacagcttctcccctccttccccatcctctgggcaccctgtaccttggtcaggcacttggggttgccatcggggtcagtcatggtccccccaaactccacaggcagctggtcggggctgatgaattttgtcagctcctgcttccagttgtctgcatgggagcaagagagggactccaaagggactcaggagactcaacagagggcagagggggctgagcttggtgagggaacctgatatgtcctgggcgtgctcccccgggcacctactcctaagagtacccaagacctttatgtggctcccagcccacggtctaggacccaaggcattgcccgtgcgtgtggaggctcaccagggtcaggccaggggtagtgcccgagtagaggacgagccagggagaagcagggtctttagcattgacctctgcttcccaggcagatggacacaaccagggggccacgtcgctcacctcccagaatcacaatcttcctgcgtgtctcctcactcatgaacgacttgaccaagttgaaggccacggggaacagttttggggctgaaacacatgtaaatctcttgagaagctggaccagaaaggacgtggggatacagagccacagccaagagcaggtgctggacaggaggtggacagatatggattctgccactctctgctgtgtgaccttcagcaagttacccaccctctccaagtcttagtgcagttaactggaaaatgaaggtgaaataatgtatgtataacacctggcacagttcctggctttcaataaatggttgtctcaggccaggcgcagtggctcatgcctgaaatcccagcactttgggaggctgaggtaggcagatcacttgaagccagcagttcaagaccagcctggccaacatggtgaaactccgtctctactaaaaatacaaaaattagctgagcgtagtggtgcatgcttgtaatcccggctactcgggtggcagcggcacaagaattgcttgaacctgggaggcagaggttgcagtgagccaagatcacgccactgcactccagcctgggtgagagagtgagattccatctcaaaaaaaaaaaaaaaaaagaaaagaaaaaagaaaaagaaaaatggctgtctccccaacccagttgtaagggattgggcacaagctggctctagggtcagcaatattgattccccaacagtatcacttcttttccacactccaggttgtctggaatcttcttgggtgtgacatctacatgagacttcctgtcctgccctgaattgctcacactcaactgagcactgtctgtgggccaagctctgtgctccatcttctccacacactgtttcatttaacctcatagttatctttgaggagggggctattgtatccccatcttacataatgggaaaactgaggctcagtgaggttaagtagacttggataaaatcatagagctagttagatttgaaccagatcctctgactctggaacacatgacatcaccagggcagccagggaccattcccgctcaaagtgtgtccatccactagtgtggtccatggactatctgttcccagcccacactgacataagtaagtaacagtaaacatttagaaacttataacttgacattgctgaaacataccagtgcatgattttgtatattacaaaaatatcagtctgtgaaggactgaaactaaaaaataaagccagaggccgggtgcggtggctcacatctataatcccagcactgtgggaggccgaagtggctggatgacttgagatcaggagttcaaaaccagcctggccaacatagggaaaccccatctctactaaaaatacaaaaattagccaggcatggtggcgtgcacctgtaatcccagctactaggaaggctgaggcaggagaattgcttgaacccaggaggcggaggttgcagtgagccaatatcatgccactgcactccggcctgggtgacagagggagactccatctcaataactaactaaccagaaaccaaccacacaaaacctggttcttcacaaaggatgggtgaagaagcctttaactccatggcttacctactgtacccccaattcctgcttctccctccccaggaggtcatcccggtcatgggcttacctcgaataacaattaaattcttcagggtctcaggataatttgcttccaggatgctaaaaaactgtggagtcaagatgagtctggttggggctctgttccatcacctcccgcccatgggtttctgtggcctctgatgctgctgagacaagaggcccatccctggcccatcctaccttccccacaagcatgtgcctcttcctctctgttattctttttttgtttgttgatttgttctcgagacagggtctcactctgtctcccaaggtggagtatagtggcacaatcacaggtcactgcgaccttgaattcctgggttcaagagatcctcccgcctcagccacccaagtatctaggactacaggcacgtgccactgcactgggctaatgtaaaaattattattattgttggtagagatgacatctcactgtgttgctcaggctgatcctgaactcctgctcaaggaatcttcccaccttggcttcccaaagtgctgggatgacaggcgtgagccaccacgcctggcctctttgtgttaatcttgctcccctttctccgtggagggtggtctctaggccagcatcattggctggtctgtggagcccctgcaaggcatccccacccctctatctcactggattctcacatcaattcacagctagggctcacagctgggagccactgcccacaccagccccaagccagccacccaccttacctgctggtagacctccacagctggcttccacaggtgtttcaggctcagcccctccatgtcaaacaccatcagcgccatctcgatcttcctgcccagctgcttgggacagagtcatataggtcagacgacagctccagccaggagatcctggccagagagacttgggcacctctccccaccttcctgccatcccaccctctggcagcccacagcgttttccagacagatggacaacacctcacttttacgggtgggtaagggtgggagaagcccacattccaccagagccctgggtgctgagggctggggaggggcagggtgccacccttctctggtcctggtgccaccctgtagacagatgaggcccagccccacccccgctgctcaccttctgagtttgcagctcacactcatgcaacagcagctcacagactttgatgcgcttccggatcatatcctgcttggaggctgacagcaggagacccttggggtcgagggacccaatgatgttgaagtacacagggcagccttcgtagtcgtagccacaaagaccacccgagtcatacagctggatgacctggaagtgtgggtaaggtcccgactcaatccagctcaccaggctgggtccctactccatcaggtggctggacgtggtaggtgggagatgtcaggggtgaggggcctcagatggcctgggggatgctgctcgaggctcacctcagggggctgccatgtgacaatgttgtccaggtcttgttgcttccggaactccatgtgctgcaggaacacagcaggagctataggattttgcaggaacctggggacaccaggctaggtccctctgcccacagccaccaagatcccaccacagcatacccaggctctcagagcgtggggacaggaggtgggctggggggacttgggtctgatgcagaaagagatcgggggaggaagaaagaagaaacaggagaatgggacagggccagagtctctacccttttgcagcaaatccctgggtcacagtgcatggaaggcagggcagtagggatcacagatccttacccttcggagcatgtcttcggatttctgcaggtcaaagtttcgagctgcaagaagaggaggtaaatagaagctcaaggctagatccagaaagagcccttccctaaaaactcatgaggaaacagctaaggtgtccccagccttttcctgacaccccaataatacattgaacatctagaaatggttgtttgtttgtttgtgtgtttattttttgagacagagtcttggttctgttgcccaggccagagtgcagtgatgtgatcatagcttactgtggcctctggcccaggtgatcctcctaccccagcctcctgagtagctgagactacagggccacaccaccatgcctggctaattttttttagattttttttttttggtagagatagggatcttgctatgttgcccaggctggtcttgaactcctggcctcaagcagtcctcccacctcagcttcccaaagtgttggaattacaggcgcgagcctctgtgcctgacctagaaatgttttttaacaagttaaggatctttaatcctctagaagactggagagcccttgatttcagtttccagtcttcctacaaccttctggaggccaatctagcctgtatttgatgtccctcaggaagcagagacacccccccccaccacctgcacagtgttagggttggtggggagcatggggtttggattcacagagactggggcttaaagtctagtgttgcccttttatttcctgtgaaaccttgagcaagtcacttaccttctctgagccttagttttttaatcagttaaatgagaacactatctgtttcagttattcaaagaacaacatgagataatgtatagaaagtgtttggcccaatacctggctcacagtaggttctcaataaacagtagctatcatgattacctattttgaagaaatagacacactttaattgaaaacatgatgctgtattttagaaatgctttgactgttgctctctgagacccctggctcactgaggaatttgtccactcccagagctgaaacaatatgcggggtcagagattttcaaatggaagggatctcagatgctatccaggcctcctctgctctgatcatgaaacagttccagaaatcactcccggccaggcgtggtggctcacgcctgtaattccagcactttgggagaccaaggcgggcagatcacttgaggtcaggagttcaagaccagcctgggcaatatggtgaaaccccgtctctactaaaaatacaaaaatcagctgggcatggcggcaggtgcctgtaatcccagctactcaggaggctgaggcaggagaattgcttgaacccaggaggcagaggttgcagtgagccgagatcgcatcattgcactccagcctgggggacaacagcaagacttcatctcaaacaacaacaacaacaacaacaacaaacacaaaacttagctaggcgtggtggtgcacacctgtagtcccagctactcgggaggctgaggcacaagaatcacttgaacccaggagaaggaagctgcagtaagccaagatcgcactactgcactccagcctgggtgactgagtgagaccctgtctgaaaaaaaaaaaaaaagaaagaacccccaatgcaacagctcagccttgattatctcccatgatggagagttcattaccacagaagacattaccattccattcctcagcagctttgactgaacccaaatctgacctgtgatgattccagccccatcatcagaggtcaaacaaatacatgttatctcttgtcaatgtggcaattctgcaaatatttgaagacaagccaccaagttcacctatgcgatctttgctctgggctatatatttattaaaatcatcttctgtgtcaattctgtcaaagagaacgttctgtgatgatggaaatgtcctatacctgagctgctcattatggtagccgctagctgcctgaggctacggagcaatagaaacgtggcaagtgtgattgaggacctggagttttaatttaatttaatcgttacagttatatgtggctacaggtgatcaaactgaacagggcagttctatatacttcagagattttaagatttttgctgtacaggtcttgtgtgttctaggttaaactcctgggtattttatgggctttgttgctgttttgaatggtatctgacttttcattatctttttttttttttttttttttttgagacagagtcttactctgtcacccaggctggagtgcagatctcagctcactgcaacctccacctcccaggtccaggcaattctcatgcctcagcctcctgagtagctgggactacaggcatgcaccgccatgcctggctaatttttgtatttttattagccaggttggtcttgaactcctaacttcaagcgatctgcctgccttggcctcccaaagtgctgggattacaggtgtgagccaccatgccctgcccgctactgatttttatatctggcaatattgctgaattttctcttgagttctagaggttttctgttgatccagttggttttcaagggagacaagcaatttctctgcaaatattttaactctttccttctagtctttctaccaattgatattttttctttccatgtaacattggcaaaggtctccagttctacatttaaacagtaatgttgattgattgattctttccttgttcctgatcttaaagaaaatgcatctaaaatcctctaataagtgttaacatttgtcagaggatttttgctacgtaaccattaccaagtcaaggaaactcctttctatccctagattggtaagactttcattttgtcttataagtaggatttgaaccttttcaaatgctctatctgcattaattgagatagccacataatttctcatttctagcactcattaatgttttcaatgacaccgatagatattctgttgttgaactattcttgcacacctaagataaacttcccttggtcacgctgcataattattattattattattatttttttgatggagtctcgctctgtcgcccaggctggagtgcagtggcgcgatctcggctcactgcaagctccgcctcccgggttcacgccattctcctgcctcagcctcctgagtagctgagactacaggcacccgccaccacgcccagctaatttttttttgtatttttactagagacggggtttcaccatgttagccaggatggtcttgatctcctgagccaccgcgcccggccagtcatgctgcataattttaatgccttattggattctactacataatattgatttagactactattttttttttaactgatggggtttcaccatgttggccaggctggtctggaactcctgacctcaggtgatccgcctgcttcggcctcccaaagtgctgggattacaggtgtgagccaccgcacctggcctgatttagacttctttatatctacattcataagtaaaataggctgagaattttcttttttaaaaaattgtattagctgggcgcagtggctcctgcctgtaatcccagcactttcggaggccaaggcaggcagatcacttgaggtcaggagttcgagaccagcttggccaacatggtgaaaccctgtctctactaaaaatacaaaaaattagctgagtgtggtggctcatgcctgtaatcccagctagtcaggaggctgaggcacgagaatcacttgaacctgggaggtggaggttgcagtgagccaaacttgtaccactgcactccatccttggcaatgaagcaagattctgtctcaaaaaaatgataataataaaatgaaataaaaaattgtactgatctagctttgaaatcaaacttactcaaaccttataaggtaactttcactctctcataggttcttaaagaattcgtatgagctagaaattaactgtttttttttttttgagacagagtctctctctgtttcccagcctggagtgtgatggtacaatcttggctcactgcaacgtctgcctcctgggttcaagcgattctcctgcctcagcctcccaagtagccaggattgcagttgcccaccaccatgcctggctaatttttgtatttttagtagacacagggtttctccatgttggtcaggcttttctcgaactcccgacctcaggtgatccgcccacctcggcctcccaaagtgctgggattacagacatgagccaccgcgcccggccaactggtattaaaactctggcggaattcatctgtagaaccactggagtctgagttttgggggaggggaagtttttgctgccatttcaatttctctaatatttattggtctgatgacgttttctatttcttcttgctggattttggtcttatatattattttctagaaatgtgtcttccttcacttggattttcaaatttattagtgcatatttgttcataatcttctcttataggcttaaaaaagattcagtttataggtgattttctgttgtgttgtttgtttgctttttgagacaagccatcctcctacctcagcctcccgaatagctggaactacaagcatgcaccaacacacccggcttatttttgaattttttgtagagatatggtttcgtcatgttgcccaggctggtcttgaactcctgggtcaagcaatcctcctgcctcagcctcccaaagtgccaggattacaggagtgagccactgtgcccagctataggagatttttcagttaggaaccagaatgtggtttcttatcctataaacagtggtttgggcaatgctcatgggatatgagaacagaatttttttttttttttttttttttttttttagtaacacctactatgcgccaggctgaggggaccagggcaggcacatccctgccctgatggaactggcatcagatgaaactaatggaaccgacagacagatgtgggatgaagttaaggaaaaacagagggggtcaggcagagtggctcatacctgtaatccccgcactttgagaggccgaggcgggaggatcattttgggtccaggagttcgagaccagcctgggcaatgtagtgagaccctgtgaccctgtgtctacaaaaaataaaaataaaaataaataaaaacaaaggaaaagaacttcagaaggagggttgggaaaagcccctcagcatgaggcccgggagagggtcctctaccaagctcagcctcagcagtagccctcccctttgcctgggtcttgggttagtgaggccgggactagcggagctgacgctgaagtggacgacggggccatgccagcaggtcccatcacccatggcatgaggtgggaggcatcaggacacccagcccccttcccaatcttggatcctttttctttcctatgacctggaagcctaggtatctgcaatctcactcctttatcaagggcacaccaagcaccccaaaagctgggttttaaacccaaaaagatactaaaggaagagagagagctgatgctgtatcaaggggcttcaagaaatcaactgtcccaactccttctttggtccaggctgggggcaatgacatatttccttgtcaaaaacaaatagaaagtgccacagccaagggggcttaaggagggcaagatgactaaatataatgtgggatcctggatgggatcctggaagagaaaaatgaaggaaatccaaataatatacggactgtagttaataataatgtatccatattggtttattaattctaacaaatgtaccatcatcatcataagaagaagatgttaataataaggaaaactaggtgcagagtatgtgggaactttttgcactatatttgcaattttctgaaaatctaaaactattctaaaaattaaagtttttatatatatatacacacacacgcacatatatatatatatatatatatatatatacatacacatacttttttttttaagacagagtcttgctttgttgtgcagtggcatgatctccgctcactgcaacctccgcctcctgggttcaagtgattctcgtgcctcagcctcctgagtagctggaactacaggcacgtgccaccacacccagctaatttttgtatttttgtagaaatggggtttcactatgttggccaggctggtctcgaactcctggcctcaagtgatctgcccgcctcggcctcccaaagtgctgggattacaagcgtgaaccacagggcctggccaaaatattgaaaaaaaacaaaaaaacaaaaacagacagaacaaatcagaggaagaattagtccctggtagggacttccttttctcaggtactgtgtgcatctgcgacctcatttgactcacagcgccctgaaggtagggaccagtattatgcccattacacagaagaggaaagtgaggttgggacaatgactggcttgccacaggcacatgctagcactggaactcagtcacagctctgcccaattccaaagccagcgttttaaaccctgcactgtatgtatgctttccgggctgactcctgacttctcactcatctcaagttcaaaatccattccatgaggtgtaatgagttaagatgaatttttccctaagctctggggcagtgtctgttattattattttgagatggggtttcactctgtcgcctaggctggagtgcagtggtacaatctcagctcactgcatcctccacctcccaggctcaagtgatcctctcacctcagcctcctgagtagctgggattacaggtgctcggcagctcacccggctaatttttgtattttttgtagagatgaggtttcgccatgttgcccaggctggtcttgaactcctgagctcaagaaatctgcctgcctcagcctcccaaagcactgggactataagtgtgagccatcgcatctggcttgttattatttttttagactgctgctgtaattcctagaagaaactgcttctctagcattcgctaaatccacttccttaagtgtttgctgggcacctgctcagtgcactagggcacctcggttcctttaggggacaacagagccctgtcctcggggaactggaggtacacccaaaggcaagtactgaaaacagtgctctgcaacatctgccccaagggctggccaggccagaggcctgaggatgtcctggctgttaactgtaacctcacctggactctgtgcccacctgttgcctcatccttgcttgacagatgaagaaactgaggctcagtggggttttgtgctgtgctcatacacaggggagctcagattctagtcagagcaggctgattccagaccctgtgttttttgtttttttgtttttttttttttgagacggagcttcactcttgatgcccaggctggagtgcaatggcgggatctcggcttaccgcaacctctgcctcccgggttcaagcgattctcctgcctcagcctcctgagtagctgagattacaggcatgtgccaccaagccagctaattttgtatttttagtagagacagggtttccccatgttggtcaggctggtctcgaactcccgacctcaggtgatctgcctgcctcggcctcccaaagtgctgggattacaggtgtgagccaccgggcccggcaagcctgtgttctttactaccctacagctccattccctcaaagtctcccactcctctcctgagaccctccttccttccctccctttctgcgtcccctgacccctgcaagcctcacctcgcagccagcgcaggaggaagtagtcatcagcattgggcagtatgggcagcaggtcctggaggttctcccggaactgagcggaggaggatctgatggtcggcggagctctcatgacctcgggggccaccaaccccgcccctaacccttcccacatcatccaccagtcaactccaccagaagaccatgcagggtgctgccctgaacgactttgccatctgaaaatagggcaccctccagcccaacataggaaaaagagttgggtccttcccaaaatttgggagtgccctacacactggactcccattctacatgtctaaggtggggccctggcatccttatttttaatttttattttattattatttttatattattattattattattattattattgaaacaggatctcactctatcgcccaagctggagcgtagttgcgtgatcttggctcactgcaacccgtgcctcccgggttcaatagatcctcccagctcagactcccaagtagctgggaccacaggcacacaagatgcccagctaatttttgtactttttgtagagatgggatcttgctatgttgcccaggctggtctcaaactccttggctcaaacaatccacccgccttagtatcccaaagtgctgggatcacaggcgtgagccaccatgcccgactgacagccttatttctacaaggatccctgggagagtctgatgcaggccagctaggcggttttaggaatgttgtccctgatactgcatcttgagggtttagatttagaggcaagttaccaaacctctctaagcctcagtttccttatctctgaaatggggataaaaataaacttgtaccaatcaaaggagtctgtgcacgtaaaacacttagcaggcttggctccgagcaggtgtcagatatatgtgagcactcagccagcgtggactgcctgatgccccggacaatggaggctttgtggaaaaaaaacagaggcagaggtcaacagacaggggctgaaagagaagccaggaatgccttatcagggcatctgttgcgtctgagagagaggagatctcacttccctggggaccaacagagctgaaggcaaaggctgggtttgaaggtgaatctgtgaatccaaatttgggattagaaatatgaggccgggcgcagtggctcacacctgtaatcccagcactttgggaggccaaggcggatggatcacaaggtcaggagttcgagaccagcctgtccaagagacctgcctggccaatatggtgaaaccccgtctctactaaaaatacaaaaattagtcgggtgtggtggcgggcacctgtagccccagctacttgggaggctgaggcaggagaatcgcttgaactcaggaggtggaggttgcagtgaaccgagattgcgccattacactccagcctggacgacagagcaagactccatctcaaaaaaaaaaaaaaaaaagattacagagaagcttgggccctaagaacaaatcacaaagagaagccaaacaaacaaatgttgcaacctggacatgaaaagcagtctgtctacccaaggctgcccccgcagccggatggcagcgccactccctcccccacaaccggggaacaaggaccagggccgggtggtggagagcacgcaaggtcagaagactggattcggctcctggtcacgcagagatgggcccctgtcccgcgtgctgcacgtagccgcctcaacaaccgcacgctggaccagagggcagaacagaggcgctctctccaggctcggtgttccagtctgtaccatgggggctccagccgggttgggcagtgccaggctgctcagggcccctcctcaagcctcccagcccgcgatgctcctcaccctggccagcgcttcctgctgctgggggctcaggtccccgactcggctgctcatggtgcccgcgggcgcagaaaggctcagggcgcaggtccgcccgcccgccgccgcctggccttgtatccgctgccgcctggttgtgcctcctgggccagatgttggtcccgccccgacgggagaggcactgggcctgccccgccccgcccagttctctcctcctctccaggattttttgctgcggtcaccaagcgcaccctacttgggacagggaggtgacctgccgggagagtggcctggggcagctggaggcagccacctccaggcctccttactgcgggggctcccgcctgttcgcaggtggcaggaaagggaatacactgagatcctctttccagcaaaatggaggaaatttttttttaaatgtttttttttttttgggccaggcgcggtggctcacgcctgtaatcccagcactttgggaggccgaggcgggcggatcacgaggtcaggaggagatcgagaccatcctggctaacatggtgaaaacccgtctctactgaaaatacaaaaaattagctgggcgtggtggcgggcgcctgtagtcccagctactcgggaggctgaggcaggagaatggcgtgaacccgggaagcggagcttgcagtgagccgagatcgcgccactgcactccagcctgggtgacagagtgagactccgtctcaaaaaaaaaaaaaattttttttttctttttcttattttgaataaaatagagaccgggttttgctatgctgaccaggctggtctggacctcctggcctcaagcaatcctccaacctccgccacccaaagtgctgggattagggatgtgaaccaccatacctggccaacatggaggaatttttaataaacctggctcaaccctctaggacccccagggcttttgtctaatgacccccaagctccttcccctgaccttgaacacagcctgggacctgtcagtgctcactgactgataggacagcctcatgtgcaaaatggttcctgccctcaagatggttggaaggataagaggacgcaccctgggtcagcagaatgtctggcgttgcctgctcagtaagtgctggctggtaggaatatatttcagaattgtgttattactgaggctgtcaccagagctgggagctgcaggggtggagatcctagggtgtcccaagtgcggagctcctgggtgagagccacagtctgaaggtggaggcatgcaaggtgccagccgtggaccaatggaagccctgggcagagtgacagagtgggcggagagccaaaaggccactctggctgacacaagagagccaggcggagatcactaggaaaagcaagaaaaaagttcagccaggcgcggtggctcatgcttgcaatcctggcacctggcactttgggaggccaaggcaggcggatcacttgaggtcaggagtttgagaccatcctggccaacatggtgaaaccctgtctctactaaaaatacaaaaattagctgggtgtggtcgtccacgcctgtagttccagctactcaggaggctgaggcacaagaattgcttgaacctgggaggttgagggtgcaatgagccaagatggcaccactgcattccagcctgggcgacagagccagattctgtctcaaaaaaagaaaacagaagttggctgggtgtgaattttcaagagaggagtagaggggacgtgaagatgaaggagagagtaaaacaggccacaagaccctgttccctctgtcctcccatggaatcaaaccaagctctagtcccgaaaggactaacccagtggccgtgagccacagaggcttttgagcccagacaacgtggcttgtcataacaagcatagagacatgctgtaattgtaaaatacaaaccaagttttgatggcttagtaccagaaaaagtaaaatgtttcattaactaattttatttatttatgtactgagacagcatctcactctgtcacccaggttggagtgcagtggtgcaatcatggctcactgcagccttgacctcacgggctcaagtgatcctcccacctcagcctcctgagtagctgggactacattctcaccccaccacacccggctaatttatttttatttttatttttatttttttatagacacagggttttgctatgttagccaggctggtctcaaactcctgagctcaagccatccatctgcttcagcctcccaaattgctggtattacaagcgtgtgccactgctcctagcctcattaattaattttatataaatgattatatattaagtgatatttttgaatataataggacaataaaatatgttattaatattactttcacctgtttcttttgatgttttaataattttgaattatttataatgataattttttttctttttttaagacagggtctcaatgtgtcacccaggctggagtgcagtggcaaaatctccgctcactgcaagctccaccgccccccacccctgaagctcaagcagtgctcccacctcagcctccccagtagcagggactgcagatgtgcatctccacatccggctaatttttgtatttttttgaagaaaaatacaaaacatggttttgccatgctgcctaggctggtctcaaactcccgagctcaagcgatcctcccgcctcagcctcccaaagtcctgggattataggcatgagccacagtgcccagctaaattgttattttttaggacagttttaagttcacatcaaaactgggcagaaagtacagagttcccacatatctgctgtccccatacacacacaacctctggttccagagatatccatttgctgaaattgatgagcctacactgacacgctaatatcacccaaagttcctagtttacattagggctcattcttggtgttggatattctatgggttttgacaaatgtataatgacatgtgtccaccattgtggtatcacgcagaatagtttcactgccctaaaaatcctctgtgctcctacctatcctttttacttaaaaaaaaaaaaaatgtagccactggggctgggcgtggtggctcacgtctgtaatcccagcactttgggaggctaaggcgggtggatcacctgaggtcaggagtttgagaccagcctggccaacacggcgaaaccctgtctctactaaaactacaaagattacctgggcatggtggtgcacgtctgtaatcccagctactcgggaggctgaggtaggagaatcactgaacccgggaggcggaggttccggtgatctgagattgcgccatcacattctagcctgggagacagagcaagactccatctcaaaaaaaaaaaagtagccactggaaagatttaaaattacacgtatgggctgggcatggtggctcacacctgtaatcccagcactttgagaggctgaggtgggcggatcgcttgagcccagcagtttgagaccagcctgggtaacatagtaaaaccccgtctctactaaaaacacaaaaatttgccaggcatgatgctgtgcgcatgtaatcccagctactcaggaggctgagacaggagaatcacttgaacccaggaggcagagacgggggttgcagtgagctgagatcatgccactgcactccagcctgggtgacagagtgagattcggtctcaaaaaataataataataataaataaaataaaattacatttatggatcacatttatgacttgcattatatttaatttgaacattgtttgccctatagagatttaaaatatgtttttagaaaaagaaagtaaatcataaaaaatgctaaaagaaagtaaaagtgacaccacatctctggaagggcatggtctgtgtttaaaaacaatgacagaatcacaaagggaaaatgaattgatttgactacaaaatacaaaaatctattaaacaagaaacagaattaagacatttatcagagtcgggcgctgtggctcacgcttgtaatcccaaactttgggagactgaggcgggcggatcaggagatcaggagttcaagaccagcctggccaacacagtgaaaccccgtctctacgaaaaatacaaaaatcagctgcgcatggtggtaggtgcctataatcccagctactcgggaggctgagacaggagaatcacttgaacctgggaggcagaggttgcagtgagctgagatcatgccactgcactccagcctggacgacagagctagactccatctcaaaaaaaaaaaaaaaaagacatttgtcagtatttgctgatggaaatttgggaaaaataaaatgtacaaaaattcaagttgataagaaaaataggaaggccctaagaaataaatgggcaaaggattcaaagcaccaattcttaggaatgaaaatgctcagggtgtatttatcaagtggatgaatgcccaatctccagagtcatcaatgaaatgtgtattcaagtaatgagatgcatttttctctgaaaaatcagcaaaaacaaacaacacacacacacagacacacacacaccttttaagaaaaaactacaaaattagctgggtgtggtggggtgagactgtagtcccagctactcagataataggccaggcacagtggctaacacttgtgatcccagtactttgggaagatctcttgaagccaagagttcgagaccagtccaggcaacatagtgggacctcgtctctacaaaaaattaaaaaactagccaggcgtggtggcatgctcctgtagtcccagctacttgggaggctgaggagggaggatcacttgagcccagaaggtggaggctgcagtgagctatgattgtgacactgcactccagtctgagtgacagagggagaccctgtcacaaaaagaaagaaaataataaagtcagttagaagttggtgaaatggagacattaatacattgatggcaggaatataaacgaattcagcttttctggaaaaccacttgaccatacacttcagaatcctgaaatattttcccactttgcccagtgataatcctaacaaaaaatattttaagcttaaagttgtttgtgtgttgttaacaggaagattggagacaattttaaagtaagctatggtgcttaatgtagttgatggaagggtttataacaacagtttgggaaagacaggaccacataatgcatgctttatgcttctggaacataaaacaaaaactactcagtaaaagaaaaactggataagaaaagaaatttggggctgggcccagtggctcatgcttgtaatcccaacactttgggaggctgaggtaggtggattgcttgagcccaggtgttggaaaacagcctgggcaacaaaatgagaccccgtctctgcagaaaatcaaaaaattagccaggtgtggtggcacgcaccagtggtcccagctacaccagaggctgaggcaggaggattgcctgagccagggagatcgaggctaaagtgagccatgtttatgccactgaactccggctttggcaacagagaggagatcttttctcaaaaaaaaaaaaaaaaatctgttttaaataaatttgccccaacttttcccagtttctgaggagtgggaaaagccatattttgaaataccagaggtaacaaatcacctcccaagagaagcttttatttaactatcacttacaggtactttctacttaccaggctggctctaagggtttgtaaatattatgatagctcagggctgtccagtggaaaaataatacaagccacacggataactttcaatcctccagagctgtgtaaaaactcattctaagcgccgcacgtggtggctcatgcctgtaatcccaacactctggggggccgaggcaggcggatcacaaggtcaggggatcgatcttggccaatatggtgaaaaattagccgggcgtggtagcacacgcctgtagtcccagctactctggaggctgaggcaagcgaatcacttgaacccaggaggcagaggttgcagtgaaccaagatcgtgccactgcactccagcctgggtgacaagagcaaaactccgtctcaaaaaaaaaaaaatttattctaagcagacagcggtggcttgcacttgtaatctcagttgcttgggaggctaaggtgggaggatcacttgaggccaggagtttaagaccagcctaggcaacaaagcaagaccttgtctctaaaaaaacatttaaaaaaaattagccagaaaaaatattccgggcatggtgacatgaacctgtggtcctagctacctgggaggctaaggcaagaggattgcttgagcccaagagtttaagttcgcagtgagctatgatcagaccgagaggtgaagccagctgaatttctgggtcaggtagggacttggagaactgttctgtcctataagaggattgtaaaatgcaccaatcagcactctgtggcttgctagaggtttgtaaaatatgccaatcagtgctctgtaaaaacgcaccaatcagcgctctgtggctagctagaggtttgtaaaatggaccaatcaacgctctgtaaaatggaccaattggcactcagtaaaatggaccaatcagcaggatgtgggcggggacaaacaagggaataaaagatggccaccccctcccaccctatccacaccacccgccagccagcagcgggaacttgcttgggtctccttccacagtgcagtatctttgttcttttgctcttcacagtaaatgttgctgctgctcactctttgggtctctgccacttttaagagctgtaacactcaccgtgaaggtccacagcttcattcttgaagttagccagaccacgaacccactggaaggaacaaactctggacacaagaccactgcatgccagcctcagcagcagagagatcccatctgaaaacaaaaacattattttaataacatatctggctgggtgcagtggctcacgcctgtaatcccagcactttgggaagccaaggcagggggattatctgaagtcaggagctcaagaccagcctggccaacatggtgaaacccagtctctacaaaaatacaaaaattagttgggcatgatagtgggtacctataatcccagctacttgggaggctgaggcaggagaatttcttcaatccgggaagcagaggttgcagtgagctgagatcacaccattacactccagtctgggcaacagagagacacttcgtctcaaaacaaaacaaaaaataatacatccaaaatatcattttaatgtgataaatatggccgggcgcggtggctcacgcctgtaatcccagcactttgggaggccgaggcgggtggatcacgaggtcaggagatcgagaccatcccggctaaaacggtgaaaccccgtctctactaaaaatacaaaaaattagccgggcgtagtggcgggcgcctgtagtcccagctacttgggaggctgaggcaggagaatggcgtgaacccgggaggcggagcttgcagtgagccgagatcccgccactgcactccagcctgggcgacagagcgagactccgtctcaaaaaaaaaaaaaaaaaaaaaatgtgataaatatgattaacaaattagataagttaattacctcaataattaatagtgagatatgttgcattaatttttgtactaaatctttaaaatgctgtgcgtatttaatacagcacattttcattgtaactagctatattttgagtgcatattcaataagccacatatatcccctaccaaattcatgttgaagtcctagtccctggtactttagaacgtgaccttacttggaaacaggtcattgcagatgtaattagcggtcgtatgggagtagagtgggcctctagtccagtatgtccttataaatggtgccatttggatgcacatggggagacacgcacatagggagaacatcatgtgaagatgaaaacagattgtggagtgatgcatctataatacaagtcaaggggcgccaaagattactggccaaccatcagaagctagaggagaggtggtaaacggagtcttcctcacaatccttagcaggaaccaaccctgctgacaccttgatcttggacttccagcctccagaattctgagaataaaattctgttgttcaggctgctcagtgtggggcactgtgttacatacagcagtcctagggcactaataggatgagtggttgccatataggatagtgcagcgttagtgcatttaatcctcctcactgtgctgtgcagtcgggctgggaaactgaagctcgaagagcctcctgagtctcatatccagcaagcagcaatgccaggaccggagccctggcacttgtcactatgccatgtccttctgcgggctgagctcccctggttttaggtcaccctcatgtccccctctattcaatacagggcagacatcctcccctgagcctgcagcacaaagatgcttccttcaaacctcagctgttgccgggcatggagaactttagttctaaccatctgggcgccagtgctttggggggcagataacgcctctcttacgtggtgtgcccttctctttcagccttccgaaatgtggctcatgcccacagtccctcctgacccgtgagctgagaagctggactgtgatgatggtgctctcatggtatgcaacctgcatcccacatcttaatgcccatgcactgtgatgcctctcactcccaccttccaagtgttcctaaaatttctggcattgttcatttgccacaggtcccatgctgacagccctcattaaagccggtggcctgccaactgaagagaactccctggggtgaatgacatgcattgtgggaagtgaaatgggcctttgccctacatcaaagctgtatcagccgctccctgagtctgtcttgaccagacagatcccactggatgctgctccaactgtgttggacttggcttgagtgactctggagagagggctgggaggaagctgcctgacacaggtgcccggggcagggcggcagcctctcacctgggcctgactgggaggtggaaatgaggctctggggcctaatcagaaggagttttcttagctcccctcaccaacccagggtgacctcagggaaagaagaggcctggtgtggccatgccctccctacttccccaaggaagggagatggccgctagggcctggaagagagagggatggggaaggggaacctagccagctgccctaaagtcctgggaccaggggaaaaggtggattagggttcaggggccctagggccacacttggacttctttctttccctacaaaagcaggagtaggggggtgcagtggctcatgcctataatcccagcactttaggaggccaaagcaggaggcttgcttaaggccagaagtttgagactagcctgggcaacatagtgagactgcgtctcctcaaaaagaagaaaaaaaaaattagccaatagagtagaaagcacctatagtcccaactacttggaggtctgaggtgagaggctcacttgagcccaggagttcgaggctgcagcgagctatgattgtgccgctgaactccagcctgggcaacagaacaagaccctgtctcaaaaaaaaaaaggccagatgcagtggctcacttccgtaatcccagcacgttggaatgctgaggtaggtggatcacctgaggtcaggattttgagaccagcctggccaacatggcgaaaccccatctctattaaaaatacaaaaaattagccaggcatggtggtgggtgcctgtaatcccagctacttgggaggctgaggcaggagaatcacttgaacccgggaggcggaggttgcagtgagctgagaccgagccattgcactccagcctgggcaacaagaacaaaactccatctcaaaaaagaaaagaaaaagccaggaggtccctggcctttcccaagccacagtacaccaggtcaggagtatatggggccatttaatctctccttgctgctgcctcctaccacaaggcctttggacatgctgttccctctgacttgaacactcctccctcatctccctgcacaccgcctagttagtggcacctcacatcctcagacctcctggttaaatggtcaaacagaccctactcctctttttcagagtatgatcttcattaggcattgtttgtggtgactgtttgactcaccccgttaactctcaccacatttgccatgctcatcgtggtacccatgatcctactttacagatgcagagactgagcttctggggctggtaacagcctgagccaggatttgaacccttatccatttgcatccaaggcctcttgtccttaatcaccacactatcctggctccctgaagataatgtgttccggaagaggtctaagcaacagcactgcactgggggctcctggaatgtctcccaaaggagatggcatttaggatgggcctctaaggtagaaaggggaggaggacattctgggtagaggtgaccacccaaagaaactcacagaggtaagagagaggagaaacgtcacgaaggcagcaagcttgaaaacattgaggggaggtcaccaaggaacttcaggccatgctgcgggctttgggccatcccttctcagtggtggggagccatggaaggtttcaaaggaagagaccaatgtgattccacctgtgcctggaagataaccatgggcccgatctgaagaatgacctgggaatagcggacattcagagcagggaaactggtctgaagcctgttgcaaagattcatggtgggtgtgaggaggagcaagcagtgggcggggagaggtcagcgcctcacctttgctccacaccagatctctatcagcaagctcgctcagggagtatcaagggctgggtattgtttggtacctggtctgtggacattatgttctacctgtaaattacaaatacattacagctgattgttttgagcacttcagataacttggatgcagggcaggcaagtcctaaagtggggcttagcctttgagggttcttgactttgcacaggaaagaattcaagggcaagctggaggtagaagaaaacagctttatcgaagaggcagtgttgtaggtctgtgactgcccctgcagagtggggctaccccataggcagggagtagcagcccaggacagttttgcagtcacatttatacccacttttaataacatgcggaccaaggggtagtttatgcagaaatttctagggaaggggtagtaacttttgggtcatggggtcattgccatggaaaggggcggtaactcccaagtgttgttatggcaatggtaaactgatatggcacactgatggtcatgtctgatggaacgctgcttccactccagccctgttttagcttgtcctcaatttggtccagtgtccaagccctgcccctggagtcgagtcccgtctcctacctcactttaaacagcaaatgcagagatccaatggcccccagattagtactatacttatatttaaacctgttcctaaacatcccacctgaaattaatctgtggattgactctttctgttctacttttataccttcctacagtgtagtcacatggttacagtgtagggttacagctgcacactttgacatcttccttgagtttcaaaattagcattttactattttgttggaattgttatctgaataggcccaactgaaacaaaattggcattagacatttcttggtgttacaactccaagttattaaccaattaactctacattgcagggggcatggaacctgggacttctcccaaggggattaaaacctgagctgatggttatcaggctgaatttactaggtatggttaaactttgttacctcaatcagacttgtcaagttcacaccttttatgcagggtgggttgatttgtttacagcctgatatgccccttctctcctccgacatggctgtttatgccatccagttgttaggagtcatcggtgtgattggcttctttagtattttgcctcagctgggtgcagtggctcatgcctgtaatcctagcactttgggaagcagaggcaggcggatcacttgaggtcaggagttcaaaaccagcctggccaacatggtgaaacctcgcctctactaaaaatacaaaaaaaattagccaggtgtggtggcgggcacctgtaatcccagctactcaggaggctgaggcaggagaatcacttgaacccaggaggcagaggttgcagtgagccaagatcatgccactgcactccagcctgggtgacagagtaagactctgtttctctctctctctctctttcgctctctctctccatatatatatatatctcctcattggttggactatttggaggaatcatctcgtaagagatgaaggatcagtttggctcaggtggctctctctttagaagatttgatgatgtcataatgtttttgagtttttcttacccaggctggagtacaatggtgcaataacagctcactgcagcctgaaactcccgggctcaagtgatcctcccacctcagcctcctgagtagccaggactaccagcatgcaccaccatgcctggctaattgtctttcattttctgtagagttggtggggggagggggagtcttgctatgttgctcaggttgatctcaacctcctggcttcaaacaatccccccttctcagcctcccaaagtgctaggattacaggcatgagccaccatgcctggccgatatcatcaggttatacagagttttccacaatgatacatacatcctatatatccacactgtccaatttgctagtgtcaaagataaacaaagccaaaccctaattaaaggaatggagacaaactattcagtagtctccattattacaataaccattgtaataggaaagacagcccaacatcaactcaactcaacttcactgaaacaaaaagcaggagacttttttttttgaggtggaatctcgctctgtcacccaggctgatcctcccaccacagtctcccaagtagctaggactacaggtgcacatcaccatgccctgctaatttttatttttttgtagagtcggagtattgctgtgttgcccaggctgttcttgaactcctggcctcaagggatcctcccacctaggcctcccaatgtgccgggatgagaggcgtgagccaccatgcttggcctctcagatccttttagagacagttttgggtggtggaaagtttgcatctgaaaggggcagagaaaggatttataattgcaaaccttcacaagtgggcattttaagggggagactggggccatcctaccaccttttgaacatgtcctcaggagtggaatttttactgggtctgtttaacttctgaggaacctctaaactcttttcttgaaagcagaagcatggccgggtgcagaggctcatgcctataatcccagcactttgggaggcagaagtgggtggatcacttgaggtcaggagttcaagaccagcctggccaatatggtgaaaactcatctctactaaaaatacaaaaattagctaggtgtgatggcgcatgcctataatcccagctactcaggaggctgaggcaggagaattgcttaaacccaggaggtggagattgcagtgagccaagatcacgctactgcactccagcctgggcaacagagtgagactccgtctcaaaaaaaaaaaaaaaaaaaaaaaaaaaagaaagaaaaagaaaaagaatctagcaccctggagttcctgtgtcttcccatccctggtcaccctgttgggacaatatcagcacacagaccccaaggggctcagcctgcttctttttttttttttttttttttttttgagacagagtctcgctctgcccaggctggagtgcagcgacgtgatcttggctcactgcaacctccacctcccacattcaagcaattctcctgcctcagcctcccaagtagctgggattataggtgcacgccaccacacctggctaattttttgtattttttagtagataattggtttcatcatgttggccaggctgatctcgaactgctgacctcaggtgatccacccgcctcagcctcccaaagtgctgggattacaggcataagccaccacacccagcctgcctgctccttttgacaggacacactcagtgacaaggtacagaaagactggaaggaaggggccctcagggggcaagattaatttcaggagcagggtggggggaggcaggatgaagagctggatggaaaacacctgatgaggcaggagctgcagcgtgatcctcccagcgatgggagagccacaccagtctccccctacccttggaaaggggactaggagttccctgaagcctgaactgttggaggctcagccacaaagtcctgctgtggtggttaggctggcccaggaaattgctgcctgctgagcaccagccataggacatgagggtccggctcccagtggctgtccttggcagccagcctgaggccaaggcttaaggggctgtgggtcagacaggaggccctgggaggtgtggtacagaagacgaatcccttagcagagtgtcccgcaattcatcagagcctcatgctcagctgagccagaggactttgacattactcattcattcattcactcattcattaaatcattcgttatgcaatagctactccatgctgtgcaccagcccagagctggaggttgttagtggagaactctagatggtaaatgtcaggaggccctctgtgaaccaccgaggcttcagctaccaagaggcttttcaggccagcagcccacctagctcctaatccagggcccatctgttcttccagagcagagacccaggcctccccctccctttggtgggggccaccaccaagctggagtatgcacaaggggctgccttcccggctgctagagttatcatcaccatggccaaggtcgtgcccagccatggaatgtgtatactgagagctgaagatggtttacccaatgcccagggcccacatgggcggctgccatctgtgtcacctctccacagtgcttattgaactttgatggatactaaaccattgatttagtattacaccagtgattctcccatgtgcacacaccattcaaagggaatagtctggctgggtgtggactactttgggagactgaggcaggaggatcacttgaggccaggagttagaaaccagcctgggcaaccgagtgagaccctgtctctaaaaaaaattaaaaaattaactgggcatggtggtgtgcacctgtagtcccagctacatggcaggctgaggtgggaagatcactcgagcccaggggttcaaggctgcagtgagctatgatcatgctactaaactccagcctgggtgacagaacgaggccctgtctctaaaaaataaaaataaaaaaaggaagagtccatggaaagtcatataagttcacaagctaacagcagtggaagccaataggtatggaaccagtggctacacaaaggtcacagagaacagacacatgccctgaatctggacaagaggtctctgcagggtgagatgaggagccagccttacatggcctggaaagagcaggcaggcacccttggaactatcaggtgaattaagagaagtccagaaacagggcaggtgggacggttgaattctggggcaggcataagggagtctctgaggtcgacatgcaagagaccaggggcagggctggcccacactgcaggtggagctggcagccagatgggaggagatgcagggagggcattaggcccagagtgcacctggagatcagaactgggggcacctaacaggggcctgtagggcagccaggacaagcacaggaagatgggaccaagatgcatggagaaagcttgtgggacagtgcagcgtggctccctggtgggctccaacactagttatcagctcccaatagcagctgccttcccctggaggcttgctggtgcctgcggaatctcctttatcctatagcaaccactctatgaggcagacgctatctcacccatttgccaatgaggagatggaggctcagagaggtctgatcactggccaaagccaggcagtgagtgctagaaacagcacttgaactcgagcctgtctcatctcacacaccatgcctgccttttctttttctttctctttctttttctttcttttctttctttcttcctttcctcccttccttctttctttccttctttctcttttctttcctttttctttctttccttccttctttttcttttcctttctttctctctttctttctctctctctctccctccctctcctcctcctccttctttttcttcctcttctcctcctcctccttcttcttccttttctttcccttccttctttcctttccttccttcttcctttctccccttcttccccttcccctttcctttcctttttctttctttttacagagacagagaactcctgggctcaagtgatcctcccacctcaacctcccagagagctgaaattacaggtgtgagccactatgcccagccgaccatgcctttttcatgttcatgaaaagatgctcagcactactagtcattgaagcaatgtaaattaaaaccacattggccgggcatggtggctcatgcctgtaatcccagcactttgggaggctgaggtgggtggatcccctgaggtcaggagttcaagctcagcctggccaacatggtgaaaccctgtctctattaaaaatacaaaaattagccggtgtggtggtgtgcacctgtaatcccagctacttgggaggctgaggcaggagaattgtttgaacccgggaggtggaggttacagtgagccaagatcatgccattgcactctagcctgggcaacaagagtgaaactccatctcaaaaaaataaaataaaataaataaataaataaataaaaaccacattaaccacaggcctattcgaatagttaatatcaggataactaacagcaccaggcaaggatgggaagcaactgggatgcttacatgctgcttttgggaaaatggtgcaacttctgtgcaaaacacgttgtccgtttcccgtgacattaaatgtacccttcccataggtcccagcaggaattctcctcctgggtattgataccctggagaagtgaaaatttaggatcacaaaaaacctgtacacgaatgcttacaacagctttattcataatcgcccccaaactggaagcgactcaaccagcctttaacaggggaagggataaacacagtgtggtccatccatacagtggtatattactcagcaacgaaaagcaactaaatattaacacatgcaacaaagtgaatgaatctcagaggcattatgctgactaaagaaagccagaatcaaaaggctaaatattgcacgattccatttatatgacactctggaaaaaatcaaaagtgtagggatgaagaacagatcagtggctgtcaggggaggggctgagggagagcaagggctgctgaatgcccgtgtttccatttttggacaggattcctgtaaagtaggcaattagggaagaactttggctgtcatttggggctgccacattgagaacaagctgggacaacatgtgagtgacaggatcctgggcagaatctcagctgacagcatagccagacccaaagaggcctgatcgcaggacagcactctagtaggactgtgggctgacaccgacctagtgtcccactgtgaggctcagtctgaattttttttttttaagacagggtcttgctctgtttcccaggctggagtgcagtggtgcaatctcaactcactgcaacctccgcctcctgggttccacagattctcccacctcagcctcccaagtagctgggactgcaggcactcgccgccaccacacccaactaatttgtgtatgtttcgtagagacggggtttcgccatgttgtccaggctggtctcaaactcctggcctcgagcaatccacatgcctcagcctcccaaagtgctgggattacaggtgtgagccactgcacctggccagtttgaaatcttaatcaggagattggatgaagatccagagctcaagcagattctcagatgctataacagtgggagggaacgtgtatgtggaagacagaatagagagtttaaaattctttctagatgggaaactgtgaggttggatttccattcagagcagcattgcacaactgcttgttagggaactatttgaaccatgtcttttattttctgcatgctttaacatctgaggttttgctaatcctggagggcctgcctctcctagagatacagcaacttgcccacaaatgcacttttcgaatgcaaaccaactgatataaaccatattccaactacctcctttatcagattctcacactccaggccactatccacctgctgtaatcaccccagggcaagataccagacagctagtgacagcccttattccacggagcctgctgaaattattcaaactagcaaatctcaagcctgcttaccctgcctcaccagttccttcctgcagaaaccatcataaaagtaaagttgctttgtccagagtttttctgtctcatgtgcgtcatgttcggccctgatgcctccctggggacccctcctcttccccctatggcacagcggcccctcctcttgggaactgtgagtaataaactatcttttcaatggtaattatttcctgatctgtcagctatactatatttcaaatttcctattaatactattttattttatttttttgagacagagtctcactctgtcacccagactggagtgcagtggcatgatttcggctcactgcaacctctgcctaccaagttcaggcgactctcctgcctcagcctcccaagtagctggaattacaagcaggcaccatcacacctggctaatttttgtatttttagttgagatgagggtttcaccatgttggccaggctggtctcgaactcctgacctcaaatgatctgcccgccttggcttcccaaagtgctgggattacaggtatgagccaccatgcctggcctaatactatattttagaagagtaacttatttcttggtattggttgatagaaaaaagcctggggtttttgctgagcttgaggtcacagcaggtcatagtggggatggagtgtctgtgttgctttgctgtgaccatcgggccaccactaggacactgtcccagccgttcctgaggagtgggccagctgtgatgcataggctgtgacctgctgttgtagaatccctgttcctgagaggttgaacagggtctggccagggaaggctgtgaactcattgtggattcagagatcaaagaggagggtgtggggaccatgaggttcacctagaatttctccatcttctccatgaaggtttggtctgggagcagtacctccacggtgtagctgatgcgtttagaatgaaccaggctgtaggtgttgtaaaacctcaggacatctgcagtgagggacagacattcagacaagatgccccacctgggactctgacttccatggtggtaaatctctgcgtgggtacccagaccagggaaccattgccacaattgagagcccagagccagcctcacactgtgcccaccagaaccaagggccctcacctggtaggacctggatgcacattgtagcaccctccccctagcccccagctccaggtagagccatccctgccaactcttacagctgccggcctggaggcaggtgagaatcccatcttcaggcaccatgtgggcattgtagcgctggctgggcagcacctctgtcatctccctagccctctgccgctcccccatcttggtcttcaggaaaaccccaaagccaatgtccccaccatctgaagcaaactgccacctgcagtggatagagccccattggcgaccccctgcctgggctccaggcccctcccagatgtgcccaggtgtagagtggctgccatccctacctgagcacacagcccgggaacaggatctcgttctccacctgcagggaggagccgcggcccacggacctcgtgtgctcatactgcagcctcacctgcttgcacaggtagtagctcttgggcacctcacccccgtagttgatctgtgggtgaagggggtgtgtgggcactaggtcacagcttctcccctccttccccatcctctgggcaccctgtaccttggtcaggcacttggggttgccatcggggtcagtcatggtccccccaaactccacgggcagctggtcggggctgatgaattttgtcagctcctgcttccagttgtctgcatgggagcaagagagggactccaaagggactcaggagactcaacagagggcagagggggctgagcccaggtctgtcctttggccagctgctctccctccctggcgcgcttttgccactccattgcctagagcagtcctgtcccagaagagggaagccaagtggccctaggtcttgtcctggggctcagcatgtgctgtgttgactaggtcctgtcccaggcctgcccctctcttactgcccctgcaggccctgcccccacatctgtccaggtattggcccattggccacgttcataggaactcggaccagcaactcctggagcctggggttgaggtcaggcaggctatgacccggtcttcgctttcccttagagactgaactcagccttctggtcagatactgccctcagctcccagggctccagcaccctcagaattgcagggccaagctcgggtcagttccccacaagctgctctgagatggccaaggatgttccacaaagggacacgggcattgcaggaacaaagtagacgaaagcagaggtggacacccagtaccctcggagagagaaggactgtataagcatgaaagcggtggaaaaatcaaaggaaaagccccctaatttggcataaaaacaaaacactaggctgggcctggtggtgcactcctgtggtcccagctacttggaaggctgagaagggagaattgcttgagcccgggaggcagaggctgcagtgagccgagaccacaccctgtactccagcctgggcaacagagtgaaaccccatctcataaataaataaataacactaagtcaaaaattagataataggcaaactatgaactggccaaaatgccacaaatatgacaggaaagggccagacatggtggctcacgcctgtaattccagcacttcaggaggcccaggcaggaggactgcttgaggctaagagtttgagactagtctgggtaacatagtaaagacatgactctacaaaaaataacaataaatgtgccacgtgtggtagtgtgcatctatagtgccagctactcaggaggctgaggcaggaggatcgctagagcccaggaggttgaggctagagtgagctatgatcatgccactgcgctgcagcctgggaaacacagagagaccttatctctgaaataaatatatatatttcatatatataagtatatatctcaaatatatacatatatatacacacacatatctatatatatggacttacgtgatcctcccatgttgtcagcctccatagcaggaaaggacaaggtgtttaatatgcaaagagtatttataaattaatggcataaaaaatactttcctagaaaatggtcatgagacacaagaaggcaataaacaacaaattaaaatagtcaattataaagaaaatgtccaacctcacgagtaataaaagaaccaaataacccaatgtaaaataataataaacatcattttccattataaaaaaggcaagaatatttttaattattgatgtccaaccttggcaagagtgtgggaaaatgggcacattcacacacagttggtggagttaaactctgcaatctgtgtgagcgctacactgaaaaagttatcaaaagtcctaacatgtaaccaggtgtggtcatgcctgtagtcacagctacttgggaggctgaagtgagaggactgcttgagccctggaggtcgaggctgcagtgagccaagatcatgtcactgtactccagcctgggtggcagagtgagaccttgtctcaaaaaaaaaaaaaaaaaaaaaaaaaagtcctaacatgcattttcctttgggggataaaaatctcccatttctaggattttatcctatggaaaaaactgtggatgtgtacaaaggttatctataaggatcgtcactactcatttgttcctaataataaaaataatacaaacaacctgaatttaggactttactaaaatgggaaaatgattatcatatgataagtagttacaaaagggtatatgtatggtatgaacccatttttttttggaaaatatatttctctgaaaaagatagtgttaattgtagttcgctgggtgacaggatattccccccttccttatacatttctgtactttacaaatttctaaactgtattgcttatataatttggaaaacctagatttctttttttttttttttttttttgagacaaagtctagctctgtcacccaggctggagtgcactggcgcgatctcagctcactgcaacctccgcttcccgggttcaagcagttccctgcctcagcctcccgagtagctgggattacaggctcctgccaccacgcccggctaattttttttatttttagtagagacggggtttcaccatattgtccaggctggtcttgaactccagacctcgtgatccacccacctcggcctcccaaagtgctgggattagaggcgtgaaccaccgcgctcggcctctttttttttttttttttttgagatagggtcgcactctgtcactcaagctggagtttagtggcgtgttctcagctcactgttgcctcaacctcctggactccagtaatcctcccacatcagcttccagagtagctgggactataggtgtgcaccaccatgcctggctaatttatttatttattgtagagacagggtctcattatgtttcccaagctagtctccaactcctgagctcaagcaatcttcctgtctcggcctcccaaagtgctgggattacaggcatgagccactgtgtgccgccaaagatccggatctaattccccccattaaacagatgaggaaaccaagaccaagacagagcagctgagtgactcactccgcttgcagctaataactggcaaggccaactctcaaatccagctctcctaacctcaaatcgggatctctacccatgctacctccaggaatctctgagacccttcctggcccgtcttccctctcgggggcaggcacagcagcccacctggcagcccaccaggcagtgggccctcaacaccagttgggtgccctacaccttcggatgcaggaaccatcagatctgtgagaaggaccaccctcagctcaggatccaggctggaaaagaggccgcagagggctcactcacctccgagaatcaccaccttcctgcgtgtctcttcactcatgtaagacttgaccaggttgaaggctacggcgaatagcttgggggctgaaaccaggcacagaactgctccctcaggcggctggctggggtctcaggtgcccacccggtcaccgcacatcccctgtccccccaactcatgcatatcctgggctgctttactcacctctcacaacaattaaactcttcaagatctcagggtaatttgcttcaagtgctgagaaaaactgcggaaccaagtggcagaagtgatgggcgtctgaacactgtccccttgcatcccctctcgccccaccctccaggacccaagggcacagccttggcctcgaatgccaaccatccaaggctttgatgcagacggctcccgatgcccagacaccaagaacccacccagacacagagaagctgccacttctggtttgttggatcctagtcatagaccttccttgaagcagctagtgcagattctttttattattatttttatttcttattttattttctagagatggggtcttgctatattgcccaggctggtcttgaactcctgggctcaagtgatcctcccacctcagcctcccaaggtgctgggattacaggtgtgagccaccgcacctggcctagtgccgattcttgacagatgagtggggggataactctattcatgacaggcaagaaaaatcccattcacgactgtggaaggttccctcccacgtgagtcagacaatagttcagcttcaggaatgagagagactttcttttagcataatatacatagttgcaaggaatggctttttatttttatttacttacttttaaaattttaaataagataaaccaattaaaattcttggttagacagtaaaacattcttgccaagaataagtctacactgtatgaaaggatatttgattcctacaaatgagtcccaataggccccattacatttgtttataagagacactgcaaatagggaatggttttttttaaaaaaactgagatattgtccgggcgtggtggctcacgcctgtaatcccaaagcactttgggaggccaaagtgggaggatcatgaggtcacgagttcgagaccaggcagggcaacatggtgaaaccccctccctactaaaaatacaaaaattagttgggcgtggtggcgggcacctgtaatcccagctacttgggaggctgaggcaggagcatcacttgaacccgttaggcggaggctgcagtgagccactgcactctagcctgggcaacagagtgagactccgtctcaaaaaacaaaagaaaacaaaaaaactgagatataatttacatcccaggctggagtgcagtggcgcgatctcaactcactgcaacctcgagtttctgggctcaaacgatcatcccaccttagcctcccaagtagctgagaccacccccacacaccactacgcccagcgaatactcttattttgtagagatagggtcttgctatgttcaagaccaggctggtcttaaattcccgagctcaagcgatcctcctgcctcagcctcccaaaatgttggctttacagatataagccactgtgcctggtggccaataacattttttatgtttaagttctttgctgtcctgggtgaaacagaaagaaaggaacaggtaggctggctgccctgcggcccaggcctccccacagcttccctcctactgcagcactcccagatgacctactctcagcccttcccagaggaaatggcaaaaaggaaggtcaggggctggaagcagaagggtaggcaggtattgggggtgagggcagagatcaggggtgggatgagagtgagcagagccagaatatgaggacagggacatccacagggacattggcaggtcagggaatcgggccctgttgtgacctgctgaacatgagatggtgacctgggggtgccacgcccaacttagcacagccccgagaagctgtgggtatgaaaatatccctgccaacaaaagtaaggaactgtaggccaggtgcggcggttcacacctataatcccagcactttgggagggtaaggcaggcagatcacctgaggtcaggagttcaggaccaacctggccaacatggtgaaaccccctctctactaaaaatacaaaaattagccgggcgtggtggcaggcgccttaatcccagctactccgaaggctgaggcaggagagttgcttgaacctggcaggtggagtttgcagtgagccgagatcacaccacttgactccaacctgggtgacagagcaagactctgtctcaaaaaaaagaaaagaaaagaaaagaaaaaaaaaacgggccaggcacagtggctcacgcctgtaatcccagcactttgggaggccaaggcgggcagatcacctgaggttgggagttcgagaccagcctgatcaacatggagaaaccccatctctactaaaaatacaaaattagccaggcatggtggcgcatgtctgcaatcgcagctactcgggaggctgaggcagaagaattgcttgaacccgggaggtgaaggttgtagtgagccgagatcacgccattgcactctagtctgggcaacaagagcgaaactccatttcaaaaaaaaagtaagagctgcaaacatggcctgtgcagctcttgtgggcagtacctgtgggcgggtactcacctggcagtgaggagagaggattcccgcccctgccccacaccagcaagtggagggtaaagacccaggcatttgaccacccacccatgcccctggcggggtcacctcacctcctggagaagctctattcctggcttccacagatccctcaggcccagcccttcgagaccaaaaatagctatgattttctccaccctcttccccagctgcaagggaatgacagggggtgagaccctgtgagggccactgcccccacccatccaagatggggctgggcctaagcccagggcactggcctggcttgtctcagctctgcatggcacagagatgggggagggaaggggccatcccacaggatgccaggaccggagtgacccaaggaccgacctctttgtgtctgtccatgggaggccaaatcgctgtgttgcagttccctcttcggtccagtggggctgaaatccctgtccctctcgtccaatgaggctgcagagggcagtgtggcccagtggattgagtgggctttggggccaattgggggagaaatgattcccagttcagccacatactgtgtggccttgggtgggtccttggcctctctgaacctgcattcactccacagtaccaggaggagccgaggagcccaggagcccaggaaggcagattctgggtgtgaggctcagggggtgagggtgctgtgtccggctgcagctgcccagggtggcacccacacaccttctgactctgcagctcacactcccgcaggagcagctcgcagctccggaagctgtccctgagcaactcctgtttggaggctgagagcaagaggcctttggggtccaggcttcccacaatgtggtaccagacagggctgccctcaccgtcgtggccgcatatgccgttagcgttgtacagcctgaccacctggatgcatacacaggagacgggggttcagtgccgagggctgagggcccagggatcagggtatgggtttgagagatgctcacctctgggggctgccaggcaaggatgttggccaggtcttgttgcttccggaactccatatgctgcagagacacggcaggaggtggtgaagattctgcctgtcccaaagacctctgtggatacctggggacaccaggccaggtccctctgcctgcaaccactaagggcctgccagagcatccccaggctccactgacatagaactgggggatggaaacaggatggggatggaaggggacatgcatctgagaggccaggagagacctagaaagggacaggggaggcctgcactctgcagctgtctccccctgcatccttccagatgtttcccatgccccctcccgcatggctgccctgggagtcagactctacttcctgacttccagttgcccttaagcaaaaacctatacccccctacaaggcctgcagagcctggctgatgtgttggggccaccctgtaacctcatcacttccccttctctctccaacacgatctccgtgtgctcctagaatataccagctcaggccaggcacaatgtctcacgcctgtaatcccagcattttgggaggccaaggtgggtggatcacccgaggtcaggagttcaagaccagcctggccaacatggtgaaaccctgtctctactaaaaatacaaaaattagctgggtgtggtagtgcatgcctgtaatcccagctacttgggaggctgaggcaggagaattgcttaaacctgggaggcggaggttgcagtgagctaagatcacgtcattatactccagcctgggtgacagagcaagactgtctcaaaaaaaaaaaaaaagaatacaccagctcattcccacctcagggcctttgcatgagctgtgctcttcaccctgatcttcacatgcttgcttccttttgggcattcatgtccctgctgaaatgtccctgacctctcttccctccttccctgttttgctgtcttcattgtactttccattctcaggaattgtcttctttgttcctctggtttctttttctctcttcccatcacggcagtctccccagcgcctagcaccaggccaggtttaccttccagtctcaatgaatgggtgttccatgaatgaatgaatggatggatgaatgaatgaataaatttgtgcctcagacttgggataggaaacaggaccaggctaggcagggggaggtgtcaacctcaccttcctcagcatgtcctctgatttctgcaggtcaaagctccgagctgcaacaagagacagggttatggttgtggaattctagaggctcactccaggcttctggagagacaacggccctgccccaccctccaggccagctttgtctcctgttacccagagggccttgttcttgacctggggagccacaatggctgagatatccggagacccaggaacactggacacaggctccttgattccctgggcatgccccttggtgggccttggggcccttttcctgttgttccagaaaagtcattgagacagcagaccctcagaatctgtcagaatcataaggctgagaattgtttaaatcagcagatcacaaacattttggcctcaggagcccttaatactctttaatttttacttaaaaaaaatttttttttttttttgagaaggagtctccctctgtcacccaggctggagtgcagtggcatgatcttggctcactgcaacctctgcctcccgggttcaagtgattctcctgcctcagtctcctgagtagctgagattacaggcacccaccaccacgcctggctaatttttgtattttagtagagatggggtttcaccatgttggtcaggctggtctcgaactccttacctcaaatgatccgcctgcctcaccccccagaatgctgggattaaaggtgtgagccactgtgcccagcccccttaatactctttaaaaaaatcaccaaactcatctgggaactatggctcatgcctataatcccagcatttttggaggccaaggtgggcagatcacctgaggtcaggagttcgagaccagcctggacaacatagtgaaatctcgtctgtactaaaagtacaaaaattagctgggcatggtggtgggcacctgtaatcccagctacttgggaggctgaggcaggagaatcacttgaacccaggaggtggaggttgcagtgacattgcttgagcctaggggttcgagaccagcctaggcaacatagtgagactctgtccctataaaaagaaaaaaaaaagaaaagaaaaattatatataagtttgcctaatggccatggtgagattatgggtgatttatagaaatatcattttgtttttctttttctataccttccagattttccatgataaatgggctctgatttcataatcagaaaaacacccagtggatgttataaacaaatgggagtgaggtcctagcggccccagcaggctgtcaaagcagtcctctgccctgagcccagccttagctgggctgtcacccagctttctaagagtcagcctggtccattggctcactggctttgcagcagcacttctgctgagagcctctggctggtgagaaccaagtggtttcacttggtccccagggccttggggagtagttctcacattgatttcatctgggcatcataacaaccatgaaagctgccagtggcggggagagagtcttgttccctataaacagatgaggaaactgagggcccaacagaagggggccataggccccaggtctcatgctgctagtaagaggcagagcggggactagacgcctgtctttggaactccaatcgggactcttttttgatttggtggcagtttaaagacattctagttagaagaaatggtactgagcaaagatgagctaggaaaccctgttggctactatgtcatagcttttgtttgtttatttgtttttgagacaaggttttgctctgtcacccaggctggagtgcagtggcacaaccatagcttactgcaacctcaacttcccaggctcaagtgatcctcctacctcagcctccccagtagctgggaacacaggcaggcaacaccacgcctggctaagttttttgtgttttttttttttttttttttttgtagagatggggttttgccatgttgtccaggctagtctcaaactcctgggctcaagtcattctcccacagcctcctgagtggctggaaccacaggtgtgccaccaggtctggctaagttttaaaattttttttgtagagatgaggtctccctatgttgcccaggctggtctcaaattcctggactcaatcaatcctccttcctcggcctccaaaagtgttgggattacaggtgtgagacccctagcccagccttgtcataagttacataaagtacacaccaggctcagaggcaagttgccatcacaggttttacaaaggctattcatcacagattaagtattctgggctcaacattcagggatgtgaattcctgtgtactctgcaatagtaggagcaggtgtgatgatcaacatggtttcatagtggttttcttactgcagctgaaaccgactccagccctaccgcccaccccctacgaaccccccagggaaggagtcttaagtgtaggagttgcagccacattttcagggccactgagaatcctgtctgtgcattcagattcctgggattctgacatttatctcaagagcaaacctcttccctaacctggtccccaaactctttttatgagaagatgttaagcaattggcctctaatgtcagactgacctgactttgtcacctgctagcatagcgaccttggtcaagtggtttaacctttgtaagccacagcttcctccaatgcaaaaacaaagctaacaataatacctacctaattgggttgaacaaggaggaggaggagggaaagagaagaaagaaaataatagataaatggccgggcacagtggctcacacctgtaatcccagcactttgggaggctgaggcaggtggatcacttgaggtcaggagttcgagaccagcctcgctaacatggtgaaaccccatctctactaaaaaacaaaaattagctagttgtggtggcgggcacctgtaaacccagctactcaggaggctgaggcaggagaatcacttgagcccaggaggcggaggttacagtgagccaagattctgccactgcactccagcctgggtgacagtgagactctgactcaaaaaaaaaaaaaaaaaaaaggaaataatacataaaaactgctgtacccagtgcctggtacagaataagtgctcaaaatatgaaagtatttccactccttgtactagccacctccaagatgaccatcagtgatcctcacctagtattcactccctgctctgctaaacaaaaatcataggaggccattgctttgtactaaactccagcactaggtcccaacagacaagaccaaaaatcaagatggagtcacccatgctcgctaaactgaaactgagttgttatctgacttgagaaatcaagagagatagcctagccaggcacggtggctcatgcctgtaatcccagcactttgggaagctgagggaggtggattactggagtccaggagttctagaccagcctgagcaacatggcgaaaccctgtctctgcaaaaaatatacacaaaaattagccaggcgtggtgccgagctcctatagtcccagctactagggaggctgacgtgggagtatcgcttgagcccaggaggtcaaggctacagtgagctgatgtcagcctgggcttcagagtgagaccttgtttgagagagagcgagcgagcaagcctaatttccctaacaggccaattacaatcttcagctggtatgttaatgaagttctctctgtttttagccttacagcaaagagtaacctgaagtcacctgatgttaaccaatcagttatctttctattgttctgtatccctgtccttgccttaccagaaaagtactgtagctttgaaatgatagatctgccttttgttctgtttctgctttcttcagccccttttctgtctataaagccaaactcctctgcttgactcatcggagcacttattctatctcataacatgaaatgttgcctgattctagaattccaatagagataattgaaatctttaaaccaaatgtgtcattattctgtctttgacagttccctcccacactgagcagggctgagctgtgtacctgatagattgctgtagaaatgatggaatttggccagacgagatggctcatgcctgtaatcccagcactttgggaggccaagacaggtggatcatctgaggtcgggagtttgagaccagcctggctaacatgaggaaaccctgtctgctaaaaatacaaaaattagctgggcatggtggcacatgaatcctaactactcgggaggctgaggcacaagaattgcttgaatctgagaggcggaggttgcagtgagccgagatcacgccactgcactccagcctgggcaacagagtgggactccgtctcaacaaaaaaaaaaaaaaaagaaagaaagaaaagaaaaaagaaatgatggaatgtgactcagaaagcttcactgtaagataccaccacttcctccctgctcactgggatcacttatggcgggaagccaactgccatgttgtgaggatgcttgagcaggccctgtgaggaagaactgaagcctcctgccaacagcgagcacagacttgccaactatgtttgacaccttggaagcagatcctcctgtcccaatcaaaccttcagatgactgcatccccgatgggtatcttgactgcaacctcatgagagaccctgagtcagaaacaccccactaagcctttccataattcctggccacagaaatcacgagagataataaatgtttgcagttgttttaaatggctatgttttggagtaatttgatacactcaatagataccaaatacactcctctttcatgccattgaccctaccccagccccacgctctatccttaccttggagccagcgcaggaggaagtagtcatcaggattgggcagcgcagatagcacatcttggatgttctcccggaactgaggacagacagggagagacctgggtcagaggccaaccaccctcggtcctgcaggtctcaactgtccttgaggaaggggatgtctgagtgaagaggtcccactcgggctgggaggatcagggtccgggtcaagccataacagtttgtttcctccgtcttgaaaatgggatgatataaagaaccaactacaggccaggcgcggtggctcacgcctgtaatcccagcactttgggaggcagaggtgggaggatcacctgaggtcaggagtttgagaccagcctggccaacatggtgaaaccctgtctgtactaaaaatacaaaaattagccgggcgtggtggcaggtgcctgtaatcccagctactcaggaggctgaggcaggagaatcgcttaaacccaggaggcggaggttgcagtgagccgagatcccaccattgcactccagcctgggggacaagagtgagactttgtctcaaaaaaaaagaacctactacactaaacatcagagagaattaaatgtggattaaacacagagaagctttacaagcctgactcagggatgtgggggcagggaggggccctctttagtgccctgatcttcatccttaggaagccttcaggccaggtcaggtgggaggataaagtgcacagagtctgaggctcagagaggttgagcaacttgcctagtgtcacacagccagtgagtggcagagccagttgcctgattctagaattgcaataaagataattgagatctttaaactgaatttgtcttaattttgtctttgaccgttccctcccacacttaagcagggctgagctgtgtacctgataggttagggttgaaatgatggactgtgacttagaagccttcaatgtaaagacatggtttggcacccatcagccacgcccaagtgaggggtggcttgacctggcctgggagttggttaggacagttcagctggccctgggcccaccctgcagggtctgagagctgagaggccactcctgggtggatgtcattgactgtaggctaaagccagcctccaacactgatgaatatggtaaggaaaagagcaccggacaaagagtcagcaggtcccactgtggccttgcctgagtcactcccctctctctgggtcttattctctttgggccccagatggatcctcaaaagactttccttggccccccaccaaaaatggactgataacctttgtctaaaggaatatgaaagagggtttggccttgggctaagccttaaatgaatcctgacatgacactgccattataccaattcgctaagtgaggaaactgaggctggaaatggtgatgcgccttcttagccaacatgagcaatttttatttcaatttctgacttcaattgtcttttaagagggttatctcaggtctaagcagaatgtccttttcctgatgcagaacactgcccctcctttttgttcctttttttttttttttttttttttgagtattgtattttgaactcatgggcattaagatcaattacttggccaggtgaggtggctcacacctgtaatcccagcactttggccagccgaggcaggtggattgcttgagctcaggagtttgagaccaccctgggcatcaaggtgaaacctcattaccacaaaaaatacaataattagccaggtgtggtggcgcacgcctgtagtcccagctacttgggaggctgtggtgggagaatcgcttgaacccaggaggcacagattgcagtgagctgagatcatgtcactgcactccagcctgggcaataaatcaagaccctgtctcaaaaaaaaaaaaaaatcaattggctgggtgcagtggctcatacctgtaatcccagaactttgggaggccaaggcgggcagatcacttgaggccaggagttcgagatcagccttgccaacacggtgaaaccccatctctactaaaaatacaaaaattagctgggcgtggtggcaggcgcctgtaatcaaagctactcaggaggctgaggcacaagaattgcttgaacccagagagcggaggctgcagtgagctgagattgcaccactgcactccagcctgggcaacagggtgagactacatctcaaaaaaaaaaaaaattcaattacttgaacttttttttaattaaaactaacagctttatggggatataatcagatgcgaattcacacttgaacaacttgtaagacttttcccctagctttgtttatactttgttttctttttaaaagattcatacaattcaagaaacacaacttttaaaaaaatttttatttattttttaattttatttttataatcatcttcttggatactaagaaacacaacttctaaaggccacaatcatccttaagctagattttaatcatactcccctcccagctttattaaggtatgaatggtgtttaattgcttttcatcaaagagaaataaaaactgttctggctgataggagtggctcacgcctgtaatcccaatactttgggaagccgaggtgggtggatcacttgaggccaggagttcgagactagtctggccaacatggcaaaaccccgtctctactaaaaatacaaagattagccaggtatggtggcacacgcctgtgatcccagctactcaggacgctgaggcagagagtcatttgaacctggtaggcagaggctgaagtgagccaagatcacatcactgcactccagcctgggtgacagagccagactccatctcaaaaaagaaaaaaaaaaaagttaaaaattagctgggtgtggtgtgcgtgcctgtagtcccagctactcaggaggctgaggtgggagggttgcttgagcccaggagtttgaggctgcagtcagccatgttctcaccactacactccagcctaggtgatagagtgagaccctgtctccaaataaatgaataaataaatttcctgttcactctcatggacaaaaaacaaattatctggtattgctatacatcagcaacacattcagccattttctaaggaaatgggtcaagttaccaacacacagctttacacacactaccttgaggaagaaaaccaagaacaggcacaggagaaattgtgcctgttcttggcaccgaagggcaggacgcgaaagggcaggccggtgggcggggacgcccggctcagaccccgtccccagcctggacctgggccccaccctgcccacaccgcgaccctccccatccgtctcgcgaccctaccagaaagtccactccagcttttccttcacctcggcacggctctgaaaggatcggtcccctccggcccgcacccacccccaagaggggccttcagctttggggctcagaggcacgacctcttggggagggttaaaaggcagacacccccccacccccgcgcctccactccccgactccttcgccgcctccagcctctcgccagtgggaagcgggagtagccgcgcggccggagtccggaggcgaggggaggtcggccgcaacttccccaggccaccttaagaggacgatgtagccagctcgcagcgctgacctcagaaaaacaagtttgcgcaaagtggagcggggacccggcctctgggcagccccggcggcgcttctagtgccttccagccctcgcgggcggcgtagccgcggcccatggagcccgcgggccggtccccggccgcctcgggccgctgctctgcctgctgctccccgcgtcctgcgcctggtcaggagtggcgggtgaggaggagctgcaggtgattcagcctgagaagtctgtatcagttgcagctggagagtcggccgctctgcagtgcactgtgacctccctgaaccctgtggggcccatccaacggttcagaggagctggaccaggccggaaattaatctaccatcaaaaagaaggccacttcccccgggtaacaactgtttcagatctcacaaagagaaccaacatggacttttccatctgcatcagtaacatcaccccagcagatgccggcacctactactgtgtgaagttccagaaagggagccctgacgtggagttgaagtctggagcaggcactgagctgtctgtgcgtgccaaaccctctgcccccgtggtatcgggccccgcagcgagggccacacctgaccacacagtgagcttcacctgcgagtctcatggcttctcacccagagacatcagcctgaaatggttcaaaaatgggaatcagctctcagacttccagaccaacgtggaccccgcaagagagagcgtgtcctacagcatccacagcacagccaatgtggtgctgacccgcggggacattcactctcaagtcatctgcgaggtggcccacgtcaccttgcggggggactcttttcgtgggactgccaacttgtctgagactatccaagttccacccaccttggaggttactcaacagcccatgagggcagagaaccaggtgaatatcacctgccaggtgacgaaattctacccccagagactacagttgacctggttggagaacggcaatgtgtcccggacagaaacggcctcaactcttacagagaacaaggatggcacctacaactggatgagctggctcctggtgaatgtatctgcccacagggatgatgtgaagctcacctgccaggtggagcatgacgggcagtcagcggtcagcaaaagccatgacctgaaggtctcagcccacctgaaggagcagagctcaaataccgccgctgagaacactggacctaatgaacagaacatctatattgtggtgggcgtggtgtgcaccttgctggtggccctactgatggaggctctctacctcgtccgaatcagacagaagaaagcccagggctccacttcttctacaaggttgcatgaacccgagaagaatgccagaaaaataacccaggacacaaatgatatcacatatgcggacctgaacctgcccaaggggaagaagcctgctccccgggccgcggagcccaacaaccacacagagtatgccagcattcagaccagcctgcagcctgcgtcggaggacaccctcacctatgctgacctggacatggtgcacctcaaccggacccccaagcagctggcccccaagcccgagctgtccttctcagagtatgccagcatccaggtcccgaggaagtgaatgggaccgtggtttgctctagcacccatctccatgctcttccttgtcccacaaggagccgccatgatgagcacagccagcccagttcccggagggctggggcggtgcaggctctgggacccaggggccagggtggctcttctctccccacccctccttggctctccagcagccacggccccctctccccacattgccacacacctggaggctgacgttgccaaaccagccagggaaccgacctgggaagcggccagaactgcctggggtccaagaactcttgtgcctccgtccatcaccatgtgggttttgaagacccttgactacctccccgatgctccgaagcctgatcttccagggtggggaggagaaaatcccacctcccctgacctccaccaccaccaccaccacccctcaactggggcttgagtggggaagatttcccctttagatcaaactaccacttccatggaaaagctggaaaaaaactctggaacccatatccagacctggtgaggttgctgccaacagtcctggcctcccccatccctaggctaaagagccatgagtcctggaggaggagaggatccctcccaaaggactggagacaaaaccctccgcttcctcaggtccctccaagactccctggggcccaactgtgttgctccacccggacgcatctctcccttctagacctgagcttgcccctccagctagcactaagcaacatctcgctgtgggtgcctgtaaattactgagaaatgtgaaacgtgcaatcttgaaactgaggtgttagaaaacttgatctgtggtgttttgttttgtttttttcttaaaacaacaacaacgtgaaaaaaagaaagtccactccagcgcccggtcgccacccttctttgccccgggaaccccatcccggcacctcccaccccgcatacaccacctaccccatgcaaaaccctatgatggcaggaatcgagacctccaaggacccgtcgttgcctccatgctcatggaaccgtgtgagtcttcctggaccccaagcttgccgtgtgcgaccacgaaggaaagaccctaaggaccttcaagggactcctcccaggctagagacgaaaatgcaccctgttcctgcctcctccagctcatagctgaggacgtgacctgccaatgcagcctccccagcaggccagcagccttcaccagccctgtccaatatggtagccacaaattcttaaaatgtggctagtttgaactgaggtctgctgtgagtgtaaaatacacaggattccaaagactcagtatcccctcaaaacactcattttttttttttttgaaacagggtctagctctgttgcccaggctggagtgcagtggcacgatgttggctcaccgcagtctcgacctcctaggctcaatccatcctcccacctcagcctcccgagtagctgggactacaggcatgggccaccacacccagctatttgttgttgttgttgttgtttttagagatggggtctccctatgttgctaattttttaattttttgtaaagatgtgttcttgctatgttgccagaactcctgggctccagtgatcctcccgcctcaaagtgcggggattataggcccgagctactgcaccagaccagttgtttttatattgattagattatatattgaagttaatacatcattaaactttacttcaattgtttctttttaggttttttttgttttgttttgttttgtttttgtttttgttttgtttttgagacatagtcttgctctgtctcccaggctggagtgcagtggcagaatcttggcccactgcaacctccacctcctgggttcaaacgattctcctgccacagggtttcaccctgttgcccaggctggtctcaaactcctgacctcaaatgatccatccacctcagcctcccaaagtgttgggattacaggcatgagccacagcgcccagcctctttttagttctttaatggagctactagaaaatttcaaaaaggccgggcatggtggctcatgcctgtaatcccagcactctgggaggccaaggtgggtggatcacctgagatcaggaattccagaccagcctgaccaacgtggttaaaaccccatctctactaacatacaaaaattagccaggcgtggtagcaggtgcctgtaatcccagctactccggaggctagggcaggagaattgcttgaacccagaaggcagaagttgcagtgagccaagattgtgccgttgtactccaacctgggcaacaagagcgaaactccgtctcaaaaaaaaaaaaaaaaaaaaaaaggaagaaagaaaatttcaaatgacctatgtggcttgcgtttgtggtggcgtggtatttctattggttagtgctggtgtagcctctggctaccaagcccctcagggttgggaagagacccagagctggagagttcagaagaaactcagggaccttgagtcctgcccttccccgtggcagaaggagaaactgaggctggtgtaggagtctctcccttcactcacctgggccagcgacttctcctgcgatgggctcaggtcacccacttgtccactcatgctgcccatgaatgggtccaggctccactctgtggctccctccaggtggcctgccttttgccagctggtagccatgcccacatttatcaccacccagaaatcccactacttcctgtgagcctcagggcaacaggtggggctcattccttactaggtgcctcaggcatggggccctggattcagcctgccctgggttcacatcctcacttgcaaaattaggacagcgatgtttcctcggagcgttgatgacatgttgaaattgacaccacctgatttcacacacacacggaggcggctgttcaccctgcctctcagtcccctaccctctactcctgtggtcccatcggatgcctctttgagccaggagaagtcatctctcacccccaacagaggcccggaagtcactgtcatcatgccttcactctcatcccaggcttcatctaccacctgacatgtccagagcaactgcccatgattcatcccagatgttaaggcacatggcttcagggttgaggatgaaacttcccaggcccagacccaaacaggtggatttgcaatcctgagctgggccacacttggcctgggagccaggatgagaggtgaggagggactcctggctacatctgcccccaccacccactggacaagcagaaagccagagcccaaggtgaggacacatgagatcacgcggtgtgcacggggcctggaacacagtagttatttgtagtagtctgggttgccctgaaacaaggagttcagggcaagtttattagggaggtgtcctgagaaacacaagtagggaagtgtggaaatgagacagagaacggaaggcagctgtataggcctggttatcaaggaagtacagaagagctcaatcccagtggggacttctgggagacagcagggaacctgcccatcagcgtttccttgcctgagtggggagggagctggggtatttatgcagcatctcgggacagtcttcagttgagggctgctccaggggctgtcaattctgctggcactgctggcctgctgtgcacacaattcagaaggctggagagcgtacttaggcagagaaacacaggtgctgctgctggggagtagtgaggctgaggtgatacaggcagaacatcaccagctttagctctaatcagaaaccgtttgctgggctccatgtcaagttctagtccaaaggcttcatgtgctccttgagccccagactgttcttccctacctgacagagcctggaagagggaagcagcatgcctggggccatacagccatgtagtaagtgacaatcaggactatctggacctggtgcttactcaggacattgtatcccacatgcctggctcctgccagaggcatgcacataggtggccttactaagtcccaggagagtcccccttagccctggaagagggcaatgagcagatctgcctcttctacagggtggggcctccccagtaccccacacactgcaggctggagcttgagccataaggggtaaaatcaggaactctcccctactcttgtctcctcccactgggtccctgctcccagcacctctggcccatcttcttcttcttcttccttatttttatgtatttattttttgagacagagtcttcttgctctgtggcccaggctggagggcagtggctcactgcaacctcctcctcccaggttcaagcaattctcctgtctcagcctcccgagtatctgggattacaggcgcacgccaccacacatggttaatttttgtatttttagtagagacagggtttcaccttgttggccaggctggtcttgaactctcgacctcaagagatctgcccaccttagcctcccaaagtgctgggattacaggagtgagccatcgcacccagccttggcccatcttcttcaagctggcttctgagtaagtccctcctctgctccaaagcctccctgggctccttgttaccctcagttaaaaactgtagatgccttcgcctagactcaaggcccttttgggtccctcctgagctaatttccccttcctttctcccttatcccaggtcccttgcctcctctccattctctttccagctttttcttttgctgttccctcttcctggaatgcctttcttgcaacaccctgtattcagcctctgcctcccacaaggcctacttcaaatgccttctctttggcaatgtcctttctgatgtgttttttgttgttgttgttgttgctgggaagcaaatccccagccccctaaaatcccacaccccactgtcgtcttctatccttccagcaattgtgatatgtcacaggtctccctcttgggctccttgagggtctggttcattatggtacactcccactccagcacccactgtggtgcattgtacacagtaggtgctcaataaaagctcaccacgcctgtaaccccagcactttgggaggtcgtgggcggatcacctgaggtcgggagttcgagaccagcctggccaaacggtgaaaccccgtctccaccaaaaatacaaaaattagccaggcgtggtggtgcacacctgtaatctaagctactcaggaggctgaaggagaagtgctttaactcaagaggtggaggttgcagtgagctgaggtcgtgccattgcactccagcctgagcgacagaacgagactctgtctaaaaaaaaaaaaaaaaaagattcaccaaaggtagtctggcaatggaagctgggatgccccagagcaagcatcacccaggatccctgactctacctgtcactgtcaaaactacctggtctgtgccccattccagtgtcacacgggttttcacccactgaactcattccagtgcacgtctgcattgggtaatgtgctgtctttgccagggaaatggggcccctgtcagttacaaataggctctggaaggccctccgccctctctccttctcccttccccccttcatgtcccccctccttcttgtcttccttcctttctatttttaatcttgtgttcctctgtctttcaacatttattaaaagcctactgtgtgccaggcactggcctagccctggaggccaattgtgccaatgcgtcctggtccctgtcccagaggagcccactccagggggctcgcaaatcagcagttgcatcctgagtgggcagagcccagatggggaaagaaagagaaaaagaaataaaagaaagggcgagtctgctggagagaggccaggtggggatccaggcaaggtggagaggctggacctagcgcagaggtggggcgtagagagtctgttaatttcctggggctgtcataacaaagtgccacaaactgctgggtggcttaaaacaacgggaaatgtatcctttcacaggtctggaggccggatgtctgaaatcaagggattggcggagctgggtttcctctgagactgggtagaaccttgccttgcctcttcctagcttctggtggtggcctgaaaccttgatgctccttgacttgcagtcgcttcactctaatccccgcctgttgtgacatagcattccccttgtgcatctgtcctcacgtggcgtttccacttctttgctgtttgtttgtttttttgagccagagtctcactctgtcacccaggctggagtgcaatggcacaatcttggctcactgcaacttccgcctcccagattcaagtgattctcgtgcctcagcctcccgagaagctgggactacaggtgtgtgccaccacgcctggctaatttttgtattttttagtagagatggggttttgccatgttggccaacctggtctcaaattcctgatctcaagtgatctgcccgctttgggctcccaaagtgctgggattacaggtgtgagccactgcacctgtcccatttccacttataaagccaccagccagattggattagggcccactgaatgacattattttaacttgattacatctgcaaatatcctttttttttttttttttttttgttaagagacaaaggctctgttgcccaggttggagtgcagtggtgtgatcctggctcaccacagcctcaaactcctgggctcaagcaaccctcccacctcagcctccagagtagctgggactacaggtgtgtgccaccatgcctggctagttttattttgtatttttttgtagagaattggtggggggtggtctcactgtatttcccaggctggtctcaaactcctggcctcatgtgatgtatttt

SEQ ID NO: 100 - DNA, 39470 bp, Homo sapiens
gatccaacccaagggcaagggcatcctgggaaagtgcgtgacctctggggacagtacggctgctggggtgggggtgggggggctgctgggatgctcacacctccctggggcagaatggctcatggctcggggggcggttgcggggaggtgctgggactctcacatcgcgtggcctcctgggggtaagatggctcagggggacatagagggctgtggaggcagccagggatgcccacacctttgtggcctcctggggacaggatggctcgggggcctgtggggggctgttgggactctcacactgcatggcctcctggggtaagatggctctgggggggcttgggggcactgtggctgtggaggcagccggggaagctcacacccttgtggcctcctggagacaggacagcttggggactgtggggggctgctggggacgctcacgtccatgtgcttcttttccagtgccatcaagtggaacttcaccaaggtaagggggctgtggggggtaggggaccagcttcccctggccacagccgtggcccagatgggcagcggacaggaagggcagcctcagccccttgcaggggtggccccacagtttggacaccgtctctccacagttcctcatcgacaagaacggctgcgtggtgaagcgctacggacccatggaggagcccctggtaggtcctctctagggagcccgcttgaggctcgggggcttgggaggtagctgccctaacccagctttcctccccgacaggtgatagagaaggacctgccccactatttctagctccacaagtgtgtggccccgcccgagcccctgcccacgcccttggagccttccaccggcactcatgacggcctgcctgcaaacctgctggtggggcagacccgaaaatccagcgtgcaccccgccggaggaaggtcccatggcctgctgggcttggctcggcgcccccacccctggctaccttgtgggaataaacagacaaattagcctgctggatctttctgcgtaggggcttggggggcccttttgccaggggcccctccatgtcagggccagttgccgtcagctgccaggctgggggtgccatggaggtggcgtgttgttgccccctcttcctccaggctcggggggctgtgctggctgcagtgctggggtgcagtgagatctgggcccgttggacacccagccctggctcttaatccgtgcagccccacctgctgtgcacaggcagggcctggtgtagtgccgagtcttggaggagataattctaagtggctgtgcttcctggccccgggccttaactgttaggaggtggctactggggcctcccctggccaggaagcagaagtgcagaggcccgaggaacagcgtggccctggtgctggggatgggttgggcacccacaccggcccttggggcctcacctggctggggggtgtgggggtggctgggtggttactgtttgcacagagtccctccgtgagggctggggatggacaggccaggaggggctggtagagcagtaccagccaccgttcatgggacccgggggctgtctggacacggcctggctgcccacctgcacagctagagggactgcagcctgccagggtggctgatcccagctgcccccactgggggtctgtggaatggacggtccatggcacctgccccagacactgggttgagaggtctgtctctcccagccctcgtcccctctcatccacatggggccagcacaggcagtgggcagaaaggcctggtaaccaggagagcctggggggatgcccacacacccctgcccttccctccctgtcccacaggctgaggagcagactccgtgggaagtaggcaaaaggcacatatatttaaaaaagtcctttacatatgtacatcagaacttgctataaatacatagaaaccgcaggcgccaccctgccagctccgcggcctggggcctgggagaggtgagcgggcaataacttaggggtcagggaagggctgggggagggagaattgcatatattagcaggggtctgccccacggagcccccgagacgcggggccctgagcacctggggtttcctgagtttctagctcttgggaccacccggtttcacggatttcaagggtttgggcccactgagcccttgtgggtgcccagtcccagagcagccacccggagccccttcctacttgggaggagaggcacagagagggccctgccacgccccggcccccagctgtcctgagtgggccccgccagggctgaccaggtgggggcccgggtcgggcgctgaaggcactgcggccagggcctagggctcctctgagcagtggtcaggggaccttggccctgctccccaccgctgctcctaggggagaaacggtccctgtgtcttggggcatgtttcgcctaaaggcgtgtcagagaggagcctgggcgccggggaagggtgggctgaactggatcacgctctgccgctcgggaccaccgcccgccgcgccccccgcccccgcgccctcccccagcgcgccctcggagggcggccccgcgtgcagcgagcgcagcatgtcctccagcacctccttgaagttgatgtcgcagccctggtgcgcgagggccgcagggtcggcctgggcgtcgggggtgcccagcggcacgacgccggggccggcgtccagggacagcggcgccgggaaagagaagtgcgggggcggcgggaaggcctcggccggggggctgtaggtgaggtccagcacctctccggggccgcaaggcagcgccagcgggcgcggggcgggcggggcggggcagcccagggcgggcgcctgcctgcgcttcacgtccgcatccatcagccgcagctcctgcagcacccggcgcacgcagccctcggggatcttgatgcctgcgggcagagcgtcggggtcagggccggcgctgggggctcgggccttcccggggcgcccgccgcccactcacccacttgcttcttcctgtccttggtcttcagccgcacgatctgcaggtagctgctgctgctgacgtcggccatgacggcggcgatgcggccccacacgcgcagcagcgcgccgcacagcatgtagtggtgccgcagccgcagcccctgcaggcagtccttaccctcctgcgccagccggcagtgccggttcctgcggacgagacgggtcgtctcggctcaggcgggtcccaggggcccgcaggctccccaggtgccctgagatctcccgcctcctctcagggtctcgggagcccccgatccccgcctgggtcgccgccatctgccggtttccccctggtccccggcccgccctcaccaggcgctgtggctgcagtgcgtcagcgacaaagcgtagccactctcccagggctccttggcctcctccgcggtgacctagggacacagggccgcatgagcctgggcggggtcagggccggcaacccgagcgaaagctgcgcccggcggccgcctacccggtggaacttgcggcggaggctgtccagggcctccagctggctctgccggccgatgttgggcttgtacaccgtgaagaactggccgcggttctgctccgccagcaggcagctgggcttgttaccgcggacctgcggaggggggcgttgaggccgcgccccggtccgccccccgcgggccctcctctgggggggtaaccccgcccgaccccaccttgtaggagaggtagaagccgtcataggggcccgtcagcgccagcgacttggcaaaggcgtcctcccacttcaggccgcggtccacgctgatctgccacggcacggggtgggggggtgtgagtgtggtgggggcggggtgggcagagtgtgaggggctgtggggcttcctgctgaccttgtagaagaccacctgcccgtcctgcgggtgcccgggagccaggaacacctgctggctctcctcgtagatctcctcgataccgggagcaaggtctaggggggcgggtggagggtaagtggtgtccaggcctgggactgtgggctggggccagggtcagtcccgtagccggggcgcaccctagagacgaccccccgagagcacaggagagggtgtcctggatcctggcctgacctggcccagcgtggggatggtgcacgtgggccccaacctggcaaccgctcaggtcctaggtaaccccgagcaggctgtgggggatcgtgggagcctgggggccgctcaggtcctatgtaaccccgagcaggctgtgggggatcgtgggagcctgggggccgctcagatcctaggtaaccccaagcaggctgtgaggagattgtaggagcctgggggctgctcaggtgctgggtgaccccaagcaggctgtgggggatcgtgggagcctggttggctgcggcactgctcatgagtgaagtagccatggcccggacccgaccctcatctggacacagggaagtggtcctgatggacaggcctggccccatgaggctggaagcacaggctcgccggcctttcgttcacaacaatgtagcaggtgccccgtgaagcctggggatgagcatggtgggcagcgtgcaccagcctgggcaccttccagagacgtgcacggtgatcccacgagccctgtgcctgcatccgcccagtctcacccagtaccctcgctcacccaggatgcatggcgcttccacgagccccttgcccacctaggccctcgccgtgctcacccacaatgcacggtgttcccacgagccccgagcccacctgggatgcccggcgttcccacgagcccctcgcccacccgggatgcacggtgttcccacgagcccctcgcccacccgggatgcccggtgttcccacgagccccgagcccacccaggatgcatggcgttcccacgagccccgcacccacacccacccacaccacaccccggcacctgtgctcacccaggatgcccatgtcgtatttgccctcccgcttgtccatctcgatgaggtggtcgaaggtgtctgagaagtactggaacagggcgttctgcttgtgcacctccagccccaggatgcggttcaggaacttggtgatggaacagtctggtaggggagggagccaagcctcaggctgcgctgggaatccctctccctgctttgctcaccacccgaggccaaggttgcatgagatgagagacaggagcgcctctgggcctgggtgtggggcactcacccttctccacgtccaggcagccattccgggactcccggccaccaatgcccacagacagcaggccctgcttcatgtctgcggggagaggggcctcacatgctggtcttcccacccctgcccctccctcgaagcccctagctccttttccagagaccagcagctccctggggggctggggagcagctgcagcctagggccagggccagggccaggagcggagccttttgcctgacttacaggagtgagaacagcatgttcttggggagtaaacccaaaccccaggcccctcagctgccctggaaacccacccggcagctgctgggggccgccttggctccctttgccttcacagccctctctgtccgtgtgtggggaggggtcactcaacacacaaccggcctacaaagcctgctgccccagctgctctggagcccagtgctctgcaacccctgcccctcccaggaagacccccaccagcccagcttaccccggaagaaggtggggacccctccagggtatccctggggcacaggcactttgttctcagtctggctcaggatggtggtgaggacacagtgcagggcccgggtgccatactagggggagaaggtgactcggggaggaggcccagggaggaggctggctttccctggacccctgcctccccagaaccccaccctcccctaggcccctggaccctgccctcccctagactcctagaccccacctcccccagctctcagccacctcctccccgggggtcctagactgggtcctcccccagacccctggatgccacctccctgagcccctagaagcccccttcccccctgggggtcctagacccggccctcctccagaccactgagccccacgttctccagcccccatctaccccctcccccaggctcttagatccggccctccctagacccctgcccctgccccgccccccaaccctgccttccctgcagtaccttgttctcaaagttgtacttgctgaggtcacgggactccgtggcgcggcggtctccgtgggtcagggccccctgccaggggtggggaggccatcagttggtcacctggggtctggcctctagcaccccacaaagctttggagagccttcctgggcctgtccctggttctcagccccacccccacctgctcaccagactctccaggcgcttggccacgatggaggcgaaccggcgctccccggccagctccgagatgaggaagacatactctggcgcggagacctggttggaccggtgggtgcggcctgggggcagagctgctctcagggcccggccaggcgggggcggggccgagaccatgttgggggcggggccaggcagcgctgggggcggggccggactcaccgaactgctggatggcgcggtcggcgctccacggcagctccaaggtcatgtgcacgcggcgccgctggttctggacacggcggtcggcttggagggagacacccgagctggaggcctccgagatgatggccacgagctagggggaaagaaggggccgggacacggttggtgcaaggcccgccccagcgttgccgccacctcctcacccactaggcccccgctccaggtcaccaggacgtcccggggcagcgagaggcctgcggggcgcggacaccacccgccacacggccactcgcgcccgcacctggcacacacacactccagaagtgcgcgggtccacagtccccggggacccttgggcccctctgtgcctcttgggtcccgtgggccgcgcccagtgcactgcagccccgcaccttctcgccgctcatgaagcgctgcttctccctgaggttcacgtggtcgatggacagaccctgctctgcccgcgactcgaaggccaccgtcccgtcgggcctggacaccacgcggcctttcctgccggtcatctgcagccgagacagggacaaaaccggccgtcagtgttgtggcctcgcaggagtctggccacccgtgtctcagcttccctatgtcctacagtggtcatgggctcccagctgtgcacgggaggtgggggtgctgggaaagggagggcgggactgctggacccaggcgatgtgtgcctgtccaaggcctggtattatcagccagccggcgccacgaagtgaaaaagtgaagctgggcgggggcagggagtaggaggccgcagaaccaggcccaggggcttgtgtcctggccctgggcaccccaaggggtgcgttcaggcaacgatctaagcagaggcctgcgcaggccaggctgggggatctggggcttagagggatggggcaggccgtccacaggaggtcgtggcctcccgggccgagctggacagcacgctgctgccccagggctccccaaacgccccctcctcgcagggccgcggagacgcagagtgaccagcaggggccaccagagctgcacacagcctgcgtgaagccccacccactgcccatgccccgcccaccacactccagctgccacgtcccacccacctccgccacccgctgggggccgcccagctggtcgatgagctcgtccagggtgttgactggcagttcccggcccagccgccgcactttgtccagcagatcctgcttcagccgctccacccgctccaggaccccggggccatgcgggtctctctgcaggaggcacaggggtcctagggaggaggtggagggtcagggcaggacatgttggctgccttctagggcccacctaactcaaggctggcccctggagggcaaggacaaggggcccggggcaaccctgagggacggcagggtggcggggaagcccggcaccgtggcccaggactgcttttctgcacttgtctccctgagaccagctggggcgagactaagcctcctgtcgcggaccaaacactgtgacctcactgcctccacaggggtagggactgcccagccccaagccccagctctgcctctgaccagtggtataacccctgacctcccctctctgggcctcagtttcccccatctgtaaagtgggcaccatagcagcagctgggctcaggtgggctggactgagggctacaacctggggtgggtggtgaccgccaggaggccgggggagcctcaggctggaatcctgacccagaggtggctgctcagcctggactggaatcctgacccacaggtggctggccagcctgggcaagccctcaccccggtcgtcactggggagcccgactgcatcaacgatgacaacgtcgtcatccaccagggactcgggggaggagttgaagtcgctgtccaggccagggtccgactccgtgctgctgtcgtcactgatgcggatgacgcccgctgtctcgcacgccagccggggggctttggccccgcgtccccgaggtcgccctgcagggaaggacagggtcaccgagggccagaccgcagcaaggtggaggagcaggtggaggagacgcagcaggacagagcaaggccagtggtccgagctggggaggtccatccgagaaccccctgcctctgggcaagcagctcagctgttctccagggacgccctctagggaaccccgtgccctgtggccaggagggtacggtgtggggggccatattttatttatttattttcttttgagacggagtcttactctgtcgccaggctggagaacggtggcatctcactgcactctctgcctcctggattcaagcgattctcctgcctcagcctcctgagtaggtgggattacaggcgcccaccaccacgcctggctaatcttttgtattttagtagagatggggtttcaccatgttggccaggatggtgtcgatctcctgacctcgtgatccacctgcctcagcctcccaaagtgctgggattataggcgtgaaccaccacgcctggcttatttatttatttttgagatggagtttcactctgttgcccaggctggagtgcagtggtgcgatctcagctcactgcaacctccacctcccgggttcaagcaattcccctgcctcagcctcctgagcagctggtattacaagcatgcaccaccacacctggctaatttttctatttttagtagagatggagtttcaccatgttggccaggctggtctcaaactcctggcctcaggtgatttgcccgcctcagccttccaaagtgctgggattacaacaggcgtgacccactgcacctagccaatattttatttttattaatttttttgagacaagagttttttctgtcacccaagttggagtgcagtggcatgatctcggctcactgcaatctccacctctcaggttcaagcgattcccctgcctcagcctcccaagtagctgggattataggcgtccaccaccacgcccagctaatttttgtatttttagtagagacagggtctcaccatgttggccaggctggtcttaaactcctgacctcaggtgatccacccgcctcggcctcccaaagtgctgggattacaggcgtgagccaccacgcccagccaacgggacaatattaataaacccatatccaacgtcctttcaggcctggccagtatggtggacacgcggggtgcctggggaggccacacaccagacttcgacaggcagctctgggcttccctgtgacagaagcctgggggttatcaatgggctccccaagggaccgtggagaccctgaaaacggaaggtgggaggggtctcgctcagcacccgcgtccgtgtcccgccccccgggtctcgctcggcacccacgtctgtgtccttcaggctgtctgttgcttcctcttccctaagcgttccatggcagggtccacgcaagacctgccactggcagcggagccttgagcctgcctggcacggacaggacctgcatttggctgagtggacgggggagtgggggaagcagggagcgaccagccagcccccggggggagaaagcagaggggcaggggtgggtggggccatggggggcagggcttacgtttccgcttgctgcccgctcctctgtcccgctttctcttggtggacggaaagtgcttctgaattagcgacaggaacacgcctctgaaagtgagacgcggagtttattctcacacgaggagctgaggccaggcggggttgctctccaggagctggacgcacccctgggtccctgtgggggtcccggacaggaccgggcctgggcagagggtctcctgtgtggagtgggctggggaggactgggggctgcctgtgagctctcctctggcctcctggtgtcacagggccacctcggccaccaggcttcccccgctctgaggaatgtggccggatatgatgatggctcccaggacaggggcagggggcagggtgaaggggtagctgggggcattggggagctccgacccccaggcaatggggggatctaggggggctgctgtgaccctcccggggcattctcaaccaacaggggagaggctggggcttcagacagctgggagggccagcccctaaaatccacagcccccttgttaaaacggcacagatgcaggaagcctccttctgagacccctggagaccatgtcccaaaccttccaggcccaccatgcctggggtccacctccaagcctctgctttagacctggagcagcggtgaaggcctctgtggctgaggctgggggcccagcaaagcccaccccagcacctcctgctgctggggccaaggggcagggtcaggccacaggtggccacagagaggggtggccatgagcgcaggaagcccacagtcctgtccccaccgtgacacttactcagcggccgagacgaagcagttgaggtgcccatcgttctcccccagcacctcccgcgtgcgcgcctcgcccgtggactgcagcccgatgaccacgcactgtgggacggcagaggactgtgagccaccagccctgctgtggggcctctgtggggccagaacctgccaggcctggggtgatggccacatccctcactctgctgctgtgctcgcctccccaggaggggccacggcccccctacaacacacactgctgggtgggggtctgccggctgcctgtctcgggatggtgagctgcccactgtgtggtcacactccgctgttctgacaccctggctggctctgattggaagacggacatccgggcgtctctcacccaccagggtgcagcccccgcccacgtctggggaggggccaggaaggacctggaagaagagcagcctccgcccctgcaggcccggccgccctcagccctcgaaggccgcagccgctcaccttgtctcgcgccagctcctctcgggccagctccaccagccggcgcaccttggctgcgatgcacagatacttgaagaagcgctggtgtgccgaccagaactggccccacagggacttgcgcgactccaggccgatccagtcggccgcctgctggaacacgttcagggcctcggcccactgcaatgacacgtcacaaggcgcccctgagctgtggctcctggctcccgacccgggccccggcccacctgccgccagccctgggcaaggcatccccacgccaggtggaatttagggcaggatgggggtgctgggggtgtgcactgtaagaggcactgcctctacctgtacggcaaaaacctgaaaaaccaaaacactcgtggtggggaagccgtgctgcaaactgcacagactccgcgcccgcggcaaacaggctcagctccttccaagaacacagggtgctcgcagccacgcctctcttgctttggaccagggtctcacccaggtgtgatcctgtccaggggacactgggcatgtctggggctggctgtggtggtcaggtttgggggctggtcccggcatgactgggtgggctgggttagggtggctgggactctggccacggatgctgctccataccccaaagtgctcaggacggccccaccccggagagcaacccggccctgggggttacgggagatgctggttgtgtcacctaaagaaacgagtgaagaggctgggtgtggtggctcacgcctgtaatcacagcactttgggaggctgaggcggtcagatcgcctgagctcaggagtttgagaccaaccagcctgaccaacatggagaaatcctgtctctaccaaaaatataaaattggccgggctggtggcacatgcctgtaaccccagctacgcgggaggctgaggcaggagaattgcttgaatctggtaggcggaggttgcggtgagccaagatcgtgccattgcactccagcctgggcaacaagagtggaaaccccgtctcaaaaaataaaaaaaaaaaaccatcgaacatacagggctgttgggcgtgagggggagaaaacaggacctgtccaaacatggagggaacgaccaagccacatggcccacagcaatgtggatgctgaacacggctaccaactgccagctgtgggccaggacctgggggcaaagggcttgggcaccacaggaaggggggcggtggtttggtcccatccctcgttatcacagccacataaaaaccccagtgatggccgggcacgtggctcacgcctgtcatcccagcactgtgggaggccgaggcgggcagatcacttgcggtcaggagtttgaaaccaacctggccaacatggagaaacaccgttctctaccaaaaaatacacaaaattagctgggtgtggaggcgggcacctgtaactccagctactcgagaggctgaggggggagaatcgcttaaacccaagaggcagaggttgcagtgaactgagatcacaccacagcactccagcctagatgacagcacgagactgtctcaaaaaaacaacaaaaaaaaaaccccaggacaggacagggcgggccgtcacctgatgacgcctgtggcatctgcaaggccacgggggagcaatttcacccgggaaacgcacaggggtccccgggtcgggtgcgcaggctcaccagcagggccgcgcggttgtagacgcactcgaaggctggggccagcgggatctcctcgatgcggaaggtgacgccggagaagctgagctggcgtgcgatgtacatgccgctgaccttcatgtccatggccacgatctccatggcgccaacgcccctgcggatggacacagcccccgtgagcacggccagagcccgtggggatggagccactcggagcgcgaggcagagccagtcgcagagagggcggggtcggcaggagcagagccctggcggccactgaggcagttggcagctgagcctggcggggacggggcaggaagggctgcggaggggctggcttccctgggagtgctgggcagcccgaggcagtgaaacgagcgacccacattcagcacctctgggtgctggggaagcacacgtggcagtgccaggccttgggctgatgggcctgaggcctcctccccaccccccgccgcccctccacgtgggtgagaagggcactcacctcttctcgatggcgtgcaggaactcctcaaagttccggaagggtgtgccctcgccccagatacccaagcggctcatgtagatcatgttccgaggctcagaggcacctgtggggggaagctgccgtcagctccccaacccgggagggcccagaggccgcgtcaggggacgactaagttgggaccacccgacgaggggccctgcggggttggagccatgggcctgaagagagccagcgtggccttgggacaggcgcagaggtgccccagtgtccgaggaggagcagggtgcagacggaggctgagtacgcgtgtgggataccccttcgcggggacagccaggcagaaagacgctgctgcgggtgggtcacgtgggatccgcaccgccccacctgtggcgctggcgtagaccacgcgggccaggggcagcttgttctgcaggtctagcacagccttgcccatcttggtggagccggcattcttggctttgtgacactcgtcgaacacgatctgaggcacacgtgggttaaggagtattctgaaggacgggggcgaccccaggagcccaggtcctgaccacccaagaccccaccttcctggtggggggcaaacgcctgtgcggctgagaactccacgagggaagcccaggtcggagtggcagccggctaccatggggggcgggcgggcaggcggcccccacacgaccattagatgggtgtggcctgggatggctcctcccagactctaaacaacacacaccgaggatggggcctccggcgaggaagggtgggatccctaaaccatgatatcgcaggacgttgccatcggaggaggatacctggaacctgttttcttttttgtttgtttttttgagacagggtcttgctctgtcacccacgctggagtgcagtgatacaatgtcagctcactgcaacctctgcctctcagattcaagtgattctcctgcttcagcctcccaaggagctgggactacaggtgtgtgccaccaccacaaccggctaatttttgtagttttggtagagacggggttggccgtttggttggccagataatctcaaactcctgacctcaagtgacctgcctgcctcagcctcccaaagtgctgggattacaggtgtgagccgtgcccagccctaattctttgtttttttttgagacgaagtctcgctctgtcactaggctggaatgcagcggcgcgatctcagctcactgcaacctccgactccctggttcaagcgattctcctgcctcagcctcctgagtagctgggattacaagtgtgcgccaccacgcccgggtaatttttgtattttcagtagagacggggtttcaccatattggtcaagacagtctggaactctttttttttttagatgagacacagtctcgctctgtcgcctgggctggagagcagtggggcaatctcggctcactgccacctctgcctcctgggttcaagcgattctcctgcctcagcctcccgggtagctgggattacaggtgcgcaccaccacgcccagctaacttttgtatttttagtacagacgtggtttcaccatgttgtccaggtggtctcgaactcctgacctcgtgattcgcctgcctcggcctcccaaagtgctgggattacaagcgtgagccactgcacccggccaggttcttaatattttaagacgaaagaaagccaagttccaggaaagcagtctgaggaaggaaaactgggagaatacaaattaaacggccggccctgccgccacgtagcagctcagcgaggtatgatctcagggttatcgctatttcgtagattgttgcacatagattgttcagccgggtgcgaagacaccagcagtctcccgttctgtttctggccagtctgaatgttctgtgtctcggcgttaactgaacagcaaagccatggccatgtcctgtgcatgaagtggatgctgcaggccaacgtccctcccttatctgagcctgtgctcccaacaccccaacacccaaggtgcaccctgcagggccgagcaccagggctgagcctggccaaggggtgccctgccgtgcctttgctgctaactgtcctgggtctcctgtgggggagcccctccgaaccgcagcctgccgacgagagccctgggatgctggggagtgaactgtgcccaccacactatcagctggggttggcaccttcctgacttggggagcagctcagtggccaccctctgcccacggcatcatggcaaacatcaggaccacatctatggtcactcatcccacttatcagaaccaagaaaccaagccggagccctgtggtgaatgatgatggtcacttgtgtggtacccacagggccagcctcccaggaccagaaaagtcttctatccggagtcctaaaccctgagcaaagctgggggctgggtggccacatccagggtagtgagctccagtggcctccagcccttccccagccccacccctccgctcctaccctctcccatcctgccctcctctcccctgactcccacccctcctctcccactcctccatcctccttttccctccgaccccctaatccagccctcccctcccgattgcccccagcaggatacgacgccctcgaaggcctccccacaccagtccaggatctgccggaggcgagtgcggtgctggccgccggcctggctctccccaatcagggcggagtaggtggcgaagaggacgccctctgaggtagtggtgtcaccgtacttgatctggggatgcacagaacaggtgtggaatggggccccggctcagcaggctctggacctgggtctccctatctgtaagggtgctgggcagagcctgccctggctgctggcccacccagctgagcagcccccactttgcagggcacggtccccaccttgccccctactttgccgagcacagcccctaccttgctgagcgcgtgcaccgcgatgcccgtggcttcgatgtcccgcaggtcgcgctccgcatcgtacttgaggtcgttggagacgctgaacctgcggggtgggggcgtcaggcgcgcccacccttccccctcgccccccgcttccgccccccacccccgctcccgccccctgccccaggcagggcctcaccacaatgctttcttccggccgcgcaggtggttctccaggatgactccggccaccgtccggcctttgcccacgccggccccatcgccgatgagaaagcccgcgcgctgcccgctggggagcaggacctcgtgttgctgttgccggagagcaggcgtcagggcctgggggtgctggcccggcccctccccaggggcctcgcggacacaggctgggctgggttggggacatgcggtcacctggcaggcgtaggtgatggcctctagctgcagggcagacagggccccgctgtccgagggcagggccagggtgtaggtgatgtctgggggtgggacgctggacagtgtgctggtctccaccacgcggtctgggtgctgcttcccgatcttggctggaggagcaaggacggagggcaaggtaaagggtatggccaaggggtgaccagggccggttatggcacgctgggcgggtctggggcgtggccagagctggcggggcagtttgggggcgtggccaggtcccgttgggcgggtcatgggcgtggccaggaatgcctgggtggaggagtggtcagggctggccgggtcgggggtgtggccgcggcctgctgggttggttgggggcgtggccagcggcttgcaggaggggcaaatgcataaaaatcctcccagtgcctctgaggttcctttccacttctcccctctgcgaaccccggttttgtataagcctggattgtagaacctgtccccgggctctccggccctccctgaagcttcacattccctctgtgggctgtgcgggcggtggtcacctgcagggtctcggtcccacaaaagggtttgaacctgtcccagggctgggtgcagccgggccactcacacttggacggcacgtagtcggcgtaggtctctgtgtgccccagctcctccgcctcctcctcctcagcctcgtcctcctcctctggctggctctgcacactctgctcctgcgtgcgtggcgggagctcagcggagactgcaggcctgagcggccgcgggcactgggctcccccaggggcaggggccaggctgaccatgggcagctgagtgacccaggggtgggagacggctctgtctgcccctgcagcaaggtgctcccccagggcctccatctcctcagctataaaatgggcactcccagcttctaggccagccaagcgctccccacaatggagatgcctgtgctgagccctctccttaggtcccatgagagggcaggggagggagctctcggctgggcccagctcacctggtagctgacgagaagcggggtgctgtgggagggcagaaagtcctcgaagcctgcaaacggcctgctgagctggaacagctggaaggggagcaggatgtcagcccgggccagacgggacaggtcacagctggtgggccctcgcagcctggccaccagagggaggctccccactgccccgtcctcgcctccccatcctcgctccccagggccctgggtcttgctctcctgctgttctcagggtgaccctggtgcctcccaagcctccccagtgggcacctccctggggcctaaggctcgctcctcctggccagcacctggctgccttctcactgatggccagtgtgcctgcctggagtgcccgggaggaaggtgcccggctagttctgacagacaacacagcttggtcccgcgggagctgccaggaaggctgtggacaggggtctgacaggagagacccactgtgtgccagccccatgcagtgcaggaggccctcgggggcctgggagacaaggggttgggagctccctgtcgagggggaagaggagacagaggcagtgggggcgggcgggcctgggccttgtccctcacccgatggctcccagcacacagggtgggtggcccagggcagccctgcactctccaagaacccccgtgggtgcagtccctgaggcccctcgagggcagcacctcctctgtgagagatggggcaaggatgcctgccactgtagtgaccagagaacacatcccactgcggccccaccctggggagaaggactgcccggagcctcatgcagattcaccagggtgggcagtgacactgtcctcggggagctgaccccaggccttggcagacaggtgtgctgggcctctggatgagtctgtggcccacccaggggtctccgaactgactgggcgtgtaaagcctgtgaacgggtgggtcggggggtggtgtggcccgtcgtcatgcccactgtccagacgccaacactgagacagtgtggaccccgggacggatggctgggggatggtagggtccaaactagggtctgtgtgattctggaatatatccactcttaaaaagcaaaaatcctaacagtaatacgagccataaaaaacgtaagcatggtcagggtacagtggctcacacccgtaaatcccagcactttgggaggccaaggcctcccagagtggaggtcaggatttcgagaccagcctggccagcatgctgaaaccccgtctctactaaagatacaaaaaaaaaaaaattagccaggtgtggtggtgggcgcctgtaatctcagctgatcaggaggctgaggcaggagaatcgcttaaacccaggaggcagaggttgcagtgagctgagatcacgccattgtactccagcctgggtgacagggcgagactccatctcaaaaaaaaaaaaaaaaaaaaagtgagcgtgggccgggcatggtggctcacgcctgtaatcccagcacttcgggaggccaagataggtggatcacctgaggttgggagttcaagaccagcctgaccaaaatggataaaccccatctctactaaaaatacaaaattagccaggcacgatggtacatgcctgtaatctcagctactagggaggctgaggaggcaggagaatctcttgaacctgggaggtggagggtgcagtgagctgagatcgcaccactgcactccagcctgggcgacaagagcgagagactctgtcttaaaaaaagaaaaaaaaaagtgtgaagaattggaaaggggagaatcccgccgggtgcgtggctcaggcctgtgggaggcagaggcagaacgggcgagatcttttggggccagggttccagaccagcctggacaacatgataaaatcctatctctacaaaaaatacaaaaattagccaggcgtggtgtcgtgtgtctatggacccagctactcgagaggctgaggcaggaggatcgctttaacccagaaggtcgaggctgaaatgggctgaggttgcgccaccacactccagcctgggcgacagagtgagatcccgtctcaaaataaataagtaaataaataaataagagcatctcttctagacccggtcccccccttgaactccaacgtcctgagacgggtgaggtttccgcccaagcctgcctgagcccgggccgggttctcggcagtgtgtgggagccaccaggctagtgatgctaatgaactgagtccacagcttctgcattttctaacactaggaacactcctgagggtttttaaagaaagtggaagcgtggcacaggaaggttagaaacctatactcagttgccctctccttttttttttaagttaacaaaacacaaaaaaacagacgccacgcaggttcctggaaggctgagtcaccattcccggtggggctggcgggcattgggtttcagatgccctcgtgccggccacagcaggccggtcaggccctggcttctttcctcacgccctgctgaggacctgggagctagctgggagggcacgggccccgggctgggtgaaatgctctgctgggcccttgtgccagagggaccaagcctgagccgcccaccatggctgcggggtgccctgatgcttcctgagccgcccaccgtgagccacccaccgtggctgcggggtgccctgatgcttcctgcctgggcccccaagcccgtgagttctgctgcccgggttgccccttcctgagggcccgggagagcggcctatgggtgtgagcccaccactgtgccgggagcgtgcggaggctggcatgggccctcaccggaaggcgctcagtcccagagacatgtccaacgtctgctcccaaagtctagaagcttctctcgtggacaggcccggattggggaagggacttgccaggcctggctcccagccatgcctccctcaccagacacctccactgagtcgcactggggcacggctagaggctaggcccgaagaacctgggggccctgctgccctacaacccctgctctaggcctggcccacccaggtccttcaggagcttcttggaggcaaaccccagcccctcagcccccacggacaatgtccagctccccaccctgggacaggatccaccaacctcgccctctcagctccccactagcggggacacggccactgctgacccaggcaccatggggctggatgccaccacaggtgctgttcctctgcctggacagccacattgcctgggcccgctgggcgctgcctctccagggggcccttcctgaccacgcttctctgtcccgtcaccttcctgtgcttctctagaccagggactccccgggtgcggtggacacggggcagggtccctctcaggtggggccataatgggcactgcagggcgctgggcagcatcctggccccccccaactccatgccaggagcaccgcccagatgtggtagccacagatgtcctggacgtcgccttctcctattcaggacacaagaggaccctcaactaaccacctcatccatggccacagatggcgccgacagtgacaggcacagccattggcacgcagagtgggggagactgagacctcactggaccgtgtgggtcccgggctggggaggccacgctggtgggtcggggctggctgggggcaccgggcgcactgaccttatcgtgggtggagggggcagggttatcgtcccagatggtggacacctggttgaggctgtcagccggcaggaagtcgggcgtgtccacgatgtccgacagggagtccacggacgaggagaagatggagatgttggagaagtcctcaaaataggaggagtcctggaagacaaggccaggcccggtgagggtggtacgggagacaccaaggcccctccacgcactggagcacgtggggatgggagacaccacggccctccacacactggagcatgtgggaatgggagacaccacggccctcccaggttcaagcaattctcctgcctcatcctcccaagtagcagggattacaggtgtgcgccaccatgcccagctaatttttttgtatttttactagggacggggtttcaccatgttggccagcctggttttgaactcctgacctcaagtgatctgcctgcttcggcatccaaaagtgttgggattacaggcgtgagccaccatgtgacagagcgagagagtgagactccgtctcaaaaaagaaaaaaataaacaagcaatgggtgagaaacaccaaccctcagggccacgcaggacggcgtctgacttctgcagcacctgaagggcagcaatgctgcaggaactctgagcagctcgggtctggggtgagcctggtgccatgccctgtgccggaggcaggggcgggggcagccacgcccagaggtggggctcgccatggggatgacacacacacacgcgctgcccagtgaaggagatgtatgtacatcatttcatttttttttttttgagacggattcttacactgtcgcccgggctggagtgcaatggtgtgatctcgtctcactgcaccctctgcctcccaggtgcaagcgattctcctgcctcagcctcccgagtagctgggattacaggcacgtgccaccacgcccagctaatttttgtatttttagtagagacggggtttcaccgtgttggtcaggctggtctcgaactcctgacctcaggtgatccatccaccttggcctcccaaagtgctgggattacaggcgtgagccaccgtgtccggccacatgtgatgtctcacgcctgtaatcccagcacttggaggccaaggtggaagattgcttgagtccaggagttcaagattcgcctggacaatatggcaaaaccccatttctactaaaaatacaaaaattagctgggtgtggtggtgcatgcccgtagtcccagctactcggggggctgaggcgggaggatcacctgagcccagaggggtcaaggctgcagtgagctgttactgcacaactacattccagcctgggtgacagagcaagactctgtctcaaaaaaaaaaaaaatagactgggcatggtagctcacgcctgtaaccccagcactttgagaagccaaggtgggcagatcacctgaggtcaggagttcaagaccagcctgaccaatatggtaaaaccctgtctttactaaaaacacaaaaattagctgggcatggtggtgcgtgcctgtaatcctagctactcgagaggctggggcaggagaactgcttgaactcaggaggcagaggctgcagtgggctgagatcgtgccattgcactccagtctgggtgacacagggagactccatctcaagaaaaacaaacaaagaaaaaaaccaggcatgtcaagggggcgctgtctctccctggaagctgtgggttccgtccccctcaccttgctcagctttgcccactgcccaccctgtcagacccaagcacctgggcactgatcactagggaccttcaggaacctgcccccaaacagagacccccgggacagaggtgtccatgctgcccgcctgaggcccagagccaggtagggtgcagcaccccccaccccaggagggtaggagcagtccacctcccagagcctctggaggccccgatcggcagggttggggagcattcatcccactgaggcccacgagggccctccggacactgcccacccaggctgcagagggcctggtcacgctgacctgtggcccggaccctccgtggaagcatttcccgggcaaggtcaggggctcctgagttggtcaaggccccagccaggagcgggggtgagttgctatcgggcccagaaccgcccaggccttggtggtgcagggagcgcaggcagagcggaggagagctccccaaacccaaatgcgtgggtcacacggccagtccttccccggagctcagcgtggacagagggaagggacctcaggcagagacacctgccccacgccctcaccaggtgcccttggcccaagaagacaggacaacagggtcctcccgcccagggtcctccacccaaaactcctgccccagtctgaggaaacaccagcccgactactccagggcatccacaccacccgaccagccccaggaccgcccaacgcatctgaaacacgggcctctgagaaaccatcacagcccagaggggcctgaggagacgcctaaacaccacgtggggtcctgggcaggaaaggacatgggggaaactgaggcaatccaagcaaagcgtgggcctcaggagttaacggtggcgtacggatgttggttcatcagccgtgacagccacagacgggagatagaacagcagggagcccgggagtgggtgcacggggactctctgcactgtccctgcagcttttctgtcattctaaaacagtttgaaaagttaaagtcaagtcgggcaggggggagctcacgtctgctactcaggaggctgaggcaggaggatccgttgagcccaggtggtcgaggctgcagtgagctataattgcgccactgcacgccagcctgggagacagagcgagaccctatctcaaaaaaaaagttaaaagtcaagcagggcgtagtggctcatgcctgtaatcctactgttttagagccaaggtgaaagaatcacttgagcccaggagttcaagaccagcctgggcaacacagcaagactccatgtctacagaacgtttaaaaattagctgggcatggcagcatgtgcctgcagtcccagctactcaggaggctgaggtgggaggattgcttcaacccagttggtggaggttgcagggagccgagatcgtgccactgcacaccagcctgggtgacagagcaagtccctgtcacaaaaacaaataaataaaagtgaaagtctaataatgagggagtgcttgcagctttcaggcttcaagaacgcagcctcgaggccccgccctgctccccgtccggtccttcccagcacaggacaccccaccaggtgcatgagccctcgaagccttcacttctagcaggtgccctcagcgattagggacagagggagacggggttcccagggctggccctgttcacatgtgggaagctgaacagagccaggccagctccccccacagtggctccgtcctctgcccacatctggatttgactcctagcagccaccagctcacctcagagacagcctaagtcccacccgcgcctgtgtgtccctccacagcccctccaggccggcccaggctcctgcatccttcaccacatgacccacccaccctccagcctcagctcagcggacccagtgcctccccagggaaccgggcccctctgcagtctgtagtgagggcaagcaccaaggcccctcaagggtgacacttgcatccctccccgccagcccccagttctggggccccagggagggccggggctgcccgctgtggttcttgtctctgtagcatttcaggagccctgggctgaggtggggagctgggaggacctggctgggaggacctggctctgcccgcttcaaaagcagcagacacagctcctcctgccctgggcagccaactccagacctgactccagaactgactccagacctgatgtgctgccgctgccctgtgctccaggacccatggggagccacagagccacagggatttgccggcctgcgccaccagagccagccctgaccaggcccacccagcctccgctccctacaagagccccataagacacccagagcccctccacctgaggcttctccagaggaaagccacagctctgggtcctaccccaggggcagaaggagggggacgcagccctcccgacagccactgccactgtcactgagggcccccgtccgggcagggctgagcccgacccccccactccgctcgggtcccccagcctacgcacagggcgccgctcccagcccgaagtcttaaatctctgcctcggaaccttccggcagattccctctcactgccagaagagacggacggggcggggtggggatttttttagatcctggcggcctcggactctaggatgagatgccggctgctccggcagggggcccggccgtcctgaatggggtcccacctcccagacccctgcccccgagggcctcgcccgccccgggaagggagtgttaccttgttcagagcctcaaactgcagccacagctgcagctgggacatggtcccggcgctcggggggccaggggtcccccaggaagcgctgcccgggagcggctccctcatgaccgcggcagcagccccagcattgggtcggccggggcggacgggggcggctctccgcccggctgcatttgcatgtcggtttagtcaccgccgccggcgcctacttcctctaaggccggggctgactttcaggaaatgatgccggccccgtaagtcagggcaattaccggcagtgcgaggagaattactgtacggggcggatctcccacaggcgctgtcaacacgcaaccccacccgtgccccgccgcaggaccagccccctttggggcacccggcggacgtgcagaatgcccaggtgggcatgggcctcggtctccccagactgcagggagctgggttccgttccacggggaccagctgctgttcctggtgcccccaaaccacaggcagggaaactgcggccaagaccgcctcccttcacccagcaccccacgcatgccaagcgcacctcaggccctgctgcgcccccctggggctctccccaccccacccctgcaggctgaggtccccgagaagcccctgccgccgaagcaaagtcccctccctgctctttccctgctgtccgtgcccagggggttcagcgggccccgtggcctcccttgatctggggctggcggagggagagctgagcctgggcccctcctctccaggctctggccagacccggcctcggccccctgggcaggaacaagtggtagcgtcctgggaaaagaacgttctcgctttggtagaaaaccaagtgtcaatgatgcacttgctggggcaaccccgggccgcgagcccgcccgcggccacactcttgcccgcactgtgaggaccctggcgcatcacaggggcctagacaccgcggggcagacacctgatgggacctcacattgggccacaggcggtcattctcggtgtccttggaggagctggggaggccccagggccagagggggtgggaggacggccgggctgtggagaggacgggccccatctgcctgtactcagcgactgacggggcagaggccgcattgcccacgagaccgcggccgagaccgcgcaggtggccacggctcctcctctgtgaggggaggaagggcccggccctgtggccaggggccctgggaaagaaggaaaccgccccgagaggccaggggagcccgtggctgggccggagggctcgggacagttctgggcttgtaagactcccgccagggctctgaggggagagtgggaccagggggccctcaaaccctgtgcactccgccccctcgggctcaccctgttctagaccctgaggccctgtgccagccccactggggccccgcgaccaggcaccgcagcagcggaggctggtgcagactgtcgcccacaccccttgccacgacccatcacctcctggaggctgggcgacaacacgggtccgtgccgctggggcgaggggcccgcctgccaggcaccccgcccgccaatggaaaacaaccaatggggaagaaacccacggagccgctcaatccggcagccaatcacagccaccgctcaacctagcagccaatcacagccaccgctcaacccagtagccaatcacagccaccgctcaacccagcagccaatcacagccactcccagagacagctccacaccagctccacgcaaaaaacccacaaccacaagcgctgctgaggacgcggggcagtggcctgggaaccatcctgcagctcctcaaaagaggcgaatggggagtaacaacccagcagctgcactcccacgtgccatcaggaggacccacagctcacaaaagcctgaacctacagctcaggagtggacccacagcccacaggacccacagctcaagggtggactcacagctcacaggacccatagctcatgggtggacccacagctcataggcgcctggacccacagctcatgggtggacccacagcccataggacccacagctcacgggtggactcacagctcacgggtggactcacagctcacgggtggactcacagctcacaggtggacccacagctcacaggacctacagctcacgggtggactcacagctcataggcacctggacccacagctcacgggtggactcacagctcacaggacctacagctcacgggtggacccacagctcccgggtggaccctcagctcccaggtggacccacagctcatgacagcctggctcctgcagcgcagtcaccacggaggaacagggccagcacagtgaggccgtccacacactggaacacgacccagccatgaaaaggagcaaggctctgacccaagccacagcacggatgcaccttgaggacctcacactcagtgaaagacgccaaacacagaaggccacgcagtgtgtgaggccatttctatgaaatgtcctgtcctgaacaggaatccacacagacaggaaaagcattcaggttatcagggggtggggatgggctggggagtgacagctgatgggaacggggcttcctgtgggatgatggaatgttctggaactagacagaggtggtggttgcacaactctgtgaatatacttttttaaagtgtggatttgggcccggcacggtggcttacgcctgtaatcccagcactttgggaggccgaggtgggtggatcacgaggtcaggagttcaagaccagcctggccagcatggtgaaaccccgtctctactaaaaatacaaaaattagccaggtgtggtggtgggtacctgcaatcccagctactcgggaggctgaggcaggagaattgcttgaacccgggaggcagaggttacagtgagctgaaatcgtgccactgcactctagcctgggcaacagagcaagactctgtctcaaaaaaaaaaaaaaaaaaaaaaaaggtggatttggccgagcgtagtggctcacacctgccatcccggcactttgggaagctgaggtgggcaaacagcttgagcccaggaagttcaagaccagcctgggcaacatagtgagatcccatctccacaaaaaatacaaaaaccagctgcgcatggtggcgggcacctgtggtcccagctgctcaggaggccatggcaggagaatcacttgagctagagaggtggaagctgcagtaagttatgatcacaccactgcactccagcctgggcaacagagcaaaatactgtctcaaataaataaagtggattttgtggtatgtgaattttgtctcagtttttaaaagacctggaaagcaacgaaacagaaagaacaagcacagactccgacttgctccccaggccccaatgtgacagcacagcccagggtccctggagcaggtcagactgaggataggggtgcgccgcctagggacctgctgggcactaccccacccacctccggcgccccgcgcccagtcctgggctcccgtggcccggtctctccctccgcctctgtccagggtgcacccctcactgaccagtcccgcagcaacgctgaccgagggctccgtgtaagcctggctgaatgcccgctgcctcagccctcacaggaaccctgccctgcattacagggagggaaacaggctacggggatgggaggggctcctcctggagggggctggggggcagacagaagaggcttccaggtggtcgtggggcacaggtggcacttcctagacactgccagtctttggtggctgggagaagggcccctcagcaggcctggtcactagagtgccccgtgcagagctgaactgtgtccccaaaatggtgtgatcatgtcctggcacctggaagctgtgtgtgtggccttatttgggaatccggtccttgcagatgtgagtggttaaaaaaaaaaaggccgcactggccgagcgggtgttctgtgcctggtgtcctcattcgaaggagacacagtcccggggaggaggccacgggacacagaagcagagatcccagccctgcggccacagccaggggatgcccggatcccccagatgctggaggggccggaaggagcgcggccctgtccgcaccttgactttggacttccaggctccagggctgggaggggacagagtcctggcctttgaagctgtgtgtgctgcttcctcacagcagccctgggaggctggcacggctccccaggaaactgggctcccttctgtcagggttccggccaggtgcctggtatgggccctggggccgccgcctcagtgtcttctggtgctgcagccgggcagggccgaaccctggcgcacagcttcctgctgagtctccctctctaaggctgtctgtgggcggctctgccggcccctcctgcacctgcccaggccctgggcggaggctcctcctcccgggggggctgtggcctcagcacagaccaggggacagaaggtggctcttcttggccttggctgggtgtgaaccaaagacttcctgtaagaaatccccctctccctctccctccttcgctccctcatctctctccctcttttttgcccaatgccagtaactgtgggggctccgtggtgccggatgggccgaggcatctgacccctgctgaaacgcatctgcagaacagtcaatgctgcctgcctccctgcctgaaagcagccagagtttgcaaagcgcttttctgagccgtgagctcatcctgagcttcccagaagcccccgggctgccaggcagagagtgttgttaccggacagctgcgttcccaatggtccctgcagccccatggggacccgggatggatgcccggcaggtggagaggtcctcacaggacaggtggtgggcaagggggcagcacctggggaatggggatgggctgtgggtgccgagagccccaggagcccagcagagacgcaagggatctgggtgatgtcaggaagggtgaaggagcacccccaccccaggaacaggcggcaagggatgggcgaggggcagtgaggcgagcaggacctggggaatgtcctgtgtaggggcacaggctggggagaggcttgggctggggtgcggttgggggaggctggcactggggtgcagtggaggagaggctcgggctggggtacagtggggggaggctcaggctggggtgaggctcgggccggggtgcggtggggggaggctcgggccggggtgcggtggggggaggctcgggccggggtgcggtggggggaggctcgggccggggtgcagtggggggaggctcgggccggggtgcggtgaggggaggctcgggccggggtgcggttgggggaggctggcactggggtgcagtggaggagaggctcgggctggggtgcagtggggggaggctcgggctgggggggtgaggctcgggctggggtgcggtggggggaggttcgggctggggtgcggtggggggaggctcgggctggggtgcggtggggggaggctcgggctggggtgcggtggggggaggctcgggctggggtgcagtggggggaggctcgggctggggtgcagtggggggaggctcgggctggggtgcagtggggggaggctcaggctggggggaggctcgggctggggtgcggtggggggaggctcgggctggggtgcggtggggggaggctcgggctggggtgcggtggggggaggctcgggctggggtgcagtggggggaggctcaggctggggggaggctcgggctggggtgcggtggggggaggttcgggctggggtgcggtggggggaggctcgggctggggtgcggtggggggaggctcgggctggggtgcggtggggggaggctcgggctggggtgcagtggggggaggctcgggctggggtgcagtggggggaggctcaggctggggggaggctcgggctggggtgcggtggggggaggctcgggctggggtgcggtggggggaggctcgggctggggtgcggtggggggaggctcgggctggggtgcggtggggggaggctcgggctggggtgcagtggggggaggctcaggctggggggaggctcgggctggggtgcggtggggggaggctcgggctggggtgtggtggggaggagaccagaagaggcaccaggggctgccctgggggacactcaccccacacagaaacaggtgccggagagcctgggggtggggccgcgaggctgggctgggcctggagcaggggacccacgggaggctctgggcacagagggtgggctgcagcagcaagggccccttatcctcgagcaggaacccaacaccccccagccagacccagtcatgcctggaacacacagacatggacctgcatatggacgctgctaacagcgattcacagctgctgtcaacccatacctactcctgggtatgagcccaagagaaacgaaaacgtgtccactgggaagtttgcacccgtgctcacggcggcacaactcacgacggccacgggtggaagcagcacaagcgtccatcacggacacacagacagacacagtggggccctccacgcctccatcacagacagacacagtggggccctccacgcctccatcacagacggacacagtggggccctccacgcctccatcacagacagacacagttggtcctccacgcctccatcacggacagacacagtggggccctccacgcctccatcacggacagacacagttggtcctccacgcctccatcacggacagacacagtggggccctccatgcgtccatcacggacagacacagtgggtcctccacgcgtccatcacagacagacacagtggggccctccacaggtccatcacggacacatggacagacacagtgggcccctccacgcgtccatcacagacagacactgtggtacctggtacctccacgcgtctatcatgaacaaaaacagtgggtcctccacgcgtccatcatgaacaaaaacagtgggtcctgcatgcgtccatcatggacaaacaaggtggggccccttcatgtgccggaacacggctcagccataatcaggagccaggctctgacccagccatagctcggatgtaccttgaggacatcacactcagtgagagacgccagaggcaggaggccatgcagcgtgtgatcccatttctatgaaatgtgcaggacaggccaagccacagagacgggaaggggatgcgtgggcgccggggcaggggagggatggggagtgacagctgacggggacagggcctcctctagggggacaatgatctggaattagaattacatggtgatggctgaacagctctggactttgtaacagccacagcatcgttcacttagaaatggggacttttctgtcacgtgaattgagtctcacgtgacagaaaaggggcggggcgtggtggctcgcacctgtaatcccgacactttgggaggccgaggcggatggatcacctgagatcacgagtttgagaccaccctggccaacgtggtgaaaccccgtctctactaaaaatacaaaaatcagctgggcgcggtggcgcacacctgtaatcccagctactcgggaggctgaggcaggagaatcacttgaaccaggcaagcagaggctgcagtgagctgagatcgtgccattgcactccagcctgggagacagagtgagactttgtctcaaaaataaataaatatggtgcgcgtctgtaatcccagctactcaggaggctgagacaggagaatcgcttgaacctgggaggcagagtttgccatgagccgagatagatcacaccattgcactccagcttagacaccaaaagcaaaactccatctcaaaacaaaacaaaaaactagagaaaaacagagacagaaaagaaagaaagaaaataaagaagaaatgcaggccgggcgcggtggctcacgcctgtaatcccaatgctttgggaggctgaggtgggtggatcacaaggtcaggagattgagaccagcctggctaacacggtgaaaccccgtgtccactaaaaaacacaaaaaattagctgggcgtggtggtgggcacctgtagtcccagctactcgggaggctgaggcgggagaatggcatgaacccaggaggcgttggttgcagtgagccgaggtcacgccactgcactccagcctgggcgacagagcgagatttcatctcaaaaaaaaaaaaaaagcagcagcaacacagagccacgtgtccacagaaccacggttcacctgcacaccgcggcagggggccccaccaggacacacggggctgagccatcacccaccagggacattgagcctgatggcttcgcgccaacctggagacggaaggctgagcagaagtgaggggggcccttcctccgggccagggtggctggagggccgggcaaggcacacacgtgacaccgcgggagccccgcagcccacggtggatgccagcagcggcatcctggcgcagcgtgagccccaggggtgggggtgggggtggccagggagcaggcagagagcggggaaggggtgggggtcccacacagacccagccgtcagcaggagaaggcacacggaaaacagacggacgcagcagggatgcccgcaggcagctcccacgggcagaggctgctgaccccgccttgggcaggaccagcctctgctcagccttgggtcttcccccaggctgagagaaacaggaaatggatggtgaaggaaccccgtccccgccaagcggccaaagttaccagcatcagcacaacacgcgcaacgccaggcactccggtccacgccgcactgtacatggtgccgtctgagggattcctccatccagtcaggagacaaccccagacaaaaccaacggagaggcactctggagaagacacaccctggagaagacacaccctggagaagacgcaccccggagaagacgcaccccggagaagaggcgccccggagaagaggcactccggagaagacgcgccccggagaacacgcgccccggagaagaggcaccctggagaactgcctcttcgggggcaagcgcagaggctgctgactcccccggtccaacaagctcttagtttttgcaatttttttgtaatttttttttttttagacagagtcttgctctgtcacccaggctcgaatgcagtggcgcaatctcggctccctgcaacctctgcttcccgagttcaagtgattctcctgcctcagcctcctgagtagctgggattacaggtgcccgccaccatgctcagctaatttttgtatttgtagtagagacggggtttcgccacgttggccaggatggtctcaaactcctaagctcaggtgatctgcccgccttggccccccaaagtgctggggttacaagcttgagcactgcgcctgacctgtaaatctaatttttaattttgtatagagatgaggtctcattatgttgcccaggctggatccacgtgtccttcatggacaaacacagtgggcccctccacgcgtccatcacggacaaacacagtggggccctccacgcatccatcacggacacacggacaaacacaatgggcctcccactgggaactcccagactcaagcgatcctcatgcctcagtcaaatagatgggacccaaatactgggactacaggcttgcaccaccatgcccgactaattttttctattttttatacagatagggtctcactatgttgcgcaggctggtctcaaacccctgggctcaaacaatcctcccgccttggcctcccaaagtgctgggatcacaggcgtgagccaccgtgcccagtcctgactcaaacatgacctcctgcattcccaggggcagaatctcccaggcacagtggccctactcggagtctgtgaagtgaagaccaccaggtgagccatgatcaaccctcccctcaatgacctccctcacgatcaaccctcccctcaatggcctccctcctcatgatcaaccctcactcagtgacctccctcatgatcaaccctccctcaatgacctccctccccacgatcaatcctcactcaatgacctccctccccatgatcaaccctcactcaatgacctccctcatgatcaaccctccctcaatgacctccctcacgatcaaccctcccctcaatgacctccctccccacaatcaatctgcccctcagtggcctccctccccaggccgtgaaggctctccagcagaaccaacagtgctgcggagtccactggccccaggcactgcccgggtccacggctcatctgctttctcctattgctctggctgccaagaaactcagggctcaggtgtatcaatagttaccaggcggatcgcctgaggtcaggagttcgagaccagcctggccaatatggtgaaaccccgtctctactaaaaatacaaaaattagccaggcgtggtggcgcacacctataatcccagctactcgggaggctgaggcagaagaatggctcacacttgggaggcagaggttgcagtgagccgagattgcaccactgcactccagcctgggtgacagagcgagactccgtctcaaaaaacaataggccaggtgcggtggctcatgcctgtaatcccagcactttgggagacgggcagatcacctgaggtcaggagttcgagaccatcctggccaacatggcgaaatcccatctctactaaaaatataaaaattagccgggcgtggtggtgggtgcctgtagtcccagctacttggtaggctgaggcaggagaatcgcttgaacccgccaggcagaggttgcagttacccaagatggcgccactacactccagcctgggcaagagtaagagtcggtctccagaaaaaaaagtcatgactagctgtctcgttatggcctgtggggttttacattcaccctcactcccagcccaggaacaggttctccctaccaatccctccaggtttatacaacagcaggaaacatttgcagggaatgcacacatgccacaggtcacacgatggctttgaacggtgcctccgtttcccctcgctcccgtgaaaagctactgtcaacctcatggctccaacaagctgaatatggtggctcacgcctgtaatccccatgctttggtaggctcaggcaggagaatcgcttgagcccagaagtttgagaccagcctaggcaacacagtgagacctcatttctacaaaacataaaaaattatctgggtgtggtggtgtgtccttatggtcccagctactggggaagctgaggtgggagcttgagcccaggaggtggaggctgcagtgagccgagattgcaccgctgcactccaggctgaacaacagagccagaccctgtctctaaaaataaaaattaaaaaaatatataaatgaaacacacacttatcctctcacagtctggagggcagaacttgtaacatcaagggtgggcagggcaggtccctcccgggggctccaggggaaaacccagttcctgcctttccagtgtccagaggcacccgcatcccttggcttggggccccttcttcccccttcacggccagagcgcaggctcttcccgtctctctctggctctcaccctcccgcctcctctcatgagggccctgtgaggacactgggtctccaggtcacccaggaagctctcccgtctcgggtccatcactcagtcccatctgcaggtccctgtgaggacactgggcctccaggtcacccaggaagctcttccgtcttgggtccatcactcagtcccatctgcaggtcccgtctgccatgagaggcgacacggcggcaggtcctggggatcaggacggggacgtcttggaggctgtaaccgtgtggccagcacatttcctcaggtctgagtcgggagcagaggcttccgtggctggctgggctgcgctggggggcacggcgcaaagggcctcgaacaccaggctcaggtctgggctccttcctggctccgcagaaccacgcggcccagcccacaggcctgggctgactcatacccgtcccgtcccacacttggcaccgcgggaccacgcatcccgtcccacactcgacaccacagaaccttgcggcccagcccacaggactgagctgacccacacccgtcccatcccacactcagcactgggggaccacgcggcccggcccacacttggcaccggggtcagacttcctccaaatgaagttctgctgctttaacagggagatttgggtccaagctgccccacatacggacgctggagcatgaggcggctgtaggcagggtgggcagggagccgggcgggcggtgctcacagaaccagcacagtggccccgagggctccgggctgaacagatgcagcagcaattgttcaggaggggaggagcaggagaattcatgagacagagatggagacggagacagagacagagacatggagagagacagagacagggagacagagacgcagagacatagagacatagagacagaggcagagagggaaacagacgaagacagagagggcgacagagacagaggcagagagggaaacagacgaagacagagagggcgacagagacagagagggaaacagacacagaggcagagagggagacaaagagacaggtggagagggagacagagagacagaggcagagacaaagagacagagacagagagggagacagagagacagagacagagagggagacagagagacaggggcagagacaagcagagagggagacacagacagagacagagagggagacagagagacagaggcggagatggagacagagacagagagacagagacagagagggagacagagacaaagagggagacagagacagagactgagagggagacagagagatggagcatagagggagacagagacagaggcagagagagagacagaggcagagaggaagacagaggcagagagggaggcagagacagagagggagataggcagagagagattgagagggagggagacagagagagagactaggagcagggggaagagggagagagagagacagagaaaagaaagagacaggccgggcacggtggctcacgcctgtaatcccagcactttgggaggctgaggcgggcggatc

SEQ ID NO: 101 - DNA, 39470 bp, Homo sapiens; identical to SEQ ID NO: 100

SEQ ID NO: 102 - DNA, 256 bp, Homo sapiens
acacctgcctctacgagtgctcccccaacttggggccctggatccagcaggtggatcagagctggcgcaaagagcgggtactgaacgtgcccctgtgcaaagaggactgtgagcaatggtgggaagattgtcgcacctcctacacctgcaagagcaactggcacaagggctgcaactggacttcagggtttaacaagtgcgcagtgggagctgcctgccaacctttccatttctacttccccacacccattgcccg

SEQ ID NO: 103 - DNA, 256 bp, Homo sapiens; identical to SEQ ID NO: 102

SEQ ID NO: 104 - DNA, 1781 bp, Homo sapiens
ggcacgaggcaggtctgtctgttctgttggcaagtaaatgcagtactgttctgatcccgctgctattagaatgcattgtgaaacgactggagtatgattaaaagttgtgttccccaatgcttggagtagtgattgttgaaggaaaaaatccagctgagtgataaggctgagtgttgaggaaatttctgcagttttaagcagtcgtatttgtgattgaagctgagtacatttgctggtgtatttttaggtaaaatgcttttttgttcatttctgggtggtgggaggggactgaagcctttagtcttttccagatgcaaccttaaaatcagtgacaagaaacattccaaacaagcaacagtcttcaagaaattaaactggcaagtggaaatgtttaaacagttcagtgatctttagtgcattgtttatgtgtgggtttctctctcccctcccttggtcttaattcttacatgcaggaacactcagcagacacacgtatgcgaagggccagagaagccagacccagtaagaaaaaatagcctatttactttaaataaaccaaacattccattttaaatgtgagcatagccaaccaccacggcaaacagagtgattaacctttagcaataaacgaaggaattcttccagttgaattcaccagtggacaaaatgaggaaaacaggtgaacaagctttttctgtatttacatacaaagtcagatcagttatgggacaatagtattgaatagatttcagctttatgctggagtaactggcatgtgagcaaactgtgttggcgtgggggtggaggggtgaggtcggcgataagcctttttttaagatttttcaggtacccctcactaaaggcaccgaaggcttaaagtaggacaaccatggagccttcctgtggcaggagagacaacaaagcgctattatcctaaggtcaagagaagtgtcagcctcacctgatttttattagtaatgaggacttgcctcaactccctctttctggagtgaagcatccgaaggaatgcttgaagtacccctgggcttctcttaacatttaagcaagctgtttttatagcagctcttaataataaagcccaaatctcaagcggtgcttgaaggggagggaaagggggaaagcgggcaaccacttttccctagcttttccagaagcctgttaaaagcaaggtctccccacaagcaatttctctgccacatcgccaccccgtgccttttggatctagcacagacccttcacccctcacctcgatgcagccagtagcttggatccttgtgggcatgatccataatcggtttcaaggtaacgatggtgtcgaggtctttggtgggttgaactatgttagaaaaggccattaatttgcctgcaaattattaacagaagggtattaaaaccacagctaagtagctctattataatacttatccagtgactaaaaccaacttaaaccagtaagtggagaaataacatgttcaagaactgtaatgctgggtgggaacatgtaacttgtagactggagaagataggcatttgagtggctgagagggcttttgggtgggaatccaaaaattctctgctaagactttttcaggtgaacataacagacttggccaagctagcatcttagcggaagctgatctccaatgctcttcagtagggtcatgaaggtttttcttttcctgagaaaacaacacgtattgttttctcaggttttgctttttggcctttttctagcttaaaaaaaaaaaaaaaaaaaaaaa

SEQ ID NO: 105 - DNA, 2040 bp, Homo sapiens
agcgagcttgcagcctcaccgacgagtctcaactaaaagggactcccggagctaggggtggggactcggcctcacacagtgagtgccggctattggacttttgtccagtgacagctgagacaacaaggaccacgggaggaggtgtaggagagaagcgccgcgaacagcgatcgcccagcaccaagtccgcttccaggctttcggtttctttgcctccatcttgggtgcgccttcccggcgtctaggggagcgaaggctgaggtggcagcggcaggagagtccggccgcgacaggacgaactcccccactggaaaggattctgaaagaaatgaagtcagccctcagaaatgaagttgactgcctgctggctttcctgttgactggcccggagctgtactgcaagacccttgtgagcttccctagtctaagagtaggatgtctgctgaagtcatccatcaggttgaagaagcacttgatacagatgagaaggagatgctgctctttttgtgccgggatgttgctatagatgtggttccacctaatgtcagggaccttctggatattttacgggaaagaggtaagctgtctgtcggggacttggctgaactgctctacagagtgaggcgatttgacctgctcaaacgtatcttgaagatggacagaaaagctgtggagacccacctgctcaggaaccctcaccttgtttcggactatagagtgctgatggcagagattggtgaggatttggataaatctgatgtgtcctcattaattttcctcatgaaggattacatgggccgaggcaagataagcaaggagaagatttcttgggaccttgtggttgagttggagaaactaaatctggttgccccagatcaactggatttattagaaaaatgcctaaagaacatccacagaatagacctgaagacaaaaatccagaagtacaagcagtctgttcaaggagcagggacaagttacaggaatgttctccaagcagcaatccaaaagagtctcaaggatccttcaaataacttcaggctccataatgggagaagtaaagaacaaagacttaaggaacagcttggcgctcaacaagaaccagtgaagaaatccattcaggaatcagaagcttttttgcctcagagcatacctgaagagagatacaagatgaagagcaagcccctaggaatctgcctgataatcgattgcattggcaatgagacagagcttcttcgagacaccttcacttccctgggctatgaagtccagaaattcttgcatctcagtatgcatggtatatcccagattcttggccaatttgcctgtatgcccgagcaccgagactacgacagctttgtgtgtgtcctggtgagccgaggaggctcccagagtgtgtatggtgtggatcagactcactcagggctccccctgcatcacatcaggaggatgttcatgggagaatcatgcccttatctagcagggaagccaaagatgttttttattcagaactatgtggtgtcagagggcccagctggagacagcagcctctggagggtggatgggccagcgatgaagaatgtggaattcagggctcagaagcgagggctgtgcacagttcaccgagaagctgacttcttctggagcctgtgtactgcggacatgtccctgctggagcagtctcacagctcaccatccctgtacctgcagtgcctctcccagaaactgagacaagaaagaaaacgcccactcctggatcttcacattgaactcaatggctacatgtatgattggaacagcagagtttctgccaaggagaaatattatgtctggctgcagcacactctgagaaagaaacttatcctctcctacacataagaaaccaaaaggctgggcgtagtggctcacacctgtaatcccagcactttgggaggccaaggagggcagatcacttcaggtcaggagttcgagaccagcctggccaacatggtaaacgctgtccctagtaaaaatacaaaaattaaaaaaaaaaaaaaaaaa

SEQ ID NO: 106 - DNA, 1442 bp, Homo sapiens
tttttttttttgagatggagttttcgctcttgttgcccaggctggagtgcaatggcgcaatctcagctcaccgcaacctccgcctcccgggttcaagcgattctcctgcctcagcctccccagtagctgggattacaggcatgtgcacccacgctcggctaattttgtatttttttttagtagagatggagtttctccatgttggtcaggctggtctcgaactcccgacctcagatgatccctccgtctcggcctcccaaagtgctagatacaggactggccaccatgcccggctctgcctggctaatttttgtggtagaaacagggtttcactgatgtgcccaagctggtctcctgagctcaagcagtccacctgcctcagcctcccaaagtgctgggattacaggcgtgcagccgtgcctggcctttttattttattttttttaagacacaggtgtcccactcttacccaggatgaagtgcagtggtgtgatcacagctcactgcagccttcaactcctgagatcaagcatcctcctgcctcagcctcccaagtagctgggaccaaagacatgcaccactacacctggctaatttttatttttatttttaattttttgagacagagtctcaactctgtcacccaggctggagtgcagtggcgcaatcttggctcactgcaacctctgcctcccgggttcaagttattctcctgccccagcctcctgagtagctgggactacaggcgcccaccacgcctagctaatttttttgtatttttagtagagatggggttcaccatgttcgccaggttgatcttgatctctggaccttgtgatctgcctgcctcggcctcccaaagtgctgggattacaggcgtgagccaccacgcccggcttatttttaatttttgtttgtttgaaatggaatctcactctgttacccaggctggagtgcaatggccaaatctcggctcactgcaacctctgcctcccgggctcaagcgattctcctgtctcagcctcccaagcagctgggattacgggcacctgccaccacaccccgctaatttttgtattttcattagaggcggggtttcaccatatttgtcaggctggtctcaaactcctgacctcaggtgacccacctgcctcagccttccaaagtgctgggattacaggcgtgagccacctcacccagccggctaatttagataaaaaaatatgtagcaatggggggtcttgctatgttgcccaggctggtctcaaacttctggcttcatgcaatccttccaaatgagccacaacacccagccagtcacattttttaaacagttacatctttattttagtatactagaaagtaatacaataaacatgtcaaacctgcaaattcagtagtaacagagttcttttataacttttaaacaaagctttagagca

SEQ ID NO: 107 - DNA, 1140 bp, Homo sapiens
ggcacgagcagcgactttaggctggataatagtcaaattcttacctcgctctttcactgctagtaagatcagattgcgtttctttcagttactcttcaatcgccagtttctggatctgcttctaaaagaagaagtagagaagataaatcctgtcttcaatacctggaaggaaaaacaaaataacctcaactccgtttcgaaaaaacattccaagaactttcatcagagattttacttgaacagcagtctcagcggttagcagcacaagagatgatttacacaatgaagaaagtacatgcactttgggcttctgtatgcctgctgcttaatcttgcccctgcccctcttaatgctgattctgaggaagatgaagaacacacaattatcacagatacggagttgccaccactgaaacttatgcattcattttgtgcattcaaggcggatgatggcccatgtaaagcaatcatgaaaagatttttcttcaatattttcactcgacagtgcgaagaatttatatatgggggatgtgaaggaaatcagaatcgatttgaaagtctggaagagtgcaaaaaaatgtgtacaagagataatgcaaacaggattataaagacaacattgcaacaagaaaagccagatttctgctttttggaagaagatcctggaatatgtcgaggttatattaccaggtatttttataacaatcagacaaaacagtgtgaacgtttcaagtatggtggatgcctgggcaatatgaacaattttgagacactggaagaatgcaagaacatttgtgaagatggtccgaatggtttccaggtggataattatggaacccagctcaatgctgtgaataactccctgactccgcaatcaaccaaggttccaagcctttttgttacaaaagaaggaacaaatgatggttggaagaatgcggctcatatttaccaagtctttctgaacgccttctgcattcatgcatccatgttctttctaggattggatagcatttcatgcctatgttaatatttgtgcttttggcatttccttaatatttatatgtatacgtgatgcctttgtagcatactgctaataaagttttaatatttacatgcatagtaaaaaaaaaaaaaaaaaaaa

SEQ ID NO: 108 - DNA, 4656 bp, Homo sapiens
ggctggagcggcggcgggcaggcgtgcggaggacactcctgcgaccaggtactggctgtgatcgaacttctcaaccctcagagacttagatcttccacctcactccctcagccaagcctccaggccccctcgtgcatccgtggtggcctctctgccttctctgttctgttctccccatggcccagacatgagtggccccctagaaggggctgatgggggaggggaccccaggcctggggaatcattttgtcctgggggcgtcccatcccctgggcccccacagcaccggccttgcccaggccccagcctggccgatgacaccgatgccaacagcaatggttcaagtggcaatgagtccaacgggcatgagtctagaggcgcatctcagcggagctcacacagctcctcctcaggcaacggcaaggactcagccctgctggagaccactgagagcagcaagagcacaaactctcagagcccatccccacccagcagttccattgcctacagcctcctgagtgccagctcagagcaggacaacccgtccaccagtggctgcagcagtgaacagtcagcccgggcaaggactcagaaggaactcatgacagcacttcgagagctcaagcttcgactgccgccagagcgccggggcaagggccgctctgggaccctggccacgctgcagtacgcactggcctgtgtcaagcaggtgcaggccaaccaggaatactaccagcagtggagcctggaggagggcgagccttgctccatggacatgtccacctataccctggaggagctggagcacatcacgtctgagtacacacttcagaaccaggataccttctcagtggctgtctccttcctgacgggccgaatcgtctacatttcggagcaggcagccgtcctgctgcgttgcaagcgggacgtgttccggggtacccgcttctctgagctcctggctccccaggatgtgggagtcttctatggttccactgctccatctcgcctgcccacctggggcacaggggcctcagcaggttcaggcctcagggactttacccaggagaagtccgtcttctgccgtatcagaggaggtcctgaccgggatccagggcctcggtaccagccattccgcctaaccccgtatgtgaccaagatccgggtctcagatggggcccctgcacagccgtgctgcctgctgattgcagagcgcatccattcgggttacgaagctccccggataccccctgacaagaggattttcactacgcggcacacacccagctgcctcttccaggatgtggatgaaagggctgcccccctgctgggctacctgccccaggacctcctgggggccccagtgctcctgttcctgcatcctgaggaccgacccctcatgctggctatccacaagaagattctgcagttggcgggccagccctttgaccactcccctatccgcttctgtgcccgcaacggggagtatgtcaccatggacaccagctgggctggctttgtgcacccctggagccgcaaggtagccttcgtgttgggccgccacaaagtacgcacggcccccctgaatgaggacgtgttcactcccccggcccccagcccagctccctccctggacactgatatccaggagctgtcagagcagatccaccggctgctgctgcagcccgtccacagccccagccccacgggactctgtggagtcggcgccgtgacatccccaggccctctccacagccctgggtcctccagtgatagcaacgggggtgatgcagaggggcctgggcctcctgcgccagtgactttccaacagatctgtaaggatgtgcatctggtgaagcaccagggccagcagctttttattgagtctcgggcccggcctcagtcccggccccgcctccctgctacaggcacgttcaaggccaaggcccttccctgccaatccccagacccagagctggaggcgggttctgctcccgtccaggccccactagccttggtccctgaggaggccgagaggaaagaagcctccagctgctcctaccagcagatcaactgcctggacagcatcctcaggtacctggagagctgcaacctccccagcaccactaagcgtaaatgtgcctcctcctcctcctataccacctcctcagcctctgacgacgacaggcagaggacaggtccagtctctgtggggaccaagaaagatccgccgtcagcagcgctgtctggggagggggccaccccacggaaggagccagtggtgggaggcaccctgagcccgctcgccctggccaataaggcggagagtgtggtgtccgtcaccagtcagtgtagcttcagctccaccatcgtccatgtgggagacaagaagcccccggagtcggacatcatcatgatggaggacctgcctggtctagccccaggcccagcccccagcccagcccccagccccacagtagcccctgacccagccccagacgcctaccgtccagtggggctgaccaaggccgtgctgtccctgcacacgcagaaggaagagcaagccttcctcagccgcttccgagacctgggcaggctgcgtggactcgacagctcttccacagctccctcagcccttggcgagcgaggctgccaccacggccccgcacccccaagccgccgacaccactgccgatccaaagccaagcgctcacgccaccaccagaaccctcgggctgaagcgccctgctatgtctcacacccctcacccgtgccaccctccaccccctggcccaccccaccagccactacccccttcccagcggttgtccagccctaccctctcccagtgttctctcctcgaggaggcccccagcctcttccccctgctcccacatctgtgcccccagctgctttccccgcccctttggtgaccccaatggtggccttggtgctccctaactatctgttcccaaccccatccagctatccttatggggcactccagacccctgctgaagggcctcccactcctgcctcgcactccccttctccatccttgcccgccctccccccgagtcctcctcaccgcccggactctccactgttcaactcgagatgcagctctccactccagctcaatctgctgcagctggaggagctcccccgtgctgagggggctgctgttgcaggaggccctgggagcagtgccgggcccccacctcccagtgcggaggctgctgagccagaggccagactggcggaggtcactgagtcctccaatcaggacgcactttccggctccagtgacctgctcgaacttctgctgcaagaggactcgcgctccggcacaggctccgcagcctcgggctccttgggctctggcttgggctctgggtctggttcaggctcccatgaagggggcagcacctcagccagcatcactcgcagcagccagagcagccacacaagcaaatactttggcagcatcgactcttccgaggctgaggctggggctgctcggggcggggctgagcctggggaccaggtgattaagtacgtgctccaggatcccatttggctgctcatggccaatgctgaccagcgcgtcatgatgacctaccaggtgccctccagggacatgacctctgtgctgaagcaggatcgggagcggctccgagccatgcagaagcagcagcctcggttttctgaggaccagcggcgggaactgggtgctgtgcactcctgggtccggaagggccaactgcctcgggctcttgatgtgatggcctgtgtggactgtgggagcagcacccaagatcctggtcaccctgatgacccactcttctcagagctggatggactggggctggagcccatggaagagggtggaggcgagcagggcagcagcggtggcggcagtggtgagggagagggctgcgaggaggcccaaggcggggccaaggcttcaagctctcaggacttggctatggaggaggaggaagaaggcaggagctcatccagtccagccttacctacagcaggaaactgcaccagctagactccattctgggaccatctccaggagtccatgagaggctttcttctcctatgtcccaattctcagaactcagatgtggctagaccaaccagtgggaaactgccccagcttctcccaccatagggggccggacccccatcaccagcctaggatccaggggctgcctctggcctcttagggagcagagagcagaactccgcagcccagcccagaggagtgtcacctcccacctttggagaggaatccttccctcccctggacaaagttgctgacaagctgctgaagtggcctctccatattccagctgagcctgaatctgactcttgagggttggggctgcacttatttattgcggggagacagctctctctcccacctcctccccagatgggaggagagcctgaggcccaagcaggacccgggggttccagcccctagctgctctggagtgggggaggttggtggaccatggagtccctggtgctgcccctcaggtgggacccaggggttctcagctgtaccctctgccgatggcatttgtgtttttgatatttgtgtctgttactacttttttaatacaaaaagataaaaacgcc

SEQ ID NO: 109 - DNA, 822 bp, Homo sapiens
tcgtgtgagcccagtgaacatcgaccgtcaggcctggcttggcgaggaggtgctggccgagccccggccggacatgtttcgggcacagcagcttcagatcttcaacttgatgaagttcgacagctatgcgcgcttcgtcaagtccccgctgtaccgcgagtgcctgctagccgaagccgagggacgccctctgcgggaacctggctcctcgcgcctcggcagccctgacgccacgaggaagaagccgaagctgaagcccgggaagtcgctgccgctgggtgtggaggagttggggcagctgccacccgttgagggtcctgggggccgccctctccgcaagtccttccgccgggagctgggcgggactgcaaacgccgccttgcgccgagagtctcagggctccctcaactcctccgccagcctggaccttggcttcctagccttcgtcagcagcaaatctgagagccaccggaagagccttgggagcacggagggtgaaagtgaaagccggccagggaagtactgctgtgtgtacctgcccgatggcacagcctccttggccctggccagacctggcctcaccatccgagacatgctggcagggatctgtgagaaacgaggcctctctctacctgacatcaaggtctacctggtgggcaatgaacaggtgggaacgtgacctggctccaactctaacctccttcctgatcctgaccccaactccatttctgtctctgctcagtcatggctccaaccccaattcaagttctaaacccaactccaaagcaccctcagcaccaactttcactcactcagacatcc

SEQ ID NO: 110 - DNA, 1665 bp, Homo sapiens
atgacccccatcctcacggtcctgatctgtctcgggctgagtctgggccccaggacccgggtgcaggcagaaaacctacccaaacccatcctgtgggccgagccaggtcccgtgatcacctggcataaccccgtgaccatctggtgtcagggcaccctggaggcccaggggtaccgtctggataaagagggaaactcaatgtcgaggcacatattaaaaacactggagtctgaaaacaaggtcaaactctccatcccatccatgatgtgggaacatgcagggcgatatcactgttactatcagagccctgcaggctggtcagagcccagcgaccccctggagctggtggtgacagcctacagcagacccaccctgtccgccctgccaagccctgtggtaacctcaggagtgaacgtgaccctccggtgtgcctcacggctgggactgggcaggttcactctgattgaggaaggagaccacaggctctcctggaccctgaactcacaccaacacaaccatggaaagttccaggccctgttccccatgggccccctgaccttcagcaacaggggtacattcagatgctacggctatgaaaacaacaccccatacgtgtggtcggaacccagtgaccccctgcagctactggtgtcaggcgtgtctaggaagccctccctcctgaccctgcagggccctgtcgtgacccccggagagaatctgaccctccagtgtggctctgatgtcggctacatcagatacactctgtacaaggagggggccgatggcctcccccagcgccctggccggcagccccaggctgggctctcccaggccaacttcaccctgagccctgtgagccgctcctacgggggccagtacagatgctacggcgcacacaacgtctcctccgagtggtcggcccccagtgaccccctggacatcctgatcgcaggacagatctctgacagaccctccctctcagtgcagccgggccccacggtgacctcaggagagaaggtgaccctgctgtgtcagtcatgggacccgatgttcactttccttctgaccaaggagggggcagcccatcccccgttgcgtctgagatcaatgtacggagctcataagtaccaggctgaattccccatgagtcctgtgacctcagcccacgcggggacctacaggtgctacggcacacgcagctccaacccctacctgctgtctcaccccagtgagcccctggagctcgtggtctcaggagcaactgagaccctcaatccagcacaaaagaagtcagattccaagactgccccacacctccaggattacacagtggagaatctcatccgcatgggtgtggctggcttggtcctgctgttcctcgggattctgttatttgaggctcagcacagccagagaagccccccaaggtgcagccaggaggcaaacagcagaaaggacaatgcacccttcagagtggtggagccttgggaacagatctgatgatctgaggaggttctggaagactggggcagcagttggggaagtgtctgctgagaatatcaaggggaagaagcatgggtcaggtgcaggaagatgtctgggtgtctgtagaagatgcttcctccattaaactgtggtgctttcctcctcaaaaaaaaaaaaaaa

SEQ ID NO: 111 - DNA, 1361 bp, Homo sapiens
gcctctagatgcatgctcgagcggccgccagtgtgctctaaagtagatgtggttccacctaatgtcagggaccttctggatattttacgggaaagaggtaagctgtctgtcggggacttggctgaactgctctacagagtgaggcgatttgacctgctcaaacgtatcttgaagatggacagaaaagctgtggagacccacctgctcaggaaccctcaccttgtttcggactatagagtgctgatggcagagattggtgaggatttggataaatctgatgtgtcctcattaattttcctcatgaaggattacatgggccgaggcaagataagcaaggagaagagtttcttggaccttgtggttgagttggagaaactaaatctggttgccccagatcaactggatttattagaaaaatgcctaaagaacatccacagaatagacctgaagacaaaaatccagaagtacaagcagtctgttcaaggagcagggacaagttacaggaatgttctccaagcagcaatccaaaagagtctcaaggatccttcaaataacttcaggctccataatgggagaagtaaagaacaaagacttaaggaacagcttggcgctcaacaagaaccagtgaagaaatccattcaggaatcagaagcttttttgcctcagagcatacctgaagagagatacaagatgaagagcaagcccctaggaatctgcctgataatcgattgcattggcaatgagacagagcttcttcgagacaccttcacttccctgggctatgaagtccagaaattcttgcatctcagtatgcatggtatatcccagattcttggccaatttgcctgtatgcccgagcaccgagactacgacagctttgtgtgtgtcctggtgagccgaggaggctcccagagtgtgtatggtgtggatcagactcactcagggctccccctgcatcacatcaggaggatgttcatgggagattcatgcccttatctagcagggaagccaaagatgttttttattcagaactatgtggtgtcagagggccagctggaggacagcagcttcttggaggtggatgggccagcgatgaagaatgtggaattcaaggctcagaagcgagggctgtgcacagttcaccgagaagctgacttcttctggagcctgtgtactgcggacatgtccctgctggagcagtctcacagctcaccgtccctgtacctgcagtgcctctcccagaaactgagacaagaaagaaaacgcccactcctggatcttcacattgaactcaatggctacatgtatgattctttagagcacactggcggccgttactagtggatccgagctcggtacca

SEQ ID NO: 112 - DNA, 1062 bp, Homo sapiens
atgtatccagaatcaacgacgggctccccggctcggctctcgctgcggcagacgggctcccccgggatgatctacaggaacctgggcaagtctggcctgcgggtctcctgcctgggacttggaacatgggtgaccttcggaggccagatcaccgatgagatggcagagcagctcatgaccttggcctatgataatggcatcaacctcttcgatacagcagaagtctacgcagccggcaaggctgaagtggtactgggaaacatcattaagaagaaaggatggaggcggtccagcctcgtcatcaccaccaagatcttctggggcggaaaggcggagacggagcggggcctgtccaggaagcacataatcgaaggtctgaaagcttccctggagcgactgcagctggagtacgtggatgtggtgtttgccaaccgcccggaccccaacaccccgatggaagagaccgtccgcgccatgacccacgtcatcaaccaggggatggccatgtactggggcacgtcacgctggagctccatggagatcatggaggcctactccgtggcccggcagttcaacctgaccccgcccatctgcgagcaggctgagtaccacatgttccagcgtgagaaagtggaggtgcagctgccggagctgttccacaagataggagtgggcgccatgacctggtcccctctggcctgtggcattgtttctggcaagtacgacagtggcatcccaccctactcaagagcctccttgaagggctaccagtggctgaaggacaagatcctcagtgaggagggccggcgccagcaagccaagctgaaggagctgcaggccatcgccgagcgcctgggctgcaccctgccccagctggccatagcctggtgcctgaggaatgagggagtcagctccgtgctcctgggggcctccaatgcggaccagctcatggagaacattggggcaatacaggtccttccgaaactgtcatcttccattatccacgagattgatagtattttgggcaataaaccctacagcaaaaaggactacagatcctaa

SEQ ID NO: 113 - DNA, 1062 bp, Homo sapiens; identical to SEQ ID NO: 112

SEQ ID NO: 114 - DNA, 993 bp, Homo sapiens
gggcgccggggccgcggccgggccggctccagggccggccgccgcggtggggcgcaggccgccgcgcgagtgaatcgaggcggcgggcccatccggaaccggccggccatcgcccgcggcgcggccggcggaggcggcaggaaccgaccggcgccctacagcaggccaaaacaacttcccgacaagtggcagcacgatcttttcgacagtggcttcggcggtggtgccggcgtggagacaggtgggaaactgctggtgtccaatctggattttggagtctcagacgccgatattcaggaactctttgctgaatttggaacgctgaagaaggcggctgtgcactatgatcgctctggtcgcagcttaggaacagcaaacgtgcactttgagcggaaggcagatgccctgaaggccatgaagcagtacaacggcttccctctggatggccgccccatgaacattcagcttgtcacgtcacagattgacgcacagcggaggcctgcacagagcgtaaacagaggtggcatgactagaaaccgtggcgctggaggttttggtggtggtggaggcacccggagaggcacccgcggaggcgcccgtggaagaggcagaggtgccggcaggaattcaaagcagcagctttcggcagaggagctggatgcccagctggacgcctataatgcgagaatggacaccagttaaacagaccagcaaatccgcgtgcggaacaggacccaggcgtctcctcttgctccctggttggggggcggtggctggggctgtgcgcccaatgatggatttgtttcttttatgttttaaaataggatttaaaaactcatgtaaaggttttttttttttcttttttttttttttaattctgaaacagacctgttttgtaccgagttatttttgggataaattttactggttgctgttgtggagaaggtggcgtttccaccggaattccaaaaaaaaaaaaaaaaaaaaaaaaaa

SEQ ID NO: 115 - DNA, 1426 bp, Homo sapiens
gtcactggaatgatggatcttaggggcccaggggtagcagagtgggaaaggctgcacccatgctctggagggtaggaggattgttatatgggactcacagcacaaacacgtgtggatgcagtgattgtcaaatgatccaagggcatgtcttgttgctcctattttttttttcctgtctgaatggaaaacagcaatttcctccattcctggttattgcagatgatctgataatttaacctgagagccgttatttcattttattttattttaaaactcaaaagaagtatactgttctcatcttaaacagtgagatgtctggtctttaatattactctttcttaacatacaataagctagcagtgtggtgatgacatgtagatacctcctaatgtgccataaaatcaaggcatgcattttaaaatgtttcgtgcccagaaatccaaacttttatagttgttgagcagccatcttcatatggtctgttctgaattcttaaaacctgcaggagctcatcagcctaacctggccccttccagctcatccccatgtcctattttgctatatttgagcataacaagattttatctcttcctttttaaaaattaattacctaataaatatgatcaaaaattgttaaataattttttaattacctaataaatgtgaccacaaatattaaataaaattatatagattaaaatgctgacgttctcttctcccccatcctattcccttgcctagaaggaacttctgtataaaaaacttgctgggtatccttttagaaattttatggtatattaatcttgtatacatatacaactgtgggtacctatacaactatgtatctctttcttttaatacacttcaaattcttgctatataccataatatacttaaccatatctccatgatggacatttaaattgtttggagtttttggctattacaagcaatattgcagtaaacctgtttgtataatttttctgcacatactcctgtagaattactagaagtgccatttctgaataaaaaattgactagtattaccaagttaccctataaaatgcctaatcagtttatattctaacagggtatgaaagtgcccatttctagccaacattagataccctcagtctcatacttaagtattttttttcccctaatcagttagatgaaaggtgatttttttaactaacaattttctgattgaattttctgattgttccgtagcatttttttttcctaaggtattttagccatccttatttcttcttttcagaatggtatattcctgttgtatatccattttgatatcttaatgatttataaccctttataaaaatagaatgagtgctaatcctttgttatgtgtactacaaatacatatttttttccagtctgaaaaaaaaaaaaaaaaaaaaaaaaa

SEQ ID NO: 116 - DNA, 3579 bp, Homo sapiens
ctgaggcccacgcagggcctagggtgggaagatggcaggtgggggcggcgacctgagcaccaggaggctgaatgaatgtatttcaccagtagcaaatgagatgaaccatcttcctgcacacagccacgatttgcaaaggatgttcacggaagaccagggtgtagatgacaggctgctctatgacattgtattcaagcacttcaaaagaaataaggtggagatttcaaatgcaataaaaaagacatttccattcctcgagggcctccgtgatcgtgatctcatcacaaataaaatgtttgaagattctcaagattcttgtagaaacctggtccctgtacagagagtggtgtacaatgttcttagtgaactggagaagacatttaacctgccagttctggaagcactgttcagcgatgtcaacatgcaggaataccccgatttaattcacatttataaaggctttgaaaatgtaatccatgacaaattgcctctccaagaaagtgaagaagaagagagggaggagaggtctggcctccaactaagtcttgaacaaggaactggtgaaaactcttttcgaagcctgacttggccaccttcgggttccccatctcatgctggtacaaccccacctgaaaatggactctcagagcacccctgtgaaacagaacagataaatgcaaagagaaaagatacaaccagtgacaaagatgattcgctaggaagccaacaaacaaatgaacaatgtgctcaaaaggctgagccaacagagtcctgcgaacaaattgctgtccaagtgaataatggggatgctggaagggagatgccctgcccgttgccctgtgatgaagaaagcccagaggcagagctacacaaccatggaatccaaattaattcctgttctgtgcgactggtggatataaaaaaggaaaagccattttctaattcaaaagttgagtgccaagcccaagcaagaactcatcataaccaggcatctgacataatagtcatcagcagtgaggactctgaaggatccactgacgttgatgagcccttagaagtcttcatctcagcaccgagaagtgagcctgtgatcaataatgacaaccctttagaatcaaatgatgaaaaggagggccaagaagccacttgctcacgaccccagattgtaccagagcccatggatttcagaaaattatctacattcagagaaagttttaagaaaagagtgataggacaagaccacgacttttcagaatccagtgaggaggaggcgcccgcagaagcctcaagcggggcactgagaagcaagcatggtgagaaggctcctatgacttctagaagtacatctacttggagaatacccagcaggaagagacgtttcagcagtagtgacttttcagacctgagtaatggagaagagcttcaggaaacctgcagctcatccctaagaagagggtcaggatcacagccacaagaacctgaaaataagaagtgctcctgtgtcatgtgttttccaaaaggtgtgccaagaagccaagaagcaaggactgaaagtagtcaagcatctgacatgatggataccatggatgttgaaaacaattctactttggaaaaacacagtgggaaaagaagaaaaaagagaaggcatagatctaaagtaaatggtctccaaagagggagaaagaaagacagacctagaaaacatttaactctgaataacaaagtccaaaagaaaagatggcaacaaagaggaagaaaagccaacactagacctttgaaaagaagaagaaaaagaggtccaagaattcccaaagatgaaaatattaattttaaacaatctgaacttcctgtgacctgtggtgaggtgaagggcactctatataaggagcgattcaaacaaggaacctcaaagaagtgtatacagagtgaggataaaaagtggttcactcccagggaatttgaaattgaaggagaccgcggagcatccaagaactggaagctaagtatacgctgcggtggatataccctgaaagtcctgatggagaacaaatttctgccagaaccaccaagcacaagaaaaaagagaatactggaatctcacaacaataccttagttgacccttgtgaggagcataagaagaagaacccagatgcttcagtcaagttctcagagtttttaaagaagtgctcagagacatggaagaccatttttgctaaagagaaaggaaaatttgaagatatggcaaaggcggacaaggcccattatgaaagagaaatgaaaacctatatccctcctaaaggggagaaaaaaaagaagttcaaggatcccaatgcacccaagaggcctcctttggcctttttcctgttctgctctgagtatcgcccaaaaatcaaaggagaacatcctggcctgtccattgatgatgttgtgaagaaactggcagggatgtggaataacaccgctgcagctgacaagcagttttatgaaaagaaggctgcaaagctgaaggaaaaatacaaaaaggatattgctgcatatcgagctaaaggaaagcctaattcagcaaaaaagagagttgtcaaggctgaaaaaagcaagaaaaagaaggaagaggaagaagatgaagaggatgaacaagaggaggaaaatgaagaagatgatgataaataagttgcttctagtgcagtttttttcttgtctataaagcatttaagctgcctgtacacaactcactccttttaaagaaaaaaacttcaacgtaagactgtgtaagatttgtttttaaaccgtacactgtgtttttttgtatagttaaccactaccgaatgtgtcttcagatagccctgtcctggtggtatttagccactaacctttgcctggtacagtatgggggttgtaaattggcatggaaatttaaagcaggttcttgttagtgcacagcacaaattagttgtataggaggatggtagttttttcaccttcagttgtctctgatgtagcttatacaaaacatttgttgttctgttaactgaatgccactctgtaattgcaaaaaaaaaaaacagttgcagctgttttgttgacattctgaatgcttctaagtaaatacaatttttaaaaaaccgtatgagggaactgtgtagacaaggtaccaggtcagtcttcttccatgttctattagctccacaaagccaatctcaatccctcaaaacaatcttgtcatacttgaaaatatgacactctagtcaaagccttggtaaaataatcagtgtttccaatctgtcctgttacaaaagaaacagattattattgaacttatgcaaataaccattgtcataagaatgtttatgaatagtttccaaattatggcaaattcatgtagagagagaaaagtaactgttttggttttgctcacaaaagtctactttacctaagggctgtcagatataagtaacttaaaagaaagagaagttttcttgacttttgaaaacaaaatatgaaaagaatcggcaatgtttcaaacaaaaagtcataaaagtcactttattcctccatcaaaaaaaaaaaaaaaaaaaaaa

SEQ ID NO: 117 - DNA, 1501 bp, Homo sapiens
ctgtgaatgtggttcgctattggattcatcatgggataaacaaaagaactcttgtaatgcagaatcattggggacttccatgccatcagaaactggtgttagtgcttgtgtctctttttctccaactagtctttgttgtgatccatctgtgtactcactggtgacctttcctctccaagaagggggacctggagtcagcccgtcacacctggtttcctctctgctagggtccctcctcccacagagcactggagggcagctgaggaggagctaccttaaaaaaggaggtgtgtgccagggagctgggtaggagcctggctatatatctgcccagcagcggtactctcgggacagagatggcactgatgcaggaactgtatagcacaccagcctccaggctggactccttcgtggctcagtggctgcagcccaccggagtggaaggaagaggtgctagacgctgtgcgaccgtggaggagtttctgaggcaggagcatttccaggggaagcgtgggctggaccaggatgtgcgggtgctgaaggtagtcaaggtgggctccttcgggaatggcacggttctcaggagcaccagagaggtggagctggtggcgtttctgacgtgtttccacagctttccaggaggcagccaagcatcacaaagatgttctgaggctgatatggaaaaccatgtgcaaagccaggacctgctggacctcgggctcgaggacctgaggatggagcagagagtccccgatgctctcgtcttcaccatccagaccagggggactgcggagcccatcacggtcaccattgtgcctgcctacagagccctggggccttctcttcccaactcccagccaccccctgaggtctatgtgagcctgatcaaggcctgcggtggtcctggaaatttctgcccatccttcagcgagctgcagagaaatttcgtgaaacatcggccaactaagctgaagagcctcctgcgcctggtgaaacactggtaccagcaggcccatcatcctggatccggccgaccccaccctcaacgtggcagaagggtacagatgggacatcgttgctcagagggcctcccagtgcctgaaacaggactgttgctatgacaacagggagaaccccatctccagctggaacgtgaagagggcacgagacatccacttgacagtggagcagaggggttacccagatttcaacctcatcgtgaacccttatgagcccataaggaaggttaaagagaaaatccggagaccaggggctactctggcctgcagcgtctgtccttccaggttcctggcagtgagaggcagcttctcagcagcaggtgctccttagccaaatatgggatctttctcccacactcacatctatctgctggagaccatcccctccgagatccaggtcttcgtgaagaatcctgatggtgggagctacgcctatgccatcaaccccaacagcttcatcctgggtctgaagcagcagattg

SEQ ID NO: 118 - DNA, 1890 bp, Homo sapiens
ccggagcagctgctgccagcccgcgggcactgaagtcctcccggctgccgctcgagtagccacgggcgcgatcgggaccagaagtctcctcctccatgatcactttggaagccgggggaagactttgccctgccctgagagctggtctgcgtttcccaggcgcggcggcggcggagcagcagctgcagcagccgagtccaaataggagcggccacagccaggggcgtgtgcgccccgcgcggagcgagctcgggttcccctcggaatgtccccggggcgcccggcgcgctgaccccgaagccgcctccgccttcggcgcctgctgcctccctcggccaggcttgttgttcgggactgtgagcttcctggctcctgggcagtggggaagcccccgggggcgagtgacctcagctggccacgacccagccctcccccgtgcgtatctcgcttaagatggcagcggagtcaggggaactaatcggggcttgtgagttcatgaaagatcggttatattttgctactttaaggaatagaccaaaaagcacagtaaatacccactatttctccatcgatgaggagctggtctatgaaaatttctatgcagattttggaccgctgaacttggcaatggtgtacagatattgctgcaaactaaacaagaaactaaaatcatacagtttgtcaagaaagaaaatagtgcactacacctgttttgaccaacggaaaagagcaaatgcagcatttttgataggtgcctatgcagtaatctatttaaagaagacaccagaagaagcctacagagcactcctgtctggctcaaaccccccctatcttccattcagggatgcttcctttggaaattgcacttacaatctcaccattctcgactgtttgcagggaatcagaaagggattacaacatggattttttgactttgagacatttgatgtggatgaatatgaacattatgagcgagttgaaaatggtgacttcaactggattgttccaggaaaatttttagcatttagtggaccacatcctaaaagcaaaattgagaatggttatcctcttcacgcccctgaagcctactttccttatttcaaaaagcataatgtgactgcagttgtgaggctaaacaaaaagatttatgaggcaaagcgcttcacagacgctggcttcgagcactatgacctcttcttcatagatggcagcacacccagtgacaacatcgtgcgaaggttcctgaacatctgtgagaacaccgaaggggccatcgccgttcactgcaaagctggtcttggaagaacagggacattgatagcctgttatgtaatgaaacactacaggtttacacatgctgaaataattgcttggattagaatatgccggccaggctctattataggaccccagcagcacttcctggaagaaaaacaagcatcgttgtgggtccaaggagacattttccgatccaaactgaaaaatcgaccatccagtgaaggaagtattaataaaattctttctggcctagatgatatgtctattggtggaaatctttcaaaaacacaaaacatggaacgatttggagaggtaagttttccctaggagattctatcttcttaaaactgatgttctgcatttgtttctcagttggacctatataacatagcagtgtcttttctctggatgccacgagtaccaagtttttagaagtagagccatccgtctatatagcaagaagcagaggaaagaaaccaattgcccttaaaaaaaaaaagctataatttaaggagtaaattataaaggaggctactctggtaaggggtaatatttatagaaaggaaacagaaaagcaaactttctatttgaaaaaaaaaaaaaaaaaaaaaa

SEQ ID NO: 119 - DNA, 1405 bp, Homo sapiens
ctttgcccgaagcccggggacgaaccgacggaccgaccgcctggcgcacggacgcgggcgctcgctttgtgttcggggctagcgtcggcgaggcttgagcttgcagcgcgcggcttccctgctttctcgcggccaccccggctccggcggcctcggcgcgcgaggggctggaggtgcgggagccgctctccgccggtcggtccccgcgcggctgagcccaggccgccagcgccgcggccccgtgcggtgtccctgagctcctgctccccgccgggctgctccgagcaacggtgcttcggagctccaaactcgggctgccggggcaagtgtcttcatgaacccagaggatgtccgggaagcactacaagggtcctgaagtcagttgttgcatcaaatacttcatatttggcttcaatgtcatattttggtttttgggaataacatttcttggaattggactgtgggcatggaatgaaaaaggagttctgtccaacatctcttccatcaccgatctcggcggctttgacccagtttggctcttccttgtggtgggaggagtgatgttcattttgggatttgcagggtgcattggagcgctacgggaaaacactttccttctcaagtttttttctgtgttcctgggaattattttcttcctggagctcactgccggagttctagcatttgttttcaaagactggatcaaagaccagctgtatttctttataaacaacaacatcagagcatatcgggatgacattgatttgcaaaacctcatagacttcacccaggaatattggcagtgctgtggggcttttggagctgatgattggaacctaaatatttacttcaattgcacagattccaatgcaagtcgagagcgatgtggcgttccattctcctgctgcactaaagatcccgcagaagatgtcatcaacactcagtgtggctatgatgccaggcaaaaaccagaagttgaccagcagattgtaatctacacgaaaggctgtgtgccccagtttgagaagtggttgcaggacaatttaaccatcgttgctggtattttcataggcattgcattgctgcagatatttgggatatgcctggcccagaatttggttagcgatatcgaagctgtcagggcgagctggtagaccccctgcaaccgctgctgcaagacactggacagacccagctttcgggaccctcccgcgtgccgaactgatcttcgagctgcatggacctaatcacagatgcagcctgcagtctcgcctaatggagctgccattaggggagtgtaaaactgggaaatgctgctcactgacagaattaaaaaaaaaataaccagtatgaaagtcgttgcgccgtgaatctctactgtagccatgaatttatggacagttag

SEQ ID NO: 120 - DNA, 3197 bp, Homo sapiens
ccagcacggacatggcctcgcgcggcgcccgcccgggcccgagtcccccgcgccccgctttgtagccccccggcggagaggcggcctcgacggtgcggacggcgcagacggccgggcgggcggcatggaggcggcgcatctgctcccggccgccgacgtgctgcgccacttctcggtgacagccgagggcggcctgagcccggcgcaggtgaccggcgcgcgggagcgctacggccccaacgagctcccgagtgaggaagggaagtccctgtgggagctggtgctggaacagtttgaggacctcctggtgcgcatcctgctgctggctgcccttgtctcctttgtcctggcctggttcgaggagggcgaggagaccacgaccgccttcgtggagcccctggtcatcatgctgatcctcgtggccaacgccattgtgggcgtgtggcaggaacgcaacgccgagagtgccatcgaggccctgaaggagtatgagcctgagatgggcaaggtgatccgctcggaccgcaagggcgtgcagaggatccgtgcccgggacatcgtcccaggggacattgtagaagtggcagtgggggacaaagtgcctgctgacctccgcctcatcgagatcaagtccaccacgctgcgagtggaccagtccatcctgacgggtgaatctgtgtccgtgaccaagcacacagaggccatcccagaccccagagctgtgaaccaggacaagaagaacatgctgttttctggcaccaatatcacatcgggcaaagcggtgggtgtggccgtggccaccggcctgcacacggagctgggcaagatccggagccagatggcggcagtcgagcccgagcggacgccgctgcagcgcaagctggacgagtttggacggcagctgtcccacgccatctctgtgatctgcgtggccgtgtgggtcatcaacatcggccacttcgccgacccggcccacggtggctcctggctgcgtggcgctgtctactacttcaagatcgccgtggccctggcggtggcggccatccccgagggcctcccggctgtcatcactacatgcctggcactgggcacgcggcgcatggcacgcaagaacgccatcgtgcgaagcctgccgtccgtggagaccctgggctgcacctcagtcatctgctccgacaagacgggcacgctcaccaccaatcagatgtctgtctgccggatgttcgtggtagccgaggccgatgcgggctcctgccttttgcacgagttcaccatctcgggtaccacgtatacccccgagggcgaagtgcggcagggggatcagcctgtgcgctgcggccagttcgacgggctggtggagctggcgaccatctgcgccctgtgcaacgactcggctctggactacaacgaggccaagggtgtgtatgagaaggtgggagaggccacggagacagctctgacttgcctggtggagaagatgaacgtgttcgacaccgacctgcaggctctgtcccgggtggagcgagctggcgcctgtaacacggtcatcaagcagctgatgcggaaggagttcaccctggagttctcccgagaccggaaatccatgtccgtgtactgcacgcccacccgccctcaccctactggccagggcagcaagatgtttgtgaagggggctcctgagagtgtgatcgagcgctgtagctcagtccgcgtggggagccgcacagcacccctgacccccacctccagggagcagatcctggcaaagatccgggattggggctcaggctcagacacgctgcgctgcctggcactggccacccgggacgcgcccccaaggaaggaggacatggagctggacgactgcagcaagtttgtgcagtacgagacggacctgaccttcgtgggctgcgtaggcatgctggacccgccgcgacctgaggtggctgcctgcatcacacgctgctaccaggcgggcatccgcgtggtcatgatcacgggggataacaaaggcactgccgtggccatctgccgcaggcttggcatctttggggacacggaagacgtggcgggcaaggcctacacgggccgcgagtttgatgacctcagccccgagcagcagcgccaggcctgccgcaccacccgctgcttcgcccgcgtggagcccgcacacaagtcccgcatcgtggagaacctgcagtcctttaacgagatcactgctatgactggcgatggagtgaacgacgcaccagccctgaagaaagcagagatcggcatcgccatgggctcaggcacggccgtggccaagtcggcggcagagatggtgctgtcagatgacaactttgcctccatcgtggctgcggtggaggagggccgggccatctacagcaacatgaagcaattcatccgctacctcatctcctccaatgttggcgaggtcgtctgcatcttcctcacggcaattctgggcctgcccgaagccctgatccctgtgcagctgctctgggtgaacctggtgacagacggcctacctgccacggctctgggcttcaacccgccagacctggacatcatggagaagctgccccggagcccccgagaagccctcatcagtggctggctcttcttccgatacctggctatcggagtgtacgtaggcctggccacagtggctgccgccacctggtggtttgtgtatgacgccgagggacctcacatcaacttctaccagctgaggaacttcctgaagtgctccgaagacaacccgctctttgccggcatcgactgtgaggtgttcgagtcacgcttccccaccaccatggccttgtccgtgctcgtgaccattgaaatgtgcaatgccctcaacagcgtctcggagaaccagtcgctgctgcggatgccgccctggatgaacccctggctgctggtggctgtggccatgtccatggccctgcacttcctcatcctgctcgtgccgcccctgcctctcattttccaggtgaccccactgagcgggcgccagtgggtggtggtgctccagatatctctgcctgtcatcctgctggatgaggccctcaagtacctgtcccggaaccacatgcacgaaatgagccagaagtgagcgctgggaacagagtggagtctccggtgtgtacctcagactgatggtgcccatgtgttcgcctccgccccccacc

SEQ ID NO: 121 - DNA, 1894 bp, Homo sapiens
aaaatacttcttgcacttaaacactgcacatgccgtactttgaggttagtctgaatcttgaactttaataccaaattaattttgaatgcttttgtttcctaagagataatggcatggtttcatatgttatactttggacagacagagttttaaaaatggaattattttttctttcatgcctcttgtaatgttctgaacaaacttgaatgatgaaagtattaaagagatatcagtatttgaggtttgtattttcttctgtctctggggaggatttctcagtggtggtgggagcccagtcttggagtgaaagtgacacctgctgtccataattcagcaagctcaagtcttctccatgggactggggtcgggcagcctctttattctgcagttgctcttgtggggctgtgcctgtggaggaagaaaatgggaagaaagagaaaaaggtacacaaaggaaagaaaactatcatctatctgtggtggaggaacagtccagtgacccaagtgccctccagcaggcgaggttttgaatctgttctctggtgcctggtattccttcagtgtgtaaaggtgcttagtgcgtgctttgctttcttggcttttctgtccccatctgtctgaaagcagacttgccatctctcattctgttgattgttctgtgcagtactctcctttttggaaaaactccagggtatgcttgggaaggaaaaaaatttttttccttaccaaccaacgctgtgttgttgagtaaacactgatctctacccacacagacaacaggaatccagctttctgcagccccacagcctagacagcagcaacctggggagttgtttgttagcaaccattgcacagaaggacgcagcacacgttcctgagtgcaggggtgttactcttagaaaagcgtcttgtagtcgaaagagaggaacttccccactggttaataagtaaagcctgttgaaatttacatgtcaattacctttcatagtcatggtccgaaaacagctagaacagctgtaaatctggtacattttccttccctcctcatctacacgcacccacatcttcacacacactcatgcccctctttcacacgcagtttgctgcacacagtgggatttagcagatagaatgcattctcttgtcctgtgtagtccaataagacatttactgaacacctggtactatctatgctaaatgctctgaatagctctctaggtgcaaagagaagagtaaggcatggtcccagatcagtggaacttaggttttaagaatgttcacttactatacattctgtgacgaagcctaaaataaacttagcctaccatctctataggttttataaaatttgcaaaagtaatcctttctcagtaaattcaagtaatggaaatgtatatgaaaaaagtaaacttctttgttcttcaccagtcccactgcgtggagctaactgccataaacagtttgctttatatggtcccaggtttttccattcctggatgatgatgtagctatataaatagatttagaagaacaaagacaggatggtactgacataggattttgtaacgtgcttctccaaacgaacaaaatggatctctttgcatttcagcacttacagatttgcctcattctatttagaggcagaatattgcattggatgcatgtcatcatggactcggtacttctatttatggacaggaggttttttttcccagtttgctgctattacaaacaatgccacaatgaatgatctgaaacataaaactttgcgttgtgtggtagcattttggggaatagattcctggaagtgcaatttcaagatccaatagtgggaatatttttaaaatttgaataaatatagccacatttccttttgtaaaaaaaaaaaaaaaaaa

SEQ ID NO: 122 - DNA, 1608 bp, Homo sapiens
tccgttgctctgcttgagccagtcctatgtagaaagtggcaaattacacattttttctccccttttagtctctggtggacatcttgtctgtgtcacagtttgatactaccaaattgaaaggattcttcactgcttcagatggggagggtgacagaagctgagctgtttcctgggtcagataatggcctctgtcaaagcaaagaatagttgtagagacacaaactgggcccttgaagctgtgactaacattttggcaacatgcatccctttgccaaataacttcttttcttcttgagtgtgattgttgatctccttctcaaagtaggctcttgttgctactattcttcacacaactcccaagcaaaagttggcagagttccggttgactgactgtgtcttgagggatatgccccggattagagtggatggggcgttccatgtcaaaatgaggttcattggcagatcctgagagctgctttgcaaagaaatagaggcagtactctttactgaatgttcttgcggtcctttatctttcttctaaattcaagtctgttcttattcatctagtgattaaatgcagaatcattgcctttgcctagcttcgtgggcattgtggaagagaagacagtatttccaactttttttttttttttcttttctcacaagccattgagcctgaggaactacaggctaaatttatgagcatttcttgatatctacagagggctactaaaaaaaaaatgctgaatagacctttatggggaacaacaatgttaataggaaaaaaaggtgatatgtttgctaatgtctatgtcagtcttaactctctttaagattttggctcattttggcttaagagcctgcagaagtatgtaagttatcaaataggggagccaggaattggtttcttccttgccatttaagcttggcaaagttagagcaatttggaatggctatccaacaatgtgttctacttagtaaatactctcttgtttttcaggggatagttagctaaaggtagggttatctccaatatgttttgggatggatcgtgaagatcattccctttttattttgagacaggatctctctctcttgcccaggctggagtgtggcggcgtgatctgtagcctcgacctccccaggctcaggctcaggtgttcttcccacttcagcctcctgtgtagctgggactgcaggcgcacgccactatgcctcactaatttttattttttgtagagatggggtttcgccatgttgcccagcctggtcttgaacttttgccggcctcccaaagtgctgggattataggtgtgagccaccaggctcagccattataattgattttcaaaaaaaatttagtttcttaagcttcatggattcaaattgagtgccatttggattttgaggcccctcagtggaaataatttgtttttagcaagtaattatgatatttctaaagtgcaaattcactgacctactttctgtgcttctggaaatgctgaatcgaataatctttttttttcctcccaataatccctctgactgtgaaaacattctccatatgtattcagattgggatagttggtaaaaaaaaaaaaaaaaaaa

SEQ ID NO: 123 - DNA, 1577 bp, Homo sapiens
ggcggagagggccggccgccggcacattcctgtggaggccgcagcgggtgcggcgccgacgggaggagcagcgagcgagcgacgaacgccgagccgagcctcccgccgtcgccatgggccagaacgacctgatgggcacggccgaggacttcgccgaccagttcctccgtgtcacaaagcagtacctgccccacgtggcgcgcctctgtctgatcagcaccttcctggaggacggcatccgtatgtggttccagtggagcgagcagcgcgactacatcgacaccacctggaactgcggctacctgctggcctcgtccttcgtcttcctcaacttgctgggacagctgactggctgcgtcctggtgttgagcaggaacttcgtgcagtacgcctgcttcgggctctttggaatcatagctctgcagacgattgcctacagcattttatgggacttgaagtttttgatgaggaacctggccctgggaggaggcctgttgctgctcctagcagaatcccgttctgaagggaagagcatgtttgcgggcgtccccaccatgcgtgagagctcccccaaacagtacatgcagctcggaggcagggtcttgctggttctgatgttcatgaccctccttcactttgacgccagcttcttttctattgtccagaacatcgtgggcacagctctgatgattttagtggccattggttttaaaaccaagctggctgctttgactcttgttgtgtggctctttgccatcaacgtatatttcaacgccttctggaccattccagtctacaagcccatgcatgacttcctgaaatacgacttcttccagaccatgtcggtgattgggggcttgctcctggtggtggccctgggccctgggggtgtctccatggatgagaagaagaaggagtggtaacagtcacagatccctacctgcctggctaagacccgtggccgtcaaggactggttcggggtggattcaacaaaactgccagcttttatgtatcctcttcccttcccctcccttggtaaaggcacagatgttttgagaactttatttgcagagacacctgagaatcgatggctcagtctgctctggagccacagtctggcgtctgacccttcagtgcaggccagcctggcagctggaagcctcccccacgccgaggctttggagtgaacagcccgcttggctgtggcatctcagtcctatttttgagtttttttgtgggggtacaggagggggccttcaagctgtactgtgagcagacgcattggtattatcattcaaagcagtctccctcttatttgtaagtttacatttttagcggaaactactaaattattttgggtggttcagccaaacctcaaaacagttaatctccctggtttaaaatcacaccagtggctttgatgttgtttctgccccgcattgtattttataggaatactgaaaacatttagggacacccaaagaatgatgcagtattaaaggggtggtagaagctgctgtttatgataaaagtcatcggtcagaaaaaaaaaaaaaaaaaaaaaaaaaaaaaaaaa

SEQ ID NO: 124 - DNA, 603 bp, Homo sapiens
gaaatttatttccatgtaattattttgctttcaatttatggaaacacagaccatgtagcaaaagtgccttaaaaatagcattgttgttcaagtagcattttcttccattgtctctgctatgtcttagggacacagatgagggaaacattgtctcagcctgaaagagccatgtctgctttctttgtcacaactatctggggatgcgacatgctaccttcagtgacaatggttccttagggcagtgattgtatgtgtgtgtgtaagtgcctttgtgtgtttgtgtgtgtgggagaatggaaacgaccctagggcaaaatatcaaagtgaagggaagagtaattggagaagattaaatttgccaaaagcctctcagaaaatcactgttatctgggttccttataggattattaaagaggagaaaaataggcctttcatagataagtgaaaaaacaaatagcatttgtgaaaagaacccattttcattcataagcaatatagccaaatgtatttaaattaactctatatgaaaagttttatcattattactttcttatgaatttatttgaatctgaaataaatgtcagcccttgattaaaaaaaaaa

SEQ ID NO: 125 - DNA, 1286 bp, Homo sapiens
agactcataaagtataagcttttagtgtctgaactttgtatctattttgaatgtacagaagcctttttgttggcttgtttctcatgtaatcctttcaagaattaaataagaattgtacttgagtcatttctgaataaaaaatgcattatatacctgtcaaaagccaggtgacaagaggtgacaagtagttacttaaaggtaacgactaaaactttggaaaaatatcagtattacagaaaatacagacaagttacataagtattttcatgtaagaagccaagtgtctgaatataaattattttccaactttggtttctctgatatttagttcacactcacttaatcaagttctcatttagatgtacttaaaaatctgatgaataacaatgagaagatatcataaatagcactatatgatcatttaataatattttatcaagaaatgacaatctcctgagtattcaaaaacataaatctttgcttttcaactttaagtatctgtcagccttccaaatactgaatagctaacagcataatgtggtcaaactaaagtgaaagagaataatattcaaatatctctcttatttaaaacacacaatacacataaaataatatgtctggctatctgcaaatatcttactaaaaaataaaaacccttaaccttttattttaatatagtttaatgaattatgttgagattgtagccttgggaaattttctcttgatggaaaaatattaaagcatttataaaaataaaatcccaacacagcaatgaacataagcaacatttaacacactaatctactggaaaaatattttttaagtcacatgaatatgtaaaagtcaagcagatattatgaatataggcaaacaaattttggtttatcaaatggataaaaaaaattttataaaaatgggctctctattggaaagtcccaactctacttcccaataaatccaatttgtaaagatagcaagaaaacttcaataataactttggtgacaataaaaaaagaactatatgaccatttggatatagtagaaaccaaaaggaatattctataatgaaaaacaaggagttagaaatgcagtataagttacggggctctgtaggaaagagaaccatggatattaaaattaagagcggggccaggcatggtggctcatgcctgtaatcccagcactttggaaggccgaggtgggcggatcacctgaggccaggagtttgagaccggcctggccaacatggtgaaaccccgtctctaccaaaaaaaaaaaaaaaaaaa

SEQ ID NO: 126 - DNA, 1198 bp, Homo sapiens
cccacgcgtccgcggacgcgtgggcgcgcgggagctgggaggctgcgagatccctaccgcagtagccgcctctgccgccgcggacttcccgaacctcttcagccgcccggagccgctcccggagcccggccgtagaggctgcaatcgcagcgggagcccgcagcccgcgccccgagcccgccgccgcccttcgaggggccccaggccgcgccatggtgaaggtgacgttcaactccgctctggcccagaaggaggccaagaaggacgagcccaagagcggcgaggaggcgctcatcatcccccccgacgccgtcgcggtggactgcaaggacccagatgatgtggtaccagttggccaaagaagagcctggtgttggtgcatgtgctttggactagcatttatgcttgcaggtgttattctaggaggagcatacttgtacaaatattttgcacttcaaccagatgacgtgtactactgtggaataaagtacatcaaagatgatgtcatcttaaatgagccctctgcagatgccccagctgctctctaccagacaattgaagaaaatattaaaatctttgaagaagaagaagttgaatttatcagtgtgcctgtcccagagtttgcagatagtgatcctgccaacattgttcatgactttaacaagaaacttacagcctatttagatcttaacctggataagtgctatgtgatccctctgaacacttccattgttatgccacccagaaacctactggagttacttattaacatcaaggctggaacctatttgcctcagtcctatctgattcatgagcacatggttattactgatcgcattgaaaacattgatcacctgggtttctttatttatcgactgtgtcatgacaaggaaacttacaaactgcaacgcagagaaactattaaaggtattcagaaacgtgaagccagcaattgtttcgcaattcggcattttgaaaacaaatttgccgtggaaactttaatttgttcttgaacagtcaagaaaaacattattgaggaaaattaatatcacagcataaccccaccctttacattttgtgcagtgattattttttaaagtcttctttcatgtaagtagcaaacagggctttactatcttttcatctcattaattcaattaaaaccattaccttaaaaaaaaaaaaaaaaaaaaaaaaa

SEQ ID NO: 127 - DNA, 484 bp, Homo sapiens
ccgttcgctccggacaccatggacaagttttggtggcacgcagcctggggactctgcctcgtgccgctgagcctggcgcagatcgatttgaatataacctgccgctttgcaggtgtattccacgtggagaaaaatggtcgctacagcatctctcggacggaggccgctgacctctgcaaggctttcaatagcaccttgcccacaatggcccagatggagaaagctctgagcatcggatttgagacctgcagtttgcattgcagtcaacagtcgaagaaggtgtgggcagaagaaaaagctagtgatcaacagtggcaatggagctgtggaggacagaaagccaagtggactcaacggagaggccagcaagtctcaggaaatggtgcatttggtgaacaaggagtcgtcagaaactccagaccagtttatgacagctgatgagacaaggaacctgcagaatgtggacatgaagattggggtgtaa

SEQ ID NO: 128 - DNA, 488 bp, Homo sapiens
cagactcagagagaacccaccatggtgctgtctcctgccgacaagaccaacgtcaaggccgcctggggtaaggtcggcgcgcacgctggcgagtatggtgcggaggccctggagaggatgttcctgtccttccccaccaccaagacctacttcccgcacttcgacctgagccacggctctgcccaggttaagggccacggcaagaaggtggccgacgcgctgaccaacgccgtggcgcacgtggacgacatgcccaacgcgctgtccgccctgagcgacctgcacgcgcacaagcttcgggtggacccggtcaacttcaagctcctaagccactgcctgctggtgaccctggccgcccacctccccgccgagttcacccctgcggtgcacgcctccctggacaagttcctggcttctgtgagcaccgtgctgacctccaaataccgttaagctggagcctcggtggccatgcttcttgccccttgggc

SEQ ID NO: 129 - DNA, 1528 bp, Homo sapiens
gaggcgccggcttcggagtgcgcccgccgccgcagcagcagcgctcctggaggaccccgccgtcccccggctcaccgctgcccttcctgctgctgagctacccgagcggcggcggcggcagcagcggcagggcaagcaccatcctaattatctcatggctaatgaacgcatgaacctcatgaacatggccaagctgagtatcaagggcttgattgaatcagctctgaacctggggaggactcttgactctgactatgcacctctccagcaattctttgtggtgatggagcactgtctgaaacatggcttgaaagctaaaaaaacttttctcggacaaaataaatccttctgggggcctctagaactggtagaaaagcttgttccagaagccgcagagataacagcaagtgttagagatcttccaggacttaagacaccagtaggtagaggaagagcctggcttcgtttggcattaatgcaaaagaaactttcagaatatatgaaagctttgatcaataagaaagaacttctcagtgaattctacgaacccaatgccctcatgatggaagaagaaggagccataattgctggtctgttggtgggtctgaatgtcattgatgccaatttctgtatgaaaggagaagacttggactctcaggttggagttatagatttttcaatgtatctcaaggacgggaacagcagtaaaggtactgaaggagacggtcagattactgcaattctggaccagaagaactatgtagaagaactgaacagacatttgaatgctactgtaaacaaccttcaggcaaaagtagatgcattagaaaaatccaacactaaactgacagaggagcttgcagttgcaaacaacaggatcattaccttacaagaagaaatggaacgagttaaagaggaaagttcctacatactggaatccaatcggaagggtcccaagcaagacagaactgcagaagggcaagcactaagtgaagcaagaragcatttaaaagaagagacacaattacgattggatgttgagaaagaactggagatgcagatcagcatgaggcaggagatggaattggctatgaagatgctggagaaggatgtctgtgagaagcaggatgccctggtatctcttcggcagcagctggatgacctcagagctctcaagcatgaacttgcctttaagctgcagagttcagacttaggagtaaaacagaaaagtgaactaaacagtcgcttggaagagaagactaatcagatggctgctaccattaaacaacttgaacaaaggtaaaagtcctgtttctttaatgaaacactttggattgtcagtgctgaagtgaaaagaatgtgctgtacattcggcaaatagaaaatacatgaaattcttccaaattagcatcagacattctggtagaaaaaagccagttgaatgttatgtgtgttttctaaggtatgactgaaatgtttttaggaaatgtcaatcacttgactagcctttaaaaaaaaaaaaaaaaaa

SEQ ID NO: 130 - DNA, 2365 bp, Homo sapiens
catcctgacatttcccttgtacctgctgaactttctgggcttgtggagctggatatgcaaaaaatggttcccctacttcttggtgaggttcactgtgatatacaacgaacagatggcaagcaagaagcgggagctcttcagtaacctgcaggagtttgcgggcccctccgggaaactctccctgctggaagtgggctgtggcacgggggccaacttcaagttctacccacctgggtgcagggtgacctgtattgaccccaaccccaactttgagaagtttttgatcaagagcattgcagagaaccgacacctgcagtttgagcgctttgtggtagctgccggggagaacatgcaccaggtggctgatggctctgtggatgtggtggtctgcaccctggtgctgtgctctgtgaagaaccaggagcggattctccgcgaggtgtgcagagtgctgagaccgggaggggctttctatttcatggagcatgtggcagctgagtgttcgacttggaattacttctggcaacaagtcctggatcctgcctggcaccttctgtttgatgggtgcaacctgaccagagagagctggaaggccctggagcgggccagcttctctaagctgaagctgcagcacatccaggccccactgtcctgggagttggtgcgccctcatatctatggatatgctgtgaaatagtgtgagctggcagttaagagctgaatggctcaaagaatttaaagcttcagttttacatttaaaatgctaagtgggagaagagaaaccttttttttggggggcggtttttttggtttgttgttggtttttttttttttttggcgggaagaaagagttttgctcttgttgcccaggctggagtgcagtgacgtgatctccgctcactgcaacctccacctcgcgggtttaagcgattcttctgcctcagcctccctagtagctgggattacaggtgcccaccaccatgcccagctaatttgtatttttagttgagacagggtttcactacgttggccaggctggtcttgaactcctgatctcaggcaatccacccgcctcagcctcccaaagtgctgggatgacaggcgtgagcaaccgcacccagcttaaggtttttttgttttgttttgagacggagttttcgctcttgttgcccaggctggagtgcaatgctgtgatctcagcttaccacaacctccacctcccgggttcaagtgattcacctgcctcagcctcctgagtagctggtattacaggcatgcgtcaccacgccggctaattttgtacttttagtagagatggtgtttccccacgttggtcagtctggtctcaaattcctgacctcaggtgatctgcctgcctcggcctcccaaagtgctgtgattacagacgtcagccaccatgcctggcctgaaaccttttttaggtaaagttgaattccatccttaaaagtttctgttatatcctatttagccattttctattgtctcccaaagaattcacatcaaaaaaacagctttgaactcccccttcaaaggaaacagtcgactttcataattagcatctaccattatccccaaatcttattttattcattgacttgaaattttttccaattgctttttttttttttttttaaggttaagagcagaggtttactaggccaaagaaagagaatagctctctgttgcagagaggggtcctggagaaatgggttaccccagttgtcttatttaaatggttacccatcagattttaattttatcttctctttgagagcttggtaataagaagcacttaaatcactccaaagaagactttaaaaagggagcagtgaaaaggtcttaataatttattgattgaattaagaaatactagctaattaagaatctgagtctaaacagcacagattttttctttctgcttttaaattgtgttttaaaaaaagagacagggggctgggcgtggtggctcacgcctgtaatcctagcactttgggaggccgaggcgggtggatcacgaggtaggagttaaagaccagcctggccaacatggcaaaaccctactaaagatacaaaaaaaaaaaaaaaaaaaaaaaaagtatatacacctaacaagagagccccaaaatgtatgaagcaaaaactgacagaactgaagggacaaatagacaattcaatagtaatatttggagacttcaatatcccactttcaataatgaataggacaactaagcaaaagattaacaagaacactgaagacctgaaaagcactataaacaaaactataagctaactagacagaacacacatctacagaacaaaaactccaaccaaaaaaaaaaaaaaa

SEQ ID NO: 131 - DNA, 1604 bp, Homo sapiens
ctaataaaaatagtttattattttgaatgatttaatggttttctacacaatttacatcacaacatgtaaattttagcagtaacatctgattctaacagcacatcatgctattcctttcatagagccttcagagattcaatgctaaacaaatttccttagttggcatcaaggcactgatcactttagaggcttttaagaaattatttaaagatgcaaatgcctctgagtgaagtgtactatcccatcactgaagcccacaggaacaagtcctacaattttaaaaaggctcgatggaaaaatttctcaatcctgaaatcccctagggaaggggtcaggagaaagtgccatggttgatatttaagaactccacagctcttaaaaataagcacttatccctaacatgcaatactgcagatgcaagttaaacttatctgttaacagctgcctgctgttttctgctcccagatgaaatgaagcaactcttctgataacgaagagatacctgtctgaggcaaacgaaacattggcacacagcacagcctcctcaatccacttgatcccaactcatctctcatttatttcggcttcttttattccaggattaatgtagtgtaacattttcatttcttttcgcttttattctgcttttgtaaaagcagtattttgagatggacattgcctcttcattgtatttctcatcaattcattatttttgtggttatagcttgacaagcaattaactttaaaatggtagattccgtaactttaaattggtagctttcatttgcttaaaattttttggcatatgcagataatgttctcatcagtagtaagaatctcagggttatgcttattccccaatggaggtatgacatataatcttttctgcctttacttatcaattcaccaaggagctgttttctctgcatctaggccatcatactgccaggctggttatgactcagaagatgttatctgaaaaaagtctatagaaaaaaaaaaggtttcccctccctcatcaacaaaagcccaccctctaagagacattcaagctgaactatcacaattcttaatcagttacaatttacaaacagataagtttaaaataaacaatttacaaaatttttgaagcataccttaacatcttgttttgcagttaaacaatggaaaagtatttctcctacactaaaaaaaaacttgcttacacacaactgaaaatagaatcttacttgataatacaaaagctaccatcagaagaaatcccttcaggatcattaagccacttcctttgctctgcagtttctatagtagttttaaattattattaaatcacctgaaaaaaattccaaaagagaaccacacactaccatatccaaacaacttttgcatttcccataattgtagttaatgtcagcccagtaggccagaccaacccccagttcaatactttccttccccaaaagctctatactttgaaggaaaacagatacagtatcaaattatgacactttccttgcccaaattaatgcactggtacacccagtggctcatatttaacttcccccagcttcccaattcaaactggggggaaaaaaactaaaaaa

SEQ ID NO: 132 - DNA, 988 bp, Homo sapiens
tcaacaagtgcgggcctggctcagcgcgggggggcgcggagaccgcgaggcgaccgggagcggctgggttcccggctgcgcgcccttcggccaggccgggagccgcgccagtcggagcccccggcccagcgtggtccgcctccctctcggcgtccacctgcccggagtactgccagcgggcatgaccgacccaccaggggcgccgccgccggcgctcgcaggccgcggatgaagaagaaaacccggcgccgctcgacccggagcgaggagttgacccggagcgaggagttgaccctgagtgaggaagcgacctggagtgaagaggcgacccagagtgaggaggcgacccagggcgaagagatgaatcggagccaggaggtgacccgggacgaggagtcgacccggagcgaggaggtgaccagggaggaaatggcggcagctgggctcaccgtgactgtcacccacagcaatgagaagcacgaccttcatgttacctcccagcagggcagcagtgaaccagttgtccaagacctggcccaggttgttgaagaggtcataggggttccacagtcttttcagaaactcatatttaagggaaaatctctgaaggaaatggaaacaccgttgtcagcacttggaatacaagatggttgccgggtcatgttaattgggaaaaagaacagtccacaggaagaggttgaactaaagaagttgaaacatttggagaagtctgtggagaagatagctgaccagctggaagagttgaataaagagcttactggaatccagcagggttttctgcccaaggatttgcaagctgaagctctctgcaaacttgataggagagtaaaagccacaatagagcagtttatgaagatcttggaggagattgacacactgatcctgccagaaaattttcctactctcacactggttctcaatgaaaaatagtgtctttgtgattttgagtaaagctcctatctgtttt

SEQ ID NO: 133 - DNA, 2659 bp, Homo sapiens
ggcccatgcaagtccaaaattcagcagggcagtcaaattttaaacctccaaaatgatcacctttgactccacgtctcacaatcatctctctcaagttcgaagttccacaaatctctaaggcaagggaaagatgctgccagtctctttgctaaaacacagcaagagtcacctttactccagttcccaaaaagtttttcatctccatctgagaccacctcagcctgaattttattgtcaatattgctatcagcattttgggcaaagccattcagcaagtatctaggaagttccaaactttcccacattttcctgtcttcttctgagcccttcaaactgttccaacctctgcctgttacccagttccaaacttgctttcatatttttggctatcttttcagcaatgccccactctactgttagcagtttactgtattagtctgttttcacactgctgataaagacattcctcaagattgtgaagaaaaagaggtttaattggacttacagttccacatggccggggaggcctcagaatcatggcgggaggtgaaaagcacttcgtacatggtggtggcaagagaaaatgaagaagaagcaaaagtggaaacccctgataaacccatcagatctcatgagacttactatcatgagaatagcacaggaaagactggcccccctgattcgatgacctccccctgggtccctcccacaacatgtgggaattccagaagataaattcaagttgcaatttcagtggggacatagccaaaccaggcgccaggtagctcctgcccttagcccaggaggccatccctgcagcggggccacgggcatcggaaaagccatcgtgaaggagctcctggagctggggagtaatgtggtcattgcatcccgtaagttggagagattgaagtctgcggcagatgaactgcaggccaacctacctcccacaaagcaggcacgagtcattcccatacaatgcaacatccggaatgaggaggaggtgaataatttggtcaaatctaccttagatacttttggtaagatcaatttcttggtgaacaatggaggaggccagtttctttcccctgctgaacacatcagttctaagggatggcacgctgtgcttgagaccaacctgacgggtaccttctacatgtgcaaagcagttgaccagctaatctggcttctgtgtctttttgaaatggctcagacctgtttctccaagaagacctagttccctttagtagtttacagctcctggatgaaagagcatggaggatctatcgtcaatatcattgtccctactaaagctggatttccattagctgtgcattctggagctgcaagagcaggtgtttacaacctcaccaaatctttagctttggaatgggcctgcagtggaatacggatcaattgtgttgcccctggagttatttattcccagactgctgtggagaactatggttcctggggacaaagcttctttgaagggtcttttcagaaaatccccgctaaacgaattggtgttcctgaggaggtctcctctgtggtctgcttcctactgtctcctgcagcttccttcatcactggacagtcggtggatgtggatgggggccggagtctctatactcactcgtatgaggtaccagatcatgacaactggcccaagggagcaggggacctttctgttgtcaaaaagatgaaggagacctttaaggagaaagctaagctctgagctgaggaaacaaggtgtcctccatcccccagtgccttcacatcttgaggatatgcttctgtactttttaaaagcttatagttggtatggaaaacatttttcttatttttaagtgttattaattatatctatggaaaaactattcctgaaatatatacagtcttatgtcccaatcagagtcttttaacctatgatttaaaaatgtataagtaacagaaattaacatattttaatgactttactttttatttctaagaaaagtatttgaaaaatggaataattttaaatcaatgataattctagggatcatgaactcccagaagattttattatttaattgtaaaggtagaggccagacgcagtggctcacgcctgtaattccagcactttgggaggccgaggtaggcgggtcagttgaggtcaggagttcaagaccaggctggccaacatggtaaaaccctgtctctactgaaaaacaacaaaaacaaaaacacaaattagtcgggtgtggtggcacacacctgtagtcccaggtacttgggaggctgaggcaggaggatcgcttgaacccaggaagcagaggttgcagtgagctgagatcatgctactgcagtccagcctgggctacagagtgagactgcatctcaaaaaaaacccaaaaaacaaaaacaaacaacaacaacaaaattataaaggtagaaaataaacctaaattgtgtcgtaattaagattattaaaattagaattatacaatgacttatttttggtggcaaatactttaggagcaataatgccttatggtaattattgatgtatagtttcttttgtttatgaagtcaaatttgtataaattctcttaattcaaagaaaaagttttatgtgatttaaaaaaaaaaaaaaaaaaaaaaaaaaaaaaaaaaa

SEQ ID NO: 134 - DNA, 1419 bp, Homo sapiens
gcagtttctatagtagttttaaattattattaaatcacctgaaaaaaattccaaaagagaaccacacactaccatatccaaacaacttttgcatttcccataattgtagttaatgtcagcccagtaggccagaccaacccccagttcaatactttccttccccaaaagctctatactttgaaggaaaacagatacagtatcaaattatgacactttccttgcccaaattaatgcactggtacacccagtggctcatatttaacttcccccagcttcccaattcaaactggggggaaaaaaactaaatcattgggagttacttgccaacttggaagttgatatttctttactttttccattctaagactttaagttctctggcatgagtttatctgcaatcataaactaaacaattacctaaacccaccccaccaatcccaaccgtaacaggccactgccaactaattgccaatatttgcccctcccctttaataaaacttttaagaagtcacattattggaaaacttaacttcaacatttggcctactcaagctcttctgaagttctcctgagatgactgaatatgaaccaaagctgcactgtgctgtacttttcagcttcaactgggaatactcttccaaggataaaagcagctccagtccctgaaggtgttcgtgccaacagcacagcggtacactccttctctaacccagtttgtcaatagtactatagcatctgtggaaaatcttagaaaaaaacattttctcccccaccctctctcttccctgttaagaccatcccaaaatgcttcaagtaaaaaataacaagtttaaggggttaagcacttttaaagtctgattaagggggtggggggaaaaaagagtaactaccagccatttctccaatggacatctcttccacagacctcaacgtgagaactgctctagtttctataaactgtaaacctgtggtggtctgattatcctgatattggattttcttgttttctgttacaccttgagtcatttgcctttaggattctagacagacctaagggaaaaagaactgaaaacatattttgcccccacccccacaaaaaaaaatactgaaaactcccccccgcctcagttacacatccaaactctacatttacaaaacgaattcagggtgaggaagtaaaaacaggtcatctattcacaaaactgaaatacttcattaccccaactaaacatacaaactgcttacagatttgctgaaattgtctcaatttggctatcaaattcatttggttttcctcaaattcgtgtaaaaaaaaaaaacccacaaacttgccatctactatttctccaggacttggcagtctgccctcaaaagcttcagacaagattcatgagtataagcctgaaaaaaaaaaaaaaa

SEQ ID NO: 135 - DNA, 1419 bp, Homo sapiens; identical to SEQ ID NO: 134

SEQ ID NO: 136 - DNA, 729 bp, Homo sapiens
ctaagtgcctctttgcatagcaccagtccccacccgcacgctctctggaccactacagctggacgggcaatggcgggtcggggaggcgcagcacgacccaatggaccagctgctgggaacaagatctgtcaatttaagctggttctgctgggggagtctgcggtaggcaaatccagcctcgtcctccgctttgtcaagggacagtttcacgagtaccaggagagcacaattggagcggccttcctcacacagactgtctgcctggatgacacaacagtcaagtttgagatctgggacacagctggacaggagcggtatcacagcctggcccccatgtactatcggggggcccaggctgccatcgtggtctatgacatcaccaacacagatacatttgcacgggccaagaactgggtgaaggagctacagaggcaggccagccccaacatcgtcattgcactcgcgggtaacaaggcagacctggccagcaagagagccgtggaattccaggaagcacaagcctatgcagacgacaacagtttgctgttcatggagacatcagcaaagactgcaatgaacgtgaacgaaatcttcatggcaatagctaagaagcttcccaagaacgagccccagaatgcaactggtgctccaggccgaaaccgaggtgtggacctccaggagaacaacccagccagccggagccagtgctgcagcaactgagcccccctt

SEQ ID NO: 137 - DNA, 1545 bp, Homo sapiens
cccatccacgccatcacaggggtgctgaagcagtggctgcgggagctgcccgagcccctcatgaccttcgcacagtacggcgacttcctccgagccgtcgagctgccggagaagcaggagcagctggctgccatctatgccgtcctggagcaccttccagaagccaaccacaactccctggagagactcatcttccaccttgtcaaggtggccctgctcgaggatgtcaaccgcatgtcacctggggcgctggccattatcttcgcaccctgcctcctgcgctgccctgacaactcggacccgctgaccagcatgaaggacgtcctcaagatcaccacgtgcgtggagatgctgatcaaggagcagatgaggaaatacaaagtgaagatggaggagatcagccaactggaggctgcagagagtatcgccttccgcaggctttcgctcctgcgacaaaatgctccatggcctctcaaactggggttttcgtctccctatgagggggtcctgaacaagagcccccaagtaccccgggacatccaggaggaggagctggaggtgctgctggaggaggaggcagccggcggcgatgaggaccgggaaaaggagattctcattgaacggatccagtccatcaaggaggagaaggaggacatcacctaccggctgccggagctggacccaaggggctcggacgaggagaacctggactcggagacgtcggccagcaccgagagcctgctggaggagcgggccgggcggggggcctcggaagggccccctgcgcctgctctcccttgccccggcgcgcccaccccgagccccctccccaccgtggccgcccctccacgacgaaggccgtcgtccttcgtaacggtcagagtgaagaccccccggcggacccccatcatgcccacggccaacatcaagctcccaccaggcctgccctcccacctgcctcgctgggcaccgggtgcccgggaggcggctgccccagtgcggcgccgggagccacctgcccgccgcccggaccagatacattccgtgtacatcacgcccggggcagacctgccagtgcagggcgccctggagcccctagaagaggatggccagccacctggggccaagcggaggtactcggatcccccaacgtactgcctgccccccgcctcgggccagaccaatggctgagagccacagctgacaaagtctgcatgtccgaggacggcccctgcactggagctgggcgccagagctgcagagctagtgttcggccctcagagaaggatccagaatcaaaagctcaagagtgacgtgaggtgggcaccggccccaagtgcagagtcaaggcagggagaggccggctggagccaggccccctcgcacgcagcccccaaatcatggacgcacctgtggggagcaccacatctccacctgcggcctcacatctccccactcccctttttgtacgtttaactgtttctttgtacgtggtttacgtaactttaaactgtaacagccttaaaaaaaaaaaaaaaaaaaaaa

SEQ ID NO: 138 - DNA, 2195 bp, Homo sapiens
gcgatggcaggttcgccgggtgtgaggcttcacagcggtccggtgaccaagtcgagatggtgagaacaagaccaagattggaaagccagcttcagaggagggaattacagcaaaaattgaaccattgacagaagagtctagcagtctcagaatgttctccaggattctgaaggcaaagaattctgtgaatttggggataaattaaatgaaaaagatcagaacgtctttaaaaggagacctcataactgtgacgaatatgggcaaagctttgtttggagtacaagcctttttaggcatcgaaaaacgcactgtgagaaaccttatgaatgggataagtgtggaaaggccactggggagaaaccttattcctgtaattggtgtattaaaagtttcagttggagctcagaccttattaaacaccaaagagtccacactggtgaaaaaccttataaatgtgatgagtgtgggaaagccttcagtcagagctcagatcttattatacatcagagaatccatataggagaaaaaccctatcaatgccgtcattgtagtaaaagttttagccagcgctcagatctggttaaacatcagagaatccatactggagagaagccttatacttgtaaccagtgtaacaaacattttagtcagagttctgatgtgataaaacatcaaagaatccacactggggagaaaccatataaatgtgatgtgtgtgggaaagccttcagtcagagctcagatcttattctgcatcagagaatccatactggggagaaaccatatccatgtaatcagtgtagcaaaagtttcagtcagaattcagaccttattaaacatcgaaggatccacactggagagaaaccctataaatgtaatgagtgtgggaaagcttttaatcagagctcagtccttattttacatcagaggattcatactggagagaaaccctatccctgtgatcaatgtagcaaaaccttcagtaggctttcagatcttattaatcatcaacgaattcacactggagagaagccttacccatgtaatcagtgcaataaaatgtttagtcgaagatgagatcttgttaaacatcacagaattcatacaggtgagaaaccctatgaatgtgatgaatgtgggaaaacctttagtcagagctccaaccttattcttcatcagagaatccacactggagagaaaccttatgcatgtagtgattgtactaaaagctttagtcgccgttcagatcttgttaagcatcaaagaatacacactggagagaaaccatatgcatgtaatcagtgtgataaaagttttagtcaaagctcagacctcactaaacatcagagagtacactctggtgaaaagccttatcattgcaatagttgtgagaaagccttcagtcagagttctgaccttattcttcatcagagaattcacactggagaaaaactattatctgtgcacacagtgcagcaaaagtttcagtcagatctcagacctcattaaacaccagagaatccacactggggaaaaaccatataaatgcagtgagtgcaggaaggctttcagtcagtgctcagctcttaccctacaccagagaatccacactgggaagaaaccaaatccatgtgatgagtgtggcaaaagctttagtcggcgttctgatctcattaaccatcaaaaaatacacactggtgaaaagccgtataagtgtgatgcatgtgggaaagccttcagcacatgtactgatcttattgaacaccagaaaacccatgctgaggagaaaccctaccagtgtgttcagtgcagcagaagttgtagccaactctctgaacttactattcatgaggaagtccattgtggagaagacagtcaaaatgtgatgaatgtgagaaaacctttagtgtgtacaccaactctattcagtaccagagacactgtaccagaaaaaaatctaatgaatgctgttgattattgatgagtatgaaaaaggttttaatcagtgttcaactcttatgctacattaaaaccgcactggatccggatacgtgtggtggctcacgcctgtaatcccaacactttgggaggcagatgtggaagcatcatttgagcccaggagtttgaggctgcagtgagctatgattccaccattgcactccagtctgggcaacagagcaagaccctgtctattt

SEQ ID NO: 139 - DNA, 480 bp, Homo sapiens
atggagctgcctgctgtgaacctgaaggtgattctcctaggtcactggctgctgacaacctggggctgcattgtattctcaggctcctatgcctgggccaacttcaccatcctggccttgggcgtgtgggctgtggctcagcgggactccatcgacgccataagcatgtttctgggtggcttgctggccacaatcttcctggacatcgtgcacatcagcatcttctacccgcgggtcagcctcacggacacgggccgctttggcgtgggcatggccatcctcagcttgctgctcaagccgctctcctgctgcttcgtctaccacatgtaccgggagcgcgggggtgagctcctggtccacactggtttccttgggtcttctcaggaccgtagtgcctaccagacgattgactcagcagaggcgcccgcagatccctttgcagtcccagagggcaggagtcaagatgcccgaaggtactga

SEQ ID NO: 140 - DNA, 1232 bp, Homo sapiens
tagaattcagcggccgctgaattctagccgagcatggacgaccccgactgcgactccacctgggaggaggacgaggaggatgcggaggacgcggaggacgaggactgcgaggacggcgaggccgccggcgcgagggacgcggacgcaggggacgaggacgaggagtcggaggagccgcgggcggcgcggcccagctcgttccagtccagaatgacagggtccagaaactggcgagccacgagggacatgtgtaggtatcggcacaactatccggatctggtggaacgagactgcaatggggacacgccaaacctgagtttctacagaaatgagatccgcttcctgcccaacggctgtttcattgaggacattcttcagaactggacggacaactatgacctccttgaggacaatcactcctacatccagtggctgtttcctctgcgagaaccaggagtgaactggcatgccaagcccctcacgctcagggaggtcgaggtgtttaaaagctcccaggagatccaggagcggcttgtccgggcctacgagctcatgctgggcttctacgggatccggctggaggaccgaggcacgggcacggtgggccgagcacagaactaccagaagcgcttccagaacctgaactggcgcagccacaacaacctccgcatcacacgcatcctcaagtcgccgtgtgagctgagcctcgagcacttccaggcgccactggtccgcttcttcctggaggagacgctggtgcggcgggagctgccgggggtgcggcagagtgccctggactacttcatgttcgccgtgcgctgccgacaccagcgccgccagctggtgcacttcgcctgggagcacttccggccccgctgcaagttcgtctgggggccccaagacaagctgcggaggttcaagcccagctctctgccgcatccgctcgagggctccaggaaggtggaggaggaaggacctgcaggggacgagccagccgagagcccatcggagaccccaggccccagcccggcaggacctacaagggatgagccagccaaggcgggggaggcagaagcctgctgcctggctgtgtcttcccacccagctctcccctgcgcccctgtctttgttaatcgacccttctggagcggggggcggcgggcagggcttgcctttcttagtctgatgccaagcaaggccttttctgaataaattcatttgactttcgaaaa

SEQ ID NO: 141 - DNA, 631 bp, Homo sapiens
cggcggccgagctcgcgcatcccagccatcactcttccacctgctccttagagaagggaagatgagtgagtcgagctcgaagtccagccagcccttggcctccaagcaggaaaaggacggcactgagaagcggggccggggcaggccgcgcaagcagcctccggtgagtcccgggacagcgctggtagggagtcagaaggagcccagcgaagtgccaacacctaagagacctcggggccgaccaaagggaagcaaaaaaaactggagaaggaggaagaggagggcatctcgcaggagtcctcggaggaggagcagtgacccatgcgtgccgcctgctcctcactggaggagcagcttccttctgggactggacagctttgctccgctcccaccgcccccgccccttccccaggcccaccatcaccaccgcctctggccgccacccccatcttccacctgtgccctcaccaccacactacacagcacaccagccgctgcagggctcccatgggctgagtggggagcagttttcccctggcctcagttcccagctccccccgcccacccacgcatacacacatgccctcctggacaaggctaacatcccacttatccgcaccctgcgcctgct

SEQ ID NO: 142 - DNA, 1263 bp, Homo sapiens
atgtgtgggagtctaaggctctttgtaggtcactcaggacctgcttttgaaaggatcaacaaaattgatagaccgctagcaagactaataaagaaaaaaagagagaagaatcaaatagacacaataaaaaatgataaaggggatatcaccactgatcccacagaaatacaaactaccatcagagaatactacaaacacctctacgcaaataaactagaaaatctagaagaaatggatacattcctcgacacatacactctcccaagactaaaccaggaagaagttgaatctctgaatagaccaataacaggagctgaaattgtggcaataatcaatagtttaccaaccaaaaagagtccaggaccagatggattcacagccgaattctaccagaggtacaaggaggaactggtaccattccttctgaaactattccaatcaatagaaaaagagggaatcctccctaactcattttatgaggccagcatcattctgataccaaagccgggcagagacacaaccaaaaaagagaattttagaccaatatccttgatgaacattgatgcaaaaatcctcaataaaatactggcaaaccgaatccagcagcacatcaaaaagcttatccaccatgatcaagtgggcttcatccctgggatgcaaggctggttcaatatatgcaaatcaataaatgtaatccagcatataaacagagccaaagacaaaagccacatgattatctcaatagatgcagaaaaagcctttgacaaaattcaacaacccttcatgctaaaaactctcaataaattaggtattgatgggacgtatttcaaaataataagagctatctatggcaaacccacagccaatatcatactgaatgggcaaaaactggaagcattccctttgaaaactggcacaagacagggatgccctctctcaccgctcctattcaacatagtgttggaagttctggccagggcaatcaggcaggagaaggaaataaagggtattcaattaggaaaagaggaagtcaaattgtccctgtttgcagacgacatgattgtttatctagaaaaccccatcgtctcagcccaaaatctccttaagctgataagcaacttcagcaaagtctcaggatacaaaatcaatgtacaaaaatcacaagcattcctatacaccaacaacagacaaacagagagccaaatcatgagtgaactcccattcacaattgcttcaaagagaataaaatacctaggaatctaa

SEQ ID NO: 143 - DNA, 3735 bp, Homo sapiens
cgatcctgaggtaacggataagtttataccatggatagcacaaaggagaagtgtgacagttacaaagatgatcttctgcttaggatgggacttaatgataataaagcaggaatggaaggattagataaagagaaaattaacaaaattataatggaagccacgaaggggtccagattttatggaaatgagctcaagaaagaaaagcaagtcaaccaacgaattgaaaatatgatgcaacaaaaagctcaaatcaccagccaacagctaagaaaagcacaattacaggttgacagatttgcaatggaattagaacaaagccgaaatttgagcaataccatagtgcacattgacatggatgctttctatgcagctgtagaaatgagggacaatccagaattgaaggataaacccattgctgtaggatcaatgagtatgctgtctacttcaaattaccatgcaaggagatttggtgttcgtgcagccatgccaggatttattgctaagaggctgtgcccacaacttataatagtgccccccaactttgacaaataccgagctgtgagtaaagaggttaaggaaatacttgctgattatgatcccaattttatggccatgagtcttgatgaagcctacttgaatataacaaagcacttagaagaaagacaaaattggcctgaggataaaagaaggtatttcatcaaaatgggaagctctgtagaaaatgataatccaggaaaggaagttaataaactgagtgagcatgaacgatccatctctccactactttttgaagagagtccttctgatgtgcagcccccaggagatcctttccaagtgaactttgaagaacaaaacaatcctcaaatactccaaaactcagttgtttttggaacatcagcccaggaagtggtaaaggaaattcgtttcagaattgagcagaaaacaacactgacagccagtgcaggcattgccccaaatacaatgttagcaaaagtatgcagtgataagaataaaccaaatggacaataccaaattcttcccaatagacaagctgtgatggacttcatcaaggatttacccattagaaaggtttctggaataggaaaagttacagagaaaatgttaaaggcccttggaattattacatgtacagaactttaccaacagagggcattgctttctctccttttctctgaaacatcttggcattatttccttcatatctccttgggtctaggttcaacacacctgacgagggatggagagaggaaaagtatgagcgttgagaggacattcagtgagataaataaagcggaagagcaatacagcctatgtcaagaactttgcagtgagcttgctcaggatctacagaaagaaagacttaagggtagaactgttaccattaagttgaagaatgtgaattttgaagtaaaaactcgtgcatctacagtttcatctgttgtttctactgcagaagaaatatttgccattgctaaggaattgctaaaaacagaaattgatgctgattttccacatcccttgagattaaggcttatgggtgttcggatatctagttttcccaatgaagaggacaggaaacaccaacaaaggagcattattggctttttacaggctggaaaccaagccctgtcagccactgagtgtacattagagaaaactgacaaagataagtttgtaaaccctctagaaatgtctcataagaagagtttctttgataaaaaacgatcagaaaggaaatggagtcaccaagatacatttaaatgtgaagccgtgaataaacaaagtttccagacatcacaaccattccaagttttaaagaagaagatgaatgagaatttggaaatatcagagaattcagatgactgtcagatacttacctgtcctgtttgctttagggctcaagggtgcatcagtctggaagccttgaataaacatgtagatgaatgtcttgatggaccttcaatcagtgaaaactttaaaatgttctcgtgttcacatgtttctgctaccaaagttaacaagaaagaaaatgttcctgcttcttcactttgtgagaagcaagattatgaagcccatccaaaaattaaagaaatatcttcagtagattgtatagctttagtagatactatagataactcatctaaagcagaaagcatagatgctttaagtaataagcatagcaaggaagaatgttctagtctcccaagcaagtcttttaatattgaacactgtcatcagaattcttcttctactgtttcattggaaaacgaagatgttggatcatttagacaagaataccgccagccttacttatgtgaagtgaaaacaggccaagctctagtttgtcctgtttgtaacgtagaacaaaagacttcagatctaaccctgttcaatgtgcatgtggatgtttgcttaaataaaagttttatccaagaattaagaaaggataaatttaacccagttaatcaacccaaagaaagctccagaagtactggtagctcaagtggagtacagaaggctgtaacaagaacaaaaaggccaggattggtgacaaagtactcaacatcaaagaaaataaaaccaaacaatcccaaacatacccttgatatattttttaagtaaacattgaacattttatcattaatttttaattgaaactagttattttataatcaatgaatttgttctttctgattttaagtttgcagatttatttagtgaaggcaagtgcaataatccttcctcagatgatgtttgcttttctaagatacatatactgattctgtgtatcttttttataaccatgagaattttacttccattatacatcaattggaaatcaatcctgttaagagataattcttaaaagggaaattaggaatgggataagaaggtgatttttttattatttttatactgaatataaaaacatttgtaagggctctcaaagattcacacatgcctatattatcataagaatttttcagcacttaactactttgttggcattgatcctagtgtctttaaatacttcatgagcattcataattaaaatttatcttaagttctatgaagagtattaatgtaactagcataagtggttttcttcaggaaaataaatatcacagtattatctgtgttaaaatggtttttgcctaaaatataatttttaatttggcttttcttatttaaaattccattatcttatgaataagcacttgaatcagtttttaaaatatttagtctaagatgattcaaagtagttttattttaatacaggacttttaaatggcagtatttcatttcttgtcaattatgttggtactttccacaaatctataaagaaggataaattgtaccatcattttattataatcctcaagagaaaatgtgtaattcaaaagattaatgtgtattaaaacacattatgtatcttagttacatttctatcagtacttttattaatatttgtgaaagaagacagcttaatagtagttagcttaagtagtttctccaagtacttttgtgctatcaatgagttcttctcaaaaaataattagttaggccaggcacaatggctcacacctgtaatgccagccctttgggaggccgaatgggcagatcacttgaggtcaggagtttgagaccagcctcgccaacatggtgagaccctgtctctactaaacccaaaaaaaaaaaaaaaaaaaaaaaaaa

SEQ ID NO: 144 - DNA, 1075 bp, Homo sapiens
tgatcagccgggggaactctgtgaccatccggtgtcaggggaccctggaggcccaggaataccgtctggttaaagagggaagcccagaaccctgggacacacagaacccactggagcccaagaacaaggccggattctccatcccatccatgacagagcaccatgcagggagataccgctgttactactacagccctgcaggctggtcagagcccagcgaccccctggagctggtggtgacaggattctacaacaaacccaccctctcagccctgcccagtcctgtggtgacctcaggagagaacgtgaccctccagtgtggctcacggctgagattcgacaggttcattctgactgaggaaggagaccacaagctctcctggaccttggactcacagctgacccccagtgggcagttccaggccctgttccctgtgggccctgtgacccccagccacaggtggatgctcagatgctatggctctcgcaggcgtatcctgcaggtatggtcagaacccagtgacctcctggagattccggtctcaggagcagctgataacctcagtccgtcacaaaacaagtctgactctgggactgcctcacaccttcaggattacgcagtagagaatctcatccgcatgggcatggccggcttgatcctggtggtccttgggattctgatatttcaggattggcacagccagagaagcccccaagctgcagctggaaggtgaacagaagagagaacaatgcaccattgaatgctggagccttggaagcgaatctgatggtcctaggaggttcgggaagaccatctgaggcctatgccatctggactgtctgctggcaatttctttttttctttcttttcttttctttcttttttttttttttttttttttgagatggagtcttgctctgtcaccaggctggaatgcagtggcgcaatctgggctcactgcaacctccgcctctcgggttcaagtgattctcctgcctcagcctctggcaatttctagagggaggaatgggtgtttgagtgcagagacactggtctggggtgatccatggagga

SEQ ID NO: 145 - DNA, 1965 bp, Homo sapiens
atgaagctctccctggtggccgcgatgctgctgctgctcagcgcggcgcgggccgaggaggaggacaagaaggaggacgtgggcacggtggtcggcatcgacctggggaccacctactcctgcgtcggcgtgttcaagaacggccgcgtggagatcatcgccaacgatcagggcaaccgcatcacgccgtcctatgtcgccttcactcctgaaggggaacgtctgattggcgatgccgccaagaaccagctcacctccaaccccgagaacacggtctttgacgccaagcggctcatcggccgcacgtggaatgacccgtctgtgcagcaggacatcaagttcttgccgttcaaggtggttgaaaagaaaactaaaccatacattcaagttgatattggaggtgggcaaacaaagacatttgctcctgaagaaatttctgccatggttctcactaaaatgaaagaaaccgctgaggcttatttgggaaagaaggttacccatgcagttgttactgtaccagcctattttaatgatgcccaacgccaagcaaccaaagacgctggaactattgctggcctaaatgttatgaggatcatcaacgagcctacggcagctgctattgcttatggcctggataagagggagggggagaagaacatcctggtgtttgacctgggtggcggaaccttcgatgtgtctcttctcaccattgacaatggtgtcttcgaagttgtggccactaatggagatactcatctgggtggagaagactttgaccagcgtgtcatggaacacttcatcaaactgtacaaaaagaagacgggcaaagatgtcaggaaagacaatagagctgtgcagaaactccggcgcgaggtagaaaaggccaaacgggccctgtcttctcagcatcaagcaagaattgaaattgagtccttctatgaaggagaagacttttctgagaccctgactcgggccaaatttgaagagctcaacatggatctgttccggtctactatgaagcccgtccagaaagtgttggaagattctgatttgaagaagtctgatattgatgaaattgttcttgttggtggctcgactcgaattccaaagattcagcaactggttaaagagttcttcaatggcaaggaaccatcccgtggcataaacccagatgaagctgtagcgtatggtgctgctgtccaggctggtgtgctctctggtgatcaagatacaggtgacctggtactgcttgatgtatgtccccttacacttggtattgaaactgtgggaggtgtcatgaccaaactgattccaaggaacacagtggtgcctaccaagaagtctcagatcttttctacagcttctgataatcaaccaactgttacaatcaaggtctatgaaggtgaaagacccctgacaaaagacaatcatcttctgggtacatttgatctgactggaattcctcctgctcctcgtggggtcccacagattgaagtcacctttgagatagatgtgaatggtattcttcgagtgacagctgaagacaagggtacagggaacaaaaataagatcacaatcaccaatgaccagaatcgcctgacacctgaagaaatcgaaaggatggttaatgatgctgagaagtttgctgaggaagacaaaaagctcaaggagcgcattgatactagaaatgagttggaaagctatgcctattctctaaagaatcagattggagataaagaaaagctgggaggtaaactttcctctgaagataaggagaccatggaaaaagctgtagaagaaaagattgaatggctggaaagccaccaagatgctgacattgaagacttcaaagctaagaagaaggaactggaagaaattgttcaaccaattatcagcaaactctatggaagtgcaggccctcccccaactggtgaagaggatacagcagaaaaagatgagttgtag

SEQ ID NO: 146 - DNA, 2173 bp, Homo sapiens
gagcgaactagtctcgagttttttctttcttttttttttttttttgatacggagtcttgctctgtcgcccgggctggcatgcaatggcatcatcttggctcattgcaacctctgcctcccaggttcaagcgattctcctgcctcagcctccctagtagttgggattacaggtgcccgccagcatgcccagctaattttttttatttttagtagagacagggtcttatcattcttggtcaggctggtctcaaactcctgacctcaggtgacccacccgccttagcctcgcaaagtgttgggattacaggcgtgagccaccatgtccggcctcatttaattctcataacactttaggtagcttattttattttattttttttacacggagtttcactcttgttggccaggctggagtgcaatggcacaatctcagctcactgcaacctctgcctcctgggttcaagcgattcttctgcctcaggctcccgagtagctgggattacaggtgcctgccaccacacccagctaatttttgtatttttagtagagacagggtcttgctatgttggttgatcttgaactcctgacctcgggtgatctacccgcctcagcctcccagagtgctgggattacaggcgtgagccaccgtgcccagccttggtagcttatttttaaattgcatttgctacaattctcctgcctcagcctcccgagtagctgggactacaggtgcatgtcgccaggcctggctaattttttgtattttagtagagatggggtttcactgtgttgcccaggcttgtcttgaactcctgagctcaggcagtctgcccgcctcagcctcccaaagtgctaggattgcaggtgtgagccaccgcacctggccactactttttggaactctattttgtacttgctgactttcacaaaaagtttgaggcagcttacaataggatgtaataggatgaaagaagaaacaacaatatattaatacgtggccagaattagtgtgcttcagaggttgtagaagccttattaacctttctcacgtttttcaggggaaagccttgccaggcagttactactactcaattgagaaagatgtgtgctaagtctcaaaagcaagtacttgttctcagtcacatcagtagtgagtagcacgcttaaactgagagtttctggttctggggtgtttctgttttactccaatcaagaaagattcttcgttcctccatactcaacaaaatggagggagactgggtaccaagttcagacacaacaatatatttacttttgtttgttgttttttaaaatattttttcagtatacatgtagcatatcatcttcttacagcaagactgtgcaatagatcatatacttgctttgtagatgggaaggctgggactgcgtgaggtcacgtaatgcacccaaagccatgtagccattaactggtagagcccaagctcagacactagaattaattctgtctgaaaccaaatgcaagcttggtccattgttctagactgttgcacttattctgtgctggccagctggcataggcaggacaacactgtagtgtggggacattatcttcccagtggcctagatgggaaggttaagttcagaagctagttgggtctgattccagagttcaccttgccagtccatttattggtggatttccttccagtgttttttccccatccataagcttgtggtttttcttttttcttttttttttcttttgagacggagtcttgctctgtcacccaggctttagtgcagtggcgcgatctatgctcactgcaagctccgcctcccgggttcacatcattctcctgccttagcgtccccagcagctgggacaacaggcgcatgctgccatgcccggctatttttttttgtatttttagtagagacagggtttcactgtgttagcaaggatggtctcgatcttctgacctcgtgatccgcccgcctcagcctcccaaagtgttgggattacaggcgtgagccaccacacccatctttttatttatttattttttgagacagtctcactctgtcgcctaggctggagtgcagtgagccaagatggcaccactgcactccaacctgtgcaacagagtcagactctgtctaaaaaaaaaaaaaaaaaaaaaaaaaaaaaaaa

SEQ ID NO: 147 - DNA, 7248 bp, Homo sapiens
tactcaaaattcacatgataaaataattgatcctgaaaaacgtgttcctactcaaggaatgtttgataaaaatgggataaagggaggtttgaaaagtgtttctttattcacatcaaagttagcaaagccatccactatgtttgtgtcatctacagaggagttaaaccaaaagtctttttctggaccatctaatttgggtaaattcaccaaatgcacattattaggaaggacttcatattcttcgatcaatactccaaaatcacagttgaatggattttatggaaaccgatcagctggtagcatgcaaaaggcctagagcgaactcctgtgccaccagaagcagttctggagaaagcttagctcaatccccagacagtagtaaatctattaattgtgaaaaaatggtaaggtcacaaagtttttcacattccattcagaattcattccttccaccttcatctataaccagtcacattcctttatagagctgtggatcttacaaagccttatcagaaccaacagctatccattagagtgcctctacggtcaagtatgctaacaagaaattcccggcagccagaagtactcaatgggaatgaacatttggggtatggatttaataggccttatgctgctggtggaaagaagttggctttaccaaatggcccaggtgtaacttctactttaggttatagaatggttcatccctctctactgaaatctagccgatctccattttctgggactatgacagttgatggaaataaaaattcacctgctgacacatgtgtagaggaagatgctacagttttggctaaggacagagctgctaataaggaccaagaactgattgaaaatgaaagttatagaacaaaaaacaaccagaccatgaaacatgatgctaaaatgagatacctgagtgatgatgtggatgacatttccttgtcgtctttgtcatcttctgataagaatgatttaagtgaagactttagtgatgattttatagatatagaagactccaacagaactagaataactccagaggaaatgtctctcaaagaagagaaacatgaaaatgggccaccacaggatatgtttgattcccccaaggaaaatgaaaaagccttcagtaaaactgatgaatggatagatataagtgtctctgacaggagtgaatgtacaaaacatacttctgggaataatttggtttcaccagatacagactacagagctggttcttcgtttgaactctctccatctgatagctctgatggaacatacatgtgggatgaagaaggcttggaacccattggaaatgtccatccagttgggagctatgagtcctctgaaatgaacagcatagatattttgaataatcttgaatcatgtgaccttgaggatgatgatcttatgcttgatgtggatctgcctgaggatgcacctcttgaaaatgtggagtgtgacaatatgaaccgctttgaccgaccagacagaaatgttcggcagcctcaggaaggtttttggaaaaggccaccccagaggtggagtggacaggagcattaccacctcagccaccctgaccactatcatcaccatggaaaaagtgacttgagcagaggctctccctatagagaatctcctttgggtcattttgaaagctatggagggatgccctttttccaggctcagaagatgtttgttgatgtaccagaaaatacagtgatactggatgagatgacccttcggcacatggttcaggattgcactgctgtaaaaactcagttactcaaactgaaacgtctcctgcatcagcatgatggaagtggttcattgcatgatattcaactgtcattgccatccagtccagaaccagaagatggtgataaagtatataagaatgaagatttattaaatgaaataaaacaacttaaagacgaaataaagaaaaaagatgaaaagatccaactattagaacttcagcttgcaactcagcatatctgccaccaaaaatgtaaagaggaaaaatgcacttatgctgataaatatacccaaacaccctggagacgaattcctggtgggtattctgctccctccttctctccttggcagggctccttccaggggatcccacggactgttccaccgcaccgcagacagacctcaagtactacagccttccagcagccttcccagacccacagatcacacccagggaaaactaataaagccacaacgtatcgaggcccgcagtgaatgctcaatccaagacatgcatcagggcggtgcacatccggaagaaagctttacacacgtcttgcaccaagaaagcaactatggtttggaagagcagcctttttcatcaggcccacaattaacaatggatgtggctaagagtacaccttctgaagcaaacttaaacattactgtaaatgctcaagagccttatcatttggcaaacaatcaaattagtgacatgcagtttatacccacttctcttcagacacctcccgagtcaagtacagtagaccaggctaagagagttggaagaaatcagtctccgccagtgggttatatgtctcagcccaagtccttgcagcttttaaagccatccatattgagttctttggtaccgcctccagtttctgaatcatctccaagtaggactcccacttgtaaaaagtcaccaataatcacaacatgtaattcagcaaaacttcagccaacatctagtcaaacaaatcttgcaaataatcagaatctgaaagcatctaagctccgccccccctcaggctctttcaaacaaaaacaaacaaacagcccccaactagagcctcaaagcttccaggccaagacaagcatcccaaggccactaacacaacgaaaagaaatcatgcagaatccaaatggcaatttgcattctggggattgtttggcctctaatcgatattctcgtcttcctaaaccaaagatacattaagtacatagccatcacctgccaatttgtttcttaaaaacaatctcttctgtaatagctttatgtgcagcttgcagcttgctactgtggtggaggttccattgaaagcctgcaaatcttaaattaaaatgtggaagcttctactagtttggctccttcattttatatcctggttgaagtacatgccatttgagcataattatctcaggtaaacacgaaagtttgcttacccatttcagaggcctgccaaaggcccaaatcatgttatccatccctctccaggtcagaaaattcataatattttactgagcaggcaagaagtgtgctttgctggtttagtcctattaaggtctgtatttattgtggttgtcagaacctcaccccttttcacttgtctctcctgtgaatatggctactattttaactaaagatatggtgataatggaagatggtagtctgtaagcagagttctggccagtgttttgtatatttaaaaggtctatgcaaaagctttgtgatgaataaaggagattaggcttttaatggaaagtctatgtaagttttatttttccttgccagggtcagtcagctaatgttactgttgattcatttcccaaattccccagactgaaaatgtttcttattacatataaatcagttatatattcctttacatcttgttttacaaacacatgtgcatgcacacacacacatacacacacataccatttatgtttgtatttgttactgggtaaattttggagcgcttgagatacaccttgaaacctgtacctaaagatgtattcatttgtaacatatgttggtgctagagttttgctggtaattcaggtttgaacccttaggcttgtggatccatgatagccattttaaggttccacagcattatgtctttaattgtaatatttatatttattgattttctgctaatatctgaagactgaaataatgaacttgaaacatttgcacaaaactttgatggggtataaatataccatatatagggattgtaaactattttctatagcaaaacaagttaaaatattttgagaaaaataacaaatttaaataagactatcttgagaaagctggagttcataatattctccccctcccccatctccagtctcctaggtttcccttttctgtgttttttgtttttttctgtttgttttttgagacagagtcttgctccattgcccaggctggattacagtggcgcaatctcggctcactgcaacttctgcctcccgggttcaagcgattctcctgcctcagcctcctgagtagctgggactacaggcatgtgccaccatgcctggctaatttttttgtatttttagtagagatgaggtttcaccttgttggtcaggctggtctcgaactcctgacctcaagtgatccacccacctcgtctatggtgtatttttgaaagacaattttttaaaggtagatttgggaaaaaaatagaattgaagatgggaaattttgttttattaaaaaggtgctagaagatgtttcaaagacaatattcttattttaatacgctgtagaaggtaggtgtggaacctccatgctaccatgtgcacaaacctaattatgctttgggtcacttgtcagttcagtaaatctgccttcctcttctcccaaatcatgtcatctttaggttgttcacctgcagctgctttaaatgaattagtatctttcagatagataaccttacaaggagaatgtttgttttgagcagctgaccaaaaatatatcaaacaggattatggccaaaaagtcactcaaatttctagagattcctttaaaagatgtatgttgatgaaattgcccctttataagaaaaacaacagcaagtcttttagtagaaatttgaaagaagtgtttgctaccattttgacccattattcccttacctatcagatgaatttgccattcactggatagaaaccattcttggatttggtaagaggtgagcaagacaaatcttgtaccatactcttatgtaccagcacttctgatggagaagcagtgaagttcagaacgttcttcacatagtccagatactgttagagtcaggcaaatcagcaaagcactttgttatggagatgacccatgatggctgcagttgtaagtgggcatacatgttctatcattttgaaggagaaagaaaaccgttctcacatgtcgcaaatatgtgaatcatactatattcccctaaagtaaaaccagtgacttagtggtttttggtttatttagaagttggtttagacccttatgaaacattatttacgagttggccttatccttaagggaaaagttctaaatttttaaatttatttttaattccctagtctgagggaaatgtctttattgtccattacataaaaatgttgactccagtaatttatttttctctattttttcctccatgtatttactccatttttctctattttttccttccctgatggatttgcagaaatgttaaccaattagctcaacttttctctacctttgttgagtcttaatcttttagaagataggcttaccgtatatttatgaagcataatatattaaaagaaaacaaatctaggatgcttgcatgacataaagtatttgcctgcagttttcattaaaaactgcaagaatatcatgcttgtctgcttcttagtaaatgttaagtctgaaatggaagtgaggatgtaactctactgaataatcaaagatcatcttagatttggcttgatctgtgtttattgcttctattaatgtaaatcaactctgtgccaaatcctcctccacaaaccatttattgtcttagttctagtggtatcaatgaagatagttacagtatatgaattctaagtcctgaggaagaaattttatggggtttgttaagtttcacattcgtgaaagaggaaattagtagagtattcagactttgatatttggctgttaatgggatgcatatcaaatttttaaaagaaggcttggcctaaggagtttattggtacaggtgcagatgattttaaggcattaaaggattatagagttatgtcatttgagactgtttctaataactgagaccatctaacatttttcttttggagtctcatttttatttgtgcaatattttcaggcatataggctactgttcattgtatttatatatatattagaatttactaagtactttaacaagtaaaaatctgaatatgaaagaaaatatcagatttgcactttaaatgagcttaattgcttgaagttgtgcctgaaatatcgaattgcctcctattgggtgtggctttgttgaaataaatttgtaattgttgctgtttgaagatatcagtacagctgttcacagaaatatattcccagcatgtcacttttccattaaagcactaagttttctttgaatgttccattgttccgataagtattttacttttttctcagtacatcagagagagcgtgatccccctacagctgtcacttccaaatgttcctgtagcataaatggtgttacagacactgaggtgcactcttggtttctgagcagagttgtcatactggtttcctggctctagggcactggggatgtactttgaaatcaccgaacaggcttgcaattaagatcaataaggctgcagcaccatttcaatttactttccatcttacccagtagtttttgtgtttttaaattcgtttgggtggttatgtttgcatgcttaagcacacatttgaaaattaattatagctgtactacccgatgtttttccttggggatgatggccttgttcctttttaaattctgatgcttgaattctattttctagtgatttttcacatctccctttaagtttttgctgcagcaatttgagagagtacttttgattaaatgattctgatggtgggcaccaatctacaactatgtcattaactgaagatacatgttttaatcttgttgggaataagcttacccactttctccttggtaaagcgtttacttaacaaaataatacccgagaatgtaaggtctctaagtcattactaacaaagagcaaaaataatatctgcagtattgtttttcccattgattttaagtcagtttagagtacaaactgtatattagaatttgcctgtaaaatgaattctaaaaagcagatgtaaagtctctcctgaaaatgttggcatagtaaataaaaataaagttcataattataaagtaaaaaaaaaaaaaaaaaaaa

SEQ ID NO: 148 - DNA, 5129 bp, Homo sapiens
gcggccgcagtggggtggagggggcagggcgtggtgaggtaaggtgagtgccgtagtggggttccctggagccatggcctgctccattgtccagttctgctacttccaggacctccaggccgcccgggacttcctctttcctcacctgcgggaggagatcctcagcggcgccttgcggagggaccccagtaaatcaacagactgggaagatgatggttggggagcatgggaagaaaatgaaccacaagaacctgaagaagaaggaaatacttgcaaaacacaaaaaacttcctggctccaagattgtgttttatccttatctccaaccaatgatcttatggtgatagctcgagagcaaaaagctgtatttctagtgccaaaatggaaatatagtgataaaggaaaggaagaaatgcaatttgctgttggctggagtggttccttaaatgtcgaagaaggggaatgtgtaaccagtgctctatgtatcccactagcaagccaaaagaggagttccactgggcgtcctgactggacctgcattgtggtgggttttacttcaggttatgtacgcttctacactgagaatggtgtgctcttgcttgcacagcttttgaatgaggacccagtacttcaacttaaatgcagaacctatgaaataccacgacatcccggcgtgactgagcagaatgaagagttgagtatcttatatccagctgccattgtgactattgatggatttagcctttttcaatctcttcgtgcttgtcgaaatcaggtagcaaaagctgcagcatcaggcaatgagaacatacaaccaccaccattagcttataagaaatggggtctacaagatattgacactattattgatcatgctagtgttggtattatgactctgtccccctttgatcaaatgaagactgcctccaatataggtggatttaatgcagcaattaaaaatagtccacctgccatgtctcagtatatcactgtagggtccaatccatttactggcttcttctatgctttagagggaagcacacaaccattattatcccatgttgcactagcagttgcaagtaaactcacttctgctttatttaatgctgccagtggttggcttggttggaaaagtaagcacgaagaagaagctgtccaaaagcaaaagccgaaggttgagccagctaccccattagctgtaagatttggacttccagattctagacgccatggtgaaagcatatgtctgtctccatgtaacacactggcagcagtaacagatgatttcggcagagttattttattggatgtagctagaggaattgcaatacgcatgtggaaagggtaccgcgacgcacaaattggatggattcaaactgtagaggacctccatgaaagagtgccagaaaaggcagatttttccccctttggaaattctcagggtccaagtcgagtagctcaattccttgtgatctatgcgccaagaaggggaattttagaagtgtggagcacacagcagggacctagagtaggagctttcaatgtggggaagcactgcaggctgctgtatcctggctataaaataatgggtttaaataatgttaccagtcagagttggcagccacagacttatcagatctgtctggttgatccagtgtctggaagtgtgaaaacagtgaacgttcccttccatttagcactgagtgataagaagagtgaacgagccaaggatatgcacctagtgaagaaactagcagccttactgaaaacaaaatctcccaatcttgatttggttgaaacagaaataaaggaattaattcttgatattaaataccctgcaaccaaaaaacaagctttggaaagcattttggcaagtgaacgtttaccattttcttgccttagaaacatcactcagactttaatggacactttaaaaagtcaagaacttgagtctgttgatgaaggattgctacagttttgtgccaataaactaaaactgctgcaactctatgagtctgtcagtcaattaaattcccttgattttcatttagacacaccattctctgataatgacttggctctgttactaaggcttgatgaaaaagaactgcttaagctccaggcattactagagaaatataagcaagagaacaccaggacaaatgttcgattttctgatgataaagatggtgtgttgcctgtaaaaacattcttggaatatttagaatatgaaaaggatgtgctcaacataaagaaaataagtgaagaggaatatgtggctttaggtagtttctttttttggaagtgtttgcatggagaaagctccactgaggatatgtgtcacactttggagtcggctggtcttagccctcagctgttgttgtctctgctcctgagtgtttggctttcaaaggaaaaggatattttggataaaccacagtcaatctgctgtcttcataccatgctgtccctcctgagcaagatgaaagtggccatcgatgagacctgggattctcagtctgtgtccccatggtggcagcagatgcgcacagcctgtattcagtctgagaacaatggagccgctctgttgtctgcgcatgttgggcattctgttgctgcacagatatcaaacaacatgacagagaaaaaattttcccaaacagttttgggtgctgattcagaggccctcactgattcctgggaggcactttctcttgacactgagtactggaaactccttctgaaacagctggaggattgtctcatacttcagactctgcttcacagcaaagggaacactcagacctccaaagtgtcatcactgcaggctgagccacttccaaggctttctgttaaaaagttattagaaggaggaaaaggtggcattgcagacagtgtagccaagtggatatttaaacaggacttcagccctgaagtattaaaactggctaatgaagaaagagatgcagaaaacccagatgaacccaaagaaggtgttaacagaagtttccttgaggtatcagagatggagatggacttaggagccataccagacttactgcatttagcctatgagcagtttccttgtagccttgagctcgatgtcttgcatgcacattgctgctgggagtacgttgttcagtggaataaagatccagaggaagcacgtttttttgttaggtcaatagaacacttgaagcaaatatttaatgcacatgttcaaaatggcattgcactgatgatgtggaatacgttcttagttaaaagattttctgctgctacatacttaatggataaggttggaaaatcaccaaaagataggttatgccgaagggatgtgggaatgagtgacacagcaatgacatctttcctcggctcctgtttggatcttcttcagatcttaatggaggcagatgttagcagggatgaaatacaggtgcctgtgctggatactgaggatgcgtggctctccgtggaaggaccaatctccatagtggaactggcccttgaacagaagcacatccactacccactggtggagcaccactccatcctgtgctccatcttgtatgcagtcatgaggttttctctgaagaccgtgaagccactttcactttttgacagtaagggaaaaaatgcatttttcaaagacctaacttcaattcagttattacctagtggggaaatggatccaaattttatttctgtacgacaacagttcttattgaaagttgtcagtgcagctgtccaggcccaacattcagccacaaaggtcaaagatcccacagaagaggccacacccactccttttgggaaagaccaagattggccagctctagctgtggatttagcccatcaccttcaagttagtgaagatgttgttagaaggcattatgtgggggaactatacaactatggagttgaccacttaggagaagaggccattctacaggttcatgacaaagaggtccttgcctctcagctgctggtgctcacggggcaaaggctggctcatgcgcttctccacacccagacaaaagaaggaatggagctgcttgccagacttccacccacactgtgtacttggctgaaagcaatggacccccaggaccttcaaaacactgaagtgccaattgcaacaacagctaaactagtaaataaagtaattgagcttttaccagaaaaacatgggcaatatggtctagccttacacctcattgaagctgtggaagccatatctcttccttctttatgacacttacctactggaaatagtctaaaattatgattataacatgaagtagtgcatggttattttacatagtaagacctggaattttatgggaaaagtatgtctttttttttccttttgtaaaataaataaaagtatatacaacttttaaaaagtgcaaccctggctaaattccactcctttggttaatactgaagataaaatataaacaaatgtcaactctgttataattaatacagatgttttactgtttatttctaattcaaacacttaagtagctttattgttaaactttgctatttaaaattggttataatttagattatgttcttataagattctatatttcctatctaaaatgttgttgtaattcaatttaaatgtgttcatgtacagtccccatcagtagcgtatagaacaccccactctcctttagtaaatgttgagaaaatgcctttgttgtcatgctccaaatcccacactgggctgccacctgggagttctggataccgaaaggttcctttcccagaggttctgctgttgccatcagaggaggatgaccgtgcttgaggaggaagaatgggttcaagatcatcatattcatcagaaggggacactaaatagaacccttaacctgttgtacttgccaaaattgagaatcagagatgtgtaaaatgcagcaaattaattataatgtaagttaagatttgctttttgccaagttgcaaagttgtatccacatcaggtcactgtaaaaatgtattatcttgtaaaacttatgtaaaaaaaaaaaaaaaaaaaaggcaaagatactaaaaaaaaaaaaattttagtccgactttatttttcctacaagtgtttaggaaatgcttctggg

SEQ ID NO: 149 - DNA, 3885 bp, Homo sapiens
  misc_feature (2487)..(2487): n is a, c, g, or t
  misc_feature (2788)..(2788): n is a, c, g, or t
ccgggaggggggagcggcgttggaggccaccgtttccagcatcaacaacagcaacttgtgattggcggtgaccggatattcagttgcacatccccacatcaatgcactgccaatgggttatatcctgtgttgtgacctcatggtttaagtgggaataaagatgagtataagcagtgatgaggtcaacttcttggtatatagatacttgcaagagtcaggattttctcattcagcatttacctttggtataaaaagccatatcagtcagtccaatataaatggtgccctcgtcccacccgctgcattgatttctatcatccagaaaggtctacagtatgtagaagcagaagttagtattaatgaggatggtaccttgtttgatggtcgaccaatagagtctctgtccctgatagatgccgtaatgcctgatgtagtacaaacaagacaacaagcttatagagataagcttgcacagcaacaggcagcagctgctgcagctgccgcagctgcagccagccaacaaggatctgcaaaaaatggagaaaacacagcaaatggggaggagaatggagcacatactatagcaaataatcatactgatatgatggaagtggatggggatgttgaaatccctcctaataaagctgttgtgttgcggggccatgaatctgaagtttttatctgtgcctggaaccctgttagtgatctcctagcatcagggtctggagactcaacagcaagaatatggaatcttagtgagaacagcaccagtggctctacacagttagtacttagacattgtatacgagaaggagggcaagatgttccgagcaacaaggatgtcacatctctagattggaatagtgaaggtacacttctagcaactggttcctatgatgggtttgccagaatatggactaaagatggtaaccttgctagcaccttagggcagcataaaggccctatatttgcattaaaatggaataagaaaggaaatttcatcctaagtgctggagtagacaagactacaattatttgggacgcacatactggtgaagccaagcaacagtttccttttcattcagcaccagcattggatgttgattggcagagcaacaacacctttgcttcttgtagtacagatatgtgcattcatgtctgtaaattaggacaagacagacctattaaaacattccaaggacatacgaatgaagtaaatgctatcaaatgggacccaactggcaatctcttggcctcctgttctgacgacatgactttaaagatatggagtatgaaacaagacaattgtgtccatgatttgcagcaacataataaagaaatttatactatcaaatggagtccaacaggaccagggactaataatccaaatgccaaccttatgttagcaagtgcatcctttgattctactgttaggttatgggatgtagaccgagggatatgcatccataccttgacaaaacaccaagagcctgtgtacagtgtagctttcagtcctgatggcaggtatctggcaagtggttcttttgacaaatgtgtacacatctggaacacgcagacaggtgctctagttcacagctataggggaacaggtggaatatttgaagtttgctggaatgcagcaggagacaaagttggagccagtgcatcagatggttcagtttgtgtattagaccttcggaaatagcgctactagttggaagccatggaccgactatgaatgtgtacatagccaaaatgagtgtccctgacccatgtaatgttatagtcccacttgaaccatggccagtccaatacagccaaatctaaaagaaatatatacatacagtgtatataaacaaaattacaccctgaagatgacagagttttgtcacagcttgtgaattctgttcaccaagtgctggaatctaatctgctgtgcccctaaaatagcatttagaagttttggatatgaaaaacagaagagagaaaatatacattataaaagcagtacatacatgtaccagtttttggatactaaatgacagccttgtttctcccctttgaatcagcagacaccatggattatattctttttttcccttcagtagtgagcagtttgtatgtacagagaaaatggacttacaaaaacttgcagcagtagtttgttcttgctttaaaatttcgtttttggtttagattatggatgcatgaagtaagggagtgaatcagtttcttgtttatatttttttcaccttttaaacaaaaaattctttaaaatattttaatgcattcttttgaagaggtagatgtttggtacattttatggctcccagagcatatattcagttggtgcatgttgtggaagggggaattggaaattaaatggaaaacctatgactttggtcctgtcaatctgtaagacacatcagtaaaaaggtattatgctctgttggttttgtttttttgttttgcttttttttttttttncttttttgttttttggtgatgtggcttaaatgcaatagtttcttttttgggacatatttctgccaattaaagactagaagggcacaactttttttttaattaccatagagaagatacattaaaaaaaatcttctgatgttttgtagccataactaaattatggtaaaaatgtgcactattgtgaaaaggagcaacgtagttttgggttttttgttgtttgtttgttttgctttgttttttaagagattaaaatgtttctggataaggattagcttctcgaagtgtccatcattctgtgtanaagcttaaatatgtaatgtaaccaaactccagtattaaaaatctctcatgttgttttctttatacaaagcaagataacggcatataacactgccattacatggcaaaatgtttgctaccttagtttaaaaaacaatctcaaacaaaagacttgcttcaaggtgtttttaaatagcagtgattcagaattttttttaatgaaagtataattgcactaaccttcttcctgctgctctgattctgcatttgtggtacttgtgactacgttttttcaaatatagatagatttaagctgctaatttttttttttttagtaatcactactatatcatgtcttttactctgtttataatatcaagtattttcttaaagatatagatattaaaccttgtgctcatgcaacttagagtaacatatacagacaaatgattgcatgaggccatgtttatatgtgtgactaataaggcttgtcatgattaacataatccaggtatgtcatttctgaagagaatagtcatcaaatttatatctcgaagattttaattaagggaattgcttattgtttgagcttagcaaattaataacactatttctgtcactaattattttgaggccttttagtactaaaattttaacctgtgttctaagtagaaactgatttaacccaagtaatgcagctttgattgatttcagcattcgttgctttgctatttttacaaaacagcattgattgaagcaagttttggttttactaaggtagggtagcatttgctattggtaaagagaataaatacacttaatttcacaatacattgttatatgtaccccagttgttgttagtggggactatgatactgtaataatatttttaaaaatttacatcaagagaggcagtcattcacgatggttttgtgccagctctttttagggttttggatcacattagagatatttagaacatattaccctgtgacttacgtaggaaacctaatatgctgagtatctggcacttgaattcctgcttttattgctggaggtccacatgtgtggttgacctctgttattgtttaaaaaaaaaaaaaaaaaaaaaaaaaaaaa

SEQ ID NO: 150 - DNA, 899 bp, Homo sapiens
gttcacgctgacgtcccaaatcttggaagttttgtccccatttgctttctgcttctggggacaaaacttccaagatttgggacgtcagcgtgaactccgtggtcagcacatttcccatgggctccacggttctggaccagcagctgggctgcttatggcagaaggaccacctgctcagtgtctccctgtccgggtacatcaactatctggacagaaacaaccccagcaagcccctgcacgtcatcaagggtcacagtaaatcgatccagtgtctgggaagctgaggatctgggataccacgcagaaggagcacctgttgaagtatgagtaccagcctttcgctgggaagatcaaagacattgcttggactgaagacagtaagaggatcgcccgtggtcggggaaggaagggagaagtttggagcagtcttcctctgggatagtggctcttctgtgggcgagattacaggacacaacaaagtcatcaacagcgtggcatcaagcagagccgccataccgctggcacgggaagcgatgataactgcgcgcattctttgagggacccccattcaagttcaagttcacagttggcgccacagccgtttgtcaactgtgtgcgattctctcaagagcaaaggttaatttaaggacaaagatgaagtcctgtaaactaatctgtcattgttttaccttcctttctttttcagtgcggaattaaaagtaagtttaaagcacctgattgggagtgttttgcgtgttcggaatcacttgtaatgttggctgagacaatccttccttgcactttgaaacactttgagcctttaagagatagcctgagaataataaattcttttcttttaaaaaaaaaaaaaatttaaaaaaaaaaaaaaaaaaaaaaaa

SEQ ID NO: 151 - DNA, 918 bp, Homo sapiens
atggcggcggggctggcgcggctcctgttgctcctcgggctctcggccggcggtcccgcgccggcaggtgcagcgaagatgaaggtggtggaggagcccaacgcgtttggggtgaacaacccgttcttgcctcaggccagtcgcctccaggccaagagggatccttcacccgtgtctggacccgtgcatctcttccgactctcgggcaagtgcttcagcctggtggagtccacgtacaagtatgagttctgcccgttccacaacgtgacccagcacgagcagaccttccgctggaacgcctacagtgggatcctcgggatctggcacgagtgggagatcgccaacaacaccttcacgggcatgtggatgagggacggtgacgcctgccgttcccggagccggcagagcaaggtggagctggcgtgtggaaaaagcaaccggctggcccatgtgtccgagccgagcacctgcgtctacgcgctgacgttcgagacccccctcgtctgccacccccacgccttgctagtgtacccaaccctgccagaggccctgcagcggcagtgggaccaggtagagcaggacctggccgatgagctgatcaccccccagggccatgagaagttgctgaggacactttttgaggatgctggctacttaaagaccccagaagaaaatgaacccacccagctggagggaggtcctgacagcttggggtttgagaccctggaaaactgcaggaaggctcataaagaactctcaaaggagatcaaaaggctgaaaggtttgctcacccagcacggcatcccctacacgaggcccacagaaacttccaacttggagcacttgggccacgagacgcccagagccaagtctccagagcagctgcggggtgacccaggactgcgtgggagtttgtga

SEQ ID NO: 152 - DNA, 3313 bp, Homo sapiens
  misc_feature (2584)..(2584): n is a, c, g, or t
aggcagcagcagagggagagctcggggcttggaggggaaacagcggaagacctaagattatcgggagggcagcagaggcagagaacgaggacaggacccttggccgtcttcttccagggaacgagaggtcacagcctcgctctccgcttatgcttctggcgccccagcttaaagccgaggctgcggctgacaaagggctcgcgccggtgccgccgcccttctcatccgggcattcgggtccctgcgagaaggagggggaaggacagagggggaggggaaggagccggaggggcgcacacttggagctgaagccctctccagggctccgggccggtgccccaacggacagaggtcgaggaggacccgcagaggtggcagcggccgggggcaggaggatggtgcagaaggagagtcaagcgacgttggaggagcgggagagcgagctcagctccaaccctgccgcctctgcgggggcatcgctggagccgccggcagctccggcacccggagaagacaaccccgccggggctgggggagcggcggtggccggggctgcaggaggggctcggcggttcctctgcggtgtggtggaaggattttatggaagaccttgggttatggaacagagaaaagaactctttagaaggctccagaaatgggaattaaatacatacttgtatgccccaaaagatgactacaaacataggatgttttggcgagagatgtattcagtggaggaagctgagcaacttatgactctcatctctgctgcacgagaatatgagatagagttcatctatgcgatctcacctggattggatatcactttttctaaccccaaggaagtatccacattgaaacgtaaattggaccaggtttctcagtttgggtgcagatcatttgctttgctttttgatgatatagaccataatatgtgtgcagcagacaaagaggtattcagttcttttgctcatgcccaagtctccatcacaaatgaaatctatcagtacctaggagagccagaaactttcctcttctgtcccacagaatactgtggcactttctgttatccaaatgtgtctcagtctccatatttaaggactgtgggtgaaaagcttctacctggaattgaagtgctttggacaggtcccaaagttgtttctaaagaaattccagtagagtccatcgaagaggtttctaagattattaagagagctccagtaatctgggataacattcatgctaatgattatgatcagaagagactgtttctgggcccgtacaaaggaagatccacagaactcatcccacggttaaaaggagtcctcactaatccaaattgtgaatttgaagccaactacgttgctatccacacccttgccacctggtacaaatcaaacatgaatggagtgagaaaagatgtagtgatgactgacagtgaagatagtactgtgtccatccagataaaattagaaaatgaaggcagtgatgaagatattgaaactgatgtactctatagtccacagatggctctaaagctagcattaacagaatggttgcaagagtttggtgtgcctcatcaatacagcagtaggcaagttgcacacagtggagctaaagcaagtgtagttgatgggactcctttagttgcagcaccctctttaaatgccacaaccgtagtaacaacagtttatcaggagcccattatgagccagggagcagccttgagtggtgagcctactactctgaccaaggaagaagaaaagaaacagcctgatgaagaacccatggacatggtggtggaaaaacaagaagaaacggaccacaagaatgacaatcaaatactgagtgaaattgttgaagcgaaaatggcagaggaattgaaaccaatggacactgataaagagagcatagctgaatcaaaatccccagagatgtccatgcaagaagattgtattagtgacattgcccccatgcaaactgatgaacagacaaacaaggagcagtttgtgccaggtccaaatgaaaagcctttgtacactgcggaaccagtgaccctggaggatttgcagttacttgctgatctattctaccttccttacgagcatggacccaaaggagcacagatgttacgggaatttcaatggcttcgagcaaatagtagtgttgtcagtgtcaattgcaaaggaaaagactctgaaaaaattgaagaatggcggtcacgagcagccaagtttgaagagatgtgtggactagtgatgggaatgttcactcggctctccaattgtgccaacaggacaattctttatgacatgtactcctatgtttgggatatcaagagtataatgtctatggtgaagtcttttgtacagtggttaggtaggtgcaccaggaataatctcttctcctcaaatatattgtccctttaaaaaaaattatcccacagggagaaaaacatttagggaattggcacatttccaagtctcttcaattcgttgcctaggtttctttcaaaaataggcattattgaagacttgagatgcaagtcttagtaaatacatcaagcacattaatttttctcccntgggctaattcagcataagtatcttaaaagtatgttagaaagtactgactttaacttgctctgactgaatgctttctggatggaaccctgtataccacttttatctgatttggagatgagacactatgaaatgtgactccacaagctttctgctgcttgctgtgtcttgataacattaatgctatgtttaacagaacaattgctgaaatgacctaaagggcctggcaagaggaagccatcctcccagccctgtgcgcatgcgagctttagtgtaaggctattctggtgctattcagtattatttcacgtggctttttctttatccttctaccaagtattggttttaccaggggatagaaattgtaatcccctaaacatctctgctacattaaatggacttttgtatgtctcctttgaacactgattttttttttttaaattgtcaaacttggtaaaaagcaccagcatggccaagtttctctagggacttcatttcattttcaggttttcaatccagctataaggaatatgtaatggacttatatacagcacacagcaggcagcaaggctgactgacatgtcatagttttcatagtagtcacaaatactatgatgggtttcatggtcttggttgtgaaatagatatctgaaacaccgtgagcttagaataaaaagtagtagtgagattttccactttctgcctgtatacctttgagctcttaaatattt

SEQ ID NO: 153 - DNA, 976 bp, Homo sapiens
agccattcctgaggaggactgccggtcgttcggacgtcttgcctgtcgctggaggagaggtccgggctctccaggaaggtggctgcggcgacaaaatgaagatattcgtgggcaacgtcgacggggcggatacgactccggaggagctggcagccctctttgcgccctacggcacggtcatgagctgcgccgtcatgaaacagttcgccttcgtgcacatgcgcgagaacgcgggcgcgctgcgcgccatcgaagccctgcacggccacgagctgcggccggggcgcgcgctcgtggtggagatgtcgcgcccaaggcctcttaatacttggaagattttcgtgggcaatgtgtcggctgcatgcacgagccaggaactgcgcagcctcttcgagcgccgcggacgcgtcatcgagtgtgacgtggtgaaagactacgcgtttgttcacatggagaaggaagcagatgccaaagccgcaatcgcgcagctcaacggcaaagaagtgaagggcaagcgcatcaacgtggaactctccaccaagggtatggttccgaccggcgtttagccgagctctctgattaccgccgtttatcagagtcgcagctttcgttccgccgctcgccgacaaagtcctcgctggattaccgtcgcctgcccgatgcccattccgattacgcacgctattcgggctcctataatgattacctgcgggcggctcagatgcactctggctaccagcgccgcatgtagggccatcctgggatggggcaccacagggagggagggagaaaagaggtgggtagggttacagatccaggttataactactctggcccatacctttcctggttgtggtttttcatgccctctaccatgtgggccttccccaggagatgatcctgttaagtgttcggcagtaacctactttgttccttcgcctcagcagcaaatcttgctactggctctagatctgcg

SEQ ID NO: 154 - DNA, 3676 bp, Homo sapiens
ggtccccggctgcccgcagcccgctcgcggcgcttctccggcccggctccttctccgctcgttaacgtcgccaaccccccccacccctcatatctctctccacccacccaaccgccccccgctccttctcgccgcctcgagtccgcttgggggaaaacttcaaagagccggatcgcaggctccctgcctactcccccaccggggatttcagactagacgcttgaagcaaagctgccatcccagaagacgacatgctctcagcaacccccctgtatgggaacgttcacagctggatgaacagcgagagggtccgcatgtgtggggcgagcgaagacaggaaaatccttgtaaatgatggtgacgcttcaaaagccagactggaactgagggaagagaatcccttgaaccacaacgtggtggatgcgagcacggcccataggatcgatggcctggcagcactgagcatggaccgcactggcctgatccgggaagggctgcgggtcccgggaaacatcgtctattctagcttgtgtggactgggctcagagaaaggtcgggaggctgccacaagcactctaggtggccttgggttttcttcggaaagaaatccagagatgcagttcaaaccgaatacacccgagacagtggaggcttctgccgtctctggaaaacccccaaatggcttcagtgctatatacaaaacaccgcctggaatacaaaaaagtgctgtagccacagcagaagcgctgggcttggacaggcctgccagcgacaaacagagccctctcaacatcaatggtgctagttatctgcggctgccctgggtcaatccttacatggagggtgccacgccagccatctaccctttcctcgactcgccaaataagtattcactgaacatgtacaaggccttgctacctcagcagtcctacagcttggcccagccgctgtattctccagtctgcaccaatggggagcgctttctctacctgccgccacctcactacgtcggtccccacatcccatcgtccttggcatcacccatgaggctctcgacaccttcggcctccccagccatcccgcctctcgtccattgcgcagacaaaagcctcccgtggaagatgggcgtcagccctgggaatcctgttgattcccacgcctatcctcacatccagaacagtaagcagcccagggttccctctgccaaggcggtcaccagtggcctgccgggggacacagctctcctgttgcccccctcgcctcggccgtcaccccgagtccaccttcccacccagcctgctgcagacacctactcggagttccacaagcactatgccaggatctccacctctccttcagttgccctgtcaaagccatacatgacagttagcagcgagttccccgcggccaggctctccaatggcaagtatcccaaggctccggaagggggcgaaggtgcccagccagtgcccgggcatgcccggaagacagcggttcaagacagaaaagacggcagctcacctcctctgttggagaagcagaccgttaccaaagacgtcacagataagccactagacttgtcttctaaagtggtggatgtagatgcttccaaagctgaccacatgaaaaagatggctcccacggtcctggttcacagcagggctggaagtggcttagtgctctccggaagtgagattccgaaagaaacactatctcctccaggaaatggttgtgctatctatagatctgaaatcatcagcactgctccctcatcctgggtggtgcccgggccaagtcctaacgaagagaacaatggcaaaagcatgtcgctgaaaaacaaggcattggactgggcgataccacagcagcggagttcatcatgcccgcgcatgggcggcaccgatgctgtcatcactaacgtttcagggtcagtgtcgagtgcgggccgcccagcctccgcatcacccgcccccaatgccaatgcagatggcaccaaaaccagcaggagctctgtagaaaccacaccatccgttattcagcacgtgggccagcccccggccactcctgccaagcacagtagcagcaccagcagcaagggcgccaaagccagcaacccagaaccgagtttcaaagcaaacgagaacggccttccaccaagctctatatttctatctccaaatgaggcattcaggtccccaccaattccctaccccaggagttacctcccttacccagcccctgagggcattgctgtaagtcccctctccttacatggcaaaggacctgtctaccctcacccagttttgttacccaatggcagtctgtttcctgggcaccttgccccaaagcctgggctgccctatgggcttcccaccggccgtccagagtttgtgacctaccaagatgccctggggttgggcatggtgcatcccatgttgataccacacacgcccatagagattactaaagaggagaaaccagagaggagatcccggtcccatgagagagcccgttacgaggacccaaccctccggaatcggttttccgagattttggaaactagcagcaccaagttacatccagatgtccccaccgacaagaacctaaagccgaaccccaactggaatcaagggaagactgttgtcaaaagcgacaagcttgtctacgtagaccttctccgagaagaaccagatgctaaaactgacacaaacgtgtccaaacccagctttgcagcagagagtgttggccagagcgctgagccccccaagccctcagttgagccggccctgcagcagcaccgtgatttcatcgccctgagagaggagttggggcgcatcagtgacttccacgaaacttatactttcaaacaaccagtcttcaccgtaagcaaggacagtgttctggcaggtaccaacaaagagaacctagggttgccagtctcgactccattcctggagccacctctggggagcgatggccctgctgtaacttttggtaaaacccaagaggatcccaaaccattttgtgtgggcagtgccccaccaagtgtggatgtgacccccacctataccaaagatggagctgatgaggctgaatcaaatgatggcaaagttctgaaaccgaagccatctaagctggcaaagagaatcgccaactcagcgggttacgtgggtgaccgattcaaatgtgtcactaccgaactgtatgcagattccagtcagctcagccgggagcaacgggcattgcaggtgagcccccccacctgaatttcagttactttaccagttgtcagttttttaatgtgtaaacaggattgggggagtatggtagggcagggcaccaggcagatttggtgaatgaagcttgtggtaatttgaatatatgcaatgtggccagtaagagaacgtgagtggtagcactgaggcgtgtctggatgctttaagttattctgtagattataagggaactccactcaattgctgataaccgatgttttaattattgtgaagggtatctaaagactgcatgacgtttacctatcaattgctttgatttctctgcctgtaagatagcaaatatacctagaagtgctgcttagaatgccttacttgatacctggtagagatgtgtagcagccgcatgtctgtgggattcatgcaaatttttcaccaaaaaa

SEQ ID NO: 155 - DNA, 1831 bp, Homo sapiens
atggcggctgtgagtctgcggctcggcgacttggtgtgggggaaactcggccgatatcctccttggccaggaaagattgttaatccaccaaaggacttgaagaaacctcgcggaaagaaatgcttctttgtgaaattttttggaacagaagatcatgcctggatcaaagtggaacagctgaagccatatcatgctcataaagaggaaatgataaaaattaacaagggtaaacgattccagcaagcggtagatgctgtcgaagagttcctcaggagagccaaagggaaagaccagacgtcatcccacaattcttctgatgacaagaatcgacgtaattccagtgaggagagaagtaggccaaactcaggtgatgagaagcgcaaacttagcctgtctgaagggaaggtgaagaagaacatgggagaaggaaagaagagggtgtcttcaggctcttcagagagaggctccaaatcccctctgaaaagagcccaagagcaaagtccccggaagcggggtcggcccccaaaggatgagaaggatctcaccatcccggagtctagtaccgtgaaggggatgatggccggaccgatggccgcgtttaaatggcagccaaccgcaagcgagcctgttaaagatgcagatcctcatttccatcatttcctgctaagccaaacagagaagccagctgtctgttaccaggcaatcacgaagaagttgaaaatatgtgaagaggaaactggctccacctccatccaggcagctgacagcacagccgtgaatggcagcatcacacccacagacaaaaagataggatttttgggccttggtctcatgggaagtggaatcgtctccaacttgctaaaaatgggtcacacagtgactgtctggaaccgcactgcagagaaagagggggcccgtctgggaagaacccccgctgaagtcgtctcaacctgcgacatcactttcgcctgcgtgtcggatcccaaggcggccaaggacctggtgctgggccccagtggtgtgctgcaagggatccgccctgggaagtgctacgtggacatgtcaacagtggacgctgacaccgtcactgagctggcccaggtgattgtgtccaggggggggcgctttctggaagcccccgtctcagggaatcagcagctgtctaatgacgggatgttggtgatcttagcggctggagacaggggcttatatgaggactgcagcagctgcttccaggcgatggggaagacctccttcttcctaggtgaagtgggcaatgcagccaagatgatgctgatcgtgaacatggtccaagggagcttcatggccactattgccgaggggctgaccctggcccaggtgacaggccagtcccagcagacactcttggacatcctcaatcagggacagttggccagcatcttcctggaccagaagtgccaaaatatcctgcaaggaaactttaagcctgatttctacctgaaatacattcagaaggatctccgcttagccattgcgctgggtgatgcggtcaaccatccgactcccatggcagctgcagcaaatgaggtgtacaaaagagccaaggcgctggaccagtccgacaacgatatgtccgccgtgtacagagcctacatacattaagctgtggacaccccgccctcacccctccaatcccccctctgaccccctattcctcacatggagtcgggggcctgggagttcattctggaccagcccacctatctccatttccttttatacagactttgagacttgccatcagcacagcacacagcagcacccttcccctgaggccggtggggagggg

SEQ ID NO: 156 - DNA, 1431 bp, Homo sapiens
atggcgtccacggattacagtacctatagccaagctgcagcgcagcagggctacagtgcttacaccgcccagcccactcaaggatatgcacagaccacccaggcatatgggcaacaaagctatggaacctatggacagcccactgatgtcagctatacccaggctcagaccactgcaacctatgggcagaccgcctatgcaacttcttatggacagcctcccactggttatactactccaactgccccccaggcatacagccagcctgtccaggggtatggcactggtgcttatgataccaccactgctacagtcaccaccacccaggcctcctatgcagctcagtctgcatatggcactcagcctgcttatccagcctatgggcagcagccagcagccactgcacctacaagaccgcaggatggaaacaagcccactgagactagtcaacctcaatctagcacagggggttacaaccagcccagcctaggatatggacagagtaactacagttatccccaggtacctgggagctaccccatgcagccagtcactgcacctccatcctaccctcctaccagctattcctctacacagccgactagttatgatcagagcagttactctcagcagaacacctatgggcaaccgagcagctatggacagcagagtagctatggtcaacaaagcagctatgggcagcagcctcccactagttacccaccccaaactggatcctacagccaagctccaagtcaatatagccaacagagcagcagctacgggcagcagagtcctccccttggaggggcacaaacgatcagtaagaatacagagcaacggccccagccagatccgtatcagatcctgggcccgaccagcagtcgcctagccaaccctggaagcgggcagatccagctgtggcaattcctcctggagctgctctccgacagcgccaacgccagctgtatcacctgggaggggaccaacggggagttcaaaatgacggaccccgatgaggtggccaggcgctgggggcagcggaaaagcaagcccaacatgaattacgacaagctgagccgggccctccgttattactatgataaaaacattatgaccaaagtgcacggcaaaagatatgcttacaaatttgacttccacggcattgcccaggctctgcagccacatccgaccgagtcgtccatgtacaagtacccttctgacatctcctacatgccttcctaccatgcccaccagcagaaggtgaactttgtccctccccatccatcctccatgcctgtcacttcctccagcttctttggagccgcatcacaatactggacctcccccacggggggaatctaccccaaccccaacgtcccccgccatcctaacacccacgtgccttcacacttaggcagctactactag

SEQ ID NO: 157 - DNA, 1003 bp, Homo sapiens
gccaagaattcggcacgagcggcacgagctttattattatagtcatttgaaattgaaagagtaacatttatctttttgtagcattcttggtccctgctgttctgattaatattttatcagtgataaaaaataccaaaatatagtgtgtttgctcatcagatttgcaaattacaaaaactaggaggatatttcagtaatggtggaggctaagcttctgtaacaaaccgctgacacagtggctcaaagagcgcagatgttcatttcacttttgtaaccaccctgtggggtaggcaggctctgtaccggtaagtcgtcaagggcctggtctggtggagcacctctgctttcctcaacatgtgccttccaaggaggctccatggcttctgcttccagctggtgtggaagaaagaaggggcatgcaggaggagggattgcctttccccaggtgccttcaaggttgcagatgtcactcctgctcccaaaccattggcaagaacttggtcacgtggccacacctaatcacagggaggctgggagatgtaatcttacctgggcagttgtgtccctggagataagggaacagtgggttttcggggagctgctagcagtcttctcagaagaacaatagctctaacacattagctgcctcagcaagctggagttttgggctttatagtcaaaatatgaaacatagaaggaggccaggcatgatggctctcacctgtaatctcggcattttgggaggccaaggcaggcagatcgtttgagtcctggagaccatcctgggcaacatagcaaaaccttgtgtttacataaaatacaaaaaattagccaggcgtggtggcatgtgcctgtagtctcagctacctaggaggctgaggtgggaggatcacctgagcctggagggccgaggctgcagtgagccatgatcctgtcactgcactccattcagcctgggctacagagtgagactctgtctcaaaaaaaaaaaaaaaaaaaaaaa

SEQ ID NO: 158 - DNA, 1102 bp, Homo sapiens
gcgtcgacgtcttgccaccgcatctggagaaccagcggttaccatggaggggatcagtatatacacttcagataactacaccgaggaaatgggctcaggggactatgactccatgaaggaaccctgtttccgtgaagaaaatgctaatttcaataaaatcttcctgcccaccatctactccatcatcttcttaactggcattgtgggcaatggattggtcatcctggtcatgggttaccagaagaaactgagaagcatgacggacaagtacaggctgcacctgtcagtggccgacctcctctttgtcatcacgcttcccttctgggcagttgatgccgtggcaaactggtactttgggaacttcctatgcaaggcagtccatgtcatctacacagtcaacctctacagcagtgtcctcatcctggccttcatcagtctggaccgctacctggccattgtccacgccaccaacagtcagaggccaaggaagctgttggctgaaaaggtggtctatgttggcgtctggatccctgccctcctgctgactattcccgacttcatctttgccaacgtcagtgaggcagatgacagatatatctgtgaccgcttctaccccaatgacttgtgggtggttgtgttccagtttcagcacatcatggttggccttatcctgcctggtattgtcatcctgtcctgctattgcattatcatctccaagctgtcacactccaagggccaccagaagcgcaaggccctcaagaccacaatcatccccatcctggctttcttcgcctgttggctgccttactacattgggatcagcatcgactccttcatcctcctggaaatcatcaagcaagggtgtgagtttgagaacactgtgcacaagtggatttccatcaccgaggccctagctttcttccactgttgtctgaaccccatcctctatgctttccttggagccaaatttaaaacctctgcccagcacgcactcacctctgtgagcagagggtccagcctcaagatcctctccaaaggaaagcgaggtggacattcatctgtttccactgagtctgagtcttcaagttttcactccagctaa

SEQ ID NO: 159 - DNA, 482 bp, Homo sapiens
tttgagacagggtttttccatgtttcctaaacttgtctcccactcctgagctcgagcaatctgcctgccccaacctcctaaagtgtagagctgcgtttttagtctttttttgagctgttttacaatccagtgttgaattgataagttcggattcactctgatatttgcagacttaacatcctacttcacaagatgttcatagccttgatccattacagccgctgcctcatccatctctgctcatatccttgatccaatacagcagccacctcttccatctatgctcatagcctaaactaatagaagccagagggaagaaatggaagccaacgtgagtccagaacacatgttttataagagcataagaaatttaaaaatagcaaagtataaaatgaagtttgtaatagatgtgcatggctaaaatttattcttatattaaccaatatattctataaattgggagaaaatattagacacatgaa

SEQ ID NO: 160 - DNA, 470 bp, Homo sapiens
gatatatagaaggttgtttttccttaaagtaataaaataaaccaactttttcctttatgagctgtagttcttgtttaagaaatccctctttactctgaggtcataaagatattgccctgtattttctttaaaaatttttaaagtttaatttcccatctagaattgacttttgcatatactgtaaggtagggatccattttttccatatagctaagtgtgtgtgtgtgtgtgtgtgtttgtgtgtgtatgatatatatttaaatgcagatattaacacaaatgccagtgttgtcttttgtctttaagctttaaaaactgacatgtggattaggccctctccaagaattttcattctaatcataaaggtaagaaattacaaactctttaatttagagatgaggtttactctaccaaagatgaatgtaaatctaagcagatcttacttgttcaaagatttccattataaaacc

SEQ ID NO: 161 - DNA, 654 bp, Homo sapiens
  misc_feature (603)..(603): n is a, c, g, or t
tacctctgtcaatgattctttggagaaaattacccataatttgctacttgaggattttattccctggattctctggatgctcattgcatgaaaagtggaaaagtttagatctatggaaacagaactgttgcctatatggaaaatcagtgccttgtggcaatacaggtaagaacagtgttgctcttgaaaaagtggacagtgggtggtctgaatgtgtcctggtccctggagtgggtttttagattgatgtggactcttcttagacttgtaagtaaaaaagttgtttcttcccctaaaagggaactgtgcgccttatacctggaattgctgggaaactgaaacattctgtagacttacttgtttccaactgtatcgcagcaagaagtctatgtgccccaggatcctggattacctgaggaagaagagatcaaggaaaaaaaacccaccagtcaaggaaagtcaagtagcaagaaggaaatgtctaaaagagatggcaaggagaaaaaagacagacgagtgacgaggtttcaggaaaatgccagtgaagggaaggcccctgcagaagacgtctttaagaagcccctgccttctactgtgaagaangaagagagtccctctccacctaaagtggtaaacccactgatctgcctcttg

SEQ ID NO: 162 - DNA, 516 bp, Homo sapiens
ttttttttttttttttttttagagttagaatgattttaatggttgatttatatttagatacaaggaaagaataaaaaacagtatctacaattagaaaaacttattgaaataaactcatgactaaaaatgaataatgtaatatattcgggtattatctttcatatactcattgtgagttaagatataaaaaatagacattcacatattgtattaatcttaccggtgcagagacatctatttaaataagacaaatcatagtgttagccatttaaaataatttagaaatgtattctcctttatattttcaagttcagtacaagtaaaatatatcactaaggaaaatgcataacaaataagagtagaatgcttatcagtatgaaataaccaatctatctcttcaatgaaccatgtaaagacttcatttcaaacaaagaattataaattgatatgggtatcaaaagcaactcctaaaaaacaattatgtccaaggacaacagttttcctaccacttgccat

SEQ ID NO: 163 - DNA, 464 bp, Homo sapiens
gctgtagcaggatattttctcgctcgaacttctcatccttcttccatttcgccttctgttttgaccacttctcttccatttcatcataaatactgtcctgatacgtacgaaacatattcttcaaatacttgtattcttttcccatctcctctgttcttgttttcaaagttctgtttcatctcagcacagcggagatccatttcactggagagcaatttctgggcagactggtggtctctgttcatttgttcaattattgctgtcagctctgagatttgctcttctaggtcagaaatgatgttggtcctggaaaatctgcctttgtccgggatctccgattcccaccgctttttcctatcaaacatctcatcccctaaggtgacagaaatctgttcccgattccgaacaagttgatagccaggtgacacgttgatcacttcataaaatgatttattagtctcttc

SEQ ID NO: 164 - DNA, 501 bp, Homo sapiens
  misc_feature (10)..(10): n is a, c, g, or t
gggactcctnaagacccacaagtgacttctgtctacactacagatgaactgaattgatcatctaaaatacgtttatagcgttcattgtgccagttgctcatggttctgctagttggcccaggactagttgtgatctgcagactgaagccagagtaagtaagagaattcaaggcactaagacaaccaggaacagttttaccaaggcaagtggaagctgctaggctcagtggttgcatgcctatagatggggtaaatcatcctggtgcaaatatggtattcacaccataaatgtgtagtgcaagtttcctctgtggccaatcacagggctgcaagctgaagccccagtttagcttattctccatacataacttcaaggggactttctggtgaacttttccaagaagctccaagcacagatggttcaaatttgcagtttggctagactttgtgactggatgtacattaaattaaaaaaaaaaaaaaaaaaaaaagcggccgctt

SEQ ID NO: 165 - DNA, 445 bp, Homo sapiens
tttttttttccattttgtggagaatgaggtgttgccatgttgccaggcaggtcttgaactcctgggctcaagcgatcctcctgcctctgcctccctaagtgctgggattccaggtgtgaggttttggtaaggatggagggaactgagaactctcacacagtcccgagggaaggtgaagctatggcgcctctggggagcaatgtggcaacaccaagtagagcaatgcggctcattccactgcagccctgcatgagagagagaggaagcagaaacaaatcatccccaagaggggaacagctgcagagtgggtcattcatacaacacagtactatacagccatccagatgaactccatgtgcgtgtactgattttgtttaaagtggaatgaaaaatacacatagaaggtatcacatgttgcgctcatcttcctgcaaaatttcagaca

SEQ ID NO: 166 - DNA, 424 bp, Homo sapiens
tttttttttttttttaacagagttgaaatgtttggatttattgtagcattactatcaggaatacacattgattatggtattgctatcaagaatacatataaatacatgcctgaagctataagtgagataagagatattccagggttagtcaaaagttaatctttgagttccagaagtctggatgaaaatgagatgagactgcaaattttgttgttaggcagtcaccatttatgacccttggcagggagggcaggaatggtggttatattgtgaactgaatgaaaactgagaactaatcagcatcatgtgggcctgaagcatttattgctaccagtgattagttgtaagaccttcggactatgtaactgtaatgaactataatgaacatgagaaaacaactcttttttttttttttttttttttt

SEQ ID NO: 167 - DNA, 458 bp, Homo sapiens
ttttttttaccatcacttttttatttggcagtaatagtaatacatccatgttacagtgcttattttggctaaagagccagtgcaattttttctgctactgtagtgttttacttttacacaaattaatgagtacagtccttacatttaggagacagaaacatttactgacatcagctaagtaaagctaatacatggttgttcacaaactaaacaaaacaataacataatatactcattaggaacaaagtagggatgttcttatttccactaatcacagattatataaattcttaaatttcacttacatatttctaaatctaagcaaaaaaattagaattcagcttaattcctataatcattttgaaatttacatcaaataatttctgaatatatattcacattaaaataaaagtaaatgggttatataaacataatttaaaatttctgattatgaaaag

SEQ ID NO: 168 - DNA, 468 bp, Homo sapiens
tggtatttcttgtagagatggggtttcaccacagttgccaaattggtcttgaactactaggctcaagagattcacccacttcagcctcccgaagtgctgggattacagatgtgagccactgcacccagcctggattttggctcttaaacattaatacacacatatgaaaaggacacaggaaccagccagcaggagtttccactggccatatctgaaatcaagtgagcagcagaaaaccccatgactgtgactacaacacaatgaatagtcagttggcacacagtgattcacaaaggaaggatggagggaaagaagcagaggagtgaaaggaaaacactgatttccacaactataggtgactatcttcctttcaaatggataaaggacagaatgaaacattgacgctgcttttttagaagaatctatgatgttctcttattgatgataagaagtttctttacagaatgc

SEQ ID NO: 169 - DNA, 398 bp, Homo sapiens
aacacctactatgtattattctggagactgggctaatggacatgaggactcaaggcggaacccaaagagatcacagctctggctgaagatgcaaagaaatgatttggtgattacacttttctttgttatctctagctacccttcattagcatgaatgattgagagattacgatacttaaaatgctggcatacaatatacagtcagctctcaatttccagtgtgcaacgaaataactgaggctctctaaggcttaccctaagtcccagggatctgctaggcagctcagcacatccccagctcacaccccttcactgctcagcctgtgtgtctgcacagactgcagcccatcttgagattatcctaagtaaaaaggaactgattgggtaaaacagctata

SEQ ID NO: 170 - DNA, 506 bp, Homo sapiens
tttttttaacctcattattgggatacttaaataacagatttatgctgttgttgtttctactggtcggtgctcgctcactaatatccaatcctagtatgattttcttttacttgtgtctattaacagggttatgtcacaccttgtcaacctcaaaacagatgatactcatcacttgtcttccatcttgctgttctattatcttcctacaaaaatagctaatttgtcagatttcaaagccttgttatttactgatgagcttaccaactggaccttttgtatcttcagtgtgtaattctgaagatgcattctgatacactagtgaactgggggtgacggtgaaggggtggtggaactaagggggtggggcggcgaacataggcaatatgccatttcctcaccatcccatgcttgtcatgtgagacaacagaaaggataaagaatactctattttttattctgaaaagataattatagcaatgataccttccattctgtttatttctggg

SEQ ID NO: 171 - DNA, 601 bp, Homo sapiens
tctgattatagtcactccctcttttcttgataagacttttctgggaataaacaagactgatacaataatggcccaaactaatacgtacagggcttctatgccccatgaaattgactggcattaggccgtgaaatccgaggtgatgataaacacttgaaaggtggaaagttcttaagtgtatgactaaatgactcactggcccgtgaaacatgcaactattttagcaaagggctagtttctcttcacatataattaaaagcagttgcagtgagacttcagtggagggtattatagtgcaaactaagaaagatcagctcatgtttaaaaaaaaactgagtaaaggaaatctgcatttatggaaactgaaagctctaacactgactcattgaagaagtctcccgaagatttataagtgtaatcaacaaggctactctttgtgacaagcatttgtcatccccgatataagaaaaaacaattattggaaaacaaaactgccacaggaattgccccattcccagtatttgccaggcaaaacattcagcagtatggggcaaaaattactatactacctgcgtctggagctgttaaaacaaacaaacaa

SEQ ID NO: 172 - DNA, 565 bp, Homo sapiens
  misc_feature (15)..(15): n is a, c, g, or t
  misc_feature (17)..(17): n is a, c, g, or t
ttttttattacattngntaaattatatttttcttgaaatctgtccaatgaatcaaagttttgaggcataggattctgagattatgtatgctcaaaaaagtatgtcaaaattgccactgaacggaaaactaaatggtactgttgtgatcctctagttcatcttctacccttatagaggagaatattaaagttaaaagagatccagagatccaagtactcttccctcacctcacctcaacacatagctgttaagtgacagaactgggactagaatctaagtctagtgctctttccaatatgctatgctcatttcttaaattgactgcatccatcagtcagcaaatcaaagggagaacagataagagagctgtaatcaggaacaacttcaaccactgagaagagagaatgtttactgtgtatgtggtggttgtaggcactgtcttcatattcctctccagttcctccatgatcttatcacccctatcttcctcagtgagaagtgtgtggtgttcaggctatggcttctctaaattctaagatcttacccagttccaagctactcctag

SEQ ID NO: 173 - DNA, 647 bp, Homo sapiens
actgtcaaaacgtttattgcaaaatggagtcttagaacaaaggaaagcaaagaaaagttcacatcaaaatgaaatgtatgacaccaacttggatttctgaatacactgtggactttgtgctggaatatcaaattccaactataaaatcagtaactgaaatagtcttaccacacaagagtaaaatttaatcttccatacaaacattatacaagatatttggcataggacttgctcagaataacattgcaatagaataattgagaaaaagtttttgttaaaaaaacaataaagtgataatgccatctattcaaagctcacactcaaagaatataaatattttctattatttagtacaaaaattttaagagtgcaaaagcaatatgtgcagtgtatcatatctgacattaaaagatatactattctgcacacaatataaaataattaatgtaggtgcttggaactctagttttgaagtaaataatcacatgccagaaagctcctcacaggcaacagagtgcaaacaaaggtggagtctgagaaaacacggctagtcttctagatttcctgatggatactcatttttcatcatagaaatgctgtatctagagctgtcaggctatgctacaatcgagaggagagaatagatt

SEQ ID NO: 174 - DNA, 499 bp, Homo sapiens
tttgacggttcctatataacgtttatttctggaagttaaagtagatacagcaatataccaaaaaaaaaaaaaaaaaaaaagacaaaaaacctcacaataatataaatttttacactatgaagtacacattggaatttgaatgcaggggccaggacagcagcttataaaccaccttataggtaggtaagcaacccacgggattccctcggctgggctggggatggggagggggcagtggacaggaagcgggcagggcctgaggaccctgttctttaatgggccacaacagggctcagctcctctcagaacttttgctacaatcagagttaagaccagatacatgctacctaaggccatgaacttgacaatatctgctccagagaagccctgaaccctcgccctaggtccctatgatttaaacccaatggtaagcccaagtctcacctttctaaatattctgtttatcagttaagcttattatgtactgaagagtgttgct

SEQ ID NO: 175 - DNA, 510 bp, Homo sapiens
ttttacagatttgtcacaaagtaaggtgctaattaatgtttgttgaataaattactatgccaattccccaatgtgtacaaaatgaatatacatatgacctagtctcaggaaaaatgtatatgtggagaggatgaaagataatttttttccatataagcttcctcatctaacctgtttcatatccagtttctgggacagaaattgattaaactattctaacgtggaactaagcaatttaaacttatatttacatggtcagcatatcagccggtgatctcaatatggccctcaaattttgctgtcatggatagttgtatattccagtgccagaaaaaagtaacaatatattcacgagagagcagcctgatgcgctgctctagagatgaaaataaattgatataaatggagatactgagcaaaaaaatcagcagctagcacttatcagatgggaagtgaaaagatgttaactgagcttacaagaatgaagaatattgtcatcagatagttgta

SEQ ID NO: 176 - DNA, 421 bp, Homo sapiens
  misc_feature (398)..(398): n is a, c, g, or t
tggtttgccaagttcctttattgtgtaatctttaacatctagtatatttgttctacatggttctaatgctggaaatctgctgtacaaaaataaagggatttgatgtttacctaaactgcacaatttcacaatctaaaactaatacacttaacatacagtctccgctaagccaatacaattatttggatagataactagatacaatagaaataaacactgatgataaattgaatcaatagtttcaggtctaaaaaacattaccttgaatcatctatatttgatgtatcttacatctcttttgttaaaatataaattaggatattttaactgtgaagaaaattacaggaaaacaaattcttgtaaaaaaataatgtaagctttaaaacagttaatatctncctgtccacgtcggacaacgcat

SEQ ID NO: 177 - DNA, 417 bp, Homo sapiens
ttttgcttcttgtgccattttaattttcaatggagagattaatgacacataactgtttagtaatcaaaacttgaaagaatttcatacaaggctcaaatcacaagttacataaatctttgacaacaatattttgatggaaggcaggtctaaactaacagagtagagaactaaatttagcattcagggtgaaatatgccttttctagaaacagccccaaagggaattaagaacatgttggggggtcagtgttgtggctgctttttctttatttgtcagaattatctgaatcctgtctcagttttgtttcaatttgtttgtacggttatcactaacattttggtggcattgattcctacacaaaatatttttgaccatcaatacttttcacgttatttgaactatgcaaggtcttcaata

SEQ ID NO: 178 - DNA, 236 bp, Homo sapiens
cccttcactgtacatctaattcttttgacccacttcaattttcatcatagtaggtagagccacatcttgagaaaccttaaaactatagatttactacaaaaaagatgagctaatacaaagtctaaagtaaactaaaagaggggttgatttacatctggcacaacttagtctttgttccaatcattttagaagtctcaatttaactccaggctagactccagtttgttctgggcctc

SEQ ID NO: 179 - DNA, 508 bp, Homo sapiens
gtcatttgtcagtttatttaaagaataaaaaacaagacaacaatttagtagaagtaccactgggagggaggggaggggaaaaaaggatatacaggggcaggtgtattctctgtacagaggtgcagagaaaatttcacatagctttagagaatgccttgtggaaaaaaaaaaaaataggccccaatacttgttactgccctttatcaaaactgtgtgcatgacctgcacaaataaaatcacaaaacagtgttgccacattcttcaaggaaacaaagcaaaatttagtgggtttcttttccctctccttgttaaaagtcattttttaaaaacatcagaagtagatgaggttacagcgtacaagtgtggtcagaatgctactgtcgtatgcaaatgacgagtgcattaagtgtcaaacaatgaaacaattgtgcaaagaataaaaaaacaaattttagcctttaaataaatcaaataacatcagtttcttggactgaacaattttcacttc

SEQ ID NO: 180 - DNA, 447 bp, Homo sapiens
ctcaggaaaaacagaaagttagggaaacacactacatttgacaaccaacattaatttgtagttggtcctaacccttcctggcacagctatcaaaagtacagctgtttaaccagaaccaaggtgttcaccccccacagaatgtacatgaaacactagaggactgcatgtttttccctgagagaagcgtaagacaaacagaagtcaaaaagtagtcactgggagcgccatccttctaagcaaatcctccctttcccttttggaggatttgcccgaactacgtagccagtcagcacttagaccacctgcctcctcctccccctataaacccaccactcccctcctcctttcccaaaccactgggggtgtcctaagccctcactgccccaagcccaaaatatcaactaagaatccttgtctgtatttccacagtcatacctaatgaattgg

SEQ ID NO: 181 - DNA, 481 bp, Homo sapiens
ttttaccctaatgctatataagaattgccttatattaagtaaatattcaggaatagagacagccctaagaactgggtcatgtcactagccctcttcagttgcagttcacggatcctccaccttgacaataaccatgattctatccatttctcctcccttgtctgctgctaccaccaactcctcagcacctcctctatacatgcattgcaagctttctcctttctcataactttggtatgctgaagatttatactggcctttctctatgaatcctttcagcttcaacttcagctctgtattgcacatgggaactcttgaaaagacaatctgatcctgtccctctcaggggagaaacttttgggccactgcttttttctcagctatagcaaggaaagcagatagggaaaagaggtgagttggtcactatgtgcagaatatggccaatcagagaagttctgctaaaggagcaagcaggtgtggc

SEQ ID NO: 182 - DNA, 458 bp, Homo sapiens
aaagataatcttgaagaaaaccatggtgggccagggatggacagggaataggacactttttaactattcttaaaaaataaaaaagaacatttcaaaaagattactgagcacataactaatgtctctgaaaggaaattcattataacagcagctagcctttattgatcatttgtgttagacataacgcaaagtatatcataatttaatttgctacataaagatacagtctacctcttaaggttgcttttgccattctacacagtacagaggaatgatgcacaccttggcagtatacttccagagcttgcaatcactacactatactgcctcactgacagcaatgcttttactataaacaatcagaactaaacaatatcctatatacattatttaatccaaacacattttatcttagaaagactgtacacagtgagttccacttctctgtcatcaaggtt

SEQ ID NO: 183 - DNA, 574 bp, Homo sapiens
tttttagaaagaaatgtttttaatataatatttaaacatattaaaaaaaagcaacaattcaataaggatccttccattgttctttatacagatttaaatgctgtcacgtactttatcagttacatttataattaataaccttccaatcactgagtttagaaattgcagtatttactgagctaacctttctcacaaagtaaggcacaactacatgatcacaagtagtaaacacaatacaaataatgaacccaagaactaaatgagaaaatgttcatgcataagtatctacagaacttatgaatatatgatccagttcaaggaattacagaatgtcatatacacaactgcattgtgttacaataaatttattacttctacacagaaagaacttagtgacttctaattctattttatacaattttacataaatttagtaagtttatgcacaatattcacatctgcaacaataacaaattgatcattaaaattcaggctaagggcaattaagacacaataatgtgtggcacgttataattacagaataccattcatcaagctcatgtctaggaatact

SEQ ID NO: 184 - DNA, 420 bp, Homo sapiens
gcagctaaattaaaatgaccttttatttgcctggacaacaaaaattttccatgattttgcttttttgaaacaatgataagaaatttttttttaggcaataagatactaagttgtatcaacaaactgcatgggatatttccacaaggagaggattttgttccctgatctagtttacgtgacattttcccttatgcttgctttctctgagctgactcttcttaaactgacctagatggtaccctatttcaactgactcagagttcattcaaaaatatgatatggtgacttggcttcactgacatgaaatccaggcactctctctactcttgctcacattcttccttgcccaaggttccagcgtgattttaggatatcttatgccaacccagtgtgccgtcacttctcagagatgtagggcca

SEQ ID NO: 185 - DNA, 904 bp, Homo sapiens
  misc_feature (517)..(517): n is a, c, g, or t
  misc_feature (526)..(526): n is a, c, g, or t
  misc_feature (542)..(542): n is a, c, g, or t
  misc_feature (727)..(727): n is a, c, g, or t
ttggcttttagaaagagaattttatttggaatgaaaatatagagcccaccctcccgcctcctctggggagggagcagagggctgggcagtggtcggggagatggtccctcagaggtcgaggagctcgcctgggcgtagacatcctccacaggaacagtgaggaaagctgggcgctggcttcggcctgggcctgggacgggtgggggtgggaactgacccctgcgctgcctcagaggctctgggcagccagctagcccggtgcgacccgctggcagaagctgagtgggaagggggcggcggaggagatgaaggtggcgtgtggctgtggccctacgcatccccgttctccatgcggcccagctgctcctccaggcggcagatgccggtcgccctgctccttgaccagcgccctcagggcccgcagctcctgcatcacctcctccagcttcccagcctccccggctctggccaggctgccgctgggggtggcatcagcagcagtggtggtggaggcggnggcccctangtgggaggagcccggngccatggcggggccgctgtcagacaacacgttgcgccggctgatcttcaggtcccgctgcttgctgggcacgtaggcctcccgcagtgagatgagggatcggtcggcatcccgcccgctcacccactcctcagcctccagggctgcctcgggccccgctggggggcgggtcagatcattcctggnagaggttcgactttctttgcccagtcatgacgatgggcttacactggcgcctcatgccagttgtggaccccggcgatcttgcacttgctgaccttccagccccgctttggcatgctgcccataccccgttgccgtttccttggtgggtgaacggttccagaaatggaggaaggaggc

SEQ ID NO: 186 - DNA, 659 bp, Homo sapiens
tttttttgtataattatttggataccaaactcactgtttaaactacctattatctgctgacaggccgccctcaacttcttacaaaggacaggatgttaaattccatttcgtatcagtctagcccatatcctcagtcactcactatcccctaactttattattcgtcatggtccttaccagcggaaattacattatttactagcttactgtttgtctctaccaccagaataaaagctccatagcagcactgacttcatctggttctctaacacctagaacagccccacaggaagcaattaataaatatttctgaataaatgaatcatcttcagctctctagaccaagccttctccttttgagcttagactaacagacacctctacttatctcctaggcaccttaacctcaacatgtttctatactaaattcatactctccccttccccgatcttctcttcttcctctttccccttctcaataaatttcacagccatccacctaaatcagaaacatggacatctttccttgctgcttccttctatctcacctcccacaaccaattgatcaccaggtttcctgtagattcaaccctcctaaatgtactcccccatccctctaccattgcaatagtaaaccctagtcacctttgtgacttaac

SEQ ID NO: 187 - DNA, 554 bp, Homo sapiens
tatgcatgtatacacactttattaaatttgcattctaagatatacacaaggccagcatttcacaaaacttcctattattccaaaagcagtaatcatgaaacagtgattatataagtcaatcaagcaaaaaacattatctatagggttgtatcatatcatctcttatacctgttttcaaatagaagcctgaaatatatgatatatattagaataggaagagagaattttactttataacaatcgcttttcaaatattagactttatataaaaataaaggggtcttaacaaagttcatctgtgagttagcatatctctttatttcaaaacaatccctgcaaaaacttaactttccagtccatttaaacaacaaaaactaaaaatgaagctgggttaaataataagggaatcatcttgctcctagttctcacaccattggaacaacttccatttcctgacctaattctatcccaccattgaatttcaaaaattaatgtaaataccatcatatttcagttatttcttaacagtgttaagttcgagcctaaaaatgatg

SEQ ID NO: 188 - DNA, 492 bp, Homo sapiens
ctgttttgttttttttttgacgtttttgtttttttttgagacagcgtcttagtctgtcgccaaggctggagtgcagtggcgcaatcaaagcttgctgcagccttgaactcctgggctcaagcaatcctcttacctcagcaactaggactacaggcacatgccaccacgcttggccttctaatttatttctgtgtcaacaaaataaaactcaggcctaggaatagcttggttcacaaatcacagagggacttagtattccattaatacaaatggaaacattaagttcatcatcagatgataaaaggaaaaaaaaaacacctgatactcatctcaaaagacgcagataagacatttgcataaatccagcacctattattacttcaaatttaaaaacttcttcttttttaagagatagggtatcactatgttgcccaggctgatcttgaactcttggcctcagatgatcctcctgcctcagcctcccacagtgct

SEQ ID NO: 189 - DNA, 666 bp, Homo sapiens
  misc_feature (517)..(517): n is a, c, g, or t
  misc_feature (555)..(555): n is a, c, g, or t
  misc_feature (635)..(635): n is a, c, g, or t
  misc_feature (638)..(638): n is a, c, g, or t
  misc_feature (663)..(663): n is a, c, g, or t
cggggcgcccgagggcgtggaggccgcggaggccgaggaacaggaggaggcggaggaggagcaggacgaggccgaagagcaggagggcggcggcggcgtgcgcgacgtggggctgtcgagcagcagcggcgactcgaggccgcccgggggctgatggtggccagacgggaagcccgagaagctgaggctgtggtgcaacttgggccgcggctcccgcgggaagcccaggtgcaacgcatcgcgcgtgccaaaggcacgcaggtccccggaggcgccccccgacggcgcgggccgccgctcgtcagcgttgtggatgaagtggcagcgcggcccataggggcagaagccgatggtatgaaaggtgcggcacagctcggtcttgtactttcgattgcaagtcaggctgcgcagctcgtggaagccatgcgcgaactggcacttttcgccgtacttgcacgtgccgctctcctcgaagggccggcacagctcggtcttgtagcgcgtggagttgatctgngagccgccgccccccttctgctgctgctgcaggtgcangaggtgctggctgcgatcgccgttctcgctaaacgagcggtcccggaatttgttctcctttgtgagcaaggctgtgccgncgncccccgacggcttctttagggtgcngta

SEQ ID NO: 190 - DNA, 835 bp, Homo sapiens
tatgcttaaccttttttttcttttctgcgttttttatggtggccagagtgtcttgctgtactaaggtctgaataatatccattataggaccatgatctggatctctgagacaagcttctttcatcccatcggcttgaacaggggtcacttaacttatctcctttactccatttttctccactaggtggtctatatgctcttaatctctgcatttcctctttccagtgaggaggagtttcactgctgtcatcatcatctgactcagaacaggatcttgatcttggaggtgtgtgatagcgaattgtgccccttcctttaatcttccgtccagactttgatacagatggtttctgatcacttacaatgggtgcaacatcaggaatcttcggttcaagttctgcagttaccacaggcatatcttctctcagtaaaaatcggtctcaggcactggaggaatctcttctgggcggaccacaggtttttcccttttagcactggaatcaactgaccttttttcattggtatcactcctctcagagtgaccttttgggttcattgcatgtttattccttggctcttctgaactgcttgcttcctttcgcctctttttagaacgtttaactttttggcctcctcttatgtttcctccttctgcttctctcatggtcaagttcactttctggagatgattctgaagaagaggaggaatttggaggaggaatccgagccctctgaatggagtgggtttctcccttttttctcaaaaacatctttttatgatttgggggcaagtacttcacagtcaataactcgcacatcttgcatatggctgctt

SEQ ID NO: 191 - DNA, 472 bp, Homo sapiens
tacagtttatcttttattttctgcaaatttaggaacatatttactcgttttcacattgaatcttaagtttaagctcttcatttggtatttaggcaatatatgagaaaaaaattttttttgttcatttgtaattttaacaagttgaacattttaccatgattgaacatgtttttattacagtatttaacattcccccaaagaataccctgcaaagtgtaaacctttgtcccatactgtgatattactgttctgctacaataaatgtcaaacctaagcactttgcagttcactacttttgggaaaatgttctagggaactgtatcacaggtgaaactgttacccataaagtgtagctctctgaactggtgtgatcgtgtctctgctgaatggtggtggggatagctggctccaccacacacacctgttttaattaggctgggtaatgtgcacggagagcaaagatcacagacta

SEQ ID NO: 192 - DNA, 351 bp, Homo sapiens
tttttttttttttttttttttttttttttaaaagcatttcctctgaatattttattcaaaaaaaaaacacaaaaagataaggcagaaacaaaaatcccagtcatttgcagtatctgggggctttcaatttggccctcttgtttaaacaaagaaaaatagtaaaattaatctatgtaaaacatgccatatatattcaactgctactaaatataaaaagctataaaactgggggttcaattttggttactggattatcacaacacttatattaaaatatgtatacttttaaattgggtttctataaaaaagggattctaatcccataaaagttatttcctaatattcaataaa

SEQ ID NO: 193 - DNA, 711 bp, Homo sapiens
  misc_feature (345)..(345): n is a, c, g, or t
  misc_feature (563)..(563): n is a, c, g, or t
  misc_feature (616)..(616): n is a, c, g, or t
acttcgtaatattttctgtccagatcttctactcgagctttgacttcattaagatcctggtccagtttattatactgctccagatttttctctttatttgcttcagtgtcttccaaatccttatgtatagcagcaatctgtcttttcttgtcattaatagcctgatctaaagacttgagttcctttttaatccacttatccctttcttcttttgatgtaaactggcttcctcgaccctgctttgcataaagatccgttctttcctgggtagcttgagccaatctagcaattcctcgttcttctttctctttcacactgttgaatttgggttctgtttctgccagntctttctgcttttcttctattttttcaagcagcttctgcctctcttttaataaacgtttcctttgatcactattgcctgctagttcatcttgtaaatcctaggctttaagctccaacttagtcctctgcttaatctgctcttgtcttcagcactaagctgttcttttctttcttcatagctgaagttttgttttcattctctaactgggcgtcgaatnctccattttatctcttgcatcctgctgagcatcgtctcaattgtctgggattntcctcactagtctctcgcttagcagaaagctcatcaagtttggcacgagtctcgttaggttcctgattgtaaatggttattcccaggctcgtcct

SEQ ID NO: 194 - DNA, 445 bp, Homo sapiens
tttaggtaagatacacatctttactgtgtatatgcgtgtacaagaaggaaaacttgcttttttttttttaagtagatgttacgaaggatggttttttttttttttcaacttgcaaaatctcttgaaggttggagcagagccgccggttacctttgagcatcgaaataccgcaagttatcccgtttccttttcccctcaggaaagatgggtgcagggttgagatgttacaagagaattaaaagagagccaccagcttggcatagtagaagaaacaaacccaaaatgaaaacacccggattttaagcgcggatcctgcgaggccggtttgcactggccgaacgcctgcgttaaccctttgggcgccgcagctgggatccccggtgtttgcggacccgaccggcaggaacagagatggagtgtcccgcgcccgcatggggagtgagct

SEQ ID NO: 195 - DNA, 473 bp, Homo sapiens
aaatcttgtagagcttgttaaccagaacaccactgtaagagaccttgaatctttttgttcccaggactttctgaattttcagcccatatgacatggaagaagagttagaaggggaatctgactgcttggatcagggactgtctggctggtggaacttgaatgtatacaacactcttcatttgcatgttttgacattttaaaaaatgttttcactttccttatctactttgactctaataacatcctgaaaggtaagtagaattattctcataatatgatgaagaacccaaggctctcaagggaacaccactcttggattatttagccccgctcttctacaagaattgcataccccaacccctggagcccctccccatatccatgtttctgccctataatctgatcctttcaccaaaaatgtttagatcaggtacacacacctgaactaaattgggactatcagtttctctctc

SEQ ID NO: 196 - DNA, 802 bp, Homo sapiens
  misc_feature (596)..(596): n is a, c, g, or t
tttttttttttaagtttttctgtttgtttctgcaaggcctagctatcttattacaatttgtatttgctctgcaacaactacaagaggtaggcataaagcatgaaaaagtttctcagttagtacctcgccatgtgttgttcactgcacaaaaccattcactttggacatgaatagtcattccttctattatcttctaaactctaaagcaaagctgctgccacccgtaaatgttctaaaagagtgtactcacaagtaagaaactttctctactgaaggatactgtcacagagtttgttgcagagcatctatatatatatttatttatttattttaaaaaaataaacaacaatgatgaacgaacccaggttcctagaaccaattctcttgattctctacttccacaaaataaagtgtatcatttggccaagactacagatgtgttttttttttttttcacagatgcaagtgccatgcaaaaataaattaaagaacagataccaaaacatacatgtgataaaactacagaaggtagatttttaaaagcatttatataaaacataattataatacctctctttttttcctttatatacagncacaaagctgtagttatacatctaggatttcctctgctgtaccccccagcgtaatctgtagcgacccagtctccagcttatagttgggtcccataatgcagacaaaaaaatgtatattgccatggattcggcgatgaaccaggcgactgcataattcagttttgaaaacacagtgtgccaccctggaccccccctggttgaatgta

SEQ ID NO: 197 - DNA, 476 bp, Homo sapiens
tttgcttcaatgattgctcttgtttataatgaaaattagtttttcttctaaaattacattttgtacaatgaagtgtaatactcttccctttcttttcaatcccgtgtagactttaaaacaaatagagtatccttagaatcaagccataattctaatgacatttgaaagatacattcattttctttacagcatgaaagacacacaaataacattttatctcctttaaacaatgaaattaaagaagttaacagtttcaaccttctgtccatagaaaaatattttctatatcctttacacaacaaaggtaggaaactctacagtgtttaaatgaaacttttatgagctaacaaggctttcaaacattttcattcttgcactgaaaagtttaaaaggtttcaggaagttaaacctttgaactttcccctaaaatggtaatctttaactagcaatattgctactaccttttgcttagtaaa

SEQ ID NO: 198 - DNA, 399 bp, Homo sapiens
tttttttttttcattacaacacttcaggtaaaaacgattcttagttcaaagacagacataaacaggctatgggcaggatctggtttgctctgtagtttgctggcccctacttcagtagtttaatatcacacgataaccagatattatgacaaaaactgtcctcacaatcaaatatgcgtgtcactctcagtctgttctagacaatttaaaaagtaccaagtgaataaacatgtctgtatattatttttctgtagagtcaaatacatgtagtcatacacatctcagtgaatactgacatggtaatgtataagtgtagtatctgtatcatttggggggaatgttttattacatttaatctacataaagagaatgcataggtcataaatgtccacagtttga

SEQ ID NO: 199 - DNA, 585 bp, Homo sapiens
tttgttttttttttcatttatagaaatcaagtcagagagactaaatatttttcagagggtaacttcagaacaatctctcttccttggtaactgcagaagatgggcatctgaactcttccaagtaccaaaattactgtcacaaaaataatgaatttaaaaatagggcaaactttgagaagactacaacaatgcagtcaacactgagacaggttcccccagagaaaaaccttctgcttcagtgggcccctgcagaacaagttgctggctaagaaatttcaagagggtaaaggaggatctctccatagcccaatattaagaacgcagggccaggagaaggtagccatgattcctcctccctcatgctcaccaactataagtaggaatactggctgatcttggtaggactcagcgggtatccagtgtaaattgttgagcctcgggaagacccaatgtaggattgggtggcaaactggtgtggtactgagcaggggccacgctggcagaagtgaggaggctgggcccaacactgacagggaccctgtgcaccaaagtgctagggtgagtggtataggctgcagcatgcct

SEQ ID NO: 200 - DNA, 572 bp, Homo sapiens
  misc_feature (538)..(538): n is a, c, g, or t
  misc_feature (544)..(544): n is a, c, g, or t
tacattccaaacgagcaggagttattttattttgcgtgcctgcagtcccccacgcagggtggcttcctgtccgaggacggagcaggcttggccgtggtccactccaatcagtctatcttcacagcagcatagatcttgcgaacaaacatgtaggctgcatagaagccgatggtacccgttagcagccagaaggacaagaccatgagggccgtgtagccaaagtagaggagagaggggatgaactccacgatgtccagcttgttaacgaaataaaagatggcataaaccaggacgtagaatgcagagcccccggagactaggaaatttctccaccaccagcggtaatcctctgcacacagctggaagtacaccatgacgatgctgatttgtgaacaggataccaccaggatgatgaaaacaaggaacaggaagccaaagaggtaatagaactgattctcccagatagcactgaagatgaagaagagctcgatgaacatggcgccgaagggcaagatcccagccatgaggatgcccacanatcggntcatgtaccaccgctgcttcgggatctg

SEQ ID NO: 201 - DNA, 517 bp, Homo sapiens
tttacttttaaaaaaatgtcattaaagcctatccactattgttgatattgccttctttgataacccatagaatattttgatagccactcatagggagttttctaaaataaattcatattaattttaatctcagtaaaggtgagtcattggcaaatattaataattaattgctatactttttcaaaacttctcagataagaaaaaaatgcgtttgacataaaaggcatttggcagattgggattctttctgtttgctttttcttttcttttctttttttttttttttccaattctttctacaaacagcatcaaggaaaaggcagaactgtactcctgaggcttctggaacagtcgacccataaattctctagagtagagtttcttaccgggtgtgcaggcatctgaagagttcccgaaaaatactcatgtctggaagctactcccatagattttagatgtattatgcagctaggtattggaataaagcaaaaataaccacagaaagtctgagacattg

SEQ ID NO: 202 - DNA, 501 bp, Homo sapiens
  misc_feature (496)..(496): n is a, c, g, or t
gcataaagtaacttatctaggtctttaaatggctaggaagttaggaagttcaaatggctaagttctatttgaagttggggtaataaaataagcatcgaaattcagaacattctcaacaatcacttaggacagcagttactgaagcaattcttaatagtgctgtgaaaaggcagcaagaagtctcagataaggaatcatgctagatcataaatatttcagcaaattatgatgacatctaaaacacaaactagtcaagagaggcaaagcaggctttttgattagtaagtgaaaaatgaaacaagatgcatatcacaatacagtcactagtagacagctgaaattgatcacagtaacgtgcactttgtcactagatacaagtgggataaaagtcgatcccaaagcatgcggtacaaaatgtgcaacatccagctttgtgcagggggtcctctataaaccctatgagcccaaattatagtcacaatcgctggaaggattntacag

SEQ ID NO: 203 - DNA, 389 bp, Homo sapiens
tttacaaacattaagcttttatttataataattttattgtgtcttatctaaaacattttgtggtgacttactgcctaaaaattccagtttagattacaatcctataattgtacacagaaaaatatctgatactacaaacaggatataatcttaactttgatctcagtttctgttgcttcatgtcacagagaaaacagagcaggaaaatggcaagtaaaacagaagtgcacattgcactaagctatcgtaaagcacaggaaacaatcttttcaaaatgtctacactgaactgattctttaaaacgattcactaactgttgtaagagttagtgctcccattactacagtgcaaaatgtaattgtgtttcaatacaaaatttaaagcaatct

SEQ ID NO: 204 - DNA, 585 bp, Homo sapiens
tccgagagtaaataattcttgctttattatgaaccaagtcacattttgtctcttccaacagatgcttgagccaaaaaagcaaacataggcagaaatacaattgagaatatcttcatgtttcaacctttaatctgacttgccttttactatcctttccccatttcttctaatctcttttgccttacaatatattaccttctaggtatcacctcatcctatagaatcccttctagtttaatgtcctgccccaaacaatactaacccattgaagataactatgaaacctttaaatggacagtggttccttttaaaagcagccttactgaaaattttatatacacttaaatcaagtaacagttaccgtgagttttctaaacttttgtgttaacagaaatgccagttcagcagtgtgactggtactttaaatgtctgtcttgccgccctagagtgacagacatcccagttaaacatattaggaataagaaatacataaatccaatgaagactgtagaaaaagaattttagcacttgaaggaacttcagtcatttaacccaacccattcatgttatagattgagaccatag

SEQ ID NO: 205 - DNA, 301 bp, Homo sapiens
  misc_feature (211)..(211): n is a, c, g, or t
ggtagagacagagtctcactatgttccttggggttgttgcaaatttctggggtcaagaaatctcctgccttggcctcagaaatgtattttcttgatttgcatttgacattgctgtctgaccgaaaccaattcagctccacaaaggagtaaatataagtctttttattttaacaggcattttataatccctaacaaaaatttttctccattnttttctttattggtaacataaaaattaaattttgatattaaatgctaccagtattattcctttttaaagcccagtttagctcccaataag

SEQ ID NO: 206 - DNA, 494 bp, Homo sapiens
atagttctctcttccaaattaacagcactctaacatactgtgacaatgtccggcatcctttagggcattttgttacccagaattttctaactatggaagttactaatgaatgcttctattacgcttattacagggtgtgaaaaaagttaaatcattacaaaaaaaaaaaaaaataactacaaaaccaacattagtgctgttagaagtcccacgggctgagcaagtgctggctgcaaggcattgaggcaagcaggcagggctgctgctcaggagccacggcaatgccaccgtgtggccatactatcagtgcagtgtataattcaggctaaaaacaaatctgcggcatttgcattatttcaaattttgagcattaagaagggttttatttttcaaatagcataacgaaaattagcataaaatgcattgcactgctttaaatcacctatttgaaaccttcatataatggcttgaagttattagtattgaattttagg

SEQ ID NO: 207 - DNA, 687 bp, Homo sapiens
tttatattgaagtctgtgtcttcgcccttttaagtgcatctccttagcattgggatcattaaagctgcactcgcataatttacaatggaaccgaattacttttccttcatcatttcgtacctcttccacataatcatggcccactggctgcacatcactctgtaaagcagcaagagatgcaggtgtgactggttctgacactgtgtcttgctttacttcaggaatctgcacagcagaagtgacaggagtacttttaacacattcggttccttttatgtcttctgctttatttcctgttgactgcagcttattaccaccaacaaaatttattttgggggtagatgttttcttggcagccatatttgtaggcactgctgatactttagtgttagatgtgctattaagagacgagtttcctgtagtcgtaagacccttcattgaagacgttgcaattgatgacgtattcacagtacaattgtttgctgcaatgcttgaaggagaggcagtcggctttgaagcagatacagctgttgaagaagtagcttggctaacaacattgggtctgttgatggaatgggtttaccaagttttgtgtgtaacttaaccactttctgatgcttagcacccacgaatgtgggcagcatacgcatctgctcctgtacaagacaacatggagagcttacaacg

SEQ ID NO: 208 - DNA, 698 bp, Homo sapiens
ttttccctaaaaatccaggtggataaaggactgtgtggggaaagtaccaaataaatgaggtaaaaaggaagggtcatacaaagagggcactacaccagcttcttggcctcaaagaagctcttgaggtgacgcatctgccagatgccagtgaggatgaggatgacagtctgagcaatggaccaccataggaccctctggttggtgctctcgctcgtcagtcggaagcgctcttcacgatacctttggtaatcctgctccttctgaatctgttccacctgatcaagcaactggcgggcgcggagctgtagctccgtcagcttatcttttgcagcaatctcagggtagttgttggcatgctccccaacctggatgtcgagatgcacacgcagtttgccaccagcgaagagagccatcctggtagaattggagtgcagacagaatttgatggtcaccggcgtgtgggaggtgaacgtgaagcggccctccgagccgtactgccgggacagcaccaccttgccgtcgtgtccttcacttccacgtgcatgcccaggccaggggtcgagggcaggaagacctccttctgcttatcccacatctgggtacgatagttgccgatgaccatgggtctcgtcggggatttctcgatgaaacagcgccttctcggtctgcccatgttggaaataaaaccccttgcccct

SEQ ID NO: 209 - DNA, 740 bp, Homo sapiens
  misc_feature (472)..(472): n is a, c, g, or t
  misc_feature (498)..(498): n is a, c, g, or t
  misc_feature (569)..(569): n is a, c, g, or t
tttgatctggtgttttggcaaaaacaatttcaagattttctccctccaagtctttgccattcatttcttccatagccttgacagcaccatctcgctcatcaaaatgaatgaacgcataatcttttaacttcttcactcgttccagtttcccaaactgactaaatgccttttctaaaatctcttctgttacagtattggcaaggttgcgtacaaacagcacttttacctttgccataacctcaggatcaggatcttctataggatcagcccattcaacagttccaacattcccccagaccttgactttaccactcattaacctacgccttgcctgggcagctgttttgtgatcttcatattcaagaaagcaaaagcctctgttttttttcttgtcatccggttggtggtataaaatgacgtctgtaagaccctctgttactttgctaaattcttcaagaatctgttctttggntttactcttaggaatagagcccacanaaagcctattgttgggcactgagatgcagacaccaatatgttttccagaacgaattcatgattatatacangttacagcctctgactgctcttttgtcaaagtgacaacgcatacctctattggaccatgagtggtccatcatagacgagatccatatagtcagcttctcaatatgggacagtcatctcaatagatctctggatcttcccacaatatctatgcacagaagctgtgactgata

SEQ ID NO: 210 - DNA, 506 bp, Homo sapiens
  misc_feature (425)..(426): n is a, c, g, or t
  misc_feature (451)..(451): n is a, c, g, or t
tcacaatataaaaatggctttaatataccaacgtacagattattcagttccattgtaatttcccaaataattttagattataattttcagaaaggatttttaacatctgctaggctaattccatcatattagtatatgaaattatcttttctccagttatttataatctttctaaatattttaaaatacagtatattttcacaacaaattttattttccccacaacaaagaattatcccacttctctagtaatttccatcgtgcaagaatgtagaatatagactaataagcctaaataggatctaaaaaggcaagttacctaaaacccttcttgtctaaccatattaaggcccaagtttacctagagtcacaattgtagttaacaagtgctatttctctggttgttttttgttgttgttggtgtnngtttgtttttttttttgagatgagnctcactctgtcacccacgcaggagtgcagtggccgatctagctaactggaactcc

SEQ ID NO: 211 - DNA, 525 bp, Homo sapiens
acagacttcacagagaatgcagttgtcttgacttcaggtctgtctgttctgttggcaagtaaatgcagtactgttctgatcccgctgctattagaatgcattgtgaaacgactggagtatgattaaaagttgtgttccccaatgcttggagtagtgattgttgaaggaaaaaatccagctgagtgataaaggctgagtgttgaggaaatttctgcagttttaagcagtcgtatttgtgattgaagctgagtacattttgctggtgtatttttaggtaaaatgctttttgttcatttctggtggtgggaggggactgaagcctttagtcttttccagatgcaaccttaaaatcagtgacaagaaacattccaaacaagcaacagtcttcaagaaattaaactggcaagtggaaatgtttaaacagttcagtgatctttagtgcattgtttatgtgtgggtttctctctcccctcccttggtcttaattcttacatgcaggaacactcagcagacacacgtatgcga

SEQ ID NO: 212 - DNA, 477 bp, Homo sapiens
ttttgacaactgaattaactttattctcttctaactgcagattcaaggtatacaactgaacattgctatttttcttatgagacttataaataaaaatacaaaaaatgttcactacaaaaaaatctactgttagtaggatgtaaaaaatattctctttgctatagaaggcacaaacttcacttagtgacacatggagagagaaaaaaacctgcagcagtaaattcattttttctttttttttccttttttttttttttaaatcttgtcagaaacactgaaattacaaagaaacgcgtcaatctacacgaaacgaaggcagatgcggaaagctgcaaccaggactgcacaacttcgagtgaaactgcttcggaactagaacagataaggagcggcaagcacaactcggggaagtgggctggggagggggcagcaggaggcaggagagagggagagagaatggagtggacagaaatgaga

SEQ ID NO: 213 - DNA, 401 bp, Homo sapiens
aactacttggtgatatcctaattaaccatgctcaattgattgctttcaaaataagaactaagagctctcatctagtcaagtggaagctaattcaactcttttacactatggcaatgataaatctcacacacatacttccactcatacccaccacatgtattatattagcaatatcatactctaggtcttctggtttgagtcagtataacatgataggcacatttctatggaatttcatgcattattttcttttaatgcttatgagggtaagtaccaaaatatccatttttcattcacagagtagaattattttttgactttttttgtgatcttttgaccaactctcacatccagaaaatgtgccatttctcttggaaaaaagcaaaagagtatgtgggtga

SEQ ID NO: 214 - DNA, 449 bp, Homo sapiens
taacataactgtggacatataaacatttaataaatcagcacacaactgtgatggtgattgatcctttgacacgcacgctctgtgtggacgacacgtgctcccagcatggtaggggaatgacctacggggctgacttcggaactgaagactccccatatatgcacactgaacacttgcgtgcagacgctcccgaataccgcaggtcttagccaggcaggggtgaatggagggaacagagcagctccttccagcctctgggcaagcagagtgcttcctttttccagccccaggcatcgccttccctagacacggttttctctctgtgtgttctctcattctttccagcaacagcacagacagagctcagactggctgtgtgtggggtggcccacaagacagcgagcctgcttgcgctgccgttgtgctgtgtgatccccgcccagcccttg

SEQ ID NO: 215 - DNA, 449 bp, Homo sapiens
aaagtcttgctctgtcacccaggctgaagtacaagcaagatcgtagctcactgcaagctcaaactcctaggctccagcaatccccctacctcagcctccagagtagctaggactataggcacacaccaccaccccggctaatttttttttttttttttttaagtagagataaagtctcactattttgtccaggctgttctcaaactcctggctcaagcctcatcctcccaaagtgctaggactacaggtgtgagccaccacacccagtgtgagttcacttttaatctttacaagcaactaactctggttttggctcatttaatttctagtttacatcttgcatattatgctaactgggcaattttttttttaaaaaaggaagcaatcttttacaattatgctttttttcaatttttcaaaaggtcacaaggaatttctacccatgcatg

SEQ ID NO: 216 - DNA, 499 bp, Homo sapiens
taaactaattagtactaaaagagatttgccaaagcttaaatggaaacaaagactactattaccacatggcatatattctaccatgctgttgaaagtatattcaaaattacaatggtacttatttaactttctaataatacaaacaagaaacattctggaaatcaatcctaaggtagcactatttggagacattagcaatgaagaatgaacttggagtaaagagtcaacaagagtagcgtgattcccttctttctcctcataaaaacaaagctcttctggtctctggtccgccctcatccctccccattcctggtgtgcatttgtgttattctgcagataagactttctaataccatgtcaggatactatttcaagacttcctattgtaagcattgaagtattttattgtgttgcaatgtagctttttacaaaacaattaaatgatactgcaacaaacacagaatgatacaatataacttcataggacaattataaataa

SEQ ID NO: 217 - DNA, 749 bp, Homo sapiens
  misc_feature (613)..(613): n is a, c, g, or t
  misc_feature (626)..(626): n is a, c, g, or t
  misc_feature (717)..(717): n is a, c, g, or t
  misc_feature (720)..(721): n is a, c, g, or t
  misc_feature (733)..(733): n is a, c, g, or t
atttcatagtatttctattagaataagagattagatttgttaaacatctaggttaaaatggttaaaaggattttcatacaattttaggcactatacacgttgtttacaacagcattggtacttggatatggggaaagataaatccgacattttaatatcttgatcaatttgtgacattcaaaataattccatttaagaaacattaatcaaaacttaaagagacataccactaagtatcccacacagtatactgaaaataaatatagaaatacaaccagaagtctacagatcaccacagtagacagactggtgaagccccagctatcatggcagtgaagggctctggctagatttggatgtcaactgctgagttctacatgaaaagcaaataataataataaaataacatgatgtacactctctgatgctcattttcatagcagcaaagcatgcttcacatgcactgcctgtgaaggatctcacaaggctccctcctagagagaaagtatgcccagcaagaataaagtaccaccaaatgtcaaagaatcccgaaaatacaggcagacagccagtcatggagcaggaacagcagtgcaattgtaagaatgactanccacattcaccanaatttcacttgtattcagcctggcacaggtttgatcatcagcatacacacaaatagccccaagcacaaagccaatccaccttagggaacantanntagtatagatanagacagtatattaaaa

SEQ ID NO: 218 - DNA, 625 bp, Homo sapiens
  misc_feature (22)..(22): n is a, c, g, or t
tttttttttccttcaggggtanttatttcccggtcagaaaagaagcagggacaggcgcctctgcctgagcctggcaaacacaacacgaagaccggggatggggcgggggaggcacaggagacggctctcaacaatgtgtgcacttggtcccttgtttgttcctggctgggtcagggaaggcctgccgggggtggtggcactgaaagcctgggggaacaggcgccaggccagtggcccagggacggcacggacggaggcaataaatactgatggccaggcgggggggggacacatccgcctgtccgtcgtccgtccgtcagtctgccctgcccgcctctggctgggctcagtccttccagtccttcttgatggtgagattccactcccaggacaggtggtcggtcttgtcgtcgtctgtgaagcgggacttgatgctgtagctgccccgggccagcatacccttgggtgcctcctccacgggggtcaggaactcgtactcctcggcccgggggccatagctgcctaccatgtagtcagtcttgtcaatcttgacgcctttccctgacgtatggctgatgtacttcatgccggacactatcctctcgttaacccggaaagagatttt

SEQ ID NO: 219 - DNA, 405 bp, Homo sapiens
ttttttttttttgagacagggtctcgctctgtcacccaggctggagtgcagtggtgagatcttggctcgctgcaacctcctcttgccaggttcaagcgattcttgtgcctcaacctcccaagtagccgggacaacaggcgcgcaccaccagccagctaatttttgtatttttagtagagacggggtctcatcatattgtccaggctggtctcgaattcctgacctcaggtaatccgcctgcctcagcctcccaaagtgctgggattataggcatgagccaccactcctggcctgaaacttggtgcttccttttaataagacatttcatggtttcagaaatgaatttgagtcaacacaaattaccacatttattaatgtttcaatttaatattgctagatatctta

SEQ ID NO: 220 - DNA, 505 bp, Homo sapiens
cacttagtatttaactcacatttattaaaaattgaagattacagaaaagcataagattggcatcattaaacaagcttaattaacttacctttgactaataaatgaaaatatttaataacactaaaggaattttgagaataagttctattccaaccttagaaattaaaaataaaagcaaagcagctattctccaaaggagaaagcaaccacagatctccctctagtggcaaaagataaagttgctgctgaaaagctgaattgctcctccatacatagaactgctcagacatttcttctataaaattctaacttaagattctaaatcaatatataaggaaaatagatctattttttgtcaaaaaaaattagacctactgcccagtaatagcatggattaaaaaaattagacaattttcacttactatgaatgctaatctctctagaaatctgctctctctagaaatctgatctgtccagaaaaaaaaataagttttgccaatgacat

SEQ ID NO: 221 - DNA, 456 bp, Homo sapiens
ttattctggcccttcatatcatcagtggaaactgtttattaaaagggaggagtatgggatacacaaatagcataaatcgaaatctcacacttaatcctttaatgttaattgcatttcagactgagtaaagtctgactaaaaatcacagcaatgggacaaagcactgctttgttttaaaactgcacatgtgctttctcccctgagaacctttggcttagactttttgtacagtaagacatttcattaaatatggttagatttgcagtctaagaccttaagtgacacactcaatgacaacattcttataaattatagccaattataagtcctccttctggtttctcttctgtgcttcgtaaatatgtacatctttttcaggatcgtagtgaacctttctcacaataaattgcctctccagcattgctaagaagttgttatcccgttcatagcgaattc

SEQ ID NO: 222 - DNA, 540 bp, Homo sapiens
gagcttaaaaacagtatttttatttttaaaaaacctcaacattaaggaggaacccttctctgaagcacatcactttcctattaaaaaataaaaaaagtacagtagaaggagcacaggacaactctcttcacacaaggaagctgtgtgtttacacaattcaaacacccagaatcaaaaccacattctcccattaacttgtgaagataataaatttgctttgataacttctttcaagaaaagataatttttctcccaaagcacaccaataaatatttatattaaaaaccacagttaatttaatcaggcacagaagaaaaaatcatttttacattagtctttgtagataagaaaaatttgatttacagtgcatattccaatcccaatctgggtttgtcctcaaattttgagaaatagcataaagaactattttgccaactgtgcgtcacaattctatgattgacgtgagttgcaggcacttagcgttccaacagaggcacggcaactgcagccatcacagccacagagctccccacaacatgg

SEQ ID NO: 223 - DNA, 548 bp, Homo sapiens
ctaatttttgttgttgttgtggtttaggcctctgtccatccttgaagacagcatagaaaaggacactaacataattcctggggagcacaaggtgcaaatcctaaagtatgttacagagacagactgagcttcacaaaatgaaaccaacgaagatcacatatcactgactcagaagaaacaacagtctgcttaaacagagaaaaaacactgtttatggaatacatgaatatgagaaattgtaccatgcagagatgtatgtatttaggcatttcctgcctgataacctctgtcaccctttgttttcacctatggaacagagaagaatactgcaaggtaacaagctcaaaacataacctactgtcatagagatttgtgattttttttcagatgtgcatgtaacttttacaagtgatcatggaagttatttatcaacttcccagagtttggaatttaaggagcaaactgagttattgtaggcaatacggtactaaagtgtcctataaaacaaacacatagctcttttttagtgcaaagaaatatagcaagta

SEQ ID NO: 224 - DNA, 759 bp, Homo sapiens
  misc_feature (657)..(657): n is a, c, g, or t
  misc_feature (692)..(692): n is a, c, g, or t
  misc_feature (738)..(738): n is a, c, g, or t
  misc_feature (755)..(755): n is a, c, g, or t
aaaatagactattgatccaaaagtattcgtgatggattttcatggccgatgttcactcaacttaaactccatgaaactgtttccagtgctcatatttacgctgaagtacaatgaggagccacttttgaagaagtattagaatggtacttttaaacaaatcttcacgtgtttcaataaaaacaacaacaacaaaaaactcagaagctattggtggcacagagagcaaatgaagggttgctatttttaagaggtcttcttgtgagtcagcttggtttcgcagtgtctagcaacttaacaccaatcagcaatgtagtcaaaatctctgaacatttcctgctcctcttccgaaagtatccttggttctcgaggtggagtcagaataggtgcttctgaggtaaattcatcatcaaaattactaacatcttctcgtcctcttatggtaggtataaatggtggctttacttttttgtccatcagagcgctccaatcaattagccggaaaaatgggtgcttttttacatcctctgcatctttctcgctagccccaaggcgccgttcaggatttctttctaacagccttctcattatagaaatggcttctgtagataagaaccttggataccttacttcatcatttacaatactgtcaaaaacttncttctcatcatcaccaggaaagggagactcaccancaagcatttcatatataagcacgccaaagccccaccaatctacagncctttggatagaagttnctgt

SEQ ID NO: 225 - DNA, 518 bp, Homo sapiens
ttttttttttaggattttcagtatttttattttccaaacattattttaaaagaacattaaaagcattagaaatacaaatcttgcctaatggttaacatacgaacaattattataaaatgtttaaaatacgtcacatactttgcatcacagtaagcatcaagagaactaattaacatatcctgataattaatcatattcaactgaattctcattacttttagttctcattttagcccttatgaagagataagttatatatttctacctccacctgtatcatcatgacacctttattatgataacacaggtagaagtagacatatataacttacgaagaaagaagttatgtctctatagatatagagatatagatacggacgggggctatgaatcgagcccactatgtatttcatgcaatttataacaataatttttttaacttttcttttggagattattttttgatgagcataaagagacaatacctcatatgcacctgcttagttttctttgtgctg

SEQ ID NO: 226 - DNA, 460 bp, Homo sapiens
acaagagtactttttttgtttttaattctctgagaaaatggaatctgaatcacaagttcacaatgtagtaaaatgaaattaagaaacaatgatttcagtaatgctatgccatcactagtgtttagctctgactttttcttgtaaatcagatcctgatatacagtctagagcatctaggttattattctacagcatattaaacacagaaaaggaggtttaaaaaaaaacacccctttcaatgtacaaacatgaatttaaaaactgcttttataaaatcacctttttacataatgtatatgcaaaactgctttaaatacatgattttggaagaattatttacaaaatctatcagtctgtggaacaattcacagacaaagcatacatagttgctttacttagttgttgcatctcaactttgggagatataaattcattcggcagtatagcaaacataaaaact

SEQ ID NO: 227 - DNA, 742 bp, Homo sapiens
  misc_feature (586)..(586): n is a, c, g, or t
  misc_feature (591)..(591): n is a, c, g, or t
  misc_feature (636)..(636): n is a, c, g, or t
  misc_feature (648)..(648): n is a, c, g, or t
  misc_feature (666)..(666): n is a, c, g, or t
  misc_feature (677)..(677): n is a, c, g, or t
ccatcagttgttccattcttaatttgttttatgcccttaggaaaatgacaaatttcttctcgctcaggtaacttttcagtgccatcagatgaagattcatactgttgttccattttaattacttttttcttaaagtctgaaggtttctttttttcttcagttccctttttgctctgctttttatcatcttcagaagtttcatcgctctggtctttctttaggaatttctctgcaatatcagataagccatcctgtacttttttacatgttttggttttgagatgcttgctcttttctttagtttcagcaacttttctaacttccaaagaagtaaaactctgctctttcccagaaagcttatcgacaccatcagtggaagcacttgcttgctgcttcttaggaagtcgatctcttaattccatgatggtcgtgtctttatcaactgtgccttctgctgaagagaaagtctctctctcttgttttctttcagcatcatcagatgatccttcttgtgaggtcttcaaatttttgtgcccttgattatcccattcctttttgctgtgtttctcatcttcagaagagtcanaatcntttgtatttggaattctttttttggtggttctgcagcaccaattntactcatgctcnttatctctttttctaatnctgagtcatanttagaagactcagactggggttgtcgttcttttagaaatatagagctcttagctgacttgccctt

SEQ ID NO: 228 - DNA, 506 bp, Homo sapiens
taatgattaataatgtttattataatgattgataattgttcatgatcatctctatatataattatgactattattattctattttctttattatactgaaacagtttgtgccttcagtctcttgccttgtcacctgcataatcctcagcccacaactgggactacaagtgcatgccaccaaacctgggtaattttttctttctttttttttgaaccagatgtggccttactatgttgctccggttagtctcgaactcctggcctcaagctatcctcccgcctcagcctcccaaagtgctgagattacaggtgtgagccaatgcagccaccccaaaggtggtgttcaaagttgatttctcatccaactctgattctagactgaatagcacagaccctcaaatgtgaggtgctaactagcaatcctggaatccagagatatacccatgatggacagcccagagaaagccccagtgctggggcagaatccaccagctcaggtgcaagag

SEQ ID NO: 229 - DNA, 507 bp, Homo sapiens
  misc_feature (498)..(498): n is a, c, g, or t
ggaggttattggcacagcagttttaatacaaccacgagtcttcacaaaataattttaatactttgtgcctgggctagcagcatcttgcactgtgacattcctatacagacataagcattttatccaagtacaaatgttaaaagcagagtaacttaagcaattgtgtatacaaaggtatacagacactgtaggttatttttcttcttgaatcatttttgctgcatagtaaattgcaattacatgtcagtataatgttactgatctatagaatacactttgaactgtgaggtatggcagctccctatgagagagagctaacatgtaaacctgaatattttgagtgatttttgttttagctgccacagatgggaaagacaaaaaaaaaaaaaaaaattccagcattcaaagaccctagagacttacttttctaatcaattaaaaaaaaaggtctttcagtacttctcatctattttctagcattcccttatcggagcactntgaacaaag

SEQ ID NO: 230 - DNA, 697 bp, Homo sapiens
  misc_feature (531)..(531): n is a, c, g, or t
  misc_feature (548)..(548): n is a, c, g, or t
  misc_feature (657)..(657): n is a, c, g, or t
  misc_feature (669)..(669): n is a, c, g, or t
  misc_feature (675)..(675): n is a, c, g, or t
  misc_feature (677)..(677): n is a, c, g, or t
cctgttgccattttttaatttctctttccaaatcttgaaggaaccaatctaattccgtctttgagatcttgttttcttctaagtgccttttcaacttctcttccaggtccctggtctcttctaagcccttaagttttatctgctcataattttcatacacttcttgaagttggtcttgtaatacttggtgctccttttcaatccgtgaaatttccccttgtcgttcctcaaaaggattatatggctcagtattgacttcttggtgtattatgttccaagatacctgtatggcaaccatctgcacgtgtggaatatttgttactgcactggtgctttctggaattacttcacatttgttgttagaatttccacagtgctcatcatttctgttagactcactcaggactgtatgagcatcacctgtgctgcagtgtgactttacagatattcccaaagagccctcaaggatctgtgtttcagaggcaatctggtgaccagcaacattctcagcattcaaatgatgaccctcanaataggcagcagcattnttatctgctctgtcattggctacaaaagacggcaccactggtactgatcttggtagctgatattcaggagaaagggctggccaaggtgtatataatgctgtgtactggngcaaaactggtnacacgntnatgtatgcttgccgtgtctg

SEQ ID NO: 231 - DNA, 537 bp, Homo sapiens
tttttttttcctttcttaagctttatttaagaaatcgagtactatatagttcaatatatataagacacatccagtattgtgttcctgatagcaagtgcatagattttgttaagatatcattttcactcaatagaaacgtttcatggtcacatgaagataatattcccagtgatttgcccaagcatgagaggagaaaacagaacacagcaaaaatagtgaactacaacagagatgaaaaacaacaacagcaaattagcagaacagtcgattcctgataagtgaataagctgattgtttggtcacaatgttttattcacttatcaggaacgattcacagtacattaatgttcactgtgtgtcctagcctgccagctaagagtccgagcccatcggctgcgtgcgactgctgtgggctgggcagcgtgtgtggcttccatcagcaaggcggatgttgatggtgctgcggtatcccaaggtggtccatgcatggcacacggattcaccttgctcacactgcagtggtgtcataccgactca

SEQ ID NO: 232 - DNA, 503 bp, Homo sapiens
tgttttgttttctttttctttttttcctttttctctgttctctacaaatcatttgggtctacatccagcttctcccagcatttactcaatatgaaacttccagttatagattaatttgaattctttgcactaattgtttaaaagaccataggaacctcagaccatccctcttcatggtctcaagagctcccagaatcatcctcttggtaagctaagtagttattagtaaggcccagggacaggactgagaagtaacatcttctattttttatttcagttttcctttaatttggaagcaaacaaacaaaaaacccttcagcttagggttttttcaattgttaaagtaatactgagcttcagttaaggctatgaaagaaaagaaaaaattttaaaaagtagtaacgtgtttttttcaagatattgtgggtaaaaacataataaaaagaaaataataattacttggaatcatgattaacattttgatgtatttccttccaatcttt

SEQ ID NO: 233 - DNA, 655 bp, Homo sapiens
aatcttttttttttttttttttcttctgctttggggttggtgagcgagaactgctagactcccgaacaaggctgtaaggtttgggaggctcaggagctggttgtttagcttctcgggcacgacgctgaggatcaaaagagctgccatctacgtaagaatcactgatgccaaaggcagcacggagtctttcattcttcttctcatttaattctgccaactggtgagtctccgtgaccgctggcctctgccctggggtctcctccttgcccccagggttcacatccttctccagcaacatgagtcgaaaggtcgccactttttcctgaatttgctgttcctcgtacccctgctcttccatcatctcctccagctcgaggcatcgcagctcgacgcgccgcttgcgctcgtggtccaggatgtcaggattaggccgcttcaccagggcagcctccaggcgccgcagttccttgggtgctgctctaggcttatctttcacttcaggggaggaaccagacctactgcgccgaggggatagtcgagatttgctgtcaacctctggagatgatccagaccgatctctctgccgaagtggggttcgtgtcttggctttagaatctggagacgagtctgactcacttctttcctgacgggatgc

SEQ ID NO: 234 - DNA, 789 bp, Homo sapiens
  misc_feature (513)..(513): n is a, c, g, or t
  misc_feature (558)..(558): n is a, c, g, or t
gtgccggtgggacttcccagatcgttctttcttgctgggaaggcttctccctgtgtcttctgtctcagacccatggctacccccaggctcctgcttgttcaggccgctacaggcagaccctgaagcaggtgcgtccattctgcctcctgaggaacgtactattttctctccgcccacttccttgcttttatttggctcaccaggatctaagccttggagatggtcctttgaggagcttcctatatcctttggtttttctggtcctttagttctggcatctttgttccttgaaagtttaaagtcaaaatataaagggttacaactgtatgaaatggagggttctgccttggtgaaaattaatagttctgatggccactggagggcagtgctttcatctttgctcaaaactgggaagaagggaccagtaggatggttgggtccttcttggctttctttccctgctgggtgggcagagggtttctttagaagagttggactcacacatttggtctnctgaaccttctgactatgactttctaaactctgatcacttacatncccctcctaggggccttctttgcctcagctttgctttcttgttctggagggctcgtccattgctgtttccttcggctggctcaagacttcattaactggcttttttgctccttggcttgctgcccgcttgatgcagcttttatgacttggagaacagcctcttttactctttgggggggcattttttggggtggagttataccccatcttgttgcactgggcttttaaaaa

SEQ ID NO: 235 - DNA, 484 bp, Homo sapiens
  misc_feature (468)..(468): n is a, c, g, or t
ttaagtgtgctcaaaagccccatgcttccgaggggcaaaaaagcaagaattgaaggccacgttggaagcacaaaattttccagggcctcccttctggtgtacggggcctcagagggcaacattaccatgaactgtcctgcacacaccagctggggaaagcctcaagtgaacaaagatgaaaacacggtgggaaaagcaaaagcaaagccgagcagcaggcagccatctgtatctgcttccaggggcagagtacaattcaacaacagacctttacatgtatttttgaagaaatccaattttgccaaggcctcctaacataagaagggcgctttcacaaccacgccttccgggccagctcctctccagatctgcactggcaggaactgctacacatggcttcacccttcgcctgaacccacttctcagccagctgtcctagcttcagagcacagcttctgcctggcctgngtgcgaggctgacccc

SEQ ID NO: 236 - DNA, 557 bp, Homo sapiens
ttttaagggagctatctacccaccacatttttacagttactaaggtggtatgtgttaacatcacatatagcagtatcattcaaacatttatgtgaaccacataaaaattttacattgcaacacagtatacacctacctatacataattgaaatagaagtttactcctattttataaataggaatactatttataaaataaatatggatttttccattgggggtttttgtttttttgtaacatgacccattaaatggatttcatgacccaccccagggtcaaacattctgaaaacactaatatgtagtaaaatggtggtagcagaaaaaaaagttccacaatcaggcttttggccttgtagcaggaaatcctgatgcacaagttctaccatcatcactgccaaaataattaccaggtcaccataatgtgaccatacagaaataaagctaccctagcaacttggaacaggtcaacaaaactctcctaacttacacattggtctcaaccatgaaagcagttcagaaatgccagctcgtttctacgtcagatactgactat

SEQ ID NO: 237 - DNA, 598 bp, Homo sapiens
  misc_feature (411)..(411): n is a, c, g, or t
  misc_feature (443)..(443): n is a, c, g, or t
  misc_feature (471)..(471): n is a, c, g, or t
  misc_feature (475)..(475): n is a, c, g, or t
  misc_feature (519)..(519): n is a, c, g, or t
  misc_feature (543)..(543): n is a, c, g, or t
  misc_feature (557)..(557): n is a, c, g, or t
ggtaagttttttactgtgggaaaccacatcctgcaacgtaatcttatttttcactagcagtccaattttgatatccatgagattgaggtcattctccagctgctggttagaacgaatgagggtgataacctcttcccgcatcttcataaggtcaagctcctcctgaaaatcctggtcactttggtccagcaggtggacaaattttcggaccacaaccataggaggatcctcagcattgatgagagtcttgtagtcatcccgagctttgtttgcccgaataaaagcctggattttgataatgtcatttatatggtcccggaagtactgcaggcgatctcgatagcgctttcgagcttggtgcatccttgccagggactgaatctttacaacttcatctttgtgggagcgcangtaagctaaccgatcttgatatgccttcttcntgttgtatcctctccactgtgactgaantgcngtgatggccaaggattgtttcttcaagaaattcattctgatcgnattcctgtcgaactagtatccacngcagcgagcctgcnggcctgtatcaggcctcatttgccagccacagtggttctcg

SEQ ID NO: 238 - DNA, 524 bp, Homo sapiens
tttgtttaaaggttttctaacagattggaaccctgataagatcatgcctgtgcagccctgcacaggcacgaggagactgtgatcaagtctgttactcgttacagtactgtgaacgtcaacaagaagaattgctgcatggaaaacactgaatataggcagaacaatctctcgcttacgatactgtgtgttgcaaataatgcctagaccagagcaatgcaggcgctatgattcatcacaggcaagatcaacaaaggaattgttaggacaaagaagaggctgcatgcagacctcccctgtcaaaacacctcgcagctcattggcttcatacagcctgccaaatgcaagggaagcagagagagggatggtgggtaggaagagaaaacttttttgcctgacaagcaacagccctcttccccacaaagcaggacagttccttataactaagagtaagttcacttaaacatgattaaaaaaaaaaaaaaaaatattaaaaaggagagaggaggcggagtttttcaaaatcg

SEQ ID NO: 239 - DNA, 562 bp, Homo sapiens
  misc_feature (305)..(305): n is a, c, g, or t
aatccataggatagatatcctgctaaaaaaaaaaaaaaagtcccctaagatatttatctcataacatcacgtctttgctcaaaaatgtcagtgcctgcttccatttgaaaatgcctaatttagaatagctagcatgatgtgcacatagttaacattcagtgtcaaaatatgagcgcccttactaacctgaacctgtcttctcagtctcccctacgctccctacaaaatctgtgtttcagcccttattctctaaacattctccctcctctttcattcttgtgctttcatcacaatgcttgatacangataagcatgcaataaatatttactcagagaatgaataagtgcccaatgttggctattaaattttaccaatccttcaagaagtgaagattttgtatatttctataaaagctttcttgatcctgctagtgaaggaatatgattcttcctctccttcccttgcaacactacagcattttaattgtacctccttacgaggagttaaccaacagagcagactattactagtgtattattttcatcctgagaatagggtcag

SEQ ID NO: 240 - DNA, 418 bp, Homo sapiens
  misc_feature (292)..(292): n is a, c, g, or t
tttcagttttatgttttttattgattcattttgaaacaacctttgaataattttcaaactaaaacaatattattttttattttaacaaaaacccatcttttctgtctcatagtttttttgtttattcatttttgtttttttagaaagagtcttgctttgtcgcccaggctggagtgcagtggtgctatcttggctcactgcaacctccacctcctgggctcaagcgatttttccacctcagcctccggagtaactggggttacaggcacctgccaccatgactggctaattnttgtatttttagtagagacatggtttcaacatgttggccaggctggtctcgaactcctgagctcaggtgatccaccgcctcagcttcccaaagtgctgggattacaagcatgagccaccgtgcctg

SEQ ID NO: 241 - DNA, 536 bp, Homo sapiens
ttatagaaaaatactttttattttgtcattgaaaaaccattttaaaataatatatcgtgtagaataaaaaattccatggatatatacatgcaaattatacatatatgtgaatttaattttgttaaaaggtaattggcatctgcaatttcatgcagtctaagtgaaacccataaagaaatgtgtatgaaataggaaagcaacaaaagctcataacattttaaaattagaaatcagattcaaaacccatcatgatctattttaaatttatctctataacatttcaattgagacataaaacacactttatacaacatgcctcactattttattaacagcatgacttccctttccccaatccccaaaccatgttcccatctacaccccaccccacccaaatctcacctcttccattagcattattacaaacatattttacaaatcttataccaagcttttccagtctcttttcaatgtagaaatatcttatatataaacccaaataccacaaatcttcacatttatattttctaaagcag

SEQ ID NO: 242 - DNA, 678 bp, Homo sapiens
gcagagttaaccagcccatagcatctttcacctttccctgagcctcctctccagtcccaggggcatctttggaatactgcagaaactgtgccacataggtcatgatggacttttcatcaggatcaacaacatccacatcttctggttccagcaatctggggatttttaattcttgttctgcaattctgaaggcctctctcagattgtctttgttggatctatgcttcacactcttcatgtcaattaggtctggtcgcaaggcatgaatgatggccaaaaaagccatcccatttctccaacttgacttaaaatcggtcacattgacagactcataggtggcgcattgttcctgagcccacaaaagaagggcctttcttgcagacatttgccatcttgcttgcactttagagcatttcttagctggaggacttgaggcaggagatgagtcaaccacactcacatcatccagggaaggctgattgtaattgcaagaaagagtctgggcaagcttctcaatatgaaagtgcaggataattgtccaaattaggccaaggataatggatgggttccatcaatgatatcagtaacatgaatatttattagcttaattgatcggtttcttaggaatgtcaaggcatgttctatattgattctacactgggaaggtatagatccttt

SEQ ID NO: 243 - DNA, 538 bp, Homo sapiens
  misc_feature (534)..(534): n is a, c, g, or t
ctcaaaaacatcttttattgattttgtggcaagtactccacagtcaataactcgcacatctgcatatggtctgcttgcagcatcggtcttcagattttcaatttgttcgattacttcaaaaccagaaataaccagtccaaagactacatgcaccccatccaggtgtggagcaggctttgtggtactttggagcgcacggtgtaacactctttatgaaaaactgggaaccattggtatgtttccctcgatttgccattgataaaaggaacgctctgtcatgtttgagaataaagttttcatctgtttgaagaaaacacaaatttgtcagtctccaattataagtcactttaaagtaatgttcaagtaataaatagaaagcaaaagatgaaattcctcttctggtcagtacagataacttgactgaacactcagaaaagaaaaatttaagctaatcaaataacaaaagcataaaaaggccaaaagatactaattaaagccttgaggaaaagaacatatatttaatacttcacacanacag

SEQ ID NO: 244 - DNA, 684 bp, Homo sapiens
  misc_feature (241)..(241): n is a, c, g, or t
tttgagaagccgtgacaagtcttaatgtgccatttcaattcaaaggaggggagggaggaaatgttcttgtttgttcgctcatcaatatgatgaggtctcgtgtcccaaaccacattcaggcagttcccgagtctgcttttgaacaggacgtgcgggtccagactgtggccggcccagtggggtgtgtggttcccggccccgcacctggacgctgccggtggggtgggggcgggtgggcggntggatagacggacaaagcagcagcctggtgtgcagccgggctcccggccgctatgtgctcccggtcgtctgcccgtccccttcgtcaccagcaccagctgcggtggcccctgaaggagccaggacatcgtcatcgtcgctgtcgtcctcctcgttggatggggctgccccaggctcaggcgcgggcatcttggcctcctgctcctgctccacgcggctgcgcagggccaggatgcggtggtgcagggctgcatacaactgacctgtgtccttggagctggccgagatcaggaagaccttcacgccctggtcctcggtgtccatgcttggatgcgaatgctcttctcgctgaccttgtcaatctgcatctgggcccacagcatggtggtgaggtcagtcgcatgctcccctgggtccgctcactagtctggactggagtgtgcc

SEQ ID NO: 245 - DNA, 555 bp, Homo sapiens
tttcctatctctttcacaagccataggggaacataatcctctttggcataaaataatgcacctttgcaaatgttctggatttctgaaatagctaatacacctaaatctatagcacgtaagcaatttaagtctcagcttgaatacgctcttagactattataaattaaaactgcaattgtaaaaggaaaattagagaaactaagtatttagagtattgtttatatactagcacacattattacagcttttgctcttttactgttctcgttctaattctgacattcttaatacctacattcctcgttgtcatgtattcccattttacttagcaacagatttattacgatacagacttctacatttacatacggtatatttaaatctaattatttaaaccttaaaatcatcagtatgcaactaaaatagtgagctaattttcttcctattatctttagtaacataccaattgacttcttttacataaatgaatactttcttgaactgtttgacttattttttttttttttaatgaaataaattctcctcttctaacta

SEQ ID NO: 246 - DNA, 553 bp, Homo sapiens
gcaaaggtcattttcatcatgagcacagagacaggtgtttaaccatccatttttagccttcatgggcaggtgaggtacaaatagccaagtatctccaatatacatattctcatttctttctcttctttcctccaaccctgggtgcaaatgaatgcactctgtctcttacacacacatattcatgtgtgaaaatgtatgtatacacaaattaagagtataaaaatcaactggaagaggaagtatcacctttacttgaatcaatatctacaactgtagcttggtatacagcaaaagtagtatattttacaatggacctcagttgaagaactgaaatggactggtaaacatcattttttaaatggtaaaatgtttatgtgaggtaatttcttaagcatctaaaaagaaagaatgtgcctatcctctaattttatattgaaaaatctaacctatgtggggctataagagatgtaacaagccactatcattaagaaccataatttcattttaaggttactgttagttatttatttaaaaaaaattttttttagagatg

SEQ ID NO: 247 - DNA, 516 bp, Homo sapiens
ttttttttttttccaaaaaaaggaaaaccagagtttcaggaactctttatccacagaggctaatagaaatagaatttggaaatatctatctgagacatttttaaatctgaggaatccgtaaaatggtggctcttgggtatccagccctcaggatctccatttacctgttaaagggaggatttggtgcctttcttctttagttgggccatcaagaaaacttcagaaatcaggcattctgtcttcctatacaataaatattttcagatcatattttcagataagagtcttcagcttccctcagctattcaacccaatgcatggaaagcctcagttgaataaacttttccaccatcccaggtgcctgaaactagtgtccttcttcacttctacattcaggacaaaatgaagtcaggtttttaaaacctcagtataaaagaccccctcacactggtccaatatgaagacttctcagcgtgaacactggggaattccttcctttcatctttcctaatagat

SEQ ID NO: 248 - DNA, 458 bp, Homo sapiens
ttttttttttttcccgtttgtaaataaagttttattagaacacaaccatgcgcattcatttatggacacattgtcagtggctgcttttgtactacaaggacagagttgagttgttgcaacagaggctatggtgttgcaacagctaaggcctacagtattcactgtttggtcctttaaaaaaaagtttggcagcttgaacttttccaccatttgacagcaaatcagtgcttctgtgagttgtacaaaaggttgcaggctgcatctaggatcaccaataagctactggctgttaatgaaagacagggcctgagtgaaaaggagaggtcagggtgagcttctggagagtgggaaagattctgtgcttggccaagctttaatcagtcaggcccctgagtcctctcctaggcccatctgtgcacttccttttaaaatcccatagctgcagtccctgcagtgat

SEQ ID NO: 249 - DNA, 739 bp, Homo sapiens
gcggccgcccagcttgcactcaatgatatagcccatggtgcagtcatcaggcagccggatgagagcagatgtgtccatgaaacgggagccactggcccacggagccatcttcaaagccagtttgcgattgatgcagaagccagcacccccagtggcaaaccagaactgtaccagcctcgtgcggttgtggggctgtggctctgaggcatggatgggccggttcaggctgggccttcccacatagacgtcgcgggccagcgggaaggctctcagaagctgcagcagcgcccttgggttcacatagttgtcatcgtccacatggcagaaccacctaagcccactggccaagaaggtgtcgaactcagcagccatcttgcaggacagagctgggtggctgtgttccgcggagcagttggtgaccacaaggtgggaccccagtctctcctggaggcctttgtctgggctgtcggtgaagacaaatgtctgttccctggtcctggaaacccacgtgtcaagcagcagctccaggcgcaagcggtggaaagccccggtcgtcttcactgcaatgaagacatcgtgtagctgtagcttaggggggccccggttctgctggctcagcttccgggtcccttgtacccgctgcggggacagggtcaagtggtaccgcagacacaggagccccatgcacaaggaggggtgaggaggctccagcctagccccgcgggaacccgcactgcat

SEQ ID NO: 250 - DNA, 533 bp, Homo sapiens
  misc_feature (455)..(455): n is a, c, g, or t
tgtccatcacatatttattgcctgcactggacctgcagttgggatactgcagtgaacaagacagagtccaccctggaaagtggccacaggggaaggcaagaggcgatagctgggggtcacttgtcactagatggaagctccttggtccacacagtcccaaagaaaggtctgcccttgggcccacgaaacccatcccagccctcacaggctgaacctcaccctgggttttccccagagaggtgcccaagaagacccaagctgccccaagtcagaggagcagcaggaaacagcctcagaagtccgtcactcttcagtactcctcccttagaatgtccacttcctgtttggtgaccatggcaaccaaaagacaatggcagtgcagtgcgtgtgggatgggggagctccatcttccttgggtacatggggaggagactccagtgaccaggagaagcggngagagccatgggagatgttagagggacccagagaagatgggggacaggaaaaaggagagaatctgtctcaagtaaatg

SEQ ID NO: 251 - DNA, 585 bp, Homo sapiens
tttaagtgagtcttgttcttcctatttctttcagcagaaatgaaatcccaggtaagtataagtattcaagtatttgatcagtaagtcacagttatctccagtgcattaaataaccttcatcaagaaataggttataggtaaaatctctgaaggatcatctatgtattcaagtaattattttttagataataactgtcttctggacttggtcttgaagtctgtacagattcagcctcagtagtagcgaactgcactgctgtttggtttggagtacaaattagacttatagtcctcctggaacttgagttattaaaatcataggaataaaattatgggatctcaacaaagggtcgagggtttgaggcttaaacaagccaacatatgaatatatgttttgtctcgctatactgcacttacgctatccagttgcaggtagttttttgtctgctagtagtgttctagattatgtctttccaaagcgctgaggctgtgcacctattctgtagttgcagctgatgcctgaatgtatcctagctgacaaattattgattaataagaacttgaatttctggaagattcttactg

SEQ ID NO: 252 - DNA, 603 bp, Homo sapiens
agattagtaaaccacagcaaagtttattcatgtgccagggacataaagatacattaattgtttgtttttctaggctgccagtataagcttttcaaaatgtttaaagtaaataaaaccaataatacagctagataccacattgcaaagaaccctaatgctatttatcagctttaaaatactttcaactgaaatcaattacattttaatatacacatattatacagaaattacctatagctcttttaaaaattctatgacattaacatgaaactttattagaatttaagattctatatgcagacctgataaagccttaaatttaattattttggagtaatgtcttcttaagaaatggtagataggataaaataatttacagatttatctgcctttgaactggaaggaattttaggtaatcacctggttcaacctactccctaaagtcacacagctctataatttccccctcactcagctacttttttctgtctaaagatatgtcaaagcgatttcatatgtaatcatgagacattcaagtgcaagataatttaccaagaaatcccactccaagatccactgtacttatttaacaagacaaattaa

SEQ ID NO: 253 - DNA, 672 bp, Homo sapiens
  misc_feature (566)..(566): n is a, c, g, or t
  misc_feature (614)..(614): n is a, c, g, or t
  misc_feature (633)..(633): n is a, c, g, or t
  misc_feature (644)..(644): n is a, c, g, or t
gcggccgccgacaacggggaggcagcggccgaggtgggcgccgacaatggcgcacatcgcctgcgcttcggggacgccgggctcaacagcgggtcgaaatccagagtccttttcagagtggctccgcacgccatggccgggggcagctgaggcgccgggctcgggtggggtcggggacgggtgacgaaagaagagggtgagggaaggggtgaagagcgggaactcgaggagagcctacccgacgggctcaggagccaagcgggtcgcggagcgccggctgtggaaaggagagccgctgccgccgctgcctccgcggcaggggcagtggccagggacggcccgggtgagagcgggaggggcggtggcgggcagaagcacacgccagtcgcgtcaggggggttcttccgcctcctcaggcgcggctcccccgagagaggctccggccgcccccgccgtccgctcgagctttgcgccgcgcctgaggcgcttctgtgctgagggctagatcctttctgaagtcgaaaacagcaccggtgggtgtgaggctgggaacgcggctctaatancgccgagtacggcagtagcttgcgagccgggatcgatgcagagagatngcgagtgggctgcgagcangaacccagcgnacacgccaacccgctttctcgtgcccga

SEQ ID NO: 254 - DNA, 883 bp, Homo sapiens
  misc_feature (595)..(595): n is a, c, g, or t
gcggccgcggccagggcggcccgtgggaccgcgggcccccggcgcagcgctgcccggctcccggccctgccggcctcctcccttggcgccgcggccatggcggccagcgcgaagcggaagcaggaggagaagcacctgaagatgctgcgggacatgaccggcctcccgcacaaccgaaagtgcttcgactgcgaccagcgcggccccacctacgttaacatgacggtcggctccttcgtgtgtacctcctgctccggcagcctgcgaggattaaatccaccacacaagggggaaaatctatctccatgacaacattcacacaacaggaaattgaattcttacaaaaacatggaaatgaagtctgtaaacagatttggctaggattatttgatgatagatcttcagcaattccagacttcagggatccacagaaagtgaaagagtttctacaagaaaagtatgaaaagaaaagatggtatgtcccgccagaacaagccaaagtcgtggcatcagttcatgcatctatttcagggtcctctgcagtagcacaagcagcacacctgaggtcaaaccactgaaatctcttttagggatnctgcaccaaccactgactaaaataaggcacacctagtcagtcccccagtggagtcggtctcagggcagaaagcagagaggagcaattggccctttaagtgatctcggtagaactcttcgtgctcagctcctcatcacagctaccgccatttgctaccttggccattcacagcatgcagctaaattctggaaatcgatttggcacctgagcgtttggcaagctagggtccaggaattttgagttccaccgaaggaattcccttttaaccctagtgccgattttggctgg

SEQ ID NO: 255 - DNA, 829 bp, Homo sapiens
  misc_feature (51)..(51): n is a, c, g, or t
  misc_feature (286)..(286): n is a, c, g, or t
  misc_feature (409)..(409): n is a, c, g, or t
  misc_feature (500)..(500): n is a, c, g, or t
  misc_feature (535)..(535): n is a, c, g, or t
  misc_feature (560)..(560): n is a, c, g, or t
  misc_feature (583)..(584): n is a, c, g, or t
  misc_feature (591)..(591): n is a, c, g, or t
  misc_feature (627)..(627): n is a, c, g, or t
  misc_feature (659)..(659): n is a, c, g, or t
  misc_feature (691)..(691): n is a, c, g, or t
  misc_feature (694)..(694): n is a, c, g, or t
  misc_feature (707)..(707): n is a, c, g, or t
  misc_feature (712)..(712): n is a, c, g, or t
  misc_feature (714)..(714): n is a, c, g, or t
  misc_feature (718)..(718): n is a, c, g, or t
  misc_feature (722)..(722): n is a, c, g, or t
  misc_feature (729)..(729): n is a, c, g, or t
  misc_feature (734)..(734): n is a, c, g, or t
  misc_feature (746)..(746): n is a, c, g, or t
  misc_feature (757)..(757): n is a, c, g, or t
  misc_feature (761)..(761): n is a, c, g, or t
  misc_feature (767)..(767): n is a, c, g, or t
  misc_feature (775)..(775): n is a, c, g, or t
  misc_feature (779)..(779): n is a, c, g, or t
  misc_feature (798)..(798): n is a, c, g, or t
  misc_feature (809)..(809): n is a, c, g, or t
  misc_feature (812)..(812): n is a, c, g, or t
  misc_feature (815)..(815): n is a, c, g, or t
  misc_feature (817)..(817): n is a, c, g, or t
ttttttttttttttttttaaaaaacaatgtctttaattcctcatatgctgncttggcaatccatatgcagcctaaaaggtggttgaaagatgtctgtggacttctacacaaattgtttaagattattgaatttgatacaagaatacgtgaagtgtcttcttgagtggtaatgggcaccctgtagttatttgctcagaaccactcacacacccttcccctccccacacacacttttgccagttccccctggtgaaccataatacacacgtgggagacagctggcatnatctgagtcttggaatagctttcttgtttgttatctgcaaaaagctaggtggcctttttagtatcaaatttcaatcttggcctcactggaaccatgctctacagagctttcccaacagtttancaagtaagcaaaatcagcttttgctcttcatatttcgtaggtgagactggggcttttaaaagaaatatttcataaaaaaagacaaaagccntaaatgagaaattagagggattttagttatcattnaaggaaaaaaacttcacaaattggntcccatttgttccatgggggaannaaaagtnttataaaagggaaataacttggatttttagggtttngaagggggtcccaaatctaaataataaaagtnttttggattaaaacctcccttaaaaataaaanacntatttttaaaaanttacntncccngggnttttttnagganttaaaaaagggngaaagtttttnacgntttaanagaaatgngttntttggggtgggcaaaatgnatatcccaatnganggntnttttgggggggg

SEQ ID NO: 256 - DNA, 477 bp, Homo sapiens
tttttttttttttttttgtcaacctactcaccaaaaaatttgcactttgactcatattggcctattttaacatttcaaaatcatttaaagaaaaatatgactttttctgtcataattcccagtcttagtctctatctttgatcaaaaagaggatagggcaatacattaaattgacaaggcatataacagccactgaatctttctgttcatgagaagaaatcccagatacaccataaatgagatgcaaaccagcagtaagaatgatggcaaggtttctgtatttccatcagaaattgtggaaaagggcctaaaaccaggaaagacaaggccattaaaaaaatgtatttgaggccgggtgcggtggctgacacctgtaatcccagcactttgggatcacaggcataagccactacgcctggccagaaaaagccaaaaaaaaaaaaaaattagggctgggtgaggtggctgatgcctgta

SEQ ID NO: 257 - DNA, 489 bp, Homo sapiens
aaaagagatggagtttcctttatctgttgcccaggctggagtgcagtagcacaatcacagctacactgcagcctcgaacttccgggcacaagcagtcctcctgcctcagagtggctgggactacaggtgtgcaccacgacgcccagttatctagtttactcttacccaagtataaatgatatgaaacaatctgagactagtcagtcaactgtccttggtaagatctccttcttgacagccatgtggattctatcacaccctttataatttacagcaatcttcagtggttaaagcaaaactgtacatctataaaggaattcaagagaagtgcaggaaaaggatgacaaaaggtaaatccctagctaccaccagaatgttatctatctaaaactgccaacttacgaataggtaaaacttatggtaaaattataaaggtgagcacaacaggaactggaatctattctgaagggcaatataatgtacttccaa

SEQ ID NO: 258 - DNA, 726 bp, Homo sapiens
  misc_feature (629)..(629): n is a, c, g, or t
  misc_feature (638)..(638): n is a, c, g, or t
  misc_feature (668)..(668): n is a, c, g, or t
  misc_feature (680)..(680): n is a, c, g, or t
  misc_feature (698)..(698): n is a, c, g, or t
  misc_feature (700)..(700): n is a, c, g, or t
  misc_feature (716)..(716): n is a, c, g, or t
aaatttgaacaggactgctttattgtgtaatttatgacacaactgttacatgaattgcaaatgaaggcttaaaatatatagcagctacaaaaaaaatcagataactcatgcttcatgtcactcctcccacaaatacttctagtctgttcaactgcagtcaattctgtattggtttgcctgtgaattagacttctcaagtctttacacagagtaaaagaaatggataaaaatcaaagtatttttctgtactttgtatcaatgtattctattctgtactttgaccctggaaaggtatgggtctgcttaaaagaaagaagaaacatacacgtaatcacaataaagcttaacattatgcagggcttataatcattttcagcaacggactgcaagctgcactgtgaagaaaatgcatagcagaggagaaagctggggatctgaggaaataggtaaggaaaacagtgtcaacacacagtggaagaagtgatgaagacatctattccggagctcacgtgccatgccctgctagcgttccttaacaagccacctgctccagaaggccacagcctgaccctcccaagtggaatataaatgcccaagtgccacatgaagccacctcctccactacctanaaagctgtnctggaactgagctacagaacacacacactntctgtctaacanaccataagtgaaagaatntntcttatatatctaatntaatacaact

SEQ ID NO: 259 - DNA, 535 bp, Homo sapiens
gcattgtatgttttacagaagttagaaacaaacacctggatcaattgtaaacataatcctgaattacagtattttccataggacaaaacacagcaagacattttctatttagacaggcaactttttgatatagagcttatttatactgaagaatctggaacaaaacacaggacacagtactaatctgtcaaatatactatgaaatgcatagtctccacttaaaatgctgaatgacacacacgttttgcaagcattactgctttccacaaaaactgctgaataggagttccgtccctgccaagatcagtgtttaagagatactttatgatgctgataagtattattggtggtggtggtgttcagaaagtttgtcactcatgcagatgtctgaaatcttgttccgaatccatggaacacagggtggaggccagctcccccttttttagatgatcacatagttctgagcagagatgtggtcctcaccctgcagttcctgcaggagctgctgctgctgggatggctgctggacagaggc

SEQ ID NO: 260 - DNA, 735 bp, Homo sapiens
  misc_feature (317)..(317): n is a, c, g, or t
  misc_feature (530)..(530): n is a, c, g, or t
  misc_feature (627)..(627): n is a, c, g, or t
  misc_feature (642)..(642): n is a, c, g, or t
gggcgggggggtcatgcgctcgcccccccgggagcagggggtccagcttgtcgagtccggggcgccccttccgagtcctgggcaccctcgggggggaatccccgggggccgcgccctctctgagttcctgggcacactcggggagggggggtccccagggccgcaccctctccaagtccggggcgcccacgacacccccccgcgagcccgccccttggggagggtggccgcgcatgcgccccgcgcgcggactcagtacgcgggcacctggtgctggggcagcagctggcagccgctgttgacgtggctgaggactntctgcttgagctgcgccacctgctcgcgcagcaggctcgccgtggacgccagctccgtgttctgactcttgagggtcttcactttctcttccaggcgcgagatgcgctccagcttgcgcttgcggcacttggaggcggcgatgcggttgcgcagccgcttgcgctccgccttgatgcgctcctgcgtgtccatgtcgatggggcgacacggcnggctctcgccgaagctcggcacgtcgggcaccgtctgtggctcgttcctgagcgccagcaggagcggcaggccccaacgcggcctggggtggcggcnagcggaagggcacanggtccgcagcgaaggcgaacgtcgcgggccccccggcgccccggggcgcgcgcgtagcttgtcaagttcgcgtagacaggcgctttgggcgcg

SEQ ID NO: 261 - DNA, 528 bp, Homo sapiens
aacatgggatgagtcactgtattgctatattgcccaggctgggctcaatttcttgggctaacgcaatcctcctgccttggtctcctaaagtattgcaattacaggtatgagccactgcacctgcccagataatcaaattttttcatcaagtgttttgtgtttcatgccagctaaaagtaaagcaaattaaacttcagaatggataattctattacacctaaactaaaatctgaaatcttgcttcaaatattcaacagtgtacccaacctgataaatttggctatttctagatataaaaattcaaagtgtgcgtcatccaaaattttcagggtgatgaaaacctaggtcttctcagatattagtattcaataccgactgcttgtttagactccacaacatttgttgaaaaagtcaaggctcattaataatacaatgaggccaacaagagagcttgtgttctcccattttcattctaccaaaaggtagaatcttaaatgtctttcatatatacatataaactcttcttcc

SEQ ID NO: 262 - DNA, 744 bp, Homo sapiens
tcagaaaagaaggtgctcggaatttcttctttttcttggatggcgattttgaaggggagccttcaggtgacaggtacttcttcgattttctctggagacttaatagtaatctcgatgttttctatggttgtacttgtgcttaacctactcactcgcttagcaagctcatcttcaacatcatgcatatcatccttgccatttactaccatgacaggcacttccatggagatgaagctcttggaaaacagctcatggttttcttctaatttttcacggacattttgcggtacctgagtttgagactgaatgtgtgaaacagatgaagcgtcatctgagagtaattcctgctcagcatcttctaggccttgttgtttacgttcgattgtcctcttatattcttcaagtcctccttctgcgagatgactaaatgggttaggaggagctggtgggccatgatcatcatcttcaaatcgcatagtataaggtggcttatccacaacattttcagccagcaactgacattgtggtcctgctgttctcaagtcatatcgatgtctgttacgaatcttatttctcttttctagttcctcatctcggattgtgttcataggaacatatcgatctggatcttcaatgttgatagcgtgtccaccactaacttaagatgatgtctctgctctcatccacgtctatctcgattcgtggactgctctcctctctccgagactccctatgcacattcac

SEQ ID NO: 263 - DNA, 555 bp, Homo sapiens
cacttccatgcacatgttaggcaggagaagaatcaagagactgtatcctggactcaaacgaacagagtgttttcagtacagtaactgccaagtactacctggaagttgaatgagatgatgttatgtcttagtcaaggaaagcagtttggacttaatttttcttcctcttaatttttcttccttttataaatatgttgatgtagtgcactagagtaatctatcatttcttgctttacttttcatctttataaaagttgaacaaagttaagctatgtgacctgaaccccaggaaaagatctaaaataacccactaactagctcttttgtaacctattggcagattctgtgattttttactaatacaattaagtcaagtattatattttaaaaataggtaaataaaaggaactgcttctcaggacagaaatgaaaattatcaatacaagtaatatttttacttactgtaagttgacctgctaccccaaaatctgcaagttttgcatgtccttctgtatttagcaaaatatttcctgccttgatatctcggtgtttttt

SEQ ID NO: 264 - DNA, 511 bp, Homo sapiens
gaaatagacatgttttcatataaccttgagctagctctttcttaagtaaaggaaacagtggcagaaaaacggtcccaacttttctgagaggtataccgtttataaggtttactgtgcaacagagataaatccaattatttgtttgaaaacattcaaccatatatttttctaatctaaggaaatgacatatatttcagttattctaaattactacaagaacccagagaaataaaaatatactttaacgtagccccacctgtgtaggttgtatcgacataggctttcatcactaccaaagaaattaattaggtccctgtatagcataccagctatacaaacatctgggattcagattagtctgatctactttttgccaattcaagttctttaatattttcatataactaaaagtatataatgggagttgaatttttaccttcttctgagtgtattgtgtttaacactgaaaagaggtatcctggttcaaaatgctcgagaccaggaatgtttc

SEQ ID NO: 265 - DNA, 556 bp, Homo sapiens
  misc_feature (490)..(490): n is a, c, g, or t
tttttttttttccctttacagttttattaataattattatttttcgtataccggttgcactgattcatttttgctcttttattttttaggcagatggctggtttttgtaggattaagcagtgaggaaaaacagcaaactaaaaatgctacttcaaatatagcaacagtcactacataaggcttaaatcaatatattgcaagtaatttctatgaattttgaacaatacaatgtagtgtatgtggaaagatcttgcctaataagtttcattctactcctcaaagttactgaagtcagtcaactattaataacagaattgtttttatagaaagattccatcttctttactgttagatgttatacgtgtcttgtactaggataaaataatgagcattgtgcatcgcaccttctgataatctcatacttctataaatactaagataaataatcactcttttaaatttagagagagttggttttaggctaacgatnttttttcttctttccaagacagagtcttattctgacgcctatgctggagtgcagcagtgcaatctc

SEQ ID NO: 266 - DNA, 560 bp, Homo sapiens
  misc_feature (508)..(508): n is a, c, g, or t
  misc_feature (523)..(523): n is a, c, g, or t
tcttgctcctcccgtaccaactgccgctgctctcgtttcctcttaattaatgatactctgtctttgatagctttagccatggtcttgtgatcaccttcacagacatacccagactctaccatttcttgtgcaacatcttctgggacatctctctctaaatcaaaagaaaactcaatagcttcattatctttgtattttccctttaatttcttaatatcttcaatacgtagccataattttatggctattttttctccatcatcctcttctgctaattctacccgtactcctgtttcctcttggaagaaggcatggttcaaaaggtctttgatggaatatctttcatctttgttttgtcgtatgcatccttcaataatttccttcacttcaggaattgctactttgtcaaaactggctggcttcaccccctcatttatacaatccttttgagggcagcagcagcaatgagaatttatgatgacaaatactgagcaaaaatctttctttntaatatccatcaganaaggcaaaacagatttcttattggaggaaaatgaagg

SEQ ID NO: 267 - DNA, 377 bp, Homo sapiens
ctactactactactaaattcgcggccgcgtcgacttttttttttttttttagagatggggtctcgctcagtcacccaggctagagtgcaatgacacgacatagctcactgtagcctcggactcctgggctcaagcaatcctcccacctcagcctctggagtagctgggaccacaggtgcaagctactatgcctgtctctattataccttacatacattttcacagttgtctatttccttattatcatttgtctcttcttactgtgttcactgtacccacttgttttaaatatatttattcctcgccttattccaaagtctttatcggttttatagattgcatttaaaatctgatattttgacgtcgacgcggccgcg

SEQ ID NO: 268 - DNA, 490 bp, Homo sapiens
ttttacaaaacaaaacgcttttatttggtccattggagcctgagtcggaagccactgtggagaatcctatggtaaaggaacggggctgacaattgataaaatagtctctgtgtcacaagagctggccgtatttacagggttaaaaatattcacagctcaaagtacagggaggccaaaggggagtgggaatgtttctccaggtgaaaaggccccgggaagcccctgccggggtaggagggggagtgggggcgaggccggcccgctgccgggagtgaggggccaggagggcacgcaaaaagctgggctcagacgtccacacactcctgggcttctgtggggaggtgggagcggctgagacctgcccgtgcccacgatgtgctggggtccctctctggcagggccgggccgagggacagggttggctgaggagcctgctggtcccagtgtgcccggcagcagtgagcggtgctgagaactggtgcccacccac

SEQ ID NO: 269 - DNA, 585 bp, Homo sapiens
tggcttttacaaaaaaggtttaactgaagagtcttttaaaaaggaagcctctctagttttttttgttttttttttgtttttttaaattacatataacttttcagggatttctcatatatacaaacatttaacaattttaaaacacaaggtaaggattccactagagataaacatggctcaacttcccaccagctttcgttttcctttctcttgtatcctccttctctttataattctcctttaaaaaattttttcattccctacatagctcatgaccccaacaggcaatatgtatttcttttactaaaaagaagtggataaaatattgcttagatttcgtctaggaagcaggagaacaaagtaccatgttttttatttcctaataccatataagtggtaaaggcaaagttttaaaacaaagcatcagaaactaagaatagaggatatggttattgttcttttaacttgtaatttcttctaggatacttgtcacaatttttcttttaccccaggaaaataaatagctataaaaaacaaatgttagttatctcaaaaatgttctttacttttatgcactcctccttc

SEQ ID NO: 270 - DNA, 888 bp, Homo sapiens
  misc_feature (324)..(324): n is a, c, g, or t
  misc_feature (364)..(364): n is a, c, g, or t
  misc_feature (404)..(404): n is a, c, g, or t
  misc_feature (410)..(410): n is a, c, g, or t
  misc_feature (430)..(430): n is a, c, g, or t
  misc_feature (510)..(510): n is a, c, g, or t
  misc_feature (543)..(543): n is a, c, g, or t
  misc_feature (551)..(551): n is a, c, g, or t
  misc_feature (558)..(558): n is a, c, g, or t
  misc_feature (564)..(564): n is a, c, g, or t
  misc_feature (566)..(566): n is a, c, g, or t
  misc_feature (604)..(604): n is a, c, g, or t
  misc_feature (689)..(689): n is a, c, g, or t
  misc_feature (715)..(715): n is a, c, g, or t
  misc_feature (727)..(727): n is a, c, g, or t
  misc_feature (754)..(754): n is a, c, g, or t
  misc_feature (795)..(795): n is a, c, g, or t
  misc_feature (805)..(805): n is a, c, g, or t
gcggccgcgggagcttcccgggcctggccgtggaaccaggcagcaacctggacatggaagatgaggaggaggaagagctgaccatggagatgtttgggaacagctccatcaagtttgagctggacatcgagcccaaggtgttcaagccgccgagtagcacagaggccctgaatgacagccaggagttccccttccccgagacgcccaccaaagtgtggccgcaggacgagtacatcgtggagtactcactagagtatggcttccttcgcctgtcgcaggccacccgccagcgcctgagcatccccgtcatggtggtcaccctgngtgagtctgagctgctgggctgggggagctccatggcggngcctcccctcctccctcgggtctcctcctgctggtgcggngccggnggctgtgcaggaagcactgnggtctgccccgccccaagcacgcttcccagggctggggtcctggatgggtttcctaagaatgggcagggccagtaagcangccaggcctcagcaatggagccagctggggcangggcccangggtggnctggcngngctccccgctacctgatcacccaccgcagacccacgcnggaccagtgcttcggggaccgcttcagccgactgctgctggatgagttttctggctatgatgacatcctcatgtccagcgtgaangggcctgccgagaaacgagagaacangggcttcctgcngaatgtggtgtcggccgagccctaccngtttggtgagcatgtgatgccttgggcggatttcttggctnaagggccaanttcccttatgtggtccgataaattcgaatcatgccctagctgtttctgggtgaatgtattcggtacaatcccaacacatcgac

SEQ ID NO: 271 - DNA, 703 bp, Homo sapiens
  misc_feature (583)..(583): n is a, c, g, or t
  misc_feature (624)..(624): n is a, c, g, or t
tttaaatgtgcttaaaatgaaaattcttattaaaaaaatcagaacaaaaaaattaaaataaaaacaaaaccagcgagaattaatacctggggttggtatggcagggtatgtacagggggaaccccccgcccctgtcccaccccctctgtcaccaaccgaggcaggggggaggttgaggttccccagctggggagcaatggcttgtgagttctgaggatgggggagccaagtcctggcgtttgctggtgatgaagatgtggtgagctgggcagaggggtgtcttgatgaacacgaggcccccaggacccatcctgagacccaggaccaggggcctcactcagttcctggcctcggcctctgacgtcagcccaggctgtgggagcaggcagtccactgagggcccaggcctctgtccaaggagtcgctgcctcctccctccccgtcccccagggaaggtccccagtactgcccgggagggcaggtgggggcagggctggtgcggggtcacatggtcggtagaaaggcagagaaaagccggggcggagggcgagggctgtgtccatgtggcgtgggcggtcacggngagtgggtggccgggctgcttctgttggagctggggctgangctggggctacagctgccctggggggggcccagccactaccgtctcgctctcactcctctgctgttcgctacgaatgtc

SEQ ID NO: 272 - DNA, 599 bp, Homo sapiens
gtgtgttctcaatgcccttaactcttcgactttcattgtgagctgcccaacatttcctagttattagatttaatattaagaaagaaaatggaacactttatggaggtagtttttttctttcctgcccaataagaacaatctcaccttgtccttgatatatgatgatgttcaagggagaaatataaatccaagtgtcctgggtgaagttatctttttatattaagtagcaggtacttaggagaatcataagaattcatttagggctctcaggttgttatataatattactgaagagcaaattcagttgttaacctctgcccctgacttactttagtgggccactagaaacaataaaggtctaagatttaaaaaatatataaatcaaataaaaaggatgcataaatataattgacatatttaccctttacctatatttgatctgtattatgcattttaaatattactattcttttatgtgcttttatgttttatttatttagtctatatgcctaatacgcacatctagtgtatgtctctaagattaaaatctctagatggaccaaagcttcaacaataagattctaagattcagaagagcc

SEQ ID NO: 273 - DNA, 728 bp, Homo sapiens
tttttttttttatttacattggtcaatttctgaatgatgtaatctggacagcttttgtgctggttgatctttacaacaacatctccaaaagcccgagtgccctcttccattgacggccagtattctgcacacttgttcctgtttccttcttcacatcgagtgaccatgacaataactgtggctttctgttcccaaatcatcctccagaaatcatcaacagtttcatccctgggaccctgtgcagcaatgtatttcctgggttctttgaaaccatcaatatagctggcatttatgtagtttgaccctgcatctccgtttatctcagagagttcaacacggttataatcataaggaagaatgtcaacataacggtttttattctggttaaagggctttcgagcttcctttataggaaacttgctgaacacccgcgggatgctctgaaattcagccagaaaaagtcttccttcatcagcaatcttcctcttataagtttccaacaaaatatctgcatggattggctccacattcatcagttgtttttcatcatccctttcaacaagctcctgctgttcatctaaattgcaggatcttctcttatgtagatcatagattatgtagagaacaaccagcacggctattgatgtcacaataatcagaaatgccagaaatgctatcagcgccctaagattatcagatgtgaatgatgtatatcaagggttctccag

SEQ ID NO: 274 - DNA, 786 bp, Homo sapiens
  misc_feature (707)..(707): n is a, c, g, or t
tttttgctttttttttaagtccccaagaaattcaaaaggggagcccatgttaagaacccctattaatgataaacagaaattgacccatgtccgctaaaaaatgtattaagtaggtttcttgtagagcaatatcaatgagaaaaacttttaatattcacaaccagtatattaagccttggaaaacattagcattattctcggggaaataactttgggactacataacaatggtacagattcaaagttctctgaatttactcatcaagtataaaataaagcctcttaaaatatcccatgctgctattattttaccagcttatactgataaactatttacagtttacaaagcgttttatctaaattctctgcttttcacaaaaaccctgatcaggtagggcaagtataattatcaccacctctaacagatggagaaattaggtctcaaagctatttaaacggcttgcctacagtcattcagctggtaaaaacctaagctgaaaataaaatctaggtcttttgactcctagccaaatattctatcctgggacacttagcccaaaacaaacctctgttctggttccagtcatgggcatcaccaagttgattaacattatacctgtacccatcttgatggtgaaaatagtcatcagtgctgaacacaatgccatcacgattctgaccaagcagaaatcgagacaatggtgttnttcccagatccagcagaccctctaaaaagataagtaacttctgcaatttatttactttttcctcttgaaactgctggtc

SEQ ID NO: 275 - DNA, 542 bp, Homo sapiens
taaaaatcatttttctttaatacaaaatcacataaagaaaggcatgttggctaaatcaaatattcactaaatatcagtgaagtcaccactggaatctcaatagcacattttcctgctttcttttctcccttctgctaaccattgaagaccagggtcatccgtgggagcagatgagtaggacacgcgtctgcacactggaggccctgggggttgacatgggagcaggaagtggacccccccaccctgcacatcccttctgtttttcttgatttcagtctcactggcccaggccaaatcttcaagggtgtctagttctgcagccagggagaaagtgatgccaagagaacctcgtctcctccctcctcagtctgctttgaaggggaaataaatacacaggcctagtgtgtctgtgtggcacagggaggtggttttgccaggcatcttggaaggttgtcttctagaatcagagccatagccttacttgtggccttggatctaggtctgtttccccgatcgaaaaaagaacagctgttttatgattg

SEQ ID NO: 276 - DNA, 661 bp, Homo sapiens
gtcagtgcggcgtgaagatgtccgcgcactgctgcaggatgagctccaccacctggttctggaacaccatggtcatgggcatgctggtctcttccacctcgggccgcagcagcgtgggcccgaacacaatggccacgctctgcaccgacatgcggttctgctcgccgtgctcgatcacccggcagaggtgctggaagagcatccgcagagtgtcgtggttgggagcgggcagcgagcgcaccaagtcacgcacacagcggctgcgccgggcctggtcctgcaacttgatggccgcaatgaactggcggaagtgcgagaaggggaagaggggctcgggcagctcccgaaagaagagcttcagggctccggtgataacgtggacgtcctcccagcgcccgtcatccaggtcaaggcgctcatcgtggtccaccttatagcgtagcttctggatggtggccaggtttccactgatgcggtacagcccgtcgatgtccagcccgcgggcctcgacggcgcggatgcactgctgcacgaagcgtggcacccggctcctctcgcgctcacacagcgcggccagcgcgcagccgaacacctggtctgtgatgtagcccttctcccgcagcgactgcagtgtgggccggctctgggagaacttgcggag

SEQ ID NO: 277 - DNA, 824 bp, Homo sapiens
  misc_feature (565)..(566): n is a, c, g, or t
  misc_feature (603)..(603): n is a, c, g, or t
  misc_feature (623)..(623): n is a, c, g, or t
  misc_feature (646)..(646): n is a, c, g, or t
  misc_feature (713)..(713): n is a, c, g, or t
  misc_feature (726)..(727): n is a, c, g, or t
  misc_feature (730)..(731): n is a, c, g, or t
  misc_feature (744)..(745): n is a, c, g, or t
  misc_feature (815)..(815): n is a, c, g, or t
gcggccgctccaaaaagctctccaggtaggcctggctgcagtcactgaacatcctggggaaactggagccaatgctgcccgccatgatgcagcggccggcctcgaagcgttcctggcagcggcagccctggacgttctcatcatggtccatgcccaggttgtggcccatctcatgggccatggtacaggccacgcccacggggttcttgctgtggtcctggttcacagcccctgagctgtgggagcacatggcggacaccctggcaaaccccacggtagtcccggtgaagtcgacacccgtgatgagctgtacgttgtcatgcaggtgccgccgtgtccgttgccgtgcctgccaggtcaggaggttctccagtgtgacactggggtcggggctgacgtggaacctgtcctgactattccaaatctccaggcccaccaggaccacacggaagttgagtttctgatatagcttgtccacgtgattcaccacctccagcacccgatgacgcacggctgcttcgctccccagcatctggaactctgcattgtccacgaccacatacanngctcacgtagcggtctctcgggatggcagagagtccncgggccgaggcctgaagacnggctgccgtccgggtcccagganggctgcccagctgtcgtcgctgacccccgaggtccccggccgtctgcacaggtgctcagcctggtancacggcgtgggtnncgnnctcgcacgtcatnncaggggctcgatcaggtgcagtctgaacccaacctgaaagaaacccctgaagcccggcacaggtgctgangcttggcgg

SEQ ID NO: 278 - DNA, 700 bp, Homo sapiens
  misc_feature (578)..(578): n is a, c, g, or t
cagaaaagaaggagtgcggaatttcttctttttcttggatggcgattttgaaggggagccttcaggtgacaggacttcttcgattttctctggagacttaatagtaatctcgatgttttctatggttgtacttgtgcttaacctactcactcgcttagcaagctcatcttcaacatcatgcatatcatccttgccatttactaccatgacaggcacttccatggagatgaagctcttggaaaacagctcatggttttcttctaatttttcagggacattttgcggtgactgagtttgagactgaatttgtgaaacagatgaagcgtcatctgagagtaattcctgctcagcatcttctaggccttgttgtttacgttcgattgtcctcttatactcttcaagttctccttctgtgagatgactaaatgggttaggaggagctggtgggccatgatcatcatcttcaaattgcatagtagaaggtggcttatccacaacaattccagcaagcaacctgagattgtggtcctgctgttttcaagtcatatcgaatttggtcccgaatcttatttctcttntctagtacctcattcggggttgtgttaaaggaaccaactggatttgatcttcaattttaatagtgttcccccctaacttttagagagtcctctgctttcattccctgaaatttggttcggga

SEQ ID NO: 279 - DNA, 761 bp, Homo sapiens
  misc_feature (371)..(379): n is a, c, g, or t
  misc_feature (382)..(388): n is a, c, g, or t
  misc_feature (391)..(391): n is a, c, g, or t
  misc_feature (393)..(394): n is a, c, g, or t
  misc_feature (397)..(397): n is a, c, g, or t
  misc_feature (399)..(399): n is a, c, g, or t
  misc_feature (401)..(401): n is a, c, g, or t
  misc_feature (410)..(410): n is a, c, g, or t
  misc_feature (420)..(422): n is a, c, g, or t
tttttaaaaaaatgagggcatagtgggggggtaataaagtctacctagcaaagtataaaacgacaaaagcatggtttccattgaataagattaaatatatataaaacaagtacactgactgtggggtaggtttggaggtgccggaggagggaagtatttgtgctaaaccaacagaaaaaagggctggggggagagggggaccccaaataaaccatcaacgggctgttctgtacagtgagggcttattaagaaaaagccgactgtttataaaagaaacggaggttggtttgtcttcggagcaggtggggacagaaggagtgtcttcgttgcagtggtcacatgtggggggtggcgggggtggggtgggaagnnnnnnnnnctnnnnnnngcnannatntntntttttctanagaccatgcnnngaggcgggcctgcatggtgccccgtgaagcacccgatggcaggtggaggccagggctgacagaatctccgtttgggaccggtgaccagcaaggctgacaggaacaggagcttcctggcggtgggaacagcttttctaccgcctggacctgagagggcggttaacgagcttccattcatgtttaatgtgcctaaagaccgagctggctcttacgtgagcaagggatttaaatcttcctcctccagctgacctcacttggaggaagttgaaacatggaaattcaaaccgctagtgtggtgtggatggtataattatctaagaaatcccacctttctgcact

SEQ ID NO: 280 - DNA, 579 bp, Homo sapiens
ttttttcacaaataatctcaactttaatagatattattttgtatttgtgatagtgccttcttcaagaaccttaaatgctttacagacattatctctaattaatccccacaacaaccctgtgaggtaggtattactcccattttacaagacagggagactgaagcacagagaggttaagtgacttgcccaaggtcacacagttaaattcactgaagagccaggacatgagcgctttagcctcccagctcccagccaaatacctcatgatagaatcttttaataaaaagggtttttcaaagaaggtttcaagagtggttatgttatgaaaatgaggtctttctactgccatcaaggaaagaaaaaaccctatactgatggttagaggccccaagacccacataatacaacatttccctctttccctgttcccaagcctcctggttcctgtcttaaataatcttttaaaggtaaaatttccaagacagaagccatgtgacttaagaagtgggacttaatttagaatatttacttttagttacaataatttatagaaatttttattccaatatacaaaatatg

SEQ ID NO: 281 - DNA, 531 bp, Homo sapiens
ctttgaggtagagtctcgctctgttgcccaggctgaagtgcaacggcgcaatctcggctcactgcaacctccacctcccgggctcaagcaattctcctgcctcagcctcgcaagtaactgggattacaggcacacaccaccacgcccggctaatttttgttttaggagagatagggttttgccatgttggccaaactggtctcaaactcctgccttcaagtgatccgcccaacttggcctcccaaagtgctgggattacaggcatgagccaccacacccagcctcatttctattaggggaaaaaaaaaaaaagctaataacaacctgagacttacaaagattatactattgaaaaccactgtgcaaccaattcaaccagtcactctctcacttcagttttcatattaaatctttagttagaaatagtacttatttttgttcttttttttaattttgagaaatagtactttaaaataaaactaacatggtttgatcagcttgaaataagattcataaaatgtaccttttgat

SEQ ID NO: 282 - DNA, 521 bp, Homo sapiens
ttttttttttttgagagggtctttctctgcccaggctggagtgcagtggtatgatgactgctcactgcagcctcaacctcccgggctcaagtgatcctcttgcctcagcctcccaggtagctgggaccacaggcatatgccacaatgcctgactagtttttatttatttttatttttttatagagacagagtctcaccatgttgctaaggctggttttgaactcctgggctcaggcaatcctcctgcctcagcctcccaaagtgctgagattacaggcataagccaccgcgcccagcctgaaatgttcattttaagtgtttattgtcctgtatgttttgaaatttttactgactatatgtaacaaatttgtcactccatctaggcacaagtgttttaggtgagcataaatttttttttttgagacagagtctcgctttgtcaccaggctggagtgcaatggtgcgatcttggctcactgtaacctctgcctcccagattcaagcaattctcttgccttagc

SEQ ID NO: 283 - DNA, 550 bp, Homo sapiens
ttttttcgagccgcactcggccaccaccgcgggggccggcggaaccctcgtttctcccccccaaccccgtcgagggggaagcggaggagggtcctctgcgagcgggtcgctaacggcagcgctaccataacggaggcagagacagaggcggcggcccgggggatccggtacccccaaggcacgcctctcagatcgctagagaaggcttttctcaccgagggtgggtcacactccccccacccgccagccgttcctccttgggcccgcagaggcgccgagggacgcctggggaagggaggggggccctgcggtacgaggaaacacctgcgcgcggccacctcgagcgttcgcgttcagggcgggggcccggccggtgcgcgcgtgcgcgcaaccccaccaggcccccccgtccacccacctccttccttccgaggcagagcgcctccgaagtcaacccacacacgaccggtcggaggcagaacggcagcccctcggcggccggccggcgcacgcgtcacaccggcccgaacccaccgcgatcgctcacacg

SEQ ID NO: 284 - DNA, 477 bp, Homo sapiens
ttctgggtgcaagaggtttatttgggagccatcccaggaagcccaaggcgggggagtggggaagagagggaagggagagcccccgcaggaagtacatgaatgagtgggttactgctgcgggcaactgggactccatcctgctgggcatcctctgagagtttatgtagaatacacttcagaattgtcctgctcaaggacaatgaagctgaggtcctgctccttattgactcagggttgctgctcctggggacattaaccccccaacacttctagcttgcccagtgcactgactgagcacacagctgtggccaccagagaacctctttgggctgtgatacaggaaaccatcggtgtgcatggtaactctctagcagtgtccttcatgccgggacatggggacacgggcaggcactgctggcatctgctaaccccggaggcccatacttcagaaccggtcagctgggccaaggcctctct

SEQ ID NO: 285 - DNA, 572 bp, Homo sapiens
ttttttttttccactaaaatatttatttaattgatatcttacagaaataaataaaaacagtttttgtctaatacagataggtttttttatatatatgtaatttgattttacaaaattgaagcatatcaaattgttttctctaaaacatagctcagaaaggaatagtggaaaacaaaccccaagaaatactggaattgtcttatttttaaatttataaccatgggccttctgaatctcagcatgacatgttattagtaaaagaatgtaagatatggagtcaggggacctgggctccactgtttacttgctacatgtcctaagaaagtttcaatatatctgaacttcagttctctacctttaaaacagtaaagatattaattatatcaacttcacaagattgttgggtaaattaaacacgtaaatgtacatgaaagctctttttaatatgtgaagagctataaaaataacagtttgatttaatttcatataaaagaatcaatggatacctccttttaactgaagaataagcaccaaaagcatgtgtgtgttttcttcagttgaattacatcact

SEQ ID NO: 286 - DNA, 420 bp, Homo sapiens
  misc_feature (213)..(213): n is a, c, g, or t
  misc_feature (293)..(293): n is a, c, g, or t
  misc_feature (349)..(349): n is a, c, g, or t
  misc_feature (351)..(351): n is a, c, g, or t
tttctctgtgttcaatctctggatttgaccctctagctccctttcagctttctgtttctcattgtttgctttcttttcttcttccagctgatgttccacttgtttcttctgttgtttcaaagatttgatggtgtcattcagtcgactgatttttatggacctcgagttcaggactgctgcttgttcttggcacgggctctgaggcgcatgcanagaggaggaggcggaggaggactttggggagaggtagagagaacgatcattagggctgggttgtgtgtgggctgtctcanctggcaaaggggcacccagtccccgctgcgggaggaggttggagggctggcctgcngngtcactgcacctccgcccagagcctcctacctccagatccttcagggtagcagatgatgtagggcccct

SEQ ID NO: 287 - DNA, 550 bp, Homo sapiens
  misc_feature (447)..(447): n is a, c, g, or t
gcactcggtgttcactgccacgtgcagggcggtgagcccgtcataattgcgggcctccaggtccaacgtgcccggagctgcgctgtccagcagggctcgcaggcaggtcgggctgcggtgctcgcacgccaggtgagcggccgtctggccatggcggtccagcgccatggggctggcaccagctgtcaccaggagccggaccacagacggtaatgtggtgatcacagccaggtggagcggtgtctgccgtaggttgttgtagatgtcgagctcccggcccccctgctggaagaggttgaccagccggtgcacagctggcaggttaccctgcaccacagcaatatggagaggcgtgtctccgtcctcatctgcacgggtggccatggcgatgtcagccaaaaaagggtgttccatggggcacaataatggggtataagggtgtaggtngttcaccagagggaacgtggagaccaatggcccgtatgggtacaaagacagaagggcatcagtgagtagtcgcttccgaccgagcatgtctatgtgagggcaa

SEQ ID NO: 288 - DNA, 627 bp, Homo sapiens
  misc_feature (44)..(44): n is a, c, g, or t
ttttaggacatacgggactctgttttaataagcagctggtaganttagcaaaccatatttcctatgacattgggttctcatacaggtctgcagttcaaaatccaagtttgaaatctgggacggaaggcattctggaaaacggagaatctaataaaatcaatgacgtctcatgttcgatgctggctgtcacggaagggctggccatctgttggtctgagtgtagctggtctcgtgaatcccactcggtacacaatcgctaaacactaaaacatgtcaagcaaagtacatggtgcgcagagtgtcttggtgaacctggaccgccttggccagtgcttggtggtctcgcccgttactctgcccagaggtatggcttccttcagcactgtcatgttccttatccaccaggtggtacctggcccggaaggccaccaggtgagcgtagtatgctggcgctgggatggacacggagcgtgtgcagcgcacgtaggtgtgacacagctggtaggttaggatctgcagctcatcagaggagaaacgattgtcgtcccagacgacgtgatagtgcgaaggcctgcttgtcccctggatgccagcgtgactacacaggtagaagtcgaactcggtggc

SEQ ID NO: 289 - DNA, 515 bp, Homo sapiens
aacttcttttttctttttattatccctggttatacaaaatccccatgttcttttattatattgaatgttcagtctactgatttactggccccaagtaaccctcctatactttatccaattttttcaaagttattttccagttttccatagtttctagtaacgcccaacaggaacacattgaatgaaagatcatctgaacagaagcaatacaatttgagtcaaaagaaacaaatgattttacgttgtgtagtgacccgaagaaatcaacactgagtataacatttcagtgttctcagaatgagttttttcattataacaaggtaatatgtataaaccgaatcatatacaatgtgctgagttggcactgaaaagcaaaacaccaaaaacagcaacaacaacaatgcactgaactgtttctccccagccgcccagtctaatcacaggtcatctcccttcacagtaggccagcggtaatcttcggcaaaaacactagaacgattctctaagtaaaaaag

SEQ ID NO: 290 - DNA, 456 bp, Homo sapiens
gttttttgttttgttttttttttttttttttagagacagggtctcactctgtcacccaggctggatgcagtggtgtgatcatagctcactgcagccttgaactactgggctcaagagacccttgcacctcagccaatacacagtaatatgttaggctgcaggataatcaaataaaaatttaataggttgtaaatctttaaattcacatcctgttaaatcaggaagcctcttttagatcaaacagtgatgtttctaacatctgtttacttaccattttgaacatgtgcattaaatatttgcttcaagtgttctattgacctaacaaaaaaacgtgcttccttacatacagggagaaaaaaacgagaaagaaaaagaggtatcatttaataggttttaccattatcaatggagacttcttacataaatttctgcataaaaccacctaagaatgttgca

SEQ ID NO: 291 - DNA, 534 bp, Homo sapiens
tttttttattgagaggaaagcacatggcctgggctagattttctccaatgcctacttcttgcaaaccagggagatagtaaagtaccctaaaactctggaacattatttacttaaggcatgtttcaggagaatccagaaatcactatgaagcaccatattccaatctctttaaaattaatcctgtatgttactctaaatatagcagaaagaataagtcagtctaccaatagctgaaaaccattaaattgttacattataaatttatattctgtacagatctgggttaaattaaaactttcctaaaatggatatggcaatttaatgctcatggagagatacatttcttcaagtttaaatggaccataatgatttttcctctatcgaatttataatcacaaaaaaaaacttataatcaaagatgaatcaagaattatataaatgcattatgggatctacaaatctctgcaaataaaacagactcaccaatttgcctgaaattatttagaggaaacagggttcacagggcttatgatg

SEQ ID NO: 292 - DNA, 691 bp, Homo sapiens
  misc_feature (454)..(455): n is a, c, g, or t
  misc_feature (647)..(647): n is a, c, g, or t
  misc_feature (676)..(676): n is a, c, g, or t
acggatagcggatctgcttcaattcttcctccagtgtgatgtacagtttccttgcagtgcccaagggctctagagctcatcccacccaaaccaaagaatgctggtcaagtgggaaggagtccctgttctcagctgtagagggtgtggggagcactccgagtgccgtatctcagaacatctaagaacagtctaggaaaacacactccatttgtggttctccagagaatcagcacttggaatcctttgccaccgcgtaccccaggctctgaatcctgactgcgagattacacctgccagttcaccatcgactgtgtcacacggctcagcacagctcccaggccaacccatcctgatttccatctacttctaaactgcatcactctactcctcacagcaacaactcaaattccctaatgactaatctgttcttaaaaaaaaaaaaaaaaaaaaaaanngagagagatggggtttcgcagtgttgcctaggctgatcttgaactcctgagctcaagcaatcctcttaccccagcctcccaaagtgttgggattacaggcgtgagccagcacacccagactaatctgctctgagtaacattttaccaagccagatttcttgaaactttttttaaaaattaaaatcccatgcncacacaagttacaggcaagcttgaatgtncctggaaacccaact

SEQ ID NO: 293 - DNA, 543 bp, Homo sapiens
  misc_feature (278)..(278): n is a, c, g, or t
  misc_feature (313)..(313): n is a, c, g, or t
  misc_feature (346)..(346): n is a, c, g, or t
  misc_feature (350)..(350): n is a, c, g, or t
  misc_feature (439)..(439): n is a, c, g, or t
  misc_feature (485)..(486): n is a, c, g, or t
  misc_feature (533)..(533): n is a, c, g, or t
taggtgtctgccatgtgctgagacccttatattgacgggaatcctcactgcaacctgtaaggtatcagaactcgcattctaccactgaggaaactgaggttgagagaagtgaggtgacttactcaaactcactcaacaggaagtggcagagctggtgagtcttatttgcattctctgtcctggaacgtgggtctgcacaaagatcccagcccataggcagagccttctggagccttggctgcccccatatcccagccccttgaaaggcccatgagctngcacagttagtaggatctggctgcgggggggtgtntagtagggcatgctcgggcctggttagtgggtntagnttggttggcagaaggccaggcccctcgtcacacgcccaagcgtcccgctgagcctggttagttagggtaatcacaccatcaaacactgncccggccctccagctgcagcttcagaggcctcccgccccacacacnnggagtgggggctgacaggggagggggggctaactctaagccccactntcctcgtgcc

SEQ ID NO: 294 - DNA, 547 bp, Homo sapiens
ttttttttttttttttttttagaaaatgaaaacaagcatctttttccttatagcttgtatctcctttgagtactctgaaatggtaaccacatgacccactggggtttcttctctttgatagtctgattttatgaaacacaccagaaatacgctaaattttgagtttttctggaatcaaacttcaaaagctggagctggaatggaaaccctgcagtctttgtacacaccttcttccagtcatccctagatcatccctctttcatgaacctgacacatgcagtagctttacatcaatggccttgaggtttttcagtcctcttaatacttgataaaattagagaaatgctatataacaaaatatgtaagaatctatatgccaatttactcaccattatactgtcttataattctttaattaaacttagttacaaaaatgtatatatttaattaaataaaagaacctcaaagaccaataacagttattaagagtaacaagcagaaaatctctccatctgttttcagaagaaactgaaaaaaaaattatgag

SEQ ID NO: 295 - DNA, 535 bp, Homo sapiens
ttttatttatttaatttttggagacagggtcttgttctgtcacccagactggagtgcactggtatgatcatagctcactgtaacctcagacttctgaggtcaagtgatcgtcctgcctcagccttctgagtagctaggactccaggtgtgcatcaccattcccagctaattttatttatttatttatttgtttgtttgtttgtttgtttttgtagagacagggtctcactatattgctcaagctggtcttgaactcctgggctcaaacaatcctcccaccttggcctcctaaagtcctgggatcacaagcatgagccaccatgcccaaccttttctagtttttaaattttcatacatatctattagatgtttatagtgtaaggttgaactccattctttgcttctctgttgctggtaaatttttgggtatatttttacgaattttgcacattcttttacatattggtaaaggaacagtctgtgatctggatttattcagatccttattcagaattaccaattgttttattaatca

SEQ ID NO: 296 - DNA, 644 bp, Homo sapiens
cttgaatttattttaaaaatgaatgtgtatcactagtgcctgattcttaatctgatcagtaactgcttgatgactgaatcaatcgctgatggagggaacaattatgcctcattcactgccgtaacatgggaaccttgcatacagcaggtgcttaataaatgctgggcacatgaacagatgaagagggcttggttcctcccaattccccagggccaaacccttgtgctggcatgcagtaggcactccattaatgctgcctgtgtgcacgtgattgcttagcaagagctggctggacaccaccccacacgagagccctctgtggcctgccaaggggtccagaggtggccctgatgtcctcagtaagcacgtggagcctgggccaccgatggctgctttggctttctggctgctacccctcagagttcatcccgggcagcactgtccagtggggactggagcacgtccgagttcttggcctcacggctcagtgcctgctgctcccgcatcttctgggactatgcgcggtcccagtcggtcttgacgtgctcattgttccatacgactgaggtctcggtgtcactcacatagccatcgtctactgtgtagtgtgtagggtagatgagcatcggcttcacatagaacgc

SEQ ID NO: 297 - DNA, 497 bp, Homo sapiens
tgaaataatcaatataaataattatattctgcttcagaatgaaaacatttccagaacattgtgggagcctcgcttgttcatcaacattacctgtttttatcaaatactgtcatttgtgcaacaaatgtcttttccccatcctcacgatttcattttcttctggctggaagctcttcactggacataatattttcaatggtttctccattaatcattccattaaactctcttcttcttggacgagtcactctaaatagcaacgagtaagacttcaccatgtggctgttactaggttcaaattcattactggaaactgcaagggacgggaaatttccaggttttgtttgattgaggtcaggattcaaaggcacctgctttttacctgtgggaacttgccttattggacaacatacatcctttctttgtttgtggcaaactttcacaagcaggacttccagggtgacagaactttggtcattttctgagtatggtgatgc

SEQ ID NO: 298 - DNA, 457 bp, Homo sapiens
ctctttcagcttctttctcatattcccgggttttctttcgttctctgatttcccaattcttaaggcgctcttgataagcagcttctttctctcggagttttctttcaagttttcttcgttcgtatgcatcttcttcatcttcttctcggtcccgttttttgtctttttctctttctcgctcccgttccctctctcgctctctctctcgctcccgttctcgttctcgctctcgttctctctctctctctctttcccgctctcgttccctttcacgatctctgcttttttctcttgatcgactgcgatccttattacgatctgagctcctttctctatcccggtcacgatctctctctcgatcccgatctcggtctctctcttttgtccggtcacggtccctatcccgttctcgttcccgctcccgttctttctccttttctcgttcacgttctctttc

SEQ ID NO: 299 - DNA, 472 bp, Homo sapiens
  misc_feature (438)..(438): n is a, c, g, or t
cggcggagccattgggatactgcgatggggggaacacggggcttgagtgcactggttgggcgccgcccggcagggccaccaagtgctgcgtggagctgcagggccccaggggctgcccagactggccctcaccgctggctgtgcccgccgccccgtactggccgcccacagggcccgacgacgtctctaggaaactggcctctgggaaggccgttgagtgcttgcgcttttccgccccagagctgctcacgccgcaagggtacagggggacactctgcaggaagggcaccggcgtgctgaaggggccttctagcattttccgcagctgcttctccttcttggccacttcgttcaggaagagcttggagttcaggtggccgatcttagtgggggaaaggctgctgctcgtgcaggtctgggtcctgtccatcaggattntcacagacttggtgttcttcatgaagctgacatc

SEQ ID NO: 300 - DNA, 554 bp, Homo sapiens
tgagacaaggtctcactctgttgcataggctggggcacagtatcacgatcacagttcactgaagcgtcgacctcccgggctcaagcaatcctcccagatcagccttgcaagtagctggcacatgccaacatgcccagataacttcttaatttctgatacagactgggtctcactatgatgcccatgctaagatttcttttttaaatgctagaaatggatgttgaagttaatatccctttcagtatttatggaaaggatcatatgttctttttttaatatggtagtattgaattaacagatttcctcattttgaaccatctttatacttccaatacgaccctctcttgtgcatagtccattattcaaagtgctcgcagacactatatgttaaaattttacactaaaatttaacattaatattcctacatataattctatagttttatgaaagctgtcagcaattaaaaaatatttaactttcacttttgagataattgtaaattcacatggagttgtatgaaaaaaggagagaccccatatacccttcacccagt

SEQ ID NO: 301 - DNA, 703 bp, Homo sapiens
  misc_feature (651)..(651): n is a, c, g, or t
  misc_feature (669)..(669): n is a, c, g, or t
ttttttttttttttttttttcaagtttttttgttaggctttccactcggatgttgaggtcctctgcaggtctctgatctgaccatccactaggctcctgaaaggaagtggcatggcctgcactttctcctcctgttgcagtatctgactttgtatcaaaagtgggtggtatctcacaaagctctgcatttctggactgaaagttttcacaagtgttgttaggttcaaatgacccaaatggaggtgaacactgaactttctgactgactgccatttgctactgatgtttcactttttagcaaatgcatctgtcggaccttgtgaattcttgtaacaagttcatctgcagaaacacttcctgctattacttccaagggaattccactgtctccaataaaaaaactggatggaacacacactacaggatagatttgtgaaaactgtaggcaggcttcacttttggtatcgattttaatagcaacaaaactgtttgaagatgcttctgtaactttatcatcttcccaacttgcagccatctgtgtagactgttcatcatcacctgccacgaacaccacgaagaccgcgccgctcctttttgccgtcgcgatggcggccggaatggcgcccctggaccacagcatcgctcccttcnggccccagcgctcgctcngtgtgtagtctccgagtccccgagccgggtctcg

SEQ ID NO: 302 - DNA, 542 bp, Homo sapiens
  misc_feature (385)..(385): n is a, c, g, or t
  misc_feature (535)..(535): n is a, c, g, or t
tttaaacaagtaaagttgttagtatccaggcactgaattataccttcatggtatcaatcaaagctatgatcagaattttatgtaactgcttaatcacttctttaacaagtgtaccgctacaggtaacattaaacgtctctagcaatgatctttatcgggttctcttgccttgactgaaatattattaatacttcttatatccattaacataaaataactttttgttgagcaaaaatagtgtgaaaacattaagatgaatgtgcgctttggaaatgtttaaatagatatgaaatgattaaataaaatcacagtcttgtgcaacatccatagcttacagttatttggcaactatgaaaccacagttactaatggaattaagactttntaaaaaattgcaaatgtacttatttgtatatgaaagaggtattcagctattaactcagtatttaataaacattgatatgtaatttttacttgaaatggcctaaggtttataataccaactagttcatagagctttttttaaaaaagactntttttag

SEQ ID NO: 303 - DNA, 595 bp, Homo sapiens
tttggacttttttgaacgttgttgttccattctttctttctccaatttcttctgcttttcacgttccattttttcaagaccttcgcgaatccaagcgggaagagtcctgcgttttactgcgtctgtttcacgtgggaaaaatatacgcaagtcagttaagtaaaatatttctacaaacttgtgagtaaatttaaaaaatatcccattaaatatcatgcctttcttcaatgccatcacttttagtaacagcagggaccactgctctagtgcttacaatctgccaggacacaatgaaagcatgttaaaccatcatctaatttaatccttacaaaagccctcagagatcactactattactccacttttttccacaggtgaggaaactgagactcgaaaaaattaagtgatttgctagtaagttaaaaaaggagtaaagttagaatcttcctaaaatgtaaaaagtaaagatttattaacaaatgctcctgtccattaaatactgaacaatttagaactttccagatataaagtggcataaatatgtatttgtcacttgaaataggctggctctataatgttatttaaaaaattgaaa

SEQ ID NO: 304 - DNA, 518 bp, Homo sapiens
gtaaatcttccaataatttttggtctaaagttccatctggttcattttcttgcaagagatactcagaatctcggtcaatatatgatctgttcctgattctaaacatttttttttcttgatttatcaacttcttttcctggatgtcaagtttgttctctgagcatggtgtgttcttagtagaaacttcagtaccgtatccatgatcctcaggagcaaaccaggatatctgtgcttctgactctttatcattcttcgcttgaacagaattcagtaactgtacaatttgttcttctcgtcgttcatccatgtgtactacagctctctcttgcctctccgcttccttgttcttctgcccctgttttttcgcgtaccacatgccgatttcgcggcctttcaggtgcccgggatgccggcccctgccgcctcgaccaccccctccgccgccgccgcctcctccggagcctcggttacctccatgaccccctgctggcccccctccatagcccccaccggagctg

SEQ ID NO: 305 - DNA, 674 bp, Homo sapiens
  misc_feature (558)..(558): n is a, c, g, or t
  misc_feature (600)..(600): n is a, c, g, or t
tttttttgatatttaattatttatttgggaaaataagaatattttaagttcatgagacacaaacaagaccctatttaataattaaatttatttcaaaaagcccacaataaaaatatttccagttagcttttccagtaaatttacttttccctcacattgactgggatcaaaaccaaggaagagaaaggagaaggaataaaggaatgagtgaaatgtgctaataaaaatattaaatttatctccaaaatattgtcagtctcttaaatatagtcatggtaggcccggcgtggtggctcacgcctgtaatcccagcactttgggaggctgaggcagacggatcacaaggtcaggagatcgagaccatcctggccaacatggtgaaaccccatctctactaaaaatacaaaaattatctgggtgtggcggtgcgcgcctgtagtctcaactactcggggggctgaggcaggagaatcgcttgaacccgggaggcagaggtggtagtaagcttagattgtgctgctgcactccagcctgacgacagagcgaaactccatctcngccccattaacatattccatcacaaaacacaaacgggctttngtctggaaggaatatttcaaggatgttaaaaaggcatggctagtggtctttaatactctgctttcagttagagt

SEQ ID NO: 306 - DNA, 612 bp, Homo sapiens
  misc_feature (542)..(542): n is a, c, g, or t
ctctatcattattattattatttgatacagggtctcgctctgttacccaggctggacttcagtggcgcaatcttggctcactgcaaccccggcctcctgggctccagtgatccccccaacctcagcatcctgagtagctgggaccacaggcacgcaccaccagggctaatttttaaattttttagaaacagggtttcaccatgttgcccaggctggtctcaaactcctgggctcaagcgatccaactgccctggtttcccagagtgctgggattataggcacgagccaccttgtccggcccattatttatcttttgattgaatttactgaaaggtgtaatgtgaagtctgtcaagttgaataataaaaatttgggcttgtattttacatgccttttccccccatttcatttttctagtaattcatttttatcatactttacagaaatatcaatctgcaaggggttggtaattttaaaaactggttcttcaaacacagtttaggaggagctagtttaggtttcattctgtcagtgtgcagcanatagaatccagctgtggtagaacggcagcactctcggcaggaagctacggtagagtgattaggctgtgtc

SEQ ID NO: 307 - DNA, 464 bp, Homo sapiens
ttttttttcctgttctttagaaataacagggctatccccctaggcagtggcccagtctcacactttttcagatgtttttatagatttctatttcccagtgattgcagaaactctctgcaattatttcttgcaaagactatcagatcatccaacattagactgacagacttctattttgctgaaataacaaatcgtgtcaatagaaagtcatttttcatctccaaatactgcaataaaaacctgagatgcttcccttatgatcgatttttaatttcctaacttctatagaaatttttcttcatggtttttatatttttggcatttctaacttaaaatatctaaaactctttaagttatatgcatgaagcatttgtgctttgattttaaaaaaaagttaatatcatgctgtttgaacaatgtgagccattaaagggtatgactgtgctaccatggtattctttttt

SEQ ID NO: 308 - DNA, 480 bp, Homo sapiens
tttttttttttgttttgagagctggagtctcgctctgtcacccaggctggagtgcagtggtgcgatcttggctcactgcaacctccacctttgtgttcaagcaattctccttcctcagcctcctgagtagctgggattacaggcatgtgccaccatgcccggctaatgtttgtattttagtagagatggggttggttggccaggctggtcttgaactcctgatctcaagtgatacgcccatctcggtctcccaaagtgctgggattataagcgtgagccatggcacccagcctcacataggaaacttcttagagcaacttaaagttgttcaactatgttatacgtctttcttatgttttactaagtctagtacagtaaaacatatacaattaattattattaaaatcaccttaagaaatactaaaaacaaggccagaatataagaaataaaatattgagagcctattaacaaactcagct

SEQ ID NO: 309 - DNA, 574 bp, Homo sapiens
tatctctgtattctttattaaaaatactgctgtacggacatagagactgaaaacaggattaaagatgaataacacaaattgggtcatgacattagaacctaacacactggtgctttttagggaagttgttgacatccaaatcacagaaccaaggtcaaaagcaaaatacaaaggtaccctcaaaaatatttacaatgaagtaaatacactaacagaatttaaaacaggtacaaaatattgaaatgaccaacgttacatgatttcaagggttgtcctttctgtgcttttatctgtcacgacaggaaggtgtggaaagtttatatcgtttatatccttaatttgactactcttggatattaaaatctttctattaattaaaaagacttttagacaacctcttaaatggaattacactatggaaaacagggctcccccaaaaacacctaggcagaactgagagttctttgaaaaccattcccaataaaaactaaatgaaaaataaatataaaacaaagcttaaaaaaatatgcattacctgacaccaaccttttctggctgacaatatttattcatg

SEQ ID NO: 310 - DNA, 549 bp, Homo sapiens
  misc_feature (499)..(499): n is a, c, g, or t
aacattgtttgtttgtaaatctgtgggatggccttgaagtgaaaggcgaggttgctgtaagcggctaatcataggctgtggggacactctactatattctattccccgagcaggagatcgtgaacgaggtgaatttctgggtgactgcttaggtgacggtcgaggtgaattgcgtggtgatggtgaaaacctgttaacagcagggtatactgcatgatgcatattgtcatcttcatcatctaaactttgtgcatcaagttcctgatcactaaaagtaccccgtcttgtagaattgcaagatgaaccagaactgcgccgagacgtggtggctgcatattcttgccggagactttcttcctgcatccgggctagaatctgtacatcagttacatcatttagcttataattggatccaattgaatcttcatctaattctgaagcacttaactcactatctatagaggactgaggactgagtggaggatttctgtctgagctnttcaagttacctgaatttccaggaagtataagctgtttgactataggagg

SEQ ID NO: 311 - DNA, 531 bp, Homo sapiens
tagatttttcatttttattttaaacattttacattaaatgaaatttaaccataataattacagaacattaccacaatgatacacacaaataacctttaaaataaaaaagaatacaattcttaactagttaaatgacactttagtgtgtaaacataaataaaataaaaccctgatgctaaaaaggtacatgttcagaggtaaaatacatatacaaaaacatttaaactaacataatccacaactagatcacattctttgcaagagagtacaaatattagtactctacagctacaaaatttcagaatcctgttaaaatcaaaaccgttgctggtttataatacacagcacaattcataaggcaaaaatataggcattatcatccagttctttaacttcacttgtattttaaggcaaacttggaactttttgcttagtatttaaaaataaatgggacttacacataacttgacaaaattaacaataagttatctctagtaaagatgtataatataaaagacatatggataacaa

SEQ ID NO: 312 - DNA, 452 bp, Homo sapiens
tgaacatattgccatttattttgttgaggttaaacatataattttaacgtattcaaacttattaatggacatttaaaaagctgaaaaagtgaagagctgtaccatgtcgtggattattttaatgtcataaaattcaaaggaatgccacatttcaataaaacattttaagaagttgacatacttttattagaatcatgcaaatattagagaaaggttaatggctttttttttagtagacattactgagaaaactggctcattatatcacaaaaagtgaaacttggatctcatatataaaggtgtatttcactgaattttttttttttttttttttgaaacagagtttccactcttgtcgcccaggctggagtgcaatggcgcgatcttggctcactgcaacctctgcctcctgggttcaagcgattctcctgcctcagcctcccgaagtaact

SEQ ID NO: 313 - DNA, 310 bp, Homo sapiens
ggggggtccctgagactctcctgtgcagcctctggattcacctttagtagcaattggatgagctgggtccgccaggctccagggaaggggctggagtgggtggccaacataaagcaagatgaaagtgagaaatactatgtagactctgtgaagggccgattcaccatctccagagacaacgccaagaactcactgtatctgcaaatgaacagcctgagagtcgaggacacggctgtgtattactgtgcgagagccgaccccgggtatagcagtgcctggggccagggaaccctggtcaccgtctccttag

SEQ ID NO: 314 - DNA, 278 bp, Homo sapiens
gatgattatgccatgcactgggtccggcaagctccagggaagggcctggagtgggtctcaggtattagttggaatagtggtagcataggctatgcggactctgtgaagggccgattcaccatctccagagacaacgccaagaactccctgtatatgcaaatgaacagtctgagagctgaggacacggccttgtattactgtgcaaaatttctcccgggcaattgaagaacgtattactatggttcggggagttatagggggatgcttttgatatctgg

SEQ ID NO: 315 - DNA, 2165 bp, Homo sapiens
gttagcgcctgaacatgcggcagtctgcgggcgacccaggctccggacaggcagcggcggacggcgccggcggaggtggcggcggaggtggcggcggagacggccggcgcccggcgcggagcctagcgaggcagttcagcgcggcctcgggcctggtctagaaggatgctgtcccgacagaaaaccaaaaacgaagtgtccaagccggccgaggtgcaggggaagtacgtgaagaaggagacgtcgcctctgcttcggaatcttatgccttcattcatccggcatggtccaacaattccaagacgaactgatatctgtcttccagattcaagccccaatgccttttcaacttctggagatgtagtttcaagaaaccagagtttccttagaactccaattcaaagaacacctcatgaaataatgagaagagaaagcaacagattatctgcaccttcttatcttgccagaagtctagcagatgtccctagagagtatggttcttctcagtcatttgtaacggaagttagttttgctgttgaaaatggagactctggttcccgatattattattcagacaatttttttgatggtcagagaaagcggccacttggagatcgtgcacatgaagactacagatattatgaatacaaccatgatctcttccaaagaatgccacagaatcaggggaggcatgcttcaggtattgggagagttgctgctacatctttaggaaatttgactaaccatggttctgaagatttaccccttcctcctggctggtctgtggactggacaatgagagggagaaaatattatatagatcataacacaaatacaactcactggagccatcctcttgagcgagaaggacttcctcctggatgggaacgagttgagtcatccgaatttggaacctattatgtagatcacacaaataagaaggcccaatacaggcatccctgtgctcctagtgtacctcggtatgatcaaccacctcctgtcacataccagccacagcaaactgaaagaaatcagtcccttctggtacctgcaaatccatatcatactgcagaaattcctgactggcttcaggtttacgcacgagcccctgtgaaatatgaccacattctgaagtgggaactcttccagctggctgacctggatacataccagggaatgctaaagttgctcttcatgaaagaattggagcagattgttaaaatgtatgaagcatacagacaagcccttcttacagagttggaaaaccgaaagcagagacagcagtggtatgcccaacaacatggaaaaaatttttgagctgattttttaaaaatttaagttttgtaagagctttaaaatattttcacagataaaaaattgcaaacaagtactctggttaataaatgctgcttcctttgtggaaattataaaattctaactttacatgtattttgttattagaaattttcttttattgaatgagaaaaattagtctatcattttaagagccaatatggcaaacactttcaaatactgtatattaggaaactgttttggtattcttgatggaaaaaaatgcagcggaaatgtcattatgaacagatgttaaataggaaattattacttgttaacttcttacagcagtagtaccttctttaaaaaaaaaaaaagaatctgcggtattttttttaaaaaaaagtttactgctgtagtgtgaaatattgtctggaaagggatggtttaaatattaccatgatgtagttgaaatataaaataggatttggaaccttattgtgataaatatttatatatgatgtatgttcgtctcccctctccaaagtaaggaacccagctgggcgtggtggctcactcctgtaatcccagcattttgggaggccgaggtgggtggaccgcttgagtccacgagtttaagaccagcctgggcaacatggtgaagccccatctctacaaaaaatacaaaaaaattagccgggtatgatggtgtgtgcctctagtcccagctacttgggaggctgaggtcagaggatggcttgagccctagaggcagaggttgcagggtcaagatcgcaccacttgcactgcagcccgagagagagagagccagaccttgtcgcaaaaaaaaaaaaaaaaaaaaaaaaaaaaaa

SEQ ID NO: 316 - DNA, 1561 bp, Homo sapiens
gcgcggcgctgctgggttctccgaggcgacctggccgccggccgctcctccgcgcgctgttccgcacttgctgccctcgcccggcccggagcgccgctgccatgcggctggcgctgctctgggccctggggctcctgggcgcgggcagccctctgccttcctggccgctcccaaatataggtggcactgaggagcagcaggcagagtcagagaaggccccgagggagcccttggagccccaggtccttcaggacgatctcccaattagcctcaaaaaggtgcttcagaccagtctgcctgagcccctgaggatcaagttggagctggacggtgacagtcatatcctggagctgccacagaatagggagttggtcccaggccgcccaaccctggtgtggtaccagcccgatggcactcgggtggtcagtgagggacacactttggagaactgctgctaccagggaagagtgcggggatatgcaggctcctgggtgtccatctgcacctgctctgggctcagaggcttggtggtcctgaccccagagagaagctataccctggagcaggggcctggggaccttcagggtcctcccattatttcgcgaatccaagatctccacctgccaggccacacctgtgccctgagctggcgggaatctgtacacactcagacgccaccagagcaccccctgggacagcgccacattcgccggaggcgggatgtggtaacagagaccaagactgtggagttggtgattgtggctgatcactcggaggcccagaaataccgggacttccagcacctgctaaaccgcacactggaagtggccctcttgctggacacattcttccggcccctgaatgtacgagtggcactagtgggcctggaggcctggacccagcgtgacctggtggagatcagcccaaacccagctgtcaccctcgaaaacttcctccactggcgcagggcacatttgctgcctcgattgccccatgacagtgcccagctggtgactggtacttcattctctgggcctacggtgggcatggccattcagaactccatctgttctcctgacttctcaggaggtgtgaacatggaccactccaccagcatcctgggagtcgcctcctccatagcccatgagttgggccacagcctgggcctggaccatgatttgcctggaatcccgcccctagtggtaccctccagaccagcgccaccgcctccgacagtgtcctcgctctacctctgacctctccggaggttccgctgcctccaagccggacttagggcttcaagaggcgggcgtgccctctggagtcccctaccatgactgaaggcgccagagactggcggtgtcttaagactccgggcaccgccacgcgctgtcaagcaacactctgcggacctgccggcgtagttgcagcgggggcttggggaggggctgggggttggacgggattgaggaaggtccgcacagcctgtctctgctcagttgcaataaacgtgacatcttgggagcgttaaaaaaaaaaaaaaaaaaaaaaaaaaaaaaaa

SEQ ID NO: 317 - DNA, 3173 bp, Homo sapiens
gagtttttctattttattgatagttttgtccttcattatttccttcctaatcgttttttgaaggttgattggctgttatttttctagcttcttgagctggaagcactaattttttgccttttaaatttctattattcattacatgtctttgtaagtacccacaagtcttgacatgtgttggaaaaggcggtctcatgcacacagcctttccaccccttctcaccaaataaaaatgggccttgggcctgaaacactttcttaccaagcgatagagtcctcacagcctgtgctggacctgtcactctgtgtgaaatatttttccctgttttacactcagtgtgtcctcctttgctctgcttcagcatgtgtgtcatatgtcacctggctcacctacagtatctccccattgggaaggggatggagggacagggttggtctgctgtagcccaagaagggtgtgtgtagaccagttgttggcatcagctgctgggaggaacttgctcaccatgggataccaacacctattactgaagctgatcttgctttgtctcctctctgtgtaagtaaagcgttgttccatgcagtgcttgactgtgcatcgtgttttctttggtgactatgataccaagatacaatgaacagaagttctaagacttctactcctgatattaggtgacagataccacttgcttgacaatatgtgtttattatcattcagttcaaaatgttttctaattgccattgtggtggttttttctttatctcactcattttacatatgtatttgattcatttccaatgagttgatgcatatttaattttttaaaaaaattgttataaaaacataaaaatttattatcttaaccggttttatttggtgtgtgtgttattgctatctagctcatatccactgtagtttgagatgatactctaagtgattttcatcctttgatatttgttgaggcttgctttataatgaagcccatagtcaattttggtaatgttttgtgtagtcttgaaaagaatgtatgttcttggccaggcacagcccagcactttgggagcctgaggtgggcagactgtttgattccaggaattcaagattagtctggccaaccctgtctctacaaaaaaaatgcaaaaagttagtggtgatgcatgccttagtcccagctactcgggtggctgaggtgggaggattgcttcagcctgggaggttgaggctgcagtgagctgtgattgtgtcactgcactgcagcctgggtgaacagagtgggaccctctctcaaaaaaaggtaagaaaagaatattctgttgttgagtgtagtgttctgtgtatgtcagttaagttgaatttttaattttgttgtttagagctcttactacataatgatttttctctgctaaaaaaaaatgaggtcttggaaaaaaatagtgtcatctataagcattaaaaaaattaaaaatgaggtcctgaatggtgtgctcaaatttccaacatttattatgggatttgtttagttctgtaagtttttgctctatatcttttgaagctgtattgttggatacatgcacatttagaatttttatatcttcttggtggatcaatcccttagtcattataaaatgtccctccttatctttagtaatatttcattaaggtctattttatttgatatgagatagctacctcagcttccttctctatgtcttttgtaagcagcatatagagttgtcctttcatatccatgacttctgcatccatggattcaagcaactgcagattgaaaatattaagagaaaaaaaagatggttgtttctgtactgaacacgtgcagatatttttttctggtcattattccttaatacagtataccaactatttacataacatctacattgattaggtattagaagtaatctagtgatgatttaaagtatatggcagaatataaataggttatggcaaatactacatcattctatacaacaggctttcagaacgtgtaaaataatatgaacaaaaaaatttaaatcaaaatataacaggcttgagcatttgtagattttggcattgttgcgggggtgggatcctgcaccgaatccccctcggataccaaggggatacagtgggaccatttgcagatcctctagagtgctctctcctgtctgtctccctgtctttccgctttaatactctgtcctgcatactctagctgttttgatatcctccgatgctcagtttatctcaattaatgaagtccacacaagctccatctggattctctttccctttgctgggacctgagaattctctcaagacattaagccggggcagtcatagagttcacgttgtttgtttcccatctctcagggatcactgttctctctaaagtccattgtcttaaaaattgtcatttcatatgttttgtctggtttttatttgtgggagaggggttgtttcaagtaaaagggtaaaatcctgtccccaatactttgccttggccaagagtgaaagtggcccattagatgatttttatcagtgattttcaaccttttctacagggttagaattctttgttcaagtaaaatcttatccccaagtgtcatgtgtatgtgaaataaatgagggcaagatggtggtagtgtagtatatgtgcacatgtgcctttgtatgtgttggggatatagcagagcttttttgctgacttggattcctattcccattccttgagggctttatagcccaatttgaaagtcactaatatagagagtacaaataggtatataaaaaagtaagcaaatgagaaaataagccagttattagttacagaggaaacaaactatccaggaaaggaaatttacagtatatctcattttggggtttggaaggatgtgtacaaaatagtgtaattgaaaattgataaaataaaaaatcttatatacttatattgggtaaaggaagataggagaagtgacagagcgagagagagagagtgtttatgtgtgaaggaaataagaaagctcagtcttataagaagtctcagataatgtgtagactttacagaaaagcagtttaagaatggtatttaaaaataaggaattaaataacatgagagttgaaaggtagtttagggggaggtctattgttgattgataaaaaaaaaaaaaaa

SEQ ID NO: 318 - DNA, 2897 bp, Homo sapiens
aagtcacgtgctgtgacagtagctggggtgaggccgtcgtcgccgcacgggctggttggggctgtgtctgtgggaggcgccggggtgatggcggtggagactctgtccccggactgggagtttgaccgcgttgacgacggctcgcagaaaattcatgccgaagtccaacttaagaattatgggaaatttcttgaggagtatacctctcaactgagaagaattgaggacgctctggatgactcaattggagatgtttgggatttcaatcttgatcctatagcattaaagcttttgccttatgaacagtcctctcttttggaactcataaagactgaaaacaaggtcttaaacaaagtcatcactgtttatgctgcactttgttgtgaaatcaagaaattaaaatatgaggctgaaactaaattttacaatggtctcttgttttatggagaaggagctacagatgccagcatggtggaaggtgattgccaaattcaaatggggagatttatttcattcttacaggaactgtcttgctttgttacgaggtgctatgaagtggtgatgaacgtagtccaccagttggctgccctctatatcagtaacaagattgcacccaaaattatagagacaactggagttcattttcagactatgtatgagcacttgggagaactgctaacagttttgctcaccctggatgaaattattgataatcatatcacactgaaagaccactggactatgtacaaaaggttactgaaatctgtccatcacaatccttcaaaatttggaattcaggaagaaaaattaaagccatttgaaaagttcttgctgaagctagaagggcaattactggatggaatgatattccaggcctgtatagaacaacaatttgattctctcaatggaggagtatctgtgtcaaaaaatagtacttttgctgaggaatttgcacatagtattcagtcaatttttgcaaatgtagaagccaaacttggagaaccttctgaaattgaccagagagacaagtatgttggaatttgtggactctttgtattgcactttcagatttttcgaactattgataaaaagttttataagtctttattggacatttgtaagaaggtaccagccatcactctaactgctaatattatttggtttcctgataattttctgatccagaaaataccagcagctgccaaactgctagacagaaaaagtcttcaagccattaaaatacacagggatacttttctacaacagaaagctcaatcacttaccaaagatgtacagtcttactacgtctttgtgagctcatggatgatgaaaatggaatctattttgtctaaagagcagagaatggataaatttgctgaagatctcaccaatagatgtaatgtttttatacagggcttcttgtatgcatatagtattagtaccattattaaaaccacaatgaatctctacatgtccatgcaaaagccaatgaccaaaacctcagttaaggcattgtgcaggcttgttgaacttctcaaggcaatagagcatatgttctacaggagaagcatggttgtggctgattcagtttcacatataacacagcaccttcaacatcaggctcttcattctatttctgtggccaagaaaagagtgatttctgacaaaaaatacagcgaacagcgtcttgatgtgctctctgctctagttttggctgaaaacactctaaatggaccaagcacaaagcaacggcgacttattgtttctttggcactaagtgttggcacacaaatgaaaacatttaaagatgaagaactctttccacttcaagtagtcatgaaaaaactggatcttattagtgaacttagagaacgagtccaaacacaatgtgactgttgttttttataccggcatcgagctgtcttcccaatttatttagatgatgtatatgaaaatgctgttgatgcagccagattacattacatgttcagtgctttgcgcgactgtgtacctgctatgatgcatgcaaggcatttagagtcctatgagatacttctggattgctatgacaaggaaattatggaaattttaaatgagcatttgctggacaaattatgcaaagaaatagagaaagatctgcgactttctgtgcatactcatttaaagctggatgaccgaaaccctttcaaagttggcatgaaagacctggctctttttttctctctgaatccaattcggtttttcaatcgtttcattgacattcgggcttacgtaactcactacctagacaagactttctacaatctaacaactgtagcccttcatgactgggccacttatagtgagatgagaaacttagctgctcagcgttatggactggttatgacagaggcacatcttcccagtcagactttggaacagggccttgatgttttagaaattatgagaaacattcatatatttgtgtcccgatacctctataatctcaacaatcagatttttattgaacgaacaagcaataacaagcatttgaatactattaatattcggcatattgctaattcaattcgaacacatggcacgggaattatgaatacaactaaatgggcattcaccgcttggcgtggtggcccacgcttgtaatcccagcactttgggaggctgaagcaggaggatcacctgaggttgggagttcaagaccagcctgaccaacatggagaaaccccatctctactaaaaatacaaaattagccaggcgtggtggcgggcgcctgtaatcccagctgcttgggaggctgaggcaggagaatcgcttgaacctgggaggcagaggttgcagtgagctgagattgcgccattgcactccagcttgggcagcaagagcgaaactccatctc

SEQ ID NO: 319 - DNA, 3151 bp, Homo sapiens
gtgaggccgtcgtcgccgcacgggctggttggggctgtgtctgtgggaggcgccggggtgatggcggtggagactctgtccccggactgggagtttgaccgcgttgacgacggctcgcagaaaattcatgccgaagtccaacttaagaattatgggaaatttcttgaggagtatacctctcaactgagaagaattgaggacgctctggatgactcaattggagatgtttgggatttcaatcttgatcctatagcattaaagcttttgccttatgaacagtcctctcttttggaactcataaagactgaaaacaaggtcttaaacaaagtcatcactgtttatgctgcactttgttgtgaaatcaagaaattaaaatatgaggctgaaactaaattttacaatggtctcttgttttatggagaaggagctacagatgccagcatggtggaaggtgattgccaaattcaaatggggagatttatttcattcttacaggaactgtcttgctttgttacatgaagtggtgatgaacgtagtccaccagttggctgccctctatatcagtaacaagattgcacccaaaattatagagacaactggagttcattttcagactatgtatgagcacttgggagaactgctaacagttttgctcaccctggatgaaattattgataatcatatcacactgaaagaccactggactatgtacaaaaggttactgaaatctgtccatcacaatccttcaaaatttggaattcaggaagaaaaattaaagccatttgaaaagttcttgctgaagctagaagggcaattactggatggaatgatattccaggcctgtatagaacaacaatttgattctctcaatggaggagtatctgtgtcaaaaaatagtacttttgctgaggaatttgcacatagtattcagtcaatttttgcaaatgtagaagccaaacttggagaaccttctgaaattgaccagagagacaagtatgttggaatttgtggactctttgtattgcactttcagatttttcgaactattgataaaaagttttataagtctttattggacatttgtaagaaggtaccagccatcactctaactgctaatattatttggtttcctgataattttctgatccagaaaataccagcagctgccaaactgctagacagaaaaagtcttcaagccattaaaatacacagggatacttttctacaacagaaagctcaatcacttaccaaagatgtacagtcttactacgtctttgtgagctcatggatgatgaaaatggaatctattttgtctaaagagcagagaatggataaatttgctgaggatctcaccaatagatgtaatgtttttatacagggcttcttgtatgcatatagtattagtgccattattaaaaccacaatgaatctctacatgtccatgcaaaagccaatgaccaaaacctcagttaaggcattgtgcaggcttgttgaacttctcaaggcaatagagcatatgttctacaggagaagcatggttgtggctgattcagtttcacatataacacagcaccttcaacatcagtctcttcattctatttctgtggccaagaaaagagtgatttctgacaaaaaatacagcgaacagcgtcttgatgtgctctctgctctagttttggctgaaaacactctaaatggaccaagcacaaagcaacggcgacttattgtttctttggcactaagtgttggcacacaaatgaaaaaacatttaaagatgaagaactctttccacttcaagtagtcatgaaaaaactggatcttattagtgaacttagagaacgagtccaaacacaatgtgactgttgttttttatactggcatcgagctgtcttcccaatttatttagatgatgtatatgaaaatgctgttgatgcagccagattacattacatgttcagtgctttgcgcgactgtgtacctgctatgatgcatgcaaggcatttagagtcctatgagatacttctggattgctatgacaaggaaattatggaaattttaaatgagcatttgctggacaaattatgcaaagaaatagagaaagatctgcgactttctgtgcatactcatttaaagctggatgaccgaaaccctttcaaagttggcatgaaagacctggctctttttttctctctgaatccaattcggtttttcaatcgtttcattgacattcgggcttacgtaactcactacctagacaagactttctacaatctaacaactgtagcccttcatgactgggccacttatagtgagatgagaaacttagctaatcagcgttatggactggttatgacagaggcacatcttcccagtcagactttggaacagggccttgatgttttagaaattatgagaaacattcatatatttgtgtcccgatacctctataatctcaacaatcagatttttattgaacgaacaagcaataacaagcatttgaatactattaatattcggcatattgctaattcaattcgaacacatggcacgggaattatgaatacaactgttaatttcacctaccagtttttgaaaaagaagttctatatatttagccaatttatgtatgatgaacacatcaaatccagattgattaaagatattcgatttttcagggaaattaaggaccaaaatgatcataagtatccttttgatagagcagaaaaattcaatcgaggcatcagaaaacttggaataacacctgagggacagagctaccttgatcaattcaggcaactcatcagccagattggtaatgctatgggctatgtacgaatgataagatctggtggtcttcattgtagcagcaatgccattagatttgttcctgatcttgaagatattgtaaattttgaagaactagtaaaagaagaaggtcttgcagaagaaacattaaaagcagcaaggcatttggattcagtcctcagtgatcacacacgaaattctgccgaaggcacagaatatttcaaaatgcttgtagacgtttttgctccagaatttcgaaggccaaagaatatacatctccgaaatttctatataattgttccccctctgaccctcaactttgtagagcattccattagttgcaagg

SEQ ID NO: 320 - DNA, 3174 bp, Homo sapiens
acagtcttccagctccacatcctgagaggacgcttctggagccgcgactgcccggggttgtgccggccgccgctgccgcccaggccgcctcagctctcctctgcgccggcccgctcactccgcccggccccagccctagcgctggccgcgaccccggcgcctttgaaacttctgctggtgtgagtgccctcgggggttccccaggaatatcgatacaacaccaacaggagatcatgaatcagacagataaaaatcaacaagaaatcccatcataccttaatgatgaaccaccagaaggttcaatgaaagatcacccacagcagcagccaggcatgttgtcccgtgtgactgggggtatcttcagtgttacaaagggagctgttggtgccaccattggtggtgtggcttggattggtggaaagagtctggaagtgaccaaaacagctgttacaactgtgccttccatgggaatagggctggtgaaagggggtgtctctgctgtggctggaggtgtacagctgttgggtctgctgttgtaaacaaagtgcccttaacaggaaagaagaaagacaaatctgactgaaatatagagatacacttgcgctccacagcactgtaatgccagtggcattgaattgctaaattatggactacaaccaagtcaactgttttggacgtttatcttctaaactgctgtgttgaaagtattgatgactggctttcatctaaaaagaagagaccaatacgagcacagtatatgaaggtttctcatacttaagttccaggtttttatctggtaaaatgttacacttactcggttgtaactgaagatatggtatgtttgaatatttactataagtctttcagtttgactaaaaatgtgaaagttgaatttagtagatgatcttcacagttccatatgtataatgtgccaggtaactcacctgccccttaagaagggaaccttgaattacataagccgtacctttgatgtgcctaatagtttcagatgtcttagttttttataaccatagttgattaggccaagaggcattcatttcttatttaagctggcaaaattagcaggaattagagaagtttaaaaagataaatggttttatgataatgttaaccatcttttgttagtaaatatgcgttctattattttaatcattgatgccttacaaaagaaaacatcttttctaataccctgaatatgtgctgttcttagaatcatctatggattcttttaaaggttgtttgtgaaattagttttccctttttagaatctcaggagtagtggggtaaagacatttcctgctgtcagtggataagacagagcttgttaactgttttggcagtagttaaaatcaaattgtacacttctcagcctgggttcatgcttcatcattaatacacctcacagtgcctaaggaacatttacttactggtcagaaggtattttggaagagtttcatattaaggaggaacaaataataattttaagttcttaaaaattacctaaaacaccccaaatataaaaagaagccttcacacctattctgtctttaggatgtcttaaattattagcagtactcctttttttaaaaacactgtaaaagtaaccacaaatatgtgaggacttactattttaaatggaatggaatgagctccatagattagttttgaatataaagtatataaaagtgcatcagtggtttatataggctttaaaaacatgttatcttacagtcctttaaagcagccatagagtttgtatcatttttcaagccaatttcagtcagggatttgaattgtttgattatggatgataaatgtgtcatatcttattaatatgtctcatgtctcgttccttcttaatatgatttagctggaattcattttcttttcgtttcatgtttaatttcataaaacgtttaacaattggcatatatacttggcattcctgtccaccaaggattgtaatccaagcctgggaaaatcttaaatttctttttacttaaatctggaaatttgtctccattctgccacctttttttttttttttttttatagtggaggggaggaaaggggggtgataccttgcagtaagtaagtcgaaatagcatgcctgaaaatttgaaacagaccattctaacacccgaggcttgtttataaaatacttgagaattacattaatgtggaatcaacagatgcagaagaatataacataacttttaaaagctttcataaataccagcagcaattgtaagcaaatctacaaaggttcttgaacctttctattatatacaaaactgaaaagtcattaaggagttcaactaatcaggaattaaatggtcatttatttcatgcagtatgatttaaggtatttcttgagattctggtcaaatgtcataatcagcaaacgggattaaaaaaaaaactccaaaatcactaaataattatctaaataatggtattggagaacttgtttcctgctatttggaagagattgttgcttcattgctagtttgtatttctaacttctacagttatagactccactgtgctttgtgtctgaatttctcagtatagacattttgtttactgtatgcttgcatatttattttcaactttgtttgtctttaaaattgcttgaggaaagatggttgtaattaatttctgctacagaaaagccacctggtacgttttgtctcatcaggattgttttaaattctaaactataagtttgttcagaggggcttttgcaatgatagcagaaaactgtacaaatgtacagttagttatagaggttcttgttgaaatgaacttaccatctgatgatatgtatgtacagctgtgtacttgagtcttttttagtttacttagaaagactagcagtttgacctgttaaacaggactagttcaagtcaagaaactaaggttgttgtatacacctggaggcatctgttattcagcttatcctttgagtgggaatttggcacaatgaggataaacttatgtgacccacttgaatggctgatctaataatgttgacattatgcattctgtacttagtgaaatgtcagatgaaaataactgatgaataatttttttgtattaaagggatgggaaaagaacacatgaatttgttaataaagcactatgatctgc

SEQ ID NO: 321 - DNA, 3115 bp, Homo sapiens
agaaaagatggcgaaagtcaacataactagagacctcatccgtaggcagatcaaggagcggggtgccctgagctttgagcggcgctaccatgtcactgacccctttatccggcggctgggcctggaagcagagctgcagggtcactcaggatgtgtcaactgtctggagtggaatgagaaaggagacttgctggcctctggttccgatgaccagcacacgattgtgtgggacccgctgcaccacaagaagctgctctccatgcacacgggacacaccgcaaatatcttctctgtcaagttcctgcctcacgctggggaccgcatcttgatcacgggggcagccgactctaaggtgcatgtgcacgacctgacagtaaaggagaccatccacatgtttggagaccacacaaaccgggtgaagcgcatcgccacagcgcccatgtggcccaacacattctggagtgctgctgaggatgggcttatccgccagtatgaccttcgagagaacagcaaacactcggaggtgctgattgacctgacagagtactgtggccagctggtggaggccaagtgcctcactgtcaacccccaggacaacaactgcctggcagttggggccagcgggcccttcgtgaggctctatgacatccgcatgatccataaccacagaaagagcatgaagcagagcccttcagcgggtgtgcacaccttctgtgaccggcagaaaccccttccggacggtgcagcccagtattacgtagcaggtcacctgccagtgaagcttcctgactacaacaaccgtttgagagtgctggttgccacctatgtgaccttcagccccaatggcacagagctactagtcaacatggggggggaacaggtctatttgtttgacttgacttacaagcagcggccgtacaccttcctcttgcctagaaaatgccactcctcgggggaagtccagaatggcaagatgtccaccaacggtgtgtccaacggtgtgtccaatggcctgcaccttcatagcaatggcttccggctgccggagagtaggggacatgtcagcccccaagtagagctaccaccatacctggagcgtgtgaaacagcaagccaatgaggcttttgcctgccagcagtggacccaagccattcagctttacagcaaggctgtgcagagggcccctcacaatgccatgctttatggaaaccgagcagcagcctacatgaagcgcaagtgggatggtgaccactatgatgccctgagggactgcctcaaggccatctccctaaacccatgccacctgaaggcacactttcgcctggcccgctgcctctttgagctcaagtatgtggctgaagccctggagtgcccggacgacttcaaagggaaatttccggagcaggcccacagcagcgcttgtgatgcattgggccgcgacatcacagctgccctcttctctaaaaatgatggtgaggagaagaagggacctggtggcggcgccccagtccgcctccgcagcacgagccgcaaggactccatctcagaggatgaaatggtgctgcgggagcgaagctacgactatcagttccgctactgcggccactgcaacaccaccacggatatcaaagaggccaatttctttggcaggagaccaccaacctggtccgtgtgctccaaggggatgagtccattgtcaactgcctgcagccacaccccagctactgcttcctggccaccagtggcatcgatcctgttgtgcggctctggaacccccgaccagagagtgaagacctcacaggccgagtcgtggaagatatggagggtgcttcacaggccaaccagcggcgcatgaatgcagacccgttggaggtgatgctgctcaacatgggctaccggatcacgggcctgagcagtgggggtgccggggcctctgatgatgaggacagctctgagggccaggtgcagtgccggcccagctagaccctccagccctggtccccagcccctgctactggctggaccctctgccctgggcaggaggtcaggggattctgttttggtttgtcttccccaccacccttttttttcatttcccctgttttgtttgttagtttggcgttaggggtggaggttgctacaacttgctggctttcggactctgggctgattgtcccctgactatccccagccctgaaaaaaagagcaggaggggacacccctccatatgcccccccccatctcctgctttcatgtccctggagggctctggcctgcctcaaaaccccttctgcctcaggtggggaggaacaagctgaactgtcttcagggactgtcctgccctttagctggcagcagcaggaggagtgggattcccaattggtaagggctcgccttggcctgttgccactcttgctccctagcctgcaaggctagctcccctgtggtcttcaggaaaggttttgaaaaaggatgggtcccaccctccctccagagccaccagtgttagagcggagcccaaaggaaggatgggagccctggagtgggcaagaccaggccacctgctgaggtcgctgtggagcaccctcgctcctctcctggctactagctctggccctgcacctactctcactggccacctctggaggctctgcctttcccaagggccctggcagagggtggggcactgcaccttaccccacccatccatgccagcacttctgcactacggccattctcctcttgggcgctcctcagcctcactgtgacctttctgccagagctcccagccaggcctactctgctgaggtggcgcttcctgctaagggcccttctctgccctttctgccctccttcccatcccacatgctgagccgccacaaagaccaaagaagtgatggcttttctctgtcccctgctgctctgaggggagaggggtgggtctcctgagccactcagatgggaaagtcccttactcggcccctccctccccagcagccccaagctttacactggatgcagcgatcaacccaccactcaccaggagccgagcctttttgttgctccgctcccaggagagtgagggtgacgcaattgattaaaaccattttgttct

SEQ ID NO: 322 - DNA, 1966 bp, Homo sapiens
caggagaatcaattaaagccattgtgaaagatgtcatgtatatctgcccatttatgggagcagtgagtggaaccctgacagtgacggactttaagctgtacttcaaaaatgtcgagagggacccgcattttatccttgatgttccccttggagtgatcagcagagtggagaagattggagcacagagccatggagacaattcctgtggtatagagatagcgtgcaaggatatgaggaacttgcggcttgcttataaacaggaagaacagagtaaactagggatatttgaaaacctcaacaaacatgcatttcctctttctaacggacaggcactatttgcattcagctataaagaaaaatttccaattaatggctggaaagtttatgatccagtatctgaatataagagacagggcttgccaaatgagagttggaaaatatccaaaataaacagtaattatgagttctgtgacacctaccctgccatcattgttgtgccaactagtgtaaaagatgatgacctttcaaaagtggcagcttttcgagcaaaaggcagagtccctgtgttgtcatggattcatccggaaagtcaagcaacgattacccgttgcagccagccacttgtgggtcccaatgataagcgctgcaaagaggatgaaaaatacttgcaaacaataatggatgctaacgcacagtcacacaagcttatcatctttgatgctcgacaaaacagtgtcgctgataccaacaagatgctgcttgctggggcagtaagaattgctgataaaatagaatctgggaaaacatctgtggtggtgcattgcagcgacggttgggaccgaacagcccagctcacatctctggctatgctaatgttggacagttactacaggaccattaaaggatttgaaactctcgtagaaaaggagtggataagctttggacacaggtttgcactgcgagtgggccatggtaatgacaaccatgcggatgctgaccgatctcccatatttctgcagtttgttgattgtgtttggcaaatgacaaggcagtttccttcagcattcgagtttaatgagctattcttgattacaattttggatcacctttatagctgtctttttgggacctttttgtgcaactgtgaacagcagcgattcaaagaggcatggggggctgggacccagcgagcccgtggctctctcaggagtagatgagtgctagaccctggacctcctgactccgagttcatgtagtctccgctgcaccaactccaaaaccgtgggattctgcttttcatcctctgtggtgttggccagatcatacttgaaggccttggaaatggagtctgctgattagccaaaaagcccactttaggatgtatatacaaagacgatatctttatggtcgtatatcaatagccagctagacgagttttctaatcccttctttgtgaattatgaaaaccacgtgttatatcctgttgctagtctgagtcatttggaattgtgggtaaattattatgtacgatggaatccacggatgagacctcagaaatatgtaatcccctggctgactaggactgttaaacatagtgtggactggatgatgccttcgacaaaccagagaagccaagttggggggagctggtgcctggagtgggccctgtgcacctcacctggcggaggctgggggggctctgtcagcaggaccctagaggagactctcattcgattttaaagaagcacaacgggtcattttcctttgtatgttcctagcgcagaactgtttctaaaacaacttgaagtatagttttgttatctaagcaatttttgttttaagtaagtaagtgtactagaatgcgaagccgttatggttcaggtttttaaaaactggtacagtattgtatctgtctcatctgttgcactgtatttcaatcatctgtaattaaaatgatcatatgttt

SEQ ID NO: 323 - DNA, 2196 bp, Homo sapiens
atgatggttggcagttagcttcctggagtgtggacgggtccttccctgcctgactgacttgtccacagggcagcaagaagatgcgccccttggtgtgtcccgagtgtctcctgtaggcagctgagctttcgcaggtctggctgggagccaaggttaccaatctggggggtaacccagccatcatctggatgagcgttggggtctttctgctctggattgcagggcagacgtcgttttgtgctggtcaggcccctcgcctgcctgattcccttggagccccccaagacaggagatgggcagatgtcctctgaagtggcatgggctgcttgctcactggccttcccaggaccctgcccaggtggtgctgcttggccccaggtcgaattcctgtgctggcagcaagcaggggcctgggccgtcggctggctggggctcatgcagccatcccctttgcagccatccgggtgacctgcataggttcctgcggggtctccaacaaggctaatgacacagcgtgggtagtggaggagggttacttcaacagttccctgtcgctggcagacaaggggagcctgcccgctggagagcacagcttccccttccagttcctgcttcctgccactgcacccacgtcctttgagggtcctttcgggaagatcgtgcaccaggtgagggccgccatccacacgccacggttttccaaggatcacaagtgcagcctcgtgttctatatcttgagccccttgaacctgaacagcatcccagacattgaggtgaggatggcacagtgacctccttggtgggtccccaccctcatggaggctggggaagagctgggcaggcactgcttcatcccagcgtcctgtccccagctgaggtgaggggggccagggtctggaggcagtggcctctttgccctgagctgactgctgatgtccaggggcagggcgtggcagggctgaggggcctgtcccaatgccacagggatccagcctgcgcacacctgctaagcccctccctggccctccccccaagcaacccaacgtggcctctgccaccaagaagttctcctacaagctggtgaagacgggcagcgtggtcctcacagccagcactgatctccgcggctatgtggtggggcaggcactgcagctgcatgccgacgttgagaaccagtcaggcaaggacaccagccctgtggtggccagtctgctgcagaaagtgtcctataaggccaagcgctggatccacgacgtacggaccattgcggaggtggagggtgcgggcgtcaaggcctggcggcgggcgcagtggcacgagcagatcctggtgcctgccttgccccagtcggccctgccgggctgcagcctcatccacatcgactactacttacaggtctctctgaaggcgccggaagctactgtgaccctcccggtcttcattggcaatattgctgtgaaccatgccccagtgagcccccggccaggcctggggctgcctcctggggccccacccctggtggtgccttccgcaccaccccaggaggaggctgaggctgaggctgcggctggcggcccccacttcttggaccccgtcttcctctccaccaagagccattcgcagcggcagcccctgctggccaccttgagttctgtgcctggtgcgccggagccctgccctcaggatggcagccctgcctcacacccgctgcaccctcccttgtgcatttcaacaggtgccactgtcccctactttgcagagggctccggggggccagtgcccactaccagcaccttgattcttcctccagagtacagttcttggggctacccctatggtgagtcgacagccagggcttggcagggaggggacgccaagagccccacgcagaccctgctttcttcccgcagaggccccaccgtcttatgagcagagctgcggcggcgtggaacccagcctgacccctgagagctgaccccgtgctgccttctccaggcaggcctggcctctgccctgggactggggcgcccagggcctcgtgccttctctcttggcctagcctggcccactcaggacctgcccagcctctgccagctcctctggcatccgccctcttctccctggggctggggtgggggtggcagggagctgggacctggagagacaactcctgtaaataaaacactttatttgtag

SEQ ID NO: 324 - DNA, 1542 bp, Homo sapiens
tctattattgatttcttatttaattttggtatagccagagaacaccatttatgtggatgatctcggctcaccacaacctctgcctcctgggttcaagcagttctcctgcctcagcctcccgagtagctgggattacaggcatgtgccaccatgcacggctagttttgtatttttagtggagatggggtttcaccatgttggtcaggctggtcttgaactcccgacctgaggtgatccactgcctcagcctcctaaagtgctgggattacaagtgtgagccaccacgcccggccttgtgtggttttaatttattaaaaattgttaaagtttactttatgacccagaatatgatctatctgggtatatgttctgtgggcacttggaaagaatatgtattctgttgctcttgagtagagtgttttataaatgtccgttatattaaaccagttgataatgttatccaggttttatatatcctttttgatttccatctatttgtttatcagttattgagaacagagttattgaagtctcccagttatgactgtggatttttccatgtctcttttagttctatcaatttttgcttcatttattttggatctttgttagttgcatactatatttcagtgtttatcttcttggtgaattgacccttttatcattatgtaacttccctatatttatatctttatatttaaaatagatttccttaaaccataagacatttgagaagtaaaaataaaataaaatagctttcttgctgatagcatatagtcgggtcttgtttttttctttttccaatccgataatctttgtcttttttttttttttggaaatggaatcttgctctaccacctggactggaatgcaatgacgtgatctcagctcactgcagcctccacctcccaggttcaagcaattctcctgcctcagcctcccgagtagctgggattataggcacccgccacgatgcccagctaatttttgtattgttagtagagacggggtttcaccatgttggttaggctgggggagttttctattatttatttcttgtttaattttggtatagccagagaacatgctttatgtggttttattaaaaattgttagtttattttatgacccagaatatgatctatctgggtatatgttctgtgggcacttggaaagaatatgtattctgttgttcttgggtagagtgttttttgtaaatgtccattatattaaaccagttgataacgttatccaggtttgatatatcctttttgatttccatctatttgtttatcagtcattgagaatggacttattgagtctcccagttatgactgtggatttttccatatctcttttagttctatcaatttttgcttcatttattttggatctttgttagttgcatattatatttcagtgtttatcttcttggtgaattgacccttttatcattatgtaatttccctatatttatatctttatatttaaaataggtttccttaacatttgagaagtaaaaataaaataaaatgtaatagc

SEQ ID NO: 325 - DNA, 1807 bp, Homo sapiens
ttcaagatgcttgtaaatgatatcaaccgtttatttagtccacccctgaagaactgagggtcctgggaactgaaccatatcaatgcaatcttttctacattattaactgaagaaaaatgggtactttttaaactttttttttttaagattaggaaacaaaaagaagtcagaaggagccaaatctggactgtaaggtgcatacctaatggtttcccatcaaaactcttacaaaatttctcttttttgatgagaggaatgagtagaggcattgtggtgcagaagtctctagtgaagctttcccaggcatttttctgccgaagctttggctaactttctcaaaacactcataataagcacgttatcattctttgttccttcagaaagtcaacaagcaaaatgtcttgagcatcccagaaaactgtttccatgatctttgctcttcatctgtctgcttttgctttgactgaatcacttctgcctcttggtggccattgccttaattgtgctttactatcttcaggattatactggaaagaatgctttagtatcttggtcctacttgttgaaaatttctattgaaagctctgcttttgcagctgatcgggatgcagtggttttggtacccatcgagtggaaagtttactcaactttaattcttcagtcaaaattgttcaggctgaaccagttgagaggcctatagtgttggcaattgtttctgctgttaatcattggtcctcttcagttaggttacaaacaaaatgaatttttttcctcgtaaattgatgtggaagatctgctgctgcaggcttcgtcttcaacatagtcttgtcccttcttaaaacaagttacccatttgtaaactgctgctttctttgaggcattcttctcataaacttttcaaaaagcatcagtgattccacaattcttccactcaagcttcaccatcaatttgatgtttgttcttgcttcagttttagcagaattcctgttgctctggtaaaggctgttttcaaactgatgtcttatccttcttagtgtttcaaactaggttctgttcagacatgttataacagcttagtacatgtttattttggtgcaaaaagttttgaaacctatgtatagttttttcttaatactcatttttcataaactttttaaagaccccttgtatatgagatgtccactcacaaaagtgttcagttgcctgactatagtgaggaataattactaagtcaaaagaaaatatcagtaatggtagttatcctttctgtgacatgtgattataaactaagcttcagttcatcagtaactaccaagtattgtgttttggtttgggctataatgttgtcatctacaaaaagattaaaagctattaaaagaatattggaaaacagaaaaactcattggttaccatcagagtttgctagggcatcagattcttactctgaagattgataaaggagagaatataatatttatcctgcccttcttgttatgaactgtattttaggcagccaagtaactgagggaaaattcttaggaaaatttccagctaataggtgcaaaagaaatgatagacttttaaaaaataaaagtttgaaagtcttaatgaagtagtgaatctagacagcagtatttcttggatgtgaaaaccattagatgataggttaatgggaaattttataatgtagaaatctgatcaaacccactgattgaagatgagacagtcaattattgtgtacctcctggtttgatgcaagagacagtacacaacagtagtaatagcaccaataaagaactcttgtcc

SEQ ID NO: 326 - DNA, 1438 bp, Homo sapiens
ggaaaaaaagttaaggatacagttgaccgttcgataatgtagcccactgttgaccagaagccctacccacaacataaacaggcaataacacatattttgtatgtgtattatatagtatattcttaacaataaagtaaactagagaaaagaacatgtaccaagaaaatcataaggaagagaaaacacatttacagtactgtactgtatttattggtaccatacatttatgttgctgtttacaagatgaagcatctgtctgaaatggccagcagctacagctgtacctatctactgtacatatcaagcaagtcgctttattcttataatgtctatgacttctttctttgaaagcgcttccatcatcactgttggcacttcatatgggtctcatggtgttaaggtttacggcattgcactagacacaatgaaaactacacaagagggccgggcacggtggctcacgcctgtaatcccagcactttgggaggccgaggcgggcggatcatgaggtcaggagattgagaccatcctggctaacacagtgaaaccctgtctctattaaaaataaaaaaattagccaggcatggtggcacgtgcctgtaatcccagctaatcgggaggctgaggcaggagaatcgctttttcccagaaggcgtaggttgcagtgagccgagatcgtgccactgcactccagcctggatgatagagggagactctgtcgcaaaaaaaaaaaaaagaaaaaagaaaattatatagaaataaaattccagctattccaaaactgcaccttgaatacaggtacagaattgctaaaaccgtgtaccattttgtagttttagcatgcttttgtgtaactgcatctggtgtttgatcctcatgagagccctgttaaggaagggtacatattattgtcctcattttccttcgaaaacacatcagagtttgtattttgactgtcagcattcaaatacaagtcttttatttataaaattttggtctttatactgtggctaaaaatcttaaatcacttgtcatgatttgaaatggtttataccgattttttttgacatttatacacacatacacatatttttaaattgtctataataaaatcatgctcatctttgaaaaaatattaggagtactacagtggatacctacatacttgctattcagcatacctggttttttgtttgttttttgagacagtcttctctgtgatccaggttggagtgcagtggcacgatctcagctcattgcaacctccgtctctactaaaaatacaaaaattagccgggcatggtggtgcgcgcctgtagtcccagctacacgggaggctgaggcaggagaatggcgtgaacccgggaggcagagcttgcagtgagccgagatcgcaccactgcactccagcctgggcgacagagcgaaactccgtctc

SEQ ID NO: 327 - DNA, 1898 bp, Homo sapiens
gctcaaatatattatgctctctcttgactctgtgcctttgcaagtgacattcacttggcctgaacactgttccagctccctctgttctttccaggtgatgccttctcgccttccaaatctcagtttagacgtgctcttctctgggaagtttattcatttactgtgtgttagatgttgttctaggccctggggatgtagcagagaagaagacaaagtcactgcatttggtgaggagctgtcatcttcagaatcaaaacttccccctagtgcagtgtccacctccagatactgcttcatttctctgctctctttgttcatgaaactttttcaataattgctttttcatttcttcatctccagtttttatctaattccaatttagtttctctctccatgactctgctcacactgatttttctcagacaccaacttttttttgccgcctaatacaatcgccatgttttttcttcatgttatttgatccttttagtggcactgggcataaatgaccacacgtttcttttcgaaacattatcatgacttttctgatgccacattctcctggcttttcttttgccccacaggaattcctgtagacatccactgccttactagatgtagggagcacctcagggcccagccctgtgcccactcctctctttagccctcatacttttcctaagtggtaccatctggtcccttgcttgaaatgccaaatgtgcattaaatgccaaaatgtatatcttcagcccaacctctgctttaaccccagcaactgtatgtccagatcctttttctcccttaatggataaggataaagaatcatatgaggatgcttaaacaaagtaggagccaatgcaacatgtctttaaatggagggaacagatttcaggttcctaaggacagcattgatgattctacccaagtgtactgaagatttctagcaggcgtgagatgctttcctttaccattccaaagtgttgtcgctgggactttgctaacttgcctctaattttttttttaaatgaatatatcccttgttcattagctacctattgaacataaataacataaatgagatatcatgtcacaccagttagaatggcgatcattaaaaagtcaggaaacaacaagtgctggagaggatgtggagaaataggaacacttttacactgttgatgggactgtaaactagttcaaccattgtggaagacagtgtggtgattcctcagggatctataactagaaataccacttgacccagccaccccattactgggtatatacccaaaggaatataaatcatgcttctataaagacacatgcacacatatgtttattgcggcactactcacaatagcaaagacttggaaccaacccaaatgtccaacaatgatagactggattaagaaaatgtggcacatatacaccatggaatactatgcagccataaaaaatgatgagttcatgtcctttgtagggacatggatgaagctggaaaccatcattctcagcaaactatcgcaaggacagaaaaccaaacattgcatgttatcactcataggtgggacttgaacaatgagaacacttggacacagaagggggaatatcacacaccggggcctgttgtggggttgggggagtggggagggttagcattaggagatatacctaatgtaaatgacgagttaatgggtgcagcacaccaacatggcacatgtatacatatataacaaacctacacgttgtgcacatgtaccctagaacttaaagtataataaaaatatatataaataaatgtaaagagactaatgtaaaaaataaataaattttaagaagagaattagctacaaataagaaaactaaagttccttagaacttaaaaaataaatcttcat

SEQ ID NO: 328 - DNA, 1749 bp, Homo sapiens
aagtctagttaaactttaaacaaaggatttatgaacatctctacttccctcagtgagtttttttttttttaacaagtaatattttcaaggaaaggaaaatggacattatgatggctgtcttttgtccttttgtaaatggtggttcttctagagctgtgctatctaatatgatagccactagtcacatgtagctatttaaattaaattaaaaatttagttcttcagtcaaaataaccccatttcaaggttcagtagctacaaatggctagtggctagcatattggaccacacagatacagactgttttcatcattgcaaaaagttgtattaaactctattgtatagaatattttgctgaaatatagtatatgtggctgggcatggtgtctcacacctataatcctagcactttgggaggccgaggcgggcagatcacctgaggtcaggagttcaagaccagcctggccaacatggggaaaccgcaactctactaaaaagacaaaaatttgcctggtgtggtgacgggcacctgtaatcccagctacttgggaggctgaggcaggagaattgctggaacccaggagggcggaggttgcagtgagctgagatcataccactttactccagcctgggtgaaagagcgaaactccatcccatctcaaaaaaaaaaaaaaaaagaaatataatatatgtaacatcataaatacataagtgaaattaaaatggatataatataagacacttgaggtggggtgtagtggctcacgtctataatcccggcactttgggaggtgaagacaggaggatcacttgagcccaggaggtcgaaaccaacctgggcagcaaagtgagactccgtctctataaaaaagaagaaacttaaaaaaaaaaaaaagacacttgaaacaggaattgacttcatcagaaagcaaagcaatagtacaaattaatattaagctctcaatagatattttatttggcctcaaggaagaggaatttaatatctgagtataaaaaatgcgtacaagcagtttgagcagctagcctgctgaagcaatgccttatcaaaaataacaaagtttcagttttgaatcagtgtcaattatgtatatgaataataaatataattacaggagttttattgtgtaataagaaaccataatggaagtatatatgtgctttcagttatgaagttatgctcgtcagccagaattttttgaaacaaatatcatttttgttattgtgatgaatacctttattaatgttacactattgactaagaagttgttatctttttaccctaatgtgcaccttgctagcagatagaaactagtgtgaaacaggtagcctgtgattctttgaattgtcacattttaagtacaattggctaacttcatttttctgtcccaagcctacttagttgtacttgttaacactttaaggttatttagatcagaagaaatctggatgtctcaggccaggtgcagtggcttacacctataatcccagcactttgggaggccaagacgggcagatcacttgaggtcaggagttcgagaccaggctggccaacatgtctctactaaaaatacaaaaattagctggtcgtggtggtgcacgcttgtaatcccagctacttgggaggctgaggcaggaggatcacttgaacctgggaagaggaggttgcaggttgccaagccaagataatgccactgcattccagcctgggtgacagaatgagactgtctc

SEQ ID NO: 329 - DNA, 2624 bp, Homo sapiens
ggcctttttttttttttttttttttttttttttgagattgaacatctaatctcatagttgccaagacagtctctggtgtaaaagaaaataccaagcaatagtccttaactttgaagctgtcatggttagcatatattagtatttctagactcagattttagtttaaatttatgtctgtgctatagttacaggatgatttagcaaaattgcccgcaattaggtcatgtgtaacctagtggttagggtgttacttatgatagtcgtgatagccattctaaccctgcttatactgtctgagtgattagcacttcattggtatagtttattttatggctgtataaaagtactttcagcctttttcaagttatgtcacacagaaaatttcgtttttctaggactgtaaatggatgaggcagctgttaactggctataggctctgtcattcctgagggctgagtcaatcaatatttccacccatctataaaccactgttgcacattagtgtgccagtgcacattctttgagaaattgtggatgtatggtatataaggccattcaactactcaaatattaaatgctcaagttaatattctgaggctcttaatcaagagtcttgagggttagacaaatagtagaaactaaggaatcattttcaattgaagttagcatgatattaaatatctttgcctatattggataatgtgcaaactgattcatgaaactaaatttaataatactatttttctatttgaaaaaaatggccaagtatacagtatgataaacttaattgattttcttggtttaccaaataatctttgtgaatttatgagtaaaccagccaacagattatttaaaaaatatttttaagaatatggccgtgaacattttactattttgctttgtcatgggagtaatgaggaaaagccctatgcttcaactccctagtccttaggaccccatattgatttggtgagggggctgctgggacaggaagaattttgctagtgttttatatgaactgcattagaagaagctccactcctgaagatgtcagtggacagatttgcctcttctcttctttcccttggacccagagcctgcttctattgccaggaggggagccaggaaaagagctggacttggccaagtgattaggggagtatgagaggaggagtaggaggctctgagattgagctgaaaatgaggaattaaatcaccctatgtaaagatcaccttacacaatggtcactttactctgttctttacagaaggctgtcacggctgtgtaccttgaatgggaactttggactgccattgttggtagatacagtagctaggtgtttaacttttaggcagaaatatcttgaggaattggaaggcagagttacagacaatgctggtatgtggaatactgtaaaaccatcaggttgggttcgtttatactgttgtttacattgttactgcatgtacataatgatctctatagcaaagaaatttataagatgatgatagttttgtctcctttcccaaaattatcatgaagccactgttctgttttgtcttttattagtgtaagttaagagattttgctttagtggtatttttagacttgtcaatagatttgttcttctttgatttggttttgcagacagtttcctttatataacaatgatatacgatggcaacaacccaatccaaaccctactggaccatactttgcctatcccattatatctgctcagccgcctgtttctacagagtatacatattatcagctgatgccagcaccatgtgcccaggttatgggtttctatcatccttttcctacaccttactccaacacctttcaggctgcaaatactgtaaatgctatcaccacagaatgcactgagcgtccaagtcagctcggacaggtcttcccattgtccagccatcgaagcagaaacagtaacagaggatcagtggtcccaaaagtaagtgtctggtcttgattggcttttaaatttgatattacttatattagtataagcaatttgctacttgggttgattgaccattaatgctgaatttactataaaacatattgttcactattgtaaaatggtaaagggtatgtaattcttaaaataattttctttgtgttgtttgttcctcattcttaattgtgatatgatttataatcattttcacattcctttagagagttttacataacataaggcagaaatatttacaaataaatttagtgataaaaattgcatggtgacactaacatttgtaagtgattagtgtggatcttgtgctagctgtgttgaatggctaatgcacttcaagatatttcaatgggccaggtgtagtggccacacctataatcccagcactttgggaggccgaggcaggctagtcgcttgagcccaagagtttgagaccagtctgggcaacatgcgaaaccccatctctaccaaaaatacaaaaattagctgggtatgttagtgcatgcctgtagctccagctacttgggggctgaggtgggaagatcgcttgagcccaggaggtcaagactgcagtgaactgagatagcaccactacactccagcgtaggtgacagagtgacaccctgtctc

SEQ ID NO: 330 - DNA, 2996 bp, Homo sapiens
aaataaagaagaaaaagaaaaagaaacaccgagaagacatgcgaggaagacgccttaaaatgtacaataaggaagtacaaaccgtctgtgctggcctgacccgcatcagtaaagaaattctcacccaaggacaaataaatagcacttcaggacttaataaggagtccttcaggtatctgaaagatgaacagctgtgccgattaaatttgggtatgcaagaatatcgggtaccccagggagtacaaacaccttttatgactcaccaggaacattctattcgtagaaatttcttaaaaacaggtactaaatttagcaactttattcatgaggaacaccagtccaatggtggtgctcttgtccttcatgcttacatggatgaactctcatttttgtctccaatggagatggagagattttctgaggagtttcttgctttgacattcagtgaaaatgagaaaaatgctgcttactatgctttagcaatagtgcatggagcggctgcttatctcccagacttcttggactactttgcttttaatttccccaacactccagtgaaaatggaaattctgggcaagaaagatattgaaacaaccaccatttcaaattttcacactcaggtcaacaggacatactgctgtggcacctaccgagcaggtcctatgcggcagataagtctcgttggagcagtagatgaagaagttggtgattatttcccagagttccttgatatgttagaagaatcaccatttctgaaaatgactttgccctggggtacactttctagcctccgactccagtgtaggtcccagagtgatgatgggcctataatgtgggtaaggccaggagaacagatgatccctacagcagatatgccaaagtcacccttcaaaagacgacgatcaatgaatgaaataaaaaatctccagtacctacctcggaccagtgaaccccgcgaagttctctttgaagataggactagagctcatgctgatcatgtcggtcaggggtttgactggcagagtacggctgctgttggagttttgaaagctgtacaatttggtgaatggagtgaccaacctcgcataaccaaagatgtgatttgttttcatgctgaggattttactgatgttgtacaaagacttcagttagatcttcatgaacctccagtttcccagtgcgtacagtgggtagatgaagctaaactaaaccaaatgaggcgggaaggcattcgttatgctagaattcagctttgcgacaatgatatctacttcatccctagaaatgtcattcatcagttcaaaacagtttcggcggtgtgcagcttagcctggcatataaggcttaaacagtaccaccctgttgtggaagccactcaaaacacagaaagcaattctaacatggactgtggtttaactggaaagcgagaattagaagttgactcccaatgtgtgaggataaaaactgaatctgaagaagcatgcacagagattcagctgttaacaactgcttcatcatctttcccacctgcatcagaacttaatctacagcaagatcagaagactcagcctattccagttttaaaagtggaaagtagactggactctgaccagcaacacaatctgcaagaacattcaaccacttctgtgtgatatgtacatattcaaacacattttttaacttttttaaattttgatgtgaagttatagttttataactggcttaagttaagttttattggagaaatcttgcctataattctataaagagaaatgacattccacaaatgtcaagcatatcttttttacacagattatgcaaagttaagagttgtatcttatcccgttagtacagtatgtaatagtgggtctgctgctactttctgttttaaggtgtgaggtaacaattcaatctcttcttcaaatcaaaatgagaattctctggaataacagattcttgtttggtaaattattcacttcccttaattttatcttgccttgtctcttgccatatttgctgtttttatggataaataagatttatggtttagtacttgtgtctttatggcacaggttcaatttctacagtgaaaatggcataggttgcaggaaagaatttctgcatctggtacatgggcaagtaagttatttagttctaaccacaaataacaagtagtttccaaggaaatttcagtggctctctggtttcttaacaaaagagaaagcacagcactttctgatccaaactgtcttttttttgtatctgttatttaaagcccagtggatatttcaattaaaaaaaaaatctaaagatgaatagtccttggtcattcattatccatggctcattaatctcttctagaatatatgctaactgttgaagatattttgggtaaaagagataatgttgacatgatactctattgttctgcttcctggcatcctcacattttgtggggataattttgcttcctaaactgatcacaactattaaacttagagaataataatagtctttctgatgaggctgccatattttgagcatcaatcttatgataaactattcttgtcacttggcatcaacctcttcatgataaatatctactactgagacacttcaattcacagttttaactggtgaatacctgggtttatttactattactctgtgttgctattttctaagaaagaatacagcactagacttcatcctagagtttcaggtaggctaatgcttagtgcctgagtatttaaattttcaaacaggcacagttcacattgctagtatggtcctaactttctgttattttagaatgttaacatgattcacattatactttctcttagttaataatacagtaggccttttgtttattaatggaagagtactccccacacctaagaccagattcttatatctccctggttacagtgcaatttggagattttttttttttcctggatggtaagatttgaaatatttacattaacataggc

SEQ ID NO: 331 - DNA, 2571 bp, Homo sapiens
agcttcgcgctagtgctgtttttttttttttttttttttagcaatggcggttcccggcgtggggctcttgacccgtttgaacctgtgtgcccggagaagaactcgagtccagcggcctatcgtcaggcttttgagttgcccaggaactgtggccaaagaccttaggagagacgagcagccttcagggagcgtggagacaggctttgaagacaagattcccaaaaggagattctctgagatgcaaaatgaaagacgagaacaggcacagcggactgttttaatacattgcccagagaaaatcagtgaaaacaagtttcttaaatatttatcccaatttggacctattaataatcatttcttctatgaaagctttggtctctatgctgtcgtagaattttgccaaaaggaaagcataggttcactgcagaatgggactcatactccaagcacggccatggagactgcaattccattcagatcacgtttcttcaatctgaagttgaaaaaccagacttctgaacggtcacgcgtacggtcaagtaatcagttgccacgttcaaacaagcagctttttgaattactttgttatgcagaaagtatagacgatcagctgaacactctcttgaaggagttccagctaacagaggagaacactaagctccgatatctcacctgttctcttattgaagacatggccgccgcgtattttccagactgcatagtcagaccctttggctcctcagtcaacacttttgggaagttaggatgtgatttggacatgtttttggatctagatgaaaccagaaacctcagcgctcacaagatctcaggaaattttctgatggaatttcaagtgaaaaatgttccttcagaaagaattgcaactcagaagatcctgtctgtgttaggagagtgccttgaccactttggccctggctgtgtgggtgtgcaaaaaatattaaatgcccggtgtccgctcgtgaggttctcacaccaggcctccggatttcagtgtgatttgactacgaacaataggattgccttgacaagttccgaactcctttatatatatggtgccctagactcaagagtgagagccttggtgttcagtgtacggtgctgggctcgagcacattcactaacaagtagtattcctggtgcatggattacaaatttctcccttacaatgatggtcatcttttttctccagagaagatcaccccctattcttccaacactagattccttaaaaaccctagcagatgcagaagataaatgtgtaatagaaggcaacaactgcacatttgttcgtgacttgagtagaattaaaccttcacagaacacagaaacattagaattactactgaaggaattttttgagtattttggcaattttgctttcgataaaaattccataaatattcgacagggaagggagcaaaacaaacctgattcttctcctctgtacattcagaatccatttgaaacttctctcaacataagcaaaaatgtaagtcaaagccagctgcaaaaatttgtagatttggcccgagaaagtgccttgattttacaacaggaagatacagatcgaccttccatatcaagtaatcggccctgggggctggtatccctattgctaccatctgctccaaacagaaagtcctttaccaagaagaaaagcaataagtttgcaattgaaacagccaaaaacttgctagaatctttaaaaggtaacagaacagaaaatttcacaaaaaccagtgggaagagaacaattagtactcagacatgatggctgctacattgtgtaaagaactgggcttagcctatcaaatggtctgtggacttacttggaaaaactgatttgaaactttcacagatctcagctttcatctgatgtcacttttcatgatcttctcattggcccccttaacctggtctgaagttctgggatgttttcagtttgatcagtctgatactcagtggcactttattaaaacatcagctgtggagtgtggcggtgcacacctgtagtcccagctgctcaggaggctgaggcaggaggatctcttgagcccaggattttgaatccatcgtggacaacatagcaagattccatctctaaaaaaaatgaaaataaacataagccacaaggaatgggtgaaagattattgtaatgtgctttaactaaataggtaaatatactaaacaaatgctaaaactcagttttaggatgaaaccattgttgatatccacatcagtccctgtttagaaaacatttaaaatgacttttagttatgtacagtacgttggcaatgaatacattaagcttcaaaatttggtagtgctctcgaatatgtatatttgtatttttcaagcgaagttctcttattcacatataaattaaagtgggttggtactgatatcaaaaaatgtttatgtttttagaacagacatttcagtcactgcattcttaggtattccaaaccaaatatgatgacatcaatagattgcattttaaaaatattgtttgatttttctattttcaaaaataaaattctgtttctaact

SEQ ID NO: 332 - DNA, 1633 bp, Homo sapiens
ctcaagatgagtaaaaagcccccaaatcgccctggaatcacttttgagattggtgctcgtttggaggcactggactacttacaaaaatggtatccatcacgaattgaaaaaattgactatgaggagggcaagatgttggtccattttgagcgctggagtcatcgttatgatgagtggatttactgggatagcaatagattgcgaccccttgagagaccagcactaagaaaagaagggctaaaagatgaggaagatttctttgattttaaagctggagaagaagttctggctcgttggacagactgtcgctattaccctgccaagattgaagcaattaacaaagaaggaacatttacagttcagttttatgatggagtaattcgttgtttaaaaagaatgcacattaaagccatgcccgaggatgctaaggggcaggattggatagctttagtcaaagcagctgctgcagctgcagccaagaacaaaacagggagtaaacctcgaaccagcgctaacagcaataaagataaggataaagatgagagaaagtggtttaaagtaccttcaaagaaggaggaaacttcaacttgtatagccacaccagacgtagagaagaaggaagatctgcctacatctagtgaaacatttggacttcatgtagagaacgttccaaagatggtctttccacagccagagagcacattatcaaacaagaggaaaaataatcaaggcaactcgtttcaggcaaagagagctcgacttaacaagattactggaagagaccagctgtgtattttatagctaatatagaatactggaaggttgtaactttattggtttgttggcatccaaagctgttggggttgatggtgctgaaaaaaaggaagactacaatgaaacagctccaatgctggagcaggcgatttcacctaaacctcaaagtcagaaaaaaaatgaagctgacattagcagttctgccaacactcagaaacctgcactgttatcctcaactttgtcttcagggaaggctcgcagcaagaaatgcaaacatgaatctggagattcttctgggtgtataaaaccccctaaatcaccactttccccagaattaatacaagtcgaggatttgacgcttgtatctcagctttcttcttcagtgataaataaaactatgcctgatgttgcacatttgccacttgagaagctgggaccctgtctccctcttgacttaagtcgtggttcagaagttacagcaccggtagcctcagattcctcttaccgtaatgaatgtcccagggcagaaaaagaggatacacagatgcttccaaatccttcttccaaagcaatagctgatggaagaggagctccagcagcagcaggaatatcgaaaacagaaaaaaaagtgaaattggaagacaaaagctcaacagcatttggtatcaggagttgggatttctcagcactgctaatgaagatcccctcttatagtccaataagcttatcaggacttccagagtcatgacatgaacagtttaattgaacccatccactctgggcaggtaagagaaaagaaaaagataaggaaagaagagagaagagagacaaagatcactacagaccaaaacagaagaag

SEQ ID NO: 333 - DNA, 1762 bp, Homo sapiens
aaattttttatttcattttatttttgagaccgagtcctgctctgttgcccaggccggagtacagtagtgctatcttggctcactgcaacctccacctcctgggttcaagcgattctcttgcctcagtctcctgagtagctgggattacaggcacataccaccatgcccgcctcatttttttgtatttttagtagagacagggtttcaccatgttggccaggcttgtccggaactcctgacctcaggtgatccacctgcctcggcctcccaaagcgctgggattacagttagagtctccatgcccggctgattttaaattttaaaattaagccttgtatagcctgggcaacatggtgagacccttccacaaaaatgaataaataaataaaattaaccaggtgtggtgatgtgtgcctgtagttccagcgactggggaggctgaggtgggaggatcccttgagcccaggaggtcaaggctgcagtaagctgtgatcatgccactgtcctccagtctgggtgacaaagcaagaccctatctcttaaaaaaaaaaaaaaaaaaacccaggtgtggtggcccatggcctgttatcacagcactttgggaggccgagatgagagggttgcttgaggccaggaggttgaagctgcaatgaactgtgattgtgccagtgcactccagcctgggtgatagagcaagtactctgtctcaaaaaaaaaaaaattaaactggttatgaaagattgctgtattgtctttttctacgtgacaagcatttgttctccatcacgaataattcagtcaaaatcaattcatttctaaacaaaaagagttaagttttctgtttttttagactttaccatccagcacagctgacagtccattggcattactttaaagtaactttttgataactgatccctaaattgctttttgaatttgtttattctattcattattgttttgaaggaaacctttgtcaaaccaatccaagcgtggtagttagtaaactatgaatttaacggcacatttcaccagtaagaccctccttctcagtatggttgaaatccagtatcattattacttgagacagggtcttgctctgtcacccaggctggagtacagtgatgcgatcacagctcactgcagcctcaacctcctgggctcaaacgatcctcccaccttggcctccccacgttttgggattacaggtgtgagccactgcatctggccagtgaaatctattatttatcagatctatcttcatgaaaattttgtcttatttaaaataacattccaaccccttttctctcctttaattaacagagaagtacaacagttccatcctgctgttagaaactcatctgaggtgaaatttgctgttcaggcttttgctgcattgaacagtaataattttgtgagatttttcaaactggtccagtcagcttcttacctgaacgcttgtcttttacactgttacttcagtcaggtgagtaaatgagctgtgcttgcagagttggaagaaagcaggtggttcttgtgctgtttgggtgctttcttattccaagcttttcaaaggaggtctcaggctgatgctgtgtcacccttgcagcagccccacgaaggggttaccggtgttgccctgttttataggggttatcactgttggtcaccatccggaaaggctgtgcaatggaaaatactgttccatggttcaaataagaaaaatctctttaggaaaacataggttgaattcagcactatc

SEQ ID NO: 334 - DNA, 1830 bp, Homo sapiens
ctagagagaggacatttcctgagtaaaatgaaaatcaaagctaggagctaatcatatttttaaagtcagatatgttgggggtataactggaagctaatttttaaaagaatcctgccatatctttgataaggaagttctatggcttaaagagtgtaaccactagttttagcagagatgtttcctttagttttgaaacattcttcaacatttcaggttcatgatgaaaaatggctgactggatttaagtcctttattttctatactcctgagcaaaattctgaaaaactggctggtctagtttagagaagaacgctgatgtgggagtattttcaccatgcattcctgctctaaatcctttgcttctactgatagactattctactttcgaaataagttcacattgctctaacacttcataagttcaatctttttctcattctgtttaaaataaccaccatgaccaccaaacgcctgaaattcactgtagttaaaattatgactgaaatagacagggaaaacctgagagtgaacgttacccagcaaatctgggttaaacaggttcgagtttttccagagcacactgtttaggatttcagcttcctgttcaaccatctcggaaacagggtgtttctctgctcctttgtgaggactaaccatgtgtccccgccactttgcaccaaagctgaatatcatcccaaactctggatccttctgacgggcatttgtgtggtacacaggaaggggtgcattatgaatatgcaattactggcatgtaatgttgtcttctgctaaaaatacaaaaagggtactctgatctcagagttgggagctgatttctgatttcagcctagacaggtctgcttaaaactataatcaagctgattgtattgccctggaattctaatttccaatttagggttttgctatataatctctagtagagtgtgtctaatctttatgaaacccagagtctttgtataaactctatggattttcttccatgcgtctaggctgagctgagctgtgtctttaggctgagctgtagagacattaaattactgagtaaatgaaggtaacgttgttatgtcactctgtttctgaaagaccaactcaaattctgtctgctgtagctttgatccttttcatttaattctaagtacacttgttattatagtaactgttgtttgtatgttattttagctttttacttaagtagctatttagcaatttaaatgaaaatgtaattaggttacatctgttttacatgcatgtaataccacgcagatgtaaacttctattaaagccatattttctttttggcaagaaaaggcagaaacaaaatcgtgccagtcgctggaatacgtcttgctctaaaaaaattaaaaaaaaggatatacagagcactgtgccattatttatatggtggttagagtacatcacttctattttttgaaaattaaaaaaaatattaacaagtgaaaaacaagcattctattccatgttccctcttacagtttatctggatacggtgtttaaaatgacaatacagccaggcgcggtggctcacgcctgtaatcccagcactttgggaggccgagacaggtggatcacctgaggtcagaagttcaagatcagcctagccaatgtggaaaaaccccatctctactaaaactacaaaaaattagctgggcatggtggcatgcgcctgtaatcccagctactcgggaggctgaggcaggaaaattgcttgaacccaggaggcggatgttacagtgaaccgagattgcgccactgcactcaagcctgggccacagagaaagactctgtctc

SEQ ID NO: 335 - DNA, 2427 bp, Homo sapiens
tggaggagagaagatggcggaagcggagtgagtgactagatgatttaaggaccatagtacagctatggatactgaaccaaacccgggaacatcttctgtgtcaacaacaaccagcagtaccaccaccaccaccatcaccacttcctcctctcgaatgcagcagccacagatctctgtctacagtggttcagaccgacatgctgtacaggcattgcatcggccccccagctcagctgctcagtaccttcagcaaatgtatgcagcccaacaacagcacttgatgctgcatactgcagctcttcagcagcagcatttaagcagctcccagcttcagagccttgctgctgttcaggcaagtttgtccagcggaagaccatctacatctcccacaggaagtgtcacacagcagtcaagtatgtcccaaacgtctatcaacctctccacttctcctacacctgcacagttaataagccgttcccaggcttccagttctaccagcggcagtattacccaacagactatgttactagggagtacttcccctaccctaacggcaagccaagctcaaatgtatctccgagctcaaatggtaagatatgagctaccaaattttttcagtgtttaaggacttgagagatcaaaatgtttcttgatttgatacaataagaggtatttttaatatttaagaaatgtttaattgtgtgtgtgtgcatgcgggcgtgccttcagctcttgtacatttatgtcatgaaagattctacttttaattaataggtcttcttggtatcaaatagtaattattacattgagaagctaatagagattcagtaacgtaagagtgattattttttaatatcaaattcattgaaaacctttttttcatattttaatatctgtgaaatttggatgcattttataactgatggcatcttggtacttacagtggtccataaaatcattgcctgtttttgtcaacttagatttggtgaaatagagatgttaaaaaaactttgttgttaaagttataatttgtatcctaggattttctgaattctatattggagttccggatagtctcccagatgattcttaactttggtttttcccatctcaaattctgcaaggttatttgtgttcttgtgttcattttgatattttatgaatataggaatgttaatttggttattctgtatttgagtatctacagattttctaatttaattgttgagcttctttaaggaatatagaaattggttgacatgtattttatttgatgtctttacaagaagctagacaaaagcattgtccctaatatatatttatattcttttttgtccagtggactgaatatatatctggatctccagtttttgttgttgttgttgttgttgttgttattgttttttgaggtgaagtctcactctgtcacccaggctagagtgcagtggcacgatctctgctcactgcaacctctgcctcccgggttcaagtgattctcccacctcagcctcccaagtagctgggattacaggtgcccgccaccacacccagctaatttttgtatttttagtagagacggggtttcaccatcttggcctggctggtctcaaactcctgaccttgtgatccacctgcctcacctcccagaatgctgggattacagacatgaaccaccacacctggcttggatcttcagttttctatctaaaattgcaaagtttccaatcattttactcatactatgctttaaaattaggttgaaccatttgagatggttgctatttggctatttttgaactctaaaattagcagtttcatacgggtcaaactaaattgaatatctcctttttaggtttagtcctttcagggtgttggtactggaaattaccttttcaggaaagttataccatttgtcccttggtgtctgtggtggattgttgccaggccctaccctctctgtcccctagaatacccaaatctgaggatgctcaaggcatagtatttgcatataacctatgtatatcctcccatatactttacatcgtctttacatatatttagtataatataaacatcatttaaataactgttatactatattgtttagggaataataacaagagaaaaatttgtacatgttcaatgcagatgcagctattttttttaaatgaatattgttttgatctatagttgaatgacgaagcacagagccttccataggtatggagggctcatcattgtactttgttgttgaatttacttagatttagtgtaccaaagaactgaagtttaaaaggtcacttaattggtcgtttaattttctaatttttttggatccgcatttggttgaacattttaatttagatagcaagaggaactgaataacccttgatacaattttgaaataaagtatttacacattctttg

SEQ ID NO: 336 - DNA, 1753 bp, Homo sapiens
ttcaaagaaagatgtcaccacaaaattaaaagctatgcaggaatttggaaccatgtgtacagagagagacacagaaactgtgaaaggagttcttccatattggccaagaattttttgcaaaatttcacttgatcatgaccgtcgcgtccgagaagccacacaacaagcttttgaaaaacttatccttaaagtaaagaaacagttggctccctacttaaaaagtttaatgggagattggctaatggctcagtgtgatacttacacaccagctgcgtttgcagcaaaagatgcatttgaagcggcttttcctccaagcaagcaacctgaagccatagcattttgtaaggatgaaattacaagtgtgctgcaggatcatcttataaaagaaacacctgatacactcagtgacccgcaaactgttccagaggaagaaagagaagctaaattctaccgggttgtaacttgttccttattggcattaaagagattactttgccttttacctgataatgagcttgattctctggaggagaaatttaagtctcttttatcacagaataagttttggaagtatggaaaacacagtgtacctcagattcgctcagcttattttgagttagtctctgcattgtgccagcgcattccacagttgatgaaagaggaagcatccaaagtgagcccatcagttctacttagcattgatgacagtgacccaattgtctgcccagctctctgggaagctgtactctatacacttacaactattgaggactgttggcttcatgtaaatgcaaaaaagagtgtgtttcccaagctgtcaactgtgattcgtgaaggtggtcggggtctagctactgtcatatatccttaccttctgccattcatcagcaagctccctcattccatcacaaatccaaagttggatttcttcaaaaatttcctcacgtctctagttgctgggctgtcaacagagagaactaaaaccagctcttcagagtcctcggcagtaatatctgctttttttgaatgcttacgttttataatgcagcaaaacttaggtgaggaagagattgaacagatgctcgtcaatgatcagtaatcaacacagaagacttctgtgaccaaatatgtggagatttctcccacccagcaagcagtcagttctgcagcagataccagctatgtgtcctccaattcaattctgactatctacctggagatagtgtcagatctcactggcttaggactcagtcccacaagaccgctccccacttctgatgccaatcgcaagccccaggctgttttacctgggcttctgaccaaccagctgtacatctaaatcagggatcccatgaccccctcctggggtttgcttaatttgctagactgtctcacagaactcagagaaacaatttaccagtttactataaatgatattacaaaggatacaaatgaagacatgcacacgttgatcccttttattgatgcagttctcaaagacccaggattgcaacatgggcagctatttaaccatttagcagaaactctaagttcctgggaagccaaagcagacacggaaaaagatgaaaaaacagctcacaacttggagaacgtactgatacatttctgagaaagactgtcagagatctgtgttgcgaaaatcagtgagccggaagctgatgttgagtccgttttgggtgtatctaacctattacaggtgcttcagaagccgaagagctcattgaagtcaagt

SEQ ID NO: 337 - DNA, 2461 bp, Homo sapiens
tgaggtccgcggcctatttacccaagttggaggtaggggcctgtggaaacatgaagagggtaaacagctgtgtgaagagtgatgagcatgtcctggaggagctggaaacagaaggggagaggcagctgaaaagcctccttcagcatcaacttgatacttctgtctccattgaggaatgtatgtctaagaaagagagctttgctcctggtactatgtacaagccctttggggaggaagcagctgggactatgactttgtcccaattccagacactgcatgagaaggaccaggaaactgcttctctcagggaattagggcttaatgaaacagaaatcttgatctggaagagccatgtttctggtgaaaagaagacaaaactgagggcaactcctgaagcaatacagaaccgtcttcaagatattgaagaaaggatctcggagcgtcagcgcattctttgcctgccacagagatttgcaaagagcaaacagctgacccggcgagaaatggaaatagaaaagtctttatttcagggagctgatcgtcactccttccttaaggctctttattaccaagcataccacaaaaagacaagtgcagacaagtacatgacctcaatgaagaggaagataaaattaggcacaaaagatgaaccccaaaagaagaacaaaggtgatcccatgaacaacctggaaagtttttaccaagagatgataatgaaaaaacgtcttgaagagtttcaacttatgagaggacttaccagttttcccagagaagacttccaaaatctttcttacgagggtactaccagcgttctaggagccaaatggcagaaaaggactgggaggacctcaacatttagtattctcttagtttccttgctttcagaaacagtgttcacatcttcagccatgtatggcattccccatcttctgacaatgagcctcaagttttctaccaggattggcaagttatcttttaccccatagcatattgtgagggagggtatttaaaaatcatattggcttttagacagccttcaactgatttgccttattttaaccccatcccttcacatttatttctgaaggtaagtgaaattatcagttcctgaactatttaaggattcttaagtggtgacaggtgtgttcttggctctctccactaccagtttaaaattcagctttcttcagtgtgctgagttggttcctgctcatccaattatttttcatcttccagattattattgctgttgtctccttttcttgttcctcctgaccttgttgatttgtgttttttttttttttttttaagtgcctatagttttagagagttttctggatggaatgaaattaaatgaatgtgttcaatccaccatttttatgtgaaactaattctaatcataatgaaagagttttcttacggctgagcatggtgtctcacgcctgtaatcccagcattttgggaggccaaggcgggtggatcacctgagtttgggagttcaagaccagcctggacaacatggtgaaaccccacgtctactaaaaatacaaaaattagccaggtgtggtggcacatgactgtaatcccagctactcgggaggctgaggcatgagaatcacttgagcctgggaggccaaggttgcagtgagcagagattgcgccactgcactccagcctgggtgacagagtgagactttgtctcaaaaagaaaaaaacaaagagtgccttacctcctttatatgatattttggttgatcctcaatttgttttaggtattatacctgaagaaccttagccctcgggtgactgaaagagatcttgtgtcattgttcgctcggttccaggagaaaaaaggacctccaattcaattccgaatgatgactggacgaatgaggggccaggcttttatcacctttcccaataaggagatagcatggcaagcattgcatctagtaaatggatacaaactacatgggaaaatattggtgatagagtttggaaagaacaaaaagcaacggtcaaatctccaagcgacttctctcatatcatgtgctacaggtagcactacagaaattagtggtagctagaatatatataaattgtgggtcctggatggtctttcttgaattggaatcttggatctaggatttatgtatagacaccagtttgtttggagttgaagaggaaaaactaactgagggaggggaaaaaagtaatttcagcttttggagagaactggtagaaaacattttctattatataattgaagactatataggacagatgatatgctgagtatgaagggtaaagtgcaaagagtattattttctcaggatgaattacaacggattattcctaaggatttttaaaaatctttataatttttctggggtcctcaatatttgtctctagagataacattctttcttagactgcttcgtatacacagaaataaaaaact

SEQ ID NO: 338 - DNA, 2869 bp, Homo sapiens
aacggactttttcagagagggaactatctctttgacacaaaacatacgttttaattaataatacttgctctggtaatatagtttcttatgagttgctacatattttctagaatagattttccctaaaatatgcctttgtaagatttttttaataaaatcaagtttagaaataatttgaacttttttgggggatagagtttcagtcttgtcgcccaggctggaatgcaatggcacgatctcagctcaccgcaacctccacctcctgggttcaagtgatttttctgcttcagcctcccgagtagctgggattacaggcacgcaccaccacacctgtctaattttggtgtttttagtagaaacggggtttcaccatgttggccaggctgatttctagttcctgacctccggtgatccacctgcatcagcctcccaaagtgttgggattataggcgtgagctaccgtgcccggcctgaacttttttttttttggagacggagtctccctctgtcgcccaggctggagtgcagtggtgctatcctggctcactgcaacttccgcttcctgggttcaagcgattctcctgcctcagcctccggagtagctgggattacaggcactccgccgccatgcccagctaatttttgtatttttagtagagacgggatttcaccatgttggccaggctggtcttgaactcctgacctcaagtgttctgccaccttggcctcccaaagtgctgggattgcagatgtgagccacgtcatctggcctggcctgaacttttagaattcaatattaaccattttcccctagtttattccctagagctcttcacaaagtatggcttgacttctctgagacagctagtgataagaaaaatgaagtttattttggtataccactcaaaaagattgtgaaaacaaaatggagattaattttttttttccaaactctttgtaccacaattttaagttgaatagctgacttcctaggcatggataagatcagttctatcttatcttctgtcctagtaatgtgtctgcagtggaatccccattgcttggcttctataattgatcttgaaccttcccaattatcattccctgaaaaaataattctacttaaataccttcttgacttaaatgtcatgagttgctacatctgggttctgataagatttttctaagaaaaactacatttgacatgtgacatcttcaggaattcaatatcttgtttctttgacagagggacgctattcatgtctgtgaatttggcagtctttgaaatgccatgtcttttttggaaaaagcttttgatggactttattttgatatacatcttaaggtcccctgacctatactataagcagagcatagcaaagagggtcattatgaacattgtgtgtagttctgggcagggcttgggatcctttgggattgttggtatctacaccacatggccccaccctgctatgttttaaggttttctgctgactttttaggtcttcagccttgattttgatgctttgagtgcctgcctctagcagcaccacccccagcccttttccagttggctgcatctcatctgttgtgggctaagaaaccagatcacagagcttattaaaattgtgtctaaaataagatccagtaggctcttgactgaagagggcttcatgtgctctgtgaactgtgtggtttccttggctgatcggagacctttctgacttgcttcctgtttttcttctttacttttgctatacagatgtaggaggctttttggtgctcttagagtgctgtaatgttgaagtatttggttaatttctctattcttgggaagggtaaaaggctaaataaatatcttgattctttgaggagttgaagactgaccagagttggatactaaaagcttttcttaacagtaatagtgcattgtacattttaatggtgtcctactagttgcagataacgtttggcatacatagctttcaaacaaagtaatgccaggattatcacttgatctatttctgtgatagagattttttttctttctttttttttttttgaggcagtcttgctcaggctggagtgcagtgtcatgatcttggctcactacaaactctggctcccagggtcaagcagttctcttgcctcagactcccaagtagctgggattgcaggcactcaccaccatgcccagctaatttttgtatttttgatagagacagggtttctccctgttggccaggctggtcttgaactcctgacgtcaggagatccgtccgtctcggcctcccaaagtgttgggattacaggtgtaagccactgtgcccggcctatggctagcttcttttaaggcgtctcaagacaaagttctcaatgaaataaagatttcaggtcatgcacagtgggtcacgcctgtaatcccagcactttgggaggcccaggtgggcagatcgcttgagctcaggagttcgagaccagcctgagcaacatgacgaaacatggtctttacaaaaaatacaaaaagttagctgggtatggtggtggatggctgtggtcccagctaggtgggaggctgaggtgggaggatctcgggagcctgggaggtagaggctgcagtgaaccgtgatcaggccgctacactccagcctatgcaacagagtgagaccctgtctcaaacaaacaaacaaacaaaaagatttcaaactctgatgtctataaaagccaggcaggtaccaaagtgagcagagagaacttgagggagctagaaaatgcatgtgctatcagatgagggcaactgctaaccagctccctgcaaatgttgctattgctaaaatctgtgggcccagtgttgcaatatcttccattc

SEQ ID NO: 339 - DNA, 4227 bp, Homo sapiens
cctaaattcctttatattgccttagtattaaggataatattatcttgcataatcttcctctgaaatatttattacttcccttcttaatgatttggaaaagcagtgtattttagataatatcttcttacagatactccaagtatcacagctaaattaattagtgaacaaaaagatgacaaagaaaagaaaaaccatgaagagaaagaaaaagttaaagcggaaaatggatttcaagacaattacagtgttgttgttgcctctgggctgaagtctcaatctaaacgtgctgtgtcagctacaccacctcgcccaccatccaggagggggaggacaatacctgataaaataggaagtacttcaggagcagaggctgccaacaaaataattactgtcccagtgtttcacctgtttcacaaactcttggcaggccagccattgccagctgaaatgacacttgcccagcttttaactctcctatatgaccgaaaacttcctcagggttaccgctcaatagatctgactgttaaattgggatcaagagttataacagaccccagtctatcaaaaacagattcttataaaagactacaccctgaaaaagatcatggagacttacttgctagctgtccagaagatgaggctctcactccaggtgatgaatgcatggatgggatactggatgaatctttgcttgaaacctgtccaattcagtcaccattacaagtttttgcagaaatgggtggactggctcttattgctgaaagactacccatgctatatccagaagtaattcaacaggtgagtgctccagttgtaacatctaccactcaggaaaagccgaaggatagcgatcagtttgaatgggtgaccattgaacagtcaggggagttagtttatgaagcaccagaaactgttgcggctgaacctccacctatcaagtcagcagtacagaccatgtctcccatacctgcccattctttggctgcctttggaatatttcttcgtcttccgggctatgcggaagtgctactgaaagagagaaaacatgcccagtgccttcttcgattggtattgggagtgacagatgatggagaaggaagtcatattcttcaatctccatcagccaatgtgcttccaacccttcctttccacgtccttcgtagcttgtttagcactacacctttgacaactgatgatggtgtacttctaaggcggatggcattggaaattggagccttacacctcattcttgtctgtctctctgctttgagccaccattccccacgagttccaaactctagcgtgaatcaaactgagccacaggtgtcaagctctcataaccctacatcaacagaagaacaacagttatattgggccaaagggactggctttggagcaggctctacagcttctgggtgggatgtggaacaagccttaactaagcaaaggctggaagaggaacatgttacctgccttctgcaggttcttgccagttacataaatcccgtcagtagtgcggtaaatggagaagctcagtcatctcatgagactagagggcagaacagtaatgcccttccttctgtacttctcgagcttctcagtcagtcctgcctcatcccagccatgtcatcttatctacgaaatgattcagttctggacatggcaagacatgtgccactctatcgggcactgctggaattgcttcgggccattgcttcttgtgctgccatggtgcccctattgttgcccctttctacagagaacggtgaagaggaagaagaacagtcagaatgtcaaacttctgttggtacattgttagccaaaatgaagacctgtgttgatacctataccaaccgtttaagggcagtgatcacaaccagattcaacgtatgcacaaagcagcggataccatggtagcggccgtcgctgattgcttttaccatgttggatccattgtcagtctcaaagacctacttccagctaggtgccttgaactcaaatagcttttcacacagacttcaggatgtgagctaagatctaaaagggaaaatgttaaaacaggagtaaaaccagatgcgtctgatcaagaaccagaaggacttactcttttggtaccagacatccaaaagactgctgagatagtttatgcagccaccaccagtttgcggcaagcaaatcaggaaaaaaaactgggtgaatactccaagaaggcggctatgaaacccaaacctttgtcagtattaaagtcacttgaagaaaaatatgtggctgttatgaagaaattacagtttgatacgtttgaaatggtttctgaagatgaagatgggaaattgggatttaaagtaaattaccactacatgtctcaggtgaaaaatgctaatgatgcgaacagtgctgccagagctcgccgccttgcccaggaagctgtgacgctttcaacctcactgcctctgtcttcatcctctagtgtgtttgtacgctgtgatgaggagcgacttgatatcatgaaggttctaataactggtccagcggacaccccttatgcaaatggctgctttgagtttgatgtgtattttcctcaagattatcccagttcaccccctcttgtgaatctagagacaactggtggtcatagcgtgcgattcaatccaaacctttataatgatggcaaggtttgtttaagcatcttaaacacgtggcatggaagaccagaagagaagtggaatcctcagacctcaagctttttgcaagtgttggtgtctgtccagtcccttatattagtagctgagccttattttaatgaaccgggatatgaacggtctagaggcactcccagtggcacacagagttctcgagaatatgatggaaacattcgacaagcaacagttaagtgggcaatgctagaacaaatcagaaacccttcaccatgttttaaagaggtaatacacaaacatttttacttgaaaagagttgagataatggcccaatgtgaagagtggattgcggatatccagcagtacagcagtgataagcgggtaggcaggactatgtctcaccatgcagcagctctcaagcgtcacattgctcagctccgcgaagagttgctgaaacttccctgccctgaaggcttggatcctgacactgacgatgccccagaggtgtgcagagccacaacaggtgctgaggagactctaatgcatgatcaggttaaacccagcagcagcaaagaactccccagtgacttccagttatgagctgcattgatgtggacttcatagacacaaaggcttcgaagcacaagccaaatatgtcaatatttgtatgtaagaagctaattatgtaataggtaatgaaactgaaactatactatgcccttaaggagatccagtttaattcaaggtgatcttttatttacctgtacaggagtgtaaacttttttgtgcttttatttttcaattgtgagaaccactgattggtatgttcaacaaatttgtgtatacaaagaaatggataaatcactgctatataagggaaactaccttaggaaagaatgtttactgaatgtttattttatttttttttttttttactatagagtgaggggttgttaacaaagaatatatattggtcattcttacaactactatttaaagtcagcaacttttcacagaatttgatagattttatgtttggccatatcttcatgctcacatttgatttctgaagacctcctacatacacttcaataaaagttaaatggacatactccctctttttttgatttactggtacatttttaaaataataaatctgccataaaatgcattatatctggagacttgcacttgtatggatgaatttattacattcaacatatttaattttatgccttctaattctaagatgcagaaaaaaataaatgaacatgattttattctatgccaacatttgggcctctgaatgtatctgttatttgaatttaagtatttgaaaaggaatggtcaatttgaaagtcattctaaactgattttttttttctaaagggctccttttttcctggactatgtggttttatgactaaagtcacatgtatgtattaaacattgaggctctgtagaggagagaggatgtacctctctggtgctgttacagtacattctgtacctgccatacaggctcattttcatgcaaattcttcctagagccaaataaataaagacttaggtg

SEQ ID NO: 340 - DNA, 6045 bp, Homo sapiens
agaagggcgctgagaagggagctggaaggaaaagaaggaaacattccttcctcaactggaggaagacacgcggccacacacagaaccagcggccccaggaccgtcaccctgcgtgcccgggcctgtccctcctgaccccaggattatagtggcgaggcagggtgttagccaagcggattgagccaggacacagcaccgcggagccctgcaggcgagtcctccggaggctgagagcaaacggctgcactaggaacccagcagtcagaccggcccccaccctggagtgaacacatcgccactgccaggcatcgcagggaggattaccccaatggcacctagctgggcgacgagaacaaccccgagatgcgggtgcactgcgccatcatcccctccgacatgctgcacatcagcaccaactgccgcacggccgaggagatggtgctcacgctgctggactacctcttccaccacgaggtgcaggctgtgtccagcctctcggggcagggcaagcacgggaagaagcagctggacccgctcaccatctatggcatccggtgtcaccttttctataaatttggcatcacagaatctgactggtaccgaatcaagcagagcatcgactccaagtgccgcacggcgtggcggcgcaagcagtggggccagagcctggtggtcaagagcttctcgcggagaatgcccaactcatcctcctactgcccctcagagccgatgatgagcaccccacctcctgccagagagctcctgcagccacagctgcagccgcaggccctgcactacgcgctggccaacgtgcagcaggtgcagatccaccagatcggagaagacggacaggtgcaagtaatcccacagggacacctccacatcgccaaggtgccacagggggagcaagtccagatcacgcaggacagcgaaagcccgtgttctggtactacgtgaaggaggtcctcaacaagcacgagctgcaagcgcttctactccctgcgccacatcgcctcagacgtgggccggggccgcacctggctgcgctgtgccctcaacgaacactccctggagcgctacctgcacatgctcctggccgaccgctgcaggctcagtactttttatgaagactggtcttttgtgatggatgaagagaggtccagtatgcttcctaccatggcagcaggtccgaactccatactctttgcgattaacattgacaacaaggatttgaacgggcagagtaagtttgctcccaccgtttcagacctcttaaaggagtcaacgcagaatgtgaccttgctgaaggagtccacgcaaggagtgagcagcgtgttcagggagatcacagcctcctctgccatctccatcctcatcaaacctgaacaggagaccgaccccttgcccgtcgtgtccaggaatgtcagtgctgatgccaaatgcaaaaaggagcggaagaagaaaaagcaagtgaccaacattatctcatttgatgatgaggaagatgagcagaactctggggacatgtttaaaaagacacctggggcaggggagagctcagaggacaactccgaccactcctctgtcaatatcatgtccgcctttgaaagccccttcgggcgaaactccaatggaagtcagagcagcaactcgtggaaaattgattccctgtctttgaacagggagtttgggtaccagaagcttgatgtgaaaagcatcgatgatgaagatgtggatgaaaacgaagatgacgtgtatggaaactcatcaggacggaagcacaggggccactcagagtcgcccgagaaaaacggagcacactctgtcacccaggctggagtgcaatggcacggtctcggctcactgcaacctctgcctcccgggttcgggtggttctactgcctcggcctcccgtgtagctgggattacaggcgcgcaccagcacacccgactaatttttgtatttttagtggggacggggtttcaccatgttggccaggctggtcttgcactcctgacctcacgtgatctgccccaccttggcctcccaaggtgctgggattacagggtctcgctctgtcgcacagtctggagtgcagtggcgtgatctcggcccactaaaacctccacctcctgaatctaggcaattctcctgtctcggcctcctgagtagctgggactgcgggctcacaccaccatgcccggctaatttttgtgtttttagtggggacggggttttgccatattggtcaggctggtcttgaagtcctggcctcaggtgatccaccagcctcagcctcccaaaatgctgggattacgggcatgagtcaccatgcccagcctaaacttggcaagataataaataacctttttaagtgtcgttgggcacttgtctggttgtttttctttaggttaccatgccagcaatgattccttttgagtttctgacagaagatagtggttttcatccaaataagtcaactactctaccccatccctaagccacttgtatggaaagaaaaagaggaagaagccagtactgtgactgcataagcttcccccagcatcacccgctatgagatgtgtggcagctgagacccgggaactgctcaagggcaccaggccccatctgtctgcactcactcaccttcctcaggtactcgcatgggcatgtcactgacttcacgtgctgctgcagctccttggtgagctggccctggtcatgggacaggaactgtggggtcaggacaatagagagcttcaccatttgcagaatgagaacaggggctcatgatgagtgccaacctattagataatttaaaaaaaaagtgttgaatgagtggaaaaacaaggtgatgtttgagtctatagtggtcaagggcttcagaaaaggacagaaccaagttcaaattcctgtactttgaatttctacttcatgccatgcaaaattactttaccccttttaacctcagttttcttctgtgtgaaacaggaacaatagtttcattcgtcattcagtttctctcaaggtttcacgagatcatacctataaaacatccaagtcatttaaatgtatcatcatttctgtcataattagtgggatccatttcactattattggatatacagttctgtgcctgaaacctacaaaaaaagaaaatgttaagtctaaaaagcattagtgatttctcatttttatattactaattataaccctatttaatcacacaaggccttgtccgtggcaggtgctcaataaacacttgtcgaatcaatgcatgtgggctccggagccacactgtttagattctattctgcctccaccacttatcagctgtgtggtctgggtaagataattcacctctttatgtctgcacttccctctccataaactatatataatgagaatccttagctcattcggttgtggtgaggggtgaatgatttggcacacaggaggggcttgttaaacattagctgtgatgatctccttccaaatcttcattttcagagccacagatgaggccatagtgcaaccaggtgaccttagagtgtaagtacacatgatcgccagctatgctctgtctccaccataggtccaagactgggtagttccggcctggaggtttctgctgcatctgccttctcagtgctcacctaagggcttttgtattttcctcctcgcatccccacagatggggttcaggctgccggacacagctgggtgatgccagggcagtggtcacctgtgccagccctgtgaggtagctggaggatcattgttccttccttctcgggctctgggcagatgccagggctggggtgacccatgccctcaagtttcttgctttggtgggccacattttcccttggcaaagagggtaaaggtcacaggatgccagagagctgtgacttctctgtgccctgggcccaaactatgaagacctgacacactatgctaaaagtccaaggccgggtgctccccagagcttcttgcctcaccgcttctgctgagggaggaatgaatactatgtcctcccagagctttgggagcttgtagcaagcagcctccccagtacaaaatctcttggaaacctctaactgtgtctgaaacattagtgcaaatgttgcatcatatttcccatatgtccgcatgttttaggaaaaaaccctcaatttcctaaatatgcaagaaaaatcgatattgtaggacaatgtgactttttaaaaaatgttatttaaaaatcttccccacctccttttctgccctccaagactgccaaatacttgttgaacaaatattattaaaagcctactacgtgccagccatgattcatggtcttggggacacagcagagaacaaactgacaggattcctctcttatgcaactcacattcttatacgataatgataagggttaacattaattaagccgtcaccacgtgttagtcacggtgcagtcattcccacacattattacacttaaacctgctagcaagcttgcaaggtagttagttgtttttcctttaaaaactgagtctcggaatgatgaagcattctgtccaatgtcacacggctagtaagtgtggagaccttgcatccaatcaatgcccgtctcattctaaaggccatgttatgtgttctccagcccatggagaataattttaacacagtcaatgaaatttctacacaacaatgttcttgtttcaagtccaagaatgcctcctacacctcctataatactggctttctggtgagtaaagatggcattctcatgtgtaatcaggtggcaaatggagatatgaccaaagtaaccatctgcctacactcataaccctgtacacactcttcctgtgtcgattcaattcaagtaccccttttgatcacttagcaaatctgacctttaaaagggttaaggtttttatatccatgtaagtttctgtattgctttggaagtctctggttaaattaatactcttttaatagtgacctgtgattctgttttgatcaagtgttttcaaacttgacgtctttgatgggtttctccagtgtcaaaatcctaaatcaagtctttttggcttaaaactaactttgggattttttcagctgcatcccttggggagtctaaagaatgtatctctcatcttgtagaggtattaagtgattcgatttatttggtagattaaatgggcaggcattgtcaaatgtggcgatactgcatgggagggcactgtcaagtgaggtgacattagatctcatctcagttatatttatgggtatgttgttgatatacgtgttccaaaaattgcatacatttatacaaatttaatatgatttgtaattttgatagttatgctaaatgtttgctaaagttatatttgtataaacacgtcatgaatggctgggcaccgtcactcatgcctgtaatcccagcactttgggagacaaaggcaggtagatcacctgaggtcgggagttccagaccagcctaatggagtgaaaccctgtctccactaaaaatacaaaagttggccatgcctggtggcacatgcctgtggtctcagctactcgggaggctgagacaggagaattgcttgaacccgggaggcggaggttgcagtgagccgagatcatgccactgcactcccgcctgggtgacagaggtagaatctaactaaaaaaaaaaaaaagttattaattatttctgaagattgtatgaaatttataaaagtctggtggccctgatatgatgctgccagtcatgattctgattactgtcttaaaatgctgcacgtaagtaattaaatttccttgtgaactgggaagtttcatcagacttctatcataactattgtttccatcatccacagttactattttgaattcttctctaaaaatatttgtaattggcaatagtccaaattttcttttgttttctttcctgtttttgagacacagtctggctctgttgcctaagctggagtgcagtgagccgagatcatgccactgcactcccgcctgggtgacagaggtagaatctaact

SEQ ID NO: 341 - DNA, 1723 bp, Homo sapiens
ggcagaccgtcacgtgacgacgtcgattcgcgtgcggcagtggcgaagttgacaaaccccgcgaaaatcgactctttgcatcgcacattttgttgattttccctcgtttttctttctctctttcccccgtccatccgaaagagggttggaaaaaaacaaaacaaacaaacaaacaaaaaaaaaaaacctaacgctgttgggacccggaagcggaaagggcatctttgaggtcgatacttccgggtcattgggagagtgcgggattcctgggccgagagcgggtggctgagccgggacctcgcgtgattctcggaacccgaggagaagcggcgtccggggctatggctgtgactctggacaaagacgcttattatcggcgagtgaagagactgtacagcaattggcggaaaggagaagatgagtatgccaacgttgatgccattgttgtatcagtgggtgttgatgaagaaattgtttatgccaaatcaactgccttacagacatggctctttggttatgaactaactgatactatcatggtcttttgtgatgacaaaatcatctttatggccagcaagaaaaaagtggagttcttgaaacagattgccaacactaagggcaatgagaatgctaatggagcccctgccatcacactgctaatacgagaaaagaatgaaagtaataagagtagctttgacaaaatgattgaagccattaaagaaagcaagaatggcaagaagattggagtgttcagcaaagacaaattccctggagagttcatgaagagctggaatgactgcctcaacaaagaaggctttgacaaaatagatatcagtgcagttgtggcatataccatcgctgtaaaggaggatggggagctcaacctaatgaagaaagcagccagcatcacttctgaagtcttcaacaaattcttcaaggaaagagtcatggaaatagttgatgcagatgagaaagttcgacacagcaaactggctgagtctgtggaaaaggccattgaagagaaaaaataccttgctggggcagacccttctactgtggaaatgtgttaccctcctatcattcagagtggtggcgactataatctcaagttcagtgtggtgagtgacaagaatcatatgcactttggggctatcacttgtgccatgggtattcgcttcaagtcttactgctccaaccttgttcgcactttgatggttgatccttctcaagaagttcaagaaaattataactttttgctccagcttcaagaggagctgctgaaggaattaagacatggtgtgaagatatgtgacgtgtataacgctgtcatggacgtggttaaaaagcagaagccagaactgctgaacaaaattaccaaaaacctagggtttgggatgggaattgaattccgtgaaggctccctagtaatcaatagcaaaaatcaatacaaactgaagaaaggaatggttttcagcatcaatttaggattctcagacctgactaacaaggaggggaaaaagccagaagagaaaacctatgccctgttcattggtgacacagtgcttgtggatgaggatggcccagctactgttctcacttctgtgaagaagaaagtgaagaatgtggggattttcctaaagaatgaagatgaggaagaagaggaggaggagaaagatgaggcagaggaccttttgggaagaggttctcgggcagcattacttac

SEQ ID NO: 342 - DNA, 2175 bp, Homo sapiens
acgcggcggcgtgccagcctagccactctagcgacggcggggaagagtgtgtacgtggtgggggcttcctcggtggcgggcatggaggcttcgcgctgccggctcagtcccagcggcgacagtgtcttccatgaagaaatgatgaagatgcgacaggctaagctggattatcagaggctactacttgagaagaggcaaaggaaaaagcgccttgagccatttatggtgcagcccaatccagaagccaggctacgtcgggcaaagccaagggccagtgatgagcagactcccttggtgaactgtcatactccccacagcaatgtcatcttacatggtattgatggtccagctgctgtcctgaaaccagacgaagttcatgctccatcagtaagctcctctgttgtggaagaagatgctgaaaacaccgtggatactgcttccaagccaggacttcaggagcgtctccaaaagcatgatatctctgaaagtgtgaacttcgatgaggagactgatggaatatcccagtcagcatgtttagaaagacccaattctgcatcaagccagaattcaaccgatacaggcacttccggttctgctactgccgcccaaccagctgataacctcctgggagacatagacgacctggaggactttgtgtatagtcctgcccctcaaggtgtcacagtaagatgtcggataatccgggataaaaggggaatggatcggggtctcttccccacctactatatgtacttggaaaaagaagaaaatcagaagatatttcttcttgcagctagaaagcggaaaaagagcaaaacagccaactaccttatctccattgatccagttgatttatctcgtgaaggagaaagttatgtcggcaagcttagatccaacctcatggggaccaagtttacagtttatgaccgtggcatctgccccatgaagggccggggtttggtaggagcggcccacacccggcaggagctggctgccatctcctatgaaacgaacgtacttggatttaaaggtcctaggaaaatgtctgtgatcattcctggaatgacactgaatcataagcagatcccctatcagccacaaaacaaccatgacagtttgctctcaaggtggcagaacagaactatggaaaatctggttgagctgcacaacaaggcccccgtctggaacagtgacactcagtcctatgtcctcaacttccgtggccgggtcactcaggcgtctgtgaagaacttccagatagtccacaaaaatgaccctgattatatagtcatgcagtttggacgtgtggcagatgacgtgttcacactggattacaactacccactttgtgcagtacaggcctttggcatcggtctttctagctttgacagtaagctggcgtgtgaatgagagaacagtcaggcagggagcccttctccccacagagctttcaggagcagacagtggcctccccttcccctccctgccccaggacttaaagagcaatagtttgccccttttggaatgatctctgaatatataaaacacacacacgaagagcaatagtttgccccttttagaacgacccctgaatatataaaacacacacacgaagagcaatagtttgccccttttggaacgacccctgaatatataaaacacacacacaccccgcgcactctcactccttttccaggtttcatagacttggtgagggatcacagcttagcatgggtgagagatgatttaaagcacagggagattcttgtcacattggggtctccaaagctagaatgggatttcatgtgcttggaaacttgcagtagaatcagggactgacatcgcagttcctctcctctcttcattccctcacagcagattggccggcaccaatcttagtcaagagtggctgtgatcacatttgtgatcaattatgtgagaattttatataattgtcttcatttcaattaaggctgaaagcataaactctagaggtgactcagtcaggactgacagtaatgtgataattgccttcattttcaacccaggagtgcctctcacagctatatgactacggatccattagtgaggagcgacacacacacctgtaggcatcctgtgcaaacactttgtcattatcaagagagatggcagtattgaccatttagtttagtt

SEQ ID NO: 343 - DNA, 3699 bp, Homo sapiens
gaaatcaaaactaaaaatccttgatgatgtgttatgggtgtggtttgtacaagagagctaatacagaattccattcagtgaatcctctgtttaaagagaaagccttggcctttgtcagaagatgggaaaacaaatgtacatttataaactttcagttaaaataaaatgtttaaattatatatctgtgtatcttttttttttaaacgattccttctaacctttttttttaaacgattccttctaacccatttttttttttgttaaacccaaccagccaactcttggtcctgattgtattggaaactagggcttctattaaagatagttaacatctatttagttcatatacaatatcagcattattcgaagagtttcacttgaattatctcagttaagcttcgtaacaaccctatgtcttctctttatagttaagaaaactgaaccttagagaggtgaagaattcgtccagggtcataaaactagcaagtggcaaaattgagatttaaacactgctaggtgttaccttaggatctaaacttttaaccattactccaaagtacaggctgggtgcggtggctcacgcctgtaatcgcagcactttgggaggccaagacgggtggatcacttgagcccaggagttcaagaccagactaggcaacatgacaaaaccccgtatatactaaaaacaaaaattagccgggcatggtagcacacacctgcaatcccagctccttgggaggctgaggcatgagaattgcttgaacctgggaggcagaggttgcagtcagccaagatcgcaccactccactacagcgtgggtgacagagtgagaattggtctcaaaaaataaataaataaactacataggaaataaaactacctggaatcttttcttttacaaaatcaatatgacacacatatcggtacttgacaaagacaacatgaaaaattttataagatattaggccgggaacggtggctcatgcctgtaatcccagcactttgggaggccgaggtgggagggtcacttgaggccaggagtctgaaaccatgcctggccaacatggtgaacgcccccatcccccatatctactaaaaatataaaaattaggctgggcatggtggctcatgcctgtaatcccagcactttgggaggctgaggcgggtggatcacttgaggtcaggagtttgagaccagcccggccagcatggcgaaaccctatctctactaaaaatacaaaaactaaccgggcgtggtggtaggcgcctgtagtcccagctcctcaggaggctgaaacacaataattgcttgaacccagaaggcggaggttgcagtgagccgagattgctctgccgcgctccagcctgggcgattgagactgtctcaaaaaaaaaaaaaaagaaaaattgtataagatattaatccaagaattctaagggaggtactagcaaatagtatccagctttttatcacaaagttaacctgcagaaaaatgatgggagctaagatgatacagagggtcaagaaaggtatctccctttaagtgacatttgagcagagatctgaatgaagaaatggcaaagtaataaagactctgaggcatatttggttttttttttttaggaatatgttctcagtgaaccatatggggggaaagcttggtttatccattttatagcatgctgtactgttactaagaaggaaatagttggtcaggcacaatggctcacgcctctagtcccaacactttgggaggccaaggcgggcggatcacttgaggtcgagttcaggaccagccttgccaacatggtgaatccctgtctctactaaaaatacaaaaattacctgggcgcagtggtgtgtgcctgtaatcccagctacttggaaggctgaggcaggaacatcctgcctcaggtagcttgaacctgggaggcagaggttgcagtgagtcgagattgtgccactgcactccagcctgggtgacagagtgagactatgtctcagaaaaaaaaaaaaaaaaaaggaaacagttgatttggagataaagaaatggaaaagcagcatgaatagttacagaaggctatattgagattgatctcatttaggtaaaacaaaagactcaaattgttaatctgaacatggactttcaagaagactagggaggagaaattttcattttctagtttatatatttcagcatgtttttattttgtcaagatacttataattttataaagagattgaccgggcacagtggctcacacctgtaatctcagcactttggaaggccaaggcaggtggatcactagagcccaggagtttgagaccagcctgggcaacgtggccaaaccccgtctctacaaaaaatacaaaaattaggtgggtgtggtagcacacacctatagcctgagctattgggaggctgcggtacaaggatcacccgaacccaagggaggtcgaggctacagtgaactgtgattgcaccactgccctttagtctgggcagcagagcgagaccttgtctcaaaaaaacagaaataaaacaacaaaacataaaaagatgcttcaattttgatttcatagcattaatttcttttcagacatgaagaaaatgaagtttctgataaacaaatctgactataatgaggcaacggagtataccgaaaagtgtgtggcctttagaatcttacagggttgggttctaatgccagctcagctacttcctgcgcttatggtttagggtcccatatgctcttaagtttttttcttcaaaagtaaaagaggactgataacatgcttagggttgtgagaattaaatgtaaataagttttcagtacatatttcttccctcaccttatttacagtaatgctaggttgtttataggctcaggaatgatgagacctagtgtcagtatagtacagatacatgtaaaactgatcaagagtgataacactaatttgctttaaatggctttacaccatagtgaatgagttattttatttataatttgctttgttccagaaagtattttaggcagattacaaatattttataatagaagtagcatagattaaaaagtgatggagggaggccgggcacggtggctcatacctataatcccagcacttcgggaggccgaggcaggtagatcatctgaggtcagcagtttgagaccagcctggccaacatagtgaaaccccgtctctgctaaaatacaatacaagccgggcacagtggctcatgcctgtaatcctagcactttgggaggccgaggcggacaggtcatgaggtcatgaggtcaggagatcaagaccatccgggctaacacggtgaaaccccgtctctaccaaaactacaaaaaaaaaaaaaaaaaaaataaaaaaagccgggcatggcggcgggcacctgtagtcccagctactcaggaggctgaggcaggagaatggcatgaacccaggaggcagagcttgcagtcagccgagatggcgccactgcactccagcctgggcaagagagcgacactccatctcaaaaataaataaaaaaacaattagctgagtgtggtggcacacacctgtaatcccaggtacttgggagtctgaggcaggagaactgcttgaacctgggaggtggaggttgcagtaagcggagattgtgccactgcactccagcctgggcaacagcaagactccatccc

SEQ ID NO: 344 - DNA, 4394 bp, Homo sapiens
gtcgccgtggctgccggtcctcgagttgggggctgccgcggacactgctaggcagacggcgagtaccgagcgcgggtggccgcggtgtccgtgggccacgctcagctgcggtcagaggcgacatgagtgccgcggggctgctggccccggccccggcccaggctggagcgccgccggcccccgagtactaccccgaggaggatgaagagctggagagcgccgaggacgacgagcgcagctgtcggggccgcgagtcggacgaagacactgaggatgctagtgaaactgacctggcaaagcatgatgaagaagactatgtagaaatgaaggaacagatgtatcaggacaaactggcttctctcaagaggcagttgcaacaactgcaagaaggtacattacaggaatatcagaagagaatgaaaaaactagatcagcagtacaaagagaggatacggaatgcagaactcttcctccagctggaaactgaacaagtggaacgaaattacattaaagaaaagaaggcagcagtgaaagaatttgaagacaagaaggttgagctgaaagagaacctgattgctgagctagaagaaaagaagaaaatgattgaaaatgaaaagctgacaatggaactgactggagattctatggaggtgaaacctatcatgaccagaaagttgcggaggcgaccaaatgatcccgtccccatcccagacaagaggaggaaacctgctccagcccagctaaactatttgttaacagatgaacagatcatggaggatctgagaacattaaataagcttaagtcacccaagagaccagcatctccatcctctcctgagcacttgcctgcaacacccgcggaatctccagcccagaggttcgaagctcggatagaagatggcaaactgtactatgacaaaagatggtaccacaagagccaggccatctatctggagtcaaaggacaaccagaaactgagctgcgtgatcagttctgtaggagccaatgagatctgggtgaggaagacaagtgacagcaccaagatgaggatctacctgggccagcttcagcgcgggctcttcgtgatccgccggcgctcagctgcttgactttctacagtgctcttctcttgaccctttttctggagtgggttttatttttgttttgtttcgttttctccttaatagaaaaatgttaacttactgggaatagctactcagccttggaaatggagagcactgcagtgaattctttagggcacttttgtggccggatgcttccaactttgtcagtcttttctgcctcaacttcttccagacatcagtcaccatgagactgttttactttcaggcgtattggggggtttgatttactttccttttatttctttattttttgcttatacttgtttttgaaaacctcctctgagtttgaagggacagctatttttattgattatctttaagtctctctaccatggagaagagcaggaagggatacactctccagtgcattttcatgttttgaatctgattagtggatcacgtagctactttccctgtcgcgtccaattcactatttgcccagaagcttggggcagaggtcctagcaggagatgatgaattctcgtggctctcggccttctcagagaaataaatgctttgtgtaacatctgtgcacaccatccattccgctcgctgagcgatggaaaagcttgcctggaagactatgtgcactgaagtaaatggggttgggggaggggacatttcatatttataatgtgctgaaggtaccatattttaaatgttatttaatgcaggtgatttattcaaacatttgttctagcttaagctggaataagcagtggtcatttcagaagttttcatttgtaattccttcctctcccttgttcccaagtaggtagtagtaagtatgtgccacaggctgattatctgggtaatcttttacgggtgggaggtgagattgatagtgcaataatcagtgatctatagaccctcatgcacgattcaagtttcactcttgtggctgatgccattattgcacattggccattccaaacctgtggagaactttgttgtcaggccctgagcgctcacagcttcatttggcccaggttgaagacaaggaaagctctgctgtggctgcctctggactgacaccctccctaatgagtcctgatgaaacagcctttcctacatccttccctcactcccatgattggagaaatgattcattgggtgatgagtgttggggttttctatactcatgttgccatcttgagatgttcaaaaaatttggggttagagcaactgttagtgtctctatgagcaatcagtagaacttacacatcctaggaaatctttctttgtaagtaattcttttggtctcaagtgattctcttcatgttgtctcttgatgtacatacccccaagcaagttggggggactgtgatgacaattaaatcaccttctctgaagttctggctctgcagagaccaaaccttactgacttgtacagacttgtacaagtaaagacttatacagatagatttttgttttaacttacaatccgttttttcctcttttttttttttttttctggtgttggagtcttatttagaaaacaggataaatgacgctgttatcaaaagttgcctggggttctgtatttcttctctgccctccaatccccgactgctatgatgtttactacagtgaacccagcccatggtaaacacaggcttcacctgttcttgtttgttagccttgactgtgaggcaggacttccctcgcttgaactgttacacatacgatgtgtgtgtcacatcacatattgtgcagctgttggttttcatgtagtgccctgcgatggaaattagatatatttcatgtatttttccattgaaggtggagtttttcaatgatcatgtgttttgtcctcctaaacagtataccaaagtttgtttttatagttgaggattgtattgataaccactggggttccgcattgaagcaggaacaaattgcctctttttctggccttctctgtgggacctctgcttttgtgaagcaactatttatttgaagaccagggtatgggcacttttgccttctctcctctctgacttttgagggtattgagggcgcccttagtcatagtctcgactccgccattgccttctcctcggcgtcctcacaactcttaattgggcctagtgaaaatgggggcaggtgagaagtccattttgagaatcagcatagtaaattacatttctaatcccagaggacttaatattttcttttgtcaccccagaggtgaaaaatcagcagttgaagcctgacaggcctcagtggtgaccaggaacagaagcagccttcctgttagtagatgggggtacttctgtggtgggcagaagccttactaaaggggaagacagactttgaagtttctagacgagaaggaggctagcttctagcctgggtggccattattccaaaaggtcattgtttctcactagaccccagggcaccagatgaatttccaagtttaaactctttcctgcaggtgattactttgaaaaaggttggtccagaccattttgatcaagaacctgtatatgtgttgtgttagaggcatctgcctcaagtctatgtacagtgtttgctgcgggtgtgttccaatattcattttacctctgcttgggggttttgtgtgttcccctccccccatgccctgcctacccccttttccctgaaccacgtccttttgaataatttccagatggatttctgtagccataccaaagccagggtgttttcattcatgcggatactagtatttatagatgtctgactacctaacttaatttttgtttttgaacttctaattggggccagtgtaaggtcgatcccagaggctgatctgcaaatcaagctacatgtatttgtgtataagaccctgtgttcaggactgggtgacttttctaagaaatatggggtttagaatggggttgactgtattttttaacctaattctggagagaagattgtattttttacagttttttgggtttggcttccttctcacatttctttagctttgaatttttactaaataaatttcctcctgattaattttttttttctcatctgggaatttgaaatctcggtgcttactgttacaccaatttgtccaaagagttgaaatcactttaatgccagaacatggtaaatttgcagccatttcaagcaggtgatggtctttttttataacatcgttaacaggtaccattaaatattctgagaggtgaatgtaaaatataaaaggtataggtttttttttttttttaaagaaaacaataaactttcaaagag

SEQ ID NO: 345 - DNA, 4460 bp, Homo sapiens
gcggaggacgcaaccgagcgggcctgcggcctcaccatggacccagaatgcgcccagctgctcccggctctctgtgctgttctggtagatcccaggcagccggtggcagatgacacctgtttggagaagctcctggactggtttaaaacggtcactgaaggagagtccagtgtcgtgctgctgcaggagcacccctgcctggtggagctgctgtcccatgtgctgaaagtccaggacctgagttctggggtcctctccttctcactgcgcctggcaggaaccttcgcagcccaggaaaactgcttccagtatcttcagcagggggagttactaccagggctctttggggagccaggacccctcggccgagcaacctgggccgtccccaccgtgcgcagcggctggatccagggcctgcgctccctggcacagcaccccagcgccctgcgcttcctggccgaccatggtgcggtcgacaccatcttctccctgcagggagactccagcctgtttgtggcctcggcggccagtcagctcctggtgcacgtcctggctttgtccatgcgaggtggagccgaggggcagccctgcctgccggggggtgactggcccgcgtgtgcccagaagatcatggatcacgttgaagagtccttgtgctccgcggccacccccaaggtcactcaggccctgaacgtcctgaccacgaccttcgggcgctgccagagcccctggacagaagccctgtgggtgcggctgagtccccgcgtggcctgtctgctggagagagaccccatccccgccgcacactcgttcgtggacctgcttctctgtgtggctcggtcagggccccgggacgcagctggggggcctgggtgggcaactgttttcctcggataatgcccagggatgtcccactggcagccggagactctctgaggacatggcctgcagtgaagcggcaccggggtgaccctggaaccctcatggggaaaggcctgtcttgggctgggcgcctccagtgccggagccatggcagtctcagccaggcctcgaatggggttttgagggtgggggagtaatttttctctctggggtctccctgcagttctcccgtgttcagttcttccgacggcagcctgtgggagacagtggcgcgggctctgagctgcctgggtcccacccacatgggacccctggctttggggatcctgaagctcgagcactgtccacaggcactgaggacccaggccttccaggtccttctccagcccctggcctgtgtcctgaaggccacggttcaggcccccggacccccaggcttgctggacgggacggcagacgatgccacgacggtggacacactcctggcctccaagtcgtcctgcgccggcctcctgtgccgcaccctggctcacctggaggagctgcagccgctgccccagcgcccttcaccgtggccccaggcgtctctactgggggctacagtgactgtcctgcggctctgtgacggctcggctgcccctgcctccagtgtggggggccacctctgtgggaccctggcgggctgcgtccgggtccagcgagcagccctcgacttcctggggacgctgtcacaggggacaggcccccaggagctggtgacgcaggcgcttgctgtcctcctggagtgcctcgagagccccggctccagccccacggtacggtggtggggatagagagcgaggagaggagggaggcagaggcagtgggacccacccctgactccaccccgtcccgtgcaggcctctgcggatggggccttcacacagggccacagagctgctgctcagagagcttcacgatgcaggtggctgcatggggcgggcccagggcctcttgttggtgaagatacatcagcacgcaggggtgtgtggggccgtggggagcaggggcactggtcaggcggcctgcggggaattctggacaagggaaatgaggtggcaccaagacggccctgggcgtgggctttgggttctcctaagcgccatttgtgaacgtgcctactccacagcccctcacggagctgggccctggcaggtacagaccttgtgccacctgccgctgagcagacagcagacaactttggaggaagggcccagggcttcttgggatcctaaggaaaaggtgccctgcgtaattggtcatgttttgatgtagaaatcccgttgcctgggttgtgggtcttctggtgagggctgccgccacctcctcctgctcacagtctgggaagccggttctgcagcatattctgccctattaaaatcagcccaggaggggcgtggggctcacagctgtgattactgtgcgttggggggccgaggtggggggatcaatggagcccaggacttttgaggccagcctgggcaacatagcaagatcccatctctacaaaaaaatagaaaaattagccccaggagtatagctcaggggtagagcatttgactgcaaaaattagccaggcgtggtgatgtgtgcctctagccccagctactcatgaggctgaggcaggaggactgtttgagcctgggaggtggaggctgcagtgaactgtgattgcagtccagcctggatgacacattgagaccctgtctctaaaaaagaaggaagcccagcgttcccttctctctccacttcctgtccccattgctgtccctggagtacgggcagcacaggtgaaggcgagggggacagacagacagcctgcccctccgtctcccgtggccctgcagcccaccctatctgctccaggttctgaagaaggccttccaggccacgctcaggtggctcctgagctcacccaagacccccggctgctctgatctcggccccctcatcccgcagttcctcagagagctgttccctgtgctgcagaaacgcctgtgccacccctgctgggaggtgagggactccgccctcgagttcctgacccagctgagcaggcactggggaggacaggctgacttcagatgcgcactcttggcttcagaggtgcctcagctggccctgcagctcctccaggaccctgagagttatgtccgagcgagtgcagtgaccgccatggggcagctgtccagccagggcctgcacgcccccaccagccctgagcatgcagaggcccggcaggtaggaggtggcaggttcctcagccagcaactcccgcctggccatcgtgtgtgctcgtttgcttgcgggtggtcgagcggccagcatgcagcgtgggagcagctgctgctgtgggcagcgcctgcagcagtgactgccgaggccctggggctgtgctgggtgtgggacctgtgcgcttcgccttctgtctccccagcacccctccacttagacatggttacctccatttgacagatgggtaaactgaggattggagggccgtgtgctcactgcgcagcatgggaaggtgtcagagcgggctgtggccctagactgcatgtccggggccagcccccatcatgtaccggagtcctgttgtgggagcctcgctcctgccacaccaccaaccatccgcacttgctccctgtcccccagagcctgttcctggagctcctgcacatcctctccgtagactcggagggcttcccacggcgggcggtcatgcaagtcttcactgagtggctgcgggacggccacgccgacgcggcccaggacacggagcagttcgtggccactgtgctgcaggcggcgagccaggacctggactgggaggtccgcgcccagggcctggagctggccctcgtgttcctgggccagactttggggccgccgcgtacccactgcccctatgccgtggccctacccgaggtggccccagcccagccactcaccgaggcactgagggctctctgccacgtggggctctttgacttcgccttttgtgccttgtttgactgcgaccgccctgtggcgcagaagtcttgtgacctccttctcttcctgagggacaagattgcttcctacagcagcctgcgggaggccaggggcagccccaacactgcctccgcagaggccaccctgccgaggtggcgggcgggtgagcaggcccagcccccaggggaccaggagcctgaggctgtgctggccatgctcaggtccctagacctggagggcctgcggagcacgctggccgagagcagcgaccacgtggagaagagtccccagtccctcctgcaggacatgctggccacgggaggcttcctgcagggggacgaggccgactgctactgagcagaaccagactctgccactggggctcaggaccaagggaggcagcaccatgtccttctgtgggacactgccagccccagggctccagcccagcccggtggatcctctggggaagccaggaccaggagagaagcaaggtcaagaaatcccacagtttgatgtattaaagaaatgacttatttctactc

SEQ ID NO: 346 - DNA, 1563 bp, Homo sapiens
tttcaggattcaacaattgcttgttgatttggggtgaagatgccatgaactcaggagcgggtgaggagggcctttctctgcctcccattcccaaagcattctccctaaccccatggtggaggctgcggagagtgttgtaggcagttgcagtgcccgtcactctctgggtgaagccagtatgtcctggtggtggccttagaagacagcccctgtgaggctcagtaagccgcagcctagattggaacagcgtgactgcctggtaggataaaggagacgacatctgaaaagagggtttcaggtgtttgcaaagaggtcagatccctacacatgaaacgctgcggccacagctgcagccatgctacctgccacatgccctggcctgcgtcagcgttatggagtaggcaacctggttcggcgcaaagaggaaatgcgcgttctgtgcccagtcctcgctcccctttgccaaccgggctgctgagtgtgatgctccctttgtgaagtggacatctgtctaatgggaactggacggtgaccaccagtccgttttacacaggccaccatacagctgccaggtggcgctggctcttagctgttctgcaagtccagcacagggtgtattcagctctagaggtggcaaacacggggcccttccaccaggcccactccctgcaaaggaagtgcttccgagagccaaggctttgctctaatctctgtgaaggaagaaaaagacttggggaaaggtaatgaataaattaaagacacacttttgtaatcgtatattttaggctttcctctctacctaattgtgctctaatctgtacttaggagtatagttttttaagtgggacatgtcaggcttttatgccacagattaaactccaaggcaaataaatgtgtgacagcttaagaggcgaaaagaagagtcttcgtcaaatggcagagtttgattgtttaacctagactaatcagtctttggagggcctgccacatgtcttccagacggctagaatgctcaggagataagagtggggcctatcgctctgtggctttctccccctgcattagccgcagagctgagtgagtctatgaaaacccattggtcgggctgccctagcaacacagaatgctgtgctgacacatactccatcacatgtttgcgatgaaaatgctgtatttttagaacacttcaaagtcaggaaaccgttaaaccacactgcatcctctcttgccctctggccacttcctccacacccccaggaacattgcccccatttcacagaaaaggagcctgagacaaagattaagtgatattttaagcaaagctgataatcccagggaaaattgctgatcaagtcttgaaatccaacacatccttcggagtaatttttaatgctttcgcttcttttacctaagccatgtgtgttccatatgaccttaaacctaagccctaatattgtaaatggagttcagaagacaacttagtctcccattttctttcctggcattcattcaaataaaaataggcacgtaatactgtactgttaaaaaaaaaaaaaaaaaaaa

SEQ ID NO: 347 - DNA, 1692 bp, Homo sapiens
acttctttacttaaaagataagtttaaaagactctattcatcagttcatgatgatcttggaaatgctgtttctctactcaaaggatatacccacaggcaggtccatggggacttgctctggtgatctctgctattaaggcaaattccagcctgtttgtgccaagaacagagtcaagtgagagagaatgaagactcagagatgtgcagcactggcttgtatgttgtcaggcagaagccttgttcctttctcaagaaaacttcaggcctatcaagcttggaaggaaatacatttttttatgctgatttgcagcctacaccagctgatgaatatgctaggactttgagagaacacaaagcatggtaagttttggtcaggtggaaaggagcctgacatctgaacataatgcttcctctctcaacatctgggatacttttgaaaattcagtaaggcttaatgtaggaaaaattctttacaggaaaagctaattgatctgtttgtctaacctcatagccactccaaaatatgccttttataatggaaaaaaacagtgaacagagagaagagatttggggataagttagaaggtaccctcaaaactactgccgtaaacctacaggtgggcaaggaggaattactgtagtgtctctggagaaagttcttgaacatccaaatcatctcttttctaagcagtttttcccctaatctcataccttacatcttccagcatcatttgctacatcaatgtcttttcatcctcttcatcagccccattgagctgactccagcttatttttgcactgatttccaccatttccttcccacacccatcctttccctctatttaaagcctccatctcaccctcagtaatgctgctgatttactctcagatgtctcaagtctagcttcctttttgaatccttctcctactccaggggctgtcaaaggcagccttaaagttcagtgactgttaggtggctcaggccatttttcattgggtggtctttggtgtttgcatactgaatttgaattcagtttaaaagcaaactgttggatatgaggaagaaagggatatggccttagccctttttccaatatttggaatatgaaagcatattgtgctttgtgtaaaaaatgttttcttctcctattctgctcttgtctttactgaaggtaaaagtattccttaagtagcttttgcaaatttctagtctgatttccacattcattaagttgatttagcagacatgtaagtcagaagtttcacatatcccttgtatcaaacattttatagggaaacctagtaaatttatgatgcttcattttgggctttccagactatttgagttattcaagatagccataatgttttagtagcgacattcttttattacttctaattgccttgtaaaatgcattgttatggcccggcacggtgggtggatcacaaggtcaggagttcaagaacagcctggccaagatggtgaaatgctgtctctactgaaaatacaaaaattagccaggtgtggtggcaggtgcctgtaatcccagctactcgggaggctgaggcagagaattgcttgaacccgggaggtggaggttgcagtgagctgagatcgcaccactgcactccaccctgggcgacagagtgagactatctcaaaaaaaaaagaaagaaaaaaaaaaaaaaaaa

SEQ ID NO: 348 - DNA, 1160 bp, Homo sapiens
gtcagagtgaagagtttaatcaacagaagtagagtaacatattctttagtagaactcacattatctgcttgaagcacattttgctaatgttttattcagaatgtatcatagatataatgttttaactaataaaatagaatggtttttctctatgaatgaatcacattctttctgccaacatagttttatcctgtctcagtaggatactccataacacaatagcagtacaccactaggctcttaaacgatcaagaacaatttttttcatggtgaaatcaaataacgcagttttggaaacctataaccgcattttgtgcttgaattacgtgccccacactgtggcttaggatacttattggggtataatgaaaatcttactgaaagttaatttcacattcttacaccccaaaatctgcattgccattgatgcatatgcaccacattattatatttccacatcagtttcttgtgtgccaaataagacccatgctatgcctcttggtttccatgaagtgaaaatacatagtaagaatgcgagaaatataaatcaggccaggcacggtggctcacacctgtaatcccagtactttgggaggccaaggcaagcagatcacctgaagtcaggagagaccagcctggccagcatagtgaaaccccatctctactaaaaatacaaacttagctgggcttagtggtgcatgcctgtagtctcagctacttgggaggctgaggcaggagaattgcttgaatccaagaggcagaggttccattaatggagatcattccattacactccagcctgggcaccaggaacgaaactcgttctcaaaaaacaaaacaaaacaaaaaaaacgttggctgggcatggtggctcacgcctgtaatcccaacaatttgggaggctgaggcaggtggattacttaaggtcaggagttcaagaccagactggccaacatggtgaaaccctgtctctactaaaaatgcaaaaacattagctgggtgtggtggtgcatgcctgtaaatcccagctacttgggaggctgaggcaggagaatggcttgaacccaggtggtggaggctgcagtgagctgagatcacgccatcgcactccagcctgggcaacaagagcaaaactccatctcaaaaaaaaaaaaaaaaaa

SEQ ID NO: 349 - DNA, 1877 bp, Homo sapiens
tttataataaaatacctacatgttactttagaaaaaaataagccagtgaattctgatataggcaggtgagacttaatgaagtatgtgggttatcaactggaccttgaagtacggctaattatttggctaagtatagggaaactggaaaaacatttcagaccagagacccaggatttaaggcacagaggtgagaatgggcatgtttgttgatacagcagcaaagagattgaccttaggaaaccagtggtgcattaggggattaatgatgtagataaagactgagagtcaaggctgattttggagtgtcttaacagtctgaaacagaagtttagatttgatttctggttaaaaaaaatcagaagaatttgaaatctgttctttctacctccctttattcatttttttcctctttctcttctgtgtatttcccttcctaggaaaatacttcatacaaataaaacggaaagattaattttaccaccaaatacaagacaaattacaagtttactttttaaattttggctttctgcattcttttaaaactagaagctgttttccattaacagtgacagacagcagtgtaaccatgtgtgtttgctagaactaaagagacgtccctatctcagattgctgtggcataacccgtggcatttattcagagtgaggctgttttaagagaatgagcattaactgcaatgtagtcctacagagataactgaacagtctttttgctattgttcttacaggtgtcctacgcattattccttaccttctctggagaaattgattcaccagatttgtcagatttttaaatgtaatattttgttttatttgaaatcaaagctaaagaaatatgttctttgctctaagaacatattttagctatgtttagctaaatagctaaacacagtttaatcttttaatttaatggctactgacttgtgcttacataatctgaaagttcacattgtcaggctgcttttttccttctaatcaacaccagtaattttactctgcattctaatatattacctgtgttattatctttaaaatgcatccacgaatgatctgtttacatttaactttttcatccctttgattcttcatcataaccttaaaactttggttttaatgacaatcaaattcaaaccagaacgaatttaactctaagttcatattattagatatctttccttatttcagctatctctaccagcagagcttaagaaaatccgatttgacttgactagacttactaggacatatctttctgtaagatttccaggtcatcacacacagctcagcttctttttgactttctgaactttgccatgtatttgttgcaaagtatttccgtagttcaaccctgtactcataccttcctagtcagtgacattgccaaaggacaagtcttgcatagaattaaagtgatgggcagaatctttatgatatttttcaaagtgctttatgtaaaatattaggtaattgactagctttaggtcaaaccatgggtaaatatcaagcacatgattagaaaccagttcttggccaggtgtggtggctcacgcctgtaatcccagcactttggtgggctggggtaggcagatcacttgaggtcaggagttcgagaccagcctggccaacatggcgaaaccccatctctactaaaaataaaaaaaaaaaattagccaggtgtcatggcgcatgcctgtaatcccggctactcaggaggctgaagcaagagaatcgcttggatgcaggaagtggaggttgtggtgagctgagattgcaccattgcattccagcttgagcaacagagagagactccatctcaacagcaacaacaacaacaacaacaacaaaaaaaaaaaaaaaaa

SEQ ID NO: 350 - DNA, 1869 bp, Homo sapiens
ttcctcgagcactgtggccttttacctactttatttaatgaaaaacaggaagaaaaacttctgaaataggagtgtgttggtgaatttacgctgcaacccacataattcgaaaaatgattccatacctaacagagtacttttcctgatttactcctttagaagcttgaattacagccaggttgtatggaaatacaggttgagtgtcttaccttaggtatccaaaagcctgtaatctactcaaaagaaacattagtgagttggaattcaaataatccttttctattgttattttttgttacacacaaggcacatctgaaagcacaagagctcagtgttctagttgtgttataataatgaggtcacaagtcctgtactacgatgaggtaggagtgtgtgaaataccatggtggttaaaagcatgggctttggggtggagccaagatggccgaatacgaacagctccagtctacagctgccagtgtgagcgacgcagaagacgggtgatttctgcatttcccactgaggtaccgggttcatctcactggggagtgtcagaaagtgggtgcaggacagtgggcgcagcgcaccgagcgtgagccgaagcagggcgaggcatcgcctcacccgggaagcgcaaggggtcagggagtaccctttcctagtcaaagaaggggtgacagacggcacttggaaaatcgggtcactcccaccctaatactgctcatttccaatggtcttagcaaacggcacaccaggagattatatcccacgcatggctctgagggtcctatgcccacggagcctcgctcattactagcacagcagtctgagatcaaactgcaaggcagcagcgaggctaggggaggggcgccaactattgccgaggcttgaatagggaaacaaagtggccatgaagctcgaactgggtggagcccaccgcagctcaaggaggcctgcctgcctctgtagactccacatctgggggcagggcacagccaaacaaaaggcagcagaaagctctgcaaacttaaatgtgcctgtctgacaggcttgaagagagtaatggttctcccagcacacagctggacatctgagaatggacagactgcctcaagtgggtccctgacccccgagtagcctaactgggaggtatcccccagtacaggcagatggacacctcacacggccaggtactcctctgagacaaaacttccagactaatgatcaggcagcaacatctgctgttcaccaatatccgctgttctgcagcctccgctgctgatacccaggcaaacggtctggagtagacctccagcaaactccaacagacctgcagctgagggtcctgactgttagaaggaagactaacaaacagaaaggacatccacacaaaaaccccatctgtacgtcaccatcatcaaagaccaaaggtagataaaaccacaaagatggggaaaaaaacagagcagaaaaactggaaactctcaaaatcagagcgcctctcctcctctagaggaacgcggctcctcaccagtaacggaacaaagctggatggagaatgactttgacgagttgagagaagaaggcttcagacaatcaaactactctgagctaaaggaggaagtttgaacccatggcaaagaagttaaaaaccttgaaaaaaaaattagatgaatggctaactagaataatcaatgcagagaagtccttaaaggacctgatggagctgaaaaccaaggcatgagaactatgtgacgaatgcacaagcctcagtagctgattcgatcaactggaagaaagggtatcggtgatggaagatgaaatgaatgaaatgaagcaagaagtttagagaaaaaaaaaaaaaaaaaa

SEQ ID NO: 351 - DNA, 2024 bp, Homo sapiens
tttcctgataaatgccttttagagataggttcttgatattcagacatctgcagaaatgttctggttcccaaagtcatttcacttcgaaataaaacacagctccttcaaacagcactttttccacataaatctagttgcctctccctgtggacattcagactgatagaacaaacactactcttttgaatttgatggttcgtgtcctttaaagtgtttgaggacctatgcagagcctgtaacacttgggtagtacctgctaggacaatttcttggcaattgtcttactactagggatcagtaagatttagattctgagcccataatggcaacagccccctcacctatgggaagctgacttccctcagtcgggcacttctcatgggggctgaacatggttcctgccattctgttacccactctcccaggtgagccctggattggcccccagaaggcctctgtaaaatcagtagccgtcctgcaggcaggtgggagcaacaggggcttcagtagcttcattttcctgtcttgcagacagagacccttggctaccactgtgctgctaataggataagtactctgttgccagattaccatgccttttatacaaaaccaaattaacttacctaatacctgacacctctttgggctctgaactgctttctctcatcaagcatgctagcactctagacagaattctagaaatttggcagatagtggaagcctttaattgaacttactccttcgttgactgaaaggagttttaaattctgagctcctgagatactgactagcaaccatggaatgaatgtgtgaccagaaagtggctttgacaccaagtgctactgtccctttgtaattggcttctaacagaattcaaccagaaataattgataatgtgaatttttgttaattgttcacttgtaggaaaatagaacatgtatcaccctttgttaggtagacatgaacttttcctgcacaaagccttgcttttagagaatgcccaataaggcaagaaaaagcatagtaacttgtgctttgagagctcaatatttgtatcttatcagtacagaagaaatatttctgtgtaacttgatcttctgtctagtacttgtcttataggtaaccaacactgaaaactttgtagtgatgactaccaagaaatacatagtaaaacaaccttttatttccaaattgttaaagagccagccattgatgctgctacatgagttccatgctcaagagccattgtaagagattaaggggtttctaggtttttggtgattttttgtttgtttttttctttgttttttagggtttttttttcttctttaattttttgattaaaacatacacacagctgttagcataaagtcgtggggggcattttctggaatgctcagcagttctgattaactgccaagcccaggttgcctctcatgaggcaactgaaaaaatcctgtgtcttgatagcatgggtgctgtgtgtgtgcatgtgtgtgtctgcattcatgccttaactcgggttactgcacaactttagttcttgacttagtctgcaccgtcatctagattgtattgtacatctcggtctgaacttcatcctggcaaaaacaaagttgcaggcacaacagtttaagaatgcattcctccagaagagtatctggtcaggttgaccctgagccttctttggacttgatttggaacttagcctggaaagcgaaagtggactgtccaacagaaagatgtcaacaaggaaaagaggagagccaagcgctagcatgccttttgcctctgcatatctgtgcacactgtatgttgttcatgatagcttgtctacaacttgactaggttggagttctggtaatagtggcaatcttgacattcttggtcagagtttagagagatgtaagactttcaattaatgtcttatttactcctttatgttgattagtctttgatacatgtgctgaatcagaaacctaaataaagataattttttaaaatgtaaaaaaaaaaaaaaaaaa

SEQ ID NO: 352 - DNA, 1654 bp, Homo sapiens
caaacaaaaaaaaagcattctaaatccttcataaatattgtggttaatataatatattaaacatttagattttaaagcacaaatgcttgttaagtaaacatattcaattatatcatttctagaaatattccagatctaattctagaagagttctgtccaatagaactttctgtggtaatggaaatgttctgtatgtgtgctgttcaatatggtaaccacatttgctgttgagcacttgaaatttgggtggtataatagaggaactgaatttttaatttaattttaattaacttaaatatccaagtgtggctagtggctacctaactgaattgcacagttctagaacataattgtcatggtgtgaacatagtctgctataacaacccactctccacaaataattacaaaattgtatttctttggtaagatttggtgtagccctcacagttcaatattgtgtcctttggctaaaagcaaggtacaatgcacatgccgaaagaccttagttttggatgtgatgaaatgttttctatgcctggaataaatgccttcctttgggttgtaatttcttaaatagtattgctcctctttctgtgagttatttaatttttttctctgtagtagctatgatttctggttttctagtgtgatcatctattgagtaagaaagactaatctcatttggttgtttttgtttttgtttttaactgtccctattttaaaatatttagatgctaattcttccttttggcagtttgcacctgagtttcaggtaggagatggaattggaatggatttaaaactatcaaaccatgttttcaatgctttaaaacaacatgcctactcagaagaacgtcgaagtgcccgcctacatgagaaaaaggagcattctacagcagtaaggatttatagatttttttttttcttttttactagaaagattcatattagaaaactttgggtaaagaaaaaaaaacttcatgtttgatattttttcatgagattggctttttaaatcaaagatgtaaataaatccagccactgtggtgcccgcctgtaatcccactactttgggatagcagatggagacaggaggattacttgagcctaggagtgcaagaacagcccaggcaacataatgatccccagctcacaaaaaaaattagctgggcatcatggcacacacctgtggtcccagctacccggggggctgaggtgggaggattggttgagcccaagaagttgaggctgcagtgaaccatgattgtgccactgtactgcagcctgggtgacagattgagaccctgccttaaaaaaaaaaaaaaaaaaaaaaatgtaaataagccaggtgaggtggctcccagcaccttgggaagccaaggtagaaggatcgcttgagcccaggagttcaagaccagcctgggcaacatagggagaccctgggagaccctgtctcagcaaaagttttaaaaaattagccgggcatgttggtgtgcacctttagtcccagctgctcaggaggctgaggtgggaggatcacttgaacccaggaatttgaagctgtagtgagccataatcatgtcactgcattccatcctggacaacagagtgagaccctgtctctctctctgtctctaaaaaaaaaaaaaaaaaa

SEQ ID NO: 353 - DNA, 2145 bp, Homo sapiens
atgaggtttatgtggcaatggaggcaataggtttggagtcagtgatatgctcttagacacttttttctactcaggtgctacatgttatagaatcagccatctgcagggtgttgtcagagaagagagcatgagagtgtgtgtgtgcaagagtgtgtgtgtcagcatgccccaggctgggtgtgcatccacacagaagggaaaggcccttcctgtattgccagttttggcattagtcctctacatgagcctcagaccttcgcattgtgcattttctcttcatgcatctgctttgccatttttgtttggatgaaaattgtgttcctaaaacactgctaaactgaaccttcatctgatttcgtaactgtggacataagtagaaagtgaatagtttgaccactttgcccattaaaatagtttatatcctagaaagatgtgaagctacaagggtcacactttcggagcaaattttcttttaggcaaagtgcagagcctggagctacatcctttatatcctctggcacactcgggtgtggtcaaggcttccccatattttgaactgagccgtatgggtaactaggaattggagactaatgcaataataagcttacgcaggtttccttctaaattcaaactctctagttcctttgggtttgggtttggccatttgcttttaactactcagctggctcctgggtctcctgaccatctcatcctctctgtgacttaggtctggtccatttatccaagtacattttggctcactagactcactgtactatgtcttgtataagtgccaaaacatctgccgcttggggcagatatttaaatctgtgcctttcttttagacatacagtaagtttcagattcttcagtaaaggtttgctagagctcgatttttcctttgaaaatactttaatatctagattctaagttacattcatgtttttccttggtctttttttctctcttgttcctccctttcctcctttaacattatactttcaccctgtgccctctgagcccccacatcagaaagctcctctcttccacgtgccatataactgacttccaaagctggtgaaatttgatgcccccatttttcacataaaagatttggtttttaaatgttactgtgatgcaaacctactaaaacgatgctttattttggctgtaaggtaaatatgtcttttggcctttgtaaagctgttgcatgtggggtaatttccctctgatcatctggtgctcttgaatacctgctgttgctgctttgtgatttctccataggttaaatattagcataggaagaggagcagatttcaaatcatgctcgactatgcagaagtctgtgaggccacaagaacgtattaattacaaattcagaaagtaattaatctttccagatttgccatgccaatattggccatagccattaagaagttaagtaaacgcctggccatggctccagctggagctgaggtctgcatggaaagctatgctttgaaccttgacaacccgtttctcctggaatatgtgatatgccacactgagaaccaatatggatttctacagtcgattagaacatgattcaatagcattgcttttgattttcagaattcatggtagctcactcaatgaaattgcttcctagatgtagccatcctgattttgagagtggaaaatattatttatcaaaatattaagagcaatttcaaaatagatctgtgagcgatttatgggcctcttgcaaaatggtatacatgttgactgactgatctggaaaaggttaatgataattactgtcagatatttttttacctgaaatttttattggagtattaaaacttatttggagtcctctccgtttcttttctctgtaggtttacccaagagaatggttctgttacccgttatgaaatttccaacatatcctgttccccactactcattcttttagcaaatgacagaagctaattcctattgaacaacaatacagtacaacacagaatgttagagaaaaagcctttttatcctgctttctttgaacacatacttgatcaaaattatttgtaaagaacatctttcctactttttgattttaacaaatgcaaatttagttctctaaaacttgaaaaaaaaaaaaaaaaa

SEQ ID NO: 354 - DNA, 2466 bp, Homo sapiens
tatgatcacagctatgcagtccttaccataaatgtaaacggaggctggaaaagagcatgaagaagggaaaacagctaatgtgttagggttgtggatagtagcttagtttttctttcagaaattcttttattgttgttaaagattatgccagtgtatccaaacatacacactcaaagaccttgcaagaggacgttactatcatggtatatgggacatttggaacatgggtaagctctttccgaaaatagagtaatcaaaacccagaaagcaccggaaaccttgagggtgtgatcacttacgtcgagaagaaattgaaacaagactttcattcttgaactgttcccctacaaaatactatactttgatgcttctttagatctttgctgttacctctcagcgttcttaaatcactttgtttccaggttcaatttcagaagcttcagcaactgcgccttacacagtaccatggaggatccttaccaaatgtgagccagctgcggagcagtgcgtcagagtttcagccgtcatttcaccaagctgataatgttcggggaacccgccatcacgggctggtggagaggccatccaggaaccgcttccaccccctccaccgaaggtctggggacaagccagggcgacaaatatccttttttactcttcaaagggagtgtgcattctgaaatgtttgaaaagttttcaggatttatcttccctgcaattctcctttggcctcagaatcttcatttatctgatgaaaggaggcaatgcaaataaatgagttggaaactagaaacatctctgcagtcaacatttggaaacatcattgtaggtgtttatgaaagcatcaataaagttcagtttaatgaaataacaacaaaaacaacctgtaattcggtcccattgcagggtgttctgagcattttctccagaaattggccacgttagagttaaacctgactttgaatcaggttagagagccttagtctctttagcaaaaatggacatagagatatgtgatttatttgtacttcttttgatctgctgacctgcttttggaacttacagacaaaatttcatattattttctatttgtgatgtttcaaactcagtaagtgataactaaaataaacctagaatataggaaaatctcatgcagtgatgtacagtcacaccaaactctgctgttaagtagaaataaaggaaaggaaatggtgaattcacctgacagtttcatttaatcagtcctgtttacagggcggcagtggtgggtgcagctgtgtgaccagcattgtgccgaaggctttggggaacagaactgagctggattttttgggagaggacacagaagtgtgccaggagggcccgtgctctcacttcattcttctcagtactcgggcgcaggggtggaggaaggagaagaaaggcggggtgggtctcgctgcggagagctgaattcctggcagtgatggtagagttggcttcacaagcctagaaaccaggaagtgggggcagggcactcatgtttactgagcacctacccatgccaggcgctgtgctgggtaatttatgtgtcacttagtcctcaaaaactcactgagtcgttaattttttttaaccctcattttctgatgaggaaactgagtgtgtggtgaagtaacccaggattcagaccaggccccgctgatggcccagcctgtgctctcccctccctatgccacctgcgaccattcgcagtgatgaggaccttgtacaagggagccaggagttgtgggggcactctagggaaaccccaacttttcttgccttcaagcttcttgcagtttttagtctatttggaggcaaggataatgaccccagggaatgtttttctctcccctttctcccgcccccaggaacacaccacatttggtccacagaaggactgacttctgattttgtatattacgtggctgttatcaaggaaagtaaagatgataaatgatcttgagaatctattctggaatgtgtgataactttgacattgaatgaaaaaggcaaaaggaaatggaggcaattcatcagcaaatttgtacatgtcaggatggagtggtacatcaaaccgttgtccaaattgccaagaatattcaggcaaaagacttggagtgtttctttgattgatttaacaatgtattttttttggctgggcatggtggctcacgcctgtaatcccagcactttgggaggccgaggtgggcagatcacgaggtcaggagattgagaccatcctggctaacgtggtgaaaccccgtctctactaaaattacaaaaaattagccaggcttggtggtgggcacctatagtcccaggctgaggcaggagaatggtgtgaacccgggaggtggagcttgcggtgaaccgagatcgcgccactgcactccagcctgggcaacagagcgagactccgtctcaaaaaaaaaaaaaaaaaaa

SEQ ID NO: 355 - DNA, 1812 bp, Homo sapiens
tttttttttttttttttttttgagacggagtctcgctctgtcgcccgggctggagtgcagtggcacgatctcaagtctgctttttcagtttcatctctacccacattattctcaatcctgaccacctcttcttacctcatttatggtggcttgtgggtacctaacactttctaaaggtgaaatcagagttcctttatttctctgggatccctattctcatgctttttgagctcagtttcaatttcatccagcaagagagcacatttttgtatgtgcagatggtgcaccttagattgctccccgtgcgtgtccactttttccccaccatttttttatatcccttgtccaaggaagatatcttatccacctggtattctccaaatttactcgtactgggaattgagaggtaatagtctccaggcatgtcagtgagaaggtctagtcaccatcccccaccacagcttaccattggcctctcaatttcctgtgaccaatgactgtctttccatcatcagaagctttaggggctggaaaaaggatgtcagagctcatcattcctactccagttaagatgcttaatgatcattagaaggtcatcattttttaactgcttccagtgaggttttattttgcatttctatttatatattttctttttacaatacatttaggggttacaaaggtagttttgatacatgatatattgcataatggtgaagtctgggcttttaatgtaaccatccactgaatagcgtatattgtaccaattgagtaatttatcatccctcaccgccccctcttcctcctacccttctgagtctccagtgtctattattccacactctgtatccacgtgtacacattacttagctcccacttataagtgagaacatgtggtattttaactttctttttctgagttatttcacttaagataatggcctccagttccatccatgttgctgcaaaagatattgtcagttctaagtgtgagttgtactgaggataccatcctaaagtggagataggaagttacttgcctcttggcaatgtattaccctttgtagcgtactccagctcaggaatttctaccctaaaccgttaaatgacattcactgttgtctgttgttttgtgtcatagcgtagctatttcatagtaaaactgtggctaagagagattgtttgcaatagtgcttcagtaagataaaggattgagtcagggaaaaaatgaatactgtttaattcatggaagatagggaaacgtagaagactcatgaaaaataatagacaagacagattttaagaaggtagaagagaaggatgacatcaaacaaataaaatatgtagaataagacagaagtaataggcaagtttatgttgttttacttgaatacatttagtgccaacataaacagattgctttttttttaatgctgtgctgcaatggaggatgatcactttgcatccagcctatagttttgtggttgatccgctaagttccctgatcgatgtacttaagcttaatagaaatgccctgtaatccaagcactttgggaagctgaggtgggtggatcacctgaagtcaggagtttgagaccagcctggccaacatggtgaaaccccgtctctactaaaaatacaaaaaatcagccgggcgtggtggcaggcacctgtaatcccagctacttgggaggctgaggcagtagactctcgtgaacccaggaagtggaggttgcagtcagccaaaatcacgccattgcactccagtctgggtgacaagagcaagactctgtctaaaaaaaaaaaaaaaaa

SEQ ID NO: 356 - DNA, 2012 bp, Homo sapiens
ttttttttttttctcctagtgctttctgggtccaggcaatcttcatttgagaaccactagtttacagcactctctgagccaaggaatttggagtcaaccagtgctcatctaggtatcaaaatggtggcaagccccaagtgcaactaacaacctacagaagacggaagtctaactttagtcaacactcagggagtggggatgaagaatgtagtcttcaaagctcctggccactatggaacactgttctcctgctgcaccctacatgctcacccctccatcgtcaaagcctcctcctcctggttctggaacaggtggtaaagcttttggaggccctgtgccaaccagtgctctccgcaccgttaatctgggaaccccaaatcaagatgctcgaccctcctgggattctgagaggtcagccctgtggcaccagaggctttctggaatgattcatcatattgtcagctgaaattctactgaagtggatgcccaagactagtttctcagtactgcagtatctcactcaatcccagtgatccgaaaatccatccatcctcccaggacagtctgactgtgtagctggttcaggaaaccaaaggcaagcgggggtcactcatccctccagagcctccagactgagaataaggaaaaaaatcgctaggtgcagtggctcacgcctataatcccagcactttgggaggctgaggtgggtgaattatgaggtcaggagattgagaccatcctggccaacatggtgaaaccccatctctactaaaaatacaaaaattagctgggcgcggtggcgtgcgcctgcagtccctgctactcgggaggctcaggcaggagaatcacttgaacctgggaggcggaggttgcagtgagccgagatcgcaccacaacactctagcctggtgacagagcgagactccgtctcaaaaaaacacccaaaaaaaccaacaaaaaaaaccccaaaaatcagctgggataggtcatgaggtcatgacaggccatcaactatttaagagatttttcaactaagaatataagaacatattgccataaaattttaaaatccctatattctagaggttctatctattttcagttgtatgctccttaaacttatctgtatttaggcttcccccaaaatgaattctaacagaaaaaaaaaacttcggtaaaaaaagaatccataaacactaaatattttaatacctttatttacctcctctctaacagaactaatcagcagcagataatatatttgttacgaagagaattaattttctagttaaacatgcacataaaaacataaaggtgacaatatttggcaatatatgacactaataaaggtaacatttattgggctatccactgggctaagcgcttgactcagatcacctcagttaatccttacagcaaacctataaagtaggtgctattcttatttccattttatagatgagcttataaatgaggaacctcattactgtaatttaatcttcaccaacccagaatttgagttcagtgtttactctggctattaaaaggttgaataagcaaattagaaattaaacgggatttcagaagatatatttaacctactagaaggtcgtacgttttaagacatactgaaaaacagatgctaactgcttccaacaggatgtgtttaggaagatcctgcctgacactataccacattaaaacacttgaagattcaaacttttactagttaaggttgagtgtcctctcactattatccccaatgactggtccaagttagtaaggtattattctacttctatgggtggtacagtatggtggatgtcagctgcggctcccaagttctatttccctcctaccctgacaaagtgtccagaactctacacacccccagcctccccacagcctggtgcaggagccagtctggtgcagaagccagcctgaggatgaactgacccagggaggaaggagtggagagattaaaaaaaaaaaaaaaaaaaaaaaaaaaaaaa

SEQ ID NO: 357 - DNA, 2032 bp, Homo sapiens
ccttttgctaagcgatctctatgcctgggatgccctttattccaggaggcatcaagcctctaaagaatgtctcacctcctctgcccaaaaatgatgcctttctgtaggctggtgttgttgcctccctcccaggatccctttggtgagtatggtgttcaggatgcaccaccaccacctctagataccttcaggcaacacagcccagttttaacctctagtatccatgaccaaactatccctgacacatgaggacaggggcctcttctggctgtcaggagcaaagcctgaagacttggagctgcaggactggaagaacagtggagccccgtgggtctcaccctttaaggatgctgaggcctagagatgggaagtgacttgctcaaggtcacacaattggatagtgacatagctagagcgcagagttcctgattccaagtcacctgtgctttctgggaccaaagaatgggcacctgctggagtccgggcagagctttctcagttgtattgctactccagacctcaccataggttggggtcccagtaggaaggctcagggtctgtgccagccctgtcggtgctgctcagaccttcatagcctctcttgtcattctttgttgccccttttctgtcaccagccaaccacatagccttgggaccagcctctctgggggaccagaagtagtgagagaaggaaggggataggcagctttgacaggtgctgctttcaattcctctgcaactcctcccccttttatttccccaatttaaacaaagattctgccaactgtggaaacttcagtccctcaggctggcagccatgccagtacctgcctgggggtggggggtgcctggcagccatgaagcaggctgaaaggcagaggggctccaggtcctgtttccagctcccctcactgcacatggtgaagctcgctccctccctccctcccttcccgcttttcccagagctaatacacaggtgctattattcagaaaaaaactggtcagctctagccaacagtgaggtttcttttcttctgccctaactattgtgtagcctcttatgctgaaatcggcttctgctggcttctccggctttcagagccctgaaacaaagagaaacaggatctgtccctacccagcacagcaaatggttgtagtaattgccaaagccctcataaagccctccggcttgaggagagagtgtatagtcatgggttctgcctctgtgcccttgctggccacttctcctctgccttctttcctggaactcagggtgtggggactgagcctgtaggggacagcatgccgtcttgctgtggccactcccaagtgtgccctcttccctctttacacatcaggtgtctctggcacaggacttggcactaagctccatgctgagacaccaggctatgtgggcccccaccttgtttcccagcctgcaccttagaagccgaaggtgctttcatcagaaccctaaaatggtcgttgaaggcgcctgggccgcagcccagcagtagttggagaggcaggcagagggcagtggttctcccaaataggagacctggggcctggccaggccagggtttgggcctaatggctttgactaaattacccccatcctccttgcccggaaaagggagagctagagccactcactgtcattctgctctgaccttgaagggggcggtgttggcctggcttctggaatggactgagtccatcgtggaaagggctgggggcaggaggagtggggaggggcactgcctgcggaaggtaggattagatcattagctcagtgacctcctaggtttcgatgtgctatgttctcatcctacagttggtttggtaatgatctgcaagtcccggagagcaacagcacagctctgcctgacgctctcattaaaatctatgcagccaagctcggcactttgtagcaccggccttgcgaagcctcctcagctcgggggccggggacccagtgagccgagaggccctctggctccacttatgcatatgcaccaaaaaaaaaaaa

SEQ ID NO: 358 - DNA, 3537 bp, Homo sapiens
tgatggaacttcagcttggggagatccaagcaaatacaactacaaaaatgtgaacatgtggaacaaaaacgtcccaaatggcaacagccgttcagaccagcaagcacaggtacatcagctgctaacgcctgcaagtgccatctcaaacaaagaggcaagcagtggctctgggccaaaatctatgcaagatggctggtgtggtgatgatatgccattgcctggaaatcgccccactggctgggaagaggaagaggatgtggagattggaatgtggaatagtaattcatctcaagagcttaactcatctttaaattggccaccatatacaaagaaaatgtcatcgaagggtctgagtggcaaaaaaaggagaagggaaaggggaatgatgaaaggtggaaacaaacaagaagaagcgtggataaatccatttgttaaacagttttcaaacatcagtttttcgagagactcaccagaggaaaatgtacaaagcaataagatggacctttctggaggaatgttacaagacaaacgaatggagatagataaacatagcctaaatattggtgattacaatcgaacggtcgggaaaggccctggttctcggcctcagatttccaaagagtcttccatggagcgcaatccttattttgataagaatggcaatcccagtatgtttggtgttggaaacacagcagcacaaccccggggcatgcagcagcctccggcacaacctcttagttcatctcagcctaatctccgtgctcaagtgcctcctccattactctcccctcaggttccagtttcattgctgaagtatgcaccaaacaacggtggcctgaatccactctttggccctcaacaggtagccatgctgaaccagctatcccagctaaaccagctttctcagatctcccagttacagcgattgttagcgcagcagcaaagggcgcagagtcagagaagcgtgccttctgggaaccggccgcagcaagaccagcagggtcgacctcttagtgtgcagcagcaaatgatgcaacaatctcgtcaacttgatccaaacctgttggtgaagcagcagactccaccatctcagcagcggccactccatcagccagccatgaagtctttccttgacaatgtcatgccccacactacacctgagctgcaaaaagggccatcaccaataaatgctttcagcaacttccctataggcttgaactcaaacttgaatgtaaatatggatatgaacagtattaaagagccacagtcaagactaaggaagtggacgacagtggacagcatttctgtgaacacatctttggatcaaaactccagcaaacatggtgctatttcaagtggtttcaggctggaagagtctccatttgttccctatgactttatgaacagcagtacttcaccagccagtcctccaggttcaataggagatggctggccacgtgccaaatcgcctaacggctctagcagtgttaattggccaccagaatttcgtcctggtgagccatggaaaggttatccaaacattgaccctgaaactgacccttacgtcactcctggcagtgtcataaacaatctttcaattaatactgtgcgggaagttgaccacctcagggacaggaacagtgggtcatcctcatccttgaacaccacgctgccttcaactagtgcctggtcatccattcgtgcctccaactacaacgttcccctcagcagtacagcacaaagcacttcagccagaaatagtgattccaaattgacatggtctcctggttcagttacaaacacctctctggctcatgagctgtggaaggtccctttgccacctaaaaacatcactgctccgtcccgcccacctccgggactgactggtcagaagccacccttgtctacgtgggataattctccccttcgtataggtggaggatggggaaattctgacgccagatataccccaggttccagctggggtgagagcagctcagggagaataacaaattggcttgttctaaaagaccttacacctcagatcgatggctcaactctgcgcactctgtgcatgcagcacggcccgctgatcacattccacctgaacctccctcacggaaatgctctggtccgctacagttcaaaagaagaggtagtgaaggcacaaaagtctctgcacatgtgtgtactggggaacactactattcttgctgagtttgccagtgaagaggagatcagtcgtttctttgcacaaagccagtctctgaccccttctcccggctggcagtctctcgggtccagccagagccggctgggctccctcgactgttcccactcattctccagccggaccgatctcaatcactggaatggtgctgggctgtcgggaactaactgtggagaccttcacggcacttcactctgggggaccccgcattattccacaagcctgtggggtcccccaagcagcagcgacccccgaggaattagcagcccatctcccattaacgcttttctttctgttgaccacctgggtgggggtggagagtccatgtaacagtgtagatgcagactcaccgaccgggacctcagacgcgagggaaaggagcactaagtggggctcgccgcctgcagccaggggccgcctgtgggaacagctattctctgcacattttccactttgttttccccaaaacatatcagtttgaatacttgaatcatgcaggccaatattataatgtgaaaaggtatctactctatttacactcccaaatagcgccatacatgctaaaccgtagagaatgagctcgcttgtgtctattcatcatgtttagcctttggattcttttttttttttccttctattcctccccaaccccccccccgcccctttttttctctcttgcaaaaccattttttgggctgataacgtatgagcttttccctttgcactgaatgatgttctctccgtctcatcggcagtatggggggcagctgtcccagtgtcaatgtttactcaagggtgttcttaggaggcgtgcgctctctactatgccttgatgttgcctaccttattgtggtatcgtggagtttaaaagatcaagttaggatgctgacttaggattattaatgaaagtgttgcaccagttttttcatgttgtaaaactaaagaatttcgctctgcagtttgaaaaactgtggccacagctgtgacttgcagcccacctgccacccaggacgggccctgcactttgaataggctttccattttgttttggaggttctcactttgaaccttcttgtttacagatttttttgtttgttttttgagaaaaaaaaatgtttactcttccatcatttaaaaaaaatgtaaaagacaaaaaaaaaatggaggatgatttaaaagatgctttctatctctgggaaaaaggagcagcatttggccatgttcttttgtttttctattcctgtcccaaatcaaagagcatggttctcaggaaaaccagttccccagtttaaaaaaaaaaaaaaaaa

SEQ ID NO: 359 - DNA, 3132 bp, Homo sapiens
aaaaaaaaagacatcaaaatcagtttctacaccacagtcaacaggttctgctgctactatgacagcattggcagcaacaaaaacttctagtttggctgatgattttggagaattcagcctttttggggaatattctggtctagcacctgttggggagcaggatgactttgcagattttatggctttcagtaatagctctatttcatctgagcaaaagccggatgacaaatatgatgcccttaaagaggaagccagtcctgttcctctaaccagcaacgtgggcagcacagtgaagggtggacaaaactcgactgctgcgtctaccaagtacaatgtcttcagacaactttctctggaagggtctggactaggtgttgaagacctgaaagataacactccttcaggaaaaagtgatgatgattttgctgacttccactccagtaaattttcttccataaactcggacaaatccctgggagagaaagcagtggctttcagacacaccaaagaagactctgcatcagtgaagtccttagatctcccttccattggtggcagcagtgttggcaaggaggactctgaagatgcactctctgttcagtttgacatgaaattggctgatgtgggaggagatcttaagcatgtcatgtctgatagctctttggatttaccaacagttagtggccagcatcctcctgctgcagatatagaggacttaaaatatgctgcttttggaagctacagtagcaattttgcagtgagcacacttacaagctatgactggtcagacagggatgatgcaactcagggcaaaaaactctctccatttgtcctctcagcaggaagtggatccccctcagccacctcaattcttcaaaagaaagagacttcatttggcagttctgaaaacatcaccatgacatctctctccaaagtaacgacctttgtaagtgaagatgctcttccagagaccaccttcccagctcttgccagttttaaagacacgattcctcagaccagtgagcaaaaggaatatgaaaacagagactataaagatttcacaaaacaggacctgcctacggctgaacggagccaggaggccacgtgtcccagcccagcgtccagtggtgcctctcaagaaacccccaacgaatgttcggatgactttggagagtttcaaagtgaaaagcccaaaatcagcaaatttgacttcttagtagccacttcacaaagcaaaatgaaatccagtgaagaaatgatcaaaagtgagctggcaacctttgacctttctgttcaaggatcacacaagaggagtttgagccttggtgataaagaaataagccgttcttctccttctccagctttggagcagcctttcagagaccgttccaatactctgaatgagaagcccgccctgcccgtcatccgagacaagtacaaagacctgacgggagaggtggaggaaaatgagagatatgcatatgaatggcagagatgcctggggagtgccctgaatgtcattaagaaggcaaatgataccttaaatggaatcagtagtagttctgtttgcacagaagtaattcagtcagctcaaggcatggaatatttattaggtgttgttgaagtgtacagggtaaccaagcgtgtggagctggggataaaagccactgcagtgtgcagtgagaaactccagcagttgctgaaggacatcgataaagtatggaataacctaatcggcttcatgtcactcgccacactcacaccagatgaaaactcgctggatttttcctcctgtatgttacggcctgggattaaaaatgctcaggagcttgcctgtggagtgtgcctcttgaatgtggactcgaggagccgggcattcaactcagaaacagacagtttcaagctggcctatggagggcaccagtatcacgccagctgtgccaacttctggatcaactgtgtcgaaccaaagcctcctggcctcgtcctgcctgacctgctctgaacaactcctctgtgaagcattgacttttttttttctgtgacaccccacggggtgacagggaccaataaatagaatgcgagcactgcacagttcgctttccctgaatcgatatgaagaacaccgcaagggacggggcccccgtcatccccacggccagtctgcaggacttcaggtaaaattgtcccacccaaactgcacgcggcaccagaagcttgctcacttatctctacttaagattttctgaaatacggaccacggctttcttgatctaaggaagaacttgctgctgcagtattgaaactgtgaagaactgacatttgaagaaaaatagattaccgttgcgggactagaatgggcgactgcttggagccagtgcttgtttttatctaggacacttactgtcctgtgaagtagaatacatttatctgcatttagtttgttaatgtctgaaatgaataaaaagaggaaattgcgattaaactgatgttctgctttttatggagaagattctgcccatctcccctggacagtagcaggcaggtgagggcagattttacccacttggttgtcacaactgaaccagttctctactccttcccttcacttctgtccactctcaagactttttcccaaaacatgcctgggcactctgcagccgtgaagaatgctcattttgacagaggcccaaatcctgtgtattaggataatatccttccccccgggagccttcgctgcaaacctgttctgccgcatgcaaagactgtgaccatggagttttctcagacaagatttggaaaggcagtggaatgaaatctctttgcagtggcctctctccaaatttccaaagatgactgcatagggaccaacactgcctgactttgcagtatctgtgagaaaaacctgaaaattaattcagggtgaaaatgtggagctctcggcctagtgtaaagtatcaagatgtatatttatgggatagatacatgacttagaagaagtagaagaaaattgtccagaaacagtactgaattttagatagaaaaggctcatgcttcctggagtagggaattgtctttgccatttaatgtgaatgcataaaattaggggaaaaaccaaaaaaaaaaaaaaaa

SEQ ID NO: 360 - DNA, 1849 bp, Homo sapiens
aaatgtagccaaggtttttacaaaggggaaaggaaaagaaaacaaaaacgcaagctccatgtgtatagctgaacttttatatgtttcttgccagcccctccgctcccttccatctctagcctctgtcctgtttagtttgatacgtcactgcagtaccttaagaggtgactcttaagaatgcatcccctcctgattcctcagctggttcacccttgaggttatttgcaaaaagaaaaggaggttcttgagggcaccgattgcgagcattctggtgcctggctccccgcctgggaagcgatggggtgctcagagcagcaggcaggttgggggagggggggggtcatagttgggttccagctcctggcttgatgagcccagggcgcttacaggcagcccatgaagttgatgacagttttagcatgagaatcacacagggtccctgtcctgggctcctctaaagccagtggatgtgctgggcaccagagacaaatcatggagatggctgctggtggctcccaggttggcccagatggggtgagctgacatactacaggcccatcccaggccccgtgggctctgcttctggggctccataccctgccctgcaggggtgctgtgtttttcacacatttctttccctgaagccttctgtaacctgtcattttccttccttcctcttccggagcctgctgctttctctggacctgtctccacctcccacacagctcatcgtgaacaccacttggtgatggagggagtggacccgtgtgtggtccccaagtgaggccactgggagtttgtccttttcctcctttgcttcactcccagcagcagacccaggttgtcaggacaggagggcctgagctaagcagtaggcatcagtctcgtttgtcttcagacggcgggggcaggtccagggtgaggctgggtggagggctgaccaaggtccaaagggcctgcgcagcctccgggagggcagcttctccagccagaggcttgtgtgagccatcgtgtgctgggcttgtttttaagtaagaaacaaggaaatcactccagattctgtcattccaaggaaagggaaggggacagttcaggtttctcagctgttcttaggggtcactgagcgtctacctcctcctccagaggaggctggctcagaacacctagaggagggggccggggatgcaccccccaccagaggctgccttcagcgtctcacgggtgcaggacagcgctcaggcttgggctctaagctctgtgtctagtgtagaacatggggaaggagcatcttaggaactgctgaagtaacttcttactgctctcacaattctaaggaagcgggagaacggcctcctaccaacagcgcccaccccagagctgcctgggaaagggcagttttactgaaaggtgctttactgttcacctgcatctttcagcagctcccctcctgccctcacctggtcttttccctctttatcccaagcctttatgcttgagtcccttccccaggggctgcccacccgacagttccaggcattccctacctgagcttcttgtctgcttttccttctcccactgcaagcggctgcttgtggggcctgggatgagccctctctgtccccaccggccctccttgccaagccattcctgggtgagttcaggcctgcgggagccacacattcatctccacctggacacttgagccgcatggccagacccctctcacctgatgcggtggtgcgtgtgatttgtcaaaagaaagccttctggatgctgttaagatgtacccttcaggtgaacctggtatcagacccacagtacttgctgtttgagaaaaaaaaaaaaaaaa

SEQ ID NO: 361 - DNA, 2149 bp, Homo sapiens
ttttggcaactacactgctgaccttgtgctgagctcagggagggaggtgcagcatgcagacagggcccaggtaggggtgcagtggctgacagacttctgtcttggcacagccattaggctcaggcccctgtgtgcgggctcaggtccctccttcatcacagggtggtattggcaccagcctgggggagcagttcatggggctgggtgtgctggaagagacatgctgagaagttagggaccccaggttctctctgactttgttttctgtttttattttgctcacatagatttgtgagttgttaaaaaagaagggctcctggggccaagaactcggaagaggggtggtatttgggaaaaacagccccatcccccttgggtgccgtggcctggacaatcccagagcatcagcatacctgagttcaggattgagcccattatggccgagagaggccctggtccccgtctcaggaaagttgctccgaggctccaggcgctctaggaaccagaaccctgggctccacagcagggccaggtgtctcctcaggtgctgcggtctcatcttagtgccacctcagccagtgtacagccttgggcaagtcacgccccctcctggagactctgaaaatggaacagaaaggtgtggtcatctgtgtgttcctctgtgatctggaaatgctacaacctttgcttctaaggcaggtagtagccaggcatggggacggggcttctgtcagctcccctttgattttgtagacctctggctcttagcaaagagatgtcctaggaaggaagggcagtaccttggtgatcctgtcttgcacatatagactggagcttcagcccattctcacctctccttcacctgagacctgtggctgcagaaccagaaactcacttccagaagcagcagaatgtctctctttccacagggctcagaagtatgtattaagccttccattaactgcatcttactcagctggaaaaataatactcaggatgcaattttatctgatttctggcctgtaagctcctgaagggttctcttaagaaaggctcaaaaaactcctgcgctgtgtgactcggagcccagccctgtagcctccctccaaggagcaggcagcttcagtggttgaccagcaagcccatcatcattcagcactactgggttatccatctgtccgtctgtcaattaaacaagtgcttatgagggcctggggccaggggcacataccgagattactaagactaaataagacacagcgtgtgccctccacagcagttcaggcgcaacctgaccactttctctatttggttaaactccagaaagttcttgactttattattcgcagttcaaaagcagcatgagcttttgtgtctgctccccttcacccactaagtgtcatgacgagcaggcagaacgcccatatagatgccacacatgctatgggttacgatataggacaggaacaccgagcttgggggatccaccatcttgtggcagacagcaagcaagccagctttttgtctcagagggaaacattacctcatgtctcaggattggttgctgcaaacccaacccaggtacagagcagtcagagccttgcattctttgtctacccagcaagatgtgcaggaatgcaagaaactcatggagaagtgtctccaaacaatgcattagcattgcacatgtctggatttgaatcctacatctaacaatttaagtgcgaaattaagtgcgaaattgggtaaattgcaatggctgaacttctcagcctcagtttcctcttctataagatggggataatgcctactttccaggtgactgtgaaagagagtgtagggtcactcgtctgggaacacagtagtgaactaagaaagcccttgagttcaagaaacttagttgcacggggaatcctttcagctatgtattaagtatgcaatgccagttagtcatgtgtgtggaaaagaatagaggaggctgggcacggtggctcatgcctgtagtcccagcactttgggaggctgaggcaggagaattgcttgaacccaggaggcacggaggttgcagttagccgagattgcgcccgtgcactccagcctgggcaaaagagcgagactccgtctcacaaaaaaaaaaaaaaaaaaaaaa

SEQ ID NO: 362 - DNA, 1706 bp, Homo sapiens
gctctcgtcgcccccgctgtcccggcggcgccaaccgaagcgccccgcctgatccgtgtccgacatgctgcgccgcgctctgctgtgcctggccgtggccgccctggtgcgcgccgacgcccccgaggaggaggaccacgtcctggtgctgcggaaaagcaacttcgcggaggcgctggcggcccacaagtacctgctggtggagttctatgccccttggtgtggccactgcaaggctctggcccctgagtatgccaaagccgctgggaagctgaaggcagaaggttccgagatcaggcctcctcggagaagcttgtcccccgtgtgggagggacggagccggactggacatggtcactcagtaccgcctgcagtgtcgccatgactgatcatggctcttgcatttttgggtaaatggagacttccggatcctgtcaggggatgatgacgatctcgaggacctggaagaagcagaggagccagacatggaggaagacgatgatcagaaagctgtgaaagatgaactgtaatacgcaaagccagacccgggcgctgccgagacccctcgggggctgcacacccagcagcagcgcacgcctccgaagcctgcggcctcgcttgaaggagggcgtcgccggaaacccagggaacctctctgaagtgacacctcacccctacacaccgtccgttcacccccgtctcttccttctgcttttcggtttttggaaagggatccatctccaggcagcccacctgatgagccaggagctgccggaggactgggacaagcagcctgtcaaggtgcttgttgggaagaactttgaagacgtggcttttgatgagaaaaaaaacgtctttgtggagttctatgccccatggtgtggtcactgcaaacagttggctcccatttgggataaactgggagagacacggcttcccccaaggaatatacagctggcagagaggctgatgacatcgtgaactggctgaagaagcgcacgggcccggctgccaccaccctgcctgacggcgcagctgcagagtccttggtggagtccagcgaggtggctgtcatcggcttcttcaaggacgtggagtcggactctgccaagcagtttttgcaggcagcagaggccatcgatgacataccatttgggatcacttccaacagtgacgtgttctccaaataccagctcgacaaagatggggttgtcctctttaagaagtttgatgaaggccggaacaactttgaaggggaggtcaccaaggagaacctgctggactttatcaaacacaaccagctgccccttgtcatcgagttcaccgagcagacagccccgaagatttttggaggtgaaatcaagactcacatcctgctgttcttgcccaagagtgtgtctgactatgacggcaaactgagcaacttcaaaacagcagccgagagcttcaagggcaagatcctgttcatcttcatcgacagcgaccacaccgacaaccagcgcatcctcctcctgtcgtgggctcattgtgaccactggcctctctacagcacggcctgtggcctgttcaaggcagaaccacgacccttgactcccgggtggggaggtggccaaggatgctggagctgaatcagacgctgacagttcttcaggcatttctatttcacaatcgaattgaacacattggccaaataaagttgaaatttt

SEQ ID NO: 363 - DNA, 3024 bp, Homo sapiens
atgcccaaaagttatttgggattagagcatcacaatgggaatacacatgccatagtaaaccatgtgcttattcagggaggtaaaggcaggcaggtttttaaaggaaaaaatgaggattacataattgttttggaaataattacccttggctacaaagatcattaacaagggtaatgccagttcaagtttgcacaggcagtttgctgggcagatgtccttgtagaagtattttttgtataaggtttaatggcctttgtgcagggttgtgttttttgtagtcttttttgttatcaggcatacaagcatgagaaccttattttcatggcctttcccagctctgtcaggattttcttcacattcatgatttaattttgattttgacaactttcgtagttattccattaacttgtaattgtatgtgagaaaatactataaagaaggaattgggctggtctgagtgcagtggtcgtttacatctaattgatcacaaccagttacagatttctttgttccttccccactcccactgcttaatttgcctagcttaaaaacaaaaacaaagaaagaaagaattggttaagcaaatattcaggaataaaacttcatgtgtcatcataaaagtaactttaaaagcaaacattttaaatatacattttaacataagtttgaggggacttatctttttcaatctgacaccgatctaaatagtttttgcttcatttacttatttatgaatgaatgaacaagacaaggtcttgttctgtcgcccaggctggagtgcactgacaccatcatggctcactgcagcctcaaactcctggcctcaagccaccctcttgcctcagcctcctgagtaactggaactacaggcatgtgtcaccatgcctggttaattttttttttcattttgtatttttgcctagttaattaaaaaaaatttttttaagagacagggtcttgctatattgcccaggctagtttttacatctttaaaactgaatacttagctgggtgtggtggtgcacatgcctgtggtcctagctgttcaaaaggttaaggcaggaagattatttgagcctaggagttctgggctctagtgcactatgctgactgggtgtccacattaagttcagcatcagtgtagtaaactccaaggagctgggagccaccaggttacccagggaggggtgaactagcccaggttagaaatggagcaggtcaaaactcccatgctgatcagtagtgggatcatacctgtgaatagtctctgcactccagcgtggacaacatagtgagacctcatcactttaagaaaaacaaaccctgaatattttaagttagagatggagttagaaatacttttagttatagcagaatcatgtcaatttttagtacatcttttacttagctttttgcacacttttttttttttgagacggagtctcgccctgtcccctaggctggagtgcagtggcacagtcttggctcgccgcaacctccgtctcccaggttcaagcaattctcctgcctcggcctcctgagtagctgggactataggcacccaccaccatgcacagctaatttttgtatttttagtagagacagggtttcactatgttggccaggctggtctcgacctcctgacctcgtgatctgcctgccttggcctcccaaagtgctgggattacaggcgtgagccaccatgcccagcccctgcactaattttttaaacaaagtcctgttggtgctcccttcaaaatttatctccagtctgaccattttaccacttctgcaacaacccttctgactcagccactgttctgtttggtttgggttacatagtggcatcctacctggtcttcctgtttccactcttataccactagaccatattctccataaaccaccagagtgatcttttaaaataaaagcataaattatgttcaaaaccctccagtggcatccatctcatgtaaataaccactccttcctacaagatgccacctcacctgccccgactgcctcatgatagttccctctgcacaatgcccactttgccacagctgtgtgctcctgctggctcttggatgagcccaccagtcacacttctgcctgagggccttgcacatgctctggttgctgcctgagatacttatccccatcactatgatcaccttcccagagaggcatttcctggcctccctatttcctcaccaccatcatttctgtctgctgactctactttgtctgttggttgatttttgcactaagcgtactaccagaagctttcctctcaatttgctttcccacagtaaaagagcagggcctttgccttgtccattagtttctcctcagaacagtgcctcccaggtgttcaacaaatacttgctaaataaaagatggctgatagcaaaaatatttatgtctatgtatagggacttagtttttattgacattgtgcttttattccctagagaccctgaaatatggcgtctggcctgcttgaaagtttggggcagaagctgtattaaacttgttccgtacacgtcctggagagagatgtttttagaacggcctcgtgttcggtttgatggtaagttggattctgtagaactcagcagaaatactgatctataatgctgatttttataaatacgccgtttaaattttctgtgatgaatgtgagtactgtaagcatgtttaaaggaaaccacagtaaatataatgccgggaatatctgaatattataatttttaactttttaaaattattttcataggcgtgtatatcagtaaaaccacatatattcgtcaaggggaacagtctcttgatggtttctatagagcctggcaccaagtggaatattacaggtacaactgtagtacactgagtgagtggaaaattctctctctccatgtattagttaaatggacatctgttctttgttgcttttgattgacccgcaaaatggccctcagtatttttatctagtactcaatgtaggaattgcactaaaaaaaaaag

SEQ ID NO: 364 - DNA, 3517 bp, Homo sapiens
taaactaggcctctcttcaggcatcagaaccaaattagagtgctttatacgtgcaaggaactaatgcagaaagacattatgggtaagtcaagggagatgccccagccattgggcaaattcctctgactcctccctgatggaactaattctttttcttctgtgcccggatcctagaatcaagattcttaaggtctgagtacaagttccgcttcaggatggcgctgctgcacagcagggcaccttgcagggccccgaccagtccacaggtgaagatatcctggcctaggaggcaagagcagaggcccctgagcgtgcacccaggcaggcccaggggagggtggggccttggtgctcttccctccacatgagggccacccagagctggctccaatcagacaggggccacagcctgcccaggcagccctgctcaggggatgggaggctgcaggggacagcagggcctgagggcaggaacagaggacgttgggcgacaggggcccagggtctcaggtcctgacaacatggggcagtgagtatacctgtcagatagaggttggggatggggctctgggccctcaaggaggccatcacacaagggtgcaggcggcccaggtcatggtcagccccgtagcaggcacctcggggagcagccagatagaactggttggtgagtggggatcctgcagtcacactctccacctgagggcagaaagggtggggcaggcatgtgagatcctggctcccctccctcttccgctctttcccattcactgactgcagggatgggtgccctgtccttccctggggctcatgtcttggggcccaattcccctgtctcaaggaaagggcagaaatagcaccatgaggtccgtcaccaccccaaatactttaccccctaccttcccctccagctgtgggaacagtttcaggaccactgacatagaggcttccacaaaggagtttttgaaggtctcatagtcactgccctactttcccttcagttccacctgccactcctcaaaccactcgtaggtgctgggtatgagcatgatcatggtggaccggcctggggatcagagctgatattactactgcccggcctctccctccaccccctcacccaggacgtgcaggcccccgtgggaatcggtcctcccaggtcggatccttggctgatgggaaagcgaagaagagaagagggatgtgttccgcagcctcttccctgggcatggagatgtagcgctccatcctgcgtgtgacaagagtgtggtgcgatctccaggcttttgtcctcaaaaccccagaaccactgcaaggactgctcgtccctagggactccccacaggggtgaagctgagccacagccttggtgtgacaaacttccaggtgcaaattggaaattgcctacttcctcccattccataacttctgctcgttctctgagtcaagcagggaggcacgggccacacacacacgtgcaccttacgcctggtccatgtccgtgtcatagtaaacatagtagttggtggacggcagatgcaggtcctccttggtgcctcgcaggcagatgaaaacagaggtcatgcctaagccgggctgaactgtccccagctgctgcttcacacctgcaaaggggagtggttggtgcctttgtggaccatggccggagacagccactccctgctcccaggagagcctcagggtgaccgctcgctgtgtcctgagccttatcttcagttgccagctttgtgcccaggccacttttacagctgtttcaacttgatgttggcaggggcctgctcttctgtgtcctcctgcctgggaaggacactgccccaggttcctattcttccacctcccctgcctctgctccaagccccttcagaggcaggtaaagcccagccctggtcctcagcccccatgagctggctcagcacctgcaggaaggtcaagcttactgcctcccatcttccccttcgtgtcttgaagtgtggagcacatgactgggttccccccatgaagaccacacatgaacagcagctcattaccagcctgatttcaggatgaacttttatgcagtcacggagtgagtgaacatgcatgattcttagtgtgacatcagaacacaaggcctccagagggatgccaatgcatgtgagcaaaggcaggcagcctgactggtacttggcatctcaggactcagctggagggaggagggaagaactacactatggcagaggccacagccactgtggggcacctgatgttccccagacctaaacagctgggcttccccactcctcagcagatgacctgagaccggtgttccggaaactgcccccacagattcttctgctgtcttcccattcccgtgccagagggatgccgggtccctggctcctctgctttttccattttttaaaaaatttatttatttttagatggagtcttgctccgtcgcccaggctggcatgcagttgcgcgatctctgttcactgcaaccgcctcccgtgctcaagcgattctcctgcctcagcctcccaagtagctgggattacaggcatgtaccaccacacccactaatgtttgtattttcggtagagatggggtttcaccacgttggccaggctattttcaaactcctgacctcaagtgatctgcctgcctcgtcctcccaaagtgctgggattgaaggcgtgagtcaccgtgcccggcctgcttcgttcatgtaactaaatatttgtgaggccctcaggttgtgttcaggaggaagagacacaggaacacagatggagggcaagagggacagatggctctagctgggctgcctgggtgagatgctggggcctggccaggacagtgtcagttcccagaggtcctgggacaggggagaagggaggtcagggtcacagagagagaggcaggaagtagcaaaggcagagtctgcctgtgcaccaagcccgacccccctgctctgcccctgggccgtctctacctcaccccctcagctcccccggtctgagagaggggaggccgagcaggctgcagacccagccacatggggcaggggaaggagaggctggcattggtggagccacccactgcactgccagtcatacaaagaagtctatcacacagaattatgtgcagtattttttttttttgagacagagttttgatcttgtctctcaggctgggttgcaatggcacaatctcggctcactgcaacctccacctcctggcttcaagcgattctctggcctcagcctcccgagtagctgggactacaggcggccgccaccatgcccgggtaagttttgtatttttagtagagaggtttcaccatgttggccaggctggtctcgaactcctgacctcaggtgatctgcccgtctcggcctcccaatgtgttgggattacaggcgtgaaccaccgcgcctggcctatagtactttttaatgaacgaaatgactatgttactggtttatgtatttgctatatttttattgttttaaac

SEQ ID NO: 365 - DNA, 72930 bp, Homo sapiens
gatccaatccactgtttgctatctcagtggccttgggtaagtcacttcacctctctgggccttaatttcatctgccaagtgggagttatgatgatagtacttccctcataaatcactgtggggggccgggtgaggtggctcacacctgtaattccagcactttgggaggccaaggcaggcagatcacctgaggtcaggattttaacaccaggctggcaacatggtgaaaccctgtctctacaaaaatacaaaaatgagccggacatgatggcgagtgcctgtaatcccagctgctagggaggctgaggtggaagaatcacttgaacgcagaaggcggaggttgcagtgagccgagattgcgccactgcacttcagcctgggcaagagagcaagattctgtctcaaaaaaaaaaaaaaatcactgtgaggataacagatgtatgtagcatttaatacggtgttttgcacaagtaaatgtatacaactttttttttctttgagacggaatctcgctctattgcccaggctggagtgcagtgacagggtttcaccatgttggccaggctggtgtcaaactcctgacctcaagtgatccacccacctctgcctcccaaagtgctgggattacaggtgtgagccaccatgcccagccacttctcaacttatgtcccaataaacccatcatacgttgaaaatattgtgagcagaaaatgcatttgataaacctaacctaaccatcatagcttagcctagcctatcttaaacatgctcagaagacttgcactagccttcagttggacaaaattatataacacgaagcctatttttaaggtttccaaggatggacccaagcacccattccgaaacccctttccaggattactgcaaattcccgggaggctttatttctcctgctcccgttcctacttcagtctgtactatctttggtcagcactataccaaaacagatgtaaaagttggccccttcagctgtttccaccaacactccagtcagggcagcccccgtgaatatagatctttcttgaatatttccagggataggaggcagagacattcacatcatagctataaacctcagggtgaacaaaaacaaaaacaactcccagtttccaagacagccttttctactttcctccacagcccccggcctcagccacaagccagctcctgtctcctggtaaaggaaatttgcctttggctattcattccactctctcttcctaaggacctctcagatttctcttccaggcattatcccactgtgtgaagcctcagggttgggggcttggctttctctcctatctccccatcaccaccatcatcaagtgaaagccttacagggctcctctttggccttcatgtagtccgcacaaggataggaggaaacatttgctgtcattctggccctctctggcttcctgctgtccacccctccccagaaccctcgggtcctgcccatttcccaaatccagtcctccagattctggtagaatctctgagccctcagtagcttctcagtgtatgtatgaccttttgcttaaaacattcagagccactggggaacatatccaaatctaagttctcttcttcttcttcttcttcttcttttttgaggcggagtctcactctgtcacccaggctggagtgcaatggcgtggtcttggctcactgcaacctctgcctcccaggttcaagcgatattcctgtctcagcctcccgagtagctgggactacaggcgcgtgccaccacccctggctaatttttgtatttttagtagagatggggtttcactatgttggccaggctagtctcaaactcctgacctcgtgatccgcccgcctcggcctcccaaagtactgggattacaggtgtgagccaccatgcctggccttctcttctttgttgcctccacaacagctgcctctcagacattcaagacctttaccctggttttccaaagcattttcctaatgaaagccatcctcttctctaagggtggaggtaatgcgctaagggtttatgacatgcatctggctcacggctgtttttaaaaaatcaaatcaacatttaaaaattgatggattacacataaaagtccggatttgtggcttttcttataaattcagaaaatctggcatcataagacccacatttctcccaaggagcatattggcctaaatgaagagcggactccctgccctttagacaggtttttcctttcttttttctttctaaatactgtacttcatgccataagacaggtttttctttttcttttttttttctgtgacggagtctcgctctgtcgcccaggctggagtgcagaggtgcaatctgggttcactgcaacctccacctcccgggttcacgccattctcctgcctcagcctcccgagtagctgggactacaggcgcccgccaccatgcccggctaattgtgtgtgtgtgtgtgtgtgtgtgtgtgtgtgtgtgtgtgtgtgtgtttagtagagacggggtttcaccgtgttggccagaatggtctcgatctcctgacctcgtgatccgcccacctcggcctcccaaagtgctgggattacaggcgtgagccaccgcgcccggcaagacaggtttttcttatgcccctgatacaccagccgtatttctctctcctgcttgacttctgcaggctttcacctttgtgacctttgctaagcggcattttagtgccagtttctaccctctgttgctttattataattaagtagggtctaggaattcgctaggttcacaaagggggaaaggggaccctacagcaagagcagtcgcaagtatgcaagtgatggctatccctggaagggccccgggtccagagggatggggtctcccgtgcaaggaggcggtgggactggtgagggtgaaggtgagtcttagttatgaaggatctaaatgctctctcatcgggcacggggagccagtgtggggtttaaggcagggcgacacaccatgagctgtaggtatgagaaaggtggctgggaagcttgcggggcagaatctattgaaaccctcccgctcaaaaaaaaaaacctctttaaaaataaaacaaaaacccctctccctctccctctccctctccctctccctctccacggtctccttccacggtctccctctgatgcggagccaaagctggacggtactgctgccatctcggctcactgcaacctcccggtctgattctcctgcctcagcctgccgagtgcctgtgattgcaggcgcgcgccgccacgcctgactggttttcgtttttttttggtggagacggggtttcgctgtgttggccgggctggtctccagctcctaaccgcgagtgatccgccagcctcggcctcccgaggtgccgggattgcagacggagtctggttcactcagtgctcaatggtgcccaggctggagtgcagtggtgtgatctcagctctctacaacctacacctcccagccgcctgccttggcctcccaaagtgccgagaatgcagcctctgcccggccgccaccccgtctgggaagtgaggagcgtctctgcctggccgcctatcgtctgggaggtgaggagcccctctgcctggctgcccagtctggaaagtgaggagcgtctctgcccggccgccatcccatctaggaagtgaggagcatctctgcctgacccgcccatcgtctgagtggggagcgcctctgccccgacgccctgtctgggacgtgaggagcgcctctgctgggccgcaccccgtctgggaggtgaggagcgtctctgcccggccgccccgtctgagaagtgaggaaaccctctgcctggcaaccgccccgtctgagaagtgaggagcccctccgtccggcagccaccccgtctgggaagtgaggagcgtctccgcccggcagccaccccgtccgggagggaggtgggggggggtcagccccccgcccggccagccgccccgtccgggaggtgaggggctcctgtgcccggccgcccctactgggaagtgaggagcccctctgcccagccagtcgccccgtccaggagggaggtgggggggtcagccccccgcccggccagccgcccagtccgggagagaggtggggggtcagccccccgcccagccagccgccccgtccgggaggggggagggggggtcagccccctgcccggccaggctccccgtccgggagggaggtggggggatcagccccccgcctggccagccgccccgtccgggaggtgaggggcgcctctgcccggccgcccctactgggaagtgaggacccctctgcccggccagccgccccgtccgggagggaggtgggggggtcagccccccgcccggccagccgcccagtccgggagggaggtggggggtcagccccccgcccggccagccgccccgtccgggagggaggtggggggatcagccccccgcctggccagccgccccgtccgggaggtgaggggcgcctctgcccggccgcccctactgggaagtgaggagcccctctgcccggccagccgccccgtccgggagggaggtgggggggtcagccccccgcctggccagccgccccgtccgggaggtgaggggcgcctctgcccggctgcccctattgggaagtgaggagcccttttgcccggccagccgccccgtccgggagggaggcgggggggggggttggccagccgccccgtccgggagggaggtgggggggtcagccccccgcccggccagccgccctatccaggaggtgaggggcgcctctgcccggccgcccctactgggaagtgaggagcccctctgcctggccagccgccccgtccgggagggtggtgggggggtcagccccccgcccggccagacgccccatccgggaggtgaggggcgcttctgcccggccgcccctactgggaagtgaggagcccctctgcccggccacgaccccgtctgggaggtgtgcccagcggctcattggagatgggccatggtgacaatggcggttttgtggaatagaaaggcgggaagggtggggaaaaaattgagaaatcggatgggtgccgggtctgtgtggatagaagtagacatgggagacttttcattttgttctgtactaagaaaaattcttctgccttgggatcctgttgatctgtgaccttatccccaaccctgtgctctctgaaacatgtgctgtgtccactcagggttaaatggattaagggcggtgcaagatgtgctttgttaaaccgatgcttgaaggcagcatgctcgttaagagtcatcaccactccctaatcttaagtacccagggacacaaacactgcggaaggccgcagggtcctctacctaggaaaaccagagacctttgttcacttgtttatctgctgaccttccctccactattgtcctatgaccctgccaaatccccctctgcgagaaacacccaagaatgatcaataaaaaaaaaaaataaataaataaataaaaattaaaaaaaaaaaaaaaaaaagaaaccctcccatcccccgctgtgtctgctggaagcccagtgagaggcaggggcagtggtccgaggacggctgccgccggatgagtggcaaaggcggtgggaacggctgggaggactgcaagggagggatttcggaggcagccttgtcaaagagtgggtatgcttgaccttgacagaaaacactgcgggagctgcggcagcaactcgctcgcctccgctcccttcccgtcccctgcgccgtagcggaccgcggcggaatcccggcccctcgccgggcgctctcccgcgcggatgcggcacgcgaggggcgggggcgggatggcgagggtggcggcactgcggggatgccggtcttccctggaaggccagggagggaaagggaggctggtcacatggcaccgccaccgggcgcagccggattggcgggttgcgcagccaagcaagccaaggctgctcggatttccaggcactaagcggccccctcccctcgttcgagtgcccaaggaaagcgctggccctgccccgggcaagggaagacgcgagccgtgctcgttccgcagtgtgaaacgcacggtatcgccgcagtcctagggaggtctgattattgggagcttgggacgtctgattattgtgtgggagcaattgtctgattattgtctcgggaggtctgattattgtctgggaggtctgattattgtctccatgaacacctctcgtcccccttcccttctctgcttttctcctgacttcccacacctgcccctctttctaccttacctacctggaggccagctttatttgcaggtttccattacttgctgtaatttttcagctttgagtaaatcaacctgctggaggtggcaaagattaaaagagaaatccgacagatgcctcaagtcccacacatccagccccacttatctccccaaaatgctcttctctgtctcaagcaaaaacctgagaaccatctccatctcgctgtccccaatcaaatctatgaccaaaacctattaaatttacctccaaaatatttcttacacctcacaccaagtatttttccttcttagcatctatcctgatttgtaactgtatgtttatttgtatgattgtttttgtaagggtttttcccactggattgtaagctccatgtgagcagtgaccttgtctgttttgctcattgctatatcaccgacactgtaccaggcacatagtaggtacacactaaatgttaattaattgattgaatgaatgaatccatgtaaaacaagtcctggggaggggcacagattttaagtaaaatacacagtttatctatccccaagaagtcacctatctgatgggtttggtgtcatgaagcctgtagttccagctacttggaagactaaggcaggaggattgcttgagcccaggagtttgaaactgtatcatactatgattttgcctgtaaatagccactgcactccagcctgggcaacatagcatgacaccgtctataaacaaaacaaaaaaagaagtcatctatccaacaaacatgtcctgaggtctttgctacacaaggccctggacagagaccagtgcatgcaatgagtaagtttccatttctaccttccctctttgtcttaagagtccacatgtcactaacccagacaagaccctgtggtattggaggtgccaaggatggagtcagagtccaggatttagaatatgatgagctggctgtgtgaccacaagtctcctctctctgaggctccatcttctcatcttgaaaacaggatagcaataccaagctcacatggctgttgagagcaatgaatgagataaatgaaagcatcaactgcgggttttacagcgatgttgggtgtaggtgggtgatcatatcttccagtttgcctggaacagatcaattgacacctgttaaactagagcaaattaatagcattccctttcatccctccaaatgtcctgctttggacagtaaagtatgtggataccctagtactacatgtaactctagagttatctacactgtaccctggggacacaaaggatggagggaggtgggtctgactgtagaaaggtggatggtaaccatggaaatgagcctgaaatatgcacaggattacaccaagtggagagggataggaagggcataagaagcagagggaccagcatttgccaagaagcgaggcttaacaatcctgggcatacttagttagataacataaagaaggccaaatggcttgagtccaggaggcatgcaagaagatgaggctttctgcagtgggaactggagaaagtttttgagtaggggtagacatgagccaatggcttcacaaaagagaccagttgaggagctggagccgaaattgaagcagaagagataatgaggcttgaacagggcagtgcatgtaaacccaggaacaaagggtgagattccataagcattttggagataaaacagataggacttcgatgtgagcatcagaggacaggtcagaggcaggaagacttccagatggataaagaggccactccctgaggcaggcagagagaggacaggccaggagacccagaaaataggaggtgacccagatcaggctgactaggcacagaagctcatgatccacagggaaaaatggagatcacatcaggtagaggtgacttctgaggccagaggaaggagctaggagcctcaatattcatgtgacatctaattaaaattagctttcaaagcaaccttgaagccaggtgctgtggctcatgcctgtaatcccagcactttgggaggctggggcgggtagatcacctgagatcaggagtttgagaccagcctggtcaacatggtgaaaccccgtctctactaaaaatgcaaaaattagccaggcatggtggcacacacctgtagtcccagcttcttgggaggctgaggcaggagaatctcttgaatctgggaggcagaggttgcagtgagctgagattgcgccattgcactccgtcaaaagcgaaaaagtgaaactccatgtcaaaaaaaaaaaaaaaaaaaagaggctgggcgtggtagctcacacctgtaatcccagcactttgggaggccgaggtgggcagatcacttgaggtcaggagttcaagaccagcctggccaacatggcgaaaccccatctctactaaaatacaaaaaaaaaaatcagccgggcatggtgattagtgcctgtagtcccagctacacgggaggatgaggcacaagaatcgcttgaacccaggaggtggaggttgcagtgagccgagatcgcgccattgcactccagcctgggtgacagagcaagactctgtctcaaaaaaacaaacaaacaaaacaacaacaacaaaaaaccaaaacaacaacaaaaaccttgaaaaagacaagagaaaactcaaaagtagagcctcaagaaagaaaaaagcaggttttgtagtccaatttcatggtatgtatggctctccttgatttaaactgtcccataatacctcatagactaaaggctgagctccttagcctggcactgaaggcttcctgtagctgggtctcagcctatctctgatgaacatttcatatttcatctgctcatgtttggcccctccctccttccttgtgaaagagtagctccttccttttggagaattgctcctccctttggtccagccatatggttcaggtactgcctatcaatcatagcattccatcctccatgaccacagatgtgggtatgcagccaaacctcaccaatcagacttgttctgaagaattttgagaatctggaacaaagggaagataattactcctctctggtgaggaagctaggacacataagctagggattctacagttccagcaagagagagaagtagactgaaaaaataaagtgggaagaagagggagttaatgcttaatggctatggaattccaagttggtaaaacgaaaaagttctggagatggatggtggtgatggttgcacaacaatatgaatttatttaatgttaccaaactgtacacttaaaattggttaaaatggtagattttatgtaatgcatattttaccacaataaaaaaaaaagaagaagctagcatgcagagaagcaaagatgaatgatggagtgcaggatctgggggctttcctgggtgcagttgctgtggtacaaagggttcaaaaggttatagaagccaaaaatcactcctttggcctagcctcattcaagttaggcttctggtccttgcatccaatggagccataatacagaacctttccattttcttttttgtttcttttcttttcttttttttttttttttttttttgagaagcagtctcacactgtggcccaggcttacagtacagtgacatgatcttggctcactgcaacttctgcctcccaggttcaagtgattctcgtgccttggcttcccgagtagctgggactacaggtgagtgccaccatgcctggctaatttttgtatttttagtagagacagggtttctgcatgttggccaggctggtctcgaacctcccgacctcaagcaatctgcccacctcagcctcccaaagtgctgggattacagcgtgagccaccatgcctggccagaacctttccattttcatttctcactcatgtcctttcaaacattctcttctcctgtcaaccctgctgctcatacttcctcagacttatcctgtgtttatacacactatgcctttcctccctgctccccaagcttggaatgtccttcccccttcttatgactttgtcaactcatattcatcatttgagatccagctgaaagggctcctcctcaggaaagccatccctgaccaccctaagcagagcctgccatgccttctgttggtctgtcatagcttttttgtatatgtcctcatcacttggtatctcagtgatctgccatcttgtctgtaacccccagtagattatgtttttcatctccatgaccctggtagctagcaaagaggctagcacaagtaagtataataaatctttactgaatgagtgtacagatgagtgagaatctttttctccctcatgccatctctgagtcactactcagtttctatcaagaagagacacataaggaaacgtgggaggaattgctttagtccctttattcaagggtgatagtctcaggagagaagaaaacacaatcaagttggggccactgcaaagtctagtggcatttaagagaagttattttccccaaagcactggcagctttgaactgaggctgaatttgtttggaagccagagccaagacaagcagacatttggtagtgttgagccttccagcaagctgggattctgacagccgtttctgtcagctgcacaaggagaagcatctaaaaggcatctgggtctacctggaattgggggtccccatatcttttagcacaatctgacccaaggaacaaggcagccgtctctcctaccctccattcccaccataagcatatacctcctctaagggggctctgcagttgattaggacgttgggcactgagaacagagtcaaagatgactataggaaactgtggcagagatgatactactgcttactaaatggcttatggtttcttcctacatttcccagcctcccttgcagtttttttgtttgtttgtttgtttttgacacagagtcttgctctctcgcccaggctggagtgcagtggtgtaatctccgctcactgcaacctctacctcctgggttcaagcgattctcctgcctcagcctcctgaatagcagggattacaggcgccccaccacaccccgctaacttttgtatttttagagatggggtttcaccatgttggccaggctggtctcgaactcctgacctcaggtgatccacctgcctcggcctcccaaagtgctaggattacaggcatgagccaccgtgcctggcctccagctctctttttgaggcaatactgaaagctttgcattgagatagtggagcccaagagagaagtagtctggatctctgagttacccaggagagttgaggagagctactctggagagtgccttaacccacagccagcgttgcatgagtggaaaagatataccattgttgtgtgttatgccattgagaaatttggcttgtttgttaccatagccaagtctagcctattctgccagataaatatagacattaattgttgttttagccatccagcatcaaacctccttcctatttgaggattaaactctccccctcctttaggactctttggtgttgccaaatccagtggtcacatctctgttcttatctttcttgatttctcagcagcatttgtcacaattgaccactcccttctgggaacatactatgttggtgtctgtgacatcatgcctgcttagtttttcttttatgtcactggcccccgcttttcagttttctttgttggctccccttcttgttttatgtcaaaagtttgaagttctggagacctggtttaaaatatcacagctggtttccaccttttgagacgatgtctttttgtgtcacccaggctggagtgcagtggcataatcacggctcactgcagtctcaacctcccaggctcaagcattcctcccacctcagtctcccaagtagcggggactacaggcacactccatcacacccagataatttttgtattttttgtagagatggggttttgccatgttgctcaagctggtctcaaactcctgggcttaagagattcaccagcctaggtctcccaaagtgttgtaattacaggtgcgagccacagctcctggcccatcttaccattccttattaataacagagcactcattgttagctgggcacattgtacccagttaagagaatgtttcccaggctcccttgcagctgagtatggccatgtgagtgagtatgttttggcaaaaatgtgcgggactttcgaggcagtccttttttctttctttctttttctttttcttttttttttttttttgagacagagtctcgctctgtcgcccaggatggagtgcagcggcgcgatctcggctcactgcaacctccgcctcctgggttcacgccattctcctgcctcagcctctcgagttgctgggattacaggcgcccgccaccacgcccggctaattttttatatttttagtagagacgggatttcactgtgttagccaggatggtctccatctcctgacctcgtgatccgccagcctgggcctcccaaagtgctgggattacaggcgtgagcctccgcgcccagccccaaggcagtcttcttaaaaggaagaggatgcatctttcttccctttttccttcccactgtttggaatatggaccatagtgaggtgaccttaacactggaagccaaatactgaggatggctgaacagccctgaactgcctacttttggacttatatttcatggaaagagagaaatttctggctaggtgcagcggctcatgcctgtaatcccagcactttgagaggccaaggcaggaggatcgcttgagcccaggagctcgagaccagcctgagcaacacagggagatttcatctccatgaaaaaaataaaaataataggcaggcctggtggcgcacctgtgctcccagctactccagaggttggggtgggaggatcgcttaagcttgggaggttgaggcttcagtgagctgtgatcacgccactgcactccaacctgggtgacagagcaaaaccgtctcaggaaaaaaaataaataaatttcaatcgtaagctatttttttcttttgttatttgcaattgaatgtaatcctgatacattcctgttgttgaagctgtttgcctgcctcccactaggaagcctaagggtccagatcctcccccagtcagaggaatggggaactagaaaaagaaaggcaaaggcactgccaggcaagaaaacgctgggtctccttccacaagtttggtaagtaagcaagataccaggaggatagaatggtaagtgagcctagaaatagactattatatacatagggtttattaaatacatagagaacactgaatgctagactaagaaatttggactttattctggaagtcccttgcaataggggaccttgtctgttttattttctaatgcctcgcactttgtagaagctcagtgaatgaatatattctttattaatttatgccgtctgcttaataaacagaaatgttggaaggtgaaccagttgggagtcaccatctgatcaacccctgcctgctttttataaataatgtaactgaaccatcatttactggaagtggcaatcaacctgtgaggaacggcaaaccaaaaagtccaccttgggtgtcatggtgatggaattggaggcggagaccagggagagcagcgggctaggatctctgagagtctccgcaacatggcggccctggaaccacctgaccggcaggaggcggagctccgccccagctcgctcggccccaccccgctcggccctgcccagcgcactcctagaccggggcgcaagggttgtgaggtgtttgagcgaagcgcctgcgcagggcagcggcgcgcggggcggaggctttataatcacttcgtcgttgccgctcggcttctatcgccgggagggcggttgaggcggtggtggcggcgtcggcggcggccgggcgctggctgaggggcgctgaggcgggagctgtggcggcgctgggcgcccctggctcctcggcctctgccggccatgggctccgagaaggactccgagtcgccgcgctccacatcgctacatgcggccgcacccgaccctaagtgccgcagcggcggccggcgccggcgcctcaccttgcacagcgtcttctctgcctcggcccgcggccgccgcgcccgggccaagccgcaggccgagccgccgcccccggctgcgcagccgccgcccgccccggcccctgccgcggcccagggcccgccgcccgaggcgctgcccgccgagccggccgccgaggccgaggcggaggccgcggcggcggcggcggagcctgggttcgacgatgaggaggcggcggagggcggtggcccgggcgcggaggaggtggagtgtccgctgtgcctggtgcggctgccgcctgagcgggccccgcgcctcctcagctgtccgcaccgctcgtgccgggactgcctccgccactacctgcgcctggagataagcgagagcagggtgcccatcagctgccccgagtgcagcgagcgactcaacccgcacgacatccgcttgctgctcgccgacccgccgcttatgcacaagtacgaggagttcatgctgcgccgctacctagcctcggaccccgactgccgctggtgcccggccccggactgcgggtgagcgcgggggcgtggcgcgggtggcggcgggctgcagccgaggggcgtggctgggggcagcagggaccccgcgtgggtgtcccaagcagggaaacccgcaaggcggcagcttcggcggggtggtaaccatcaggcaagcccagactagtggtgtgaacgcacccgacaccccgccccctgccccagggctcgaggtggctgctaagcattcggtgaggggaagggagctgtccaagttaggagacagggagaggcggtttttttgttgggggaatgccctctgtccggaggtgaggacagtatctttttttttttttctttttttttttggagacggagtctcgccctgccgcccaggctggagtgcaatggcgcgatctcggctcactgcaacctccgcctctcaggttcaagcgattctcctgcctcagcctcccgagtagctgggattacaggcgcccgccaccacacccggctaatttctttgtatttttagtagagatggggtttcaccatgttggctaggctggtctcgaactcctgacctcaggtgatcctcctgcctcggcctcccaaagtgctgggattacaggcgtgagccaccgctcccggccaaggtggggagtatctcttaatgagagtggggaggggatatttggccaaggagggaatgagaatattctgagggggcagcgcgtcggaggggtgtgtccacttggctagggacagacttagcattgcagaagaaggcgtgttctccctgacaaccaccgctgaaagttgggatggaggtgactggggaataggctctcgggtaccctgagcactatgtgttctgtgccacgctatcgggaggcactctgtcgttcttaccttgctgccttgggtagggtgaggggtagacagatatgttctttgtccagagtctcaatgggggcactgagaagaatgcccagaggttggtgtgataggagaaattgtgtttctgaacccctttgatcttgagttcttgatgacagtctttttaatgcaccatgtaggctgaattttaaagggcagtaaattaaaatatgcaatatctgcagagacataatacaccagattttgctatctgaagcattcagtggagaccttcctcgccctccccgcctttagaagtctaattgttactgtcagtatatcccatgaaggggttgcacgcaggaagaggggctcatttaagtagttgggagtcagacagccattacctgttctgtgaccttgggcagataattttattcttgtgtgtcatgttttggcgacaaaaagatgctggggagtccttgcagtgtgtaaacgtaatgctagtaaaaagttgtgtgatctttagcttcaaaggagttaaggacttttaattgtagcctatatatcaaggtggttttgaaatctccatgatgctgctggttgtctcctttcaaaaggagctgtcttagagtgtctaggagagtaagaagagttaacttctgtttttaattctgccaaacttgtttagaaatgggtgtgctatttaacctcactgagatggggtttctaaattactttgaagtgttgtggtcaaaggaatggtgtttatggtggctcactttcactttcagttaataagtatcaggaaggaccttttaggttcatggaactgtctatgtctagtgatcttactggccctctgaggttaatttatattaaagttttacagatactgttgatctgttttcttaaccaaacgaatattaagagaacacaggccaggctcggtggctcacgcctatagtcctagcattctgggagaccaaggtgggtggatcacctgaggtcgggagctcaagaccagcctggccaacatagtggtatcctgtctctgctaaaaatagaaaaattagccgggcatggtggtgcacacctgtagtcccagctacccaggaggctgaggcagaatcgcttgaacctgtgaggcagaggtgcagtgagccgagatcaggccactatactccagcctgggtgacagagcgagattctgtctcaagaaaaaaaaaaaacaaaacactgcatagttaattttggaatagtacattaactcctttctgagatgtttccttgagttctaagaaatgtggcagatcatctttctggaaaaggtccctgtttgtttttttatttttctaaagtcagtttctgtctttgctcacatcaataaaaatgcacagaaaataattttcaagcttggtgacaactctcaactatttggaagttattaaaaaattaggccatttcttattttagccaagtattatgttagtatcctccagattttatttttttaattagttagaagaatgataatcatatatatagttatatatataaacaatgtatttttttatatgtgtcatctacggacttaaggtggagtttggggaaagaagaaagctggcctctcaatacctgtgtgccaggtatatataatttaattcgatacaaccttgtgagataggtttaggtttgatatagttttataaatgaggaaactaaagtttaaggaaattgaatgacttgttcagggtcatataactagtaagtggtggaaccaggcttagaacaggggtcttaattccaaccaatgccaatattccttccattcagcccctgttttaaaaagcatttgcttgtcaacatagccgcattattgaggatgctgctgcttgggtgcatttcattaagtgtagcctgaggacaacatggagaaagccaaagatactagagtctagtttcctttctgattcctgttgttaacagcctcctacctacgttatttttcttatctgaaataggtctaattctttcctgacttgagaggtttaattaatgtttacacggtgttttgagatcttcagttgaaagtggttatagggagtaactttaaaattctgttagttgccaaatagatgcctgagttctcccttgggatgtgcctagtggctttgcatctctttttttttgagacagcgtctcgctctgtcacccaagctggagtgcagcagtggtgcaatcacggctcactgcagcctcaatctcctgggctcaggcgatcctcctgcctcagcatctcaagtagctgggaacacgggtgcatgccaccaagcccagctaattattattattaatattattattattatttgtagagatagggtctccctgtgttgcccaggctggtctcgaactcctgggctcaagctgttttcccgccttggcctcccaaagtgctgggattattgctgcctctttttaatgccaggaaaaaaaatagcttctgtgttcttactggatgtcatggttcccttgttttgttttgaacagtgttgttttgttttgttttagagacagagtctcactctgtgcccaggctggagtgcagtggcatgatcatggcttactacaaccttgaactccttgactaaagcagtactcccacctcagcctcctgagtaactgggattataggcacgaaccactgcacactgctcctttgttttatttttttaaacaaatcgttctattcttctggggctggtagaggtcattgataaacactagaagagaagtccaagtcccagttacctcctattcccatacctgaccatctttactgcccacagataaagttcttgccagccaaattgatcaggtctcccctctgccttgtttgtatgtgcatttggtagggtgaggggggcatgtgagcaatcttacaggttctgatcattagttttactataattactcataataacaagaacaccatacattcagagattcatgatttgtttacagaatatttgtaggatagagcaaagagttttggatttttcttctcttacactcaaatatggttttattttattcataaataagggaaccaatttcagtgggaaaacattcacattataatttttttttttttgagacggagtctcgctctgtcacccaggctggagtgcagtggcaccatctctgctcagtgcaagctctgcctgccgggttcacgccattctcctgcctcagcctcctgagtagctgggaccacaggcgcccaccaccacgcctggttaattttttttttttttttttttgtatttttagtagagacggggtttcaccgtgttagctaggatggtctcgatctcctgacctcgtgatctgcccacctcggcctcccaaagtgctgggattacaggcgtgagccactgtgcccggcctcacattattatttaatatactaagaacaatatggcctagtataatcttaaaacaagctgtcaaatgagataaaattagttcaaaatacaaataactgattttttatagttctttatagtcttcagactataatctcattcagacataatttcattttagtctcatccaggtggatattggcgtgcattttataaaggagaaaccagttcagagaagtttaaacatggggcctagtgtttcattgctaataattggtacaattgatcttttacgcttttgagtctctgcccaagtatgtcttttcagaaaccccgaagtcaggtaactgtaatgttttcctctcaagtatcctgttgctaatcttaaaaccctttcagaatctctaggagactgacgggtgagcaaagtaggcaacagaaaatttcctggtgtacaggggcagatcttctgtacagatgaataagaagggataaggctgtcttgacctaaattctttgtgcaggtccaccactccagcctttcattgctgcctctgtcctctgcagaatccttcctcccacctgatcccaggaaacagtatcagctattggccttcccagacaactagactggaccatcccataaacaggaagcttttttcatccctagcacatttatgagggaagatcaagcaagctctttgagcaagacaaatttcagtcagtgaaggaggatttttgctttctgaagcctccctgaacctcttctcttgatttggctccatacctcctgttccacaacttttccctgcattccccaactccacaccaccccctcctcttgtgcacgtacaccaacctccatcccaatacatctgtctcagatttgccaaagtacttgtactaaaggagaacatctgtatcactcccctgcctaagactattcattgactacctaacctataagatgagttcttattatgtctttgagaacttatttgatctacccttatcatttaagctcctttacagtttccaaccatcttttttttttttttagatggagtctcgctctgttgcccaggcaggctggagtgcagtggtgcaatctcggctcactgcaagctccacctcccgggttcatgctattctcctgcctcagcctcctgagtagctgggactacaggcacctgcaaccatgcctggctaattttttgtatttttagcagagacggggttttaccgtgttagccaggatggtctcgatctcctgacctcgtgatccacccatctcagcctcccaaagtgctgggattacaggcgtgagccaccacgcccggccatctccaaccatcttttgattttattttctatttttcactcacatcactatttcctaaggtatgttataggcattacttgaaagaaaaatgttttgtgaggaaataagcttggaaaatactgagttaaacaaaataaaacaagtttatgagtttcttaaatctttaaacatgctaatatgctaatatgtagtataaatcttcaatataatgtaatttccccaatttagatcaccaggaaacaggtttttgttttttctgtagcatctttaaggcttaactcaaactttccctaaactcctttaatagttaccatgctggcctgcctttggttagtgtccttatttaaccataaaccttatgctctgaatagattgagagctcatgtctctagactaggatatctatattccaaccatttctacaactctgtgtacaaagtctttcaattaggctctagaagagtgtggtacatagatgaattttgatgaaaaagataagaaatatgagcagcatagttctcagaggaagaatagagatgaaagagataagcaagaatagtatagacaggtgatcattcaattcaacagacaacttttttttgagatggagtctcgctttgtcgcccaggctggagtgcagttgtgccatctcagctcactgcaacctctgcctctcgggttcaagcgattcttctgcctcagcctcccaagtatctgggattacaggcatgtgccacaatgtccagctaatgtttgtatttttagtagaaacagggtttcaccatgttggccaggctgggcttgaattcctgacttcaagcgagccacccgcctcaccctcccaaagtgctgggattacaggtgtgagccaccacacctggcttcaacagatactttcagaatgatacactgttgaaccctgggtgagtactgggtatttcaaaaagaacttagacatggttttcttgataggaagtttcacctggtagaggagacagataattgatacatagatagatagaaaattattcaaatgtcatatgataaatactaaagaaaatacgggtgctcttagatagatgaaagaacaatagaatttgcatgatggtttcaagaaagacttcacagaggagcaggcatggtggtgtgcacctgtggtcccagctgcttaggaggctgaggtgggaggattagttgagcccaggagttcgagaccagcctgggtaatagcaagaccccatacctgggaaatgactagagatcaacctgaaaacgtggactggattcaggttgataggcctgtgtaagccatggaaataagttttgggttgaagcactttttttcttttttctttttctttgaaggattttaagcaaaagagtaaccttccagaatggaatttggatggagtggggaatagggagagcagataaggaggctcttggagttgtctagcctagagatgggtcttaaatagggcaggaaaaatgaagatgttaagggtacagttcattgtgacaagttggcgcatgtctaccaccctgatgcctactaggggtctatttgtaaatgggtagcctagttatgttacatgacttggggatggaaagtacagacataatataggaacacatttctttaaccactgaagtctattggagcataatcaaatttatactaatggaaatctctttccagggctgaagctaagtaatgctgtggtctagcttgtcactttatgaagtttctgaagatttaggaaattaataaaatgagtaaaagttgtatgaacttaagcagcaggggctggggtgggcggtctgtagtctttttcttttttattattttttatttttttgagatagggtttaactctgtaactctgttgcccgtgctggagtgcagtggtgcaatttcagctcactagaacctcaacctcccaggctcaggtgatcctcccacctcagcctcctaagtagctgggactgcaggcatgtgccaccacacgccaccgcgccccaccacactcggctaatttttgttgttgttgttatttgaagagagagtctcactctgtcacccaggctggagtgcagtggtgcaatctcggctcacagcaacctctgcctcctggattcaagtgattctcctgcctcagcctcccgagtagctgggagtagctgggactacaagtgcacgccaccatgcccagctaatttttttgtatttttagtagagaggggttttgtcaggttggccaggctggtctcgaactcctgacctcaggtgatccacccacctcagcctcccaaagtgctgggattacaggcatgagccaccatgcccggcctaatttttgtgtctttcgtagagatgggatttcaccatgttgccctggctggtcttgaactcttgggttcaagtgatcctcctgcctttgcctgacaaagttctggggttatgggcatgagccactgcacccagctgtgtctgtattcttcacagcatgtaattttctacacctttcttttagcttctgattagcaagcctgactgattggttaagctaaaagagcagagtaggagagatgcaccagcatgggacgtggaagagaaggaacaaagtggacagggcagattgggtttcaaggatgaggtattttcttttcttttttttttttttttgagacagggtttagctctgtctcccaggctggagtgcagtggcacgatcttggctcactgcagcctccacctcccgggctgtagccgtcctcccacctcagcctcctgagtagctgggactacaggcatgcactacaggcatgcaccaccacgcctagctaatttttgtattttttttttttgtagagatggggttttgccatgttgcccagactggtctcgaactcctgagctcaagcaatccacccaccttggcttcccaaagtgctgggattacaggtgtgatccaccatgcccaggcgaggttttttttttccaactattcgggaagaagattaccgtattcagaacttaggggtttaccactaaagtgggtttatatgaaattttaggattaggttatagtacctggcatataataagccaatagatacatggatacattgaaaagattgctttagagcagagtgatggcctaggagaagacctagaatgtcctagggaaggtcaaacaaccaaaacaagagagggtctctgtcattcatgcaacacaggtattttgagcatgaaccagtatactagactgagattaaaaagtggatgatatgtctccttaagtccagtgtggtttggaaggcaagcatataaacagttagttacattataatgtaagtgttataaaataattgtgcacacccacgaagtaggcaacgagctgcctagagaggttaagtatattttacagagaaaatgacacctgagttggttcttaaatgggtacttgtcagggcaagaagtaaggacaagacatttctaggtagaaggaatagagtatgtaaaagccagaaagtaggacagagtgtacgatgtttttacgccatatatctttgaggacaaggtctcacatgcagttttagaacgtgtttagctacgtttgaatgtgacaagtacctatacctccatttggtggaatagaagctaaggtttggagattgtttttttttttttttgagatggaattcctcttttgttgcccaggctggagtgcagtggtgtggtcttggctcactgcaacctccgcctcccagtttcaagcaattctcctgcctcagcctcccgagtagctggattacaggcatgcgccaccatgcctggctaatttttgtatttttagttgagacgggatttcaccatgttggccaggctggtcttgaactcctgacctcaggtgatccacctgcctcggcctcccagagtgctgggattacaggcgtgagtgactgcaccaggccggtttggagattttaatagcttcatgtcatgcagcatgagtcagaggcaagagctcagaccaggtacccaaaaacaggaatgccaaatctcgtgccctgagtaattctgtgtcgtagtaatagattgctgtggattcatgagtaatttggggttattttacttccttggcaccaaattacacactcaaaattgacattgttgatcctatccaatgttcttctttttcaagaaaaaaaaaaaagtgggctgggcacggtggctcacacttgtaatcccagcactttgggaggctgaggcaggaggatcacttgaaggccaggagttcgagaccagcctggccaacatggtgaaaccccatctctactaaaaatacaaaaaatgtagctgggcatggtggcgggcgcctgtaagcccagctacttgggaggctgaggcaggagaatcgcttgaacccaggaggcagaggttgcagtaagccgagagcacgccattgcactccagcctgggcaacaagagtgaaactccgtctcaaaaaaaaaaaaaaaaaaaaaaaagaagtgggggctgggggaatgttaataaacatttacttctgccatgtgaggtaggaatggatgatgaagtgttcaaggctccctactggatgtccacttaatttgtatctttagaagttgacttagtgcttttctgaggtcatccagtaactttcccatttaatgcaaaataacaagctagtcactgtcttgaggagacacgttgtttatctttagtagttattttgcagctaggtggggtaaatttgcccagaactcctacaggatatgaatcatttgcattcatagactgacctgttctcactttgttctttctgaaaagagttttaatacagcctgtattatataacataggggatacattgtcatttatattttcagcatcattctcaagtcaatttgcagactctatgataaacctgagaacttgagttgctatgattaacatctcatgtacattcaaataaacaagcaaactgtagaataaatcccagaaaatgttattagctttttgtacacgttatttgaggtctttgaatattgcgggagagtattggaatagaggacagagtgcagatggcaacacggaaacctgcaattactgatgtttttaaaaatgtgtgtcatagaccaagcttggtggctcacgcctgtaatcccaatgctttgggaggctaaggcgggagggttgcttgaagacagaagttccagaccagcctgggcaacatagcaagaccaaccctgtctctacaaaaaaaaaataaaaagaaaaaagaaaaagttagctgggcatggtggtatgcactggtacttggaggcctgaggtgggatcacttgagcccaggagtttcaggttgcaatgagctatcatcacaccactgtccagaagctgggcaacagagtgggaccttgtcttcaaaaaaaaaaaaaaaaaaaaaattgtgtgattaactttcataactttccatttatttatttattattttttttagacagaatctcactctgtcacccaggctggagtgcagtggcgcaaacgtggctcactggagcctcaacctcccagcctcaagcagtcctcccacctcagcctcccaagtagctgtgactgcaggcctgtgtcaccatacctggctgatttttttttttttttgagatggagtctcacactgtcacccaggctggagtgacacccatggtggcgcaatctctgctcactgcaacctccacctcccgggttcaagcgattctcctccctcagcctcctgagtagctgggattacaggcgcccgccaccatgcccagctaattttttgtatttttagtagagacagcgtttcaccatgttggccaggctggtctcgaactcctgaccttgtgacttgcctgcctcagtgtcccaaagtgctgggattacaggtgtgagccaccacgccaggctgttttttttttttttttttttttttttttttaagagaaaaggtcttgctgtgttgcccaggctggtctaaaaatgctggcctcaagcgatcttcctgcctcagcctcccaaagtgctgagattacaggcatgagccatctcacctggctaaaatgttattttatacaagtattatatttcttgttagagtaatctgagcgcttaattgacatatttggaattaatcagaaaggctaatagttatataaatatattggattgtttgtgtgagactaattcttggtaaatgaacatgaactacaagaaatggtcgacattagtgctgataaattctgaatctttacatgaagaatatgtgtcacagctgagtgcagtggctcacacctgtaatcccaacactttgagaagccaagacaggcaaatcaccagaggtcaggagttgaagaccagtcttgccaacatggtgaagccctgtctctactaaaaaaaaaaaaaaaaaaaagccgggcgtggtggcgggcgcctgtaatcccagctactcgggaggctgaggcaggagaatcacttgaatttgggagaagattgcagtgagccgagatcacgccactgcgctccatcctgggcgatatagtgagactctgtctcaaaaaaaaaaaaagaatatgtgtcagaagagagaaagggaggtatggccttaatgctattttaatttataagatagaggcctggtattcttggattctggagcctatcaagacatttcaaggtataggtttgaattgaaaaagtatggaaagataagatgagctttcaagagggatgctgatcataagtctttagggtttattgtctctgtgactatggtcagaccagcttcactgtggaactggaacttaagaatgaaaaaggcagcatgctttccaactgcctgactgcttgttggcctcaccggtgggagctccagcatctcctttgctcgaaatggaccccaactgctcctgtgccactggtggctcctgcatgtgcgccggctcctgcaagtgcaaagagtgcaaatgcacctcctgcaagaagagctgctgctcctgctgccccgtgggctgtgccaagtgtgcccagggctgcatctgcaaaggggcgttggagaagtgcaactgctatgcctgacgtggggacagctctgctcccagatgtaaatagagtaacctgcacaaacctggattttttaaaaaatacaacactgagccatttgcttcatttctttttatattaaatatgttaatgacaataaaacaatttttacttgaagaaaaaaaatgaaaaaggctgagtgcagtggctcacgcctgtaatcccagcactttgggaggccgaggagggcggatcataaggtcaagagatcgagaccatcctggccaacatggtgaaaccctatctctacaaaaatacaaaaattagctgcgcatggtgatgcatgcctatagtcccagctactaaggaggctgaggcaggagaatcgcttgaacccgggaggcggaggttgcagtgagccgagtcgcgccactgcactccagcctggcgacagagcgagactccatctcaaaaaaaaaaaaaaaagaatgaaaaggtagcatggtggctcatgcctgtaattccagcactttgggaggctgaggcaggctgattgattgagcccggaagtttgcgaccagcctgggcaatggggcgaaaccccatctctatgcaaattacaaaaattagccaagtgtggtggtgcgcacctgtagtcccagctactctagaggctgaggcaagaggattgcttgagcctggtatgcggaggttgcagtgagccactgcattccaccctgggtgacagtgagaccccatctcaaaaaaaaaaaagaaggaattaaaaaataaactttagtttttgccatagctctttatttcactaatgtcctcttccttcgtataaacaaatactaatctctctaaatatagcaaactatcaaaaggaaatagttttgtaccctgttatttatgaaacttattatgacaaactactcctaaagcagcttcagctatgattgaataaatgctggaaatccaggataaataagatactccacctccactttttaaagtaaataaatgatttgtgtttttggaatctcaagaaatttatagccaggcatggtggctcacgcctgtaatcccagcactttgggaggccgaggcgggtggatcacctgaggtcaggagtttgagaccagcctggccaacatggtgaaaccccatctctactaaaaatacaaaaaaaattagccaggcgtggtggcttgcacctgtaatcccagctactagggagtctgtggcaggagaattgcttgaacctgggaggtggaggttgtagtaagccgagattacaccactgcactccacaatccagcctgggtgacagagcaagactgtctcaaaaaaaaaaagtttactttctcacatgggatatattttacagttggtcaaatgtgcttgtgtgtgtatatgtgtgtatgtgtattcttttctctgtatcatatgtgatagtggggtagtgccaaacattgttaactctgatgaataatgtctcttttggttagatcattcttaccttactggtatctcttactgtttccttacctagttatgctgttattgcctatggctgtgccagctgcccgaagctaacttgtgagagggaaggttgccagactgagttctgctaccactgcaagcagatatggcatccaaatcagacatgcgatatggcccgtcaacagagggcccagactttacgagttcggaccaaacacacttcaggtctcagttatgggcaagaatctggaccaggtataagttggcattatctcattgtctctttatttggtatttcatgatgtgagcccatagctgaaagaaattatcttattgtataacccaagtactccaaaggatcagagagcagaaaatatcatttgataatactttcaatattataataaagatagcacttccctctctgaccattataggttatccaactatataaaattgaaatgcaacaaaattgaattatgtagttcctactttcttagtaatatgtctcagattggagagcaattagttcattttgttttgctaggggctttttcaaaactttcattgtgaacagaaagacatttaattagtattaaacctgtgctgtttgccttcaagctgacttaagtgcctcactgcctttggaagtagagtacagattgaagaaaaggaaacagtattagtatagattaatgattaaccttaaaaggaggaatgtcacacattcagctccaaccttggcgagtcagaggaaacctattttaaaatgtcagtggatttattgctttgtacttttattttgctgatgtcatttgggagaggctagtaggaaagattttgccattcactttttcctggcacagcataatttcctaaattgtcattttattaggatagttcataacttgctctgaaaattaccaagtatatggtagatagcatacccagttgtttttaggttttgaatttgaaagtatcatgggaagggattgtgggctatgttaacagcaaatcacaatgatacatgttgaacctgaaaaataaatttcccaaactaaagtttttaaaaatgtaaagctaattccaggctgcaggctattctttctgtaggattcttcttttaaatctaccagcctatcgactggtagaaatttcatttttcttggaaacatctttctccctaaggaaatctccttgctagaatgtggttcaagtgctgtgtaagatgccagttgttgggataggcagctcaataagagacaggattcattttatgaaaattcctgaggtctagacatagccaaccttccagtaaagtgggttgtacaatttggagtgttcagtgaagagttcttgactgctgcctcatttcttatatatactcctaggaacaattaaatcaaactggatttaactaggggtattttttctacccattcttcccccactcatagcagatgacatcaagccatgcccacgatgcagtgcatacattatcaagatgaatgatggaagctgtaatcacatgacctgtgcagtgtgtggctgtgaattctgttggctttgtatgaaagagatctcagacttgcattacctcaggtaagatgggaaatgcatccattcctttcgtagtctcattctcttactgatttagggaaaaggatgtcaaaaagacacatccgttctctcattacaggtttaaggaagctgtgaaaacttcttctgacatgctcctctaatcatgttttcaccagctactattctgtttctacctttctttgcttgccatattacaggtagtctggacttgctttttcccttttgctgtcttgcctccatacttgttcatgttctttcctttgcctagaatgctttctgcctaccttccagtatcctccttttatctcaacttgttcagttcttatcttttaagagccacttaaatgcctttcatccatgttgcctctcctttttccgcctcattctttgactttcttttatcttttgtcataaatatcgtcagtactttacacttcacgtacctatcttatcttactaaactgtaagtatcttgaggctagagttgtgacctttttacagttttttgcatttagtgagttcccaaggaattcattaagtgaattctttttttttttttttttaagacagagtttctctctgtcgcccaggctggagtgcagtggctcgatctcgactcactgcaacctccacctcccaggttcaagtgattgtcctgcctcagcctcctaagtagctgggattacaggcacctgccaccatgcccagctaatttttgtatttttagtggaggcggggtttcaccatgttagccagcctggtctcgaactcgaacctcaggtggtccgcctgcctcggcctcccaaagttctgggattacaagcgcgagccaccgcgcccagcctcattgagtgaatattaaaatgttgtggaggagttaatatttacaaacaaaatgtttgctaatatttacaaataaacaaaatgtgttaatatttacaaacaaacattcattgtgtaaatgaaacacaacaccttcattgccaatttgtcgaacatttgagtacttactgtgtgctagtcattggggacataggggtgagtaagacatgatccctattttcaaaattgtttatcccttctagtggagaagatagcacaaagagaatgggcaaaaatggttgggcacagaagggctgactgtaaaagtagccaaactcagaataccaaactgatagaaaggttatgatgaggtctttttatatcctctcccacgaacatggtttgcagtatctattaggtatggtaggacatatgccaagaaaactacacaaatcagagtgttcattagtgcagggtgcagtgtgtctggatgggatgtcaagtgcataaggctatgcagcatcccaagtattgtcagtcatggaagctagatcagttttggtgggttagggaagacagaattcagcagagaagaatggaaaaggaatttcaagtctggaagcctgtctttacaacaacaaccaaaaaagttaaagagcccagagctctaatagtctggccttgtcctttgctctcccttgtgtaatgtattcatttcccataaactcttctgttaatccttactgaaaagaaggctgttgctgttatcaagccctatgataatactagctgtatttgtaatgttgacattaacttcagtctgtttcccctgcagcccctctggctgtacattctggggcaagaagccatggagccgtaagaagaaaattctttggcagctgggcacgttgattggtgctccagtggggatttctctcattgctggcattgccattcctgccatggtcattggcattcctgtttatgttggaaggaaggtaagaaagacatgctggtttctgtgcttgtttcaactttaggttcgttagtaaaggtttgagggaaatgggaaggagctatgtttcagagctgcctgaaaaccagctggttcttagataaaaataaccttactttcttaaatggattttcataaacccccatgagatctgaaagttcttattaacatcctgggcctggcttgtctcagtgacttaaaggtagaatgctgggccaggcatgatggttcacatttgtaatacgtggcctagcactttgggaagccaaggcaggtagatcagttgagcccaggtgtttgagaccagcctgggcaacatgacaaaacccatctgtacccaaaaaaatagaaaaattagctgggtatggtggcatgtgcctacagtcccagctactagggaggctgaggtgggaggattgcttgagcccagggacgtagaggttgcagtgagccaagatcgcaccactgcactccagcctgcatgacagactccaaaaaaaaaaataaaagaagaaggtaaaatgcttacttcattctgctggagttattttgtctctttttggattaactttgcctgtattactttatatcttccaggtctgagttaggttaaaatttgataaagatgcctatttggggtagaggatatgttttaatatagataacttacaagtgaatattcacctgtcctttttttctctggcaaaagattgatgtcctaacctgctgacctggattttctttttttattcttagattcacagcaggtatgagggaaggaaaacctccaaacacaagaggaatttggctatcactggaggagtgactttgtcggtcattgcatccccagttattgctgcagttagtgttggtaagctagtcaggaccacacctcttctctctcagctttctgaccatagcagtttagccagatggccagatgtttctcaaagactcctacattttatgcgaacccaccttgatagtaaattctgttaggcaccatgattatgattatttttaagtttttcaagcacaccaaattatcagagtgtgcaatcttttgttcttaagttagtgcctagaactccatttggcacatagaaaaggttgaattacagaaacttattttaagccctagttttcacctttcatcttccttctctacttgccatgaaatccacaaaacaaaattacttttgttttgatttgtttaatgcttcacattactttgggaggcataagagtttgttttagaataataatagtgtaactaacatttaatgtggctcttcatgtgccaggagtggttctgagacttttgcatatattaatttatttaatcctcacaatccttacaaaaggaagcacaattttaatagaaaggtgcagtaattggctgggcgcagtggctcacgcctgtaattccagtgttttgggaggccgaggcgggcggatcacgaggtcaggagatcgagaccatcctggctaacacggtgaaaccccatctctactaaaaatacagaaaatcagccgggtgtggtagcgggtgcctgtagtcccagctacttgggaggctgaggcaggagaatggcgtgaacctgggaggcggagcttgcagtgagccgagatcgtgccactgcactccagcctgggcaacagagtgagactccgtctcaaaaaaaaaaaagaaaggtgcagtaattttcccaaggtcacttagctgggacatgaatcaagttaatctgccttcagatcctgttctcttaacagctaagccattctacctcacacagcagtaagattttggaattaacatcctgaggagatcctaaactccaagcagtagtcacttatttaatatttgattcttgattggctcttgattgggttagcatttcagcagtgattagaagaggggaaaatgaaagcaacatatatttactgtgcaaaacacagtacatagcattctcatttgattattgacaaccctgggaagataggtccaaggttatacagctagtaaatggagccaagaatctaatccagacctttctgatttctagcctggtcatcattctgttacaccaggccacctttttgggatagccactttctgtcttcctttctttataaagtggtttgtccatgcccagactgggaagaagaattcagggcacttgcaacctaatagccagctgacatgtttccttctcttcccccaggtattggtgtccccattatgctggcatatgtttatggggttgtgcccatttctctttgtcgtggaggcggctgtggagttagcacagccaacggaaaaggagtgaaaattgaatttgatgaagatgatggtccaatcacaggtaaaaagcaggatgtttatttccatttgaatttatgatatacaagataaaaatcagtaaaattcagcgcattttacagggagattgtcattggattactttggataatgagctttgtagggggtaaagtatttttagcttttcatttctttgttccaaagttattaggttaattcccctggtacttgcctctgtgtggcaggtacaaactagtaggaatccaagtaactccaagtatgctggtagtagtagtgattataataacatctttatatctgcacagtacttgataattttcagagtattttacacaattatctcacttgctttttacaacaaacagctctctgacgagggaggatggagctgttatccccatttaaatgggaatttctttttttttttttgagacggagtctctgtcacccaggctggagtacgatgtcgcgatctcggttcactgcaacctccgcctcccaggttcaagtgattctcctgcctcagcctcctgagtagctgggactacagcaacgtgccaccacgcctggctaattttttttttttagtatagacggggtttggtgtttcaccgtgttagccaggaagatctcgatctcctcaccccatgatccgcccaccttggcctcccaaagtgctgggattacaggtgtgagccaccacatctggcctaaatgggaatttctttaagctttcatcttactatctattaagagcttcacagagctgagactagggcaagtcttctgacttttactttaatgtggtttctactcgtagtaagtaacgtagggcacaagtaacgtagaaaaccccaaaggtttttctagcttccttttttcttttctttttttttttttgagacggagtcttgctctgttgcccaggctggagtgcagtggcatggtcctggctcactgcaggctccggctcctgggttcgcgtcattctcctgcctcagcctcccgagtagctgggactacaggcacccgccaccacgcccggctaaattttttgtatttttagtagagatggggtttcaccgtgttagccaggatggtctccatctcctgacctcgtgatccgcccgcctcggcctcccaaagtgctggaagtacaggcgtgagccaccgcgcccggccggtttttctagctttctactagaagcttcctattaaaatcagcacatgacccaaacatattttttaaatcttcacgtttggttacatggaagcaacagtgtagtggaaagaatagtggccttggaatcagagttatagtttcatgtaactaccatggccttggacaagtcatttagttttaaattttagttttctcatctaaaattgaggctattaatgcctagttatttggaggattaaatatgaacatatgttaaaacacctgatatgtggcgactgcacacagtacctgttcattaagtaaatacattagttctctgaaaagtcattgcaggaaaatgcctactgactgttttgatgctctgctgtcttgaattggatgtttggttctatccccagtggcagatgcctggagagccctcaagaatcccagcattggggaaagcagcattgaaggcctgactagtgtattgagcactagtggaagccctacagatggacttagtgttatgcaaggtccttacagcgaaacggccagctttgcagccctctcagggggcacgctgagtggcggcattctctccagtggcaagggaaaatatagcaggtaaacaaatagataatttctgacagaaatggttagaattataagaagtaacacattgagccatttctctgtgccaggcttgtgccacgtatcatcttattttgatttaattgtcaatggttttgttttgttttgtttttacttttttatttttaaagacagagtctcactctgtggctcaggctggagtgccatggcgtgatctcggctcactgcaagctccgcctcctgggttcaagcgattctcctgcctcagcctactgagtagctgggattacaggcacccgccaccacgcccagctaattttttgtatttttagtagagatggagtttcaccatgttagctaggatggtctcaatctcctgacctcgtgatccgcccgccttggcctcccaaaccgttgggattacaggcatgagtcactgcgacaggcctttttttttttacttttacaaataggaaacaagcttagaaaaaaaggttacgtcagttatgcaaagttcattgttctttccattgcaccatagctgcctctatataaagaataatcctgacttgagattcccccttgactgcctgaggctgcctgcttcaggaagggagagtaggcatttttatagaattcgtaaaatgctctccgttaggcttgtcattggctttcagtagcatttatgctgtatcatggcttatttattttattttatttttttgagacggagtcttgctctgtcgcccaggctggagtgcaatggtgcaatcttggctcgctgcagcctccacctcctgggttctagtgattgtcctgcctcagcctcccaagaggctgggactacaggcgtgcaccaccatgcctggctaatttttgtattttcagtagagacagggtttcatgttggccaggctggtctcaagctcctgaccttgtgatccacccgcctcagcctcccaaagtgctgggattacaagcatgaaccaccacacccagcccatcatggtttattgatagtgggctttggggatttttttttgttttttttctcactgtgtcatccaggctggaatgcagtggcacaatcatggctcactgcagcctcaacttcctggactcaggcaatcctaccacctcagcctcctgagtagctaggactacaagtgcacacaccacacccagctaacattttaaattttttgtagagatggggtcttgctcggttacccaggctggtcttaaactcctggcctgaagccatcctcccaacttggctcccaacgtgctaggattataggcatgaaccattgcccccagctggtttagtgatactgcaatccttattacctttctatttccatttgctagataaggaaaatcaattctatgtacttgtgttgaaaatatgtaaagctttgtaactaaaaagattgtgacttgcttggtcatttcactagttaggcagaccagagtgtatattttcagaggagcataacatgttgcctgagaagcagttgaatgcaacggagaagaaaggcctagggaggggtaaaggtagaacaaagcaggataggaaggtagaggagatggttgccttcagctatccaaaggaccttcaactgtgaaaaggattagacttctatgcctcataccaaaaggtagattaagatgacttggcagaagctaaagggaaactaattttggttcagtatagagaatatagggaaaagcaacatgaaagcccaaagaggaaaaaggctactttagtagatactgagctgcctatccctggaaatgtttacaatgagaccagatggctatttggctataagaaggattcaagcaacagatggcaggtggactggatctcccacctgagtgcctgtcaatcacttgggagcctcttaaaaatagacttcagggacccatcccagaatgagtagcttagaatttcctggagtggcacctagggggtgatccgtgttttgcaaaagctccccaggtaattctagcacagccgttgcatgaaccagcatctgacaaccacctaagtaggagccctttctgaaagactcttccaactcagagtgattctgtggcagacctgaaactagaagccaggtctctgacactgtgcactttccattgcattccctcatttccctgggccttggcacatttttgaagggcacctgaagctggagcagcaaagcaaaggctcaggcagtaggatggaagctgcttgaatgtgcagctgcaggctgctactgacccgtctgtgcatctcatgactctggttgtctcttatcaggggatcccgcccccacatgctggcatattcactgctgtgctttcttaaaaccaacacccctgtaaataagcagacagacataattggagactgacttgctgaaactgcagcttagccagtccagctgttctagttctgtgaaagcctttattttataggaagtgaatgagtcagatgggtttgactgtgaaacccattataaggaaatacttaactgtgcaacaaagtgatgttggagccaagaaaggcaatagttatgggctctgagacactattgggaaagtttgctgctccaagaggagggaagaggttggctcctgtatgtccttcagtctcattccctggaggtaatttgattgttaaatgtttgatttcctattatgtgcaaggcagggaaggtaaagtgtgtatgagttgtggtctctccttttgtggagttaacagacaagtgagagatgcataataataagtaggcagggcctgcgcacgcctgtaatcccagcaccttttttaggtgggtgatcacctgaggtttagagttcaagaccagcctggccaacatggtaaaaccccatctctactaaaaatacaaaaattagctgggtgtggtggtgggaacccataatcccagctacttgggaggctgaggcaggagaatcgcttgaacctgggaggcagaagttgcagtgagccaagatcgtgccactgcactccagcctgggtgacagagtgagactccctctaaaaacaaataataataaataagtaggcaggtgctgtgggagtacttagcaagaagtgaatggtttgctgggataatgaggggaagtgatagttcctttgttgttaaggactgagtataagtttgtctggtagagaaaggaaatttctagagagacagaatagcatgtgcaaagtcatggaagtataaaatgtataggtatttaaagaaagaaagaattcagagtgactatgatttcggatctatagggagtgatagaactggacagagagcttcctggcagatcaggaagaccttaatgcctgttggcagtagggagccaagagttagagaattgttagagtgattgggtctttattcacactggcactgttctagaggttgtttgacttggacttaagggctactggagagggagcccagttttagtcatccaggcaggagatgatgaaaacctgaagttcagcagtagctgtggggatagaaaggaggggacgatttcaatagatatttaagagaaaaaatgtatgggcatctatttgcgctgtttgacagttggagaagatcagacagacaaccacaatttgcaagagagtaatggaagagatgtgtgccaggaagcagactgtcttggaatacccaggtctcatattaacttgaacgtcccctctttacacaggttagaagttcaagccgatgtccaaaaggaaattttccccaaagacacagccagtcttggtgcaattagtgacaacgcaagcactcgtgctatggccggttccataatcagttcctacaacccacaggacaggtatgtgaacagtcagatgtccaggagaggttgcattttttcgttgggtactaggtcttcagaagttcaatgcctcatgttagggctgtatgtaccatctcctgggatatatagtgtaacctgtgaattcatttgagcaagttcttggtacttgagtgtttggcatctcttgattcttcttgttagcgcttgatttttagagatttcttttctttcttccttttatgtattttttcttttttttttttttttttttgtctttcttggctattgcaacagtgtataattacatggaacttaaagagctagattgatgttcattgatgtcttcaagtctagggtttctgcttgccctttgcttgataggattcccatagcttctttctctttcattttgagaaactggtgtatctgggatggtgtgattgtggtactcccactagtaggtattctggcttcttctacttgtggcatggtagtaaaaagcttttacttttctattttgagtaagctagcatggggctctgacccttagttgaattttggaagctctttctgtatgtttaaagagattggctgagatacacgtgtgtgtgcatctgagcacacgtgtgcatgtatagttaaatcagcaaaaaggatctaattactcttctccatctcatttatttttatttttgtttttttagagacagggtcttgctctgtcaaccaggctggagtgcagtgacacaatcataactcactgcagccttgaactcctgggttcaagtgatcttcccatctcagcctcccgagtagctgggactacaggcacgtgcctccatgcccagctaattttttttattttagaaacagggtctgactttgttgccctggctggtctcaaactcctggactcaggcagtcctcacacctcgacctcccaaagcgctggggttataggcatgagccaccacgtccagcctccatctcatttgagtgttagattaaaatgttatttttgttaaaagtgagctctagttaactgttcacctatctttttgaaattcctaatcctgaacccatgaactgcttttaccaacaggtttagcatgatccatgcatgactcagcaaagtggattttgtctccacagagaatgcaacaatatggaaatccaagtggacattgaagccaaaccaagccactatcagctggtgagtggaagcagcacggaggactcgctccatgttcatgctcagatggcagagaatgaagaagaaggtagtggtggcggaggcagtgaagaggatcccccctgcagacaccaaagctgtgaacagaaagactgcctggccagcaaaccttgggacatcagcctggcccagcctgaaagcatccgcagtgacctagagagttctgatgcacagtcagacgatgtgccagacatcacctcagatgagtgtggctccccccgctcccatactgcagcctgcccctcgacccccagagcccaaggtgcaccgagcccaagtgcccatatgaacctctctgccctagccgagggacaaactgtcttgaagccagaaggtggagaagccagagtatgaagtggaatgaatgctcctgttctgagaagcacacttgtaactgcatcttttggaatttttttttttttttttccaaggggtagagatttatgtattttatttcacagattctctggtcacaggtttttgcccagggaaattctgagaaattcacaatttcttaccagataaaacatgaaaagtttgccgttagttcccctcccctcccctccctctttttagttttaatttattggttaaactgatggcagcaatccatgaggtgtgtcaaagagtgtacatatgtatgtgtgtatattgaatgctaaacatattactgaaagacacattttaataaagatttctgtcataattcaacttacctcattttccttggcttggatagtcccacagagccaagtgtttgaaacaaagcaccatctttgacagtctctagacctgaatttttctaatccaagggaagaaggattgtattcaaatccaaccgcagtagtcatctataaacctatgactcctagcatgacaggaagcaaagctaggcttgttttggactttgtagtcaggctgaagaattattagctgagtcagctgaatagggaagcagtagattaaaactaactttgtttgccctctagaagcaactgtgcaatttactcttaaaactttgcccttttctgcattatagtcactagtagtcatatgcttcagaggagagaaggagtggcagtcccaggtagctcttaagagaattctcagtggtcaggcatggtggctcacgcctgtaatcccagcactttgggaggccgaggcaggtggatcatttgaggccagctgtttgagacccacctggccaacatggtgaaaccacgcctctattaaaagtacaaaaattagccaggcggtagttgcgcacgcctgtaatcccagctactcagggggctgtggcaggagaagcgcttgagcctggggaggcagaggttgcagggagccgacatcactgcaactccagactgggtggcagagaccctgtctcaaaaaaaaaagagttctcagtgaatgttgcatggttacaagttggagaacagaatattctgttattggaggaagaaatacactgatgcgcataatcacaaagcaatgacataggtgtttgctgtgttctcaggtataccactccgtgttctgataaactttctcagttttgctaatctggtttaaataaaagggactaaaatctgagatttgtaatgaaaggagggggtatgccctcaaaatctctgaacatatttatctgatcttacaaatttgtcaaaattgagctaagtttgtactacttggagttttgcctctgtgtaaaataatgtcctggccgggcacagtggctcacgcctgtaatcccagcactttgggaggctgaggcaggtggatcacctgaggtcaggagttcgagaccagcctggccaacatggtgaaacccccgtttctactaaaaatacagaagttagccaggcctggtggcatgtgtctgtaattccagctactcgggaggctgaggcaggagaatcgcttgaacctgggaggtgctggttgcagtgagctgacatcacccactgcactgcagcctgggaggcagagggagactccatctcaaaaataaaataaaaaataaaataatgggctgggcgcagtggttcacacctgcaatcccagcactttgggaggccaaggcgggtgaatcacgaggtcaggagatcaagaccatcctggccaacatggtgaaaccccgtctctactaaaaatacaaaaattagctgggcgtggtggcgcacacctgtagtccagctactcgggaggctgaggcaggagaatcacttgaactcgggaggcggatgttgcagtgagccgagatcgcgcctttgcactccagcctgggtgacagagtgagactccgtctgacaaaataaaataatgtccttagaagtgaaagcttatatacagtatagcaagaaaattagaagactcgtgaaacctgatgtcagattccaaatcttagagtgacttactttgtatgagtcagtttcatgcccctaacttccccaactttcagatcttatttatgtatttagagacggagtctggctctgtcccccagactggagtgcagtggcatgattttggcacactgcaacctcagcctcccgggttcaagtgattctcaagtctcagactcccaagtagctgggattacaggtgcatgccaccacacccggctaatttttgtatttttagtagagatggggttttgccattttggccaggctggtctagaactcctgactcaagtgattccccccacctcagcctcctaaagtgctgggattacaggcatgagccacctcgcccggccctcagattgcatttaaagagcttccagtgtcagacctctctcaccttagtcctgggcccagaggaaaaattgaaatcctcctttccctgaagaccagatgactttctgtttcctttcacagatgcacttttgtcttcctggccagtgttttactacaatgaggatggcaagtctggacaacagccagcttagaagattcttatctcttgggcactgcagccagacttcacacatttccctgcacctaggacaggaaatgctgttagtggactttggatttctggaagaatgttccctgaagggggcgtgtacttgtgtgaaaaagagaacttgttggaaaaagaggcagacagcctggagatctctgaaacgcaaattatcaactcaaaacttggaattctcttgaagcctcgagagaacaattcacttctttgataaaatcaaagaagtctgttggaggggcagtagtttatggctaaacctatatttcttatctgggttccacttactacagctgtgagatttgggcagtttactctgagtctgttttcacttagccaaaatggagatgatgatcctagttaaggggttgtgaagactgagatggtatactgaaaatgtttttggtaaaggcccatgttttttcctcctgcaggaagaagaagaaatgagttaaaggagattttagatatcatataagaaaggaagcctagacctctaggccagaggctatgaaaaatttaaatttattctaatccttagcgacactttagtagatgaaaaggcccatcatcaccacctagaggcgaacacaaataatgcattagaaaagttacaatagcttggccgggcgtggtggctcatgcctgtaatcccagcactttgggaggctgaggcgggcggctcacaaggtcgggagatcgagaccatcctggctaacacgggtgaaaccccgtctctactaaaaatacacaaaattagccgggcgtagtggtgggcgcctgtagtcccagcaactcgagaggctgaggcaggagaatggcgtgaacccgggaggcaaagcttgcagtgagctgagattgcgccactgcactccagcctgggcaacagagcgagactccgtctcacaaaaaaaaaaaaataataataatagcttagaaaatggagaaagtttaatttcctcttcatacagccttcattcattctgaaatacctaccgcatttcaggtataagatgtagcaatgactaaaatacaaagttcctgtccccatggaacttagactcttaacgggggaaggcaatcagatatataacctggagtgaggataagtaatctgtgaagaaaaacagggaagacagagtggtagatagtgctacttgacatgaccaggttggtcctccttgataaggttccattttattagagactttaatggagcaaggaagagaactatgtgaatatctaggggaagcacataccagacatgaggaataaactacaaaggccctttggtagagcatccttagtctgtttccaaaaaagcatagtatagaggcctatatggctggaacaaagtggaccaaggtggggagagtagtggattaggtcaaagacagctggagcaagattgtgtagattagccaaacaactctgaagacaaggaaattttagatttctttgggccaggaggaggtaatcttcagcgccagacagatgcagtgcttgcggccagctttcaaaaaggttgaaactgggaggggcatgtctgatcactagtactacttggacaggccaatgtgaagaagcttgtggatatggtaaatgaatactcatttatgctcacctaatgtaccttcgtatgctgcagaggctggaaaactaaaaacttcatgtcttagatttccttgaaaccaaggttctgaatgtaacctaaggtcaagttttgccagttagatgcacaaacaagatgtggaaggaggagtgattcaggggttatctttagctactttggctattgctcctgcaagatgtagagaccttaggtttctctttaactgcattctaatagccatcagtagctttgtgggtgttgaagggtgtctggatccatagatagcagtttgcgatatgttttcttgtagtcaacctgtagtggcctcctaattgctcatctcccctatggtggcagaggtagcagctcacatggaaggctaattccaggtctgggaatcgcctggaggcccagcctatggccatgttccccaggctttccagtgcttttgtaagcacctaatttacctgtgttgaatccttttccacttaaaattggtagaggagtattgtttcctgcagttactgaatcctggctaatatagtatttggttccaaaagtggttactagtaacaggccctcaaagatgggcttcttagattagttatgactaagctgcatttgaatgaaatgtagatctagtcaccattggaaaatgataaactggtaggcaaattgcttacacctgtggtcacctgaaatgaaatgtcttttggagaaaagacgttggcacctcaaagggctgccatgatagatcatcatgtaagaaatggggacaaatgatggtgactacactagaggggttaaaggaaaaagacaaaaagctcaaaagtttgacatttgcagctcaaggcatagtatgggagagacccaaaagaattttatcttttgtagccgcaaggctcatgtacatcaaaatcaaagggagattctggatcactgaattacatacaacataagttgaattcgtagctttaccaggcctcttatgtgaaaatggggctctgaaatgagcaatggggacccttgagtggatttggataaatcctagtgctgtcaactcacaaactctacttcttttaaccagcagaagcagccattcttccccttatagatatggctggttctgctgcttgaagaccctggggtagttgtcttaaaggggaatactaatacttctcgtgtcccaccccctacccctccttgctaccagctctaactagagtcagatcccagtatgcttctggaaggcaaacccaaagtctgatctgagagacttacagaagaattgtaagactttgctaatttgtatcagcagaaacaaggggaaaatgtgtagagtatattccaaagatgttggaccaggaagataggaatatacatttattttcatttgcattgaatttatcaatatgggggtactagaggttctggactcagcatattggctttagcagctaagaatttttttttttttggagacagagtcttgctctgttgcctacgctggagtgcagaggcgcaatctcggctcactgcaacctctgcttcccaggttcaagcaatcctcccacctcagcctcccaagtagctggaattacaggctcatgccagcacacctggctactttttgtatttttactagaggtggggtttcaccatgttggccaggctggtcttgaactcccgacctcaagtgatctgcccaccttggcctcccaaagtgctgggattacaggcgtgagccactgcgaccggccaagaatggctcttaacaggttgttggatgaaacctggacttaaaagtggcctatacagagatggcaaaaattccttagtgtagaattagaagaatcaaggccaggtgttgtggctgatgcttgtaatcccagcactctgggaggctgaggtgggaggactgcttgaggccaggagtttgaaactagcctgggcaatatagtgagaccccatctctacaaaaagttaaaaaattagctgggcatggtggtgtgtgcctgtatagttccagctactcaggaggctgaagtgggaggattccttgaactcagggatttgaggctgcagtgaactatgatcgtgccactgcactccagcctgggcaacagagctagaccccatctcaaaaaaaaaaaatcagccgggcatggtggctcatacctgtaatcccggaacattgggaggccgaggcggatggatcacttgaggccaggagttccagaccagcctggccaatatggtgaagccctgtctctactaaaaatacaaaaactagctgggcatggtggtgtgcatctgtagtcccagctactcagaaggctgaggcatgagaatctcttgaacccaggaggcagaggttgcagtgagctgagatcatgccactgcactccagcctgggtgacagagcaagactctgtctcaaataataacttaaaaacatgatactaaaaacattgatttgtagatttatcatatgtgtgacctacttacctcctaattttgcccttcaaaattgccaagaggttatttctttcagcaaggaattgaaaagtactttaaacaagggaaacaccttatcttgaaaagtttgtagtgtgtaccttccctaggctggaaatgaagctaagagatgttaccattgtaaaggaatccctgatatcagtagagatgatgggatcctgcagtgccagtggccaaggggtagtaccaaggcaacagagctgtagtgatgaaatacatgggttacctaccaaggttctatttggcttatagaacgcaaaacaaatcttcaggtctggcaaatagaggcctgttttgagtcaccaaaatggagatttacagacaattctcagagctgaagcccttgaaaaagggggtgcagggtactctggaggaagcacccagcaataccaccataactatatcataaatcttctcgttttccccaaagggatcttaagccatgtaactatgcatgtgtgcttagggaaatggaaatgcccaggcctttagggattacttggaaactggccctaagccagcacaaatgctgagacctaaaaagcctttgtggtccactagttagaatagaggcttccatggtgttatgggtcgaattgtgtcccttccaccaaaaatcatatgttgaagtcctagcccctagtacctcaaaatgtgcccttatttggaaaatgaggttgttgcagatataattaagatgaggtcttattggcatagggtggccccctaattcgattgttgtacatataaaaaggggaaatctgaacacaaagacatgcacataggctaagtaccatgtgaagatgaaggcagagactggggtgatgcagcagaggccaagggacaccaaggattgccagcaaaccatcagaagctgggagcggcaaggaacagatcctcccccacagcccgcggaaggaaccaattctgccaaaatctaggacttctagcttcctgaactgtgagacaataaatttctgttacttaagtcacccagtttatggtactttgttatgggagccctagcaaactaatatacgggggtcaggtgataaaaaggagttctggcctgcatcgatctcacgtactcattaccagttcctttaggcacagttgtagtagacgcactcggcgactggtagaatctgcacattgagtgactcatggagtgaaagctgttgtggtaagaagagcaaagggaacccttgaaattgccctttcccaccaaaaacataaaccaaaagcgatagtgcatccctaagggaatgatggatattagtgtccgcatcaaagacagaaatttcaggaatgatggctcctatcatatccacatttaatttacttgtttggcctatgcaggacttgatttttagctgttattttagatataatctctttatgaagcaaatcaacacctgccccggcccctacagtcgtgcaactgaatatgagtactgacctggaatatgcttttttctctagcccaaatagcagaaaacatcaaaaacagattactttcacctgtcagggtcaacagtacattacactgtcctgcatctgggttatatcacccttgcagctctgttgcagtctaatctgcaggcactttaatcatctcacatctcccagaacattgttctacatgtctggaatcttgcaagcaagaagtagcaggtatccaaatgccctggtaaaacatgtgttctaaggataggagataatccctgtggaaattaagagaatgtctacctccgtgatttgggtcaccccaccagataaagaacttaatccagttcatatactggctgaggaagaaggatcatggactggatggtggagaaagaaatatatataaatagaaacaactaactcatgaaaagctgagaaacgggcactatattagcatttcatattttcttccttgctctattgtgttaatttatagatattaactcattttcccctcccatattttccctagtataatgaaatgtattactgttggtaacttgttaatttagtgtttagattatatgctgttatggtagaattgtaactgaactagaatgataatcacccagggtggatcagctagctatgtgactgatgggatttggggtctcttattttaaggagcggatttaggtccctaaaagtccaaaaagatagactgtgtagacatggtgaactgactttcaacatccattccaaacacttcctcatactgcagaggctgcaaagataaaaactatttcccagactcccatgcagctaacattccgcatacaagttggagtctaccccatcaatggatgaaaaaataaagaaaatgtatttataaatgatggaatactattcagccttgaaaaagaaagaaattctgttatttgcaacaacatggatggagctggagaacattatgctaagtgaaataagccaggcacagactaataccacgttaccacttgcatgtagaatctaaaacaattgaatccatagaaacaaagtagaatggtggttaccagaggctgagggctgaggggaatagggaaaatgatggtcaaagggtacaagacctcaggaggaatacgtttgtttgtttgtttgtttgtttgtttgttttgagatctattgcacagcatggtgaatatagttaataatagttgatagagtttggatatttgtgcccatataaatctcaggttgaattgtaatccccagtgctggagatggggcctggtgggaagtgattggatcatggggtggatctttcacggattgatgctgtcctcacaatagtgagtctagagatctggttgactgaaagtgtgtggcacctcccccacctctctatttctctggctttcaccagtattaagtgctctgccttccaccatgaataaaagcttcctgaggcctccccagaagccaagcagatgccaggtaccatgcttgcacagcctacagaaccatgagccaattaaacctgttttctttataaattatccagtctcaggtattcctttatagtaatttgagaatggcctaatacaatagtatatgattgtacatttcaaatgtacatcatttgaagagtaaatttcaaatgttcttgtgataccgtaacttgtattaagttgattgactctctcttagctgagaaagcgagatggactccatttggctccttcctttgcaagacatcaagggctccttacccacccccttcctcaaggacttgtgcaagctgactctcagcatatcaaagagtgcaattaactgataaggtactgtggcaagctatgtccgcgattcccaggaattcgcccaggtgatggtaccctaaagcccctgcatttgtgtccagcagatagcacccagagcccccgcacctatcagcttgtgatgaatttaaaacccctgcacctggaactgtttgttttcctgtaaccatttgtctttttaacttttttttttttttttttttttttttttgcctgttttacttctgtaagattgctacagctaggctccccgtcccctctctaaaccaaagtgtaaaagaaaatctagccccttcttcggggccgagagaattttgagctctagccatctctcggtcgccatgtaataaaagactcctgaattagtttcaaaatgtggtgtttctctataactcgcttggttacaacatttggaggccccagcgagaaattcgcccctgggtgagagcccgactcgttccaggctcccccggacagacggcggacttacaggggaggcgccacctgaagacgttccagggccccataagaccctatcttccggaggggaacggatcgaccaccggtgtgtgcccacaaaaaattcaactcctaagtcctcagtttctagtcccgggaaggtaagtcagatctgactctgtttctctgggagggaagtggctctgatgaaggccgtccctttttgactctgctcgcattccaggacgctggaggacggagtcctggttttctgttaggcgcctctgtgtctctctgagagggaagcagccctgacgagggccctcccgtgactctgtccatattctaggacgctggaggactgagtcctggtttctggcaggccagcctctccgttaagtctaggctgtctgtctctctctctctctcttctctctctcgctctctctctttctctctctctcctctctctccctccctccctctttctctatctcttcttctttcaggtctcctggagacctctgttttagaacgggaattaaaaaaaaaaacctgttgtaaactctgtgtgaatcagtgcatgtatgtggagttcaagggcttgcgcttgaatttccagtttgtagctccaccgtgaaagctacggaattcgagagggccctcacctactgttccgtggcgacctcatacggcttaaggcagcatctggcatagctccatctgagccgggggtttataccggtctgccaatgcgaagaggagcctaagtcccctcagggggagcagccaggcgggcatctgactgatcccatcacgggaccccctccccttgtctgtctataaaaattgtcataattgtttatataccccagtgtctattgtcttgtttagtgtctattgtcctgtctggtgtctgtctaagtttcttatgtctggtcgttgatattgcccaagacgactgggcaaggacttcttcaaagtcctgagtgcagattttctaacacaggaggtctcaggcgtgtctcttcgggttgccgggcccaggggccaggcgcgcctccaccagtttacacaacagcctcctttccctcggcagaggctccccgacctgcaggcgaggagtgggaggggacggcgcaggaccccctcccccagggacccccgcgggcgcctgactcctgcgccttcaggggtcaaaacccctgacatccctgagcaccagcgcgtccacacccggctcggaacgcaggggcccggcctgctgtggtgaccttagccccgggctgggcttctgagccgggcttgcagtgcctgacggggcctggaggcggggcgggggaccacagagtcgtcctggcgacacaggggacccagcgctgcccggcacagctcctcccagcctcagaagatccgagtggcccctttcctccacatccccatcccttaccccgcacatctcgttttcctgtgtcacagcaagtccagcgcccccaagatttggctctactctccctttttaaacccttaaaagaaaaggccaagtttgaactttttgcctcccagtcgtggagacaccaaaaatatttaggctataggtcaaggaggagtgagggatcacattggtcccactgacctcggacctgcctcttgtcctccccctagatctcaaagcttaaagagacagtccttatgtggcaagaagtgttggactatagttgttttcctgcttcttctggttataatacttctgttcttccgatactacagccccccaggttgtaaatttctctgtccgtgctgggtttaatatttcttctcaaaccttgttaaattgcctctagaatgagaaactcttcttcccggcctcgtaaagattggagccctctccaatgtatgttacaaaatttctctctaggcttctcagaggattatggggtctaccttaaaaaaggcaaactccggacactctgtgaagtagaatggccaaagtttggagccgggtggcccccagaagggtcactgaacctcgcaattgtccaggctgtgtggcgggtagttgctggaactcccagtcaccccgatcggtttccctacattgatcaatggctgagtttggtccggagccctcctccatggctccgctcatgaaccattcataattctacctccaaggtccttttgagccaaacctcactttcgcctcgactctcagccagcttggctcctcctgtattgcctccttctgaagaagaggaaagtctccctcacccagttccgccgccttataaccctcctgctcgcttacaatattcccttgtctcctcgactatgtcccctgtgggctgtccgcccatcgcctcccaactggggccatggcagaaggaggtagccccctcctcccgctgaggcacaaatcgctctgggtgatgagcactatctaattccgggacacttccatcactccaaaaagaaacctattggcaatcagtcctaactaccccttctccccagccccagaaccactaatctaatactttctctataaatcttcctattctggacattttgtataaatggaatcatacaatgtgtagccttttgtgtctggtttctacttagcaagtgtttttcaaagttcatccatgtcgtagcatgtatcagtacttcgttttgtggctgaataatatttcattgttttgtttttgtttttgttttttgagacggagtctcgctctgttgcccaggctggagtgcagtggcaccatctctactcacggcaacttcgtcctccccagttcaagtgattctcctgcctcagcttcctgagtagctgggactacaggtgcgtgccaccatgcccagctaatatttgtatttttagtagacacagggtttcaccctattggccagtctggtctcgaacacctgacctcaagtgatccacctgcttcggcctcccaaagtgctgggattacaggcaagagccgctgtgcctggcctgaataatatttcattgtatattgcatggatattgtatggatataccacattttgtttatccctcaattcatggacatttaggttgtttccgctttttggctgttgtacataatgctgctataaatattggtgctcaaatccttgctttcaattcttttgggaatatacccagaaatgggattgctgggtcctgtgttaattctacgtttagctttttgaggagctgccacacttttttctacagcagctgcaccattttacctaccagcaacacacaagggttccaatttctccacatcctccaaccgctgctttctcctggggttcctaagctgagaagatgtaagcatggatatttctttttgtctgttttattatagccatcctagtaagtatgaagtgatatttcattgtggttttgattcatgtttcccttatgacatgttggtgggcatctttttctgtgttcattggccacgtgtatgtcttcttagaagaaatgtctctttgaatcctctccccacttttttttgtttgtttgtttctgtttttgtctttgttttgagacggaatctcgctctgtcacccaggatggagtgcagcagtgcaatcttggctcactgcaagctccgcctcctgggttcacaccattctcctgcctcagcctcccaagcagctgggactacaagcacccgccaccacccccggctaattttttgtatttttagtagagacggggtttcaccatgttagccaggatggtctcgatctcctgaccttgtgatccgcccacctcagcctcccaaagtgttgggattacaggcatgagccaccgcgcccggccacctttccccactttttaactgggttatttgtctttgttgttgtgttgtaagactttatatattctggatgtaagtccctgaacagatatataatttgcaaatattttctcccatctgtgggcagtcttttcacctggtgtgttcttcagtgcaacaattctagtagtcatttcctgactcatcaccttcccaattgtgccagagttagtagctattctggggcccaatttgcagagtctgattctgggagttattcctgaaaacatcctagagcccactcctccagtccttccaactatttttttttttttgagatggagtcttgctggagtgcagtggtgcattctcagctcactacaacctctaccacccgggttcaagcgattctcctgcctcagccttccaagtagctcagactacaggtgcccaccaccacacccagctaatttttgtatttttagtagagacagggtttcaccatgttggccaggctggtctcaaactcctgacctcaagtgatctgcccgcctcagcctcccaaagtgctgggattacagttgtgagccacaacgccaagcccaactattctttttacttcccgcccccaagctttttttttttcttttttttttttgagacagagtcttgctctgtctcccaggctggagtgcaatggtgcgatctcggctcactgcaacctccacctcccaggctcaagtgattctcctgcctcagcctcctgagtagctgggattacagtcacccaccatcatgcccagataatttttgtatttttgtagggatggggtttcaccatgttggccgggctggtcttgaactcctgacctcaggtgatccacccgcctcagcctcccaaagtgttggggattacaggcatgagccactgcacctggccccatttttttaagcgtctggttccctgtattaaatccctttctgctcgattagagtgacttctgtttcctgtgactgatccccgatgataaatagcaccatgggatacagtgtcctcaaagagaggctatggcatgtcattttgttagagctgatgtgcggccaaactataataataatatactcctagaaagccagaattgaaagcacctttgagatcgaccagtccaacgccttcattcgacaaagaaggaaacgaaggcacaaggaggaagacataaaaaccacgaggccgagtgcctacagctccctcagtcgcctcctgaggccagtggacctgagctgacctggcttcatgaaatcactgtgatctaggtcacgtaagtccaatgaggccagccctgccaacctcactgtagctgactggacacaggatttgggcccgagccatttgctgccttggacaagctggatgtgatggaggccaatgcctgtgtgagactgtctggtatgggagacatcgatgctgggaacatgcccagagggcatggggccagagcacaagtctatcccagttcctgttctccggggacttgctggacgctgctgagagggcttccccaataacctcacttcctctgtgtccttattgtagccaccatcactgaaagtcctctgagcctggctcttccttgcatacctaaaggagctcgagaacatacccaaacgtggcccttgatttttctgggaatcacatagctagatcaaaaaaagaagtagccggcacagtggctcatgcctgggattacccagcattttgggaggctgaggcgggccttggagatcaggagttcaagaccagcctggccaacatggtgaaaccccgcctctactaaaaatacaaaaattagctgggtttggtggtgcacgcctgtaatcccggctactcgggaggctgaggtaggagaatcgcttgaacccggaggttgcagtgaactgagattgaggcacagtactccaacctgggcaacagagtgagactctgtctcaaacaaacaaacaaaaaagaacgagtttccttctcaaaagggatggtcttcagaatgagaagatataaaatgcctgttccaaaacagatggctgataaatatcagtcttctcctccccttccttgctgtgcggtttcagtcctctgaggccacatgtgacatcactctgagatgttacaaggctaaagaacacaaccaaagcaaacctgaattgcctggaattccaaatgagtagagactgctttctcctggggttcctaagctgagaagatgtaagcatgaatcttccagagaacagagactacctaatattgcaactcacagaggaatgtggagctgagaaattgaaaaagaaagagaaagaaacaccatttgattacactagatgacatcattttaatgccaggatctaaccatgcctaaagcccctgaacgtttcagtaacataatccaacaaatgtctttccccttatccaaagcccatttcagttaggattctgtcatctgtaactaaagaagttgactaatacaggaagtgggatactcctagtgctggcccctcacacttggagttggctgagttgaggtgggttatagaatggtgaggatttcccaatcccaggctgggaggcgggtgtaccctgagatgcagctgcacatccagagtgtcctgaaactcagatcatgcacccagcagaggtgggaactttagagggcttcacagaaatacgtcaatgtgctggctattttcccaaatcttcaattcagagtccagaaatagacaaattttgcagagaaaataataataaaagctaacatttggcctggcacggtggctcacacctgtaatcccagcactttaggaggcgaggtgggtggatcacgaggtcaggagatcaagactatcctggccaacatggtgaaaccccatctctactaaaaatacaaaaaattagctgggcgtggcggcacgtgcctgtagtcccagctactcaggaggctgaggtaggagaatcgcttgaactagggagtcagaggttgcggtgagccgagatcgcgccactgcattccagcagcctggcgacagagcaagactccgtctaaaaaaaaaaagctaacatttatgagacactcactatgtgccagacactatattaagacctttacacatattaattcatttattatttttcttttctttttaaataaaatgagatgggggtctcgctgtgttggccaggctggtctcaaactcctgagctcaagtaatcctcccacctcggcctcccaaagtgctgggattacaggcgtgagccaccatacccggcccatgtaatccttaaaataacataaataagtgggtactattttattttccattttacatttgaggaactgaagcacagaataattgcccaaagtcttacagctagatggccgttgagctatgaacttgaatccaggcagcctggcccctgagcttgtgctcccacagctctgctcagagaggctgcccatagccaacaatccaagctgattcagtgtccgatgatcgtgtgctttgcaggactgaaaatgctcatcttggccagccacggtggctcatgcttgtaatctcagcactttgggaggccaaggcgggcagatcacaaggtcaggagtttgagaccagcctggccaacatggtgaaacccagtatctactaaaaatacaaaaattagctgggcatgatggcagttgcctgtaatcccagctactcgagaggctgaggcaggagaattgcttgagcctgagaggtggaggttgtagtgagccgagatcgtgccactgtactccagcctgggcgacagagggagactctgtctcaaaaaaaaaaaaaacaaaaaaacaaaattgctcatctgttcatgtcaaagttaaagtgaatgggagcaaaggcagggaggcaggaaacacacccctcccaagcccttctgacctgtcccactaagaggaaaatgacccttatgtaaagagccttccacacagtgagagcagccagctgtgcccccacccccatgcctggtgttcacattgctccaaggcagaggtgaagacagaagccttagggatctgagtactgggaggtttccgttgctaagagagacatcctccctctccctagcaaatcaagatcaaagtctagattcagggaccataatttacaattcttctgactcagttattagcccatggtcttacccaaatgcaaataagtcagaaaccttacatgtctttttattttattttactattatttttattttaaaaatttttttagagacagggtctcactctaccacccaggctgggtgcagtggtacaatcacggctcactgcagccttgacctctaggtttaagcaatcttcctgccttgacctcctgagtatctaggactacaggtgtgtgccaccatgccagatttttttactttttgtagacacagggtctcactacattgcccaggctggtcttgaactcctggcctcaagcgatcttcctgcctcagcctcctaaagtgttgggattacagatgtgatccactgcgcccggctaaacttacacatcttttaatagagtggtcttgccagagaaaccccaatcctggcaagtggaagcctgtgactgctgatcaaccgctaaggcaatgtcttggccccaaagagtacccacaggaaatcctcaaaacccttctacggtgtggccgcagaattacagtgggtaggggagtccctccaccaaggtaaagcagccagactggccctgctctattgaggcaggaaatacttgctgttcttcatgtaatgcacaccgtggaccactgagtgttctccttctcccgttttccaaatggggttgcttatttgtaattatcttgttttccctccaccaatgcatcaaggtattttaagcttattagtatttatctatagcagtgtctcccaaacttcttgatctcaggactctattatgctgttaaaaattattgaaggccaggcacagtggctcacgcctgtaatcccagcactttgggaggccgaggtgggcagaaaacttgaggtcaggagttcaagaccagcctggctaacatggtgaaaccccgtttctactaaaaatacaaaaaattagccgggcgtgatggcaggcacctgtaagcccagctactcaggaggctgaggcaggagaattgcttgaacccgggaggcggaggttgcagtgagttgagatcatgccattgcactccagccggggtgacaagagagaaactccatctcaaaacaaaattattgaagacttaaaagagcttttgtttatgtgggttttattattgatatttgccatattataaattaaaattggccagacatggtggctcacacctgtaatcccagcactttgggaggctgaggtgggcagatcacttgagcccaggagtttgagaccagcttgggcaacatgacgaaaccctgtccctacaagaaatatagaaattagctgggcgtggttgtgcacacctgtagtcccagctactcaggaggctgaggtgggtggatctcttgagtccaggaggtcaaggctgcagtgagccattattacaccactgcattccagcatgggcaacagagtgaaaccctgtcttaaaaagaaaaaagttaaaattaagaatttttaaaatatttatttaaaaataaaaagactcattaaattaatgttaacataaataaaacattgttaaatttaaaaaaacccctacatttccaaacaaaataattagtgagaaaaatggcattgttttacatttttacaaatctttttaattctgggttaatgaaatgcagctaaatttccatatctacttcttcatttgatctgttgaaatatggtgttttggttgaagcgtatgaagaaattcagtctcacacagataactagaaaaggtgggcgtataggcacatgccctcttattgcactccactttatttttttattcacggatattgcatttcttacaaactgaaggtttgtggcaacttcatcaagcaaatctatcggagccatgtttccaacagcacatgctcacttcatgtctctgtgtcacattttggtaattcttacaatatttcaaattttttcattatgattgtatctgttatggtgatctgtgatcggtgagctttgatgtcactatcatgcagttatgtgttgcttcacaatgggcatgtattctgagaaatgcatcattaggcaactttgttgttgtgccaacatcatagagtatacaaacctaggtggtagagccgattacacacctaggctatatggtatggcccattgtgcctaggttacaaacctgtacatcacgttactgtactgaatactgtggacagttgtaatacaatggtaataatttgcatgtctaaacatagaaaatgtacagtaaaaacacagtattaggatctcacgggaccacaatgtggtccattgttcactgaaacatcattacgcagcacataactgtaaccattttggggcaccatgaaccacgcacatatcagatggagaacttaattgatacatatcgtgtgtgttctgactgctccactgaccagcgttcccccagctctcttcctctccttgagcccccctattccctgagtcaaaacaatattgaaattgggccaattaataaccctgcactggcctgtaagtgttcaagtgaaaggaagaatcacacttctctcactttaaatcaaaaactagcaatgaatggccaggcacagtggctcatgcctgtaatcccagcactttgggaggccgaagcgggcagatcacgaggtcaggagatcgaggccatcctggctaacacggtgaaactccatctctaataaaaatacaaaaaattagccgggcgtggtggcgggcacctgtagtcccagctactggggaggctgaggcaggagaatggcctgaacctgggaggcggagcctgcagtgagccgagactgcgccactgcactccagcctgggcaacagagggagactctgtctcaaaaaaaaaaaaaaaacaaaaaaaactagcaatgattaagcttactgaggaaggcatgttgaaagccgagacaggccaaaagataggcaggccccttgcgccaaacagccccactgtgaatacatagaaaacgttcttgaaggaaattcaaagggctactccaatgaacacatgaatgataagaaagtgaaacagacttgttgctaatatggagaaagtttgagtggactgggtagatcaaaccagccacaatattcccttaaaccaatgcctaatccagagaaaggccctaactctcttcaattctgtgaagcccgagagagagatggaagctgcagaagaaaagtttgaagctagcagagaatggttcatgaggtttaagggaaaaagccatcttcataacataaaaatgcaggtgaagcagcaagtgttgatatagaagttgcagcaagttatccagaagatccagctaggatcattgatgaatgtggctacactaaacaacagatttcggtgtagacaaaacagccttttattggaaggagatgtcatctaggactttcatagctggagaggagaagtcaatgcctggcttcagaccttcaaaggataggctatcttattggaggctaatgcagctggtgactttaagctgaaatcaatgctcatttaccattccaaaaatcctaggacctttaagaattgtgctaaatctactccacctgtgctctataaatggaatgacaaagcctggtgatagcacatctgtttacagcattgtttactgagtattttaaccccctgttgagacctcctgctcagaaaaaaaaaaaaaaaaaaaaaagatccatttcaaactattacagcttattgacaatgtacctggtctcccaatagttctgatggaaaggtgtgaggagagtaatgttgttttcatgcctgctaacagaacatccattctacagcccatggatcaaggagtaattttgattttcaagtcttattatttaagaaatacatttcaaaaggctgtagctgccatagacgttgattcctctgatggatctgggcaaagtaaattgaaaaccttctggaaaagattcaccattctagatgctactaagaacattcatcattcatgggaggaggtcaaaatatccacactggccgggcacggtggctcatgcctgtaatcccagcactttggaggccgaggtgaacagagcacctgaggtcgggagttcaagaccagcctgacaaacatggagaaaccccgtctctactaaaaatacaaaaattagccaggcatggtggcgcatgcctgtaatcccagctactcaggaggctgaggcaggagaattgcttgaaccttggaggcggaggttgcagtgagccgagatcatgccattgcactcctgcctgggcaacaagagtgaaactccttctcaaaaaaaaaaaaaaaaaaaaaaaaaaaaaaatccacattaacaggagtttggaagaagttgatgccaactgtcatgatgactttgtgggttcaagacttcagaggaaggtggcctggcgcggtatctcacgcctgtaattccagcactttgggaggctgagacgggtggatcacaaggtcaggagttcgagactagcttgaccaacatggtaaaaccccgtctctactaaaagtacaaaaattagccaggcatggtgtcacgcgcctgtcatcccagctactcaggaggctgaggcaggagaatctcttgaacccgggaggtggaggttgcagtgagctgagattgcaccattgcactctagccttgtgacagagtgagactccatctcaaaaaaaaaaaagaatcacttgaactggggaagtggagctgcagtgagccaagatcacaccactgcactccggcctgggcgacagagccagactctctctcaaaaaaaaaaaaggccgggcacagtggctcactcctgtaatcccggcactttgggaggccgaggagggcagatcacgaggtcaggagatcgagaccatcctggctaacacgatgaaaccccgtctctactaaaaatacaaaaaaattagccaggcttggtggcgggcgcctgtagtcccagctactcgggaggctgaggcaggagaatggcgtgaacctgggaggcggagcttgcagtgagccaagatcgcaccactgcactccagcctgggcgacagagcgagactccatctcttaaaaaaaaaaaaaatacaaaataaggtcttagtattattatgaaaataactgacttcacagaccctctcaaggtcctggaaccttcgggaatttgcagatcacatgtggagaactgctgatgtaatgctttattctttgcagatcacatgtggagaactgctgatgtaatgctttattcatcagttaatatttatcaagtgtctaccgcattcctgacagttccaggctctgagtattgggtggtgcactgtacacaagatccgtaaggcctctgctctcagagaaccaaaattcttgtagatagaagcagaaaatgaataaataaatgaataagattatttcatctacagaaatgtgccttgaagaaaataaaacaggataatttaatagagaatggcttatgggaaatttatcttcagtggttcaatatgatatccactctcccttgtgcctgtttaaatttaaattaaatcaaataattcagtttctgagtcacactaggcacatttcaagtgctcaataaccatatgtggctagtggctaccatattgtacagtgcagataaaggacacttccctcattacagaaagttctattgaacagcactgattgagtctgtgtgagacagaaagctcagtgaggattgagggcagagtactgaaggcagagggatgcaaaggcaaagatcctaagatggaaaccacttgggtgtgttgaaagaaaaagagagacagcagtgtggccgaagtgtggtaattaaagaggggactggagggctacgatatgagagaggtgggtgggagccagagcatgctggaaattgtgggccttggtgaagacttacagagcccagtaaaagcaggcattgatatgacttgattgatgtttttgaaaaatcactctggctgctacatggaaaatgaattgtagaggtggaggtagaggtaccagttaggaggctgctggatgaagggagtgatgacggaaatggagagaagctgtttgatttcataggtattttggaactagaacagcaggacttgcaggtggatagaatgtaaagaacgagaaaaagggaggaatcactaatggcctttaggcctttggcttgagcaactatatagatgatagtgccaattactgaaaagaggaagaatgaattcaggggcatggaactaagagctcttcttgggggttttacattcagatggccattaggcattcaggtagagatgacaagtaggcagttgggtacacacatttggaacatggaagtcagagctggagatacataaagttggccctccatatctgtggattcaactaattgtagataaaaaaaaatctatctatctatctatctatctatctatctatctatctatctatacatatattttttaagacagagtctcaggccaggcatggtggctcacgcctgtaatcccagcactttgggagggcgaggcgggcagatcatgcggtcaagagattgagaccatcttggctaacacggtgaaaccccatctctactaaaaatacaaaaaattagccgggcatggtggcagatgcctgtagtcccagctcctggggaggctgaggcaggagaatggcctgaacccgggaggcagagcttgcagtgagccaagaccgcgccacggcactccagcctgggcaacagagcaagactcactctccaaaaaaaaaaaaaaaagcagcatgttttaagcaggagaaagtggtcattttggttgaccattgctgacaggttaaggtgacaacagactagtgtgcccactggatttggcagcatgaaagatgttggcattcttgataagagcagtttcagtggagtggtgaggttgggagcctaaagagagtgggttgaagagtgatgagatttgaggaaggaggaatgaagtggggaaaaccagtagtagctggagggcaagtagagtcaagggaagttttgttgtttcatgttgtgttgttaagatgtaaatatataacatgtttatgtattgattggaatgctctattggagagagagagattatctggtgttgcaggagaaaaagcatgtagttgcagaagcaaagcccttgacaaggtgagagttagccttagaaagtagcgagaggacttcatttatggtaacagggaagaaggcagagagtgtgggttcctgtctggttgtggtgatacaatcgtaaacaatgctgctctgaacattcatatacaaattttcgtatgaatatgtcttcagttctcttgagaatatacctaggaatgaaattgctgggtcatatgataactctatgtttgttcgttttttcttttttctttttttcttttttttggagacagggtggctctgtcgcctaggctggagtgcagtggtgggatcacggcttactacagccttgatctccggggctcaagtgatccttccacctcagcctcccaaggagctgggaccacggctgcatatcacccatacctggctaatttttaaatttttttgtagagatggggtctcactatgtggcccaggcttatgtttaattttttgaggaactgccatatggttttccaaagtgctcgcactgtttcacattctcatcagtagtatgtgagggttccaatttctccacatcttcaccagcacttgttattgtctgtctttctggttatagccatgctagtgaatatgaagtggtatcttattgtagtttttatttgtatttccctatcgacgaatgatattgagcatcttttcctatacttcttagccatctatgtttcttgtttggataaatgtttattaaaatcttttgcctctttttcagttgggttatttgtccttttgttgttgaatcgtaagacttttttgtgtattttggatactagatgtctatcagatgtatgacttgcaaatatttttgatgggttatctttttactttcctgatagtgtcctttgaagcgcaaaagtttttaatttcaaagaaatcataattacctatttttctttggttgcttgtgcttttagtgtcataagtaagaaatcattgtctgatccaaggtcacaaagacttacgtctatgttttcttaaaagagttttatagttttagctcttacatttaggtctttgattcagtttgagtgtatttttgtacatagtatgagttaggggtccagcttcatccttttgcatgggatacccaattgtcccagctccatttgttgaaagactattatttctcccttgaatcatcttggcatccttgtcaaaactcagttaaccaaggccaggcatggtggctcacacctgtaatcccagcactatgaaaggccaaggaaagaggatcacttgaagccaggagtttgcgaccagcttgggcaacataatgagactttgtctgtacaaaaaaaaaataataataattgtttaaattagctgagcgcagtagtatgcaccgagagtcttaggtacttgggaggttgaggcggaggattgcttgagcccaggaattcaaggctatagtgacctatcatcaagccatagcactccagcctgggcaacagagcaaccctgtctccaaaaaactgaaaagaaaaagatcaattgaccatgtgtgtatttttattcctcgtttatttctggtttctttatttttggactctcagttctattccattgatccatatgtccatccttatgtcagtaccacattgtcttgattattttaactttattgtaagttagaattgggaagtgtgagttcttcaacttttattttctttctcaggattgttttgattattctgtatcttctgtatttccatataaatttaggatcagtttaccaatttctgcaaaaaaaggcagtttttattttttaactagtttattttagatttagggggtacatgtgcttgtagttacatgggtatatagcatactgatggggatcaggcttctattgtacccagtgtccaaatagtgaacattgtacctgacaggttatttttcaactctcacccctctctcaacctccctccagagcagcttggattttgatagggattatattgaatctgtagatcaatttgggagaattgccatcttaatgatattaagtcttccaatttatgaacttaggatgtctttctatttacttaggtcttctttaatttcttttttttttttttaagagataagatctcactctgttagctcactgtgaactcctgggctcaagcagtccttccacttcagcctcccaagtagctaggaccacaggtgccaccacacccagctaattcgtgggggagggagggtagagatggggtctccctatgttgccctggctggtctcaaactgaactcaaatgatcctcccaccttggcctcccacagtgctgggattacaggcatgaggcagtgtgcctggcctttcatttctctcatgttactggttttaagcagaagaatatcatgatttgatttatacttaagaagattactcagtagtggccgggtgcggtggctcatgcttgtaatcccagcactttgggaggctgaggcgggcagatcataaggtcagcagttcgagaccagcctggccaacacggtgaaaccccgtctctactaaaattacaaaaattagttgggtgtggtggcgggcacctgtaatcccagctactcaggaggctgaggcagaagaatcgcttgaacccgggaggcagaggttgcagtgagtcgagaccaccccattgcactccagcctggggtacaggctggggtgcagacagagtgagattctgtctcaaaaaaaaaaaaaaggaagattactcagtagtgtggaaaaataattggtgggcaaagagacgctacatgaacaagggcagagacaaagaggaagtcactcattacataaatatttatggacgggacttggtgattgactttatgtagaaagaaagggaagagtaaagaacaactcccaggtttgggcttcggtacatcacgacgccaccaattgagataggaaaacacagtttggggggaaagatgaagtgatcagtttgtgcctgctgagcttcaggtggtgaagggacacccaggtggaaaggtaaggtagttggatatctgagtccaatgctaagaggagaatctagtctgggaatagtgatttgacactcatcatataaaaggagagctgtgagagtgcacaagccaactgatgggaaaagtaaaggaagcagaaaggatacacagaaaaactaggaattccaagggtgagctgatgacaaaaagtccacaaaaggagactgagaaggaacaaccagagaggcaggaggaagctccagaaagagatgcagggagagtggctaataataacaacttaaggactgaaatgcttccatcggaattagccaaattagaagtcactggtgaccctggcaacgactcttttgctgaagctgaagccacgctgctatgaactgaagaggaagtgggagttgggaaggtggagacagcaaataaagataactcattccagaggtttgcagggagaaaggaaaagaagtgaaaaagcagtaactaggaatgtaaagagggtcaagaggaggttgtgctttttaggacaaaagagacttgggtgagtttgtaggctgaggaacgaaagcagatgaaagggagaggatgagggatggagagtccttgtagagctgggaggaataaggagggagaggattgattttatttatttttcttttaaccctgcttgattctatactgatttttaaaatttttttatatgggccgggtgcagtggcttgcacctgtaatcgcagcacttggggaggccgaggtgggtggatcacctgaggtcaggagttcaagaccagcctggccaacatggcgaaaccccatctctactaaaaatacaaaaattagccaggcgtggtagtgggcacctgtaatcccagctactcaggaggctgagacaggagaatcgcttgaacccaggaggtggatgttgcagtgagccgagatggtgccaactgcactccagcctgggtgacagggtaagacgccgtctcagaaaaaaaaaaaaaaaaaaaaattctatggaggtgagaggacttagaacagtgctcttctgacgttaatgtgcatatgagttacatatctcaaatctcccctctctccatcttgacagctaccattctggtccaagtccaagtccccctacaggcctcatctctcactgggacaactgagctggacttcagacgctcaaccctgtggtttaggcttggtggtgaagaggccaggacagggctaactgaatggaagaaaacagaaggggccggcatggggagtctgaatacgggcatgctgctggggagaacttggtgatgcttgaggttgggatttcagagaaggctgttctaggcgtggctctggagagaatagctacagtcatgtgaaggccactgaggatggcaaggaagggccctgggacattcacacggatgagcaggatattaggacagaaacccaagtcccggatggatgaagggaggtgacagggaagatagaagatgaaggtgatggggaggcacagcagagtagagccaggcagcagaagtctcagaggagaaagaaaaagataacatatgcgcacagaaaacaaaacaaaacaaaacataaagccaggcacacgcctataatcccagcactttgggaggctgaggtgggaggattgcttgaggccaggagttcgagaccagcctgggcaatatagtaagatcttgtctctacggaaaaaaaaaaaaaaaattagcctggtgtggtggcatgtgcctgtggtcccagctacttgggagactgaggtgggaggactgcttgagtctgggaggtagaggttgcagtgagtcgacattgagccattgaactccagcctgggcgacagagtgagactctgtctcaaaaaaaaagaggcggggggtggggggtcattgtggctcacacctgtaatcccagcactttaggaggccaaggcaggcagatc

SEQ ID NO: 366 - DNA, 131546 bp, Homo sapiens
gatcattagagaaatgaaaatcaaaaccacaatgaaataccatctcatgccagccagaatggtgattattaaaaagtcaagaaagaacagatgctggtatggctaaggataaataagaatgcttttacggctgtgcgcggtggctcacgcctgtaatcccagcacattgggaggcggaggcaggcagatcacgaggtcaggagatcaagaccatcctggctaacacagtgaaaccccgtctctactaaaaatactaaaaaaattagctgggcgtggtggtgggcccctgtagtcccagctactcgggaggctgaggcaggagaatggcgtgaaccccagaggtggagcttgcagtgagccgagatcgcaccactgcactctagcctgggcgacagagctggactcagcctcaaaaaaaaaaaaaaaagaaaaaaaaaatgcttttacaccattggtgggagtgtaaattagttcaatcattgtggaagacaatgtggcgattcctcaaagacctacaggcagaagtaccatttgtcccagaaatccctttactgggtatatacccaaaggaatataaatcattttcttataaagatacttgcacacgtatgttcattttagcactattcacaatagcaaagaaatggaaacaacccaaatgcccatcaatgatagactggataaagaaaatgtggtacatatacaccacggaataccatgcagtcacaaaaaggaatgagatcatgccctttgcggggacatggatgaagctggaagccattatgcttagcaaactaacgcaggaacagaaaacgaaacaccgcatgttttcacttataagtgggagctaaacagtgagaacacacggacatagggaggggaccaacatacactggggcctctgttggggagttgcggaagggagagcatcaggataaagagttaatggatgtggggcttaatacctaggtgatgggttgataggtgcagcaaaccaccatggcacacatttacctatgtaacaaacctgcatgtcctgcatatgtctccaggaacttaaaataaaataaaataaaatttaaaaaataagaaactaccaaaccatttttcatggctgaattgcgttacattcctcccagcaatattccagttgctctacatctttgtcagtacttggtattttcagttttaataagtatgtggcagcatatttatgtggttttaatttgcatttatatttacttaatgacaactgatgctgacattatacatcttttcatgtgcttgattgctattcatatgttttcttttgtgaggtttctgttaaaattatttccccatatatttatggagatgtcttcttattacattttgataattgcttatatatatatatatatatatatatatatatatatatttaacagtcatatatctgatatacatcttgcaaatattttttcctagtctagggattgtcttttttatttcttaataatgcctctctcaagagtgaaagtttttaattttgatgaagcccaatttataattttttattttatggttctagttttttgtgttctctctaacaaaacttagcttattgcaggtcacaattttttttctgtggtttcttctataggtttaccagtttaggtctatgttccattttttatacctcatgagatatgaattgaggtttctctttttgcatatgattgtccaattgttgtagcagtatttgtttaaaagatatcctttatccattgaattgctttggaacctttgttaatgattgattatatatgtgtgtaagtctatttctgaactttcatcctgttttattaaggcatgaaaaatgtaattttgccaatatcattgatttatagaatcattttgctagtactatactctattgtatactgtggcttcagagtaaatattaaaatctagaaattgtagtcctgcaagttggtttttttccttgaaattgtttgactattttgtgtcatatgcttttcacatatatatacttttttttttttttgagacagcatctcactctgtcacccaggctggagtgcggtggtgtgatcttggctcgctgcaaccttcacctcccgggttcaagcgattctcctgcctcagcttcctgagcagctggaattataggcacgcgcctccacacttggctaatttttatatttttagtagagacgggttttttcccgtctgttggccaggctggtcccgaactcctggcatcaagcgatctgctggcctcagactcccaaagtgttgggattacaggcatgaatcaccacacccagccccacttttcatataaatttaataattaatttaaatatttctactagaaatccttcaggaattttgattttgaacttttatatgtgttttttattattgttattttttgctttattgaattggctaagacctccagcaattcattgaatgaaaagtgttgaaagtggacatccttgtcttatttttgatcctagaggtatttcaaaatttttgcagagagtctaatgttagctgtacgttatttgtagactttttctttaaaaaaatagagacaggttcaccctttttcacccaggttggagtgcagtggtgtgatcaatgcttgacctccttgcctcaagtgattatattgcctcagcctctcaagggattctcctgcctcagcttctcaagtagctaggactacaggtgcctggtatcacacctgacctaaacttttctaaaaaatcagattaagggccaggcatggaggctcacacctgtaatcctggcacgatgggaggccaaggcaagtggacggcttgaggccaagagtttgagaccaatcaggtcaacatggtgaaaacccatctgtgctaaaaatacaaaaattagccaggtgaggtggagcacacctccaatcccagcatacttgggaggctgagacatgagaatcgcttgcacccagaagacagaggttgtggtgagctgaacttgcgccactgcactctagcctgggcaacagagcaagactgtctcaattaaaagaaaaaaattaaaagaaaaaatcagattaaggaagtcttattgtgttcctagtttgaaagttctctgtaaaaattatgaatggattttaaatttaataaaaaatttttcacatctatttatatatactattttaatctttattctgttaatatgggaatttgcgtggttgatttttaaatactaaaccaactctactttcttataagtaaccctatctggtcatgattgaacattgttcgagtttactgctaatatttattatgagacattagtattcattttctcttcttgtaatgctctttccagtgtttggtataaggaatattctggcttaaaaaattagtttggaagtattttattctcctctattttttgtaagtacttgtttagtattgaaattattttttcttaaagaagatattttctttcatattggaagacatctttctaaactttgcagctgtgttgactttcacttctacatgatttcttttttcttcttctcctttttttcttttgagatgccatcttactctgtcacccaggctggagtgcagtggcgtgatcttggcccactgcaacctacgcctcctaggttcaagtgattctcctgcctcagcctcccaagtagctgggattacaggcacacgccaccatgcccggctaatttttgtatttttagtagagatggggtttcactatgttggccaggctggtctcaaactcctgacctcaggtgatccacccaccttggcctcccaaagtggtgggattacaggtgtgagccactgctactggccactactacgtgatttctaacaacctgtttggattcaatattcttcttgcacaactatctgtcctttaggaataatgtgacagtaagagtgaaagtgcaaaaatatagtcagttgtttcatatcattcactaaaagtaattgttctcatgcatgcatttgggagcagtcatcttaagaaaagtttactacagtcaaatgtgtctgaaagacattgttcattatatctctttctcagaaggcagaacacatgtagtacattagagacgtcacaaggtcctgaagaaatgaatttaactttgtataacccaaaggtttccaatatatttctcctagaattctttttacttgcacaatacattttaaaatcactcagaaacgaatgctccatgtacagcagtttgaaaaagcatggactagaaagtactgagactgaaattcattaagctagaaaagagtttaataaaatagcttctcccaaatcatttcagggctgctccatttcagcaacatttctaatctttagctatattccttggtgatgttttacagtatgatgtccaaattgcatgcattttaaatttccataaagtgaatcttagtcattttccttgtagaaaattaacagactaaaattaattgttcatcaatccggagtcttcctcccactccttctctcctcaatgaaagaagaaggagctggaaatagcatgtttcttaactgattatctcaactttaatcatcctctgcactggaaggtctgatgcccacaagatactttcactgttttcagttatgaagaatggtcatttgtataattttgctggagaaaaattgcttctatatacaaaacccaaggaagaatattgcatctgtaatatctaaatacataagtaacctctttttgtcctagaatcttaaaaattggccttttttgatttccaacttttaatttcaggggcacatgtgcaggatgtgcaggtttgttacataggtaaacatgtgccattgtgattagctgcacagatcatctcatcacctaggtataaagcccagcatccattagctattcttcttaatgctccacccttccacaggccccagtgcgtgttgctcccctcaatgtatccatgtgttctcattattcatctcccacttataagtgagaagatgtggtatttggttttctgttcctgagttagtttgctgaggaaaatgggttccagctccatccatgtccctgcaaagggcatgatcttgttcctttttatggctgcatagtattccatagtgtatatgtactacatttaatttatccagtctaacattgacaggctggataaagccacaatttgcaattttttgataagagttttctcctcaattccttcctaattttacaaatttataaaaatgagttctagcatagatttttaaaattcacaatctgtttgaaattaccaaatacatttatcaactttcaatcaaggtgaacagattattctaatgaattttttttctctaagtctctgcacatttttctctctgaggaagaacaattatgtcaggcttctgacaagcttatgactgacaattgattaatattatttttagtgtgtttccaatgctggtctatgatgtgttctgtcatagaaactttacttttctatatcttcagatcttttttccacaatcaagaatagatactttgggattttatttattgcacacctagtaaactggctaatctggtatcttcataggttacgcatatctaatttaagggatagtacttgtttctttcatgcaatgaagactgcaagaatattatatatttttaaaattcttgtatgtttttaattgatgaaaaatgtctaattaattatgtatagattgcaaactgaattactgtaaactccttaagggtgtcaactgtataaccttagcagtcaagcagaatgctgggcacatttaaatggctcaacaaaagtgtcaacagatgataaaggaaggatgattttctgaaaaaaatattaccagtattgcaaccttgtgccatatcatgcatcactgggcattaagagacaaatgagaaagctgggattgaaatattaaagagatattaagaattgacatcattgtccaagcaagagagtatattcaagtggaagtaggatattaggcaagaattatatttagtaatcgcaaatataattcaagatagcaagggctacagccaacaagcaaggcagtcagattgacatttctttagccatttttcttaatttccagacaaatataaatccatcctttttgatcatggttggaactcactgtttttttaaattgcatgaagttgtggtatcctacaattttataacagtctttgtttctaatacaccactttcaagctttcaatgatttgcaaatgaagagactacatatatttcttttgacagtgtctgaagtgttggtataatgcttaacaggagtccctcatcaagtgactattttacataattgaattatctaactagaatcagaggtgaaaagctatgacacagtgaaatgtgaaattattttgcagatcataaacagctttgcaagtatgcaataccatcattatgagttcagcaatctgtcaaagaaaatattaatactggcaaagaatttacctacagggtaacagaaaatgaatacttcttattgatcatgtttctagcaaattattaaaacagcataattcagagcatcaggcacaaactaattttgtgaataaaggcccttaggccacatcctctctattaaggaaagctggccaacattccagatgtacggttagtttttaatgggagggtggtgtgagtaagtgggggatcctgtctcaaagaagtcaagtgacattacccgacactcatgcattgaccttccatgagtggcatggtattgtatttattataaaatggcagcaggttttctgagattaagtagaaaaattggtaagtatttaactactatctagtgacacaactctttaaaaacatcaaatagagaactgaggccagaaaaatagcaataaaaagtcagtttgaaaattttaaaaaaatcttcaaataaacagcatgaaaagaaggaaactgggaaaataaaatctgagatatactgagtaaaatacctttggattgagtagagctattagcgggaaaaaaataaggcaagaatttgaatgaagctcataagaactgaaatgcttggttttaaaagttgaaaaaagaggccttttaaaatattcttaggtagctgattatgaattaaagaggaaacatcacattgaatctaagactttctctttataaagggaatgaaagcttagcagattaatattaatgaacaaactgaatgaatgaataaatgaatgaatgcctactctctatacacaggtgtaattttaattagctgtaagagttaacttgtcaaggcctgtgagattgtaaactagttgaaattgttaggcttcctctccatcctttttttcaaggcctatttttcccttatccattgtatgtgacttttaaaaaaaaacagacttatcctgaactttcaaaaatgcaactaaataataaactcactcatgatttcttcattcaataaatatattttgagtatctatcatgacctgacattgtttcaggtgtctgtaatttaacagtgagaaaaacagataggatatctgacctcatggagctcatagcttagtctaggaattgtatataaaataaataatttcctaaatgaatatataagtatataattataaaccatcatgtgtactgtattagtcagagttctccagaaggacagaattaatggaataaaagagtttcttaggtatttaatgagtttattaagtattaactcacacgatcacaagttcccacaataggcctgctgcaggctgaggagcaaggagagccagtccaagttccaaaactgaagaacttggagtctgatgttcaagggtaggaagcatccagcatgggaaaaagatgtaggctgggaggctttcacattttctgcctgctttataatcgctggcagttgattagatggtgcccatccagattaagtgtaggtctgccttccccagcccactgactcaaatgttaatctcctttggcagcaccctcacagacacacccaggattaatagtttgcatccttcagtctcatcaatttgacactcagtattaaccatcacatgtgctatggaacaatatgatttctgtgagaacatatgactgggttggttagggaagactttcataagaatatagtatctgagagagagctgaagaattagcagataataactatttggggaaacaggcattcataataatttatggagagtgttttaggccaagggcacaaagagtagggcctaagaagcatgttaaaatacttgcttattaatgaattatattgtattttctcaaggattgtttttattttaatggagaacttttccccttctttgactgtattataagtgatctaacaaatttttctcattataattcaagcagcttagaattatacatgttaaaaatatataataaaatgcataattatatacattattttataattgtgagtggaaaatcgttatctcaatttcctaaaaatacttattattgcattgttatgcattaagacataaatttcatacatgtgcacacacactttattttctctaaaatggtttcatactatatgcagcaatttgcaacttgcttttttacttaacagtatgacttgaacactttccctgccagtatgtatagtcattattcatctattttatgtacacatgtcattcatatacatatgatatgtgaatatataaattcataaatgttaatacgtatgatacatgaattcatatatagtatatatgtgatgtgtgagatattgttacatatatactgactatatcatgatttctataaccactgttgtataaatgcacatctagattgtttacaaggtttttttattttgggtgatgcagccaaacatattcttgcacacaaaagtttttggatctgtatgagtaattttttagaaaaaagtttctggaattagaattacagcttcaaagtacaaattttaaaaatttgacagctattataaccaaattctattcctttacaagaagactttttattagctaaaatgtacaaggatagcttgtacattttctgcacacttgacaaactaaatataattatctttaaacttttaacagagggctctgaaatcggaagcatcttctgtacaaaattgactgcttttataattcagtaggtagtatcattgtttggatcaggatatacaaaaaataaaaagtggtaggtattgtgccaaagtagagagggcttgcctagtatggagacattcaaattcgaatccaaataccaccacagccaaatgcaatatagacctgggctggagtccatcagctggaactcacagaagtaaagagtctcaagaagaagataactggtcccaattgttcattgtccttaaatcattacaattggctgtccatccaacatctcatatacagaaggtgggctttgtctctgaatcaggctgctacacccacaaatatgaaaattccttgttaagaattgcgaggttggaatttcacttgctgacatcttagaatgtggtaaattttttcttactcctagagcagtcaatcaacataatagaggaaaaataatacatatttaaagggatctattatgcttcaattaaattgcatgttcaataatgaaacaaatggccaggtgcggtagctcacacctgtaatcccagcactttgggaggccaaggagggcggatcactaggtcaggagttagagaccagcctggccaacatggtgaaaccctgtctctactaaaagaatacaaaaattagctgggcatggtggtgtgcccctgtaatcctagctacttgggagcctgaggcaggagaattgcttgaacccaggaggccgaggttgcagtgagcagagattgcaccactgcactctggcctgggcgacagagcaagactcggtctcaaaaataaaatgaaataaaagaaacaaacactttaataatacttactctgtataatgctttgtacagatccagcatattaactaagaaaatggattaattacctttccagtaaaattccatgaaactgatgagtttttaaaaattctattcctttttgttttgtagaaacataatataatgtttcaaatgacggtgttctgtcttatgaattgattgaattcaattcattcaaaacattgaaaagtaggactgttttgtagattatttgaaaaaaattactttcaatgcatgaatgttttcccagcctagaacattccctctctattgttcccaaacctagtccaaactatatcattgacatatttgaaagccataagtatgaggaacagctggacaagttactgatctcaatgaatacattttcctgctttgcaccccaattctttccctgttgaggagccttaaaaattttcttagccagaggaagtaagagataaaatttaattttctccatctcagcatatctactttaatgagctccccaggcttctttctagatttgcctagataactggataataacaagaattctcacagaatgtcttttatgattaaaaaaattttacctgtggataaaatcataaaattggtaaaattggatgggagagtcacctgtaggggcagtgttaacttcaaagtcagtgggtgggtctgtgttgccaattcatctcagccatttgtggatgacttctggtcaactaataaaaactggtttgttgtgtgcattagatgagatagaatgtgtacggcacccagcactgggccagcacatagctattaataaatgttactggataggaaaagattaaaacaattttttttgtttctttctttctcttccctgtggataaccacagtggttctgactccctatgcaactgctccattttccctctccactttctatgcagccttttgaaagaatggacttctcagtgggaattggtcttctgtgaaagattcatgaggactgcattcaaaacaactttatacccatgctttcaatctgacacattgtttcacttgacaaatctctccttttaccactcatattgtttgatatggatcatcattatcatcatcttctgcaagtttggagaatctcctaacctctctcctatcccctccaaccaactaaaaagcagcttctggcaggctaaaaagtcaggtgatcgtgtccatattaaaatggtggttatctgtttgacagacctatggagctcaacatgcacagcagtattccagtgtaaagtggaaatggtgcatatgtgattagatctgagcaaatccagaaggtagaaaaataaaagcagatgactcaaactgtcatggtattactttctactgcttcattgcttctccctccactcgtatctttgaagtaggactagtttttatctgtaactgtattgtatattagcagagttgatccaggaagtagtgaggaaatcctttaaatagcgctttagattgtgcctttggtcatttacttcaagtgggaagaaggcctgagatacaaatctacagatttaagaacagaggctaatatattgctcaaatggtcaagaatatggaaagaacaaatattataaactttacaagggatgaggggtatatagtaagggtatagagagtgtgatgagatctatatcccatacaaatgtttatcagaggtctacaactgactagaggggtctccaaggcactctttccagattttccttcaggtttggggcctcattcccccaactactggtcatgttggccaccactgataaatcatggctgtttccttctcttagaattaccctgaatgataagagctgactcactcaaggatggcttccctgtccaggggcagaccacattcaattactagtaaatgtagaggtaaagccccacccctcaccttaatgtaatttcactttgaaagcccccaaataaagagctccctgtggaatcaactgaggcttctgcttaaattgtactgttttttccttttagagttaccaaagcaggctgggtatggtggctcatgcctgtaatcccatcacctttggaggtcaatgcaggcagatcacttaaggccaggagttcaagaccagcctggccaacatggtgaagccccatctctactaaaatacaaaaattagccagctgtggtggcacgcacctgtaatcccagctacttgggaggctgaggtaggatcgcttgagcccaggaggtggaagttgcagtgagctgagattgtgccactgcactccagcctgggcaacagagccagaccctatctcaaaaaaaattatcaaaacaaaactcccacagataagaataactcttaaatattccctaagaggttcatttctttgtttgtattattccatttcaagttaacaaataacaagtatatttgataatttgattgattatggacagatgtgtctcaaatttgagtgaggctgatctaatggctcaaaagacatgtggctacctataaatgaatagccttttatttatgaattgtaacataatttgtaaggacttgttttccagagttggcaaaaaaaacaagagaagttttaaacatgacttaagggaggttgtcgccaatgcagtaagaaatgttgattccaatctgactgagaattagagatcataaatatccatctggctacttggaaagttgagctatttaccttttagctgtcatcatccgtgatgaacattcccaggacttcagacaagcatttgcattattagtgttaggacagactctcagagcttctgagatccatacaattgtcacatgtgtatgaagaaagattaaaaaattaactgaagaaggattttatgaaagagagtgaaaggaatgtcagctaccactatttaagatgctttttaaggatgttcctttctttctttgactctgtattggagccaaaaattttctgtatgagggtgttttatgatggttgctacagttccagatcacattccaggcataaagtcctggaaatgttcattgcacatggtgcaccttagggagctcatgggaggaattctcactctgtattaacatatactattgtatttatttatttaacttttaagttcagagatgcaggtttgttacacaggtaaacttgtgtcatgggggtttgttgtacagattattttatcacccaggtattaagcctagtagccatgagttatttttcctgatcctctccctcctcccaccctccagattttttttttttttttttttttgatatggagtcttgcgctgttgcccaggctggagtgcagtggtgtgatcttggctcactgtaagccccacctcctgggttcacgccattctccttcctcagtctcctgagtagctgggactacaggcacccgccaccatgcctggctaattttttgtatttttttagtagagatggggtttcactgtgtaagccaggatggtctctatctcctgacctcatgatccgcctgcctcggcctcccaaagtgctgggattacaggcgtgagccaccatgcccggccccaccctccacattttgaaaggccgtagtgcatgttgtttccctcaatgtgcccatgtgttctcatcattttgttcccacttataaatgagagcaagcagtatttagttgtctgttcctgtgttagtttgctgaggaagtggcctccagttccatcattcttttttatggctgcatagtattccatgctgtatgtttagcacattttctttatctagcttaccattatgggtgtttagcacagagctcccagaggaaggggcaggctacattatttattagataaaggattttataagattttccacaaaaatcagagcatagtactatttcagaagttcataatatttttatataaagatttttcttccaccaacaggatgtaagatgcatgatggatgcctgcatgagtagttgtccacattcaaggtgtttgttatagttttttgagttacatgagggatggttatcacttatcatttggcatgatgttacaaaattctagctacagtggattaaacaaaaaggaatttatttttgcataatgtaagaattttttgaggcaagtagtccaggtctaagatggcagtccaatgagaacatccatattttagtcttcctatagctttatcctcttggtatgtggcttttattctgatgattttatgatagttgctacaattccagaccacattgcaggcataaagaaaactgaagaaacaagaaagagcatgaaaattttgttttagtaatacaaaacgtttccaggaaccctgagtagaatatggcttatatctcattgagcaacaatgtgtcacatggtgatatggtttggcactgtgtccctacccatagctcatctggaattgtaatctgaattgtaacccccaagtgtcaagggagggacatggtgggaggggattgggtcatgggggtggtttctctcatgttgttctcatgatagtcagtgagttttcacgagatctggttgtttggtaagtgtctggtgtgtcccctgagctctctttcttgcctgctgccatgtaagatatgtcttgcttcccctttgccttctgccataattgtaagtttcctgtggcctcctcagccatgcagaactgtaagtcaataaagcctcttctttataaattacccaggctcaggtagtatctttatagcagtgtggaaattgactaatacagagaattggtaccaaagtggggtactgctataaagataacatgaaaatgtggaagttactctggaactgggtaacaggcagaggctggagcagtttggaggtctcagaagaagacaggaagatgtaggaaagtttggaacttcctagagatttgttgaatggttttgaccaaaatgctgatattgttatggacaatgaaatccaggctgaggtggtctcagatggagatgaggaacttacgtttaaacgggaagcagaatataaaagtttggaaaatttgcagtctggccatgtggtagaaaagaaaaaccccattttctgaagagaaattcaagttggctatagaaatttgcataagtgatgaaccaaatgttaatagccaagacaatggggaaaatgtctccaagccatgtcagaaatcttcacagcagcccctcccatcacaggcctggaggcctaggaggaaaaaatgtttttgtgggccaggcacagggcctcactgctctgtgagcctcaggacttggtgtcctgtgttccaggccctccagctcaagccatggctaaaatgtgacacagtacagctcaagctatcacttcataaggtgcaaggccaaaggcttggtagcttccacatggtgttgggcccgcgagtgcatagaagacaaaagttgagctttgggagcctccacctagatttcagaggaggtatggaaatgcctggatgtccaggcagaagtctgctgcagaggtccctcacggagaacctctgccagggcagtgcagaagggaaatgtggggttggagaccctatgcagagtacttactggggcacagccaagtgaagctgtgagaagagggccaccatcctccagaccccagaatggtaggttcactgacagtttgcagtgtgccctggaaaagccacaggcattcaacgccagcctgtgaaagcggctttaggggctgtatcctgaaaagccacataggcgaagctgcccaaggccatgggagcccaccttttgcatcagcattccctgcatgtgagatatggactcaaaagaggttatttcagagctttaagatttaatgactgctttgctaggttttggacttgcatggggctggtaaaccttttgttttgtcccatttctcccatttggaatgggaacatttacccaatgcctgtacccccattgtatcttcaaagtaaatgacttgttttttattttacaggcttataggtggaagggacttgacttgtcttacgtgagactttggacttggacttttcagttaaggtgctggaatgagttaagacttgggggactgctgggaaggcatgattggttttgatatgtgaaaataacatgagattttggagggtcagggtggaataatttggcttggctctgtttccccacccaaatctcatctggaattgtaatccccacatgttgaggtagggacctggtgggaggggattggatcatggggtgattccctccatgctgttcttgtgatagtgagtgaattttcatgagatctggttgtttgataagtgcctggtgcttcccctctgctctctcttgtgcctgctgccatttaagacatgacttggttccccttcaccttctgctatgactgtaagtttcctgaggcttccctagtcatgcagaactgtgtcagttagtcagctaaacctcttttttaaataagttacccagtcccaggtagtatctttatagtagtgtgaaaacagactaatacacatggccacatagatgcaagagaggctgataaatgttgattttagttggcatattgagagtatgtataaagtctgtaaaaatgaaagggagtatagatattaggtaggcaatagtggttctgacaaaatggattttcacttctaagtacatcactactattttacctttcttcctcaaactatgcccaccattgctagattttatggacttacatcattgtctacttaaacaccaaaaagttggtgatgcagttttctacagtaattttttgcatataggcagagttagagtatgtgtaaatatctctctaggtgcccatttttatgagaggagccactttcaatgaagaggttgccaaattatctccttaacagaactgccaaatgtgtaatagtgatttaaaatgaacaaattattatgttaagaatgattccctattagataaccttgaaaactcaccttttgattaatgtcatgcaaataaaatcattctttaaaccagagaaattatctttaccatatatgttgcatggctatttttttaaaattacaattttttataactgataaaattcagcttggtgagagcaattttaattcccctgtatttcagtcacaaaagtgatatctctggcttcattagcagtggaattacttgctcttcttatgacttaatttcttgctgaatttcacaggcatgctcttcctacagaggaaagttacaaagaacaaacttcccagatggctaaatttcattgaaaaagagtcatctaggaatagaacaatttgaaaagaagttcaatatttgtttactgccaccatcaactccttctgtcagacaaaaatgtaaaaaagtcaaatgaaagcttatgacattctcaaattaaaaaatgagtgtgttattgatttcttatttacaaaaaaaatcagcaaaatgttgtaactgaaattatctaattttaaaattggctcatttctattaatcaagtagaaaagtttttgatgtgtctagatggatatttagcagtagattaccatgtggacagttggacagtttttcttttttttttaactaatgcattagaatgtatttgttgttgttttgttattgttaagccaagtgttatttaaaagtacagaagaatggtagcacactaaaaactgtagcaggggataaaggtagaaaaaagacattttagttgaattttgatttacattgtgcttaataagcaatctaaattcacccagacttttttttagtcatttcaggatattgaatggcaaagtattaagctgaagagaaagattaatatttgaaaacagcatttttacactgtaaagttttgaacaaaaagaaataacctagaaaatcacgttttccagggaacttaaaattaacccagaaaattaaataaaatttaccacttggtttcgccctcccttaatatcttttaaattcattaatggtccaatagatgttgtaattaaggtcatccaagtaacttgtcaactaagacgttttgctggggtaatcttcattgtcaaaaggaaataattgattgaaatagccattgagataattaacacacacagacagatatgcagtgtaaaaaaatgcccttgcccttggtgctaaccttgttggataagttgagtgggtttttaattctttctgattgccgtgtttgtttttctagacttattcagttatattaattctttgctttggttttagaattccagcttctcggtgcaatgtttgtgtatacatgcattttctacttagtgaaaaaaaaatgggagcatgagtaaatgcttgtgaagaagcaaaacaaaataaaaactaatgttttgttttttttctatttgccatattgtctgatcaaaaaattctactagcaactttatgaaaaaatgaaatgtcactatgaaataaattgatgggattatatttatctaagaattataagcattctcatttaatggtttgtcaattttctgccatgtaaaccaggtactcagaaaagaagtttttccttaacaaaatcaaacattttataaagtttgtattcagtgtttctctaacccctttctgtcctaacttagtactctcgcattctttttgggtgcctttcataccataatctcatatcttcttctgctttctgtctaccaagcaacccccacagtagaggctcttcctagtagggatttcataaatattcattgaataaatgattttgggggtagttttctgaccttcagttatagcaagattgtgggatcttgaattcagaagctgaaacaaaggatgcctgattgtggtggaaataggagtccccttggtgggctggttttacagtatggtcctggaagtatttctggaagtacaccatagagaagttctttaattctaccaataattttgaaaacaccctattcctggtacaaaactctttgttgtttaaaatagccagagcgttttctgttacagtgagtcaataaagtacttgataccaaaagacattacaagcaacagacctcaagtttgtgataagagatttattatttgatctagttagataagaaggcagtgaggagcaggttaacattagacaggaaacatttttaatccatgactccaatcattaaaatattgagaacagatcaaatgatggttgctctagcatatcacaatgggcataagttatacaaagactatagagtgagatagttccagaaacctctattggagtgtaaatgatagaatcagagctttaaattctatactcaaggcaccagagattttctatgactattcctaaaataatttcttatagccactgggtttatgtagatatttctcaggtttagaatctgatttttttatttctggaattttaacatagaccaggtttacagtctcagtgtgtttcttctgaaagttaggatttatttggaaaaaatagaatattatgatatggaatacggcattttggaggcttcacgtatatctcagttcctcaaactccaaaatttcccagaacttttcatatcaatagaatcgatccctcttcattggtttcatgacctggtttcactggtttcaaaagactctgcactaaattcatgagcttattatcttgcaggcagatgcaaattctcatttctgatccctgtcacctctcactgtcctcttctataactagagtcagaatgccctacaattgtaaatttaaacctcagaggaaagggttacacattaaaaactttgcaaaactttaaaaacttataccagcccaaatctggaaagcttgtggtgcaatagacactgagggtactttaccagggagaggaaaacatggctaaatttattaatttggagctcttaaaaaatgttataccctctgcttgagtagctgagagaagcttggattgttgactaaaactagactaaatgggagcctgtattgaatgaagcttgggagtctagaaattattatgtataaggtagagaaagtaatctaaatatttagaaagaaaaggcccacaggtttttttttttttttcatcaaaacactaagagataaattgacaaggaaggcactacctttcttaaataattctgtagtggctgtatttttctagacttaaaaagaagaaaaaggtaggagaagctgccaataaaatgaactcctgatttcaataaagaagttaacttaattactactgactaagtgagcatggttaccaagataagatatgacccaagaaatcagaatggtttgaatttaaccaaactttgaagatagttaatcgatcatgcaatatctaggactgaaaaagatgaggagtctacaaagttctctaatgggagagtagccaggaacacttggggaagacctattacatatacatatacatatacatatacatatacatatacatatacatatacatatttcaaatatttctcttgtccttctgcaaacctgtagccaaagtaatattggactgggtaaagtgatagacccaggcttttatacatatatgtatatatgtatcatttttttctgaaaatagaaagctgatgaacagtttcagaatgccattgaggactaccaatcaaagaaaagtgaggaaattaaattattcaggcaaatggagttttgaacccaatctacattttacagtgggcctggtagatctggaaaaaagtttttgtggttatttacttagctgctgagttcatatcaggaataaatatattcagcaacagcatcaccacattgcctcttgaactagtaaaggctcttacagtaaaaaaatggccagctcctagaatattctatttttactcaaaaagtacatcaaagtcaatatctgttccctggagggaaccagagagattagtggcaccatcaacgtcttaaaagatgcatgtaaaaataatatttttatatacccacttaaattgacaatttgacctgtacagaagataggaaaatcttgtaggacagtagattaaaatacactttatcaggagatggctacaattgcagatgctctttcacatgtggtatatttggaaaacaaagtaaatatagctgatggtgtctatgtgacttcatgtgaattttttctctgagttaataaacattttacttttactttattagtacagcagtatgctttcttcatcctgccttagggttatagcaactttccacctctgctaattgtactgtctaaggaatgtaatcattttgccatacttctgaggatcatgtttatcaattacatggatgatatcatgttatagttcactggtgaggagaacatagcaagatgagttgataaaacatgtgaaaaaggggttacaagtaaattctatgcatgatatgttgggaattgataattttataattcagtttaaaagttggcaaactttttctatgaagaattagatagtagcttttccacaacatgtttgcctccagaacacatgctgctaaaaccacccctaaaagccaaaatgcaaaggaagagattcttaacagcattattgttattggacacatagatctgggaaagtccatgactactggccatctgatccccaaatgtgattgtatcaacaaaagaaccatttaaaaattttagaaggaggctgctgaggtgcaaaagtgttcccttaaaggtgtctgggtcttacataaactgaaagctgagcatgaatgcgatatcaccattgaaatctccttgtggaattttgagatcagcaactactatgtcactgtcattgacaccccaagaaacagagactttatcaaaaacatgattacaggaggatctcaggcaaattcaaagctgctgtctccaaggatgagccaacctgtgatcatgcccttcttggttacactgtgggtgtgaaacaattgttggctttaataaaatggatttcgctgagccaccctatagccaggagagatatgaggagatcattaaggaagtcagcacttatattaagaagactggctacaaacttgacatagtagcatttgtgctaatttctggttggaatgttaataacgtgctggaactgcgatggttaatattgagtgtcaacttgattggactgaaggatgcaatgtattgtgtgtccctaagggtgttgctaaaagagattaacatttgaatcaagggactgggagaagcagacccacccttaatctgggtgggcaccatctaatcagctgccagtgtggctagaataaaagcaggcagagaaacgtgaaaggactagactggctaagtcttctggcctccatctttctcccataattgatgcttcctgtcctctaacatcagactccaagttctttagcttttggaatcttgtacctacaccagtggtttgcaggggctcctgggccttcagtcacagactgaaggctgcactgttagctttcctacttttgaggttttgggacttgaattggcttccttgctcctcagcttgcagatggcattttgtggaacttcaccctgtgattgtgtgagtcaatactccttaataaactccctttcatatacatctatattagtccatcttcacaccgctggtaaagacatacccaagactgggaaatttacaaaagaaagagttttaatggatttatagttccaagtgactgggaggccttacaatcatggtggaaggcaaggaggagcaagccacgtcttacactgatggcagcaggcaaagaaagagagcttgtgcaggaaaactcccccttataaaaccatcagatctcatgagacatactcaccatcatgagaacagcacgggaaagacccacccccatgattcaaccacctcccaccaggtcccacccacaacatgtgagaattcaagatgagatttgggtgaggacacagccgaaccacataaacatctattctattagtcctgtccatctagagaaccctgactaatatgagaaccaagtgctcacacgtcttgttgcaagggatggagagccacctgaaagatgtcagtgccagtggaactacactgcctcaagctctggacgaccaactcttccaactaacaagcccttctatctgcctctccaagatgtctacaaaattggttgtattgatattgtccctgtgggcctagtggagacatgttctcaagcccagcatggtggtcatctttgctccagtcaatgttacaactgaagtaaagtctgctaaaatgcaacatgaatcttttgagtgaagccttttctggggacaatatgggcttcaatgtcaaaaatgtgtctgtcaaagatatttgttgtgacaatgttgctggtggcagcaaaaatgacctgcaaatggaagcagctggattcactgctcaggtgattatcctgaacaagccagaccaaatcactggtggctatgtccctgtactggattgccacacagctcacattgtttgcacgtctgctgagctgaaggaaaagattgaatactattctggtaataagctggaagatggccctaaattcttgaaatctgatgatgctgccattgttgatatggttcctgacaagcccatgtgtgttgacagcctctctgactattctcttctgggtcgttttgctgttcatgatatgagatagacagttactactggtgtcatcaaagcagtggacaagaaagcttctgaagctgtcaaagtcaccaagtctacccagaagcctcagaaggctaaatgaatattatccctaatacctaccaccccaatcttaatcagtaaaagaatgacctcagaactttttgtttcaattggtcatttaagtttaacagtaaaagattggttaatgaaaacaatgcatcagaaaagcttcagaaggaaaggagaatgttttgcggatccatttttttttttaatgtgtggtagttttaagttattagtttttaaaatcagtgcttttattttattttatttttttttggagacagagtctcacacagtctcccaggcagtggcatgatctcgtctcactgcaacctcacctccagggttcaagcaattctcttgcctcagtctcccgattagctgagattacagacaccctaaaatcagtactttttaatgaaaacaaccaaaaacctgtcacagaattttgagacctgttaaaactaagtttaatcagaaaaaaaagagtcagatagtaatattaaaagttttgtaggccaggagactaaatcaagaatattagataatctaaggatattaaataactaatgtaacaagagagaaaacaaatgtccatttttattgatgaaattaaaaaataatataactgagtacatattttgtaatgtaattgaataagaaaaagtgaatttttttttattttggggggcacatattatttcacttatttgatgttcaaaattagtggttcatatttcaaaattgattaaaaatattcatctgttcatgataatatgtaataagagttggtgtatttcatctttgaaaatgtctttttatacaaatagttactgccaaatactgatataaatctatgagcatatgattttaactgagcatattcaatgcttgagaggcagttatatatttctattagatttttctcttgatatttaccatttagcatgtcattttattgcagatttatcatttctaatcgaaggttaagtggaaggtctgcaattgctcagtcaagtggattctgaaatacagatatttcctttgcatttatatagaggttcccaagacactgctggaactgtagtttgatcttgtaaaatatacccactacaactttgtatgagaatggatttctcactttttaaaatctgatagcatcgtaagtatacaaagtagcttaacattacacgtgattccaacaacatttagttgtcattgaaataactttgccataagttttgcatacatgttgttttggcttgaaattttaggtttaattcattaagaaaaataaatctgtagtgaaaactaaattccaaagccattcagtgttcaataatagtagttgaagggatttcttttcacttataaagaaattcattctctgcttgaactaaatatgcaataaaattttaagccaccaagatgttgtatgttagggcatgttaggatatttaacttctatttctgacaaaaattcttggaaactggtgattgtcaagttctcaaaagtgatgaagttcactgttgacactacatgaaaaagccaaatgttttctggaatgtacttgctgttgaattcaatgaataaccattggctttaaacatcttacatttttataactttttaatttgtccaagtgaacacttttagctctaaacatattttaccactataaatttggaaatattatcagattcccctttaatttgtgctaaattaatgttcttcttaaattcttttataatgttcttacttggtgtttttctactcagcttattcagtgaacttaatttttcagttgattcacattcagcattgacactttaaacaactgagtgatagagtggtcccttggtgcctgcaggggtttgatcacaggatccccttggatatcaaaattcaaggatgctgaagtcccctataaacaatggtatagtatttgtatataacctatggaaatcttcctgtatactttgttttattttttattttattttactttattattattttttagagatagagtctcactctgttacccaggctggagtgaagtggtataatcatagcttactgcaacctcaaactcatgggcaaaagcaatcctctcaccccagcctctcaagtagatggaactacaggtatgtataccagcctggctaatttttaattttttttttgtagagatggagtcttgcccaggctggtctcaaattccagatctcaaatgatcctccctttggcctcccaaagtgctgggattacaggtataagccatttcactgaaccaccttccatatactttaaatcatctctagattacttataatacctaacacaatgtaaatgccgtgttaaagtttctaaatatattccataataatttttatctgtgttattttttagtttattttaaagtttctaaatatattctatactaaattgtttatttgtgttattttttattattgtattgttactttaaaaaattactttgtttgggattcagggggtgttttgcaggtttgttacatagatatatagcataagggtgaggtttgtgtttctagtgtatccatcacccaaataatgactattgtacttgataggtaacttttaaactcttaaccccctcctatcccgcccccccaaccttttggtgtctccagtgtctattatttccatctctatgttcatatattcccactctttagctcctgcttacaagtgagaatatgagatatttgattttctttttctgagttattcacgtgggagaatggctttctcctttgttgctgcaaaggacatgactattattttttaatggttgcatagtattccatggtgtatgtatacaacattttctttgtccagtccactgtggatgggcacacgttagttttattgctttgctactgtgaatagtgctgagataaacatactagtgcaggggtcttttttatataataatttctttttctttgggtagacactccatagtaggattgctggattgaatgtagttccattcgtagttatttcagatatctacatgttgttttccctagaggctgaactaatttacattcccaccaacagtggaattcctttttcttctcatccttgtcatctgttgtgcacgtgtgtgtgtgttttacttctttttttaatgaacgttttgactggtgtaagatatctcagagtggttttaacttgcattttcctgataattagtgatgttgaacctttttgcatgtgtttcttggccacttgtatttcttcttttgagaaatgcctgttcatgtcttttgcctagtttttagtttggttgtttgctttttcttgttgagttgtttgagttccttatagatactggatattagtcctttgctggaggcataatttgcatgtattttctcctgttctatatgttgttggttcactctgttgattatttcttttgcagcatgaaagctttttagtttaattaagtcccatttgtatttttgttgttgttgttgcctttgcttctgggtccttcattataaattctttgcctaggctaatgtccagaagagtttttcctagagttttgttcagaagttttatagtttcaggtgttacatttaagtcttttatccatcttgagataattttgtatatggtgagagataggggtccagtttcattcttctgcacttgaccaaccaattttccaagcaccatttatggaatccagtgtctttcctccattgtttatttttgtcacttttgttgaagatcagttgtttgcaagtattttgttttatttatggtttctctactttgttccattgatctatgtgtctacttttctgccagtaccatgctgttttagttactatagccttgtaggataatttgacatcaggcagtgtgatgcctctggatttgttctttctgcttaggattgccttggctattcaggctttttgttgttattgttccatatgaattttaggattttttttctaattctataaagaatgttgttggtattttgataaaaattgctttgaatctctagaatgctttgggtggcatggtcctattaatgatattgattcttctaatccattgcatgggatgtttctccatttgttgtgttatctaccatttctttcatcaatattttatagttctccctgcagagatcattcactttttggttaaaagtattctcacattttttgtggctattagaaatgggattgtatttttgatttggttctcagctacaatgttactgttgtatagcaatactactgacttctgtacattaattttgtatcctgaaactttcctgaagttgtttatcaaatctaggagtcttttggagaaagctttagtttttttttttttcctagatgtatgatcacgttgtcagcaaatagataattttatttcttctctttcattttggatgctttttttttttctcttgcctgattgctctgactaggacttccagtactatattgaatagtagtggtgatggtggacatccttgtcttgttccagttcttaggcaaaacattttcaacttttctttattctgtataatggaggctgtaagactgtcatatatggttgttattattttgagttatgtttctttgatgtcttgtttgttgagattttttttatcatgaagggatgttggttttattaaatgctttttctggatccactgggatgattatatggtttttgttcttagtttctgtttatgtgatgaatcacatttattgatttgcatatgttgaaccatcattgcatctctagaataaagcccacttgatcataagaagttatctttttgatgtgctgttaaattttgtttgtcaatattttgttaattatttttgcatatttcatcagggatattgggctgtaattttttgtgtgtgtgtgttcccttgcttgattttggtatcagggtgatactgtatttatagaatgagttagaaaagagtcccttcttgatttttggaaatagtttaagtaagattggtattagctcttctttgcacatctggtaaaatttggctgtgaattcatattgtcctggagtttagttttttggaagtttttttttattactgatttgatttcataattcattactggtcttttcaggatttctatttcatactggttcaatatggggataatatattgttccagaaattcactcatttcctccaggttttctaatttgtgtgcataaaggtgttcatagtaatcaccaatgacctttcatatttctatggtatcagttgtaacatcatctttgtcaagtctgactgtgcttatttgaatcgtctcttttttttttcttggttaatctaagtagcactgtcagttttgtttaacctttcaaaaaatcagcttttcatttcattgatcctttttttttttttttttggtcacaatgtcatttatttctgctctgatctttgttatttctttttttctgctagctttaggttaggtatgttcttgttttttcagttccttgaggtatgacattgtgttgttaatttgaaatctttccacctgcttgatgtaggcattttgtgctataaactttcctcttagcgttgcttttgctgtatcccttaggatttggcacattgtgcctctattttccttcatttcaaaaaaattttgaattcgactttcattttattgtttatccaaaagttgttcaagagtaagttgcttagtttccgtgcacttgtgtagttctgagaattcctcttggtattcatttctaattttattccattgtgttctaaaaaagtatttgatatactttcaagtttttgaatttattgagacttgctttatataaggtcaagcatatggttgattttggagaatgttccatgatcaaatcagaagaatgtattttctgtagttgttgggtagaatgttctgtaaatgtctattaggtatattgggcctacagtctagtttcagtccagagtttctttgttgattttctgctttgatgatatgtctagtggtgtcagtgggatgttgaagtcccctactattattgcattcctggtaatatgttttcctaggtctagaagtatttatggtaagaatctgggtgcttcaatgttgggtgcatatattttacgtagttataattttttgttttattgaagcctttattgttatataattcccttgtctttattttacagttgcggtttaaagtctgtttctcatatcagatatgagatctgatatcagatatgagattctcatatcagatataagatatgagatctgatatcagatatgagattctcatatctgatatgagaatggctatttctactcacttttgttttccatttacatgatatatctttttccacctctttactttgagcctgtaagtgtccttagctataaggtggatctcctgtaggtaacagatggtgggatcgtatgttttatccaatttgctagtctaagtcttttaagtggagaatttaagccatttatattcaaggttaatgttgatatgtggggttttgttcttgtcatagtttgttagctacttgccttggaatctcaattgtaattacctatagaatctgtgagctttctattatgtgtgctttgatattggtgagtattttcctttcatttccgtgttaaaactcctttgagcatttcttgtaggactggtatagtggtgttgaattctcttagcatctccttccctgagaaatacttttttctccttcatctatgaagcttattttgataggatatactattggctggctttttcttttatttgagccggtaaaaatagggcttcaatctcttctggctccaaaagtttctgctgaaaactctaatattagtctgatgggatttcttttatagctgatttggtgtttttctctggctacttttaggatttgctccttcacgttaaccttagatagcctggtgagtatataacttggtaatgttcatcttgtgtagtatctccaagatattctctggattttgtatatctgcatatctacatctttagcaagatccaggaaattttcctgaattattttcttaagtaattattttctaaacttcttactttttctttttctccttcaggaatggctatgaatcacaagtttggttgccttataaaatgttgtgtttctcaaaagctttgtcatttttaaaaattctttttcctttatcttttctgactgggtttattcaaaagattggtcttcaaggtcttaaattatttcttctgcttggtctagtctcttgttaaagctttcaattgcattttgaaattgtgtccatgaactttttatttccagaagttctctctgttgttgatatgtttttaaagatatgtgtgaaaaacaacccaagaattgtttttctggtttatgttggttttcaactttcccttggatgtcattgagcttccttataatctatgttttgaattctatgcctgtcatttaaaatgtttcattttggttagaatccattgctagggagttagtgtggttcttttgggggtgtgtcacaacattctgtttcttcatgttgctggagttcttggctggttcctgcttatctttcagaggttgtgattcttatttttgaatttactttcgttgggatgggggtttttccccctcgcttgctggtgtgactgtagagcatgttgggtagagtcttttggctttgcttctattgccctgtgcgcttctgttatagttttatatcagattttgcagtcacacttacaggtcagtagatgacactaacaggtaagagccagctatggcaaaagcagatgggtatgtactagatctttgtttactgtgtggtgcattctggtgacacagctgggcaggcctggatcacctggcttgcccatgaatattccagtgatgagcacaggaactaatcctgatgggagtggctcaggagctcctggtgaaatatgatgatgtctgctggaggtaagtgggctgtgctagctttatgtccaagacaggcaggaatgcagtatgggtccccatcacacccctgtgctgggctcttgactctcacatcaaatgcacactgtcatctacctcagccctcagtgtagctaagagccatggaagatagctgtgctgtggttttctgtgagactggtttcagggtggaaccccctccctcaacctacgtattgctttatttttttcttttcttttctttcttttttttttttttttgagaaggagtttcactctcgtcgcccaggctggagtgcaatggcatgatatcggcttactgcaagctccacctcccaggttcatgagattctcctgcctcagtctcctgagtagctgggattacaggcactgccaccatgcctggctaattttttgtatttttagtacagactgggttttgccatgttgggcaggctggtctcaaactcttgacctcaggtgacccacccactttggcctcctaaagtgctgggattacaggtgtgagccactgcgcccagcctgctatttttctatcgttctttccaaatattttcaatggccgttagttgaattcattgatgtagaacccatggatacagcaggccaactgtgttagtaatatccctcaatttgtcaacaaccaatgaaaagcactctaaatcatttttctttaaaaaaattatttgatttttctcctaaagtcctcaactctttgaacaactgttcttgcagaaaggctaatagtcctaaacaagattactttctctgaacatatttccttttctgtagcgatcaatattgtgataaatgctgaatctggtaatatcaacatacattataatcttttagcacagctatattgttatcatataacgaatacaattcttgttaactaagataacaatatccacacttgattctgcctttaagtgcaaagcccacttttcttgttttcacagaatgggtatgcagtgataataaaaaataaagttgcaatatggagatatacatgttatttgaagagctgtcaagttataactatgtcactgtgatttgtgaactgaatagcagtgaaaagtaatgagagtaccagataaggtctttgtttcacgtactcaactcggcagccatagagaatacataaaccaatgagtactgcttagttaaataaaactttatctccggacactgaaatttgaattttatataattttcattttgtcattccttgtcagaatgaaaaaatgtaccataattacacagaaatattcaagttagattgaaaacctagagactggtcatcagttagtttaaaagaatcatagcgtgtgtgaccatgtcttaaaggatactgagtctgactcagttaattttttagaaaataaatcaacgggctgggcctggtggctcacgtcggtaatcccagcaatttgggaggctgaggtgagtggatcatctgaggtcaggagttcgacaccggcctgaccaacatggtgaaactccatctctactaaaaacacaagaattagtgttgggtgcctgtaatcccacctacttgggaggttgagacaggagaattgcttgaacctgggaggtggaggttacagtgggccaagatcacgccactgcactccagcctgggcgacagagcgagactccatctcaaaaataaataaataaataaataaataaataaataaataaataaataaatggtctgaagtgttaaatgactcatgcaagacacatagtaacagtagagctagaaatcttgttttaaaattttctatgtagtgtatttctctaattacaacatggactttatatatacagtaatgaatacacatttttgtttgtttgctttataatacttgtcactcttttggaaaaaaatttatattaagcataaaagtatccacaaccaatgtacagactaagtagcaataataatagttacaataataaggcaaataccaatgtacctgctattaatcttaagaaagacaagtgatgatggtggcatacctagctttttaaatttaaaatatgatactttcaacactccatgattttttgtgattttagtgtaattaccttttctttttaaaaatagattccctttctcgggttaagaaagttcccttcatttcttagtgtcctaaaggattttctggtactcctaattttggtcctctggcctgaagctcaagttttaggaattcttctctgcagctcattttctgcaactgtgctcatgtctggggtcaagtgacaggaagactgagaaagaaaataagcacctatcctctttagaccaccacttctctattggaaacaaagtttcccttgcctcaaattttaggtaccttttggaccttgctggtgccaatattcctcgtttataccactactgtgagatcacctgaaggctagggcatgagagaaaagaaaaaaaaattagagacaaatggggaaatttccctccacgttctctgagtgtcaggaaacctttccgagtcttcaggagagaacttgagggtttctagaactctctctgttgccacttccatgttttgggctgccttgggccccagctatgttccatggaggagatagtttgtagagtgcttcctcctttgacccagaattaggactagccagcagaacttcttatatttctagctctgcttagagcgaagttcgagacaggcaaccatatttatcttcttctatggaactttttttttttttttttttttttttttgagatggagtctcactctgtcaccccaggctggagtgcagtggcgcgatctaggctcactgcaagttctgcctcccaggttcacaccattctcctgcctcagcctcccgagtagctgggactacaggcgcgtgccaccacgcctggcaaattttttgtatttttaatacagacggggtttcaccaagttagccaggatggtctcaatctcctgacctcatgatcctcccacctcggcctcccaaagtgctgggattgcaggtgtgagccactgtgcgcggcctatggaacattttttttaactaatagaccttttgaaggtattgcccttccctttagggagccttcttttgtgtggaggtgctcactttgatcttccatcttgcttgtctctagattttatttatctcctgtattcaggggcttctgaaatgtcaacctagggaaaatgcctgctttaatgtgctgcatagttctctggaatcaatttttctttgctcttacctctgaggttattccctatttttaaataaactcatccatgacaaaaaggtagattgttttaatattttatatagtattataaatattctctatgtggagtacttttttatacctctagctcaaaacacttgctacaaatggcagttttgatggatttttaaaaaataaaattgatttgtggttttgatatgatgtgcatatgttccaaggaatggctctagtgaacccctagttacattaccttggtgaattaatgaatcagcaactctatctctaatatttcaatttatctctctggaatatttttttctcagatttttttaaacatttgagataaagagaagtcaaattgacttgattttaggtattcacttgatacatgggtatatttgcattagattctagttcatcctcagtgctaatttcaaacaatatgaactcaatgatacatttactgtaatttaagtatcaatgattatgatgaatatgaatttctttggatttgtaaagtccacctctaaatatacttaagtgacaactctggtataaatcgtcttctcattctgtaccctttatccttctgctgtctcctgtcacctaccttcagaaacgtgtctctgttcctacaaaacattgagaaaatgaagtattagaacaaggtggtttcttctggaaagatttgcattttaaccatgataaaagctttaagttatgagtctatgataacaaaacttcaggtaccagagaggattttgagagaaaactcacacgaaaaaattggcctaagattgtggcataatacaaaatgcatggctttcagattttaaaattttgtgttgatttattgaaggaatttaggtgggaaaaggtggttattttctatgatgcctggaggttagcaatacatcctcattccctaataaaacccagtgatgctcagtgtgatttacaagaagagtatttgaggaatagtgaaatatataaagacagcatttttttcataataactaagtcagcagtgtgactccctatggcaaactttatttcaaagtctcataagcctattaattcttcagtaagcggattccactggacagggtattaggtatatctggaaggcttgaaggggtaagttctgaataagttgtaattttagggttttaaattaggtttaacaaagcctgtagggtatttgagtctaatattctctgcacatttgaaaattaatgtttgtggcgtaaaaacatctgggttagagattaagctttctttggtgtaaaacattattataacagtagatatgtaactagagagagaaattgaagtttgtgggtgtgctccagttcagtaggtagtttagttattgcactaattcctcccgcttgcattctctttgtggagtacttggaattccttggtatgtgtggcttcctaagtaatacatctgatcctgatgaaagccaaccagacctatcctcggagggtgaacttactcttagatgttgaaagtgaaagtcaacaaccactctgctgtctgtattagagatatttatcagagcaaataaatgatatgaatatagagcaaactgagtgtcttgggtataaagtaatgatgatcaggcctgtgttaaacatgtcacataatcattgttgactcaattttgcttgatctttggatgtagccagccttgggatgtagccagccttaatcttggatggatcttgctgcacgttttagaatgaagtctgtgagttgccatgaaatgggcttccatgattatgatatagtggctcatcggtttgtttggattcacttaagctgtggtgacagacatgcactgagccagtgaatggtggaaaatatcctctagggctcctcattagtcacactagagactcaaacatcatttaaaacatataagcttcatatgatttgatcatccagtatgtgaattttctttccaaatcaatcaatcgttctctcccacatgcctccatcaaaacaagttatccagtgttacagctcttttagaatttgtctagcaagttctctggtcttcactggaaaacccataaaacattaataataaaactagttttctaaagaacagctactcgtttgctgtctcttctagtagacgtagggagttcaaactgttttcaccattactgcttttgaatccacatagcattatgtctagtggcattctaatctctggtgcttcgaatgatgctcaattaatatgctacagtacttgtgtggtaagagcttcattagatgatgtctgggatctgctcagtgcccaagtttcaagtataggacttaaaacatagttgttacctgatatctgcccttggtaaatgcttcctatttccttctctcatacctacttcctagtgaaaggttgacaagcaggagttatacatccagaatgatcctttattgctcttcttcctgtatttactctgcagagaaacactgaaggatagcatgcacaaagttgtgaaggaaggtgtggcagacagaccctaaggtgagctcccattatccttgccttttagtatttataatgttgtttaacccccttctcctaaatgtgaacaaggcccttgactttcagctaatcagtagaatagggcaaatgagatgacatgtcagccacttgattaggttatgttatattgcaaaggtaaagaaattttgcatatatagttaaggtccccaaaccagtggtttagaagtatcaaaagggaggttatccggagagatcaggtgaaaacccttgacaagatgactgggccttccctgagtgacaaactctcctgctgaccttgaagaaacaagcagctaagatgtgaactgccatggagaatgccaggtggcagggaaccaaaggcagcttctaggagctgagggcctcagtgctacaattgcaagaaattaaattctgccaacaaccacacgaacttggaagagtacccttaatttcaaatgagattgtagcctggttgacacattgattgcagccagtgagactctcaacaaagaacccagttatgttcccagactcctgactcacataaatggagtattttaaagtgttgggccaggcacagtggctcatgcctgtaatcccagcactttgggaggctgaggcaagaggatcacctgaggtcaggagttcaagaccagcctgggcaatgtggtgaaaccctgtctctacaaaaatattaaaaaattagctggcccttgtggcatccgcctataatcccaggtacctgggaggccgaggcaagaaaatcacttgaatccaggaagcggaggttgcagtgagctgatatcgcaccactgcactccagcaatgtaagactccatctcaaaaaatatataaataaataaaatgtatataaaataaacaagtaatgtattttaaaatgttaaatttatggtaatttgttatacaataattaaaagaaatgaatacacaagtaatataggagatttgggattttataatcacagacctgtacccaagagaggtgactacaaactttctgctcacataaaacgtgtggagaaggactcccttcttaatatttatacctgtgagaggggatttgtagccagataggctcaaattatgatcttacctctgccactttataagctgaataatttgtggcaagttctttcacttgttttaacttgtcttctcattagacaaaggggataatagtagtaatgactttgcagtattgtggagatgaaagtgagatatgtcaagtgctgagcccacagttgttcaaaaacactactctccttccccattctttatgtttgccaggtgcctctctcttttgtatacatatttaaattacacgtatacttttagattcagctcatatggtttattggtcacattttctagttcattaactagacttcaagcacctagcagataaggatatgtctcattcttttgtgttcccagcatatagcacaaatgctggcataacacaggtgtccctgtgacactccagctcagttggatctcttctttgaactcaaatgtgtgtgtttgggatggaatgcagtcgattttgtacagaggcttgaggaggtggtgattgatttactagggccgggtggggggattggtttgaccaggtatgccatttacatagcctgggaaaagcctggccttcccatcctagtcttttattatgcaaatgtgccactgcctggagctctgccaggatgcatgcacagtgtggtattacctggaggccgccatgacacgggcacacgtggtgaaaaggagaagagagtgggaaacgccatattgaatgtacttggctttcaggtacagctgccagcatttacatataaaagcttctagtttgcatatttatgcctgactcttcaggctgctttctgttagagaagaaatagtttggggctgctttttattaaaggaaaattccacctagaactcttctaccctttttagctttttactctttctctaccacttattttacaatactgcctttcctatttctttaattttaattttgctcttgctttctgaattttcatgtgtagttcatgtctcccaaacagattataaactcctttagggtaaaacttatttatatccaataccttgtgtgtttgtctgctctcatgctgtgaataaagacatacctgagactgggtaatttataatgaaaaagaggtttaatggactcacagttccacatggctaaggatgtctcacaatcatggcagaaggcgaatgaggcttgttttacatggcaccaggcaagagagcttgtgcaggggaactcccatttgtaaaaccatcggatctcatgacacttattcactaccacaagaacagaatgggggaaacaactcccatagttcaactatctccacctggccccacccttgacacatagggattattacggttcaaggtgagatttgggtgggacacagccaaactatatcaccttgcctaatagtgaaaatatacgtagcatttctaaaaaaataaaagagggacttgaatgggatattacaatcggtcatggacttaaatgttcatcagttaaaataatttgcactcttgtttacttagagattaaataccttgaagcgatgatatttattattaagcaggtgcattgctgcccaatttttaatttttgttttttggatacactgaagtataatatcacttgagtgtcactgaccaaaaattttattgtattatagtgtgaaatctagcttggagattttaatgaatagttagctcttcaagaagtggttaaattggtttttaattaaatttcattttatttgtagtgattaattttaaactaatttaggattagataaatgagagtaatcttgaaatcaagaaactgacttaattatgagaaatagctatttcttacggtgaaatgagaaacaaaatattaatttcatctaagaggacactgttttagctaagataaaattacaaagaaagcatttggggaggaaattttgcatttaaaataaacttaggataaagaacatacgttaactgaaccactgatgaagaaagcttgcagcttaagttttctaactgaaaagcagttaccatttgtgaaccctgaaaatctgagacaggtctcagttaatttaggaagtttattttgccaaggctgaggacacatgcccatgacacaacttcaggaggtcctgacgacatgtgccgaaggtgatcagagcacagtttggttttacattttagggagacatgagacatcaaacaacatatgctaggcatacatgagacaatcaacatatgcaagatgaacattggtttagtctggaaaggcgggacaactcaaagcaaggcaggaagactcgaagtggggatggccttccaggtcatgggtagagaagagacaaatggttgcattcctttgagtttctgttagcctctccaaaggaggcaatcagatatggatttaactcagtgagcagagggtggctttgaatagaaagggaggcaggtttgccccagtagttcccacattgacttttccctttagcttagtgatttgtgagccccagttttcacaccataaagttatcttcaaaggggataagatctggaggttgaaggaaagattcgtcttcatgattcatctctgattatttgtccaatctatttttacattttctaattgatgcagcattttaaagtctttaaaaatattacattagttattcatagacattgttagaaaggtgtaatagatgtaataaagttttctgtctgttaatttgatataatttttttcacaagctctgttgtttgactaaacgtctttcttctcttgacttatcaactatcccgtgttcctgttccttcatctttgccactgacatgatctatatatactacatttatttcttttcgcccactttatgcactatatttcttccactatattttactttgcagtctaaatatagaaaatttgttttattttcacaataggtagattgaagatataagaatatttagtttcatagtgtcatagtatacagaaaattcagctgcttatttttttccagtagcagtaccatgactgaagatgcattaaaatataaacacacacacatgaacacacagacattcacatgcacacatgtacactaagtcaaaagagaaaagttggcaggtagaaaaacaatatgaaattgaatagaattaagtaattacatgtcataacaaagaatccctctatactactccaatggtgttgttgataacatacaacgttggatatggatatgaagtaatatttctgaagaaaacaaaatctgtacccattttgtgtccagtacattttaaaataaatcactttcctattttagtggcacagactgactctccttagagagagtttcaactttttcaatataatcatatatgcagtataagtctatatttgattataaaatcctctgaaagtatttaaaatttattaacttatttgaaacctactacattcttggggcttgtagtattagttctactttgtagacataaaaacataggcacagtgtggccaaggacacctaaaggaagagggagtctgcaggacttgagttcatgtttctcctattacatcttgctaaaatggctcattgtctggggtatacaccctggttctttgtctctgttgagaaataattcaggacatgggcacacatgaggaatggaattaggagcagaaagtttaatagacaaaaaagaagagagagagaaagggcttcctcaggctgagaagtgggtctcccaagagaaggtctctggtttgggtggaaggcaatcgattttgtacagatgcttgaggaggtggtgattaatttacatagggcccaggggattggtttgaccaggtgtaccatttacatatcccgtgtaaagactggccttcccacactagtctttgttattattatgcaaattcgacctctacctggcagtcaccatgatgcctgaacacgtggttttacttggtgggtgccataatactagcacatgtggtgacaaggaaaagagagtggaaaacaccattttgaatatacctagcttccaggtacagctgctgacatttacatataaaagcttctagtttgcatatttatgcctgactctccaggctgctttctgttagagaagaaatgatttggggctgctttttattaaaggaaaattccacccagaactcttttactctttctagctgcctaaaagtaatgttttaaaaactcctgtattattgttatatcttaatagcaacttgtgactgaaatgtctttgagtctttactttcttacttttcctttttttctttcaccatttaattagacactaaattctgaactttcttgtctaacctcaaaagaaatgtccaaactgctttacaaagtggatgtttcattttgcattcataccagcaatgtctgagagtttaccacactttatctgcacaaaaatttggtatcataatgttttagctgttaattttaggcattctaatgtgtgtatagtgatatcttgtgattttcatttttatttttctcatgactaatgacattgatcatctttgtatttattttttgactttcacatatcttcctttctgaagtggctttttaatattttgcccatttaaaaaatatgtattgttttcttattattgagttttgagagctctttacatattctggatacaagtgctttgtcaggtattggacatgaatgtattttcctactaacctatggcatgtttttctctgctcttaacagagttgttcacagcataagatgttttaattttttatgatagtcaatgcatatattttttttctttcatggattgtatttttatgttgtacttaaaaatactttggccacaaagattttctctacattctttgcctaaaagttttatatttctatgaaacttgtagatttatgcctggatccattttgagctaatttttgtatatacagtgtgaggtatatgttaagatatttttctttttcttttcttgcttatgagtgtcaaattgtttcagcaccatttgttgaatgataggttattctctctttactgaattacttttgtaactttttaaaaggtagtcagtttctggacctcttcagttccattgatctatctgtctctcttttcacaaatgccaccttgtcttgatttctgaaattttttagtatgtgttgaaatcaggtagttgtagtcttcctacggtactcttctttttcagaattgtttttgtattttagtttctttaattgtccatatattttataatcaccttgtatatatctacagagaaatctactaggatattggttgagattgtattgaatctacagatcagtttgggaacatttgacatctcaacaatattgagatttctaatcaatgataattatatatattttcatttacttagatctttgattcttttttctgtgtttatgatttttagcttagatactttaggatactgatcttatagcctatgatattgataaacatactcattcacttttgaagtttaaaaaatttcttttgaatttttgacctggacaatcatttcttatgtaaaaaagatgcttattgtttcctctttaatatacatgattttatttctttttcttaccttaatgtgctgatgaggactttcagtatgatgatgactagaagggttgagggtagatatccttgctttatttccagtcttagaaagaaaacatttagtcttacagcattaaatataatatttgcagttaattttagatttcctttatcaggttaaggaagttgccttctatccccagctgctaagactttttctcatgaattttgacttctgtaaaaggcaaaagatttatacgatctgaagagaaaccagaatattatgttgacttttgtaaaatgctttgtctgttttttgatgattggtttttctttgttagtttgttaattacatatttgatttacaaatgttgaactaggttcgtattcctaggatatatcctatttggttgtgatattgaagcaggagatatgggaggaaaaacaaattttccctctttcctttggtataagcagcttccccctccaatcccaaccccctccatgagattgtaccctgctctgcaagtttttatgagtttatggtttcctgttttctgtaactagtgtctgtaagtctgttttttatctgagtagcacagcggaggtcatgagacatgcttgagcaagcttagattgcagccatctgggcacctagtgaaggacacaagataaggctgtgtaggcatcttgagcaaacctagatagcagccacctggcctgcatagcaagagtcatacgtaagcctgagttaggaacccttcacagtttgattaactgcctttgttctgcttctgtaagcttgctttccccgccctacaagtttcgtgccagtggcaagccaccccccttcagttgcatgaataaaagtcaagccctctcttcgttaattgctcagcctctggatattaatctgctgagccagtggccacctaaataaaatcctccttttccacccatctggtctctcgtttcctgcaacagtattttaacctctctctattgctgaattcaactctatatctgttgaggttttttgcatacatgttcatgagcaatattggtctgtagttttatttcctaatgatgtctttgtcttatattggtatcagggcaatcttggaccaatgagttggctagtgttccctctcctgttttctggaatatattatgtagtgttagtgttatttccttcttacctttaaaaactgtctgggcctgaaattttcctgtggaaacttccttattactaattcaattttatttcatttcatagatatagaaaaattcaggttacccatttcttcataaatgtattttggtagtttgcaatttttaaggaatgggtacattccctttaagttgctgaatttatcagcattgtgttgttcacagtttttattccttattattcttttaatgtccatgtggtatgtagcaatagtctcttttttgttcctgataatggtaatttgtgtctttttatttttattttttttggttactctggctagaagctttttaattttattagtcttttcaaagaaccagatctctgttttctgttttttatttcattgattttccctctaatatttattatgattattatttctactgctagtagtatcattgctctggctgcttgggtttaagttgttcttctttttctagtttgttaatgtggaattttagattgtttgatacatttataatgttctaaacatttaatgttataattattaaatgtttagaatctttaatgttataaatttctaagtacttctctatctccttctcacacattttgatatgttatttttatttttattttattttacagttaaaatactttcttattttcccagacactttatctttgactcataggttatttagaagttgttttctatttaaatttccaagtattttagaatgtttctgatatctttctgtattgttttcttgtttagtttcaatatggtcactgaacatacctttttgattttgatttcaattcttttatctttgttaaagtttgttttattgtccagaagataatatatcttggagaatattccatgtgagcttgatgaaaatatgaattttcatcttgttctagactatgttgaaattacagaaaacaattataacaatattatgaagcagaacccataaaataatttgcaatatacaagatataagaagtgggaaactctaaaataggagaatgggctaatgtcatggaacagaccttatgttgataagattagtatgtttcattacacagtataatattaatagtagagaagcattggtgttacagtctagtactgttagccaacttttcatgatttatattttaaataaattgtaagctcttcgagtggtgggacaatgtggcagagccacagttgatagacctgttctacttctggtttctggaccttgctatagaggttgagtctcacaagattggagctggcatgaggacatgtataaatctattattttaaagaaatgtaggactgtgcagtgtgaggctcatgcagatacttcagccgggggaaggtcaatcaagcttttctatagttccttggtgaggagacctggaatgggaggagacattgggtcctgaggaaggaacacagcaaggatgagccatggtattagggacgtaaatggggatgagatcatgaagaaccttgaatgcatgctaagaagtttttgggaaacaaatatcttggtatcaactattgaggctagatttttttaacctttaaacacagaaatgtctcttcaaataaagagatgaattactttcaaaagtacagtactagtagccgtatcagtggtggggacacgtctctcttctcatgtttcctgctgaagggactgaactggtgcaacattgtttttcttcccatctttttacttactctactccagtgtaaaagggtggcttatctttggtaagtttgtgataaggttaaaccaggagtgagtatccactaatcatctgtccagtaaatcttaacctgagcaggttctttttgtgtgaagggctttttttttttttttttgctcacattaagctctccactctaattttgtttttattatttattacagtgattttggcctccaccagattcccttttttctttttttcagaatttggaaagggaaaatgtatgctatttattggctctccttagagaccccagaaataataacaatgggcatttacagaatgattcatgtataagattatcattattactatccctattatccttagtggttcatgtctaagactatgcttattactgatataatataggtcctactcacacttctactgtgcccaatgttcctgtcttagtataactgtaaatttataattttgttttaattttataccctataaaatgtacaattttatcaattaaaatataaaacaagtaatccactaaataaacaaaaaaatgtgttaaggaccaaggacttaaagatgaataatgtctaaattttaataataataaaatctccataacgattagaacagaagacatagaaatataggttttaaagaaatgtgtagaattttctgtaacatatgtctacccaaattccgaatcccacacaaaatttggtcacgtaatgactcacagatgtcttttgttggcatttccaagaggcatgatatcaattctatgtaagctactttcttggaatatgagttttatttattttactgagagatgagatagcctgtgaacatttttttcctggcttaaagttacattttttccacatcttcctttttcagagatccattaatttttccaggtttagcaggaagaaagcataagttgtggctgtgtaaatggtgttactatttgcttatctccattttaacaagtatgggagtaataaagaacatatgtaaatattactgggtatggtgaaataaagaacatatgtaaatattactgggtatggtgaatgttccttggatcagtggttctccaagtgtgatcactgcaccagcagcattagcatcactgggaaaattgttagcaatagaaattcatggaactccatgccagaccaagtgaatcataaactctgggatggtgtttagtcatctgtgttttaacaagcccctcaggtgattctgatacacactaccatttgagaaccactaccttaccttagagaaaacagtactcccttgaaatcctcagcacaggagaatttgggaaacacattacctgctaacgtcatttgctcccataaagtattatagtgcaggccaaaggcgaataccccccatttttgagattagcaattattatacctttggttgtaaggaatcacctgttataagattccacagttactttcctagtagtttcaacatgtcaggaaatatgtaaggcttagtgaatatagaagtgaacagaagggaaaatatatctgccctcattaatttttaataacagttaagaagcaagtaaataaatatacaaacaattgtgataaattttggaagaggaatactagcatgtggatgtactcacagaatgtggttgggaaaagggattgttatgctaagagctggttgtagagtctttcaaatgtcctgagacaggaatgggcttggcctttcttaaaaaacaatagaaacccaatgtgactataacaggatgaactgagagagacctggcatgagataagcttggatttctacgcagggcaagatcatgctattccaaaaggattagtctacacctctccatgcctgattcctcatctcctatgaacataaaacttagatctattttcttataatcagaatccatttaacaaattcactttcccagcttgaatttaaggctgcaaatactggttcttgcccatgttttcccatgtggctcagtaccctggagaccagtcttagctctgtctgtaaaactcttgtttttctaatattagtatataatatgaacatcacccagcacatttattagacctttttattaaaatttggcccatggttatcttgttatatattgctgcataacaaattttcccttaacttagaagtttaaagtgatagatatttattatctcatagtttctgcaggtcagaaatccaggagtggctactgcatagttttggctcagggtttctgatgaggttccagtcaagctgctgatcagggctgaagtcatctgaaggcttgactggactgggaggatctgctttgtttttaagatcatttatgctgttgttggctaaagaccgtggttccttacaacatgggcttctctactgcgctgttcatgacaggacagttggcttctctcagtgtaaataatccgagagagagagagagagagagagagagagagagagaaagagagcaaccaagatgggaccgtgtttttttttttaacacttattatcagaaatgatataccgtcatttctgccacattctattgatcacaaagaccaactttgccacaatatgagcagggaggaaacaagattacaaatcctaaatggcaaagatctttaggagccatccttgaggagactgtcatatgaattttggattcaggtttatggctttgagccttggtttttcattttaccagttgcatgtatgtttgtttgtgtgtgtatatatacttataattaaaggttatttttacctctttgcttctcatccatgatttccagtcatgcactttcctgaatattttgcttgccggtctgtcccttccttgactgttttgtctttagcttaacagcaatcacaatatggaggcaatggcatctactgaatatgggaatagtccaggagcaaccctcagaaacacaacacatttgaaacctaagatgagttatgaggaaagaccatatacatttcaaagtattagtcatgaatctccaataaagccattgtcttatagctgaatttcagccttgaatttttattttgttaattttccaaacagttttataaacattgtgtgttaactcaaataatatgcaatgcacaaattttgctgagtccagacctcttttgaaaatactcatatttttcaaagggaggaacatcttagatattagtagcagttaatagttaatgaagttaaaattagcaaaacaccattgtctttttagttttttatttatcttttgcacatggtatgtatgttttctgaacactttggttataaaaatctgctcagcctgatattttttccagtaaaacattcttaaatcatacctctttcagtgaggctcatgagaccctgtttaacaaacaaatggaggagctgttgagctcttaattatactcacttagtttcatgaaaatttgagataatgaactttgaggtatttcttatgggtactaataacaagtggttggaaattatagggttctctatgccttgctgctattttcttgttaattatacttattactgtgaagctctattgcagcaacatatgtataaactaaatacactcaattaatttgcactattttagaaactgtgtttattaagcaaaacaatgccaagactctctgatagaatttaaatggctgggcttaggagataatagcatttctttaattgaaaccatttctgaagcttaaatgtgatgtttatatgatatctttccctctgtaacatccttatgtggatgaagattattctggttaagaagtgaaatactgaaaatgtcacttggtttttatttatggttattttttactaaataatttctgatgctgaaatagccaaacatgcttgcatgtaaaattaagcttggtaccatcaagggtagtaaatattaaagtgaaggaaataagaacgtttggggaaaaactcttgagttcttcttctgtttctcttgggaaatttatattccagtactagcattatctatgcatatgcccactttctctagcagattttgacctctctgggcaagagctgagctttgtttgtattttctacacgacactgagcccatggtatagaatatagtgagtgttttataaaataataatgaataagggaaactctccaggaccctgggtcaagatgaactgaaaaatatagcctataaattgtgatatacttaactgaaataaatagtttaacagagaaagtgaggagttgagcagaacaaagagtggtaaaaatgtgtttcagataagatgtgagggatccataattcagcctcaggagagaaaagatgtcaccactagttcaggggttaaaactatatttctgtctatatgaaatagttgagtgtgtttggaaggtggacggcaccaggtcaaagtgtcctgctagcttctcctaaactctaaatagcattgtcctagcaatgttaaacatgcccagtcctttatactgaggaggagtcatctaggctgtcttagtgtacaggaaggattttgggttaaactcagtatttagtaaagtttaaatgaactttttcaaaatagcaagaaatgcttgactttggtagctatgctatccaggttgattggagtttcataacataaaactaaaaattcatttctactagtcatgcatattgaaatctacatttagtatatgatactgaggatgataaagtggcaggaggaaccctgcagatatgaaatgcaacatagtaagataaaaattacatgaattttatatgaagactcctaggtttgagtcctagcttttcgatttacagttgtgtaatcttaaagaggctgtttttatctctttgtttcttagtgtctttgtatgtataattaagattttattgttaactgtgaagaactagaaaacagggcttctgagtatttgaaagcccaataaatgtaaagtacaagaggagaaaatgaggtatggtcttaagaaggtaaacccctgatttctttggtggtagggagtagatgggagagagagggcaaaaaggaaaaaagagaagtgagagggagaaagaatgaaagagggggaggagaaagagagagaaagagagagagaaagatgtggatctggtaaagatttccttctgagagtaggacttcattatggaaaatgctctgggatttttttcgaaatggttactttatttcttcctctgccagaaacaacgtgtcacagaattaaaataaattaaaaaatgtttcctagccatcaacagataatatatccagaatatttttcaatggcctgaagtgtaatgccttgacattatcatctaagaaagattagcttaggctcatttctccaaagaagtgaagtagtattttgtataattacctagtgcatttaacttttattacaaattattcatataaataccatttcggccctacttgatttaatcttatattatttcccaaatttttaaccttattatacccttaattgccaattttgctttttcttcttttctctcaccactaaatctgtgtccaattcatttcttttaagttctttgtctgggcccatgaactagtgttgctgattgaggatatgcaattataatatccagtatggcaagtttatatagacatatatttaacccagtttccatttgctccaagaattgtctgtaaccatcatatacatttctgttatattaggattagagacaagttctgtttagaaataactccaaaaacagtttttatacattattttcacattgaaaatcagtcagatctgctccagcctcaaagatcatgtttatgtaaaattaaatgagtgctggcagcaagctgcacttttttttttcctaaataggaaataggttaagctctctaattcatttctaggccatgtccagtcttttaatgagcatatcaaagacattctctgtttctgttacagggtttttgatctctagaattttctttccattttttttttcatggagtttccatctctctgcttacattattcatctgttcttgcatacctatttttatgttttccattagagatcttaatataagaatcaaagtaattttgacttccttatctgataattctgtgtcatatctgagtttggttctgatgcttgctttgtttcttcagattgtgcttttttgccttttagcatgccttgtatttttttatgaaagccagatatgattattaggtaataagaactgaggtaaataggtctttggcataagaagttatgtttatctggctagaaggtaggctgttttcaatatttgctgtgactgtaggagccagagcgtcagactcctctagagtcctggtttttgtatcctctgttgtctttgtgtttccatagagactcctttttatttaggatctgagctttatttaggatctgctgttcctttagttgtattcattgttattatacaggagtcctgttgatgtgatggtaaggggtgtgtgtgtgtgtgtgtgtgtgtgtgagtgggtgggtaagtgttctattatactgcaattgggactcagtctttttgtgtgtctccatccctgggctgttgcctttcaggaatatttcttagcttcctttccaccccttagatgaggtaggaaggctaaatggagctggagtggggtaattggccttctcccagttcagatatggacctggtaaagatttccttctgagagtaggactttcttatggaaaatgccctgggattttattcaaaatggttactttattctttcctttgccataaatatgaggatttcaaaaaaaatctttacagagtgagactccattaggtaaaacctgtgaaaatgtgggagtcgctctaggactgaaaccctcggaattgtcactttcacactagtctccagcaattcatcaaaattactatttaagtattcacaccagtttgtggcctaacagttctgttcctgttaaattgatcttggctgtgattgcctgtatttggctatgaatctctgtattctccaatctctccagagtctggggtttgccctgttacttcaattctctgatgcatctgggaaaatttgttgatttcaagtttgttcagcctttttcttattgtaataatgggagtgacaactttgaaactgtttacatgttggagctgaaaatgaaagtccctctgataaccagatagggccacctaaaatcatgctcattaggcagagcaagctggtctaggcactgcaaaacatatcaactcaggtgagttggttaaaatgaatgaaggatgaaataaaatctatcaattcacctcctagtgcagagacttgcaaaaaactcataaaaaatatgggatgatttcttacagtcccaagcaaaagacatagtcatacgatagttctatcttttgtgtttctgtagcactttcactttacatattttatgattcatattgtgttatagttggctcattatatgtaagctttttgaaagacttcaaactagcatgaacaagaccactattagaagagattacaactgataaacaatattgtggaaacaaatacacagtgtgtgattgagagtatagccaaaactatctgcattttaagttttttacttttatatgaccatcaaatatttagcccataataatgtggatccaaccccaccaattctcataaagtacttttacaaaggcctctacaagttaatttttcttcttctaagtttcaccacttaaccaaactataagctaatcacctgtatgactatctctattctcactagataggaggctttttgaaagcaggagtgatgttatgagcctgttgtattgctggcatctagcacaatgtctaacacatagtaggttttaataaatactttataagtgaattaatgaatgaaggtcactaataccagaactacaatgttctatacatacacaaaaaaagggctgaccttatcagtaaagcaccacgaacatattgtgaaacctttctcctttttaggacaaactcattattctctatttatagcatgcacaaggaagctgacaaaatcaggaagaagtaagaaagcatgcatcatgaacattggaatgtgagacatttcctcctgtattaatcatattttcagattctgtgttgactatttgacatctattattcctaacctctccataagcctgctggatcacagggccaaactaacaaccaatattgtttacatctttactgcaagttagctttcatggacatgcagaagttgtattacaatcctcccaaccactaaccctgacctgcctgtttcctcttagttcccagtagggaacatttccacctagttactttattccacgattgtcatacaggtatagtcccagttcctctgtttgtctgctttcctacccatgcatatgacagactttgggtagcctgtatggtatgctatgcctctcattaccaggggaaatggtgagtattaaaaactttctttcaatggcatttacttctttgtgtcatcactcagttacatgtataagttaagaagttgacacaatataacctctcatcatcagggtgtgttatgaagtaatctcacttcctttagcactgagattttcctctgctttctgctattgtccccataggagattgatatggtttggacttgtgtctccacccaaatctcttctcaaattgtaatccccaagtgttgagggagggacctggtgagaggtgattggatcatgggggtggtttcccccatgctgttctcatgataatgagtgagttctctcgtgatttgatgttttgaaagtgtgacacctgtgcccctgccccacctgccatcatgtaagatgtgtcttgcttcccctttgccttctgctatgattttaagtttcctgaggcctccccagccatgcagaactgtgagtcaattaaacctctcttttttttttaaataaattacccagtctcaggtagttctttatagcagtgtgaaaatgaactaatacagagatattcagaactgtaagcataattatcaacttcaaatgtggagtgcagtttcttagccactctccttctttttccctgcagcctaccccaacttgtagatcataagtagctgggctgcaaaactgtcttaataaacttggattactccaaaagttttgaattaaaatgttagcacttattatatattgattaatttagctttctaagtgttctgaaagaatactgggcataaaatgtaattgctttagttaatagctatttgattggatgttgagtgtcatttgatcgtttacccttaaagtctttcaaactttaaactgaaattgaaaaatgtctggtgggattaaagtatgtgagtaactttaaaataaaaaataaaaataatctggtgaaaaccataagaaaatagagaaagagggaagaaagagaggagacagaaatcttaaatgtaattttgttttttctgtagtcatattacatttatgtattaaacttatgttttgctgaatttcttaaatccttgtgtcagtgtctttcatctgcttttggaaactcttggccattttatcttaaatattgtgtttgcttcattctctttttcctctcattctgaaactccaattataggtatgctagatcttttctctttatttcacatattgcttacattactttatgtgttattcatttttgtacttctgtcttttaacactttttaattattaatttttggtaacaccaatctttcttatatctaatgtgctattaatctcacccactggtttgttaaatcaatatatttttaaaatcagctttagaatgtctacttcttttttcttatagatttcaatcctcttacattgtccattttttgtctattttctctatatttgtctctatattcttggcgttaccaatcataattaaagtccttgactgctagtgccaatacatgaatcacttttatatatggtgtatatctggtattttctaaatcatgagtggtaattttttcctcatttatttattttttatttcaatagcttttggggggtacaggtggtttttggttagacaaataagttcttagtggtgatttctgagatttttgtgtacccagagcacccgagcagagtacactgtacccaatatgtagtcttttgtctctcgcccccccccatttccccctgagttcccaaagtccattatatcattattacgacttcacatcctcatagcttagctctcacctataactgagaacatacaatatttggtttccattcctgagttacttcacttagaatattggcctctagtttcatctaagtacctgcaaaaggcattattttgtttatttttatggctgagtagtattctatagggtgtatataccacattttctttaactacatgttgattgatgaagacttaggttggttccatatttttgcaattgcaagttgtgctgctataaacatgtgtgtatgtgtcttttatagaatgacttcttttcctttgggtagatacccagcagtggacgttctactttgaaaggttgatctacttttacttctttaaggaatagtcatactgttttccatagtggttgtactaatttacattcccaccagcagtgtaaaagtgttgcatttttaccacatgcatgccaacatctatttttttttgattttctaattatggtcattcttgcaagagaaaggtggtatcacattgtggttttgatttgcattcccctgataataagttatatggagcatttttttcatatttttttttggccatttgtataccttcctttgagaaatgtctattcatgctctttggctgggtggtaatttttgattgaatgctgaacaacaagtataaaatactgtagtgaatctagatagtatcttctaccagggaggattcactatccttctggcagaaagaagggaggttgaccaccttaattcaatcaggggctggcttgaattaaagcaggattgtggttatagtaagactcaatctatgtttgtttcattccatgctctcaaagcatagccctccacaggatccaactgataatgtggtatggtaactagggctcatttccctggaaagtcttgttttagtcctgtgggattgtagaagcttccattctgcttttcagaggtgttcaagctcaattctttaattcttgttctgcatagtttaaacattcaccagatttctcaagaagcctgtcatgtcttcagatctgtcaattctgcagttaagtcactctggctccacatgaccaccaaagctttgttgggttttatgtcccctacacacagttctattcctagcaaagtctgaatctcagattccagcccattctcagaactggcaaacgcctgcccacagggaaaaggtaactgttcctaagataatttctttaaagcttttcttttctgtaattttagatcctccattactcactgcttctgttgctcaatggtgccttgaaattaaggacctcttaaaatgtacttggatttatttgcaggtacaattaagactctttccaagagtgttagtttgtcacaaactacttcatcccactttgaagtggaaggtctgtgggtcatattatttcaatcaacacctttattaaaaatgttctcaatattgtttgttctgcagtaataacattgtgaatgtaataaaattaatatagtgtgttagtaatctatttaggttgaataaagtatggattataatcaaattgaaacatttctcttttaaaacaaaactattaagaaactgacatcatagagtgtacctaaataatcatagacataacctcctgattttgcaaatgagagttttgaggcctggaacaatgcattttatttactcactttttttctcctaccaatgtttaggatgattttatgctataaaaagtaccagttgctgaggttataaaaatggcaagataaaatctctaccctgaagtgaaaaccttaactttggtagggatataaatggtaaataaacatgcccagagcaacatagttactaaaatataaatgtcctagaattatatttgagcatattagaggtactaactgactagaggattctaatagagtgtcatggaatatttcaactggttcttagtgactaagattttattttgaaaaggaaagtaaaagggcattttaagtgggggatgccatgagggtcatagatatgaaacagcatggagtttgcattttagagtgcatgatgggttggtggtaatatgtcacaggggtatacaaatggaaaatcagggctcatattgttaacggtcctatacaccatacataggaatctggacttttactgtggtgtcaggggaaactattaaaatgtttctgtaggtgaaacttgattagagtcagggtggaaaaaagcaaggttaagtggtttgtatattatttcatagggagcagagttaaaatcttgatttaaatccaatattcttatctttacaacaagctatttataatgagtaaattatacatgtggaatgataataatatttattatagatttaccatatgttaagggctaagtgttttatttttatcttagctaatcatcaccagaggcgatgggataaggaagacttctatccagaatgactccttgattggaagtaaaaacagcactcttgaaagagccactgtgctttgatctttggtccagcccttgtagatgtgtccgcagctcctatttgcctggacactggaagagtcaataaaaagaactgtacatttatcatttaagaaactaagaggtcattttttggacttgtgacaaaacccattatactgtcaagaccactcagctagaataaagtaggtgataaggaaagaaaaatggcacatgggcaaactttttgaataaatcacatgaatgtcttggaaaagtcattacataaacaaaaaccatgccaatgtcagtccacatcatggtggagctatcagagagcaacagaccttagggtacggagatgcagggaaaggatgtccgcctccccagcaacagtggaagattttaacatcaacccaggagattggctgctccatcttgagtctctgcccggggtaggagggcttctgcagggtgaaatgaggactttgtttctattgatttctgtactgggtatccagaacctcaaattactattaacaagattcatgtcattacagtcataatttccaaagttgcagtggaaatgaggaagacataagacagatgaatttgtttaggtgagaaaatcacaaattatccttcaaaaaataggaaacaatatgaaaccattattaaatgcaacaaatatgactcttgctcattgatactaatgccttttgaaatcttgtaatgagaaataacttagaagtaaaatcacttttaacagaattaatgattaaagctgtaggtaccagcaaagggttttgttacaaatagtctggaatgtatgatggtatcctctggtgtgtatttcttctgtggatctaaaggcataaccatgtcagtaaaggcttcaactaaagcactcaaattcattggctcatatattgcattactgttaaattcctaggcaataaaaatgatcaattctgtccctttgcaatatttaattgacagaagaattgtgagtttttgtagaatgcttatctgttcgatgtcagattttcagatgtgtgcatttaaaatggatactgcccaataacagaaaaattctttctccttagaggaaagataacagagctctctaaatgttcacagcctttctccaggtttcttctgtttttatggactagttgtcagtgcagtaggccagtccaattttgtttatttaccattttcctacaggcaggtggtaatcagagccaatctacctatatctccaaaaactgttccgattatctccaactcccaaaggaatagaaataagccactctgaagtcttgaggattttacatagttgacctatcatgtttctactgatagagctagtgaacaagactttgaggtgctgccttgttagaactttggggatatcacactgaatggctaatataattcagcttggaaaaattatccttaacacataagtttatggccagtctaagtacctgttccatgaatagtcaaaaggagataagacagtggaaaaaggaagataagaaaaagaataagaaaagaagcaaagagaaaggaaagcaaacagaggggaattttaaatcaagttgatttatgggaggcatggatttcactcaacagttgataagggtcctgacagcagactagaaataaattatttctcaaaaagaaatggcaccggaggtttctcactgagaaagagaaatgaacaacataaagaataaaaaattgagatagttgtttaaaagaaataaaactccatggaagataaccttggtgttcacaattgctattcaaagatgcacatcttttagagatgaaatgagaatactgtgaacatcaggagactgttctactattttatcttttacttaaacagaccacataagggtactaggtaacattattctattgaagcttgtatggaaaaatcaagagaatataaatgacagtttgccactgagaacttgcttattcaaggataatttctaaattacatatgccccccagttagaaaaatttcctgttttcaataatactatgtttttatttttgaagattggctgctagcttctatttattaaatgctcatgactacctttgcatttgtctaagatgtacatcttgaatttatggatgatgtatcagtcaggacccagcaggaaacagatggcatcctaaaaacggtttacttagaaataatttaataaaagctacgtacaaaagtgcgtccagggtgaaggaaaccagtaagacataggtgaggcagccagacactatcaacaagaaaggcagttacaattgctaggcaggaaagagctaaagttgcagcagccactgccagaattaaactctgagtagaatgggatgcaggtcagtaaatattcagcctctctcttctcatattttgatttcctcttagagactcctattgattaagcccaacaggaagtcgggaggcaagggagcctaggtaagggtgtctatagaggtttcaacccctgaaatagagcacagagaaagaggagttatttggcatgtaagataattgattaaatttgggaaataatttagttgatgcacctgcagaaatccagatgaatgttttcagttggagcagaggaaatagttaagcctagaaatataaatttagaggtaatcaactatttgtccttatattcaggcttaaaattagagttctgccttaagtttttcctttgttatttttatctatatacgttggatgagcctatctacttccaaagtttaaattcccaatttttgtgactataatgtcacatttatttatcaaagcaggacccttggtaacacatagtaggcaatatttgttatatcagatttggttattgaaagtacttgaagacaatgcagttctttttccttcttatttatttttaattgacaactaaaaattgtatatttttatggtatacaacatgatgttttgaaatgtatatatatttggaatggctaaatcaagccaattaacatatgtattaactatatatatgcatataactatctcatatttatttgtagtaagaacacttcaaatcttctctctcagcaattttctaggatacaaatattattaactatagtcaccacattgtacaatagatttcttgaacttatactcctttataatagattttgtgtcctttagccaacatctccctatccctactcctaatcccagactctagtgtccactattctattctctgcttctatgaatttgatttttagactctacatgtaagtaagatcatgcaggttggtttttctgtgcctggcttatttcacttaacataatgtcctgtggatctattcatgttgttgcaaatggcagaatttccttctttttaaagactggatagtatccattgagtatatatacatcacattttctttatccattcatccattgatggacacttaagttgattccatgtctaggctgttgtgaataatgctactatgaacatgggagtgcagatatctactaattttattttctttggatacatacccagtagtagaattgctggattatatagtagttctatttttaacttcttgagaaatctttatactattttccataatggctgcactaatttacattctcacagtagtgtgcaagagttcctgtttctccacattcttgccaacacttacgtttggtttttatgatgttgttgttcatagccattctaacaggtataaggtgatatctcattgtggttttaatttgcatttccttgatgattagtgattttgaaaaaattatttatatacttgttggccattgtatgtttccttttgaggaatatctatctaggtccttggttcatatttaaatctggttatttgttttcttgccattgagttgtttgagttctttgtatattttggatgttaacccttatcagatgtatggcttgaaactacagtctcccattacataggttatctcttcattctgttgattgtttcactggctgtgaaaaagtgttttggtttgatataattccattgatctattttttgcttttgttttctgtgcttttggagttatagccaaaaatatcataacctacaccaatgtcatgaagcatttctcttatgttttcttctagtaattttacagtttcaagtcttatgttcaagtccttttgtactttgagttgatttttatatgtgatgtgagatgacagtataatttcttttttctgcatatggataaccagttttcccaagaccaagaagagactgtcctttccccattgcatgtttttgtcctctttattgaaaatcaattgactttaaatgtgtggatttatttctggacactctattctgcaatgttgatctattgtctgtttttatgccagtactatgctgtcttgattactatagctttgttgtatattttgaagacaggtaatgttgagatgtgaagccagctggacttcctgggtcgagtggggacttggagaacttttctctctagctagaggattgtaaatgcaccaatcagcattgtgtctagctaaaggattctaaatgcgccaatcagcactctgtaaaaatgcgccaatcagcactctgtgtctagctaaaggattgtaaacacaccaatcagcactctgtaaaatggaccaatcagctctctgtaaaatggaccaatcagcaggatgtgggcggagccaaataagggaataaaagctggccacctgagccagcagcggcaatccgctcaggtccacttccacactgtgaaagctttattctttcactcttcacaataaatcttgctgctcctcactctttgggtctgcactacctttatgagctgtaacactcaccgcaagggtctgcggcttaatttctgaagtcagcaagaccacagacccatcaggaggaacaaacaactccagatgcaccacgtttaagggctgtaacactcactgcaaaggtctgcggcttcactccagaagtcagcgagaccacaaacccatggcaaggcagaaattccagacacatctgaacatctgaaggaacaaactccggacacaccatctttaagagctgtaacactcaccatgagggtctgcggcttcattcttgaagtcagcgagaccaaggacacacaggaaggaaccaattctggacacaatgtgatgccttcagctgtgttcttttttctgagcattgctttggctatttggagtcttgcggctctctacaaattttcaaattttttccatttctgtgaaaaattttattagaattttgataaggattgcattaaatctgtagattttttgtatagtataattaattataatttatattaattaacaaattaattaataattgatttattataaaattatcgattttagtaatattaattatcccactccatgaacctggggtatcttttcatttatttgtgtcttcttcaacttctttcataagtgttttatagttttcagtgtacactttatttttcagtttcacctccttggttaaatttatttctaagaatttcatttttttgtagttattgtaaatgagagttttttgatggttttggttagttcactgttagcagatagaaatactatgacatttgcatgttgattatgtatcctgcaactttactgtatttgtttattggttctaacaggttttttttttttggttgaaacttaaggattttctgtatatatgatcatgccatccatgaacagagacaatttcttcctttccaaactgaatgccttctatttaacttttcttgcctaattaatctggctgaaacttccagggccatgccaaatagaagcggcaagagttggtattttgctctgttcttgatcttagaggaaaagtttttaaattttcaccactgattatgttagctgtgggcttctcatatatggcctttattgtggtgaggtacattccttctatatcatctagtttgttgagggtctttttattatcacaaaaagatttgcattttgtactgttgactttggcttgctagtacagttgtcccttggtatccatgggggattggttccaggatcttctgtcaatacccaaatccatgaatgctcaagtatctatataaaatgacatagtatgtgcagatgacctgtatgttttggtttgtatgctttaaatcacccctagattatttaaaacatctcaaacaatgtaattactatgtaaatagttgttattctgtattgcttaggagaaaatgacaagaaaaaaagctgtacacattcagtactaatgcattcgttcttttttccccaaatattttcaatctatgattgaatccatggatgcagaacccataaatatgagggtcagttatattttgttgaagatttttgcatctctgtttgtcaagggtattggcctgtaattttcatttctgtagtgtcatagtctggctttgttatcagggtaaccctcgccttgtaaaataagtttagaagtatttcttctccttcattttttggaaacgtttgagaaagattggttttagttattttaaaaatctgatcctggacatttatttgatgagagactttatattattgattcaatctctttactttttttttggtttagatttttcagtttagattttctatttctgattcaatcttggtaggttgtacatttctagaaatttatccatttattctagtttatccaatttattggaatatattgcttatagtaaccttttataatcctttgtatttctatggtatcagttgtaatgtctcctctttcatttctgattttatttattcgagtcctctttctttttcatttcttagactacctaaaatcttgtcaatttgtttatttcttcaaaaagcaactcttagttttattgacttttctattatttctcatgtctctcatttagttcttctcagatcttggtcattttcttcttctgctaactctggtctcagtttgttcttctttctctagttccttgaagtgtatagttagggtcctcatttgagatcttttttttttttcttaatgtaggcagctattactacaaaattccctcttagaactatgttgctacattccattggttctggtattttgtgtctccatttctgattgtctcaagatattttttgtttctcttttatttttttcctcagttgttcaggactatgtactttaatttctccctatttgtgaattttccggtttttcctctataatgattttctagtttcataccattgtggtcagaaaagatactttatgtgacagatttcactctttttaagttattaagacttgttttgtggcctaacacatgatctgccctggagaattctttgtgtgctcttgagaaggatgagtattctgatgcttgttgatggatattctgtatatgtcttttaggtacattaggcttaaaatcttgttcaagtacgaagtttacatgctgattttctatctaaatgatatgtccattgttaaaagtgggatactgaagtctctgattataacaactgtattgctatttctgtcttcagatctattaatatttgttttatatatttatgggctttgatattgagtgtatctatatttacagttattatatcatcttgatgaactgacatcatttatcattatataatgaccctttttgtctcttgttacagttttttacttaaagtctattttgtctcctgtaagtatagcacttttttggttttcatttgtatggaatatctttttccattccttcacgttcaacctatgtaagtccttgaagataaagtaagtctcttattggcaacatagagttaggtcttgttttatttatccattcagctactctatgtcttctgattggacattctaatccatttacatttaaagtaattcttgataggtaaagacccactattgccattgtcttaattgttccctgactgttttgtaccaattttctttctttttcctctcttgtctccctttgttatttaaaaattgttttagtggtatgctttaattgctttttctttatctcttgtgtatctaccataagtttttgcttattggttaccatgaggcttttggaaagcatcatattgttatggcagtctactataaactaacaccttaactttaattgcataggaatctttcactcccctttccccacattttctatttttgatgtcataacttacttttttatattatgtttccattaacaaaatactgtagctaaggctatttttaatactttttttaacctttatactaaatttaaaggtgattacacatcaccactccagtattcaagtattctgaatttaagtatatacttacttttaccaatcaattgtatatattttgttacaaattattgtccttttgtttcagcttaaagaacttcctttagcgtttttttgtaaggcaggtctagtggtgataaactccttcaggttttacttttcagggaaagtcttcatctctcctttattgctgaagcacaggtgccccaggtaaagtattcttggttaaaagttttattccttctctaccaaaaatacaaaaaaaaaaaaaaaaagccaggcgtagcaactcggggggctgagaatggcatgaactcaggaggcagagcttgcagtgagccgagatcacaccactgcactccagcctgggtgacagagtaagactccagctcaaaaagaaaaaaggttttattctttcagcactttgaatacatcatcccattttctccttcactgcaggtttctactgagaaatttgctgatagctttatggaaatttccttatatgtggtgagttacttttctcttaatgtttttaaaatggtctattcgtatttgacttgaataacttaattataatgtgtcttttgaagttctctttgagttgcacctgtttaggaacttttgatctcatgtatcagatgtccatatctcttgggaatttttcatttattatttctttaaataagctttcagcccttttctctattctctgttaatggtgtcctataagtctgataggctttctttactctttccatttctttttttctttgttttcctctgactaggtaatttcaaaagacctgtcttcgagtttacagattctttttctacttgatttattctgctgttgaatctctctattacattttcattttatttattgaatattttgcctcctggatttctgtttagttcagtttttataattctatttgttttttgaacttctaatttttttcgtttttaaaataatattgttgagttgtctgtgttctcttatatgccaccgagcttccttaaaataatttatttgaatttcttttcaggcaattcataagtttccagaaaattattgtgtttgatggtgtcatgtttcttgctttttcatgtttcttgtggctttgtgttgctgaatgagcttttgagaaagcagtcacttccttgagacattatatactggctttggtagagaaagactttcacctgcaggtgagtgtgaaggcatcaactaggtgggatacagcaagtctggtttcagaaagggcattgtggcatagtttatgtataactccatcacctgatatcagcattggcaaagattgaggtgtcctcaacactctaaactgtaggtgtctgttgtagcagtggcagtagcaagccttgtttgaaaaagtggcaaaggctgctgtggttctccttttttttttttaacccctgcaggggaagtcatagctgcagggatacttgtttgtgtgacctctggtgtgcaggtacacaggcagccgtaacagcacaaattctggggcccaggcacacttctcccagaagtagtgctagtgttcaggttgcaggcactcaaaatgacagtggactgggttcctgggctctgaggcacacaaaactaccatgatgcccaggtccttggatgtaggtacactcactacagtgttggcaccagtatctagatctgagctgaacatgattgatttcagagacaaccttaaaaaaattctgttgaaatatggacatggcatatcagctataagcaactgaggaaaacaggtcgttagtgtgaagttttgtgtttctctggctaggagttaggctatgtttactgtttgctgtaataacaggtgccagaggcttaagttttctctagtgtctttgttttattcttctctgttgtctttgaatttctttagagaccccttcttaaattgggtctcagccttgcagttcttacgatgtaattccctgttattttacgggatcctgattggtgtgctggtaaattgtggggagagggaaaatgtcctctaattctgtaattaagttttagtcttttattgggatcctaggctgggatcttcacaagagcttctgagtttgtttttttttctcttagatgagataggaagactagagaaactacagttcagtatttgtcatcttccagatcagttaggctttagtaaaactcaaatcagtcagtgataaatagtttcccttgagggtaggtgttaaagagaacagaacactctgggactgtttaaaaatggttattttctgcttgctcctgtcagaagcacaaaaggaatctttctctgatctttaccctgagcatgtagtttgggctcctggatgtgaaagtcatgaatttgtggggtcctctgaggctgtgcctgcaatttttgtctctcaagatagtccatgctttttctccagcaattagtcagttaccctttaagtgttcctaccagctgctggctctagcagcagcttctgtttctttctgtttctggtgagctgtgattctctttatccgcacgtctccccagctttcaggacagttgtttgcccagtaacctgggcaatctaaaaatggttgtttatattctcttttttccccaaattattttttattattattattattattattattattattattattattattattattgtgagcaggactgacttttgagttctttacatgtcaggccagaaactggaagccctagtttctttgctcaacattccttctggaattaagggtgctgatttgtacccctttcctccaccattgtcttttactgagggtctgttgttcactaagttagtttttgtacctctacaaagttttatttcaccctaattcttgaagaatactttttctagatatagaattctagattggattttaaaaatgttttcacttggacaacttcttgaatcagtgctttcatctcttctcagaaattcttaactattatctattcagattctgtatctctcaatttctttattatcactttcttgaactctccttcaacatatgttagaacattttatactatctgccctattttgtaccctttcattttcttccatcccacgttttttttttctttactgcactctcaatcctttcaggttgaatttcctatttattaatttctttcaatttttctcccctctggcatttatcctattcgttttagtttcaaataaaatattaatttttagtcattatttttcaaagatgtttggtcaatttttatagttacatattccttacttatgtttatagttttctgttttatttctttaagtatatttgacatatttacttggcattctttgaatagtaatttaaatgctaaatttttgcagatttgattctgttgttagttattttggaaagttttttttttcctcataccctgattccttatatgttttatatgtacattttattgtggtcccttggaattttatcattttataaagtttctttagaaggtaagttttttcaaaggacattgactttttaaaatgtgttaagtagttttaattcaacatcctttttaatgaagaaaacttatgggttgttgtttatttgtttgttgttaggtgaggagcaaaataaaacaatcattctaaactcttttacgatgaattctgtggttgaaatggataggactgcacaagtaatataaataattttaggccacaaacatgcaagatttctgatgctcaagggagactccacccctcagtatactctgctatctaaatctaaactgaatttatttggagtatctttccatatgccaacttatttctagtttattttattcttttccaaaattaccagctttatttgtagatcttattagatcttgaacctgttggtctcaggctttatatttggtctcccatgtcacatgtggtcatcaaaacagaaacttcattttttttaaaactcttgatgctataatagttatttacatttagaaaaagtaacttttttttttttgattcagtggtacatgtgcagtttgttacatggatatattgcatgatgctgaggtttgggttacaattgcccaggtaatgaacatagtacccaataggtagttttccaacccttacccctgtctgtctcttccacctcttagagtccccagtgtctattgttcccatctttatgtccatgtgtatccaatgtttaactttcacttataagtgagaacatgtagtgtttggttttctgtttctgcattaattgacttaggataatggccaccagctgaagtcatattgctgcaaaatacatgatttcattcctttttatgtattcatgtagtattccatggtgtatatgcatattttctttatccagtccactgttcatgggcacccaggttgattccatacctctgctattgtgaattgtgcgcgatgaacatatgagtgtatgtgcctttttggtagaactccttaatttcctttaggtgtatattctgtaataggattgctggatcaaatggtagttctctttttagttatttgagaaatctccaaacttctttccatgatggctgaactaatttatattctcaccaacaatttataagcattctcttttctccacagcctcatcaacgtctgttgttttttgacttttttgatacaagccattttaactagtgtgagatggtatctcattgtagttttgatttgcatttttctgatgattagtgatgttaagcattttttcttatgtttatggcccacctatgtgtgttcttttgagaagtacctacccatgttctttgcttcacttttaacaggattgttttttgcttgttgatttgttcaaatttcatatagattctgtatattaagacttttgtcagattcagaatttgtaaatattttctcccattgtgtagcttgtctgtttactctattgacagttccttttgctgaattatttgcacttttaattgttttcataacgaagactgcttaaggtatctaaagttctgcttggaatacaattgtctgaaattttatataggaattttgaataaggaataccttctaaacctacaagaatgcatttctgagaaaaatattttaaagctaatttccatttccttcaattaagttgctggtatactctgatagcactaaaaatataatttttggtggggtgcagtggctcacgcctgtaatcccagcactttgggaggccaaggtgggtggatcacgaggttaggagatcgagaccatcctggctaacacggggaaaccccttctctactaaaaaatacaaaaaaaaattagccgggtgtggtggcaggtgactgtggtcccagctactagggaggctgatgcaggataatggtgtgaacctgagaggcagagcctgcagtgagctgagatcgcgccactgcactccagcctgggcaatagggtgagactccattaaaaaaaaaaaaaaaaaaaaagaaaaaaaaaaaagaatttttaataagagtatcaataagcattctttacaaaacataatttttgctctaatcaaattacatcattaaataattatagggccattctatggtgtgctatagagaggtgtttagatttcttgtaataaacaaacgtgggagaattttgtctcccatgcatatagtagagtaaggtgagggcagtaaacagtttttaaaaaaaaaacctgctcgactctgaaagacaaccaagacataagtattgaaattacgagattttttttaaggcaatgttggttgtattgaaattaccaatgatttgttaatgttatttgaatattttaatctctttcccattctagtattcaataatgtctcaatgcaaatggttgcactaaaacgagaacaaaggcaattttaaagatttcacaaaatatgaagtataaaattgtaaatgctgaaattaccactgataaactgcaaggaatgagtttgggacatgaaatttttcaccctaaaagaaggagaatggtaactttacatatttgtttattttgctatctctttaggatcaatttttaaatccaatgcctctttaatgatttgaaacaattatgatgtgaaaatgtaagtggtatgtgtatagccaaaggcagaagatcaaatttgaaagtaaaatgattagtacagccattttctttagtcatttccatgatttattgtatagatataactaagaaaataaacattcagacaatagatctacatttaactgcaaatgtataattggtttcattcattcaaattttagaatatgttattacctttagattcaaatttaaatttgtgaaactaattttcaaccctctcttattttaaactggtaattttataaatggcagccaagtgatttcctgattctatcacgaggactgtatcatatggattatctaaagattatataataattatgtaagaaatagataaaaactatattacatctaattttaaatatagtttgtctaaaattcaaacaaaattatatgaacaaagctagaggtaattctacagcccttctacttaactgactgtatatcttttaccttaaaaagaaaatatctttatatttatccacaaccataacactttccagaaattcaggataaatttcttcaaaggtttttcaaaagcgattgattaattatctttatttttctcccagaaaatattaaaatgttcctgacatagaaatttatcagtataaacacattattttctgcttcaagtttcctttccctgaacttttggccaagtagagagttaaagaaaaatatgctatattttaaagtcgaaagtttgcaaaaattctcaccctcagttttctttgctctgtgacctgcctctcttaactcttggcattttggaactagtgtttacctcactatgtatgaaaaccatattccttgaaacatttcatagtctattttatagtaaacctatctgtttgtgtaaaaagttttattttattgttttttaccaaacatagtaaggtttctaaacccaagagtatttttttagaaaatgttttgctgagtattctccatgtgtattgagcttgaagtggttaagaaagaaaatatttgtcttcaggatgtgagagatgatttaacataaaaatgcaaatacataaaaaagagaattggcacaagaaaattgatgataaatcatgattaaaaataatggttaaattctgttaaatgcatttgctatacatcagttacttttccaatttaatcctcagcaacactctgaggtaaatatattaatacctgtatttgacatatgaaagaacagaggcacagaaatatcttacagctatgagtttctggagcagaaggcaaacctagggactactcctcttgagtctatattcttaattgcatttctgcctttgactgatatgaaaaataggtactacagcttatcaaaggagaaggagtcacagcagcccctgaaatgtttagtcatagctgtgtgttggagctgggatttgagatgtcactatctgatgaatagttctaaatgattgctttgccaaaatctaaagtcttagacatcttctgataagtagagagttttaatgacatcctgaggttttaaattctattattttctaagatttttctttttggcagaggaagcaattttctctttgtcattcacatgccagaaacataaagcaacttttttttgttaactggaatatctcatgcatccgtacagccacacgatgctctgagaatattaaatattcctttccgcagcatacacaatgcagtgaattttattatttccatttttagccaaaaaataaagcataagaagacataaagagttatatattctagacagtgttgaataagtaatgaatctttctgggtttattttcacaatgtacaacccatcagtcatagattacaaatgttttcttttgattgttcttcagagggctttaataaaaaatgaaagtgtatcttaaaacaatcagttttcagtcttaaagctctttgttgaggataataaatttatagcatctgaaaagctggcttttcagtaaacatagaaaattgtagcctttaatttaatttttcccaatttaatttttttttgtaatgcagtaataaaaaggcttggtgaataattgtgcttttagttttataatatattttatttcatccaatgttaaagtaagagcatttagtctttcatcgaaaattgttatgtcagcttttgtttaatttcctgaagccttcctgctaagatttcatcatatgtgcataataatattttaactttctatttagtggcaattggaagggaaaatcatttacaaagcagtgaaaaataagtctaaactgtcaccaaatgaataaactaactccagctgtagccatgttttactcctttcttctttttaatgtgttgtttctgactttattttgtatttaatttttaaatttacaactgacacaatgttatggggtacaatgtgatgtttccatgcagaatacatagtataatgatcaaattgttgtaattatcacacttatcactttaaacatttattatttatctgcagtgacaacacgtaacataatctcttctggctatcttgaaatatacaccataacgttatttgctgtagtcactctaatctgtgacaatgcctttttccattatataatgtccctctttgtctcttttaactgctattattttaaagtttttttttttttgtctgaatagctgaatagctacccctgctcgtttttcgtgtccatttgtgtgaatgctttttcccatttctttaagtttatgtaagtccttatgtgttaggtgagtttcttgaaggcagcaaatagttggatggtgagttcttatccattctgcagttctgtatcttttaagtggagcatttaggccatttacattcaatgttagtattgaaatgtgaggtaccattgcattcatcctgctatttgttgcctgtgtaccttggtttttttgtttttgctttttaacttgtatttttgttgtataggtcctgtgtggtttatgctttaaaaaaggttctgttttgatgtgtttccagaatttgtttcaagatttagagcttcttttagcagttcttgtagtggtggcttggtagtgatgaattctctcagcatttgtttttctgaaaacaagtgtatctttccttcatatatgatacttagttttgctggacacaaaattcttggctgataattgctttgtttgaggaggctgaagatagggacccaatcccttatagcttgtagagtgtctgctgagaaatctgctgttaatctgataggttttccttttaggttaccaggtgcttttgtctcactgctctcaagattctttctttcatcttaactttagacaacctgatgacactgtgcctaggtgatgatctttttgtgatgaatttcccaggtgttctttgtgctccttgtatttggatgtctagatctctagcaaggctggggaagttttcctcattcattccctcaaatatgttttctgaacttttagatttctcttcttcctcaggaacattgattattcttaggtttggtcatttaacataatcccatacttcttggaggctttgtccatatttccttatttttttctttgtctttgttggattgggttaattcaaagaccttgtctttgagctctgaatttatttcttctacttgttcaattatattgctgagcattttgcatttctatatgtgtgtccgctgtttcctgaagctttgattgttttttattcatgctatctatttcattcttgtatcacttttggatttccttgcactggatttcacctttctctggtgcctcccagattagcttaataactaacctcctgagttctctcttaggtaaatcagggatttatttttggtttcgttccattgctggtgagccagtgtgattgttgtggggtgagggagggggtgttaaagagccttgctttatcatattaccagagttgtttttctggtttcttctcatttggatgggctctgtcagagggaaggtctagggctgaaggctattcagattcttttgtcccatggggtgttcctttggtgtagtactcgccccattttcctgtggctgtgccttcctgtgagctgaattgcagtgtttttattctctcttctgggtctagccacctagcaactctacctggctccagggtggtactgggggttgtctgtacagagttctgtgaagtgaaccatctatgggtctctcagtggtggataccagcacgtgttcagtggagggggccagggagtcaagtggactctgtgagggttcttagctctgatgatttaaagctctatttttgtgctggttggcctccttctgggaggtggcactttccagagagcatcagctgtggcagtatggagaggaactggcagtgggtgggactctagaactcccaagattatatggcctttgtcttcaccttccccgggtggataaggaaggcccatcaggtgggggcagggctaggcatgcctgagctcagactctccttgggcaggtcttgttgcggctgagtatttggggtgtttcccgggtcctgcaggagcagtccacttccttcagagggactgtgggtcctctcaggattcctggttcatttttgcagttgatgtggaactaatattcacagtgtgagcctctgtaccctactctgtctgtccgagtcagagctgcagtttagtcctgcctcctgtccgccatgactgtccaataaacctcagcctaatgtgtaacagaacaccgaaacttaattcttcttatctaactgtaactttgtatccattatcccagtcacctcctcctgcctattctccccagagtctggtaagcactattttactctctacttctataaaatcaactgttttaggttctatgtatttatctttctgtgtctggtttatttcacttaacataatatcctccaggttcatccatgttgccacaaaggacataatttcattcagttatatggctgaatagtattccgttcatgtctatctagctacctatcacattttcattattcattcatctgtatatagacatttatgttgtttccatatcttggctattgtgaataaaataggtgtgataaaaaagacattacaaccgataccacagaaatacaaaggatcatgacaattctatgaacaagtatatgccaacaaattagaaaacctagcaaaaaactagaaaaaaaattggtaaattcttggagatatacaacttaccaggattgaaccatgaagaaacagaaaacctgaacagatcagtactgtgcaaaacttaaataaatcttcctgttagtctgatggggaataaaaatataaaataaaatttaaatgaatttttttgttttaaaatttagtacccaagtcactttcagttcttagtaacttgtaactgggataatttctgaaatagtttttactggccaacagaaggttcatattctttctttgtatattgaagtaagttaactactctggttgcagctgttttagtatttaaaagtcatcaatattttcctgaagagttaattgaattttaaaaatatttgttacatagacacatttttttatagggattatacaggaattatatattatcttgacttaaatataagttagtagttttgtagatctggtcatgagttgatattttatacatatatatgtatgtatttcataaatcttgaaatatttgagattaaaatgtatgaacctaaatggcttgcatataaatcagatttcattcaagatttaaatcactgaaatataacatgaaataagcagaagcatgtaatttgctcagttgctcctcaaaattgttgagatttagatcttttccaaattcagctgttagaatacctatcaaagcttactattcaagaaccgtttatatgaagagataatttgatgatgttacacttactttgcagataaaatttagctttcatagagacagagaaaataagagtcaagcagttatctgtgcaatactcctagatcattactcttagctttgtgtcactgtgataccaaagttgaaaaatattgagcatttcaactggttgtattatactcttaaaataaaaaatagtgtttatcattctccttttaaaaattatgtaaacatgataatgtcaaagataaacaacatgaggaagggaatgctgagatttctactttcccctctggcatattgagtcaatcattatcattcatagagtgcattaaaaatacatccactcttgagtattctgacttttgcttttacagatgacactgggtctcaaaatagctcattgatgattactgcaaataagctaaaagacattatctcttttagtctcacagaatttttcatacagttttaatctcctgaggttgaaaaacttgaaaattgaaatgcatgtaagaacaaatcacataaggaaaacaaaaacaatacattgaaattggaatggctctcatttaaaatacatgaagtctaaaaagtctacaaattgctttatttcagtatgatgaaagactaatatttcctattttacatcaggaaatatttgaagtctaagagtccacagccttccttgtacgttatcacatttaaatctcacaataaccctacagggtagaaactattaataagggtacataccaatgaggaattcatagctcaaagaagttaaatagcatgtacaatgttagacaactgtattaaagtggtaacacaaataattcataaaatataccaaaccacaaaatatgctttgagtcacagttggttctaaataaataaatgcatttctttttttctttttacctcattcactgaacttaagaattttctaagttcataacaaatgttaaatacaaaggttttgtcatatttttactaagatggtgaacatgaaacatgcctatgtgtgacactgcaagtccccatgacttccaccctcttctccattctactatggaaatatgtccccaaatttgacctggttttaaagaactaggacagttctgggtttcttggagtcagggcatataggaaaacaaatgttgccttttcctatggcaatcttaatacaaatctttatgttgacacattttacttatgtctttcctttttatttcactttgccttaaggcaaagatgagacaacaaagacatggaaacagtttcattctttaaagtatttggtgctatacagaggcagaaatacaactttcagacttcttggttttctttccacctccttactctgagacagagatccagtttatatgtacattctatcttataaatcaacactgacagttgtataattttaaatgtaaacaaggacaaaaaagaatagaaaataagcacattttaggacacagaataatcaaagccaacatattataatatttagtttattgcaatattgtggagacaacatgtactctcccactactctgcccaacacaaaaaaacaacctagaaacagcaaatactattaaaatatgaatttaaaatattagatgtggcatgtgcttgtgtgtgtgtgtgtgtgtatgtgtgtatttggggaattgtaatgggaatggcatgctctaccctctagagtgatctctggcccccttcattccactttccataacaagcatgggcagagccatctggcttacatacattcacatgaagcattagctgaaagtagcaataatatattgaattatcaatgatacatatattataatgaatgagcttataatggaagaaatgaactctcctccacttagtgcaatattccttgcaatcttcatttattaacacttcctcacatcatgatggcagtattgcaaagatttatactagaggaatggcctggaaaagaggccaacagtattagtcagtctgattttaatctaagcctaatgcctgcctctagtttggcccaaaactgcttataaagctcttctgcagtctagttcaattaaccaggtgtctttaccatgcaaataaggtaaaggaaaaggaaaaggaaaaatcaagaacaactgatacatatttggctaaaaacactgcatgtaagtgatagtatttattgagcaggaaggaatactgcttgttgatgatggagagagttcttatttggccatgttaagttagaaatatcttagatcttcaataaaagtatcaagtgagaagttttataaaaattataacacattgatgaaagtgtatttgagagttttaatgggagtggcatgctctaccctctagagtgatctcacgtcctcttcattccattttccagaacaagcatgggtggagccatctggcttgcatatatccacatgaagcatcagctaaagtgtcaataatatagaattactaatgatacattatagtgggtatatatatgatattactgcagagaataatttggggctcattgacacatggccaacatttaaaataagagaattagataggctcccttagaagcaacaacatgtttgaagaaaaagaagcccaggacaagtctggacacaccccaacaatatcatatagagcagaggaggatgtgacaaaggaggcaaagttggtcaatgaaaaccagcagagatgcccttaaatcttgcagaagaaggtatttcaattacctgtattcatcataataaaaaatcattttgaaaaatcaaaatggtagctaaatgtgatatggaagaacatttaaacaattttttttctaaggtaggagctagtaagttcatatgctgccattcagaatgattcactagagacagaaattagtgttgcaggatataagggagataattgaaggagagatactgtgagaaaaaatgggattctaattagagaggatgtgtgggcctttgagaggagcaaaggccctgcactcatcaagatagcacagaagcacagctgttacagatgcagagatgcatatgagctgctagatgtgtgcttactagtagcagtgtctcttttttcttaataaagtaagaggcaaagccatttgctagctaggagggtttgagaggtagaattgtccacagaagagaaagtgtgaaataatcattttggacagtggaaaattaaacatattgatagggacaggaggcagggaaattctgggcagaagaaggcgggtccccatcaagggccccaccatcaatcctggagctatggccaaaagtgagaacatgcattcctgttttcctgatcaaatgttgccttttccaaaaccacccatggcccaccctgctgcacatcttgtgcccataaaaactccaggctccactggcagaaagaggagaagaggagaagcagctggatgttggagactacagttggatgtcaaagagaagcaacttgacttcagagggatggcatgacggtgtagctctaccttccagctcttccccttttcagctccctttccctctgagagccattttcatcagcaataaagtcccccacatttgccatatccaatttgttcatgcaaactcgttcctcttggacactggacaagaacttgcatgtaggtgcaaaaggctgtcacactgaccctccactgtgctgttaacacttaagccatacacagatgacaaagctaaaaaagcactgactgtaatactccttctggggctttaggggttgcggccaccccactagatactgttgtgggtctagtgtggaatttgttactgccatcaccctggcttccgtacctgctcacctatatgcttccttccacgaggggttgagcgcagcaggtcaaatgagtggagtttgcccctgctggcacctgtgtgctccaattcccacccacgaaggagtcagggaaaatttcctgcttcaatactaaggaaatacataagtttgctaggcaaagttgtataatctttggtaatctgtggacataaatggaagaacattttatcagtagtgaagaggtcaagaaaacaaggaccccactctgtttcctaagagacatgagtagatataaatgaaaaagtctgtgctgctttcctcatttactttctgttccccattgtaattaactatgagtatccactttctctgtctgccaatgtttggatctaaattcaccataaatttcctatatataggaattaatataagaaagatgttatatttataggtgggattaagggtcagggatattcctaacagtatagatggataggtacaaagatccaaagaggtaatacaccatgcccatcagaaggttttttattggaagaaaatccttgtgataaagaaactcagaggtctttgaaataactggaccaacacaaacaaaatgaaataaaacaaaaaaaaaatcattaaaattaaccaaataaattctgcaagtcaggaatttacttttattttccttttaattgctttatttacagaagtttctatgaaagattaaaggagaaccacaaaaaatttagggaattttaaacttctctcatattgtatatgcttacgttgtatacgtgtgtgcatatatctcttttttcttgaagaaaaaacgtgtatacaggactctgtaggagagagtcttgcagaggtggggaacccctttttattcagataccttgaatattttccatattagaagtaaatatgccaacttctcactgcaattttatcttcaagattaataaaataatgaaggcttcaaaaagtttaactatttccccaactcttaataggcatatctgagacattactacttcaactaatgacaaaatggtaagccaattttattgttgctgcttttttctctcccttttttgagtttcattgtttagaattccttccctgctgcttgttaaatcccattccctactttataaacatgtggaatatttttgagaaagggaataacaaataggtgaggagaaacttttcctgaaatctacagtgtaataactgcaattcctattctagttcccagtgtttccagaaatagtcttactctatctcctcttgtagaaatgctgtaatgaacatagagacttccaaagtattctaagtaaaatatatgtttgccttagtttttgcatgggctacaactctataaacaatctctctttacatatacgtcttctccacacattgctatatattctgctttaccctgagaaataacatacaaaatctcttttaaaaataacaaaagaaggccgggggcagcggctcatgcctgtattcccagcacttagggaggccgaggcgagtggatcacgaggtcaggagattgagaccatccaggccaacattgtgaaaccctgtctctactaaaaatacagaaacaaaaaaaaaattagctgagtgtggtggtgcatgcctgtaatcccagctactcaggaggctgaagcaggagaatcacttgaacccaggaggtggagattacagtgagccaagatcgcaccactgcactccagtctggcaacagagtgagactgcatctaaaaaaataaaaaataaaaaaaaaaacaggaggaacaaattaaattacaattaataagtaaaggaaatagttaaaatagttatactagccacttttcctgggtagtggcacctaaatccccagcttcagtttccactcatatgctgattactatctcatggaagtgtgccaggcttttggcttccctggtacctttgaaaactcatctttttgggggggatttctcgagccacttgtcggtgatttcccaaaatggatgccagaaacactttcccttctttactagcagttggggcacacgtttgtatgaactaggttgtatccatcagacacagccgtatgagacttgattaaaaagtgactgtagaaacaaatgtcctggaatccattcttctaggaccggccttagaaccatccagctttcagaggaaacccaagttataatattttttaaattttattttgtggcatagataaatattttattttttaataattatttattttattaacttttatttttaagttcagaggtacatgtgcaggtttgttatataggtaaacttgcgatgtggggtttctggtacagattatttcatcacccaggtattaagcatagtacccattagttatttttcatgatcctctccctcctcccaccctcttgtaggccccagtgtgtgttgttcccctctatgtatccatgttttctcataatttagctcccacttataagtgagaacacgtggtatttggctttctgttcctttgctagtttgctaaggataacagcccccagctcaatccgtgttcctgcaaaggacatgatatcattctttttatggctacacagtattctatggtgtatatgcattaaattttctttatccagtctaccattgatggacatttaggttgattccatgtctttgttattgtgaatagtactgcaatgaacatacatgtgcatatgtgcttatgacagaacattttatgttcctttgggtacatacccagtaatgggattgatgaattgagtggtagttctgtttttaggtctttgagtactgctatcacactgtcttctacaatggttgaactaattgacactctcaccaacagtgtataagcattcccttttctccacaaccttatcagcatctgttattttttgactttttaataatagttattctgactggtgtgagatggtatctcactgtggctttgatttgcatttctctagtgatctgtgatgttgagctttgtttcatatgattgttggccacatgtatgttttcttttcagaagtgtctgttcatgtcctttgcccactttttaatggggttgtttgttttgtttcttataagtttgtttaggttccttatatatgccgacttttttcagatgcatagtttgcaaaaattttctcccattctgtgggttgtctgtttactctgttgaaactcaaattataaggcaaggataacaagactggataaaaaaataagtattggttttctagagatgcatttatgaattcaaagacacaaatatgttaacgtgaaaagatataaaacctgtactattcaaaccttaaccataagacagctgtagcacatatgttaatgctggttaaaatgggaaatcaaactacaaagagaaattcatcagacacaacagagtggaaattttctaactcacttagcttggtgaatgattgaataaatagaaaaataatatagtaacaatactgaagttgggaacattaaagttatttagcaaatataaaaaataagaattttaatatatgtacacacagcattattacagttgactttgtagaggttacaaaacaaatttcgatacattccaaaacatttacatcattaggactgtattatactaaaagtatattaaacagaaattgtattcatttgttttcacactgctataaagaactacctgagactgggtaatttataaagaaatgaggtttagttgactcacagttctgcatgactggagaggcctcaggaaacttactatcatggtggaaggcggagaagcaagcaccttctttacaaggtggcaggagagagcaaaaaaaaggaggggaattgccacacatttttaaaccctcagatctcataaaaaactcacttactatcataaaaacaatatgtgggaaaccacctccatgatctaatcacctcccatcaggttcctcccttgacacatggggattacaatttgagatgtgggtggcaacacagagccaaaccatgtaatagatataagaaacaaagatggaggataagagattctaaactacttgttcagataatttacttgtgtcctctacacctacttagccacaatttcaaatgtaccattttttatcaggtgatagattactgctgtgactattttagaatttgttggatatagcaatacataggatatgatggacatttttggttgcattgtcaattgatgtctgctggggagtcactccagggctcaggaacgaaccatgaatagtttttcaaatggcaagtaattttctgctgtagaaggcatgacttgctctgcgatcctttgattttccttctggggcttgccagaggcttcacacagagttcttatttgccacatctatttctagcaccattaaacatatgggagattacaaagagaggaacagggcatcttattcttcagcttacatctgatacaaagccctatcttcatcaggtccccattcaaaactcttagccttctgaagcgcttggtaaatgagttggattggtaatcctgaggataaaatatattaccataggactcactgaacattttgacttgttccatatagtttctgtaaacatttcatttatacttgaacagaatgaatgactattttctaattacataggacaatcttgttaatagtattcttaccattctttatattcttattaaattttttgattgttctattacttatttataaaggtatctgagaaaccttactgacatgctggattagtttatttacttgtaattttataaaattccttttatcattttaggctcttactaaagaaacctgcttacatttattacattcctttatcgaatcaaaacatttctcaatgtagaatgacattcaatatcacataatgctttttgatatgaagtctgttctgtctgatacaaacatagcaatcccagttttcttttgttaaaatatttttatattgttttattttcaacctttcagtacatttatgtttgaggtgtgtctcttacaaatacatatagctgaattaatttttaaaaaccaatttgagaatctttgtatttatctagaaatttgttatttgtattaaatgtaatcactataatattacacatttcattttctttcacatgtggttctactttgtcttcctttccctaaatgtatttgttttcttttttgaaggaaatatttttattcctttttttcactttatgattttggagtttaataattaatttctgttattttagagctcacccatatgattttaatattttagctaacttgaaatctaaaaatatttttaaaaatatagtacttaatattccaattctaataattaatttttaatttacatatttatatcactcataaattattgcataataagcttcatggtaatattggatttttattgtaaagaataaaaaaactcattaagcatatacagtagaaattcatatttagtagcctattgatattcacatgtataaagttaatatttgtacgaataaaattgtattttattatgaaatctattttagtgaaggatcttaagctcaaattagcatattataaataagaacttaaagaaattacacaggctttggtatctatactgtttgaattaaaatcttatttattttatcacgtccataatctcagcactttgggaggccgaggagggtgcattgcttgaggtcaggagtttagaaccagcctggtcaacatggcaaaacctcatctctactaaaaatacaaaacttcactggctgtggtggtgcatgcctgtaatcccagagaccagggaggctgaggtaggaggattgcttgaacccggaggtgaaggttgcagtgagccgagatcacaccactgcactccatcctgggtgacagagcaagacactgtctcaaaaaatatatatattatttatttttttttccgtgactgtagacttaactgttaatgatgaatatacttcctttgtagctggttattattgactatcattaagtatgccaaatatattcagaaagaaacaactgcaaatgcccacttaatatctgtatttagataacttaaaatatgtccaaagatttatcttcaagttttagagtgcgtatttcatgaacaaaagctttcaaaaactgattcaattgaagttggagttaaacttattgtccgcagaaaaaatatgaatatttttatttctgattgtgagaaaatgtgttttgaaaggtgttttataccttccttatttgcttagtgtgaaaatttgagatggaattagaaaatgatctatgtggaatgtgttttctcaacatggccctgaaaaaactaaacatatgtttttaattataatactatctagtgtatgcaaaacattactgtttatttactataagatacaaaaagcttgcagaacttaattgaacagtagcagtctagtacaaaaccgaactgtttaaatgcattcaatagtttttctttttttaattttttttttaattatattttaagttttagggtacatgtgcacaacgtgcaggtttgttacatatgtatacatgtgccatgttggtgtgctgcacccattaactcgtcatttaacattaggtatatctcctaatgctatctctccccactccccccatcccacaacaggcccctgtatgtgatgttccccttcctgtgtccgtgtgttctcattgttcaattcccacctatgagtgagaacatgcagtgtttggttttttgtccttgcaatagtttgctgagaatgatggtttcaatattttaaagtttctgttcattttataatctttctaatatgacagggattcttagaagttaagtttattgattaaagatggattgcttcttttgtttttagtattctttatggtttaagagcagaggccctaaactttcctagagttaaatgtgcaagctttgtggttagagtatcagacgtctctgtagtctctcacacagcagagctgccgtggaacaactgccaaaggaccaggacactgcatagttaaatcatttccttcatccaatgggatcctgcattgaaaaatatcatgcagcaggcaggtgctgaacagttattaaaaatctcaatgaaagaggctagcctgactcgagaaaaattcaaaacctgcctttacacttatgattatgagatagtccatgatcagaggtgataaattacagaacagcatatttcaccccacattttattctacttttctctcaaactttatttatttctcttaaactttctggagtctgctcacttccctcgaaggtatcagtgacttgctgaaatatatcttacaatgtgttttcatagaaaaagtgagatagaggatacattaacaatacagataaattttgactatccacacattacattggggcataaagtgtttaattacccttttttctctcttttgcctttctaaaatctattgatccaattgaatttatcagcaaatatttactgattatggacaatgatggttaggtattacaaggagagaaataagaaatatattgttctaaagtaggcttcttgccagtaaaatatctaagaattcatttacaacttcctggccttcctcaaacttctgtgtgtaaaagactaagatactacaggacgatttcccatcattccccatctcacacacaataaagcttggacatacagtgaaaacaaccacctaaagttcccagacaatgagtggaaacagtcaggcactagtccagagtttatgctctcttgaaagagggaaggtgaaaatctacacaagtgtaaaatcaagattatatcaaatacctcctctgaccatattggaataaaactagaaaccaataaaaggaagaactttagaaattataaaatttatagaaacaaaacaacatacttctgcatgacatggggaaataaataaattagaaaaggaattaaaaattttttgagatagataaaaatggaaacacaacatactaaaacctatgggatacagcaaaagcacttcaaaaaggggagtttatagcaataaataaaaattagaaagatctcaaatagaccacctaatattgtatcttaaggaattagcaagaaaaaatccaactaactgagctcaaaattagcagtagaagaaaaataagtaaaaagttgataggtgcagcaaactactatggcacatgtttacctacgtaacaaacctgcacatcttgcacatttaccctggaacttaaaaaaaaattaaaagaaaaactacaaatatcatctggatagaaaaaaaatacaaaaaaaagcagcttggtttttcataatgctttgaaaagaactttgactaactgtatgatctttatagggacaataccaacatcagtgcatttcctgagcttgtgtttttatacacagaaaccatgagcaaaatgaacaaagctggaagttgcacactacctgacttcaaaatacactataaagctatagtaaccaaacagcatagcactggcataaaaacaatcacacataccaatggaacagaatagagaaaactgagataaatccacacatttaaaaccaactgatttttaacaaaggcaccaagaacatacactaaggaaaaagtctctccaataaatggtgctgggaaagaaaactggtaatccacatgcagaaaatgaaactagatgctcacctctcaccttatgcaaaaatcaattcaaaatggattaaacttaaatgtgagacctgaaacaataaaagtattagaagaaaatttaggggaaatgcttcataacgttgttctaggcaagaaatttttgggtaagaactcaaaagcacaggtaacagaagcaaaaatagacaaatggaatcaaaccaaaaagcttctgcatgacagaggaaataatcaacaaagtggagcaacacacagaatggaaaaaatattttcaaaccatgcatctgatggagggttaaaatccagaatatataaggaactcaaacaactcaataataaaataataataataatcatcatcatcattatctgataaaaagtggacaaaagatctaaatacattactcaagagaagatatacaaatggccaataggtagaggcccaccttgtttaactgcatttcacagatattgcattttttactaattgaattttcttgttagctctgcaataagcaagtctttggacaccattttttccaagagggtgcactcactttgtatctctacgtcacattttgataattctcacaatatttaaaactttaaaaaattattgctttatctgttatagtgatcagtgatcttcaatgttaatgttgtaattgtattggggtgccactaaccatatacatattggatgacaaaattattcaataaatattttgtgtgttttgactactccactgattgagtgcttctttgtctctctatctctccttgggcctccctattctctgagacacaacaatattgaaattaggcaaattaataaccctgcaatgtcctctaagtgttcaagagtgaaaagaagagtcacacggttttcactttacatcaaaatcaaggaatgataaagcttagtgaggaaggcttgttgaaaatggaaaaaggccaaatactaggcatcttgtgtcagctaggcaagctgtgaatgccaaagaaaagttcttgatggaaaacaaaaatgctacttcagtgaacacgtgaatgataagaaagtaaaacagccttattgatgacatggagaaagtctgagtggtttgggtaggagatcaaaccagctacaacatttccataagtcaaagcctaattcagagcaagatcctaactgtcttcaattctctgaaggctgagcaaagtgaggaagctacagaagaaaagtctgaaaccaacagaagttggttcatgaggtttaaggaaagaagctgtctttataacataaaaacgaaagatgaagcagcaagtgcagatataaaatctgtagcaagttatccagaagctctacctaagatatttaatgaaggtaggtccactaaacaaaagattcaatgtagatgaaagagctttatattgaaaaagatgccatctaagactttcacagctagaaaggtgaattcaatgcctggtttcaaagcttcaaatgacaggctgactctcttgttataggctaatgcagctggtgactttaggataaaaccaatgtggatttgccattccataaattctaggacccttaagaattatactaaatctactctacctattagctaaaaatggaacaaagcctgtgtgacagcatgtttgtttacagcatggtttactgaatattttaagttcattgtcaagacccactgctcagaaaaaaagaatacctttcaaaatattactgctcactaacagtgaacctggtcaccccagcgctccagttatgaagatatgcaaggagattaatgctgtttttatatatgttaactcaagatccattctgcagcctgtgaatcaaggagtaattttgaatatgtttcattaaggatatcactgtcacagatagtaattcttctgatggatgtggatgaagtaaattgaaaaactctggaaaggatttatcattctaggtaccattaagaacactggtgattcatggaaataagttaaaacattgattttagcaggattttggaagttgattccaaccctcatggatgactttgaggggttcaagatatcagtgtaggaagttactgtagatgtgatacaaatagcaagacaactaaaagtgaagcctaaagatgtgactgaattatgggaatctcataactaaattgaatgaatgaagagttgctttttatggataagcaaagaaatgtatcttgagatggaatccactcttggtgaagatgctgtgaacattattgagatgatgagaaaggttttagagtattctatagtcttagttcataaagcagcagcggggtttgagaagactgactccaattttgaaagaagttctactgtgagtaaaatgccatcaaacagcatcagatgctaagaattttttttgtgaaagaaagagtcaataaatttggcaaacttcattattatcttaagaaactgccacagccacctcaacttcagaaatcatcaccctgatcagtcagaagccatcaacatagaggcaagatcctccaccagcaaaaagattatgactaactgaaggttcaaatgatcattagcatgttttagcaaataagtatttttaaattatggcatgtacagttttaaagacataatgctatcatacagttaatagagtgcaatatagtgtaaacaaaagttttatattcactggaaaaccaaaaaaaattgttgattcactttattgccatatttggtttattgcagttgtctagaactgaatccacaatacctccaaagtatgcttgtatacaaaaaacattactaatcatcagggaaaagcaaatcaaaatcacaatgatatatcccctcacacttttcagaatggctattaccaaagtaacaatacatgctattgactgtctttttaataggcatggatgtggatgaggagaaataggtacccttctacagtgttggtagaaatttacattagtagaaactttatgaaaaaaaaagtctggaggaacctcaaaaaattacaaatgaaactagcatataatctggcaatcccactactagttttatttatccgaagaaaatgaaaccagtatgtcgaagcgatatctacattctcatgtttattccagtagtattcacagtagcgaagatatgaaatcaacctaagagttcatcatggataaatcaatttttgaaaatgtggtatttttacacagtggaataccatttagccttaaaaaagaaagaaatcctttgatttccaaaatccgatgaacctggctgacattatgtcaaatgaactaagccaggtgtagaaagacaaatgcgacatgttctcattcatttgcacaatctgaaatagttgatttcacagaaattcagagtagaatagtgtttattagagtctagaaagagaaagatggagagagattggtcaaaaagtgcaaagttacatttagataggataaataactttcggcattctgaaatatataatattgtattgtatatttcaaaataactagaagaaagtatttttgaatgttttcatcacaaagaataataaatgttggagatgatagataagctaaataccctgattaatcattacaaaatgtatacatatatcaaaacatcacaatgtaacccataaatatgtacaattattatgtataaatcaaaaataaaataaaactttaaaaataaattattatttttatctagctgactcagatattttaagttatatgtagaggcaaaaacagtgaactctattgctaggtcctgtgttctaggacagacctggaatttgaagccaaatattaaatgaaggaagacataatatatcaaagacatctaaagctttctgtatttggaataatataattattgtaaaatttacatagaacaaaatcaattcaaaaaaggcaattttttttctaatatgaggttactttgtcttaacaattaatatagttaattaataattattaataatgattaatgttctatagcatgtaaataatattacatttatgttttacatagtaagccattattttaagtagatttttacataagaattacctggattgaagagggccagagggaaaaactaatggtgaaaagtgacataaaacataattattattctaaaattaaactatattatgtcacaaaatagaaaaatgccattaccagctggttgctaacagccaggaattgcttttgtataacagttgaaatgcaaaagccagtcatttccattttattggataggggaagaagccataatgtaagtttttatagggatattcacagttactgctgttatccataattcctgtgtcctttccaaatgtaaccaactaatgtaaattgtttttggtcatactgatttatgtcataatgatagcaattacagcagggcaagttgtatttgacaagtcagttgagtacttttagcctggcactgttgaattacagctttcagaaggcacccctgggtccttaaaatgtctatcatcaagtcttgaatgaaatcaattttataaacatagcagaaattatgagtgctgtcatacttaaaagctttccctttcgaaatttgtgcatcaatctcaacacattattattgcctcaaaacttttatgacctttttgtaaagcattattgcaatagactttaaatattcttattagtggaaaatttattttttgtggattatcataatatataaaaacatatatatttatattgaagccaagataatggaatgaatatatgaatatgaattgattagtgtctgaatattcatatatgttcatctctataaactatctatctatccactgtatctctatgccatctggataaacaataaaaaaaatgagcttaacgataaccttgagccgtagtatataaataactcccacaagcttagtgttccaataacgtaacactaggcataaatgggttcataccttgagccagtgcttaaaattgtcacttgaattctgtaaatctgagatcttgaaatgctttaaagcaaaggttttcagacaaaggtaactttaaacttaattgtcattaacttgccataattcaaacatttctcattttgtaaaagaagccagaattcttagaagattcagtctgaaaaattctatgaaaaggaaaaaatgaaattctgttaacatgaaaaactctcttacttcaccacctccatgaagaatcattttggtggattggaatgatcagggtagaagagagaaaattgatttaattttaagaaatggagaacttggaaggtatgggcactaaaataaattaggtgaattttaaataacaagagattatcattagtgaactgtcaccttggcctatgacaggttcaaattagggaatagcttcctatgcacacataacttggtccaaggagtaaataaccacagaaacttctattttagagcatgtaactactctaaaatgaaagtatccaccccactagagtaatttcttcataatttcctgctttaagttccagagtgaatggaacataagttattccttaaagtaaaatgagtatcatttttaacgtaaatatatttgaaatacatagtaaggatgtagctctacaaatttagactattttaggagctgtagctctttatataaatacaattttattttcttcccagatcatagtttcagactttgtgagatatataagaatatatttcacaaaactatgaaagatagatagacttcttagatttaatgtgaaatgattacatattttatatatttcataaaggtattttttattatggtatgatttgcttataattcttagtagtggtgtggaacacatcagagtaccattcctatttgcaacttatgtaaagtactgaaccaagaagttgaaacaaatatctatatgttcagtgttattttggttgttgcctacaatgagctgcatttatattatattacaatataatataataatatatagtatagtatagtagtatactatactatctaattattttttatatttattaaataaaatataatgtatattattatattatatatatttatctgtttataattacataattatttctaatatgataatattatatactattattacaatatctaattagtattatatatcattgtatattaaaagttatattttagtatgtcattaataatgatacaataatgatattatattatatatttcatatatatcattaatattatgagtattataatataataatatatctataacatatagtatattatttatagatatcatattataacatttatattatggatattgcattgatatataatataatagcatatatattagtatgtagtataatattatatggtataaatattttatgctactaataatataacaaatgattgagagagagacagaaaacaatgttagaatttgaaattcatgagaccacagtaagtagaaaataaagccacagaccaaaaggtctatacatagaagtagggcttgggaagtaaaaataatatagatagtaatataatactaatatatactattatatatcatatattaatatcacatattatatattaataagatatataatatacataagtatattatatattaaatatataatggtgtgtaatacataaattataaatatatactataacataattattttatataatataaaataatatataattgtatataatacgtaagtatatattatataatatatcatactatatactatatatattatattaatatataatatatactactatatactattatactattattgtatatcttatgataaaatataagtagatacttttttcttttctttttttaattgtactttaagttctagggtacatgtgcacaacgtgcaggtttgttacatatgtatacatgtgccatgttggtgtgctgcacccattaactcgacatttacattaggtttatctcctaatgctatccctccccctccccccaccccacaacaggccctggtgtgtgatgttcctcttcctgtgtccatgtgttctcattgttcaattcccacctatgagtgagaatatgcggtgtttggttttttgtccttgcgatagtttgctgagaatgatggtttccagcttcatccatgtccctacaaaggacatgaactcatccatttttatggctgcatagtattccacggtgtatatgtgccatattttcttaatccagtctatcattgatggacatctggattggttccaagtctttgctattgtgaatagtgctgcaataaacatacatgtgcatgtgtcttcacagcagcatgatttgtaatcctttgggtatatacccagtaatgggatgactgggtcaaatggtatttctagttctagatccttgaggaattgccacactgtcttccacaatggttgaactattttacagttccaccaacagtgtaaaagtgttcctatttctccacatcctctccagcacctgttgtttcctgactttttaatgatcaccattctaactggtgtgagatggtatctcattgtggttttgatttggatttctctgaaggccattgatgatgagcattttttcatgtgtctgttggctgcataaatgtcttcttttgggaagtgtctgttcatatccttcacccgctttgtgatggggttggttttttcttgtaaatgtgtttgagttctttgtagattctggatattagccctttgtcagatgagtagattgcaaaaattttctcccattctgtaggtttcctgttcactctgatggtagtttcttttgctgtgcaggagctctttagtttaattagatcccatttgtcaattttggcttttgttgccactgcttttggtgttttagacatgaagtccttgccacgcctatgtcctgaatggtattgcctaggttttcttctaggattttgagggttttagatctaacatttaagtctttaatccatcttgaattaatttttgtataaggtgtaaggaagggatccagtttcagctttctacatatggctagccagttttcccagcaccatttattaaatagggtatcctttccccatttcttgtttttgtcaggtttgtcaaagatcagatggttgtagatgtgtggtattatttctgagggctctattctgttccattggtatatatctctgttttggtaccagtaccatgctgttttggttactgtagccttgtagtatagtttgaagtcaggtagcatgatgcctccagctttgttcttttggcttaggattgccttggcaatgcgggctctttttggttccatatgaactttaaagtaggtttttccaattctctgaagaaagtcattggtagcttgaaggggatagcattgaatatataaattactttgggcattatggccattttcacaatattgattcttcctatccatgagcatgaaatgttcttccatttgtttgtgttctcttttattttatcgagcagtggtttgtagttctccttgaagagttccttcacatcccttgtaagttggattcctaggtattttattctctttgaagcaattgtgaatgggagttcactcatgatttggctctctgtttgtctgttattggtgtataagaatgcttgtgatttttgcacattgattttgtatcctcagactttgctgaagttgcttatcagctcaaggagattttgggctgagatgatggggttttctagatatacaatcatgtcatctgcaaacaggggcaatttgacttcctcttttcctaattgaataccctttatttctttctcctgcctgattgccctggccagaacttccaccactatgctgaacaggagtggtgagagaaggcatccctgtcttgtgcccgttttcaaagggaatgcttccagtttttgcccatttggtatgatattggctgtgggtttgtcataaataactcttattattttgagatacatcccatcaataccgaatttattgagagtttttagcatgaagagttgttgaattttgtcaaaggccttttctgcatctattgagataatcatgtggtttttttctttggttctgtttatatgctggattacgtttattgatttgcgtgtgttaaaccagccttgcatcccagggatgaagcccacttgatcacggtggataagctttttgatgtgctgctggattcgttttgccagtattttattgagtatttttgcatcgatgttcatcagggctattggtctaaaattctttttttgttgtgtctctgccaggctttggtatcaggatgatgctggcctcataaaatgagttagggaggattccctctttttctattgattggaatagtttcagaaggaatggtaccagctcctccttgtacctctggtagaactcggctgtgaatccatctggtcctggactgtttttggtgggtaggctattgattattgcttcaatttcagagcctgtttttggtctattcagagattcaacttcttcctggtttagtcttgggatggtggatgtgtccaggaatttatccatttcttctggattttctagtttatttgtgtagaggtgtttatagtattatctgatggtagtttgtatttctgtgggattggtggtcatatcccctctatcattttttattgtgtctatttgattcttctctcttttcttctttattagtcttgctagtggtctatcaattttcttgatcttttccaaaaaagcagctcctggattcattgatttttttggaagggatttttgtctctatctccttcagttctgctctgatcttagttatttcttgccttctgctagctttgaatgtatttgctcttgcttctctggttcgtttaattgtgatgttagggtgtcaattttagatctttcctgctttctcttgtgggcagtttgtgctataaatttccttctacacacttctttaaatgtgtccctgagattctggtatgttgtgtctttgatctcattggtttcaaagaacatctttatttctgccttcatttcgttatgtacccagttgtcattcaggagcaggttgtttagtttccatgtagttgagcggtttttagtgagtttcttaatcctgagttctagtttgattgcactgtggtctgagacacagtttgttataatttctgttcttttatatttgctgaggagtgctttgcttcaaactatgtgttcgattttggaataagtgcgatgtggtgctgagaagaatgtatattctattgatttggggtggagagttctgtagatgtctattaggtccacttggtgcagagctgagttcaattcctgcacatccttgttaactttctgtctcgttgatctgtctaatgttgacagtggggtgttcaactctctcattattattgtgtgggagtctaagtctctttgtgggtctctaagacttgctttatgaatccgggtgttcctgtattgggtgcatacatatttgggatagttagctcttcttgttgaattgatccctttaccattatgtaatggccttctttgtctcttttgatctttgttggtttaaagtctgttttatcagagactaagattgcaacccctgcctttttttgttttccatttgcttggtagatcttcttccatccctttattttgagcctatgtgtgtctctgcacgtgagatgggtctcctgaatacagcacattgatgggtcttgactctttatcaaatttgccagtctgtgttttttaatcggagcatttagcccatttacatttaaggttaatattgttatgtgtgaatttgatcctgtcattatgatgttagctggttattttgctctttacttgatgcagtttcttcctagcctcaatggccattacaatttggcatgtttttgcagtggctggtaccggtttttcctttccatgtttagtgcttccttcaggagctcttatagagcaggcctggtggtgacaaaatctctcagcatttgcttgtctgtaaagggttttatttctccttcacttatgaagcttagtttggctggatatgaaattctgggttaaaaattcttttctttaagaaagttaaatatcggcccccactctcttctggcttgtagagtttctgccaagagatctgctgttagtctgatgggcttccttttatgggcaacccgacctttctctctggctgcccttaacattttttccttcattccaattttggtgaatctgacaattatgtgtcttggagttgctcttctcgaggagtatctttgcagcgttctctgtatttcctgaatttgaatgttggcctgtcttgctagattggggaagttctcctggataatatcctgcagaatgttttccaacttggtttcattctccctgtcactttcaggtacaccaatcagacgtaggtttggtcttttcacatagtcccatatttcttggaggctttgttcatttctttttactcttctttctctaaacttctcttctcacttcatttcattcctttgatcttcaatcactgatacccttttttccagttgattgaattggctaatgaagcttgtgcatttgtcatgtagttcccatgccatggttttcagctccatcaggtcatttaaggacttctctacactggttattctagttagccattcgtctaatcttttttcaaggtttttagcttctttgcgatgggttcaaacttcctactttagctcggagaagttcgatcatctgaagccttcttctctcaacatgtcaaagtcattctccgtacagctttgttcagtttctggcaaggagctgtgttcctttggaggagaagaggcactctgatttttagaattttcagcttttctgctctgttttttccccatctttgtgattttatctaccttttgtcttttatgatggtgacatacagatgagcttttggtgtggatatcctttccgtttgttagttttccttctaacagtgaggaccctcagctgcaagtctgttggagtttgctggagatccactccagaccctgttttcctgggtatcagcagcagaggctgcagagcagcgattattgctgaagagcaaatgctgctgcctgatcgctcctctggaaactttatctcagaggggtactggggcatgtgaggtgtcagtctgcccctgctggtgtgtccagaattggtgggttcttggtctcaccgacttcaagaatgaagccacggaccctcgtggtgactggtacagttcttaaaggtggcatgtccggagtttgttccttctgttgttcggataagttcggagtttcttccttctggtgggttcgtggtcttgctggctcaggagtgaagctgcagacctttgcagtgagtgttactgctcataaaggcagtgcggacccaaagagtgagcagcagcaaggtttattacaaagagcaaaagaacacaccttccatagtgtggaaggggaccctagtgggttgccactgctggctggggcagcctgcttttattcccttatctggccccatccacatcctgctgattggtcccttttacagagagctgattggcctgttttgacagggtgctgattggtgcgtttacaatccccgagctagacacaaaagtgttccaagtcctcactagattagctagatacagagtgctgattggtgtgtttacaaaccctgagctagacacagattgctgattggtgtattcacaatcccttagctggacataaaggttctccaagtccccactagactcaggagcccagctggcttcacccagtggatcccgcaccggggctgcaggtggagctgcctggcagtcctgcgccttgtgcctgcactcctcagcccttgggtggtcaatgggactaggcaccatggagcagggggcggcactcatcggggaggctcaggccatgcaggagcccatggcgcggggcaggaggctcaggcatggtgggctgcaagtcccaagccctgccctgtggggaggcagctaaggcctggcaagaaattgagcacaacgccagtgggcgggcactgctggggtacctggcacaccctctgcagctgctggcctgggtgctaagcccttcactgcccggggccggcagggccagccggctgctctgagtgcagggcccacggagcccacacccatccggaactcgtgctggcccacaagagctgcacgcagccacggttcctacccatgcctctccctccacacctccctgcaagctgagggagctggcttcagccttggccatcccaggaaggggctccgacagcacagcggcaggctgaagggctcctcaagcgtggccagagtggatgctgaggccgaggaggcgccaagagtgagtgagggctgtgaggactgccagcacactgtcacctctcacttggggggtgcctcccagttaggctactcgggggtcagggacccacttgaggaggcagtctgtctgttctcagatctcaaactccatgctgggtggaccactactctcttcgaagctgtcaggcagggacatttaagtctgcagaggtttctgctgccttttgtttggctatgccctgcccccagaggtggagtctacagaggcaggcaggcccccttgagcttcggtgggctccacccagctcaagcttcctggccgctttgtttacctactcaagcctcagcaatggctggcacccctccccaagccttgctgccgccttgcagttcgatctcagactgctgtgctagcaatgagtgaggctctgtgggcgtgggaccctctgagccaggcacgggatataatctcctggtgtgccatttgctaacaccattggaaaagtgcagtattagggtgggagtgacccgattttccaggtgctgtctgttaccgcttctcttagctaggaaagggaattccctgactccttgtgcttcccgggtgaggcgatgccttgccctgcttcggcccccactgtctaacaagccccagtgagatgaacctggtacctcagttggaaatgcagaaatcacccgtcttcctcattgctcatgctgggagctgtagactggagctgttcctattcagccatcttggaacctaagccaaatagatactttttaaaggtacgttttaacttgtaatttgccatgtgaccctcatttatagttttatgtatctgcgaggtgctcagaaagcttagggaagaccataagttccacaagaaaaatatcatgttgtatatgtaaatgcattatttataagacatcaagcaaaatattgataattttcatataactaattattttctaaaggtaacaatatcattagaaatcattaattggactcctactgaatcagaagtttaaattaaatgtcatgcagtatacagaatgaagaccatttagtgcccatgatggcagtctttatgcagtttgttagacgtgctttctatttcttgaaatgctgcactaactctttgaggtgtctatcctttgtgattctgttatttcttgtgatgtctttggagagatgtcaacatgtaatatgaagaaagcatcctgtatcttcaaaggacagtgagtgtttgacaatctgacccatgaaagacaggactctctaataagaatttgtttcagggataaaaaaactgtgaatttgttttaaaagcagcaagtccttcaggtcagaagccagcaaggcaaaagcagctttaaaaatatgtccataagatgaaaactggttataaacagcatatgaaaccaaggaaataacttccctttgacaaaacaaaatggtgatttcaccatagatatatttctgatatgtttgtctcatttcatagatttcaaggttatggcatgtcagcagcaccttcacagtcatttaagctggtgtctgctctctgtacagatgcagaatctgaggtaggactgttggaaccactagttgtccccaatgggctcatcctgccactattctgccacttctgaagatgttgcttgtagcaaactgaacatgttccattagtcctaggatttccataaaagtcacatcctgtttatatgctataaacatatgcagagtgattgttatggtacttctttttatagttcacataaaaaacaatttctacctaaatcatgaattttataagttttggttttaaaacatggccttctcaccttgatttttgtgttagaggttttcaaaacattaacagtttagtttctgtgctaagacattaactatgttaagaagctaaagttcatttgcctctgttttttatatttagcttgcaaaaaatgaccttctaaaaaataattcaggtcagtttctcctgcttattgggtcaacaaatgtcaagtgttgaaacagtgtcaagctgaagccaaaagcagagctccaaagaagtaacaaggtgatatttttaacaggtaattgccagcgattttgcctaagccacaaagatgcaatacacatttgacccaattcttaggttggggactttttttcccttcaacatataataaaatataataaaagtaataaaatggttttcatgaaccaccatttttctttcaacaaaatacttattttaatgagtcaggtaagaaggcagcatttgcttaattatcacagctgaaaaaataactcgaaccttgtaattgtgagagtactttgcaattccttgttacttgtgattcttttgcattcttaaaaataactaaggaataaccttagtaaaaagttaccatgggcagggcatttgattttgtgtcctttctcttcatctgtcctttgatgtcagtccatgtttgattggaaccccagaaagatgactttaaagtgattagattcaaatgattgagagagaataacgtcagaatttgaaagtcatgagaccagagtagaaaacaaaaaccatggaccaataggtctatacatagaagtggggcttgggaagtgaaaaaaataaaagaggattaaattaatgattttggggaaacaggaagatatgattaggatggtattgaaagtggggtagaaaaattttacatacttatgagaagcttatcagaacactgtaaaaattcctttctggaaaaggtctgacaacattcatgatgaacacccttactagcgtttaggcatagactagcatacagtctcttctgtatagttagtttgccctcaaggaagaaatgcatctttttagagtcaaagtgcttttaaggaaattgcatgttaaattttccttggtgggttttaaaggcatatgtcacctatttctaccacgttagttagacacaatctctttcactaaaatccatattcagagaggactgtttctgcaggggttatttgccatcactgggggtatatctgctggctgtgaaatcacacttattttaatgtccctagttgcttaaatcctaagtggatgactattttgtttgagactcacagaaaagagaaggtacattttagatcttaatccaatatacacatacatgcagatacacacatgtacatacatgtgaaaatttacacatttgattttaaaatttaaaagtaatgcttactctttgctcagtacatcttgatattttacattctattttatttctttaaaaattctctaaattgactccaacaacccctaatgtgtaggagtatggctgcaatttaaaatattgccctaatttgttatttaaataagtttttggttttctttaaagcattactgggtttgagccaggagttttgaatacaagtaaaaatgaatttccatggacactggaacaaagaacaaaagacacacaagaaaagtcatttcaggccaacaaggccaagaacgagtcagcttatttgacaaatgttttgggttactgttccaagacaggtactgctaggagctcagaattctgcaacaaataagttagagaaggtagctggtttcaaggaatccataatcttttagagaaaaagataacttaataatcaataaagttgtgcatgacaatttttactactagagaaataatattctcttattggaacagagcacaaagatttaattgaatataaacaaagggaaacttcctgtgggaaaaaagttttgattcataagtaggacaagaatagtatgtaggagtccctgtgtaggtgtgtagtaagggtaggcaggaggattagaaatgaagttttaagcaaataagaatattataatgccctgaggtaagattctgatttcaaagagtgatgggaggtggtaggagtatatgccttgaaaaaaatctccattgttgatacagaatgcaaagaaaagtcctaagtctggactaggaagtcatcgatagttaaggaaccctccatgtgaggtgggaaaagccaagagagtagaatgtcacagagttaaggggagaaaatgttggatagaagggaatgaataagagtgaatgaagaaaagagttaaacataataaggactaaaaaccatcactgaatttcagtaaactcaggtctttgctaagcttagaaacagcagtttaagtgtgatagtaacagtaaaagccaggtcatggtggcttgaagagagattgatggtaagaaaatgataatattagtctggataacatttgaaattttgttttgacaaaaaagggagggatataggacatttgctgaacatgtaaggggaaacaaggaaagattgttaaaaaatacaatatggaaaatttcaactataaaccaagaaggagaaaacaacataataaactccacatattcatcattcagcttaaacagttatcaagtttctgattttgtttcacttgtacccaaaccaattcctctcttcctccatattattttgcagcaaatcctaaataccacgcaaatttgtcaacatatattttaacatgtatccttaagaaataaatcttctttttaaactaatcacaataccattatcctagttacaaattaacaataatctttagcattactaaatacctagttagtatataaatttttactgttgttccatagatatttttaccattaatttattcaattcaggattgaaatacaacacaaacacaggaaaagtcacttctgtccagggccaacaaattgtcaaacaattcatttgacaaatatttttggatattgttccatgataggtagtactgctaggagctcaggttctgcaacacagaagatagagaaggttcctggtttcagagaattcatacacatttaatgaaaaatataattgaataagcaatatgagtatttaataagcctctaagtaaggtataggaagagtaggagggaaaattgaaaatagttttaagcaaagaagagagtatgataatgccctgagataagattctgatttcagactgatgggagggttaggagtatattccttgaaaaacctccatcgttgatacaaaatgcaaagagaagtcctaggtctggactaggaaggttactgttattcaattcaggattgaaataattgaaatcaattcattgtgattgaatgtcgtatctcacaatctcttttaaactacagtataggtttcctctttcctacccacttttttcctttatattgatttattcaaagaattggatcatttgccctgcagcgtttgttgtggtttgaattttactggttgctgaacagtactgtataatgtgttcctatatccttcatattttctgtaaattggtatttaaatctataatcttgattttagtgtagttccatttttttgaagactgctgtatagacagtggttcgttctttcatctgaaggcacaaagtgtctggttgtctatattattgggaaattagtagtgattaagaatcatttcctagatttgttaattcataaacagcttcaaaatgtaatattccaattctgtatttccattttcaatcattagctggagtaagtctataaagaaaggctttctctcattaactatttagttactcttaagtacaatttgtacagaagataaatgtttgattagtttcttttattaactgttgtcacaattatgagttaattgccagacatctttgaaagatgaccagagcatttttaatttttgtttttataaaatgatcattgtgagcacaataattaaaaattatttgacaaattttatccattgcagtggttattcctactgattctcaaattgtaccacgcctgactcatataaagcactttaagttactgagtcattctgacaaaagcctcaggagtctttgatgactcttgttttgagacttgtaaaatgttatagacacattttctgcactttccagcccagacctgtaataatttttttaaaataaaagatttatatttagcacataataaaaaataaataaaaagcccaaagagggagacattgaagatgtgaaagggaaaggagagacaataaataaaaggccttttcttttttttattgagacagagtttcgctcttgttgccgaggctggagtgcaatggcgcgatctctgctcactgcaacctccacctccggggttcaagcgattctcctgcctcagcctcctgaatagctgggattacaggcatgcaccataatgcccagctaattttgtatttttagtagagatgaggtttctccatgttggtcagtcaggtcctgatcacctgacctcaggtgatctgcccgcctcttcctcccaaagtgttgggattacaggtgtgagccaccgcgcccagccaataggaggccttttctgagaagagggctgtgtatcgaatcccagatcctgaaatgagggcttaactacagttaggaggcaagaaggaggaacgtgtggaagcagacaggttcaactgtataggcacaacagtgggaagttgaggaattttagtctattgatttcctttttctgttgaacaggtagtaaagtcatatgttgaatttgagggggaagagactatgaagcttgttgaagagaaaaggaggaagcttgtccatcttcatctttactttcctagacttttcaaattgaagcttctccactcactgatggcttgagttgctctactaattctcttgcattttcttttcttttcttttcttttctttttttttttttttttttttgagacagagtctcttctcttccattttctaaattgtctctgacatttgcctggaaccacacacaatattccaagcgtggtcacaaccattattctataccaaagtggccatgttgctgtttttacttaaatgtttctacaaatatttgtatgaacaaatgtaattttatatgaatgcacaattagtagcaggttttacctgttgtgatattgttattggtgcactttttcctttttcttttttgcttggctccttatgctccatctcctcccacccttcctccaactctccaacgctgtcacttatgttaacaatgcagcgtatattcctacatttttttctcattttaatgtaatcatgttattggtcaggtccaggtctgttctacccctgtgcaataattcaatcaccgtgacgtgggttttgcaaaagagaaaagatttattcacaagtccaccaagcaaggaggtgggaaaatgctttcaaatccacctccttgaagataggttgagggatatttatgtgttagagaaatggagtggtctaatgcgtgaggaaaagtgattggcagtacggagaaatgaagtaattggttcattctgaccaagtgtagtttgggtttgcagcattttataggacacatgtatagaaaatggcagcgttagtgtgatatgagggtggaattttgggccccctgacaacaaaaggccacctctccagcacttgcaccaccctagttgaacggtaggtggtccaaccaatttgaactggataggagctggcccaagttcctgaaaaacagcttgatcaactattactgtggtgacctatgaatgctgtctataaaagtagccagtgaaggtaaaatttcagcattcagtggggaagtcatcagctaccatggcctttagcttcatgaaaaaggaaacaaaagaattacacaatcaagcaaccagaagcaagcagggcaggcagatctgatcaaattaaccctttggtttcaatcacatggaaacatatgcatgaacatacataaatgcctatctatcaatcaatcatctatctctttatatatttgttatttttcaaaatgagatgatcatatttgttttttgtgaaattttttttctcagtgaaaaaattatagaaatccttctagttaaatttaaaaaattttaatttttttatagtgagctacatatttaaccaaccattttcctattgattgatattaaactttccccagtttgttgccactgagaacaatgttgccattaataattttgtagttatatctttgtatactaccacctttatttttatgggataggttcctaggaaggctatttctttggattttaaaggatgctgccagattgctttctgaaaaggttgtaaaacttgacatttctaccaccagaggaaaaatgtattattttccagggttctcatgataggagatatatttctctctctctctttagaaaatgttttcaagtctaataaatgtaaagtaataatttaattttaatctaatttgcattttgccaatgactagggaaactgaacatctttttatgtcattttgctctttcaatttattgttccaggaattattcaatgaatatactttgcctatttattcatttgggctttttatctttgttgtaaatttataaaaattctctgtgtgttgtgtatgtgtgcacatgcatgtgtgtattcacacacgtgtgttggtacatgtgtctatgcttactacctgcataacagaatttttttctgaatattttactcacttaagtctgcttgtggttcttttgtaaataaaatatattgttaagcaattttttcccctttattgtatacaattttccagtcttatgtaagaatgtgttaccagatccttaatgggcttgtaatatcctacatttttataagcttttattttagcttatattacatttaatgccttaatacacctagcttgtttttttatatgtggcagattctgtgggttggcttattctacaattgccccaaaccctgccctcctggtatttttctgttaacaagggtagaaactaacacatgagatctccgacttctttgcagttttgaggtcatctaaccctggttgggttatagggcaaacatccttttctaagtaaaaacaaaatcctgttaaaaacaaaggaaaaggctcatgagactccctttccctacaatcttttctcttctttatgaatgaaatatggacattatggcttcagtttttccatcaatcttgcagtgatgagaatgaaaatcacacactgaagacgatggagcagaaagatagaaagcggactgtgtcattgagcagttggctgggctgaatcacactccattagacttacatgaaaatacaaaccttcctatgtttaggctactatattacaaagtttttgtcacttaaaattgaaagcaatcctaacaggttcagggtcccacatatattttcttcttcataggaatatgactacttgtcctgtaatctatctttttccccaaattaaaatgccattcttaccatttattaaattagcatatatagaaagacctatttctggattctgttccactgagttgtctttctgtttccatgtcattagcatatttatttgattaaaattatttttatatatatgtatatatacgcacacacacacattcacacgtaatgttttcttaatttctttgctttagacatggcaagggtacttcaaatctattccttccttcaggagtctttcaaatatttcaagaaaatcgtttgctattgttcataatagtagaaggaggcaaattcctaggcagataggggcaggtccccggtgaaaccaaaccttcaagccaaaaacagcctgaagccttaaaaccaggctgccagttccagatggagtctgcaaccagagtgagaacttctattcctgtttgcccactctttcctgattggttctttctgaacaatgctttttaaccaattgaatgttgccttttccaaggttacctacagcccgcactttcttcattctgagcctatatgatccccagactcagccacactttgagactacccaatttcaggtcggggctactcacaatttattgagctcttctgtcactcaataaaactcttctccaccttgctcaccctccagttttccatgtaacctcattcttctggacatgggacaaaatcctgggactcaccaaacagccagtgtgaaagaagctgtaaagctgtagtcctcccgtactctgttggcaacaggtggctgccccacaagacaggaagtggcggtggctcttggccagcccaggtgctgcaggcctagtggggcaatgggatcgaacaagctggaacatgcccctgtttgccaaagaaaggctgtggatggcaggaacgaacgaactgcaacatgaacgagctgcagcccttctggggcccagacctcgggactgccctagctagaactgtaacacgctgtaacaccctctttggggctctggggtggctggcatatctcagttttttgggttccaccgcattcccctcgtttagatgctggcgcctaaagcagaagctgctttgcagtacacctggttcagccagacttgcacagagctggtgactggagcagccacaccaccacagcagttggcacaactggctgggcaccatggctgaaccctgcactgaatcactctcacacccctcactgctccacgccagggttgtctgtggtggatgtgagatctgggccagcgagcctggagctgagcacagcctgctggtcagattgggtggtcatgagcgaaactctagcagaggcacccctggtcacggaggtctccagctggtgaagcaccacctgaaagaatcctatgtaatttagactaaggcattaccagaatggcattcttgaagaagttaaaaaaggtagtataatgaaagcagcactgctttgtagccaagagattatcattttaatccttcctgtaaaattttttaccctacccatgttcttttacttcccctgtctctcactgacttatccatgaaattaggggttgacagaagataatccctgtggtcccatacagctctaattgtctatgattccatggatttctggactaggacacttgtctgtaactattacattatttctccttcaagtaatgaaaatatctgtaattagaatccatcattttttaaatgtttcttgtataattatattcaatgctaaaaataaaaatacatacatatatgaacttttattcttctttcattgtttgtaagagcacttggtgacctgtgaaaagagataaattgaattgcacttgactcattcacttatgggtagcttcatacaggccttagccttgatagtagaaaacaggcaggcagttatcaagagctattattctgagaacaaattattatattaaagaaaaagttaggttcatgtttaggtaagaataaactttgtccaggattagaaactgcactgctatgtagacagttggtaccactcaaagctattgacacttctttctagccgtcacatcatcctagtttcttcatgcatactgacaatcagattatattttgaacatataagaatgcagaaagtcatccaggcacagtggctcatgcctgtaatcccagcactttgggaggctgaggctggcagatcacctgaggtcaggagttcaaaaccagcctggccaacatggtgaaactctgtctctactaaaatacaaaaattagccaggtgtggtgatgtgcacctgtaatcccagctacttgggaggctaaggcaggagaattgcttgagcccgggaggcagagcttgcaatgagctgatatcgcaacactgcactccagcctgggtgacagagtgagactctgtctccaacaacaacaataacaaatagaatgcagaaagtcaaatcatatgcccttctaataggccttctcatccacagtatgggaataattagattcagataataattttatgcattttatacttcctattctgaaacatctcaagatactaatttaaaatgaatatgaaaaattattgaattaagggaggtattcattctccctcctttcagttaatgtcacaagttgattctagttttctaggtcatggttcttctccaggattaagacaaatggatcaaacagaaaattgagtcatctaaaatttatttccctttgtttaactttaggttagctaggaaatttgaatatcccaatttatattcaaatttaattttaaaaatgataactaatgaccccaattcaaataatttgcagaagcttatagccttataaatatggattataataagaataatggtttatagataatggactttttttctttttctggaatgttcttacagctgagagtatgaaagattgggcctactgcatcctattcctgtctctctctttccctgtaaccttatctgtgactttgtttaagttattaatattgctgccatcctaggaaaatgtaattcagaatagacagcatgaaaagtgggaatatcaggatacaaacttgactacatttttcttttattactgattttctacttttcttttctgagctccagtaaaggaaatagagattgtttgcctttccttctcttccaccaggtatgtgaaagtctgaaagagcctgctagtaaagtaccatttgaaaaggaggaagcaggaagctaggagtgaacaaagcatagggttgatggatacagtgctcacaaaattgccccaccgttgtcattgatatcacctttaaacaagttttagagaattgaaaccagatatgatgtgaagttatagaaacagtttaatggggccaatggacaggaccttctggcaggtaagaacgtcttggatatagaagctcctagactctacagtctcaatgctattaacttacttgatctgtgacattacgtaggtaaatgacatctcctgaagtgatttttctcatctgtaaaatgaggttaaaatgggaataataatgatgtctactttgggagcagcttacaaagggaagaaaagagtatatagcacaatgcctgtgcaaagctaacattcaataaatgttgactgccatcattagagccagatagactgatagcagtgagttgatagcagggccagtggaaaccaacaagaagctttctcattagcagtgagatcacagattctgcattctctctgtggaagcagtataatactccctaggtttcttgattcttgttggtctgtgaaaagtgaagaaggaaaataggatattacttgttctactgttttctccaactaaatgaggtgacaaaaagcacaagtgactgatgtaaggtacaggaaataattcataagttgcacctttccttcctttctaccccaagctctccaaagcttataaggaggattcaaaatgcatagaatatgtggaaacaaaaaaatgtaaagtatgttattgtaaatggcatgacctctaatttaatgtatcactcacaactcattcctagaaaaccaatacaaagtgctacactcttggaagatttttggaaacattgtatgtattatttatgtttaaggaaactgaggcagagaggtaatatatcttgcccaatcatacagaattattaaatgagactcaaacaacaattctattaatcaacactgcctctactgaaaagttaatgttttattttatatgctttatattgcttgtgggtaggaggtgttgtctaggaagtttatgtgtttacctttcattgtcttaaaaacattaatgatacagagaatgtttttaatatttcaggggcttaaaatgtataattgaacacttggagggcacagcataattttcctgttcttcatattctccactacactgattattctttcaaggttgtaacaggctgctgcttctacaaatgtagtaattacatgagcattgatacatttctagattttagtttattctaagaataaatttattctaataatgagatgctccaagttcattaattttaggaaaaaatgttgtaaattatattgcgggaattaggagactgtcagggatgtagggaagaatttgtaagtattttgagatattttaaaacattctaaaacattagtatatacttatattaatagcataaaatacaaaatattttcactattaaatactttaattgcttttaaaatcagcattagagaaatctgttttgtatttttttctctttttcttttggatagcagttttaggtagtttacaaagaggtgagttcattaacattccaattataatcaatcaataaatatctgtttatatatacctaatttttacttccagattggtatcatatatttactgaggtggattgaaccacttcaaaacaacgttaaaaatttaataacatctaagaattcatgaggaaaattgacatttgttcatgaaacatgatcaatgaaatgtgcagtgtttctgtggaactatttccaggcagctgttgcaaatgaccctgatttgagaaatgctgggttaacagcattgctgtggggaattaacttgatgaaagctctatatatcctgctaagtgctgcttaatagtgcctaactcctcaaataactgtattcaataatagctaaacaacaattaacagctaaaaatgatgtgcaagtatctaccatcttatgagatggcagaatgggtgaaagagaaataagtaagttgtttgaggaaaacaacaacaacaacaagaaacagaaccaacttcaatgaaataattcaaagtgaaccaatcactgctataaatggaccaagaggcagggcttggttaggtaaatggccagcttcttcatgaagtatgttctagtctcttaggatgaactaattcttcagttttgacctttcatagcactgcttgtacctttatgacttgattcatttggctttgaattttagttgtttatatattgggctctgtactagcctgtactcttgggaataggggcaatgacttatttgtctttgaatgcttcaactctcacaacaataagtatatggaatattgaaaatatttaataaaattaggtaaggaaataaataggtaatattttaactgtcagttttttgctctagtctatcaaattaaaaaaatacaacaggaaatcagcacaggaaagtatttttagcccatcttccaattaagagacaacggattatgatcaattaaattgatattcttcctcaatatacataaagttcaattgcttctcatgtgggctagaaagaatggtgtctgcatattccaagtgtgagtaataagaaatacacaatcaggcaatcaagaggaattaccaaaaagtaagtgagatgctcactgtgtaataaagcttactgagaaactgtgttaccaggactccctgtaaccaaagtactggtgtcagatgcagacgctgagcaaaagaatgcatcaaggatcttgccttttctctcaaggagctaacataggaaaggagactggtcataggccaatgagatattaatagtacagtaagggttgtaatcataataagttgatgaacttgaagaagaaaactgaaatgcattaattgtataaatgtcttcaaatcaacagaaagtttaatgaatcgccacagaaatacagagaaagaagttgtgaactatggccaagccaacaagttttggaaagtttcaatgaaaagaagaaatttgaattagggcttcaagggtgacacaagatttcattaagttagaaaaatggtatttttagaaagaataaattacatcaacaatggtgctgtgacacagatgtatcaaacatagtaagtagagatccggtgtggctggcaattaaaacctacagatgacttctgagcatgggatgatgtgaaaagaattataaaaatgcaattctggtcaatggggatggataccttggatttgaggaagacagaaagctgggtaagtgttgggagaaattgtcctggtgagaaattgctcaccaaagaagtagattagtattagtggaaaaaaaaaaaaaaaaaggaaagaagaagaaagaagagaacataaaaagggattaatcttcagtgcttcagtgctttagtggcaacaaaatcatgaccctttctatagctatagggagaacagaagagggaaagttctgaagggagtgggtgtcaccagtggagggtgtccaggttcttggtgtcatgaacaaagaattggacacaacacacaaacaaagcaaggaagaaatgaagggatttattgaaaatgaaaacacactctacagtgtgggagtgggcctgagcataggggatcaaaggccatgttacagaattttggggagtttaaataccctctagaggtatttaatattctctagaggattccattgcttatttgggatatgccctatgtaaatgaagaggatgaagtaaaattacaaagtcatttacttggcctatgccccatggagaggatatttcctgtcatagctgaggtgtgaattggccttaagttccctccctccagaccctattttactgcctcagtggggataaatattacagtttggtggaatttgacactgacatgacttttaagcttttgagaaagtgtctagaagacgtttaggggcctggaccttgatagagcttttggtaccgaagaaacatttgcaggctcctcaaggaggtggtagttgaatagttggtggtgattaagccctttgaggactgagaggggagagcctgaagacaagggatggaaaggaagaccttatttatggtctacataatcgggtctactctgaatatttactgcgtctcctgcccctcatatgttgaaattctaacccccaaggtgatagtattaggaggtagggcctttgggaggtaattaggttaaaggggcttctttgtcatgaataaaattagtgtcattacaaacaaaggcctgaagcagctcattcactcctgctaccatgtgaggacacaagaaggtgccatctatgaacaaagaaacaggctctcataagacccccaatctgctgttgcctttattttggactccccagcctccagaactgtgagacataaatttatattattcataaagtacccagtgtaaggtattttcttatagtagcctgaatggactaagacatagtacaggtgtcacagacacttcattgatgttatttaaacaagatgaagattggagtcctaaagaaaactcacatttgctgaatgaaatgagtgcagacagaagaagcatgtaggagaggacaacctctctgatgacaaagcaaaatgttttaatgcaaggagtatcaaatactgcattaggatgaagaccaagtatttattatttaggatggttagaaacatattctgtttttatgtgaaaacataggctaactatcctcttttatatctctgttgttctcctcatcagtctggaaccacgagatcatctttagtgctaaacagcccacacaggattggaaaagaatattttgttgattgcagcatcctgtgtcaactgattactttctcttctatgcagattagctgctggggatcccaattgctcacagtagcagctgttgtcactgattctgtcacaagcagtgctgagcaggagtcaagtcatgctggggagaaggtgaagggaaatgaaacctttctcatttagcagagtcgctgcctattagataagtagacctgaaaatccaaaaagtttgcctcttgctcttctctgagattcattatagtttgtgactatcaagagagttgatattcaagatatatttattgatcccattttaaatcatacttttgaaatattttaaaaggtcattgttgcgctgctctattataggtcctctctgttgggatgggggagtggacagtttgggatgaagcccatattcaagaatctcctgccttcttcaagaagtgaagttgtcagaaaggagggttgcaaatcccattatgttcccttcccttgaaataaatcagaaacaaacagaagaaacaaataaacaataaataagcaaataaactcctgcaggtttatgtaagtccagtctcttgtcatagagtcagtaaattggacttactaatttttccataaaaaatatttacttcccttaagaaccacatgtcccgttgtttatgataatttgtttatgttgtttatatactatcattactattactaattttgcttcagctgttagttactgtgagggtcgttgaaacttcagactataatgataaatttgttcatttttcttatatcttcattaattttttccacaaatattttgagaacaagtttgtaaaagcttaatcattcaaatttgttatacttttcacatgaattaaactatgtttttctaacaacagaaaagaatcacatgttctatttctgcctttggtgggttcattatgttgagtcattatccttgcctcaacaactatcctactgacctctgaaggttagcctttttctgtgtttcttggaaaataaaaagcaggagccttgttaagcaagttgtatttttcctttctcctaagagtaattacaaatagatgcagtcctttgctttgagccatcttgaactcctttacaagataaaagtagacagttaatcgtcttttaccaagccctatcaaattatttgttcatattgctaataccaatattttagctcacttttattagacattgtaaaacctaatgtttttaatcctaaaaaatagcaattttatttaagaagacaaaaataataaaatgataagataggactccctgtctcaaaacacaagacaaacataattgtcattgcccagtttcactaggaaagaaactctgaggcaagaacaaaaatgataatgcagcaatttgaagataaaactcagcaagcggccgggcgcactggctcacgcctgtaatcccagtactttgagaggccgaggcaggcggatcacgaggtcaggagatcaataacatcctggctaacacggtgaaatcccgtctctactaaaaatacaaaaattagtcccagctactcgggaggctgaggtaggagaatggcatgaacccaggaggcggagcttgcagtgagccgagattgcgccactgcactccagcctgggtgacaggacagggcgagactccatctcaaaaaaaaaaaaaaaaaaaaaaaaaaaaaacaaacaaaaaaaaaaaaacaaactcagcaagcataggtaaggaaaggaatagttgtgggagttaattccaatatattctgggatgtatcatttggctctttctgtagaaactcaagatgtaaaatcccttcctgtgacatgatatctcatctgaattggaaagtgggagaaggaggcagaaaatctggtcacgcagcacattggcccggctacgcacaggcaatcaagggtacaaacattggcatttccagagcaaggacctggctggccccagacagatgcgtcaaatgaccccagcatacttctttcacggcagtttcagacatgtaccagtatcaagggggctgctggaatcaagggaatttgggaaagtggttaaggtttgtgtttcataaaataatctgaattttacaaaataacaacaaagcaataagtaacaatgagtaacagatttgtcaggaattgtcaaatgcagatgaacacaaaaaacatggtgattttaagttggctgtaaaagacaggcatcgtcttttataatatgactctcaagatttggttttacactaatcaacattttatgcaacatgagacattgcaatgctattttgatcctattttctacattggcattcatatcacaggctctgcaattagcatagtgaagaattttatgcttcaagtgatgtactgaccacattctgggtgaaaaacgatagtcccaaaggacaaccagcagtgcttttacaactcagctggaaattttgcaggaaataatgtatacgattaatagttttttaatatttttttcttattcaaactaacaatcagcttaatttagatccttgagattctccaatgtgttcgctaaaaccagctttaaaatcctcatggttgtcaatgttaggaaaatatccttacaaaaacaaagaggtgtcataatttggagactccttatttcagctctttctgtgttagcaaacagagttcaattgtggaagaaagaaaaagagaagatgtgcttaaaaagaaagatttgtttttttcatttgacgcacaaagatgttgcagcaaagatagcagatttgtaaaaaatcctggtttaccaaagagtatgagagagtggaatattgtattttctcttgacttcacactatcaggatcttctggtgcagaaagaagcagaggagattccctgataatttcttattgatagagccaatccagttcctgttgttccagtctatcccatcacagaggagtagtacagttgcaacaaggatgttgtaaataaataaatcttctcctattcaatgggcacaaattaatggtaaatttacttaaacgctaagttgcctaacaaagttaatatttgggccagctttgattaaattgttaccacctactgagtgtttttacatgccagacactgttctaaatatttataaaaattttaatcctcacaataactgtaaaaggtaagtactactattaatccaattttatgaagaaggaaacttaagaacttatataactttctcagggtcacacaggcagagctgggatttgagcagtctggggccagcggtttcctcttagctaaaaccaatagtttcttctgtttttgtttttgttttttgtttttttgagacggagtctggctctgtcgcccaggctggagtgcagtggcacgatctcggctcactgcaagctctgcctcaggggttcacgccattctcctgcctcagtctcccgagtagctgggatacaggcgcccgccaccacacccggctaattttaagtatttttatagagacggggtttcactgtgttagtaggatggtcttgatctcctgacctcgtgatccgcccgcctcggcctcccaaaatgctgggattacatgcgtgagccaccgcgcccggccagtttcttcatttttaacacttcaaataaaatatgcatgcttgtgtgtgtgtgtaatagaaatgtgagtgcacgggaggctgaggcaggagaatggcgtgaacccaggaggcggagcttgtagtgagccaagatcacgccactgcactccagcctgggcgacagagcgagactccgtctcaaaaacaaaaataaaagacaataaaagaaatatgagtgtatatgatttcttattttccttatttgctcaatagccaatatgggacctattttctaaataggcctcatctctctctactttatcagagagtaaatgtaaatcaggaagagaacctgaggtaccctgtaattattctttactcagctctcaaaagccttatatcaaatatgttaaataatctacttccttgtctttcataaatgtgctccggcttcgtaaaccgtgaaaagtgacagattatttattaagtcacttaaccactagcacatcccctccctttctcaaagagtgagatatcactccagctgctgaaagttaataaactcatggctaggtgattgagaagagctgtgatacatctgtaactgtctcacaacacaaggtaaataaactaggaattatcttcttacactcacagggctgccaggagacagaaagcttttcctctagattccaccagatttatttcaagtaactttttgctggctcttgtaggaatgcaaatttacagggagaggaggtcagctgagggcttcattttactcttgggattctgtccctaggacaattccaatttaagatttaagatgggcacaaatttcacagtaatttcatctttgtcgtcttccattgggcattcagaagctatgccaatgcacatttaatttttaattcagtgtgaggacaaatggttgataatgggagttacaatgatacagtctcaagttacttacttcacttgattcaggtttaacctctttttttaaaaaacactgtttttttttctcttatttccattctcacctccagcatccagctagggattctctctctctcactccccacccccaactctgtctctgcaatttgtactgtgtacagtacttgaagttgcctagacttgtgcacaactgtacataatgaacttactcactcccagttactggcataggaggtccctgctttctcatcactcctattcaacgtagtactggaagttctagccagaacaatcaggcagcagagagaaataaaaggaatccaaattggaaaagaggaagttaaattatctctgtttgctgatgacatgatcttatacctagaaaatcctaaagcctcctccaaaagactcctagacttgataaatgacttcagtagtttcaggatacaaaatcaatgtgcagaaatcagtagccaataatgttcaagctgaaaatcaaatcaagaacacaattccgtgtacaatagccacacaaaaaataaaatacctagggatacatttaactaatgaggcaaaagatctctgcatgaagaagtacaaaacaccaatgaaagaaatcacagatgacacaaacaaatgagaaaaggtctcatgctcacagattagaagaatcaatatcattaaaatgaccatactgcacaaagcaatatacagattcaatttaattcctatcaaattaccaacctcatttttcacagaattagaaaaaacaatcctaaaattcaaatggaaacagaaaagtcttgaataaccagagcactcctaaggaaaaagaacaaagccagagccatcccttgacctggcttcgaattatactacaaggccaaaataaacgaacaattcatggaactgtagttcaactgcataataccagaatcaagctgattatttctgcctttatattttatcacaggagtaacttttgaccacacaatgctaatcctaacattttgattcacagtgataatactttccccacctattgaattttttttttaaattatactttaagtcctgggatacatgtgcaggacgtgcaggtttgttacataggtatacatgtgccatggtggtttgttgcacccatcaacccgtcatctgcattaggtatttctcctaatgctatactcccacaccccctcactccccgagaggccccggtgtgtgatgttcccctctgtgtccatgtgttctcattgttcaactcccacttatgagtgaaaacatgcgcatgcggtgtttggttttctgttcttgtgttagcttgctgagaattatggtttccagcttcatccatgtccctgcaaaggacatgaactcatcctttttttatggcgattcctcaaggatctagaactagaaataccatttgacccagcaatcccattactgggtatatacccaaaggtttataaatcattctactctaaagatacatgcacacatatgtttattgcgactctgttcacaatagcaaagacttggaaccaacctaaatgctcatcaatgatagactggataaataaaatgtggcacatatacaccatggaatactatgcacctattgcaattttttggtgtttgttgataaattatgaggattacgcactaggtgtgtacagggtttcataggtgctttgtaaacatcagagtcacttgggtccttttctccataagcctaaaatcaaattacgcaaccaatgaccactactttcccagacactgttcacaggctgcatgttgatgaagggcagagaaaaagtcctcataactgatgtttaggtgggaagcacctatggcatttttaagttctagttcaaaataagaagctcagctacatttcatgtccaaagtaaaataatctatttcacaacttttattgagcagttcctttgtgccaggtgctatgctggctctgatactaacacttgaagaaatacaaattattaattttgtacacaagacattcaatcctgaaaagaggcacccagggtattagaaatgctctctcagcaggtaggagtgttaatcttggttttgccattttgtttttttcctatttatttatttatttatgagacagagtctcactctgtcacccaggctggaatgtagtggcacaacctcagcccactgcaacctccacccactgggattctcctgcctcagcctcccgagtagctgggactacagacgcgtgacaccacacctggctaatttttttgcatttttagtagagacagggtttcaccatgctggccaggctggtctcaaatctctgacctgaagtgatcctcccacctcagcctccaaagtgttgggattacaggtgtgagccaccacgcctggctggttttgccatattattgaaattttaaacatccaaagggcttttgactttttgtttttgctttgatactcaatgtattttagctgaaattattcctgtaagtatttaatactgctggtataactaataaataaaaacaaatattttataaagttaaattactcaagaacttaaatattatcaacttgattagttaaatcttttaaaacatgtcaataaaattatgagcttttcctttttttaattgaagaaacagggtcttgctctgtacatccgatatgaagtgcagtggcgtgatcatagctcactgcagtctcaaattcctgggctgaagagatc

SEQ ID NO: 367 - DNA, 646 bp, Homo sapiens
  misc_feature (463)..(463): n is a, c, g, or t
  misc_feature (583)..(583): n is a, c, g, or t
ttttttttttttttttttcggtgagaaggtgagaagagacaaagtagaaaccaaacagatggctaaaggcagaggattgtgagggtctgactgaagcagcaggggatgaattcaggaaaccattcacagaaaggtagaatcaggaggacttgataacttactgactttgaagaaaagaagtcaaagatgaccgagttcctatcctgaagcctaggaagatggtaatgctgagataaggcatacagaaagaatggtgaagacaccctgggctacttacccaacctgatagattaagacagtataaccaaatctgccagaaagaactaaagatatataatgaaaggccatcttctgaacacttgaccattttctactgcctctaagaactccttcctccttgtcattaattagatgttaatgctgttaggcaaaatccagaccaggtacagagaaggtgaggganctattcattcaccactggagggcaatgggaaacttgacaaagcctgtctcatgatgcttacattctagagttgaagggaaacacaaatgttaatttcagatagtgatttaaaatatgaangaaatatggcaaacagaccaactggggtgatcatagaaagctgcttctgaaggagttggaatt

SEQ ID NO: 368 - DNA, 861 bp, Homo sapiens
  misc_feature (23)..(23): n is a, c, g, or t
  misc_feature (28)..(28): n is a, c, g, or t
  misc_feature (30)..(30): n is a, c, g, or t
  misc_feature (53)..(53): n is a, c, g, or t
  misc_feature (133)..(133): n is a, c, g, or t
tttttttttttttttttttgatngtaananctttttaataggtcaaataactntacagttcattatattcttcctgagaataatttatatcccccaacaaactaaagggagggtatatcttttcaaaattaanagaatggatggtgtaatggacatcaaaagaaaaccaaattcctgttttgcttcattctctcctgggaagacagatacaaggaagggttagttaactccagtggctgtaaaatagtcaacatggctttaatctttctttataaattatatgaaaatggaaaaaggggatggttctggaacttctcctcaatgcagtttggaggtgctctggtactaagcatttctgcttccaagagaaatatcattgctacaaaaaactggcacattattctgtgaaaaaagacatgagtttttagttgtgttctacagccagttcccgacccaatgcttcacatatccacacgaaagtaaaaggcaggtaagacaaaaagggctgtagttttttctgaaataactcaagtcttcaaaatatagcttttatattctttgtaaagtgggattagcatattgcaactgaagggtgttctaacaaacaaaaattccagtctggataataattctatggtagacaaaagaattctcagcctcttgggtttcctggaattctttgcttcatgctctcctcttccactatgcagctaaggtagtttaggaattaagatgtcaccccttggccatccccctttagaacgtatcttaatgtgaacataaattgttcttcatgatgcttaaaagcttacatataattttcattcttagaaaaacgccacattttggatcctggatttt

SEQ ID NO: 369 - DNA, 539 bp, Homo sapiens
ttttttttttttttttttacacgaatttgaggaaaaccaaatgaatttgatagccaaattgagacaatttcagcaaatctgtaagcagtttgtatgtttagttggggtaatgaagtatttcagttttgtgaatagatgacctgtttttacttcctcaccctgaattcgttttgtaaatgtagagtttggatgtgtaactgaggcgggggggagttttcagtatttttttttgtgggggtgggggcaaaatatgttttcagttctttttcccttaggtctgtctagaatcctaaaggcaaatgactcaaggtgtaacagaaaacaagaaaatccaatatcaggataatcagaccaccacaggtttacagtttatagaaactagagcagttctcacgttgaggtctgtggaagagatgtccattggagaaatggctggtagttactcttttttccccccacccccttaatcagactttaaaagtgcttaaccccttaaacttgttattttttacttgaagcattttgggatggtcttaaca

SEQ ID NO: 370 - DNA, 650 bp, Homo sapiens
  misc_feature (104)..(104): n is a, c, g, or t
  misc_feature (147)..(147): n is a, c, g, or t
  misc_feature (176)..(176): n is a, c, g, or t
  misc_feature (294)..(294): n is a, c, g, or t
ttttttttttttttttttttgtagagatggggttttgccatgttgcccaggcaggtctctgactagtgagctcaagcaatctacctgcctcagccacccaaagngctgcgattacaggtatgagccactgcgcctggccaacactgntgtactttttaatttttacttgatggcanaaatgattatgttgttaaatgtttcttctaaatttttttttcaattttgaaggatatcaatgttttaatgacaaattagccttcatgcaaattcatcttggggaattctagtaactgncctaatttctgggaattctggaaacatcttataatattttcctgacacatacacaagactactatctctccccactcagagaaacatacacatgcaaaaaactattttaatataaatatggaaataaaaaacaactctttcaccatatcaatgttcctcaacaactttttttttttaacccaactggaaggaaaaacctagggcacaggaaaaatagagaaaagtataaaaaaaaacagtaccagcacgtaagtataccaagctcttccagtcctatgggccctgaacttctctacactagacatgtatcataaaactaaaaaaatctagactaccaagaaagttccttcttcagg

SEQ ID NO: 371 - DNA, 656 bp, Homo sapiens
ttttttttttttttttttttctgcttccattaaggaaaaacaggcattatcacttacaatctagatacaacgaatcttttcaatcttttatatttaagtcatcttagcaaaactttgcagaggaataattaaattgtaaaaaaacttcactctaaattttcattttaatgataacccaaaactgttcctggacttgaaggcatctatacctgaaatgggtaacatcttttggatgcaactaactgctcatctactgcttttggtgaacttggaacatatttatcttataaatattgatttcagatttcaaaaaatatttctaacaggcgctagcttattaatctagttcttctttcttgcatttgttctgacaaattgcaacacttctaaaaccactgatggctcccaattgtgttgaaaagagaacagttatcttctttggtccatgactgcaaaacattttcaattttagatttataaacaccaattacaatgatgaatccaatgaatttttctacttctgcataatctatttccttttattcacttttatattcataccagccttcagcatttctccactttaaaagcagtatgaagtcaatgctgataaaccaagcatcataaaagatgaatgaaataggggtcatgcattc

SEQ ID NO: 372 - DNA, 787 bp, Homo sapiens
ttttttttttttttttttttttttttaaattttaaatatacctttatttctcaaactcaaagctttatcaagttctaacacattttgcattgacaagtgattttatctgcatcaagtaaggttagtgaccaccacgaaagaggaatccccagacctcctaggcactaagaaatatttcaaaggctatgcaaatatagaacaaaaagctttcaatttagtctaattggtatctatttttcatctatattaatttggaaataagttgctaccttagaaaaattacatttttatccattaaaataaaacaccagataggttgagtttttttaaaaacacccacagatctgtatttagctacttcctctttagtagatggtcatctcaccttcctatgcaaacacacacaagaatttgcaccaactctcactagcccaggcaaaactccaagcattttatttagcttacacttcaattatttttttaaagtgataggtaaacaagatttaggcacttgaacacacacacgcacacacacacacacacacagtcttttatttcctgatcttaaccttagagttctccacaaataatcctgaaaagttgccagatctttaaaaatacctctcctcaacaccggccccctccccccacgacttggccctctgattttaactggctgaattggaatatgttccaaagcgagctgtgaaattctagcctctgcaggattaaggatgtgaatctaaccttggaaactggattcttacaagtccacccagaagggttt

SEQ ID NO: 373 - DNA, 731 bp, Homo sapiens
tttttttttttttttttaatgaggcggagtctcgctctgttgaccaggctggagtgcaatggcacgatcccggctcaccgcaacaagagcgaaactctgtcttaaataaataaataaataaacaaacaaacaaacaaacaaactatcacagcataaagtaggaatatttcgttactgtctagttaaactggttaatgcagaaaggaagtctggtaattccagttttaaagtaaaattttggacattgtaggattgattatttggcatagttgtgatgtttgttcctgcgttatggttttgttggcagggcagcctttaaggacctgtatattttcttctagactctatatattccctgtgagtattagttgtatggtcaaactggcaaattttaccataggtataaataatagagaatgtggaagaatagtgaatagtgtcagagatagttaaaagtccatacaatagtagagaaggtagtaagtaatagtggcttggactaaatatttgttgaataaatgttttaaaaaacaggctacctacaatttgtgttgaagatatgaatgaatgaagtttccacacctttatgtggagacctgataagtaagcaacaataaggaagggtccccaggttggggagagccccaagttgagaacaataatgaacaattattgtatgaacaattgttagagacagctaatcacaaacaacctgcgggcacaatgacctc

SEQ ID NO: 374 - DNA, 487 bp, Homo sapiens
tttttttttttttttttgtttgtttttgagatggagtcgtgctctgttgcccagcctggagtccaatgccgtggtctcggctcactgcaatctccgcctcctgggtttaagtgattctcctgcctcagcctccagaggagctgggactacaggtatgtgccaccacacctggctaatgttcttatttttagtagagacgggatttcgccatgttggccaggctggtctcgaactccagacctcatgatccacccgccttggcctcccaaagtgctgggattacaggtgtgaaccaccatgcccggccgtgacactcgttttatagcatcaggctggtgaccagaatgtcatggcttctgggcagaggccagcttccatgccgtgtcctgtcttcctagtgcagatgtccccagctgcagtgagtaccagcgtgagggaatgggctccagactcccagaggggccacagggatggcacgccaagctct

SEQ ID NO: 375 - DNA, 2500 bp, Homo sapiens
agggtcagtttttaaaggaaaaacaactaactaccttgcaagcttgctagcaggtttaagtgtaataatgtgtgggaatgactgcaccgtgactaacatgcagtgacagcttaattaatgttaacccttatcattatcatataagaatgtgagttacataagagaggagtcctgtcagttcgttctctgctgtgtccccaagaccatgaatcatggctggcatgtagtaggcatttaataatatatgttcaacaagtatttggcagtcttggagggcagaaaaggaggtggggaagatttttaaataacattttttaaaaagtcacattgtcctacaataccgatttttcttgcatatttaggaaattgagggtttttttctaaaacatgcggacatatgggaaataggatgcaacatttgcactaatgtttcagacacagttagaggtttccaagagattttgcgctggggaggctgcttgctacaagctcccaaagctctgggaggacatagtattcattcctccctcagcagaagcggtgaggcaagaggctctggggagcacccagcgttgggcttttagcatagtgtgtcaggtcttcatagtttgggcccagggcacagagaagtcacagctctccggcatcctgtgacctttaccctctttgccaagggaaaatgtggcccaccaaagcaagaaacttgagggcatgggtcaccccagccctggcatctgcccagagcccgagaaggaaggaacaatgatcctccagctacctcacggggctggcacaggtgaccactgccctggcatcacccagctgtgtccggcagcctgaaccccatctgtggggatgcgaggaggaaaatacaaaagtccttaggtgaacactgagaaggcagatgcagcagaaacctccaggccagaactacccagtcttggacctatggtggagatagagcatagctggcgatcatgtgtacttacactctaaggtcacctggttgcactatggcctcatctgtggctctgaaaatgaagatttggaaggagatcatcacagctaatgtttaacaagcccctcctgtgtgccaaatcattcacccctcaccacaaccgaatgagctaaggattctcattatatatagtttatggagagggaagtgcagacataaagaggtgaattatcttacccagatcacacagctgataagtggtggaggcagaatagaatctaaacagtgtggctccggagcccacatgcattgattcgacaagtgtttattgagcacctgccgcggacaaggccttgtgtgattaaatagggttataattagtaatataaaaatgagaaatcactaatgctttttagacttaacattttgtttttttgtaggtttcaggcacagaactgtatatccaataatagtgaaatggatcccactaattatgacagaaatgatgatacatttaaatgacttggatgttttataggtatgatctcgtgaaatcttgagagaaactgaatgacgaatgaaactattgttcctgtttcacacagaagaaaactgaggttaaaaggggtaaagtaattttgcatggcatgaagtagaaattcaaagtacaggaatttgaacttggttctgtccttttctgaagcccttgaccactatagactcaaacatcaccttgtttttccactcattcaacacttttttttttaaattatctaataggttggcactcatcatgagcccctgttctcattctgcaaatggtgaagctctctattgtcctgaccccacagttcctgtcccatgaccagggccagctcaccaaggagctgcagcagcatgtaaagtcagtgacatgcccatgcgagtacctgaggaaggtgagtgagtgcagacagatggggcctggtgcccttgagcagttcccgggtctcagctgccacacatctcatagccggtgatgctgggggaagcttacgcagtcacagtactggcttcttcctctttttctttccatacaagtggcttagggatggggtagagtagttgacttatttggatgaaaaccactatcttctgtcagaaactcaaaaggaatcattgctggcatggtaacctaaagaaaaacaaccagacaagtgcccaacgacacttaaaaaggtgatttattatcttgccaagtttaggctgggcatggtgactcgtgcctctaatcccagcattttggggggctgaggctggtggatcaccggaggccaggactttgaggccagcctgaccaatatggcaaaacctcgtccctgctgggggtacaaaaattagccgggcatggtggtgtgagcctgtagtcccagctactcaggaggctgggacaggagaattgcttggattcgggaggtgggggttttagtgggccgagatcacgccattgcactccagactgtgcgacagagcgagactctgtcaaaaaaaaaaaaaaaaaaa

SEQ ID NO: 376 - DNA, 1215 bp, Homo sapiens
ggggggacttgagtatcctttgttaccctcaggagatcctgaaaccagtcccccatggatactgagggctgactgtatagtcctatcctcacggaactttcattctaatgggggaagactgactataaacaaaatatatgtaataggtggtggtaagtaccgtggagaagtaacaaatggggcaaagtgagttatacagctccattcttagaaaccttggagtacttttcttagtttatactcgtggtggtttccttttgtctcctttattacatgggactctgacatgtgcccatagctagggtgacagtaggatctacccgatagtagggtggcagtaggatctacccaaaaagcgtcctgctgatacaggaccaaagcatcctgttgttctcgagcctataaaaagagctaatggtgttgcttctcttaactgtggcctcctacactgtgttttggatgattggtgatgtcttggatattctgtttctttggaactttgaatatacaacactttactagggaattagcaatggaagcagagcaaagatgtacagaggaaacaatgcgtaactctgatggaattgaagtcatgaggcagcagagagcttaaattacagctttaaaaatttttattttttagagggaatttacttgggagtaacagcagtaatagttaacggagccagaatgcttgagtcatataattgcaaagcagagttgggagcaacagatgctaaagagtagttgctgtagttcctctttgggtcgtaggagcagttgtcatattactatatagctactgcatgaagaagagttcttagtgaggcctgggtgatcagctcttcttagtattctgtgtgaccccatttgaccttttaacaaatccctaagtaaataaatagcccctcaggaaaactaagtttttctctgctgtttttttgcttgagagagctataactgtaatagacttatatttctgaacattttagtgcttgccaatatttggtaatatttatgtttcctatatttgtaatgaacattcttcttccggtacattttttgttaaattattgtttgatggataaaagttcaccttttattgtataaaattgactgagattaatttatacacattgacaatgggtaaatagaatttttcagattattaaaagctgaaggatgcccacgtaagcaaaaaaaaaaaaaaaaaaa

SEQ ID NO: 377 - DNA, 3492 bp, Homo sapiens
cacgcgtccctcttgcaacttgctgagtttccctaagatcattattttgaattccttttctggcatttttatagatttccttttcttttgaatctgttactggagaattattgtgtctctttggaggtatcaaatttccttgctttttcatgtttcttgtgtccttacattgatatctattcagctagtggaagagttgcttcttccaattttatggattggctttcataaggaaagacttttttgtaggcatatctgtagttttggttgtgattaggatgttttggctttgattctggtgagcacaggagtgtaggctcaatgatttcttcagctgtaaccaatgtaactggtgtcatgtaaccatgtcactgtgagtcctcagtggcttaagttgccattgttagctgaggctgttgtgaggcttttctggggaaagggatgccagaggggccagtccctgggccttttggtggcatgggcaggctttagctgtggtggcgatgggctgggcatgctagtcctcaggaccccagctggtgtaagtgctggtagtggggggcccaggtgggctggtcctcaagcccccaggcagcatttatggtgctggcagtggcagtagcagcagtgggctagacactggactgtcaggtggcaatcatagctgttggcagtagctgtggcaggatgaatgggacagtttctagccccctaggtgatgcacttgggtgggcactggtggtaggtggggcaggcctgttcaggccttgggattgtgtgcgtgggcaccagtggtgttggatggggtgggccagtcgtcaggcccccctacagagcatataggcaccagtagtggcatgagggaaagatagcgctggagaacactggtgacagtgggtggagcaggcctgtctttaggttcttggatggcacatatggacatactggtcctcaggccccctgaaggtgcacacaggcatgctgttgccctgctgagaggggcaaggttctgttggtggcattggtgttgggaagatggctcccaggttctgggagcttcagctccctttttcctggggtagcctccctggtgtgctatactgcctgttccctgggatataagacacttcatgggtcagagtactggggacctggctgcactgctgggtgattgtgatactgcaaccttctggatggatgtgggaggatgttcttgggggtccagggatgtggactgcaggggcttattggaccccaagtgggcaggatataatctggtgggggctagcctcttaaaatggtgctgtgccacagcagcatgtttcttgggatgtgagtaggatccagtggaattccctttctggaagaacgcatttgcatggattccaggcagctccgtatactggactcagggcctgtgaaggctgacggcatcccctgtgggtgccagcatctgtgctgcgaatgtggaccactgcagttctttgacttttcttttcccagaaatgggattcccctcctgcttctgagccagtccaagacatgctggctgctttatttactgctccctttgtgcctcagaagttccctgttgaatagtgttctgtctttggtgctctacctgacatgtggttaactacttgcttttttggtcctttgttgtgcaggagttgagtgccaggctcacggttttttgattaccatagttttgtagtttttgaaattcagaagtgtgagacctccaactttttctttttcaagattattttggctgttgagtcaattatgattccatatgcattttagatggatttttctatttctggaattgtgccattaggagtctgatagatactgcattgaatctgtagagtgctttgggtagtattgacatcttcccactattaagtcttccagtacatgaacacatgcattttcctgatgactaatgatgttgtaccttttcatatgcttattggctatttgtagatcttcctgggagaaatgtctatgcagactttttgccaattttttaatttgtccatttaaaaatcagggttttttttgttgttgagttgtaggagttctttttgtattccttatactagtcccttatcagatatatgctttgcagatattttctcccaggtgggttgtcttcacttccttggtagtgtcttttaatacacaaagttttaaatttttatgaagtcaaatgtatctacatttttctttggttgctcatgcttttggtgttgcatctaagaatccactgccaaatccaaggtcatgaagatttactcctatgttttcttctaagaattttatagtttttgctattacataaggtctttgagccattaagatctttgacttaacttttgtatatgatgtaaagtcactgtcaaacatcattcttttgcatttggctgtcactgggttactgaggactgggtagcttagttgagtagataatcttttgttgtttcctccttgtaatatacaagccttggcttctgtgacatcatactctcctagatttccccctgtcactgtggcttcttctcagtctctgtccatccctggtgctcctgaaggttctgttctcagccttacacacattacctgggtgatctcattctctgccatgacttcacttgccatatatgtgctgattttccccaaattcctatttctcccgacctttacatctattttatttgcaggtcatatatctaataaggaattgatatccagtgtacatgtagaactcctgtaattcaatacagaaaccaaacagtccaattaataaatggagaagagatttgaatgaacatttttctaaagaacatctcaagctcaagatttcccagataacttttctttcttcaaaatctgcttctgtgtttcctcatctgtaggtggcacagcatacatctgatttcccaagccagaaacctcatagttattcttgactccaggaagaaatattattgagtttttaaaaactcagcttattgactcattgttttatataataaaatgcaacagttttaagtgtatatttcaatgagttttaatacatttatgtacttgtgtcactatcctcatagatagagacaaaacatttctatcacaccggcaatttcctatgtgtcccatcccaatcaatcctttcccctttgctggctccaaacaatgactctttcctatctttttagaaagattagaattgcttttctagagttccagtaatggaatcatacagtgtctaagtctgtttgtggtgctgtaacaaaatacctgagactgggtaatttataaattataggaatttatttctcacagttctggatgctgaaaagtttatgatcaaggcactagcaggtttggtgtctgagggcccagtttctaatttgaagatggtgctttaaacactgtcctcacatggtagaaggggcagatgggcaaacaaaaaaaaaaaaaaaaagg

SEQ ID NO: 378 - DNA, 2113 bp, Homo sapiens
ggggaggactctctctgctgccacttcaccttcctgagagaggaccagcggccagagcctcagtgactgccaccctggaggacagggcacaacaaccgtttctggtaaggagaactgggtttatgctcacagagactttgggaattgaaaggatcacagtttggtcacagctgttcatttctgacatgaccttgcacagatcccctcacttctgggttcgctggtcagtaaaacggggcaatggtgatgagtgttgcgggcatcagcaggtgcacagctggtggagcacagcctgaagaatctgtgcctgcactcacagcccagtcccaggacagcgggctttgctgccccattgcccattacttagccaagtcgatctccatgaaactctcagggagtaaggctgaactgatcctctcatcagtgggacagatgggagaactgaagctcccagagggtgataggctttcccccatctcccctagcatgccggggcattcttctcaattttaccctcctaatttctcctgtcccagaccagccagacacgtaccatgtctcagacaagcctgggagctgaggatggattcttagggctccccagggcaaatgtgggatattttcccaccccaggagcctcatgttccgaacaagacccctgagtggaccttgtcttgtgactttcaacttctgaaaactaccccatgctcccccagatgccccacatttttcctatgacaccctgccggacgcacaccaaaccgcaaaacacatgattccaatacctggaaatacatgggctggggcagatgggtgaaggagatacttatgaacaaggaagacaagaagtggtttgatcttttctaaaatagtatggaagaggctgctttcttgtaatttgctaaaataagctcttctcatggtaaaatcaggttcatgcaattttcaaatcggaatgtgcattttgttcatttgcttcacccttttccctgagccagaccctcccaccagcttgccagaggctgctactgtcttgcttgcacactgccttccaatctctcatgaactttggtctcttttgtgggacgattagtaaaatttttcctttggagaagacgcctgtcttcattctcaattcctccacttttgtctgccctgtagaccaacacgtatcacattccttcaagcctacggtgtgtccaccacgctctattcagttcttttataatcttctccatgactcattttagcattgccatcagtatcctttctgactcacctgtgaacactttgttatttgtgaatatctgccaaaaaatgtattcctcaatgcagcctgatccactcagaaagcttggattgggagagctattgttgctggtcattggctaacataacatagtttgactggcttttgtgacaggcaattggctgttttaaaagaaaagacctcaattcagagaaactcctgccaccagcaattttatttttgaataaccttttataagaaatgcactcaagattttgcaataaaattctgtgtgttggttttagggtaggcttctagctgtccaattaatttgtctcctgaccagggagtggcagcattgtacacatgttccaagaggtttgttgacttttttggaaaagtctctttttccacctgtggaatcaaggacaatacacagcaaaaggagccatttcctgatgctagctccattgtaaatatgtgacctttggcaggtcatttaatgctcagtttccttgcattttaatagaaattttaagatcagttttgatcacatcacagggaatttgagagagcaattaaaataagaaggatgaaataactttgaaaattataaatgtattcacagaggcttattacaattatgatgttcataatcaatatcattaccactgtcatcttgacccttaccacatcattatgttgattccaaacctcagaaaacgtcatctaaagtagagaggatgtcagggaactggtgctattttagcaaaagccagaagcataatttaccagagacgagaacagggtgtgggagagaggaaaatgttcttctctgggcttaagaaaaaaaaaaaaaaaaaa

SEQ ID NO: 379 - DNA, 1526 bp, Homo sapiens
tgttaggacagtggtttaaaatatataagagaatcagtattttcttttcttttttttttttttttaagtatatattgatcattcttgggtgtttctcgcagagggggatttggcagggtcacaggacaatagtggagggaaggtcagcaaataaacaagtgaacagaggtctctggttttcctaggcagaggaccctgtggccttccgcagtgtttgtgtccctgggtacttgagattagggagtggtgatgactcttaatgagcatgctgccttcaagcatctgtttaacaaagcacatcttgcaccacccttaatccatttaaccctgagtggacacagtacatgtttcagagagcacggggttgggggtaaggttatagattaacagcatcccaaggcagaagaatttttcttagtacagaacaaagtggagtctcctgtgtctacttctttctacacagacacagcaacaatctgatttctctatcttttccccacatttcccccttttctattcgacaaaaccgccatcgtcatcatgacccgttctcagtgagctgttgggtacacctcccagacggggcggctgccgggcggaggggctcctcacttctcagactgggcagctgccgggcggaggggctcctcacttctcagacggggcggccgggcagagacgctcctcacctcccagacggggtcgcggccgggcagaggcgctcctcacatcccagatggggcggcggggcagaggcgctccccacatctcagacgatgggcggctgggcagagacgctcctcacttcctagacgggatggcggccgggaagaggcgctcctcacttcccagactgggcagctgggcagaggggctcctcacatcccagacgatgggcggccaggcagagacgctcctcacttcccagaaggggtggcggccgggcagaggctgcaatctcggcactttgggaggccaaggcaggcggctgggaggtggaggttgtagcgagccgagatcacgccactgcactccagcctgggcaacattgagcattgagtgaacgagactccctctgcaatcccggcacctcgggaggccgaggctggcagatcactcgcggttaggagctggagaccagcccggccaacacagcgaaaccccgtctccaccaaaaaaatagaaaaaccagtcaggcgtggcggcgcgcgcctgcaatcccaggcacttggcaggctgaggcaggagaatcaggcagggaggttgcagtgagccgagatggcgggagtacagtccagcttcggcttggcatcagagggagactagggaaaggggagaggggagaggttagtattttcaaaaatcatcatatagtacgtggttacacaactctgaatatactaaaacacattgaattgtatactttaaaggagtgaactatatctcaatatataaggggtgagttatagctcaataaagctgttaacaacaaaacaaaaatgccataccaaaaaaaaaaaaaaaaa

SEQ ID NO: 380 - DNA, 3135 bp, Homo sapiens
ggcgagcccacagctactggctgctcaagcggctgtccaggaacggggcccccctgctgcggcggctgcagtccagcctgcagtctcagcgaagctcacagcagagagaaaatgatgaggagatgaaggctgccaaagagaagctgaagtactggcagcggctgcggcacgacctggagcgcgctcgcctgctgatcgagctgctgcgcaagcgggagaagctcaagcgtgagcaggtgaaggtggagcaggtcgccatggagctgcggctgaccccgctgacggtgctgctgcgctcagtgctggaccagctgcaagacaaggaccccgccaggatatttgcgcagcccgtgagtctgaaggaggtaccagattatttggatcacattaaacatcccatggactttgccacaatgaggaaacggttagaagctcaagggtataaaaacctccatgagtttgaggaggattttgatctcattatagataactgcatgaagtacaatgccagggacaccgtgttctatagagccgcggtgaggctgcgcgatcagggaggtgttgttctgaggcaggcccggcgcgaggtggacagcatcggcttggaagaggcctcggggatgcacctgcctgagcggcctgctgcggcaccgcggcggcctttctcctgggaagacgtggacaggttgctggaccccgccaacagagcccacctgggcctggaggagcagctgagagagctgctggacatgctcgacctcacctgcgctatgaagtccagcggctcccggagcaagcgggcaaagctgctcaaaaaggaaattgcccttctccgaaacaagctgagccagcagcacagccagcccctgcccacggggccaggcttggaaggcttcgaagaggacggagctgcgctggggccggaggcgggcgaggaaggagataaatctccccctaaacttgaaccatcagatgcattacctcttccttcaaactcggagactaattcagaaccaccaaccctcaaaccagtagaactcaacccagagcagagtaaacttttcaaaagagtcacatttgataatgaatcacatagcgcttgcactcagagcgcactggtaagcggacgccctccagagcccacccgcgccagtagtggcgatgtgccggcggcggcggcctccgcggtggcggagccagcaagcgatgtaaacagacgcacttctgttctcttctgcaaatcgaaaagtgtaagccccccaaagtctgccaagaacactgaaacccagccaacttctcctcagctagggaccaaaacctttttgtctgtagtccttccgaggttggagactcttctgcagccaaggaaaaggtcgcggagcacatgcggagactccgaggtggaggaggagtccccaggaaagcgcctggacgcaggtctcaccaacggctttgggggtgcgaggagcgagcaggagccgggcggcggcctggggaggaaggccacaccccgacgacgctgtgcctccgagtccagcatctcctccagcaacagcccgctctgcgactcgagctttaatgcgcccaaatgtgggcggggcaaaccggctcttgtgcgacggcacacgctggaggaccgcagtgagctgatctcctgcatcgagaatgggaactacgccaaggcggccaggatcgcagccgaagtcggccagagcagcatgtggatctccactgatgccgccgcctcggtgctggagcctctgaaggtggtgtgggccaagtgcagcggctacccctcctacccggcactgatcatcgaccccaagatgccccgtgtgcctggccaccacaacggcgtcaccatcccggccccacccctggacgtgctgaagattggggagcacatgcagaccaagtctgatgagaagctgttcctcgttctcttttttgataataagagaagttggcagtggcttcctaagtccaaaatggttccccttggtattgacgaaactatagacaagttaaagatgatggaagggaggaattccagcatccggaaggccgtgcggatcgcttttgaccgcgccatgaaccacctgagccgcgtccacggggagccgaccagcgacctcagtgacattgactgacggcccggccgccagcgcgggtcttgtccatagtgttgataagctgtacatgtttgtatattgttcaaaacttaacttattctgatttttagttatagctctttaattctttttccccggggaggggggaggttttatttccaagttttctaggaacccatctccgtctgggcgctgtgagtggggtgggcacgtccgggcagcccagtgcgtctgtcgcacgtccccaggccgtgctgctggcgtcactttctttgatatgtagctttttcttaaagacttttgaatgtttaataattttgtaaatcatgctctttacacagagtaccacttatttaataagacgggatgtaaatttacaatgacaaatgtgtattttaagaaagaaaatgacattattttgaatggtactttgtggaaagaggggagaataaagttatgctgtgtacatcacttgcagatcaccaaaaacactccgctgcccgtgaccgccggtgggtgtgtccccgctcccgtcgtcccgcccacctcaaaccccgcaggtgtgcctcccagcggattatttattgtagaaagtgtattcatttgctttataatgaaaaatacatttgcaaaggtatattgatatgcatttttatacaggcacataaaaattcaacttggcttgggagcagaatgcattgcattgtataaatgactctggcctgtgtgtactttgattttataacttgtaatcttttgtttacaatgaggggctttctgtaacttcttttaatttagaacactttggtagcaatagaaactttggatacatttttgtatggtacctgtgatgtatatagaattagtactttatttttatttttaagaggtaaagcattatgttggggaaagtagggtgggtttccaaatttgcattttttatattaaaaataaagtcaagatttaaaaaaaaaaaaaaaaaaaaaaaaaaaaaaaaaaaaaa

SEQ ID NO: 381 - DNA, 4091 bp, Homo sapiens
ttttttttttttttttttttttaaatagactatttttctagaacagttttaggttcacagcaaaattgagagtaagatatagagatttcccatatatcccctatccccatacatgcatagcctcctccactatcaacatctcccacgagggtgggaaatttttacaactgatgaacctacattgacaaattatcttaacataaagtccacagtttacattagggttcatgcttagtgttgtacattctatgggtttggacaaacgtatgatgacatgataacatgtatcaacccttacagtatcacacagtgaattttcactgcaaaaatcccttatgctatgcctgtttatctctccctccaccaccaacccctggcaaccactgatctctttattgtctccatagttttaccttttttcatacagtatgtagccttttcagattggtttctttcaattaataatatgcatttaaggttctttcatggcttgatagctcattttgtttttggcatttgtttggatttgccagtttatccattcacccactgaacgacaccttacttgctttaaagttttgacagttgtgcataaagctgctgtaacattcatgtactgtaatgttttaatctttaataatattaattaaatttaacagataaaacttatttcagacctgcccttgttccaggtctgattgaagccagcttgctgaggcaccttcagtaggtcatagctcaactgctgctgtggacttcagggggactcaaaagcattaatcaaaatcttccctctctagagtattttacactttaaaaaaatttataccctatttgtcccccaaaacagataattgacttaagcaattaaaaaaaagaaaaccaaaaacttcccctttcaactgttcttcagctctctgggattgctcagacctaagctgcctttccattgcatcctgtggtcttttactgatttcattggaaggcaggccttttcctaatggtttactttgacacagcaagcttcctcctaagataaattcctctttttctggttgtatttaaaaatgaagtgtattaaattcttcattctgatagttttcctgagggtatgggactaatattttacgtggtggcatataaataaaacctttttacttttttattggagacaagagtcttgctctgttgcccaggctggagtgcaatggcgtgatcttggctcgctgcagcctctgtctcctgggttcaagaaatccttgtgcctcagcctgccaagcagctgggattatcggtatgcaccaccacacccagctaagttttgtatttttagtagagacagggttttaccatgttggtcaggctggtcttgaactcctggtctcaagtgatctgcctgtttcagcctcccaaaatgctgggattataggcatgagccactacacccgatctttcccaggcatttctcttttgttcatttttggtggttgtatgctagagatttagagggaagaatggtgagatagtgtagaaaattatacttgtgtctaaattaatttgtgcattacattacatatgcatttaacacagaaaataatgtaggaagatgagacagtccaaggaagaaagctaaaaaaaaagttacatctctttatgtaggtaataaacaactatgactattttattcttctagcttttctcctacacatatgctcatgtcaccaccaccaccaattatgacaaatcggaatcattccatattattttatattattgctggctgctaagaacaattaacacactaacattttagttaaatttgcatgtgatatttgaagatcatatatttgataaataacttgtatccagaatacatgtagaactcttataataaaagacttaatagcatcttacaataactcaacaataaagagacaactcagttgaaaagataggcaaaggattttgcagagaagatctacaaaaggccaataagcacaggaaaagaagaataacattactagccgtcaaggacatgcaagtcacaccaacaatgagataaccatttcacatgttctaggatggctatcaaaaagacagacaaggatgtggagaaatcggagccctcatacttgctggtgagaatgtaaaatggtacagctgctgtaagaaaacagcctggcagttccccaaaatattcaacatatagttaccatatgactcagcaaatatactcctaggtatatatacccatgagacatgaaaacacacttctaacacagaaacttgtacacagattatcattcataatgtctagaaagtagaatcaactcaaatgtctatcagctaatgaatggattaacaaatatgcctatacattagaatgttaattattcagcagtaaaaagcaatgaagtacagatacgtgctacaacataggtgaaccttgacgacatgctcagagaaagaagccagtcacaaagtactgcacattgtatgatttcatttatgtgaaatgcccagaataggcaaatccatagggacaggaagtagactaacggttgggggatgggaaggttaggggagtagaactcctaatggctgctacgtttctttgaggagtgatgaaaatcacttttgattgtgctgatggttgcacaactccttggatatactaaaaccattgacctacacacttaaatgggtgaattgtatggtatttaaattctatcttaataaagctctttaacaataatatatatttacaaataaaggctgagaatccctaaatctacattttccggttccagtttttaaaacttcaaacaaaatgttaatgtcagcagcactggattggctgtccagaggttctagccctaggacttttcattagccagttgtgtccctggaagcaagacactcatttgtgaaatgagaataatgtatataatttaatcccataatttttaaggtccttttcctgaattttaatatagggcaaaataatgtaacttttttttttttttgagatggagtctcactttgtcgcccaggctggaatacagtggcacaatcttggctcactgcaacctctacattccaggttcaagctagtctcctgcctcagcctcctgagtagctgggattacaggcacacgccaccacgtccagctaattttttgtatttttagtagagacggggtgtcgccatgttggtcaggctggtctcgaactgctgacctgatgatccgcctgccttggcctcccaaagtgctgggattacaggcgtgagccactgcacctagccccaaaataacgtaacttttaaaaaacttgatatttaagtcttaaaagttgtagacatttcggagatactgttacggtcagaggcttagaaatcattgccaggttactttggctgcttattagaatcaccatgggagcttttaaaacatacctgtgcccgggtcataccgccagagagcctgatttaactggtctccagtggtcttccagcatctcactgctctccttcccttgctctccttatcccttgtcttttgcttacatcatgattttaatgtgcaggcaaagttgagagccactggctttgctaatgagcaatgctgtattggcagcatcaaaagtcagtcattttgtttcactttttattacttgataccatatttatcaacttgtgggttggggatggagagggtatataaaacaacaggtagacatataatagaaaatgtctataaaacatttcacaatttaagttgtgcctgcttataacgatttcttacatcagttttagatataaattactggttatataggttcagctttcagcatgtcttaatttgccactggttttatgaattttcctagacttatcattgtaatagaacataatatttcttattattttataatatctatattactaaagtgttatcatttcatttccataggtcataggttttggatctgttaaaattgcagcattcatagctatggtaggaattctgtctattgtggctcaggtgagtatcattttatctatacttaaaaaaaaaaaaaaaaaaaaa

SEQ ID NO: 382 - DNA, 1968 bp, Homo sapiens
agtctgggttggactggcggccgtggagtttgtgacatacgaggtgacacccctcgagtcacttcccttcaactccagctggagcgcctgcttggctttgggttcgttctgcagccttcgccccgctcctagcctcagggccggactccggcgcagagcccagcccagcgcagcctgccagcagccacccagccgcccagccgcccagccccgcacgaaacccggccagagcttcctagcagcccgagccatgaacaccgaatgtatcagacccccatggaggtggcggtctaccagctgcacaatttctccatctccttcttctcttctctgcttggaggggatgtggtttccgttaagctggacaacagtgcctccggagccagcgtggtggccatagacaacaagatcgaacaggccatggatctggtgaagaatcatctgatgtatgctgtgagagaggaggtggagatcctgaaggagcagatccgagagctggtggagaagaactcccagctagagcgtgagaacaccctgttgaagaccctggcaagcccagagcagctggagaagttccagtcctgtctgagccctgaagagccagctcccgaatccccacaagtgcccgaggcccctggtggttctgcggtgtaagtggctctgtcctcagggtgggcagagccactaaacttgttttacctagttctttccagtttgtttttggctccccaagcatcatctcacgaggagaactttacacctagcacagctggtgccaagagatgtcctaaggacatggcacctgggtccactccagcgacagacccctgacaagagcaggtctctggaggctgagttgcatggggcctagtaacaccaagccagtgagcctctaatgctactgcgccctgggggctcccagggcctgggcaacttagctgcaactggcaaaggagaagggtagtttgaggtgtgacaccagtttgctccagaaagtttaaggggtctgtttctcatctccatggacatcttcaacagcttcacctgacaacgactgttcctatgaagaagccacttgtgttttaagcagaggcaacctctctcttctcctctgtttcgtgaaggcaggggacacagatgggagagattgagccaagtcagccttctgttggttaatatggtataatgcatggctttgtgcacagcccagtgtgggattacagctttgggatgaccgcttacaaagttctgtttggttagtattggcatagtttttctatatagccataaatgcgtatatatacccatagggctagatctgtatcttagtgtagcgatgtatacatatacacatccacctacatgttgaagggcctaaccagccttgggagtattgactggtcccttacctcttatggctaagtctttgactgtgttcatttaccaagttgacccagtttgtcttttaggttaagtaagactcgagagtaaaggcaaggaggggggccagcctctgaatgcggccacggatgccttgctgctgcaaccctttccccagctgtccactgaaacgtgaagtcctgttttgaatgccaaacccaccattcactggtgctgactacatagaatggggttgagagaagatcagtttgggcttcacagtgtcatttgaaaacgttttttgttttgttttgtaattattgtggaaaactttcaagtgaacagaaggatggtgtcctactgtggatgagggatgaacaaggggatggctttgatccaatggagcctgggaggtgtgcccagaaagcttgtctgtagcgggttttgtgagagtgaacactttccactttttgacaccttatcctgatgtatggttccaggatttggattttgattttccaaatgtagcttgaaatttcaataaactttgctctgtttttctaaaaataaaaaaaaaaaaaaaaaaaa

SEQ ID NO: 383 - DNA, 1636 bp, Homo sapiens
gggcgggttaccgggaaggggcgcgagtgcgtgctgtttagccctgtagggagacatgatttccagaagtctttaggaacccagaggccgccgcaagagtcacggaatccgatttcaacctgataatttctaagggactggccacgttcttttattatatggctattgcctcgtaccatatatggcttgaaatcggtagatcattagctagaatttgagaatcctacgacatacggaggttctacagaactaagaatgtaactgtccttaacagggactctccttcagtaaggcgttccactttgtccaaggaaaaggactggcgttacagtagacacctcatagcgcaggagtagaggggagggtgcttcagcattaatattctgcgattttaaaggacttccggaaatgaggggggcgtctcaataatggatttgggcaagtcgtttctttgtgtgtttttctattcctcaagcttaagcaaaaccttaggctcaccgtaaaatcatcctttccacctcttttcagtagcagtgccttcaggtttcatttcctccttcctctgcatatcgatccacaatgcaaattgcaggccctcatcctcacaccaagattcctacacccagctaaagctgtcccagacttcatatccttaactcgagttcacctttttaatcctagaattcaaaggacttatgaactgtgaccatatcttacctagtcagtctcttacacatttttttcaaactgtgcctctgctttttcccccagacccaccgctctgtgcccttatcatgtttttcccttctatttgctaatcccaaaagagtaatttcaagtctcttatccattagctgactaacctgcccataaaaaacgctgttctacttaaattccccggccattcaatgttgtataaccttatgtacaggatgagataatgtttgcaaaagtccattttaaagaaccctcaaagacaggcgccatagatggccacttgcagtgatgttttgttcttccctagctcctgcagatacctaaagatagtccataatctttttgggtctcacttctgcaaattggagttcatacttgcgctatcttttgttgaagaaccctcaagatagttgcaaaaagtattttgaaaagtataaagtgatgggtttaatgtaaatgttttattcaatactactatcctctagactaatttggttgtagttcacattacagtagctgcttcgtaagtgatttttgggctgggcggggtggcttatgcctgtaatcccagcacttcgggaggccatggtgggtggatcaagagaccgagaccatcctggccagcatggtgaaaaccctgtttctactaaaaatagccgggcgaggttgcattgagccaagatcgcgccactgcactccagcctggcgacagagcgagactccatcttaaaaaaaaaaaaagttatttttgttttgggggcagtggtggcatgcacttgtaatcccagctactagggaagctgaggcaggagaatcgtttgaagccgggaggcagaggttgcagtgagcggagatcacgccattgcgctccagcctgggccacaggagcgaaactccatctcaaaaaaaaaaaaaaaaa

SEQ ID NO: 384 - DNA, 1169 bp, Homo sapiens
acgcgtccgctgggaatacatctgtggacaagacatgcttgggtcctactcctggagcactgtaaaaagagctgattcaagtaagtagatgcctgttttgagaccagaaggtttcataattggttctacgacccttttgagcctagaattattgttcttatataagatcactgaagaaagaggaacccccacaaccccctccacaaagagaccaggggcgggtgatgagacctggggtttagaaccccaggtgagacctcaaatcactgcattcattctgagcccccttcctgtccccaggggaggtgtattgtgtatgtagccttagagcatctctgcctccaacccagcagttctctgccaaagcttgtggaggagggagagccctgtccctgccctcaggctccccagtgctcctggcccttctatttatttgactgattattgcttctttccttgcattaaaggagatcttcccctaacctttgggccaatttactggccactaatttcgtttaaataccattgtgtcattggggggaccgtctttacccctgctgacctcccacctatccgccctgcagcagaaccttggcggtttataggtaatgatggaacttagactcctcttcccagagtcacaagtagcctctgggatctgccaacacacgtccactcccaagccactagcccactccccagttggcccttctgcccttaccccacacacagtccaactcttccacctctggggaagatggagcaggtctttgggaagctcccacacccacctctgccactcttaacactaagtgagagttggggagaaactgaagccgtgtttttggccccccgaggctaaccctgatccatagtgctacctgcacctctggattctggattcacagaccaagtccaagcccgttcttacgtcgccataaaggcccccgaacggcattctcggtacttctgtttgtttttgtacattttattagaaaggactgtaaaatagccacttagacactttacctcttcagtatgcaaatgtaaataaattgtaatataggaaatcttttgttttaatataagaatgagcctgtccaatttctgctgtacattattaaaagttttattcacagaaaaaaaaaaaaaaaaaaaaaaaaaaaaaa

SEQ ID NO: 385 - DNA, 124114 bp, Homo sapiens
gatctacccaactcagcctcccaaatgctgggattacgagtgtgagccaccatgcctggccgtaaccaattattttaattaatataaataatcagagtataacaaaatacaccaaaactggttatattatctttataaaatatgttttataaatcactaacaaataactaatctggttggtgataaatatgtctgcttttacttattcctctccattttagtattgtaattttttagcattctatactagatcccatgtacagttgaagttttcttttgtttgttttccctgtcaggcttttaattaaagaataataagatcttatattattatagatcttatatcgcttatataactaaagagtacattcaaccaaactttaactgaactttacttgtttcatactggtggaaataagcacaatgtgaataacacctgagactgtcactggtggagagcgctcatgagcccagccctccttgggcttccttactggcctcccagccccacccttggcctgtgccatccttaatgtgaaatcccattacaccttacctaatctctcaaatggcacctatcagatcttctcttttattcttgagtattcagttcctcccttttttttttgatctttctaactgacatgtttacagccatttaagacacacagcacatgtacacatgtaacttccctcaaatccatgtgcttcttccattactctgtctcttttcttctttgcatagcaaaactgatctgtaccaattagtgaccgacatccttaatctagcagacaggttttagtctagttttctattgtccagatgatgttgcataatcaacaatgtcaaacttcaggggcaaacaattctgaagttaaataaagcactgcctagttcttgtacctgtgagttcgctccacccttgggctctgccctgctgtctctatttcttctggaactcaatggctagacaggcgtgtccttctcatgggaagagcagaagcacaagagggcaagtggaaatgctcagatcctacatgccatcaatttttcctttttcttttggctaaaacaagtcacttgaacaaaagaaactatactccactgatttttgtgggtgaaactgcaaagtcacacagtaaagaatgtggatatatgaagaggggaagaactggggccaagaacatcatctaccataataatcttacctacctttggagtagcaatgagtactataggcttttgccttctttaggaaataccctcttcctgtggcttccataatgaaacattgtcttgatttcctcccatccctctggctgcctttgtttagtttcctttgctggtccagctttctcaagacctggtaccaccatctcctcatctttttttttttttttttttaatatggcctctctacttagtgttatccatgattctggaactcattgccacccaaataaagctgaagcagagatgcttaaattgttcccttagtttcaaaaccatatatttaattacctattttatatttcttccaagatgtttcaaagacacctcagactcaacttaagcctaaatttaaatttaaaacatttataattattccctcttgtacccccagacttcttcagtgctccctagctcagtgaatcctactacatccattgagttatagaagccaaaaaaaaataagactcatcctcaacacttcttttctcattaagctctattgattttattgcctaaatagtcctggaatgtatctgcttctttctgtcactgtggtttctccctagtctaatccaccattctctctcacctgtagcattgtattatcttctgaacctcatctccttttgcccccatctgatctgttctctgcattggagccagaaaaatcttattgaaaagcacatctaataatgtctccttccttttaaaatacttcgaggactttccattgaatggatagaggtaaaatgcctgacagacctatatgcatttttgtccctgtctcatgccatgcttaaccgtattactttgcagttccgcaaaaaacatatcatgagacacagattttgtagggcatttatttggaatatgaggccaggaagtaggagtgagggaataaggagaatgaggaaaaaacaaaataacacaagcaaaagccattgtaagagtgtatgattgagtttgcctctctagggaacggtggtctgatttcatagcacatctagaaagtctgcagattaggacccataattatatgcctgaagaataagcacctagttgcatatatccactggctccccattgtttgagggttgcactcacttgtgtttagctcccctgcatttcagagccagacacgtgcacatcctccctgtctttgcctagttaactcctatttatttttctgaacccacctcattcctgtgacagaaaacccctgcctctaaatgaagcaggttcttccagttttctcaagaccacatgcctctactatacaccatatatatcttctttgcagtgctgattgctgtgatgagtttgcattttttaatgattatttcatgaaaatctttctgccctctggactgcaagcttgagaagaccaagtttcatgtcagcttttgattttcattgccttaccagcacccaacctaggacctggtacataaaatatgttcaatatattttcaacaaatgtgtaagtataggtgtgtgtgtattaatatgtgtgcatgcatgtatatttataaagggaaactttgaatttttagagcttaaatagattactatcaatatctaaaaaggttatcatttttaattcaaatttcatattctatttttacttattgctttcttttagtgcttacatagtcgaattataccagaggcatctgtttaaaaaaagtcatacggagaaaaaacagagaactcttgctttacattatcatgatttatctgacagcttatagtattggtggcacttttctgtagaaagttatcgctaggcagttgctttaataaaacagagatttttgagttaaaatgggtaatatcagaccataaaagacaatcctttacaatcctgccttattcagtagaagtcacattcgttagtgttgagcaatttgaggacttaggtacttacaaatatatatatatatccatcccctaaaacaccatgtccaaatttttgtttcatgaactgggaactgtgacttgataacaggaaatatgtggcaaaaatagatgagtgttcagtctctggggttttatgctgatataaaataataacaaccaaaatgggaatggagaggcagatggaaatcaacaaattatttttaatgaagtaaaatacttccataaaagtaagctaccagttggaagttatcactatttaataaatgttttttatatttctagttaccatgttgtatgccagatgatccagcattaattcaacaaataatatggtacccttggcaaatagaatggtcatcatggagatggacatagtctccaccttcaccgggatggttgttattgctttatttaaaaatgcagttattttctctgaaaacatctatacagatctatcatgtcctgagctttttctaatttcttggaagggaagccaaagtagcatgcatctaattcagtctcagacctcagcttccaagagatgttattaactgtggtgaaaggattagtaaaatagtaaatggattatgagatagttgtatctgtgtcaattagtggttgctgtcaattactagttgcttatattcactttctctcatttagggagtgtggagagtagaatattaaatgtctggtgggcacagagtctcttttcatctggtagttgtcttagttatacacggggctataaactgaaaatggtgtgtaaccctttaattgaagactctggggtcctaaaataatttcctcaagaacactctggcccatagaataaacattttgaaaaatattttctttggtttattgcatatttgaaatcagataatatctgtcactccaggatctataaactcttgcatgtgggatatttttaggtaaagtgatttttttttttttttgaggaataccaaggggatagtggatttccatgaacttaaggatcacagtttttgttaagccgaatacccaacttgaacaaattttctatttttttgttgttgcttattgacagatgtgccatgaaggtgtttttaaggtctcatgaccctaaaaatggcttacgataagcaaaagtaatgtcagctttgtcctgaggggatcttgattcacttatcagctgaaaacagctgagcaatcaaagcacaggttcttccttggtggaagtgacaactctagttcagaatcttccaatctgaatctaagatcatccttagaaattagggtgggtggagaaaccagagtgatgtgtgctggagccaatactccatcagagtgggagagtccactctttcctgttgctttccccactcaggccttgggctattttagatgaggtcaccttagccatgttctcaccactccagctttgggccatctctgatgagttcacctcagccatgttctcatcattcctcctctggggcatttcggatgaggttaccatggtgggcacatttcttgcctcatgtactttagaatgccatgtatgcttttaaaatcagagacaagtgcctaacaacttcttatttatatgtttttaggttagatgtaaaatgacctgagaactgcagccctcatgagcattggctacgtgaatttttgattaataaagtctagtaaattcattgactatatagccttatctaccaagaaaagataacttaatttttgaaaggattacttagcttgctttggagagggtcaaaatttagtagaaggtgtgtcaaatgaacattattgctgaagtaagtctgaaaaattcaaaactgttgatggtgagaactgaagtgtttattatattaccctgggtacttttctatgtctattttcctttggaggaaaacatagttctaagaatctaggaggcctgtggatgtatgaaattaagaggaaataaatattctatcaataggaagaacttcaagaaaacccaaattgtccatattctgaacataacatttgttatatgtgttatactcaatttagttgcttttgtttatctgagatttctgtagctttcaaaactgatctcttaagatttactagtaatgtgagttattaaggggggcaaaatttcattaattcattctgttttctaaatactttcccttatccttgcctctctcatgcagtctttcattgtttctctcccatttattttacaagaaaataaaaaatcttactgagacttttaggccttacatgatttggcatctccagtgaccagaaacatctcctgtctcaccattgcttactaaactccgtggcttccatcaattcctaaattatgtcaagcttttttttcatatctgaatcttgctttctgttccctctttctaggttactttttatgtatgttactccttcttctggtctgagcttaatcatgtcccctcctcagaatagtattgtctgaccacttttctaaattcaacatttcatcttatttttctcacagcatctgtttattgtcttcattgcatttgacataatttatgatttgtaaaaatgtgttggcttttctccttaggtagtgagcttcatgacagtaggaaccttatgtatcctgattattaattatatccctggtactaatagttagtttgacatatgggaggttatcacaaaaattataatgtatgaatttcaactgtaaattggaagcttgtcaagccccttcatggttagtgactgacctgttttcctcaatcttgatctaatgaggctttagactactgctcctagctttatgaaaatatttctaacaaataccatgagaacaaaaaaagacaatgtttaaattctgaatcttgacaatgttatactcttttataagtgatatgctttggctctgtgtccccactcagatatcaccttaaattgtaataatcccacgtgtcaacggtgggaccaggtggagataatgtttcccccatactgttctcgtgatagtgagtgagttctcgtgggatctgacggtcttataaggggcttccccttggctcttttctcattcttctctctcctgccaccatgtgaagaatgacatgtttgcttccctttccaccatgactgtaagtttcctgaggcctccccagccatgcagaagtcaattaaacttctttccattataaattacccaatctcagatatttcttcatagccgcatgagaatggactaatataatgtttattgcaaaagatgacatttttgaattaaatatctgaaagaaaataaaggtgtcttgtagagttttgtttccttcatttgttatcctaacataatagaaataaagaagtaatacaaagttttaggaaaacatagcaaatgaataatacagttatgactttaaaaggaaatcactttcagtaacagtaaattaaaatcttaattattatatttcacttctctatagcaaattgaaaaacaaaacaagcactgtgaaacaaattagaaattcagtcgtaatactctcaaatgtactaaggaatttagaagagtaaatttcatttagtttcaaaagattaaaaagtacaactttggacaataacgttatttttcttaggtaggcattaaagaaaatagatcccatatgtctctttttaaaagactgtatctaggccctggccccggaccctacagccatcaagatgttgatgcctaagaagaaccagattgccatttatgactcctttttaaggagggagtcatggtggccaaggacatccacatgcctaagcacctggagctgtcagacaagaatgtgtccaaccttcctgtcataaaggccatgcagtctctcaagtcccgaggctacgtgaaggcacagtttgcctggagacatttctactggtaccttcccaatgagggtatccagtatctccgtgattaccttcatctgcccccggagattgtgcctgccactctatgccgtagccgtccagggactggcaggcctcggcctaaaggtctgaagggtgagtgacctgcaagactcacaagagggaaagccgacagagatacctacagacggagtgctgtgccccctggtgccgacaagaaagccgaggctgggactgggtcagcaactgaattccagtttagaggcgaatttggtcatggacatggtcggccacctcaataaatttggagagggttattttgcattgtataaacatccagccaaaaaagcttaaaaaaaaaaaagaaaaaatctaaaccctcactgatttcagatttattaaaaaaataaacacaggtaatttccattttctagtgtctcctttgctgcgtatttcttttgtttaaccagaagatcacttgtgccactagatttatagaatattaagtgttactcacttcagtatttgtaatgtcattatccattttaggataatttcaacatttgtttattctggaaagcagaagtaatctgcattcagatacaatggcaattccatgcccagaatgcttccctgagcttcacggcttattaaagcatgcagtcctgtatttccacagccatactaagtagctggattcaggcctgtgaatttggtaatgctcagtacatttcaaaacgtggactgggattgaatatttaggtaagattgacttaaagataattagttcatatattataacagatgctttaaaggagtttgtgactgagcaaatccactgggggacccatgcactgtacagcattttaatagcttcccatggagctggtttttatccagctaggctttagtgtgctgccatctccttgtgtggagaggatttgagtctcactgtggatcctatcattggaattactctaagaatatcatagaaaatactgaggatctctttaggatttcagtatcagagatacttgttctcatccttagataagtactattaaagtagtttttattaggtaaacactgcaaatcttgaaattgatcatttttttctctctttaggttggcttctataactctaagaaccaaatatgggggcccacttataattgcagtatttcatggcatgtatctctgtatgaatccacctatgctctccatcttactctcctttttctatctcctttttcaagttcatattcaattcattgtaccttgcttaattatatgctttctgttaagctgacttgcgtgcctttttgaaatgaggtagattattaattcattaattactgtatagattgcttttctggctcattgtaattttcaagtcattagcacaacaggagaatttataaggtatttttgatatgccattagacgtatcaaaactagacattgggaaggtcttacactcttcatatgcttatgtaccttatatttgagttaattttcttaaataatttctactacataggaagctgctgaaaaattttaaagagtatttgatagcataactaatctagtacaaaaattaattaataatcttggaaaagacatcattaatgtttaggtagatattccatgccatcatttgcataacaatatcacattatgctttatcttcatattcaaagagttttcaacatacaaagagattctattataaaggtgtatttataagttagtcatttagaatgcagagttcattttcatgaacaatcaagtttctaaatgacagctaggttagcccataaaacctgttttgcccatagtatataagaaataattttaatttacagtgacaaattacagaaaatattattttacatcttaaaatagaaataaaagcacaaaaattaccttattttaattttgaaggctaagacaaaaatggtataattaggaaatcaggacgtagatacgcaggttcttgtagatgctggagagaaattctgggtatctttaaagggaggaggatttattgtactgtgtgatttcactccactgtatattagttgtcccttctttttataaatatatcattaatggtaggtgcttttctgattatcaaggaggattaagttccctttcaacttaaaaattaaatgagtaacagaggagaggagcagcaaaagacagagtaagtgaattggtattcctgagataaacagatgggagctggagcagaggcatctgagtaagggaagtgcttacctgggcattggacatgggagagattttctgaggtggctctaaatgagccataaactgctgaaatcatgagggtagagaggattcatgtgttgcacagaactcccaaggggaaaataacaactgcagatgaagggatatggatcacacaggtccccacgtttcctgtcgggctgggggcagggtggagtgagggcagggagggatcccgcgtagatggcaagttctttatttccaggtggtggcaagctgggtgtttgcaatcttggaagtgcttatacttataaaactttcacttactctgggggtatctgatactataagcatacagaaatgatgcagaattttattttaagtataaagttctgagcctggggccaggtacataggaaagtattaattaattttagttcttattattttctggcatttaatacaattgtcagtggaagttattaatactcactatttattattactgaacacagtcctctaaatcatgagttaagtaaatctaaaacaaaatacagagtactgtttccccatcactctgccccagctccatttaggaccttgttccctaacatgcaccatccaccaggccttttggttctttttaaccttttagtttcccttccttcacattattctgagttatctgctatccctcccagaaagtgaacatatgccctttaattactctgcctccattcaacgttttgaacctttcctcttcttccctttaccagccaacaactacaaacttaggtctccacttattattgtcacatttttactagcaatttacaacctcagctgttcaaaatcgagccctgattcgtcaacgttactgaaactgctattatggaagtgaccaaaactctcctttgtgcagaatttaatagtcttttctctgttcttgttctctttgatttttttgcagtattgcagtatcgaggctgttagccaccttcttctggagctcctcctcattgtttctctgagacctcctcatcgcacagctcagtctattgaaatcttgccctttcaggttccatcttagatgcctcctccttattggacccttcctgattctcccagctgccctcaataccattttgtctttgcctctattggaaagtctgttttcatctttgacatatagatatttgggtattgttaagatctctgctctggattctgagaatgaggttcttgggaataggaaattgccttacatttacttactgagtaaattcccaatcaacagttgctgaggactggctttctttctccatgcaacctcctgaaacattgccattgctgtacattattaatatttgagtcacgatatctatacctgaggtttaaaagctgacgaattgctcatttgattgccagcatcataccccgactggtgagtgtgctccatttttggtgaacacagaattttatacatttatttcagtgagtttactgccccttccttcaaagtagttctcacctaaacttgttttttattcccaagatccttattatgaaatagctgtttcagctcactggtatgcgagagcaagtctaatagcactgaatcctgacactggttctgtgttccagctctcactggttcctctcctggggtgctttttctctgactgcttttttaaggccaccaatctgaaatgcagtttccatttgacagagctgtagatgagcttactctgaaaacacactacttgcccttgggtctaaggtgctcatttgtagtccccgcacataaacctaggagctccttactttgcaatctgcaggtgctcagcctattgcatattggaaagaaatgttgtcaacaatgaaaacaagtcagtaaatacttaggcattttctcactagtaaattgctgcaatctgaatcatcaccatgttctcccaattcttttcccattccatactaggtagatttatgtgacatccctgaatatggcttctgctggtggctgctacctgaggtctgttctcctgccaccctctccgctcagggcctcggctggttcacatggcctcctgctggtgaggctgatcacttccttgcctgggacccttattaactctgcaaggtatccacagccttccccaagagagattggcagtcacttttatgcccgccagggtctgtgtcatgctttcagcacaaccctccacttattccgtcatgtagcatattagggattccctcctctcgaacttatctcctctcaagtgtctatacaagctaagaagacttactcaggagtggggtcatggtgtctcttcactgagtgacagattcttctttctcagctcctttgaaatagataagagctagtagtactgactcaatttataagatggcaaaaaactaagtaaataaaaccatgccaaatcaaaaacaaaaataaaacccacctaccctgatgtcttttaaagaagccttttgatcataggattggacattctctcacttacttactgagcatttatttctcaggtgtctacttagggtaaactccgcaaaagttcctggtaatgctttgcctatgtcagtgtggaacttggcctattaaatgacaggcagacaggccaggtgcagtggctcatgcctgtaatcctggcactttgggaggctgaggtgggtagattgcttgaggccaggagtttgagaccagcctgtgcaacatgacgaaactctgtctctactgaaaatgcaaaaattagccagatgtggctgtgggcatctgtagtcccagctactggggaggctgaggcacaaaaactgcttgaacccaggaggtagaggttgcggtgagctgagattgcgccactgcactccagcatgggagacagagcaagattccgtctcaaaaaacaaacaaacaaacaaacaaaaaacataaatgacagacaggtaagctaagcacagaacaatgtcagagtgcagttaccatcgagagcaggaaaataacagagaacagagaaagggggaaatgagcttcacaggatggggttaggaccaaagaaagtgatccaggaagtggatgttaaggaatgaatgaaaatgcagagaaaaggatgtaaaggagatctttgtgatatttatgcaagtcttctgtattttcaaaactccttctaaataaaaagttaccacctcaccaggccaataaagaggaagctaagagaaaggtattcacaacatacagtatgcaaaaaaacttgtcgctcatttggtgttactagaccttcagagtcacggggaaaccctggagacaaagctggtgtacatgcagttgaatctggatggatttggatttctaaaagggaaagacagaagagttctaattaatggaatggaatgatgtgattttctttttagaaaagtttctctctgtgactttgtggaaaataggtaagaggtcagggatgcatgtgaagggaccgtgatctaggtgaaaagtgatggaaatctgtatcaaggaggtggcaatatgactgacagtaaaagaagaagttcttgagatacttagaagatggaattaatagggcttagtcactgatgggatttaagagagaaggaaaaggatttaaagatttagacttatctggccagagtgattcaaattcatagaaaaagtaacctgtgagaaggagcaggttaaaaggaagaggaagggaaccacttctgttttgagcagcctgaatctgcactgcctatcggatagctgagagacggtgtctagtggcagctgtacatctaaaacccggacttgggggaaagatcacaatataacttagagatatagatttgaaagtcattaatagatttagactgtcttaccctggaatccatgaatagtcctaaggggttcacaaacctcagatatatgtatatactttccccttgggctaaggatctgcactgagtatttccagttgccttatcccacatgcatatatgtgcatgagatcacttatatcccttctctgtcctatgtctatctatgtccccaagaggctgatgtgtttgctggcattacccgactcccttgccatttcttatggtgaggcattggcaggagatgagagggaaggagaaggaaaaggttgggatattcttttcccgccttccccacattgggtcccatttctggcagaggctgtattcctccaggactatggtcctgtccagagtcccctccttcatggagccagcactcccaagcctgcagtaacacaaggccttcagtcccagcgggtcccactttttgctcttgccgtcctcttggtgatttgacatgcttttccagttgcctgaaacctgcccatacatcatgaggagtcccttcattatggtctttgtaccatctgaggtggattgtttcttgccagattccatgtgtctttttttggtgctctagtatacacttgtgggagaaaaaaactcttacaagctatggggacggctgaccacacccacagattgtggcccgtaaactacctgtgaggaccagcaagtaccttcatggatccttatttaccctaaaacagtttctaaaatcttagtgacaagaagttgttaccagacatcccaggtgaaactgcacccagtgagtattgtaccaaattcctaggactggcctcaagtactgctgagcttagaaggggaagagaatgtgagagttcagaatctatgaatgtgtccagcataaagagggctgaatgttacagtgatgccttcaatctaacctgaatgttcttcttgtatttttgatatttattttttttctccactttttgaggtggagagggggatcaggatggatggaatatttgatagacaaggaacccaggaatttctccaccctgtccagctaaaactatactgcttggcagagttcccaagacggcactgtgcaaacaatggcagtgaactggatatccaagtgctgccttaccagctgaaccggtacctagtgttccagcaaatacttcagttcaaaacttaagcagtgcctcctgccctctttaaatttgagaatacatatcaagcacctggagtgcaggttcttacattttaagaaacagtgaccccactcattagaaaatgtgattcaattagtagcttaggctctaaccagtcagattaacaactccattctctattccctccccgctttctctttctcccctacacccatccttactctctctgaggacacacaggagttggcagaaatgggtctggtatgaggagagggctgaaagctccctgtccctggactcgcctcagcttctcttctgccatattcctgccattttttttttcctactgactctcctcgctggcacacttttttcttcctgactttttgttgaaaacgaagcattagataacctgggggacaactgaccttgtatgcctatgtttacaacatgttgccacccataggtagccaagtcagtgattcatcaggagttagtagatagggtagctagtggtggtgagaatagaaccattcacctcttttctcttccagaggaatcagggggtaagatattagggttgaaagggaccctagggatcactgggtttaattttttttaacattttcaaaacgccttagaaacctgtatttaaataaaatctttaaaataaatcaacatatgaaacaggccttgttctggatgaagtaggttggaagtctgagtccacatgaaaacaccatggctccttcccattgtcactattgcgtggaggctcctgggaaccctgaatgcttcatgaagtccacctcgaaagccttcagttatgaaaaccttatgaaaacctgctgtaccacagacttaaaggacttgctcacagaagttaaatggcctagagaattggagagcctcctaaatctaggaagcagcaccttaatccacattacattgccttcctcttctctgccccttcaaatctacaacattggattcaggatcacacagctgacaccccattcacattgccctcacacttacgattcactagaaagctgtttatctcagaagacatttttatatttaaaatggtgtgtgtgtgtgtacactgaagagtgtagtcattataggtttattctcacgggtagtcggccaattctggacagggagtgctggcttacactgttagccaatgagtatctgaccatcgcccatgctatacttccctcatttagaatggcacccctaagttatttatttactctggcatggtccttctgtctgtgattgtaactgctctggcacacggttttgactattattagctgaaaaagagaatcccagtgatagtgctggaagtgctgataaagtgaacacttggtggtaaaaggcaattttatggcagcgccaggaagaaaaagagggtcaaattcacaaagcaattagagattggtggaagtcctttgagatatgagggatataaacctcactgaagccttgtaagattaaccaataattgtatggacaatatctggaaagaaaggaaaactattgctgaggcatatctccagttaatggctattgaaagaaaaagaaaaatggttgcttatgtttgatattgaagacaacatattcaaaatgactgtgctccaaggaatccatgtaggatagattaaattagtttgtcatctcaaggagcttgttcttaaagttaagtgttgtactcatttatcagtccaggtaaggatacagtaatcaacgcaaaagaaggcaagatctcttttttcttttgtgttgtcatatactcaaaacaattttcagctctattccaagtattggcttaaacaattctgattatatcagtttaactggactataaatgatacttaaatatttcccagtaagccgttggtataacatcataccaatgactggaattttctgatcttcatggttggtcacacagttagatgtgcgaacaaacattctcgtataagagcaaaggccaggcgtggtggcttacacttgtaatcccagcactttgggaggccaaagcaggagaagtgcttgaggccaggagttcaagaccagcctaggcaacataacaagatcccatctgtaccatcaataatcaatcaataatgtatttatttattagtccaaatgaaaagaaataaacacttcatttttttaatagtacagttctattatatttttaaaatatagttgccatggtcaacagttatccagaatccgacttggtataaaaggattaatttttttttgttttttgttttttaaggaaaaacactagctggaaccaactgtgtggacagtgaaaatgatgaaagactgagagaaactttagaaatgcaagtgagggagtaaggtgctaagaggcccttagaagtcttggcagatgaaagatactgagtgtcagtttgcctgaagacaatacatatataaacagaatgggtttgactcagattccaccatttattgctgtgcccctaggaacccactcagtcttactgagcctcagtttcttctttggttaaattggggtaaccatacttgtctaatttactttctttcttttttttaaaaaaaattatattttaagttctggagtacatatgcagaacctgcaggtttgtcacataggtatacacgtgtcatggtggtttgccgcacccatcaacctgtcatctacattaggtatttctcctaatgctatccgtcctctagtcccccaccccctgacaggccccggtgtgtgattttcccctccctgtgtccatgtgttctattgttcaactcccacttataagtgagaacatgcagtgtttggttttctgttcttgtattagtttggtgagaatgatggtttccagcatcatccatgtccctgcaaggacatgaactcatccttttttatggctgcatagtattccatggtgtatatgtgccacattttcttaatccagtctatcgttgttggacattttggttggttccaagtctttgctattgtgaatactgccgcaataaacatatgtgtgcatgtgtctttatagcagcatgatttataatcctttgtgtatatacccagtaatgggatggctgggtcaaatggtatttctggttctagatccttgaggaatcaccacactgtcttccacaatggctgaagtaatttacactcccaccagcagtgtaaaagccttcctatttctccacatcctctctagcatctgttgtttcctgactttttaatgatcgccattctaatttactttctagggttgctgcaggaacccagtggaatagagtatgtgaacatttcccaggaatttgggaattgatatcagttttatttccctgttctcagttggactgtgtgtaatcttaaagacccagccagatatgaacctttccctttttaacatttttaaagtttttatgggatctctttatggtgcctaggcttgtctcaagcacgtggcctcaagcaatcctcctgcctcagccttccaaagcactgggattacaggtatgagccactgtgcccgacctttcctctttttttttgagatggagtctcgctctgttgcccaggttggagggcagtggtgtgatctcggctcactgcagcctctgcctcccgggttcaagtgattctccttcctcagcctcccatgtagctgggattacaggcctgcactactgcatccagctaatcctttgctcttttaagagagtgtttgattgcacatattcctgagtgaacagccataaagatcagaaaattccagtaacaataactttttaaccaacaccttctaaagagcaccttgaatttatttctcaataaagaagaagtaaggaggttttgaaactcaagaaaaggataaaggaatgtttgagtttgattgagaccaggagacagagtttaagataattcttaatctattattaatagtgaggccttaggcctcatttaaaaaatgacctccttatagaatatgaggtggtacccttaagacctaaccattgatgagcttacaaaaagagatatgttttcccccatcggaaagcttccctctcagtgcagtttgaaaaatgaaggtctaccccagggtagtcatccttcatgtaacattaaatattaaattaaattggttggttgtagagccagtgttttctttgaattctttagtgtaaagaggtatttcttctggaatattttctggtagtgtatcttatttctttacccacctgtgatgtagaatctcttctgtcttggcaggaagagaaatttgtactacacttatttacttttggcaaagcagttcctattttaacacctacttgaaagtgttaagacttttattttattgttgttgtgagggggatgaattatttatacaaatttctccctttaaaccagaacaatgatacactgctctgtaaatatctgttggaaaggctttcagttttaactcatcatattgtaccgcacctatcaagtcctttactgggttttgcatcagagtcaaaacactcaaaaatgattcagggttctagatgacttcttagctgtaaaataagtttgcctttttctcaccattttggtgcaaccttacatacacatctggttgagatcattttcttgaagtcaattgaaacctattggaaacacacaagacatagcacaaatattgcatttttggagtacggctatgctgtgtgtcaaaaacctaaaatcatttatttctataattgagctcaaccatatgaaaaagtattagctacaagaagcaatcagcattatttatgacagagaaaacacagaaactaattaaatgtccaatgagttacccgaggaaatgttgaaaaaattcataagaactagctatttaaaatgatgctgtaaaaatatttatttaaaatatttattgacatgaaaatcatttcatgaaattctaaataaaagaaaaagattgcaaatagtatgaatatgtgatctaattttggtattaaaatatatattatttatttaaattgttaaaaatgcatagaaaatggtatgaaaggacacatacgaaaatgtgtttatctctgggtagtggaaatctaagtagtgtttactttttttttctttttgcctatttatttactattttgtgttttggattatgctgtggtgaacatatgttacttactgcataaaaagtaagaaaaactgttcaggatgatagacccatcttcaaataggggactacaggagagggaggtggtagaaattgaccattctgtagggggaccattctgattttaggatttctctttttagctttggtaaaaataaacaaaaaataaaactatgtcttaaaatataagtataaaaactgtgtttgttctatatgtttatactgaggttcaaatagctctcgtagatttacactttttgagtgactaatctctacatttttagtctaattttttcatttgctttttgaaccaatataggtgatattcacttctagaatattttatgatgatgtctgtatcacaaaataatagttaaatgcattgcgtgctgactagatctgactagattctaggcctattctaaatacttggcatgtatttacttgcctaattctcacaatatcctataaggcaggtactattattttctctattttacatctggatgaagaacctgaagcccacaggagctaagtctttattggaagttgtaaaacctgtggtagatctgggatttgaatcaagcaggctggctccagtgccatacaaatatgtgtcacatatgctacattatattttcatatttaccaaagatgttatgatggttaattttctgtgtcaacttgactagatcatagggtgcccagatatttggttaaatgttaactcttggtggctttatgatggtgtttctggatgagattagcattggaatcagcagactgcataaagctgattgccctctccaatatgggagggcattgtctgattgactgagggcctgaatagaacaaaaatgtagaggaagggagaattcactctttctgcctgatggcttgagctggaacatcagtcttctcctgttttgactggtactagacttatatcatcagccctccagttctcagaactacactactagcttcctgggtctctagtttgtaaatggcagatggagttttttaacctccataattacggtagccaatttctattggctttgcttctatggagaaccataacacagatttgatgaatgaaaatgctcatttaaaatgaaaggaaacttcaaacaccatattataattataactataaagtaggtaatatatttttaatagaagaacaaaaacacccaaagaattttattttcacaaatagcttgtaaagaggtttaaaattttaatttgtatttttttctctttttgttaatatgtgtgtgacacattttgtatgaatgtcacaatataccataccctaaaatacatcatttttgtgccactggttaatttaatatttcttttctttgtaatatttatccaaaaatacacacacacacacacacacacacacatatatatatatatttaaacatatatgtttatacttatcctatacacacacacgttatacttatcctacacacacacacacacacacacacacatacacatatggtgtatatatgtatgtgtatatatatatgtatatgtatgtgtgtttgtgtgtgtgtaggataagtaattctttttttcttttttgtatgtaacccataaaataattagaacgtgcaaactcactctgtgttttcaaaggtccaattcattatcacctcacaccttttcaggaaagacagttatcaaaagcatctcaaatttaggctttcactgtgtaatgtcaaagttcaaaaagcaggaaaagaaatttatgcttacaaacatctcatggtgcatgacattttaaaaagcgtccgccatcctagaaagagacaataaatgtttttacactttaatctttagactgttaaaaattttcacactaatttcctttcacaggcctaaaaatgtacttttccccctctaccattttttcccttatttatatcattttatgttggcctctttcttttcactttcttccattcttttatctctttcatttttctccttctaataactttttatccatactaataatatagatgaagatagtatatgtgtattagttcattttcacacagctgataaagacatacccgagactgggaagtttatataagaaagaggtttaactggacttacagtttcatggggccagggaagcctcacaatcatggtggaaggcaagaaggaccaagtcacatgttatgtggatggcagcaggcaaagagagagcttgtgcagggaaactcccgtttttaaaaccatcagatctcctgagactcactcactatcatgagaaaagcatgggaaagacctgcccccgtgattcagtcatcttccactgagtccctcccataacacgtgggaattatgggagctacaagatgagatttcggtggggacacagagccaaaccatagcagtacacaaaaggtgttgctaaagatttttaaacataaattgacaatacttttaatgacagtgagtcagtgctatttttcaagaataaaaagagaagcaatgccagatttcccccagtgacataaaagagaaaagtagttattccagaaaagattgtattccagtttctggtaaaagaaaaactgactaaaaagtggcttaaacaattttttctctttcttcatataacaagtccaaaggtaggcaatttctggtattactttagcaactccaagacatcagggtcgaggtcagtatgattctcctgacttttccatctagtggtgaagtggttgtttcagcttcagccatcacacccacattcaaggtaggatgaaagaaatcacatttatcaggacagaaaaatggcgctagaaatcccctgcaaatttctatatgagctcactgcctcacccatgctgcagggccaattctagctgcacaaaagactgagcagtatatttttgccactaaaattgccaactgaataataaatcaggtttcccttaaaagaaaatgaaaactgaatatctgatagatgtattactagatatttctatgcaataaattctcccaaaatctagtggtaagaagcaacaaacatttactatcaagcagtttctttttctttttgaaccctttgaccaacatctcatttcccctatttcccagcccctggtaaccaccttttcactctctgcttacttgagtttgagtttttagacttcacatataaatgaaatcatatatttgtctttctctgtctaatttctttcacttagcataatgtcctgcaggttctttcatgttgtcatgttatcacaaatgggaggattttctttattatggccaaataatattctattatgtatacatatataaatggatatagaaaataggatgtgtatatatgtcacatttgcctctttcatcacaatatgcctcaagtgatagagtgactcaccaaagggcttaactcacatctaatatatagttgacttcattgtacagtaagtctgacatcaagtatggtgcctgttttaatttgctagggctgccataataaagtaccacaaactgaatggcttaaagaacagaaaatcattctcacccatattaatgtgcacacagattgaagtgtccttatgtgatgtagctatacttactttttggtgtcaaacatcttaatgtcttttttaaaactatgagtcagtgagaactaccacctgataggaaagcatatttagattctttttcaaacaaatctcattgggtctaatatataatagttttacagattgtatgtcttatctttataatatacatttacttgattactggtgtttttatcccaaagttacagttctgtttgttatcatttgatattatcatagaggaatagcctttaaagaccttggaagtagagtattactgcaaggtttgaaagaaaaacggcagcattaaagagtgtcagctcttatatgtatatgctttttaggaacataaacttagaacattaaaactcttaggtcatacttgtcaataaatgatttttttctcaacagtactttataaccttttagaaatttgccaacaggtgacaatactccctaacagtctgctagaagtgtcagagctcaggatatctgctttttaattgccatattcaaggtctaattattttctctatattggggtaagagaactgtaatgaggaagtaaaatcattaaacaccagtgagtaagggaacagagtcttcttgaattctgatgtgaattagcttccccagcagagctttggctgtggataatttctatctgaatgtctccttctcagttatttgagaggacacataaaatataaaggaagactgctcaactcttgtggtctttaaagagaagggaagacaatggattaaaaggctattattacatctagacttatagactgttaatacttaagagtttattaacctcaaagtgtcaaaatgttctataaatgagtaagatactatgtaaatcaggctacacatatgataaaagttgtcattagaataagtggcctagaaatatataatactacacagttttcatactttttgaattcatagaatttagacactcagattcctttaaaaccaattttgctgctttatttattatttatcatattgcctttcacagttattcttttctgtaattctcagctgttttagaaaactaccacaattaccaaactgtctcaaaagcaaaatttgttgctgtagctactagaaggctaagaaatcacaaacatttgattctgtaagagtctatgtgtgtgcctgagtgtatctcatgcatggttttatgataaagcatgctaaataaattgtttatatttgtgtttgtgtgtatatgtttaccacttatgaaaagaacatacccaatggcagagattgaattaagtgctttctgcatgatctcatttttccttatgacaattcttgaatgaaggtattgtacacatttattagctaacgcggtgggcttagcaagtggctgtattagtccatttgtcttgctgtaaaggaatacctgaggcggggtaatttattttaaaaacaggtttattttggctcatggttctgtagactgtataagaagcatagtggtggcatctgtttctggtgagggcttgtagaagcttacaatcatggcagatggggaaggagagcaggtatttgacatgatgagagaggaagcaagagaaagagagggagtaccatattcttttttaacaaccaattcccacgtgaactagcacagcaagaactcactcattactgaggggaggacatcaagctattcatgagggattcacccccatgtctctaacacctcccaccaggtcacaccatcaacactgggggtcacatttcaacatgcgatttggaggggacaaacatccaaactacatcagtggtttagctgggatatgaacctaggtctgcctgtctctagagaccattcatgtaagtacatagaaaccatattcttccttgccactagaaaaaaccctctagcaatttttgccaatgttgattataaaaaattttatatggacccataaagaaaagagcaaattttgagcctctctgggaactgtgaaaaaaaaagatctgtcctcatatcaacctttgacaattcaaagagcaaacagaagattgggttacttctgtgatcacactgataattccagcaggcaaatcttagtcacaacaagtccctggagtccagccaatctggctgctttgatgctaggctcagtagaactgaaccaaatgtgcgtgggaaagagaagaaccagatattgccatgactgctcatcagtcaggatttcagagactgaagaatgcagactgaacaaacctgaacccatacaggaaaaatgaacatagtaggagcaaaccatcgccctctcatacagcatagggagggattttctggagccaaagagtgggtttggggtttcgtagtccaaagtctggactcaagggaacctcagataaccagtaaaaatgatcatccatatcttgggtctcctaacaacttgacatgagtagtttaatatgttgaaacttcagtttccacccttgcaaaatgaaagttatattgttctcttccaaggctgttggtgaggttgaatgagataaggttgatgaaaggaacctcaatacagtgcctgatacacaataatgacaataattatatcataatcacagtcataatcacaataatgccctttctagccacatatggcagagacattggtgcagtggtcctcaaacatacgggtcagatttgtcgctcaagtctgtgatctaatgacatgatgaacccattagatgcctccctatcatctggatattgttccttgctttttccaagatctttttgaagatgacaatatattttcataatatttcactattttaaaagctttctgttgagcataatatacatattggaatgtgcaagtatcagttatactgcttgatgaaattttaccagctggatgtttttgtagccagtacccagttgagaaacagaacactttctccagtcactatcctcccgcaatgaagtgtaccttgggctaatagataagttttgcctattttccaaatttaaataaatagagccatatactctgtatatgtttacacctcacttcttttagtcaagataatggttgtgagattcatagattcattcatgttttgcatgtagtcatgctttgttcttttttattgctatgtaatattctattgtgtgactataccacaatttatccattttcctattgacgggcatttgattagcttccagtttggggatattatgaatagagattctataaatattcttgcacatgtctttagtgtacaaatggaagcattcttgcatgcctaggtttgggactgctaggtcatagtatgcatatgtttagcatcttttcgaaagcaagggtatcattttacatttccaccagctgtgtactgggttgttttcaatgattattgtgtgttaggaatcattcttcctgcatcacggttatttttaaagcatccacctgagaaaaatgcagctctactaagggctggttcttgtggacattagatcccaccaagatggctgagagcaggacgtgccctatgatatgtgtatgtgttagaggctggaaagctatcagaaccatgtacctctgctgctgttttatggcttcatatattttggtggcagtccttaacagctgtggatttatttttctaatgtttgcttggaaactgaaatgagtttgaaagcagcccgattcatatagaccacacaagtaagaagaagcatattagataacacaaatatgggctagagtggcgccagagaacaaaaaagaaacaactaatgattaggtaactagtggacccaggcatgaaatttagtaatatgctgtttaaacataaaaggctaagaaaaacttgtttgaaattgtagaagtgtctgacagctagtgtaaggaatgtgtgagtttccacgctgacatcctcccataccaacagcagtttcaacttatcaggtggccttcaattttagcaatgaggagaaaaatgggtaataaatatgagatcttgtgttaattcaaaccattcacaaatctctttattttagggaaagtcacgctaaaaccacaaaccagcaggaagaagtaaaactttcaataatgggttgagcatcgactgagcttgaggcctgacacgctgcattcccattttatcctcaagccaggccagttgtgtgttttcaccaacatgtttcccacagattggtcccagagatgctaagtcacttgtcccaagttccaaaagtttgtgaatgacagagccattttcaaattgaggttgagctgattcctcactgcttcatgttgcgagagagaagtaatagggaagtagtatgatttggcagtaaacagcaggcaaactataaaacattatctgatggacgacacaaacgctctttacatctctgtcattgcgccctgtccggtaggagcagctgaatgccatttggctctttcaccttctgctatctcaggaaggcaagctgagcttagacaactccgtgcctttgttgtcccctcacctcatgtctgtattcatctctgttcccttatgttgtaattttctaaccttttcccctcccatccagtggccttatctgaaaaatgaatcctcaagttgtccacagctcttcactaagacccggtctagatccaaaatgaattcagaaggctctcagccagcggggcaatgtgtggaatttatggtagtttgggggcgtaatcttagtgcagacaagtttcctttgccttgttggaatcacatcggagccatcaaattatattgcttctcaagatgcagttaaagtgatttgggatgtgctcctctggctctcccacttgaagagctttactgtgaagcttgagcttaaggtagagatgagctggtaggcccaggtgaggaaagtggttagattccttgtgacatctggaatcagtacttgactgatagagttggacagtactttcatgatcaagcattccaaacacctcatttaatgagggaagctccaaaagtcaaatccaagaatgccaagttagggaggagtaagagctagaataaaaatctctcaatgcatggtacagtcctctttgcttttttaaaaaagttattgtaatctcacagatgagtaaaattaagcaaaatgaagctagctggtttaacaaacttcattgtagcatcaaccaaaaatgtgtgagtcagcattaaattgggccagatttggggtgggagaaaaaaatggtcagatttcttccaccaaaaggcatcattagatgtcttcattccaagctcagagtgtacatacagcaatttgctgctcacagcacgtccacagcaaattatttcccttcgtcaatcagaattgtggtcgtctaatttgccattctcaatactagtcacgctttcactctgtgtaaaaattcagattttcttctctcttcttagacacatggcaccttttacctgcaaaaggtaattgcagtgactgtattgacatgtaatgatatattcacgagctaatcacatttgcatttcctccgcttgctactgaaaagctgcaaaggagtccctgtcatcatgtgtaggtcctcttccagcccagcattcacagcaggctggcaacaccaggcattcagtcagcaggtcataatgactctaccgctttctattattcaaaatggaatttaactgggaacttcatattgtattgtacacttaacccagttttcttatttgttataggtttatattgttaagcagtatggtaaaaataaaattctatttaccaaattctccttaacagatggaatgtttaataggccaataaataataggttttaaaataacttactaatctttatattctccgtattcttaatatccttcttatctactccagaccttttattttaaaactttagaatatcttaaataattaccagtcaatatttattacatcattatattctgcatttagctttattgcttatattttaacaaatgtaataaagacaatggcatatgcagcttgtagtttgttgctatgagccaggccctgtgttaagcaattagaggatctaagtgagtcctcaccttaactgtgtgaagtagatatcactgtcctctttttacagatgaagaaactgaggttcagagaggttgaatcactctttcaatgccacacttaaaaaagtggtcaaaccaggagtgatggcgagtgcctatagtcccagcaactcaaaaggctgaggtgaaagggtcacttgataccgggaattcgagtccagtttgggcaacttaagagaccttgtttcaaaaaagcaaaaacaaaaataagtggtcaaattaggatttataatcagaactatctgacattaaagtgctcttaaaagtgaaaacacgactgggcgcagtggctcacacctgtaatcccagcactttgagaggccgaggcaggcggatcacctgaggtcaggggttcgagagcagcctgaccaacatggaaaaacgccatctctacaaaaaatacaaacttagtcgggcgtggtgacgcatgccggtaatcccagctactcgggaggctgaggcaggagaatcgcttgaacctgggaggcggaggttgcagtgagcagagagcactccattgcactccagcctgggcaacaagagtgaaactccgtctcaaaaaaaaaaaaaaaaagtgaaaactcattattctgcttttgaaatggagtgacctttcttccttgttccatattcacatggaccatttcatccacaggaaaagaagaggaaattataaataccatgattcataatttaattactagtgaattgatagatagtaatgaaacaaaagtatgagataacagagaggaatgagagtggtattagtcagtcaaaatctattcagatgccagcaatggaccgttttcacaaaatctaggatctttataaaaacttttttaaagatagctgaactttattgattcaaatactaaaacttttacaaagaaacttttttagttttattttatttttaattgacaaatagtaattttatttaaggggcatacagtgatattttgatacatgtatatattgtggaatgatcaaatcacagaactagcatatctatcacttcaaatatttatgatatttttgtggtaagaacattaaacatcgtctctgtttgctgttttgaaatatacaatacattactattgactataatcactttgctgctcaatagaacaccagaacttatttttctcagctgcaactttgtatccattggccagtaatagttccccctaccccgccccacctcaaacctctggtaaccaccaatctactccctacttctatgagttcaacttttaaaagtaacttttcatggaaatctttctaaaatattctataggcatttctgtatagcatttaaacagatgacctcaggacatgacttgaaaaatccaggatttcactacgtggtggaatagctctggtccgttttcatttgtcttgagctctgctctcctgatgtttactctcatgtctgaatccacttggttcttgccttagtgacttctcttccatctagtgtgctatggaccatataacacagagttgcaaaaaaatctgtgtatggagtgattgggattctgaaggaaaaccttacagaggaaagtggtacttcagttatagctttttggggtaccagacaagttttacaattttgaaatactgatttatttatatttcacattgttcactacatataaatgcacatgtaagaaaatgatggtaaatgtacatacagaaaaattaggcatagaagtgtacaaatgagaacccatatcaaggagcttcttggcagtcaaaccaaggcaaaaagaggcagatttagttatgatttttattatcatagaagataatgtataacagccgtgaaagagctcatagaaagcttcatgtatctttttttaaaaaaattccctaagtcagagctgtgttgtagtgggctaaaatttctttttctgtttttctttttcctttttttttgagacagagtcttgctctgtcacccaggctggagtgcagtggtgatctcagctcactgcaacctccgcctcccgggttcaagtgatcctcccacctcagcctcccgagtagctgggactacagtcatgtgccaccacgcccagataatttttgcatttttagtagagatggggtttcaccatgttggccaggctggtcttgaactcctgacctcaagtgatctgcctgatttggcctcccaaagtgctgggattataggcatgagctaccgtacccagcctaagatttcttcttggtgttgctttcactaaaaaaataatcattagcagtaataacaactgaacaattatattaaaatactgtggatcaaataatgaaatagagagttatgctccctagggccttaactatctattcagaaagcaaagataaaactttatacggctagccaattcaagttagtatatgttgtcattactgaatttatgtaaattttagatataacgttctaaccccagtttttcaacttcataactaagatatgtagttgaagattcctcaaatgcttacgaggacattaacatcacccaaatcagccaaaatatgtcatataccattgaattggacacccacatctaatgactggttaatgcagatatgaaaaggccagccccttcacctcaattcctgacaactgtaaagtgtatcccagtttcagagacctccacagggttggcggaggcctggtgatgaccgcctctctgcccaacttctccctctgcccagtcctgcttccctcacttccactgtagttgttaatctcaagatcactccctaataaatttcctgattttctgtactccagtctctatcccaggtgctgcttcccctaaaaagaacatgccgcattacaggtcactttgtgcaagccactaagaacactgttcaagggaagttacagtctaatttacaagacaaggcacagcagtgcatacacaggctgaggggcaaacaaacccttcagcttctgaatgctgttacctctcagaagccagggagattgctgagagttgggggagccaaggaaggcttctcagaggaagcatcttttaaatattttcttcttccacccaaagcacctatcttggaatgtcaaatgattcaacactactacttttccatgtgcgtttgtaaaagtatataacaatttgagggatcatgttcttatgctgtaatctttctaaatcctctttctaaatcctaatgatgtgtatgaataccatagaagtagcaatagctcacaaaggcctgcaagaaggtagttgtgtttcctgcatagaaccctgttcaattgctgcctttctcttaagattatcatgtagcttttcaccttaagaaattaatatgctgtcatctgactaaataatgcttttggctgaaatactggtcccaaacatctcttattttgttgtgtctaatattttaccatctctgctcagcataacttattctcctcataatttcactttttctctgcttacactaacacgtggttttaaaggaaatattgatgattcatggtgataatagtacgtactttaatgaggttctgccattcatcatgttgttacatccatgtattataacactgaattgtagtcacctgtactggtagtcttcagtttggtttccccagaagcagactctgagattttaaggatttgagggtaggtagtttattagggaggtaactccaagtaggagagaggaaaagtgaaataaggaagaaaagcccatcaataaatgtatattatcaagccacttacaactgtgagcaagtatagcttaatccaactaaggaactctggtgacccctgtagaatatgtacctccctttcccacctaaaggcaagggatctgggctacttttacccaactattgtcagtaatctcttaagaactgttcctcttagacattaagtcctgagcactctcagtttcccaagtgcttgagcaaagtaaattcttgaagtcagagaaagctcttaggcaaaataaataaaatgcaggtactagcagtcaggcctaagggctctgagatggtaaaggcagggggatgtgggtgatgtcctgaaacatcatctacactggctaattaagagaaaacacaggattgcaatcacattgcgtagactggatattctcttcctcgctcctacagtcaatcacgccccaatttctgctgatgccatttccctgctagctctggggactccctttcctttgctgtttttgctgtcttctagccacatatgtctgctttcttgcctgttaataccccaagagttcttgcctctgagcctttgttcaggacggagcttgggtccctttgctaaaatgtgtttttaccttgtatatttctattgcagtccttctccaagctcactttctctaagatacttcacacatctttctgctatagttggtggcacttcattttagcttcattttagcacttctcataatctgaccttttattaagtcgggttcatagacatctctgtttctcactcaattgtgaatttctgaggggcaggtgctggcatgcaattactgtggtacccactccagtgcttcacatgtagtagatatttgataaatgcttgttgaattaaattgaataatttaaatccaaattaggtcagaaaaggatggtgttttaagtgggggggggggggcaccagattcagttacctggatagggaaaacatacacttgaattttctaacagcttgcactcaagctgtcattaaaattaaagtcctttattagatgctttcattgttgccgaaataatactccctgtgccttggagcagtagatgtaacagcctctcttagttataattttgtgacatcaggcatcaagcagtcgggaaattgcgagagctggtaatataactttacatatagtatatcattacaaatgagaaaacagggcctgcgggcagggatgctctgtaacatatttttctgagaagaaagaaaactcaatggaataacagtaaattctgtaaaaaacattttctccttaaaaaaagacagtgcccatttagttatcctttaataatttcaattaacttctgcatggcagcatgctaaaagaaacaaattgcctctcagtcagaaaactgtctgtctctccctgtcagtctctcatgaacacacacaaacacacacacacccacacacacacgcatgcacacaactctaagagcaatcattttaggagtctgggctgactctgaacactgctccaggaattaagggcctagactgggcaaatcactctgtttactggaagtatccaccatttcctctcctgtttcccacccatttctatgtttgcacacttgtaagctaatctaatttaaacaagaaaaaaaaagcctttaatgggatgataaccagaaaaaatgttcccattgtgtttaaatgaattcaaatgaagtcatattttgagggaaggggagagggccagtccccctgggggacttggagtcaagacagacaactgtgggtaagctttactggcaagcctctttcaatctatttcatagcttacatacccccgctcctctgatgccccagcccaaacaatgatacacagtgtgtcaggaggctgtagtagcctaaaccccaaattactgtgacttaaagtcaacgtagtattatttttgcttcttattgttgtgtttttctgtttttattttcaatctcacctgagaaggaggcagaccaggggtaatctgggagatccatgatcattagggacctagactccttttatcatctttctctctgtatttgtcttccatcttcagtgttgcctcatggtcacagatgacttgctggagcaccatcaatcacctctttgttccaggaagaaaaaagggggagcaaggaaaaaagattaaaaggacaatgcttcttcagtacatcagcagcttactttctcttggccacctctatcaaaaaacaagaatggagaacatattttgatgaaaatgcatattataaaaagaagggaagaatggctatcaagtagacaaaacacacagacatacacaatattgcttctgtcagatccttatgtggattgggttgcaaaagagtagtgacagcatgctttaagtgcctaaaaagtctctgtaaattcccagttctcttgttgatagtgtttggttcactcagagaaagatagagagagagagagagagagagagagagagagaatatgagggaagaggcctgacattttcttgagaactgaaacctttcttttaagatggcttgcctttatcaccatccgaaattctaagcactggatatttgtaccagactctaaggtaggacagcacaaatcctttgttaacatgacttggtccttaactcttaatatccctatttcttccctgagggagagtttggctgggaaggacgcaagtatcattatttttcttctgctggccaaagttgtctctttgtgcattctcagctttcaaaagaaattgagctgaatccacttttaaactctaagggattcgttatcagaaaagaaaaaaaaaaagagagagagagatttgagttggctttgaaggaagtggagactaggaggtccaaggttgaactccttgctcttaaaagcaaaaactagagtgagtcttaggattgcagtgggctctgtgcaccagtatccatagcccttggagaggaatgcccacagtcttttgttgagatgatcacctatctcttcagaatctccaatctagaatttcccatttcactttttagtaagaatataaagttggatactgggtattcagattcctgtttctgctctctctgtaccctgaggcctccaaatacgtataaagaaagaggcaatgtggcagtataacagctaagataggagtggtaacatgcctgtgggatcctcagaacagccaccactgggaaattcaaatgatcataggcaatttctaaggaggtcaaggttgcaggcttaagtcttacatgaatcatttagctctagtacattcaccagccataagctatacacataatgatgatcattgctaccaagaatttatttatttctcatttttgatctgtcatgtacaatatgatctaaatgtaatagaccatttgattcaatattaaatgcctattaaagagatggtcagtttttaagttttaataactaatttgaagcttcttcatcaatcttctctcaattgccttttatattttaaatgatcgtttttgaaaggctttgtcattgaatatattgtaacgtgtgaaaaaaaaagtgtttatactaaatgtgacttatcctcaaaggtccacagaaaagaacatctgtcattgttaaagatcatgcagcctttttcctctgcctggggaaaagttcaaagttgacagtgagttcacttgaagagatgtaatatgaagtcagagcgaaggtaagttgacaggaccaggacaagcaagataaggtttaccaaggagtcttggcccctttcatctgttccatgatctcacctgaaacaaaatccttgttctgctttatcttcctatgtatccaggagatttaagtagtaactgaagctgtctgtagagtaagtacagtagacataacaccacacctcgttttccttttcatgccggggaagccatgttcccgtgttgagactacctttagtggggactttctattcctttccagaacaccatttacaagggaagagggagcagaattattcctctttacagtgcttggaggagattcagaaggtgatcttgttcggactataccttccttaagtattatttccctgaagaaatgctgcagagtctattctgtggcattcttggaccacaggattggaagcacttgattgggaataagacagcacatttctaagatctctttactatattttggcttttttactcactataaaacatttacctagagggctttctattaaatttagtccagcccattctctgacaggtaagtccaggcatcaaaaagtgtgtattttctaaatattgaagtaccattcagcctgtgaaaaataaagcaaatttgtactgatgtggaaagatgttccagtgcatattaagcaccaagaaatgaattagatttgaaagcattcataatattatccttttttaaaagtgggagttggtagatggatgagcagacacattagggcgacttgctgcagcctctggggataagcagtgtatgcagaaactttgatagtcaatttctttattaagaaggactgtggcccggtgcggtggctcacacctgtaattccagcactttgggaggccaaggcgggcggattgcttgagtccaagagttcaagagcagcctgggcaacatgttgaaaccacatctctactaaaaatataaaatattagccaggtgtgatggtgtgcacctgtattcccagctactccggaggctaaggtgggaggatcatcagagcttaggaggttgagggtgcagtgagccgagatgtagcctccagcctggggcaaccaaagtgagatcacatctcaaaaaaaaaaaaaaaaaaaagacttttaggaaagagaacattctgattatttacttttaagtagtttgacttaaaaaccatattaacagggtttatttgaaccctggaagatagtggaccatttttattttcttctttgtactttttgtatttaaaaaaaaattcctcaaactagtggtggtgtttttttttttttttttttttttgagacagactcttgctctgtcccccaggctggagtgcggtggtgcgatctcggcttactgcaatctccgcttcctgggttgaagcaattcccctgcctcagccccctgagtagctaggattacaggcactcaccacgatgcccggctaatttttgtatttttaatagagacggggtttcaccatgttggtcaggctggtctcgaactcctgacctcaggtgatctgcctgcctcggcctcccaaagttctgggattacaggcatgagccaccacgcctggtccccgtgttatttttaaaaggtatccttgctgtaatttttctttatattaaggattctattttagacttttatatatactattctaattcatccattaaaaatttaggcctatatcgaaacctgtaaatctcttaaataattattcaaccagaaaaaaaagttaaatgcaattaaactttgccatatgtgtatgatatgcctaaactaaatggtaataaaaccatccctggttttcattagttagatatgtgtactctcagggataaaagaaagaaataagatcattttgcagcctttctttgaatccagggcagccatccaagaggccaaaaacgtaacgcctggaaaaaataaattccttttaatcttgtggattaatcaggtagtgcaaattttttttttttttttttttttttttttttttgagatggagtttcactgttgttgcccaggctggagtgcaatggcaggatctcagctcactgcaacctccgcctcccaggttcatgcgattctcctgcctcagcttcctgagtagctgagattacaggaagtagccaccatgcctggctaatttttgtatttttagtagaagcgaggtttcactatgttagccaggttgttctcgaactcctgacctcaggtgatcctcctgagttggcctcccaaagtgctgggattacaggtgtgagccactgcacccggccaggtcctgcaaattctgatgcaaacttataaaccacccaccttgatttacattaggaatataactgtatttaccttcccaacattacataaatactatgatgagaaatcaaaattaaagtgctcaaaattgaaagaaaaaatgtagttttgaaataggaaaaccatataaaaatgaaatttagattgcattttctattagaaaaatgtaaatatgtaaatgattacttaggatgctaaaatatgcttttattcacttatatgcaaacaaacctaaacaacatatctaatatgtaaataataaaaccaaaattatcttctttatttcaattggcaacttttttctccttaagtgcatattttatataaacacttcttatttgtttagaaataaaaactgcatgtaaaattcttttattcatttttatagactgcaaatatgccatagccttctgtgagctcgataaatatcaggtgataatttggttcatttaaaaaaaaaacaaatattttacagcttttgtcagattttattgctttaggccaaaggtcaatccaaggcccagggcaaagtataggtagtgtgttttttgagtaggtatacattggaaggagttgctgaaaaggattatatgtcatatttcagaggtacttccataaaagggatgataaccaagctggcctgatgagccacaattgaagttgttccgttttataaaagagtacaccatttcccacagtaggactcctcaaatgaccttcaccaaggcagaggcatattgtgctgaggcttttcagggattaattaaggggctgtgaatagtgtaggctagacataattgtatgtgttttgtgtgcttgtaaagttacctgttatgcatccccttaccttgctcatataattaaaagtagactccaaagaccaaaatttaaagcagcccctgttcactaatcgccccatggacttttgcagagatagttccgttttgggaatgaatttgtaagtggagtttagaccacaaacactcaaaataatgctttcatctgctccactggttgaagttgcccccagcggtgttgcttctcctctgtacatttcctcaattgactttcaggttacctctctgtgcgagctctgggggtgccagagaaaggcagagaaaaagagagacctaagtgcttgaggcagaacatcgacagctaccagtacgtgttctcagctgcaggtttactcagctgttccaaaggacagagaggcagggcagccgcagggtctgctctagactattctttccctttgagaaaatgccctctgaaatttcacgtggctatatgcaatatctatatttggtctagagtattataaaaacgaactagtcctacattgtacaaaaaagctaatttaataattgagagtaatttttgtttaaatatactatgttgaatcatgcatctagacatttgagcttaagttttgagactcagtatgtactgcaagactgaagaaatgtatcacatctgtgctccaacgatccctgtgtctgcagagtgcttcgtggtttaggaagtgctttcacaagcacatttttggatacttacaaaagatgtgaggtttacagaggcgttattgagatttttcagttgagaacactaacacccaggatggaatagtgggataaaaacacagctatcagtgtcaagagacatggatactgcccctggttttacccatggccttttctggatatatatatttttttctctgggcctaattttcttcatgtggaacatgagaaaatggacaaaatagctataaaattttgagcatcctgaagtgatgaccttagacatgaatcaaagactcttgaatctcattatttccatgatcccctcaagttccacgggaccctcattaccacttgtaaattcagtatctactataatgaagaaattcgtatatgtaactgtaaatcaaaactggtataataaagcctttcaaaaagcatataaacaatgtataaatatgaatacactcctattttgttaatatatacatgcatttatattatatataattatattttttacttggtaaacatttcaaattagaatattctctaattttgaaatgttaataataatccatttattgattattgttgatgttgatatcattgaaaattttacaaaatctttttatattcccaataaagaatcctatctttctcaacattatgaacatttatcttacagttacataatgtttagaattaatgtatttatctcaaaacacttgagggtttttttaatgaaagatgcattatataacttgcctcatatcatgtatcatgcatttggtatttaacttagcgaactgtttgttatcatggaatggcggccactgtttctctttttatgcaatccattagaacattggattagcactaaattattctgtattaattgtgaatataagactgttagattagttctgaattgttctgtgttacttgtggatacacacacatattttaatacagaacatatatttcttctgaatccatttctctctcctacttgaccgtagtaaacatactctgcactccagtgtcagtgccaggttatttttgttctctaagattttaattgcattcattattttgggctcagtactggttaggaatagtcttcaaagattaaagctgtttatgtggatatgaaaaatcatttggtgatctgccgaaaccctcctgttcataagaggaagcttttctgtcaaaagaaagaatcagacacataaaacagattttctcaattgatatcacagctctatagagtcattaggctaaagcacctgcaccttgaaatgctttgattgcccagtgtgctgtgaggacctgggctgtcaccttgaatgctgatattcccttcctctgagttaaagtaacatcctagatttatcaccatattggaaattcatttaccaagttgattcagtttgttttccccactcagtgttgtcctagtcagcagatgggccccttatttattagaatggtgcggtcactgaattgtatccaccaagctctgctacttttgcagtggaaatgttagcagttttatttaccaatgcaaatatttaccgagaagctaccaaataaaagttattttggattttttttaaatgtctaattgtttatgcaatcatctactcaagaaacatttactgagcacctatttttacatgattctatcttgtttgtggcaaggaatacaaaggtaaataagaggaaacagcctggtctaatggagatgagggcactggagtactaaagacatgggttacaatttttccttagtcatttattaaccatctggcattatcttctactctgtcttccctgtacttgtgtgtgtgtgtgtgtaaagtgggaagaatatatctttatcaggttatagtgtgaattagaaattaaacatatatagtattcaataaaagcatagtggcagaataaacagttcttctcagcatcatggtagtatcaataagacccggactgtgtcctcaaaggagtgtacattttgttggtgtaatttatgagatgcctaacataaaaactctccaacttattcattacatagactgatacttcattttatctccccccaccatgccccccgccagcatattttctggctcatttgtccctttagttctcttctgtgtcatccagagtccagtcaggaaacaggaatcttagcagttatttcaattgaaaaaggttaacatagggaatcgattataccggggttggaaagctacaaagccaaaaagagacctgtgagccaacagcaatcctaaggatgggggaacaaattaaaagacattcgcgttatcagattccaaaagctcgaagaaaagacccccaaaacttaggctgagacctccacccagctggggctgataactcacaggctgcaggagggtcccagtacagccatccttctcaagctgctatctctaaggtacaatgagaattgcaccgacagtgccaaaaacagtagaagatagaagatgaggctgactgctgctgctggagggaagagctatggccggggcttctctgacagtaatgatgggtgaaaaaggaaggagtaggtcttctcctgcctgccagtttcataccagtgtcctatggcagaatctaacagggagccagctgtgaagaggaggtgtagcttcatggtcccaggtgcagcatcacagagccaggaatagaaagggattggggcttacttactaactagcacaggtctgttttagcagggtgactttatgtccagatttgcaggattacaatttaccctcaaagactggagaactcactggctcctttcatttcgtctactatgatatgttcacttttgaagagaccccaatccacatgaatgttgaaagtaaacatttgtagttatatactcaaattatcttttgaaaagaatggatctgacttttcctacttactatgtcaccattgaagactaccttctcaaaagacttctgttgttactttaaaattcttaaaagacaaatcttcatgtaattctgttggtatcaacaagggaaacacctaatgtgggaaattaacttgtcattcttctccagttaaaatggttagaaatatgaccattaccattaggaaattgtatatgaggttaaacatttattaaatgcaaacacttttccaataaatttaaaataagagatatttctcgttttttttctggtttcaactgaaatagaagatgacatagcctctgtaagaagatgtagaagatgaattttggtatttacaagtttgcatgttgttgaataaaggtttatattaggtttcataattaattctaatattcaaatatctgtttgtagagcattttaattagtttaacaaatgtttactggggtcttataagtgccaggcactgaggaatcaaagttaacaagaccgccaaggtctcagcatgcagggagcacatattctagtggagacaagtagaaaaacagcaattaaacacagaaacaatgtaaaagtgcacaaagggaaaaaaactgagttattttggggagtgtgtttgtataagtagccatgaaagtcttcttgaacagatgctatttaagatgagaactgaaggctgaaaaggaaggaggaggaggtacctatgtgaaatacagaggaaataggaaagacaccattccttaagcagaatacaacttggcattttcaagataccgccatagaagctactggagccaatgcacagggagaggagagagaatgagtttgaagggattggaggggccagaccgtgaaggaccttgtagggcccagtaaacagttgggattttattccaaccaaaatgggaaaccatggaatgttttaaatctgggagtcatgaaagctgatttatagttttaaaagtcactctgttgactgcagagaatggattttagaggttagaatagaaacagagagagtatgaggagaagaaagccaggatctagggaagagataaagatggtggtttgagatacacttcagaagtgaatcttgaaggactagcgagtaacttggacatgagcatgggtaggaaaatgggagtggggaaaggatttacgaatgcttcctatggattagaataagcaactgggtagatgttgatgtcattatgaatctggtagaaacaaagagaggaatagatacctgaaagagtggaagaaaagtgaatcttattttagacacataggatgtttgagacatctgtgaaatattcaagtgcaaatattaaatagacagttgaatatccaagtttggaaattacagcaggaggcaaggccagtgataggaattagtaagttatttatttttgttttcgtttttttaaaaatcatcaaccatgtatctggatatgttcacttgcagagagaatctgcatagtaaagagaacatccagcattgtaaagactggaatagtaggagtgacaaataaattcagcagagaggtcagaaggaaagcaggagtcaagtcctgtgaaaaccaggagagacgattggtgcatgaataaaggagccaagtgtatcttgtgggagccaatcgaacttgcagagaagtccaagtagatcaagagacagaagtgtccattagatttggccacatggagatttccattgaccttgacatgaacagttccacattatatgaagttttatgagcctatatatattcagtttttatgagcctcaggtggttgataggaaggaataataatcacgacaacttttgtcaagtctgaggaagaactgtctgctgacttatcacattttcaattaggggataatatttgatgtaagtggctctgaaaggttttctgtctcctctctgattggaatccataacttgaaattgatccagtgtggtaacaagaatgctattctcctgtttgatctcttaggctttttcactgtagggcattcgctgaaaatgatgaccaagaattgtttaagtgcaaccaggctgggaaagccagtagtaaccaccgtaggacagacaagaggtacttcatctgaataaccataagaatgatagagcaatgtttttttcactcaatgtcaatttaaattacttgaactaaaaagtgaaatatagtttacttattcgaggatactctatagcagacaatctaatgtctgtggatgttattgaattacttccttatcggagggcaagctgaatttgtctgcagttattttcgtttataagagtacagcatttattttttcttaactgtgctcgactttttgttttgatggcaaaaagcattacttggaatgctgaattttaagtatagaattgtgcccttcatattctcacatacataactttgctttaccacatagagacctgatatgtatacatagctttaatatatatcttgtgtattcagctttaccaaatttgtgaacttttcttattttaaatctggttttaaaatttttgaaggggcattctagtgttgctttctcccaacaaaccccagactgatgccttaaaaatttgtctcaagttacatatagaccacactttctcaacattttctcttagatatctcagatctaagatgtctggaacaagctcacactctttcttccataagccccctcctcttccattgtttcttatcacaatgtatagtatcaatgaggaggtgaagccaaaaatctcgattttatactctcccttgctaccataagcaattcattatcacagtctgtccgtgttactctcgcatctccttctctgtattcattgacttgacccctgctgagcccaaactaccatcactattcacctagactgttgcgatatccttctaaatggtctctatgtatttctttcaacccatttcctagaccgcagtcagaatgccgttttcaaaatccaaatcaagcatatcattcctccacttagtactcttcaatgaccggccattgcctttgggatcatgaccaaaattcttaacccagtctaccaagcttgcatgatctggctcctgcagttctctcctggctcaccttgtagcactctgtccccactctctctctccattactctgctccagacatactggccttcctttctggactatgccaagccccttcaccctcagcgcctttgtgcctgctgtcccatctgctaaggatgctcttcctctccgttctttctcacctagttaatgcttatttctacttttgactcctactcaaatgacatttcctcatgaagtcttccccaagccccgggttcagccctatccctttgtagcactggctgctttctttcacagcacatatagctgtagatttttattcctgcactgggatatgggctatgaaggatattttattaacatttgtttctaattgtacactaccaattccatggggacctggatgatgcctgctttacttgacctttgtattcccagtgcgtattgccagtagcgtaagagtgttcactaagcatttattgctggatgaatgaatgaatgaatgaatggtgtcgagaggactgcggagaaacataaggctgactctgcatcttattaccaagactggaaaaaacaatttaaagttcatatcctactgtgttaatagaactttctgtgtatgcaaaggtcagtacattttaagattaaagttgattttctatgaacttactatatatagattgaggtgtaattaataatgtcaggctatggggctctatggacaagtaattattttcagatatgttctacagcatttattattgttaccatcgataactgtaatagctagcattagtagcttgcaaaacccactcataaacctgatttcatttactttaaatggatttagtgtaaaattcaattggaaacagtgcttaagatatagatttgaggtaaatttaactttactataaatatactgaacaaaagtctaatttttttccctgtgtttttaaagtttcaatttttctataatttctcaacatggatttgtcttgataattttgcagcacaggtctggtttgggaagatcattgcttttctatttgtagctgaagtctctgccagaaaaaagtattcatcatgtgtgtaacatggtatgattggcagttatataattgatcagagagagactttttttgtctcatcactggatttcataagttgatggaaccttaatggttgtgtagctgctacccatatttcattagtgcatactacattatggacacacagtaaatattaactgtgttaattcaaatgtaatttataatttaggaagtaaattgatttctgtgtctttctgacaaatcctttcatttctttgaagtattgtttattttagtttgatgtataaatacagccacataaacaagaaaaggtaactctgtcaccttatgttttaataactttgaaataatgagacatttataagtatgctgagattttcctccaagttaatttttcattgtgatttgttttaaatctttctactaaaaactatcatattcagattttgtatgatgcaagaatgtgataatataaatcgggacagatttttctggagtaaaattcaactgtatatattgaaatatataacagttgtatacagtgaatatatattgaaatgtaacagttaatttaacattatttatgatatcttttaacattcttcctaacatacatttcctcttttagaaatttacctaaagtaaatcgttagagaaggggcccttgtagaattataaaaaaagttatgaaatacaataacttaatactattttatcctataaagatttcttatttgtataaatatacttctgatgagattttgattttgaagaaattaagtcatttttccctttgtatcccaaatcaacttgatgaagcccttacttattaacattttaatttgagaaatcccagcacaatcttactattaaaataataagagatagtaattttgattgtcattgtgacctttttaaacaggagctaaagcacaccaattggatagtttatgcaaattgtaatgttttcttttaagaaagtgcttaaaattatgtttcaaaggtttttatactcactttaatcttagcatagatgatgttgagttctgcattaacgaggaaagtatcaccttaattatgtaatagggtaacataacatcattagataaaggcaaaaataggcatggcattgccgctaatgtgtttaagtttaaaataataatttagatgtctttgtgtgtttccttagaagttgctctgaggagatagtatgctctgcttcttggccagcttctggggaggactggctctcacattaagtatattaggtaacagtacaaagcaccaggacacatctatataattgcagagaccttacttgctgggttggaatctcacttggggccctgtttgttgatatatttgcaacaaaaagccattaacttacagggtcaagggttaatggaagaaatattcttgtcttcctattatcttgcaacgttttgctgggagctgaagaaagataacgcttttctctcccagtttctcctggcagttttaaaaatggtgacttcttgtttctgtgactaaataaaagattagatgccaatatggaaagctttagaattgtactcagtcaagctgacagttcagacaagtgttccatcacgaccacctttgctgaggtcactggatggtcccagtcacagaaactaggaggaaggcacctaaataatttcttgatttctatgacttcagttttttttttttcctgctccattttaggtaagttagtcatcttgcacaagaaggcgagaaaatttcataaaactttaaaggagagaacaaaaactactgctaagtccaaaaggaattctatgtctaaaagagagaatttagctaatcagattggtgcccctcaaattccaattattttagagtgtataaagagagtgaaataaatccttgtcccaaagaaattcttattcattaaaactatgttgatgattttaaatggaattatggattaaattagtttgcccagattttatgggtgaaaatcattgcctaccaaaggttatttctgtcatttttaaaaatacattacatagactaactgtttcattataacgtatctgatgagagtaggttgcccaatgcaatttaagagtcagtggaaggtcttttcttatatgtaagcgttccactgggaaattttttccggaaattccaccaattaggggattctccaggttaattaaaataagtcctttcaggttataataaaaatatcgctgagtactttagggaacttgtgaactcctttctgtttgaaggccggaatacctttataatttcatccggaggttagtcgtagccatgggtatagttaccactccagaattgtcttgaattgaaaaaatctcagcctatttaattgtagtgctctgccaacaaacacaggttgtgctggtttgatttgacacagcttggatggtgggtttgactaattttcctaattaaatctgccacaacagtcaatgcatgtggacacatatggttacagtcctccatttcacccataatttagcttgacaacacacatgtgagttttctctttactcaatgtttatacaaagggactttttagcacataattttctaattttcctgaaattctaacttcaaaataatacaagggagaaaatggaatcacaagtctgcttaatttaaaatgaagctggtggaaaacttttccctaattgggatatttgttttcttcccaaattagttgagatcatgctttatagcaggttagccagcatggctgataggctgataagccgtttcccctgcgcccctcagcagtgacagcgtgcttctctacagaaaagctactctgtgtctttgcaaaatgacccaagcctcagtcccttaagtccgtggaccataatcattagaccaatttgtccacttagcatctcatgtagtcaaagggcagattttgtatattcatttgtgcagactttgtatattcatacacctgttaaagatttcagcgttaatgtttttccccagagatttttttaagaccttcttctgtaatctgtttattttacatattctcacaccaggagttttttatacagtaatagctacaatggcaatatatattgaccttctgctaaggcatgtttctaaaatatctctcatcagaaaaaccaagcatatttggagtttccagggagagttttatgtatgctcaccagtaacctagtcaactgtgcagactgctgctatatggtggttactgttttggcttcatctgtggtgctagggtgactgaacttgatgatctctaatagccattccaactggacacctctactgttctatgaaaaaggaaagtgaaaggcaaaagcagaaatgcaggcaattgattaacaccgagcatcactgtactttcctttcacggcttccagtcctatttttctgattgttttcgttttgactttccaaaagatgaaattgtagaaacctctctcttaagtttcatccagaaaaggtacagggggtcaatatcagtgactttgaggacttcaacataattaattctagaaacatcaggaacatagcagaatttaattatatatgtctttatcaaattacagaacttgagtgtggctggcaagggcatctcggcccatcatcaaatgtgatgtcgcatgtgctgaactgagtggtgtgcctgcagaagaagcctgagacagcatgcctgagtttctttttaatgcatgatcatatgagcacctgctctactgtgcaaactgtttctaaccatagaaggcaggaatctagttcactagtgggagaattctgaggtaaaaattggagtgaagaaacttggatatggttttcacatgcttctgaacatctttacattaattgagtttttcttttatggctaaacgcttttattaaaggaagacttaaagatctagaatgacttgtcattgttaaattttcccttctgctatatagtttcagaaggaagttcagaagcattaaaactgtccctcttcttagcacacactgttgatacatgtgcttacacattcagtcacacatacgcaattatttcttttaatttagacatatctagtgtacatgctgagtgtgcctataagtgttaattataacaatatttttgaaataaaaatatataatatgcataccttctatgaagtaaataatgatgaggcaaaataataattgttccatctgatatcttcgtaaatttgtattacaaatgattatctctcgtgtgtctctgtctttggatctcatttctttgtatttctcttaacaagcacacacatacacacatacacacacacacacacacacacacacatccttggtgatttcaaaagaaataattggttttacagtttgtatctgcaaaagatttttttttcagttagaatatctcatttttaatgatagtattagagatatgcctaccattggcattctactatgattcaattttttattagtcatctttcacccgttgcttaacgtcaatggctctttcattcttagaccctgagttgaaatgaatttttacatatactcaatatggtttggggcccaccagttcccactacagtggtgctccccatcactcacatacaattttatttaagacaaaacagcagctccagcagaaaataagtgtaatcttctcctttgtaagttgtaattgaggttatggcacagcatattgcctgtggcagaatctattaccaagaagtggagaccatgatttgaagctggctgcagtgtaagcaaaatgaattaattatcagcagtacagaattgaagggaaatacagggtttcctaaagtgaaatatattggcatttttaaatagagaacactcactgcaaggaacttattgatgaatcaccaagtcttttctacttttcttgcctttcagaatttgtatatactcaggttaagatgactatgtgtaaattaaatcacactttgctcagaatgcatagaaatattttatagtatattttgttctttttcttagttgttgaaatggagtctcactctgttgcccaggctggagttcaatggtgcaatctcggctcactgcaacctctgcctcctgggttcaagtgattctccagcctcagcctcccgagtagctgggattacaggtgtgcaccaccacacctggctaatttttatatttttagtagagacggggtttcactacattgaccaggctggtctggaacccctgacctcaggcgattcacccaccttggcctcccaaagtgctgggattacaggcgtgagccacggcacctggcctgttctttattaatttaaagtttgcctatttttaacatataactgttactgtcacttggacaggtaaatgggcaaataatgaatggactaaattagcttcagtattattctttaatagaaaaataactctctccttatcaagtgtggctcaaagaaggcaaaatggaacgttttttgagagtttataaacatttataattttacgtcataagttgtgaactttagtgaccataacttttgttggtaattatttagcaaaattgagtatcttcatagcagcaagataattagcttatttgtatttctttatgtgtggttttccatttaatttaaatttcattcagttgactaacaatgatttttcacttttaaatatcaccattcaaaaaccaaatacaattacattttgccaaatttatttttaatttttttttctaggaataggtcgttatttggctgtttttatttttctgtttttagataattgtttcatataattgtaatgaaactgtttgcttttaagcttcatttagattcttttgtgaaaggatgctctgtctctactgggtattttctagcagttgtgcacattgacttttctttaagttgtagaggatctgagcagatggttttctcagcatctagacaaatagcatacatggttcaaggtcactccatgcaacctgcctatgataaattgggaatccagaatttgtctcatttacaaatgtccaacaacataggtccatggaaaacagtgaagtgccaaagaaaaagatcagcctcctgggaaggaggagacccatggaaaatccccctagtttcagaggctttcatgtgagagggctgtactgacctgtggtggggtcttctgatagtgcttctcccttctacctgccgttcagatgctctgaactgatgacctccatggaaactacaattaccaggaaagcctcctgttgccgtggtcactagtgactgtgcccatgctaatctttcccaatttcctttccagttgttttctagggatttctgtctttgatagaatgtaagagaagagatgaagaggtgtccaggtgtgtgtgtgtgtgtgcttttgtgtgtgtgtgtgtgagagagagagagagagagacagagagagagaaatgttgatgatgggtagtgaggtaaattctggtgcctcaacaatgagtttctacacagaaaaccacagttattaagttgatgtctgtggagctctatgaagtctttatgtgagcttcagtgggtccgtggatcctctaatattttgtgtgcatgcatatatgcctttttaggggagagagttcattgcttctaccagattctcaaagggaaatatgaaatttctcccaagaaaatcctacctcctgtggtataatggttgcccaaaatgttggttgctggatgctttctacttccttaaggaaaagttaagacgttttgtacctactttcaggcagtcctggcatgtatgggccatggattgaacattagaattcagtttaattgatcttacatttagagaaatttttccctagcctctggcaatgatttggctgttatcctttttacttattttcttttttacctctatttttccccagttttgtatttaggaccaggagaagacagttctatgagtaaccagctagacaccatattaaaagtagtctgttcatattaaatattgatcacatgaatgattgtaataatcatacatgcttaaagctgtatgtgcattaaccaaacctgtgtaaaaatttagcgaagctctgaaaggttaaagaatttgccaaaaaagacacagctggggagtaacagagccagggttcaaatctaggtctctgattttaaactccatgttctcaacactatgctattatgccagccatagtgggtgaacaaagcccaccagttttcacactctatccatacgtctaacaagactcatcttccgaacatttttttttcctctcctggcttttaagagcaatggcttagctagaaaaaagtgaaccctagcaagtgtttgctacccagttcacaaaggtaagaatttcaggttgtctgttaggtttaggttttcatagatagtcagatcctgaccactttctcttgtgtgacctcagacacataatctggcatctctttgcttctgttcctttgtgtctaaagtggggtcattgtgaagattcgatgagtttatacagataaagcattaaaaatagtgcctggtacatagtaagcactcactaaaagatagctgtcattattagttataacttagttggaaggtcttatttcctgagggcatctggtacgtctttggataaatgtggccatgaaaatgacagtgactcgaagagggccgaataggatcagctcagatctggagctcccagtgagaccaatgtagaaggcaggtgatttctgcatttccaactgaggtacccggttgatctcactgggactggttagacagtgggtgcagcccatggagggcgaccagaagcagggtggggcgttgcctcactgaagaagcacaaggggttggggaactctctcctctagccaagggaagtcttgagggacggtgctatccagcccagatactatgcttttcccatagtcttcacaacccacagaccaggagattacctcaggtgcctataccaccagggccctgggtttcaagccctaaactgggcggctgtttgggcacacatcaagctagctgcaggaattttctttttgtaccccactggcacctggaatgccagtgagactgaaccattcactcccctggaaagggggctgaagccagggagccaagtggtcttgctcagtggatcccacccccacggagaccagcaagctaatatccactggcttgaaattcttgctgccagcacaatagtctgaagttgacctgggatgctcgagcttggtgggggaggggcatccatcattactgaggcttgagtaggcggttttccccttcacactgtaaacaaagctgctgggaagttcgaactgggcagggcccaccgcagcactgcatagctgctgtagccagactgcctctctagatttctcctctctgggcagggcatctctgaaataaaggcagcagccccagccaggggcttatagataaaactctcatctccctgggacagagcacctgggagaaggagtggctgtaggcacagctttagcagacttaaacgttccttcctgcctgctctgaagagagtagcagatctcccagcacagtgctggagctctgccaagggacagactgcctcctcaagtgtgtccctgtcccctgtgcctcccaacggggagacacctcccagcaggggttgacagacacctcacacaggagagctctggctggcgtctagcaggtgcccctctgggacaaagcttccagaggaaggagcaggcagcaatctttactgttctgcagcctctgctggtaatatccaggcaaagaaggcctggagtctaacccaaaaaactccagaagacctacagaagaggggcctgactgttagaaggaaactaacaaacagaaagcaatatcatcaacatcaacaaaaaggatgaccatgcaaaaactccatccaaaggtcaccaacagcaaaggccaaaggtagataaacccacgaagatgaggaaaaacgagtgccaaaaggtgaaaattccaaaaaccacaatgcctcttctcctccaaaggatcagaactccttgccaataagggaacaaagctggatggaaaatgaatttgacaaattgacagaagtaggcttcagaaggtgagtaataacaaattcctctgagctaaaggagcatgtcctaacccaatggaaggaagctaagaaccttgataaaaggttagaggaacggctaagtagaataaccagtgtagagaagaacataaatgacctgatggagatgaaaaacacagcacaagaactttgtgaagcatacacaagtatcaatagctgaatcaataaagcagaagaaaggatatcagagattgaagatcaacttaatgaaataaagtgtgaagacaagattagagaaaaaaacaatgagaaaaaatgaacaaatcctctaagaaatatggaactatctgaaaagaccaaacctacgattgattggtgtacctgaaagtgatggggagaatggaaccaagttggaaaacacacttcaggatattatccaggagaacttccccaaccgagcaagacaggccaacattcaaattcaggaaatacagagaacattgcaaagatactcctcaagaagagtaacataattgtcagattcaccaaggttgaaatgaaggaaaaaatgttaagggcagccagagagaaaggtcgggttacccacaaagggaagcccatcagactaacagtggatctctcagcagaaactctacaatacagaagagagtgggggttgatattcaaaatttttaaagaaaataattttcaacccagaattttatatccagccaaactaagcttcataagtgaagaagaaataaaatcctttacagacaagcacatgctgagggattttgtcaccaccagacctgccttacaagagctcctgaaggaagcactaaatatggaaaggaaaaaccagtaccagccactgcaaaaacaacccaaaatgtaaagactattgacactatgaagaaactgcataaactaatgggcaaaataaccagctagcatgataatgacaggatcaaattcacacataacaatattaatcttaaatgtaaacaggctaaatgccccaattaaaagatataaactagcaaattggataaagagtcaagacccatcattgtgctatattcaggagacccatctcatgtgcaaagacacacataggctcaaaataaagggatggagcaagatttaccaagaaaatggaaagaaaaaaaaaaaagcaggggttgtaatcccagtttctgataaaagagactttaaaccagcaaagatcaaaaaagacaaagaagggcattacataatggtaaagggatcaatgcaacaagaagagctaactatcctaaatatatatgcacccaatacaggagcacccagattcataaagcaagttcttagagacctacaaagagacttagactcctacacaataatagtgggagactttaacaccccactgtcaatattagatcaacgagacagaaaattaacaaggatattcaggacttgaactcagctctggaccaagtggacctaatagacatctacagaattctccaccccaaatcaacagaatatacattcttctcagtaccacatagcacttattctaaaatcaaccgcataattggaagtaaaacactcctcagcaaaggcaaaagaacagaaattataacaaacagtttctcagaccacagtgcaatcaaattagaattcaggattaagaaactcactcaaaaccacacaattacatggaaactgaacaatctgcttctgaatgactactgggtaaataacgaaattaaggcagaaataaataagttctttgaaaccaatgagaacaaagatacagcataccagaatctctgggacacagctaaaacagtgtttagagggaaatttatagcactaaatgcccacaagagaaagcaggaaacacctaaaattgacaccctaacatcacaattaaaagaactagagaagcaagagcaaacaaattcaaaagctagcagaagacaagaaataaccaagatcagagcagaaatgaaggagaaagagacacaaaaaaactcttcaaaaaaatcaatgaatccaggagctcatttttttgaaaagattaacaaaatagactgctagccagactaaaaaagaagaaaagagagaagaatcaaatagacacaatgaaaaacaataaaggggatatcaccagtgatcccacagaaatacgaactaccattagagaatagtataaacacctctatgcaaataaactagaaaatctagaagaaatggataaattcctggacacatacactgcccccgcaagattaaaccaggaagaatttgaatccctgaatagaccaatatgaagttctgaaattgaggcaataattaatagcctaccaaccaaaaaaaggcccaggaccagacagattcacagctgaattctaccagaggtacaaagaggagccggtaccattccttctgaaactattccaaacaatagaaaaagaaagtctcctccctaagtcattgtataaggccagcatcatcctgataccaaaacctggcagagacacaacaacgacaaaataatttcaggccaatatccctgatgaactttgatgcgaaaatcctcaataaaatactggcaaaccaaatccaacagcatatcaaaaaacttatccaccatgatcaagtcggcttcatccctgggatgcaaggctggttcaacatatgaaaatcaataaacgtaatccatcacataaacagaaccattgacaaaaaccacatgattatctcaatagatacaggaaaagcctttgataaaattcaacaccccttcatgctaaaaactctcaataaactagatattgatggaatgtatctcaaaataataagagctatttatgaaaaacccacagccaatatcatactgaatgaacaaaagctggaagcattcccttcgaaaactggcacaagacaaggatgccctctctcaccactcctattcaacatagtattggaagttctggccagggcagtgagacaagagaaagaaatgaagggtattcaaataggaagagaggaagtcaaattatctctgtttgcagatgacatgattgtatatttagaaaaccccatcgtcagcccaaaaactccttaagctgataaggaacttcagcaaagtctcaggatacaaaatcaacatgaaaaaatcacaggcattcctatacaccaatagtagacaaacagagagccaattcacgagcaaactcccattcacaattgctacgaagagaataaaatacctagaaatacaacttacaagggatgtgaaggacctcttcaaggagaactacaaaccactgctcaaggaaataagagaggacacaaacaaatggaaaaacatttcatgctcatggataggaagaatcaatatcatgaaaatggccatactgcccaaagtaatttatagattcaatgctattcccatgaagctaccattggctttcttcacagaattagaaaaactactttaaatttcatatggaaacaaaaaagagcccatatagccaagtcaatcctaagcaaaaagaacgaagctggtggcatcacattacctgacttcaaagtatactacaaggctaccgtaaccaaaacagcatggtactggtaccaaaacagatatatagaccaatgaaacagaacataggcctcagaaataacaccacacatctacaaccacctgatctttcacaaacctcacaaaaacaagcaatggggaaaggattccctatttaataaatggtgttgggaaaactggctagctgtatgcagaaaactgaaactggaccccttccttacaccttttacaaaatcaactcaagatggattaaagatttaaatgtaaaccataaaaagccctagaggaaaacctaggcaatatcattcaggacataggcatgggcaaagacttcatgactaaagcaccaaaagcaatggcaacaaaagccaaaattgacaaatgggatctaattgaactaaagagcttctgcacagcaaaagaaactattatcagagtgaccaggcaacctacagaataggagaaaagttttgcaatccatccatctgacaaagggctaatatccagagtctacaaggaacttaaacaaatttacaagaaaaaaaacaaccccatcaaaaagtgggcaaaggatatgaatggacacttctcaaaagaagacatttgtgtggccaacgagcatatgaaaaaaagctcatcatcactggtcattagagaaatgcaaatcaaaaccacaatgagataccatcttgcgccagttagaatggcgatcattaaaaagtcaggaaacaacagatgctggagaggacgtggagacataggaacgctttacactgttcgtgggagtgtaagttacttcaaccattgtggaagacagtgtggtgattcctcaaggatctagaaccagaaataccatttgacccagccatcccattactgggtatatacccaaaggattgtaaatcattctactataaagacacatgcacacatatgtttattgcagcactattcacaattgcaaaggcttggaacccacccaaatgttcatcaatgttggactggataaagaaaatgtggtacatatacaccatggaatactatgcagccataaaaaagaatgagttcatgtggggacatgggtgaagctggaacccatcattctcagcaaactaacacaggaagagaaaaccaaacaccacatgttctcactcatgagtgggaattgaacaatggtaacatatgggcacagtgaggggaacatcacacaccagggcctgttgggaggtagggggcaaggggaggaatagcattaggagaaatacctaatgtaggtgacgggatgctaggtgcagcaaaccaccatgggacatgtatacctatgtaacaaacctgcacgttctgcacatgtatcccagaacttaaagtataataataaataaataaatataaaattacagtgattcactaataatcatattctgtgtctgaaattccttttcccctcctttatctttctgcacccctacagagataggaaaaaccaaagtgttttttctccgctcaaacatcactcaacacaacacttctcacaccagatgtatgggggtttctctccacacaccaagtgatcagttctctagcagacaccaagtgggtgtaattcacttcatttctgatgctggctacctggaggaagagtcaaccccacagattaaaagctcagtcccacaagactgcctcccacttcaaatgccagtagcaagccccaggttatgacctgtacttctgatgtgctggctatggatctaggtttccaaaacctccttctcaggttttatgaatttgctggagtggctcacagaacacagggacatgctttgcttacatttacccgtttattgcaaaggatattttaattttaatttttgtttttttttacagagttgatatgatttactaacaagtattaattgtcgatcttgagacttctgaaatattttcattggctttatattttaatatgaaaattaataatttcttttttttaaattttattttattttaagttccaggatacatgtacagggtgtgcaggtttgtttcataggtaaatgtgggccatggtgtttaactgcacctatcaacccatcacctaggtattaagccttacatgcattatctgtttatcctgatgctctcccccttcctctgcccccctcccaccccttcaggccccagtgtatgttgtttccctccctgtgtctatgtgttctcattgttcagctccccacttataagtgagaacatacagtgtttggttttctgtttcctgcattagtttgctgaggataatggcttctagattcatccatgtccctgcaaagggcatgatctcattcctttttatggctgcatagtattccatggtgtatatgtaccacattttctttacaaggatattttaaaggatacaaataaggagccagatggaggaggtgctcagggcaaggcatgtgggaaggggtgtggagtttccatgccctccctgagtgtgccactctccatatacctccatacattcatcaatctggaagctcattcaagcccagtcctttggggtttgtatagaagtttcattatgtaggtatgattgattacattattggccattggtgatccacttaaccttcagccttcctcccctccctcgatgttgtaggttggggctgaaggtgccaaccctctgatcatgtcttgacttttctggtgaccagcccccattctgaagctgtctaggggtttcatatccactgacaagctatctcattaaccagcaaccagctatctcattaacatacaaaatacactcttatcactccagaattccaaggcttttaggagctgtgtgccaggaaactggaagaaaaccaaataggtatttcttagtatacatcacaatatcatatccctgcagccacagcaactttgtagataatctttaaacatcagaatggagaaagtggaagatgagcccggacagagtgcattccaaatcagtgctgtttcgtgtctctctttttcaccgtataatctgaagtttagtctcaagattctgccatctcaccactacccatttctaaatggaaatttttcagctggtcacagccaggagccacatatgaagaggaataagagacagaagacttctaacttttcattgcttggcaacagtaaatgcttacagtttttttaaaaaataaaattgatgttataactttatggaaatcagttgtaaaagggagttagcagatattttatctttgtgataagacattctactggtctgtggatatgtgaatagtagatcgttttttggaagacactaaaaaaattaaagttttgtaataagagatgtaaattaaagtcatcagtagagagaaatgggtgccctaaaatatggaatatttggagttataatgccttctaaaggaggatatattattataaccatcatttattcaataaaaactataggtacttaccatgttccaggtacatggctaatttctggggcaacaaaaatgacaaagttattgtcatccttgcccttgaagtgctggttaaaggtgacagataatcaaagaaataattgcagagcgtggcactgagtatgatgataaaagttaaaaaaaagagtgctgagagaccacagaagaggaagctatcagctcttaagatgcttggaaaaataacagatgaaaggacatgcattgaacatttattgaatgaatgaatgaatgaatgaatgaatgagtgaatggtgtcaccaaagcttatgtcatcacagtgttaaacactatatcctgaaacaatgacctggaattttgcaaacaaaagagaagattcaatgtagtagtcaactccattgcagaacactggggcctcaaggtgagagaggaagctttatgactcctacagtcccctaaaaattgagtaacatattttaatctgttacccaataacatactttaaataatgtaagctgcatgctgttatttcctagaaagatgtggtttcctggagataagttgtgtctaggtgaagcttctgcatgatagcttatttcaactatgtaacaaagtatatattttaaagacagccagtagtgaatctttcggaaagaaaaaagttatcttaaaagtagatgcattttgatttaggattttgcatgtctgctttcataaataggttttcatatctggtttcctgcattaccaaatgacattgaagtttttatagatttaatatttatcataacatacaactacatctattccctggaattatgtgtgggtgtgtgtgtgtgtgcacgcacatgtgcatatttatctgccaacatctgaattccctctatagcattgcaaatgtaaaattagtatgtcattcttagaggtgctgtttagtattacaatctgtagctaaatactaggctaattattctgtgaataagtctctttctctggtataatgtagcactcaagcacaagcgatcaataaatgttattatgttatatattttaatgttattctacaagttagtaaataaaatatctaacatagtaacattttttgttttttatttttatttttaaaatatctaacataataacattgccaactcttttcacacatgagttcatgtaacccttatgatttgccatctacaaccatattttaaagtgccaaatataaagttggtcattgtttctaaaaagtcagtgttctcacgttctatttgactcttcgtgtctaatagtgatatttaaagtaggtcatttagctgctgattttactcctgaataactccggtccccttaacactatcagatgttcctttccatcacgtgtttttctgcttccagttgaagaacccacattaaaaggagttgagtggaaaatggaatgagcaatacgccctcagtttactattccttccagatatttttaaatgaaggtacggaaagataagatggtaggtttgttgcggggcagagggaggatggaaggagagtttatcaaaagcgaaaaaataaacagatgagggatataagaatcattcccacagcctccatctccctttatgttctctgatttccaaacatctgtatttctatttttaactttataatagcaaaaatgttgtttaagaagtaaataattcctaacattttaaggataaattagtgtagtatacccagtataaggcaagggcccagatccatgaaggtatcagcattaaagaagacaaattacagaagaccttcaaaagcctttagaagcttatgtactccttaacagtttacaaattgccttatctccatttttcatctgtataaattgatcacatttcctcaatttctaacatagagcagaaccactttcatattttttatttatatgtgtgtgttatactcatacatataaactgtatttttaaggacacatttaagtgttcccttttttcacctgacactaatgttaagaatggaaaattatgatacaattcagcaaggagaggaattgcggtgcatgttattattgactacattcaggtatagttggacaaattgggtaatggaaccaaattggattatatgagattctggccttaaaactatcattctattatgtcttctgatgaaacacaattgaatttgagttgtgtaaactgaaaaaaaaataaataattgcaaaatgtaaagtgaaagatacaagagtagctacatagaatcgaaataaaactactcacgtaaataaaatatttcttacacacttaaagcacatatattaacattatataagaacacatctaaatgaatgcttatcactgagcaatatgattttcaaaatgttattcgaagacaacttggctgttcataaatcttttaattttaagctgccgatttacagtttttcctttcatcctcttgttttgaaggcttgatgtgggagtgctaattaatgttagaattcttatccaatgtacttgttgctaagcagatagaactatcagagcattttattttgaaactgcactcttttttgactgatatagcatttgaaatcgtgcttgaagaaacatttcatggcagggagccagttttctcattaagaacatattgcccatgaccaattcactggtttatttatttccacaatgcctgttgcccctgtggctcatacatgcgtcgtgttgaaaaccacatgtaaaagacatgaacactaagttgtcttatcagtatgagaatacacaatttataaaatcataaaacatggaagttaatgaaaagtttatttagaactgtatattttgccttccaggcagaagttcttactgactccttgggctgtcttagctgattgcacgttgacttctgtattcttcatatacgttttttgtctcaatttgagtttcttcagaagcagttcctgtgtcagaggtcctgtttgtttggtttattttataagttcataaaatactgatagggatctgagaaatgagaaaggggacagcaactgagagaagccttggaaatggtttaaaaccatgtctcagagttaagggacaacggaggtaggatatttatgcaccaactcttcagtcactggctgagtgtcacaaggtttgaagaagatgtgatgtccctgacacttaccagcctgccatgcaaaaggacagagtagtctttgaagtttcagagaaagcactgagccaatgagaggcgatgacctgtactagcagttggatgccagttggggcacactgaagcagtaacagctaagtgctctaggtgggccaccaaaaacatctgccatatcttctgtgggcttacatccacccaaagtgttatttttattctatcctgatctatggaagatggaaggatcatttcgtagttgtgtattcatttttttcattagtttgtacacatttatggatatcccctgctggggccactgttctaggcatggaggcagacaccagggaagaatatgacacaccaccatcattgaggtccgcacagtcagggtaatgggcagaggcagtgaagagccacggaaaatccttgaggtgcaaatgaagttgaatcatttactccatctatgggaatcatttacttcgtctactatgagtagtacaaaatcctactaccttctggagtggctttggctctttgtctggcattgagtttctttctctgtcttagcccgctggtctctgagtacccccctgaagatgcattcatatagaaaagggaggagtcagtaatatcttgtttttctattcggggtattttagtaactgcatcctgtggctgaaacattcagatgatttcaagattttgacacatgaagattccaggttcacctatgaaagaaaatagggagtctgcctgccaaaattctagttttatctaaaggatgccaactagcatatagcatgcatgcagaagatggccagtattacattttttgaaggagtccattacaaaaactataatatttagggatatgtacttattaatctagaatgagagctacagctatggtaatatgaatggaagcataataatttttccaaatagtattactgtttagagattgtttttgtttctcttccttaggttttttttttttttttttttttttttgagagaggagatagaggtggctgctgtgatggcaatgatagctatggttactgtcttattgaatgcctattattatattaacaaaaccgaagttcagagaggttaattaacttgtctaaaatcacaagcttggctgggcatggtggctcatgcctgcaatcccagcactttgggaggccgaggtgggtggatcacttgaggtcaggagttcgaaaccagcctggccaacatgatgaaaccccatttctactaaaaatacagaaaaattgctgggtgtggtggcaggcatctgtaatcccagctacttgggaagctgaagcagtagaatcacttgaaccagggaggcagaggttgtagtgagccaagatcacacaactgcaccccagcctgggtgacagagcaagactctgcctcaaaaacaacaaaaaacaaaaacaaacaaaaaacccccaaaaaatcacaaactagtcagtcagtattttgacctgagtatcttgaattctcaggtgtggctgcaagacgtattgataagaaaaaaaaaaaaaaaaggtacaacataagagaattcaagtttcattcacttttccagcaaatattctgtagaaaatccactatggcccagccacttagctaggcaatgtgagtaccaccttctaagacagagaaacaaaaccttcccctcatacagcttaccatccggtagggaggttagctaagctattaaacagatcagtacataccgggggatgagtgttgtgatgggaaattcagttgataagagagcccgaagccagaagacctcattgattttagggatcagaaaaggctttctgcaggaagtaaattttaagctgaaagttaaaagaggatgactaagctaaagtgggagtcaggggagcggaaaggagagaagtgttctaggcactgggaaggcccagaggccttattctagcattgaaaggacaatgtggctgggacattgagttcaggagggagagtggagacagaagaagccgaggagatggaagccctgtgaaagatgcagcagatatcatgatgttgttcccaacctaaaagccctgggaagcccatgaaggagattcctctggctctggtgtgtgggcagattgaagaggaatataccaaatgaaaggaagcatcctaagtaattctgatgatcatcccggagtgctgctggtgaaggtggacagagtagatttctttgagagatactgaggacttaggaagagaagacttgggagagtttgcactgaagaagggagaaagcaatagcattgtctgtgcttttgatttgaaggaaagggtaaatgttagtgaaatagcttctgaaggcctttaagaagactgcctacatagaaagcctacttctatctgccggccaaagatctggaggaacctcatcctttcattctaaaaggagtcgtggatgtagatttaaccgttctggtatctgaaggtggtgggattaggaataatttttcttcctttttttttttttttttttgttttctctgctttagttttataattaaaaaggaattttcttataaaaatacagctactgtgatatcttctgctgaacatgtggctcaacttactcacaaggtcaggaaagttgggcccaaggcataactgcttaaactcaagaaaagagaaaagacaatttcatcaccagtgtaattaagtgagcttccctacaatatcttaacttagcttctcatctaagtaatatgaatccaggtatagtgggttttggtgtttattttaatcttgtattgtcattagccagttagttacattagttacccttgggtgtattgtggaaatagatttccgttacattctttttttcccccctttttaaggatttagagtattatgcctgagtgaattgattcatagggattttacttactcattcgttgtgcgctgctgtgtttttgttctccatctggttaagctgccgtgactctctgtatagcatttgcacagtgttcacatgatgcttgggtacttaggtgtcagtttttcattatgcccggatgatgtgcgttgcgtggaaagcctccggaaccgtaaactctcatttcccaatcatgaatagttaggaaaccagagttcggcattttcattaacatagggtcttacatgccagttcagcttactacctgctaagcctcctagtctgttggaaaatgtgcattggcagttttccagtcttgctaagactcataaatagatgcctttcatatgaaatgtatttgctttggcatattgacactggaatacattattcttttagcagttgaacaaattaaaataaaaatgatgacttctttttttcagtatactaaaatgagcataattgggttaatatcttaatctggcagtcaggaattagcttgtatacccacaaccacataatttcactaagggaagtttacatgtttccttttccttgttctgttgatgaccttcctacgtgtcaataactagcagagagtttggtcagataaaggggttggaataacctggagagcttaccaaaaaaaatccttatctctgagtaccatctctgtaaaatcctggtttaattggtcttgggttcagcctgagcacctggatttttttcaaagttcccagatgatttcaatgtgcagtcaaggctgagaacactcgctctcatcatgtgtaccagagacaatactttcgtaagcaaacagcctcacctaattgtttctttctcttttgttttccctaagtctagtccacatctttgggcatggtccttgagtaggagaataagagagctattgaatggtccaagaagattcagatggcttcattttacactccagttgatcatatagaagtttagggagaacactcaagaccactgggagctactatgtaggtgaatagatttgtccaagacccactctggcacttccaagctggccctggtgtactcatgagtaaagcctgccagtgtatacttacatttccaaagacttccgtttagtaagggctgcctgatcttataggtgcctcagactggtccttctacaagtatagttgttttatttcatacttctaaatggatgtttgatattgtttaggattcaaatgtttattcagaaatccataaagtaggtatttgacatctcatagttttgaacaaaatggtaagaacaagatatatcaaaatatatcttgaaggcatgagtaccatagaccttttagaagtgcattttctagcatcttgtacaaaacaagacccttatttctgtaaaacttgatggaccttagctgggaatgtgatatcacttatccttcaatgattttttaaaagaattatacctgcatttaaagccttggcaaaatatggtaacattctagctactgaaaacccataagatattgtcccacataagatggataactttccactgaagatggataagttttagggtatctgaaccttttaaaccttgtgggtatcatttgtataatattctacttaatagtaaactctgccattcacagtgtcccctttctcatttttctagctacagttttcggcaagccatttggtgtgcttgcaatgctatcatgagctatggcttggcgttacaaggtctggagagtgaaagtgttttctgagtttctattttcaatagttattaggaaaacaattgaactttggctatttcctggtaggtttaactttcatttaagtgaggcatctgaatatttttgttgaaaatataatctttcaccatgaaactatctgagtttgagatttcagttataaaacacgctcttttcagtcattgaaaaaataacctcctgcaattttcctctgaaaaataaaaatgtgctttgatagagttttcgataattattatcatacatctgtgcatgtacccacaccattgtgttcatctcccatccatgtcattagtgaagatatggattaattccacattggatttcattgtatagaatctgggtatttatatctaaaaaaaagtgctgtcatttgattacatttaggcaaattttctcagtttataatctagaatgtgtgtttcggtcttcttctttaactggatgttctcaaagtatacttaaatggcatggccaaaccattgaagaaatacaacagtgatgactagtttctctgtgtctttccctgttcagcagttatagaggcatgattctatgattatttttgtgtaatctttgaatatgcaaaacaaattataacaaaaagctgtggactcttatgggattctaggtcgtgtatatttaattttcagcagcaaacttctccctatttgtaacttgttgatcttcttcagaaatattttcttttccatttaaaaattttaaactgagactacaatcaaacctttttcttttcttcatgtatagcaatgcttaagttatttgtatttcttataattaattttatctgcaaataacagaaatcctgaaataatagtggcttaaacaaagtagaagttaattttttatcctcatgttaaaacaaaaagtgcagacataaggagtctggagctggcagagtggctcagctgtcatcagggacctgggtttctgtatccttagcacactcaaggttgcctcatggttcaagactgctgctagattaccagccatcgcattaagaaggaagctagaaaagcgaagtgggaaaccaagagagttgtcctcttctttacaaagagtctttctgtggatcccatacatcacttctgcttaggtcttgttggtcagagctaattcacatgaccataccttgctgacgggaaggcttgggatgctagaactgtagttgggtgtaataccatcccaaatcccaaatatatttggtggctttttttgtttgtttgtttgtttgtttgttgttttttcgctaagaagaggaaatagactttgggataggaaatagcagtctttgctacctcactgttttcagattatgatattgtaagatatgctcaaaatactccaagtacaaatacttacattgcttgttgacagagtaaaataaattatataagtaaagctagttaggaacttgccatattggcagttcattttgaggatatttctaaaaatcatggactgcaggaggagaaataccaaagccaaacacataaaaatttcccacaactatatgaaaattccaaaatttatctatatggtaatcatatgtctggtgactttatttattcagaatatctctaagaaagagagagggttgtatatttgaccaattgtttttgtcaattcagagctgttgaacaattataaaattccaaagttctcagaaaatacttggctagtcatggtattgcatactgtagcttctttaaacactctgcagaattcttgggagttggtcatcagtagcagacggtaagaaaggttatgaagtctcctggttgtctgttgctaaaaaatcatcccaaaatatagtggcctgaaacagcaacaattattgatttgctcataattctacagtttggacaagattcagtggggatggcttatctctgccccatgtgccatcagatgggatagctcacctggaggggctgaaggatccacttccatggtggtttaatatacacagctatgaagtcagtgctggctgtctactgggaggtctcaattctcctcacgtgacctctccacatgactaggctgagcttttcacagaatggcagctgatttcaaagagggatcatcttggagaataagcattccaagagtacaagtcccagtgtgcaagtacttatccagttttttgttaatgtctcattagccaaatctagtcccatggcaattgggaggggctacccatggatatataaataccaggaggtgtggttctttggaggccatgaaagaaactttctgccacatttaagttctcaggcagaaaaaatagtgtttattgaggtactaccatgtgccggtcactgtccttaaacacagagctgccctgcataaaaggtcttattcgtcccattttccatttaagataaatgaggttcaaaatgttttaaatgacctgcaggaggttacaaaggtcctgtggtgaggctccatgtttcaatctacctctgaaaaactcctaagtctttgcactttgcagggcctccagctgcctttttaaccacatggtccattgtcactgctgcaggcacgtctgccctgtgtgctttcactctaagcacaataaaagacttaccacccgataagtctgttttttgaattgagaacaagagaaagagattcctgaacattctaattaaccaagtaccgctcctgtgccacagagatgcctagcagtgagagccgtaaaaggaaagtgcttggcagtgaagcaagacaagaaacctggtcctttgtgctctgccccattgcaagctttctcctagcaaacctgaccagtgacaacagtgtccaaagtcttttctagaaaggtctccatattggtacctttttcctgaagtaagggcttataacaagggcattaaaatatgctaatttctaatgctttctattaggcgtatccacatatcaaagcttttactggaacacctttgtcaaaaaaaaatataggtcatgcacatggccatgaaattccattctttatattttaagcagcatcaagattgttcttttccttcgctgtttggcagattagaattcctctttaaagtgggagaagttagttacttatcaaaccatttgattaattagctagacctgtcaggccaaacaggactagccaagtcttttaaatctcttaatatgagccaattttcacaataacttgttttattcatggccttcacattttaaattcttgctcattagtgacctggtatttgggcttgtctgaaaggagagcatccgttgtgttaaacagggctcattatggattataggttttcgaatggggatgcctatgcacaaaagatcgccctcccattttcctctgaatagttaattggaccttcaccttgtttttacaagcaaaggctaagcttcaataaggagataggcttttataatgccacagtttgggttgtactgaagagctggtgacctatcattatcaatacagatgtggaactaaagtacagcatgtgtttggttttgctagagacaataaaagtaatggctgtttttaaaaccagtaaaacactgaacttgatagaaggagaaattcattgaatatatcactctgcaatagttcaattccttgagtaataaaatacaaccaccaaacactcagaaataaacactagttaaaaaaaaaaaatgaaacacaagcctgaacccacaatacccatgcattgactcccaagaaaacagatttttacattccctaataaatacatgtattactatatccccaaggttttagcatcctcattgtatatcaggctaatgtctctaatacaaattctttttgaatttttcttagttaaaataatcttctgttttggtgtgtattttcaatttgttttaagattctgtttctgttgcttgcagtaattctttttattttcttttcctacagaatttactgtttatttccaaattactccagaccctaatagtctattttgcttttggcagaattcgtgtatctattgagttgcattctgttttgttgaatttcactcaatgcgtgtctctccaaaggcttcgttcagggacaaaacattcaactgcttctttagggcctttgggttgtgtttgtaacatgtatccacaatcagctgtcataataagccgagcatcctgattaattcactgtaccctccagtcgaagtattcacggatgtaactagttgaaatgcggatacacaagttcctactggtcttaaaagaaatgatttttctggtagttttataattttagcaattcagatttcgtacatttgaggttagaaaattcagcagacagcctaaatgcggcatcatgctaatggagtcctggaagctgctggtgttaaaatgagtaaattaaggagtcaacactgcttatttaggcacattaggataaaatagtatgagagctcggacttaacaaaaatcaattcagcacgcagagtgcacatccatcagggctttgttatgatgtcagggcgagcagcaaccctgttttattttatgaagaatgctacattagcatcatcgcgtccttggatggctgtgacatttgctgttatggaactactttgcggcagccacagggcccccagggactactccaactacattaaaaaattaggttggcatcaaatgacttattgaactctgtattgatatccttgggatttggttgtcaatctacacagtagttagtctcctttcacagcgaccgcattaagtaggaagttgtaacagttattgacgatttgagcaaattattttcctctatccagcccctacatacaacaacaatagtaataaacacagcttgagtgaaaagtatattccacatatggcatggatgctttgtttacatggtacgtggttttatttcacaataactcctaggtagatattatgtcctttctgagatttaagcattactttagtcacttaatcaaaaatcataaactgaagctcatgccattgaccccagttatataaaagaagtttgaaattttcttttgatctaggttttgcaccctgatagacttcacagataatgtaactaattagtaactgtgttttatttttgtgtacccatattctccttgccagaaaaaaaaaaaaagttgttggaacatactctttgctgtgtttcctcttggaaactattagccttcattattcagagtattggaggttagatatttaattttacaagcctaattattgactaacattttaataaacatttgacatttattaataagaattcaaaatatataaccatttaattttttacatactatctaatatctaatagtctcatatgaagtagaaaaaattacattcatgaaacactacactctattcatattatgatcacaccatcttttgttttccttcttttaaaatttttattttttgattatgaaattaatgtgcattcattggtaaagttcgggaaggcataataaagaaaataaagatgatatataccaattaaaggtaagccctgctaatagttgatattctttcagaattttttatattcattttcttctgtatatgtatacaattttcctatgtttgctttatatatattgttttgcaactagttcatgcattctaagtatatagcagaatttgtttcattaattacttgctattggaagttggttctgagctattttgaggatgaaaaacgtttctttgaccattcctgtatatacaacttctatgaaagaggcaaaaggttatgcatgctaaatattcagatgtgttaccaaaataccatccagaataacacctatgtaagaagttccctgattctcacttcacttttagggttaactgggacagtatggacattcttttcttaattcagtcattcaaagccatttgagtgcttactatgcattaggcactctgcaagacccaagagacagcagtggtaggagacagataatcctgctgcttacctggaatgtaccatgcaatgggtggagactaatctgaaataaataattgtacaaatgcctttctaatggaacttgtgctgtgaaggaatgttacgtcattgaacctgatctaggatggagagtcaggaaaagcttccctgaagaggtgacatttgacacttgaaaggggcaggtgtaatgagtttaatatatactgtgttacatcatgctaataactattaaccattgcatttttactgaggaatgctatgtatgttttggcacatcttaagtcagataattttattctgttttattgttggaccaaaaaaatggacaagttctcttttccacttctcttcccctttttgcccacaactacaattaacatgtgatggtccagaactattttttccttcttttttttttttttctatttaatgttacaaaggtaaacgtgtgccatggtagtttgctgtgcctatcaagctatcacctaggtgttaagcccagcgtgcattagctgcttttcctgatgctctccctcccaccgctccctgctcccccgccccacagtgtgttgcagaactatttttttttttttttttttgagacagagtctcactctgtcgcccaggctggagtacagtggcacaacctcccctcactgcaatcttcgcctcccgggttcatgccattctcctgcctcagcctcccaagtagctgggactacaggtgcctgccaccacgcccggctaatttttttgtatttttagcagagacggggtttcaccattttagccaggatggtctcaatctcctgacctcgtgatccacccgcctcggcctcccaaagtgctgggagaactattttttaaaggaaaatatggtctccaattcagaagagttgcacatctccaggatagggtttcatcttccaggcagtgtattcaggcagctcaacactactcattttttcacctgagccagctgaagttctagcggcagttgtctaatgatgatttttaagagtcataagcaaaaatgaggggacattggagcagtaccatatttagaatgcgaatattagtgcctccatagtctgaccttttctctctggacatattttatccatcactgtgtccacacatgccaaaatgactagtaaggaaatgaaaatatgtggcctttgaatgcaatttgtgaccaacattattttttgattaacagaatatatttttgtttcattgaatcaattattttatttagtatcagcattaattgtctacagacaaaatatctttggttctttgttaaacatttcaaaatgtgctttttattgtataaaactctacaactattatttccctagaagttcaatgcatacattgataatttattatgataaattgatgcagaatattgcatgatgtaatatgagtttcatgttgaattaagccatcacccctaaatatgaatctcaaagagctgtggctatttggtttctttatccaaagaaaaaatgattcataaccattgttgatgcaaatattactacttaagatgcaatgggtttctagtttcctctttgctgtgtaaaatgtatgcttggttgaccagaattcagtgaaacctctcattagggcactacggttcattaaggtttaaagaggcatcactgaaatttgaattggccatgctgtgattgccaagtctctctgagtggtaattgggctgtgttatgttgtgtgctttactgctgcaatggtttttagagttgttaaaaaataataataatagtgattaagctctgtgctatgtaaaactggcaagtttcttagtgatggcatctttttgtttataaattgagatttaaaaaatcatattcttacaaaaaacattcaaacaccaaatttgaatatcatactgagtttgttttttacttattggaaagagtatgttaacataattttgtttctatttcattttctcaaactggaagaaatatctggatgtgcacatagcactagaaaaatcaataagtaatctagatattgatttactgaatacccaacatgcagattgagagaaaccatattcaaaatgtgacaattcagttaaaagtgaactgaaacaagggtgcggttactaataggcagggaattactaggcagatgcatatcagagccagatccccaagggaagggcttatttcacctacgtgatagcacagtttgtactcaggcacttgagaaacaataatttaccataattgaaccagccacaaatatttattttgttaaatcagacccacaataccagcctgtctgtgctttgctggctagaaaatgtcctcatgagtcttaaatttatccttaaaatatatttaaaaaaataatcttaactggctttacctgtacctagttcaaatcgttttctctttatgcacggtgaaatctcaatgttggttactgtttctgcacatttccctcgggatggtggtttgtgagcatacctacctgtgctgctgtgttgcgagcctcactttgctcacctgggtttccccaagtgttgtgtttcaccactgggaggaactggccactgctgtcacctcaccacctaccataaggcctaatatatgacatatgtctaatatatatttgttgaataagttaattactctggattcctacctgtggcgcagtggctgacacacatatatctgcactgccttttgtgagtgactgaatgaacgtatgcatttgccatttgggaatattttcagttttatcgacgtgactgtttagaggcataatcacagacttataggaaaaaaacgtttaggaaataattctttgcagatatccttttggaatatccatgtaagatttgccttttgacagttactccccaatcctcctgcctaccttatccctcccattaaaaaaagagcaacaacagccgggtgctgtggctcagacctgtaatcccagcactttgggaggccgaggagggtggatcacctgaggtcgggagtttgagaccagcctggccaacatggcgaaaccccatctttactaaaaaatacaaacaatagccaggtgtggtggcgggcgcttgtaatcccggctactcaggaggctgaggcaggagaatcgcttgaaccgggaaggcggaggttgcagtgagctgagatcgcgccactgcactccagcctgggtgacaagagtgaaactccgtctcaaaaaaaaaaaaaaaaaaaaaaaaaaagcaacaacacaagatatctggcacacgttgtcctgccgagttgttgtgagtttgtcatcgttttcgtttgttgttgctgttgtgtaagcttcacgtttggtgattgttatgttcttggggatgcattctgactatattgggtccccttgagaccagtgttgcaaccaaaagaagcagagaagatgtagtccctaccctcccgcacctcgacttcatgcctttgcgagttttttttttttttttttttttttttgagagggagtctcgctctgtggcccaggctggagtgcagtggcacgatctcggctcactgcaagctctgcctcccgggttcacgccattctcctgcctcagcctcccgagtagctgggactgcaggtgcccgccaccatggccggctaattttttgtatttttttagttgaaacggggtttcactgtattagcctcgagttctttaactacttgatcttcactgaattgatcaggctgagaaagaaacagaacagtgtcagaagccaaccagtcaggtgaaaatattgtgttttgcaagtaaggggggttgaagaatgagagggatgggaaggagggaggtacagaggaggggagaagagcaggtgcgctaaggtatggaatggcagtttgaggaaggctgggtccacatcttctgttctgatgcaaccccctcactgctgcttcctagagggaccttcagaaagagccacatttgttttcaaggctttctggagttagacttctacctctttggggtgccccactggtctcaagggaatccaacacagtcaggatgcatccccaagagattgtaaatacatacaatttaattgttataattatctttttcctgtttgcatctcagttaaacattgtaaaaaatgttgagatgctacttctcttaatttcagttccctcacagagcagagcctgagtcaagatcttgagtgcaagcagtttacttgacttgtttatttgacttagcctgggaagtagaagtgaggtagagagtgagctaagaacaggggaaaacccagtgaaggatgtgctgtttagggggttaccactgtgggcaactgagttttggtcctgctgggaaccctctgaagaaccatgtagtaaatgtaacctcaaacctgcctatctaagtagcactgttcaatagaactttctgtaatgatggaaacattgtgtgtccacactgtcttctgccatagccacatgtagctgtttagcatctgaaatgtgactagtgtgactgaggaattacatttttagcattagttaattttagttaacgtaagtgtaaatagccatatatagctagtcactgctggattgcactgcacaggtccaaaggattggatgttcaggcgtttatcactaactctcattccatacgtggggcttatggggctgtgggtgttaactccctcatacttccaacctgccctgcaaggggctaagatagctgccatgacttaggagaaatccctgaggaagaaaaaattgagagaatcaaagtccttaagaggagacactgccttgatacaagaaaactgtccctgacagctgcagaagaaatcacaggctgagaggacacacaggaggcacaaagtacccgtgtgatgccaccttatgaggcattgaaaaagtgacagtttggtatattcatatctgtttttacgattctgaagtatcaaagttcacatcataagaaacgtaattctggtaataatcctgaagttttcagttaatttaatgcttggaaacttttaatgttttctaaatagctttttttcctctcttttaaaacttcaattatttcgattttactctaatgtaggtactaggacaaaacggtcacctcattagtatgtagtattttctgtgttttcaattattacattttgaaatgctagtggaaaatgctgtctgccttacttttttattttcatagaagtgtatttgaattggtttcaaccaccataaagactatttcaacttatttgttactaatgatgccatagcttagtaaattgcataagctgaataaaaatagtataacaaaaaatgtggcaactctagtgattcaaaatgtgaaaaatgatgaggctctattttcttaaagttagatttaaactattctatgaatatttacattttaaaaaattaaattttctgagaaaatcttgcttatccctaaagatacccatcaagctgtaaaaatgtagagtttatatagataaatgaaactacataatatattagagtgttgctatgtagatatgaaaacaaaatttactcttgctttttgcatttctatgaaataactgtttaaaggttaggaataaaggccaaaatttgcatttaaatggatatattttaagaagaaatgccaatttgtgacctttacccttgccgctagtatggttttttttttttaggattaacaatcaaacttcagaggaaacactagaaatataagcaaattgatagaaaatgtttagtttaaacagcttcccagaaaactgtttttatagcctgtagggagggctaattgggccttgtcatgaatcagtttaatcatgtaaaatatatttgatgactgcaatgatagtgaaagattgatccgtagtggtataaatcaggggtcccaatcactgcagactcagtggaaatgaatagttaaaattcgaagggacccattaagtgtatgatggcaatcacagatttaaggcttcattctatatatttatgtatgcattttaaaatcttaagaagatacttcaaaatatattagagaatttttaaatttgtaaaatctacaatgggtactacaatatatctacctgtgaaccaccacagttgctggttgaaattactttattctattatcttccaagttgtattagccattgttagatttcagtgttatcagggtaatagaaattaggtagtgattcaaagtgtgttttaaattattcctctcttttcattgactagttgcatgtctatgagaatatgtgtgtatatatatttatatgtgtgtatatatgtatatgtatagtctatacagattgactatgtataatatgtgtgtatatttatatatagactatacatatatagactctctatatatacatacatatgtatatatgtttgagtgagtgaatgattgagaaacagatagattcatcaaagctgactctcccctttatgtggtatagtagaactgaatggaacatgtttttagtttagtttttgctgatgtgtgcatgtaaagtcctctataacaacctttttttccaaaactgtgccatttccggcactgctttttcctccattgttactttttgtttattacttgcaccttggacacatgggggaaaagtcaacctccctggacaggttcaggaatcagaggatgaaggaaagaggatacatgaagacatatatgaagtaggagttctatttagaaatgaaagaacatgtgaaatatcagttaacatcggttcatatggagtccaggattctatttaatatatcagatagtcagtaaggtctaagagaggcaactgaagtaccctatttagaggaaagttggcatcatggaagtttgttagccattgcctgggctcagccattaggaaattgatattaagttgggacattcagtccttggtctactagagaaaaagacttagaaatctaggctcttaaagtctgagtgaagctaagggcaagtacagaggggatgacccaggagcacagtgcctatgggactgactctacctaattgtagttgcttgaggtcaatgtatcattgaatccacttgctcagatactggaccagagcaatttctactaccattgctctggaacagggcattgcaccattctcttagaaactggaccttaagaaactgtggccatttcaattccattttgatatttattacagatttcttagtagatgccagacagtgtgttaggtcccatcactcatattgccttagtatccattagggctaagtaccattttcttagctacactcttccgcatgtagcttatttaggaaaagtcgggcaagtgggttacagacatagtagaaaacattatgtcaaataacaacctgcccagcaatgaaagattttaccacgtcctttttgattcctatttttgctaaacaggtttaaatccttaaatggttacagaattcccccaaagagtagattatttgtaggtattagacaaaaacaatcaaacaaacaaaaaaaaccacaacaccataaaactaataaacacacacaaaaagtgaggggtccgtactcaaaaaaaattttggaaaagagtgggttaagcaagttattttacttctactgcagaggaggctttcagtttgctgttacgctgtaatacccaagagagactaatgtatgcagagtttcccaaaatcatttgatctgggaatagtttgtattgaagcatctttagtgactggtgtcctgtagcacaaattcgttaaaattccaatgctccagttttatccatcactaggaggagctaacctcagagaaactcagggaaggatgctgggaatggacctgctggttgtacttcaaaagaagcaaaggcaaaggggtccacacagaagccccaaagagaatcaaggttaatgaagggctctgcatatgatgactgtctttaaagtaggaatcctccaatctgaaatggcacagacactgaagagatagaattaaaatgtctaaaattatgaatgttatccataggttgcctatactagtcaatcaaattctggaagatggaaatgactagataaatccttccccttgctcccatcttgaggattaatttatgggtaagaggtccatagaggcttgttaataggaaatcagacttttacagctatatgctaacttttggcaatgatagacagttaaacagaatacttacctgaatgaatcagtttggcagaaacatgcacaggatttgaaaattttatgattccaaaagcatatctgaacatatgccaattgataacaaatattagatgatccaagaactatttggtgaaataatgaaggtagtttgtatagaaagcacctgtgcttatagagttcataaaagtttttcaaaatgataagaggaaataaaactcttgtaattaactagaaagatataatgtattgatctgtaaattaaagaattttaaataatgagtgttttctctcttcactcttgagcctgtttctttcctcaagaaaattttgattcctaaagactaaagtggaagtgtttattatgtatgcataataaatatctagaaaataataaatatctaaaaaaagacaaatcaacatctgacatgaactttgtctttccaaagaccatagaatgggctatgagtgaatatctttacaaagacaaacttatcattagaacatttttggttgtctaacaggcaggaaattgttaaaaaaaaatcttgttgcagtaatggagaaaaattagatgttcataggagctcccagtgaggataatcacatctgaatgcatccttgaaaataaacacaactcaacattttagtgttctattatttaaccaattggagtatgaatggatatgtaacaaagcttcaataatgtgtttcctcccagtaattgcgtttctttgtaaatgtctgtcctttgagctaactgtgtcttgaaatctcctgacttcataattctcaaaatcaggtgtctgagatggtactacaacaggctacttgagataagagtgaccatatttaatgatattgaccagtcaactaaacaaaataattattttgatcaatctttaccaactaactagcaaaatttaccttactatgacaaattctaatgttttacataggaaacaaaatactaatggctttacctatatcatgcccaaccaggaaatttaatttgattagtgttttgcatatactaaaatatttctatctggatacatgcaaggctccacagggtggggttagatttttttttttcaatgatacattccacattccccctgagggaaatgtcaactattatcaggcacagccaaaaaacaaaacaaaacaaaacaaaacaaaacaaacacatggaaacaaatgaaaagaacaaactgaaaaagtgttaagtccatactattgggcaaaaatagtagttaacatatgtaaaacaaggagaattgttcaaagcttttttttcttcttgatatgaatttgttgtaaggcaaatatcttgtttgagtcatttgtttattgtgtgtaagtgtatgtgggtgtgtaatcattttgcccatctcttttgtcaggaaccattaaattcagtgcccagaaagatgttgcaaatcagctactataaaattagaatatgctagaaacttgtaattaatagtataaaattcttttacaagaccagacgatggttctacattttatgttatattaaaaaatgagaaaacgtcatttgtgaaatttaataaggcagaacattattatgttcatattgaaagtcagactaatctgagtggattaagggtgccttgtggaatatcttgtgttagttgactaattcttgtcctcattattaatgttctgcagcaactgtaatacctacaagtaaacatcaattgaaaataacttcataaacatttcttaatcaccacagatagaatattgtttgctgtgttaatgcagattaaatagcataaatttacttttatctctttttaaaaaaataaattttgaaaagcagattagtgaatggcagagctgtcacccttgataaagctgtttcacatctttggagagcttaaacatgatacactgaagtgtgttcactgtcccttatgagcattaagtggtttgtaagataaaagagagaaaccagaagtgagaaggtttctattacaaacttagtcatatcatataaagggatggcgtagattaaatccctactcccaccctttgccacctccccttcactccccagaacttcaactgtcctttatgacacacaactgagcaggagacatagaatcacatttttcacagggatttgaaatgtctttgtggtcatggtctggcagtaatagaagccatatgctgtgggtcaggaagaaagctatctcgaaacagaagaacccatctcctggcctaatgaccttgggaacgtttagtcatttcaaggcatttatcgttgaagcagcgtaggggtcgtttgggctatgttttcctccatgtgactccaagttgtgagggggagaagtgcatattatccataaagaagacagcatcagtgataagtaagtggctaatgtcagtagcaataaaattctcttccagggcacctgttagctgatttgttgtagattgatttgcatttccctttgtgattttgaactccttttagcttcttaatactttaaaacacaagtctgatggaatgagagatcgcatgaaagaatttgatttaagctgagtactttgtggacattggaaaagcagcttttgtcttaaattacattgcctttggaataccagcatgtaagacaaagaaacatgatctttgtaatggctgttggcccatctccagttgacacacacatgcaagttatatgggctgggtcacttgaggtttcccatttcccataaaataatgtttatcatggcatggtggggcttaaaattggttcctaagtaatttttgctccagtctcttatagttgtctctgagtatgtccccagaactgacagtgatttggaggcattgaccatttaacatgatactggtggacattgatcagatggccagtatttgggtaaaacttatatttggaagaggagaactgatttttggatattaggaaaaagagagccccctccccaacttcaccaacactgctgaattccgattataggtataagcaggaattttctaaaattttagattaggttttaccagaaattctcaatattctactgctgaatctttaaactaccagacaccttttgctctccattttctcaaattggaaaggggtgatgaaaatggtaaaatgtctcttccctcttcctttgttctcagggatgtttgttactcatccttctacttgcagctagtatataaaacatcttttagagtctccatgtcttttttttttttttcttttttgagatggagtttcactcttgttgcccaggctggagtgcagtggtactatctccgctcactgcaacctctgcctcccaggttcaagcaattctcctgcctcagcctcccaagtagctgggactacaggtgcctgccaccatggctggctaatttttgtatttttactagagacggggtttcgccatgttggccaggctggtcttgagctcctggcctctagtgatctgtccatctcagactcccaaagtgctgggattacaagcgtgagccatcacgcctggccagaatctccatcttaaactggcttcctgaaagagtaaattgatcaagcttaaaataattttctgctgttctttttttccagtagggacaaggtcttgccatgttgcccaggctggtcttgggctcttggactcaagcaatcctcccacctcagcctctcaaagtgctaggattacaggcctgagcccccatgcccagtctcctggtgttcttggagggttttcctctgtaggtacttgttcatttgtgtccagagagacttgggagactataatcaatactcttatcagccagaacaacatacattaaaactaaaagaaaaagaggaaggttgagttaaactggccctaaaaatattgatgttctctcattggaaaggttgacaggttctttcaaggaaaggtcatttcaggaacataagaagtctttttcactttactctttgctcttatctgaaagctcatcacagtgttctataatattttatcatgattctgataggtttcaggatgaaaaatggaatttggcttaaagagtgcagggctagtatgaggacactgcactctgaaataagtcagagtgatttgtcttcatcagatgttccataataatacttaacttttactgtatgacgtgaaacgagtgttattatttcaaaaaatgtatttgtaaatttcaggtcaaaactaagaataactctaagagtgtaaaaaataacatattttaatgttaaatttttttattgcttacactctaaatattttcctttgaccaatatgagaaatattcccattgatatctctgtgcatttaaacaattgtgaaaatagagaactcagttatagttaaatgactgatgttctataagataactttatcacatagataaaataatgaagaaaagaaattaaataggcattcctctgagagtttctctgacaatcaaatcagaggttttgattgaaaaattccctcattaatgtagattgagtgaatgaactaattactttgtaatttgttctaatagaaactttccactgaggtgaggggcaaggggaaaccccaccgtcttcactgtcatggaaaagataaagaagtaatggatctttgaaatatttcccctaactttcaaaaccttagcttacagtgttggagactacctgagattacctttcaagtagatgttttcaggaaaaaaaaaagaatatagaaaggcagcccttgccacatacaatgtatttgaatgacactacaatgcagcttttgtaggtgatcagatagaagtgtcttgctgttctattgtatttcagcttgaatatccttcatcaaggcagttactgcaaaacaatgttgtaaatgaaagttaaaatgacattattataagtaaacttgagttttcttttattacctgtcatttataaggtggtaatgcaccacgaaaggaattgcatattttgggtaataaagaaatattctatgaccttggtattacttatactaagattggttttaagacttttattttgggtactatagagtagagaccatgtcattccccctttcctaccccatttagacattaagacattcttagtgatttttttataagtacctgtcttcatccattttctgctgctgtataacagaataccaccaactaggtaacttacaaagaaaagaggttttttgtttgtttgtttgtttgtttattcacgagtctagaggctgggaagtccaaaattaaagggctgcatctggtgagtgccttcttgctgcatcatggcatgattgaaggcatcgcatggcgagaccgaccgttctctagagagaggaaatgtggcctaactcccttcttttataactgtcccacttctgcaataataaacccactctcatgataacagccttcatccattcaggagggtgctgccccctgacctaatcacctcttagaggtcccacctctcaagatcacaatggcaattaaatttcaacatgaattttggaggggacattcaaaccatagcagtaccttttttctgaagtctccccagagcagtaatctttagtcctgaatatttcactgaaacacttacatgtagaggtattttcttaaaattgagacctgtctttattaaaaattatttatagtgatactcttttctgttctgtttacagtatatctgaggaaatataaagtgtatgctattaggctttgtaatgtcttattattaaggcagatataatagctttaaagagaacactgatggatagctttttagactcaaagcagatatttgtgtgcgattaaagtagaaaatgataccctacaattgttgagacatttttgatgttctttggctttccacactgatctttttctatctctacagttagtttggttttggattaatgtttttcattcagatataggaaatcagtagcacttgaaatgccatccatagtacactgaagtcttcagtgaaacaacagagtccaatattcaatcagaaaagaaaatgaactctaggagtcatttccaggagacatgtctgaagtcaaacttgggctttatttcctgtcttcagagggtgcactttcatagttgttttctataaggttcaaatcccagagtgtatgtgccactctctctccatttataccataaacaaaaattcaggtctttatcatttcacaccctggctgtcaatgtggctgtctctccagcttctggtctgctagctccccttctaccatccccaactcttattccctggcttaatttttataaaacaactatctgatcatctcatttcatgttcattaactttttttttttttttttttgctgcctctaggatataatgtctaggctctttgtgttatgactggggctaggaaagaaagccattatctaactgaatggcctctgaaggaaatattagagcttttctataaatttatttttctcatccttctaaatctgcatgtttgtatatattttattatatatatatactttacccatacagtagtatatgcatataattgatgaataaaaatacatatcttgggatatgctcaaaatacattttactaagagaatgcatacatgtggcagttatagattattaatgtcactttatttttctcttcttacttttccactaggtgagcaaggcaggtaaattaaatctgtcctgttgatggactgaaaactaacctcaatacattctctcaaatatgctacaggagttttgatttgttcatgaatttatttttattttcctacaaaggcaactggtaaacactgcctcgcttttgtttacctcctttctttttgacttttctttctgagaacttttgttttcttgggcatatttcaaagagctactaactttatttcttacatttggcccaaactggcttctatttgcccactcttgttaactcctttgccatgagactgtacttttaatgtatactctttgtttgtacaagttcttttcttttcagtagttgtttctctttcagccttaacttatggccctatgttctgatgcttgcaacctgccaagtactttccaagccctacacccctgtggtcatctggtacaattggtactgccattagcaccacttccaccatcaccaagctgtcctgcctccattagttcactttgcctcttatgcttcttctctcacatagatatctcagtgcatatctgagactatcctggccttccacctcatggttcactcacactgattatgagtttttcttgttctaggagctaaaaatatctctcctgccatggcctgagggtctcaacattccatattctcttcatagtaagataattttttttcccccaaaatcccagtagtctgggtggcaaagtactggttcaaaaaagttgatagtcccagcactttgggaggctgaggagggtggatcacttgaggttaggagttcgagaccagcctggctaacatgatgaaacctcatctctactaaaagtacaaaaaaaattagccaggcttggtggcagatgcctataatcccagctactcgggaggctgagacgggagaatcgcttgaacccaggagatggatgttgcggtgagccaagatggcgccactgcactccagccttggtgacagagcaagactccatctcaaaaaaataaaaaataaaaataaaaacgctgatagaagggcatctcttcataacactaactgtcccctgactacctcaacctaaatactccttcttgttttctttttcctactttagtataaactcagatactttaagacaaaaggggtacttctttctctcaaaaagaaaggcataaacatagtgtcctaggcaaactggtccttatgcttactataaatcaatccaagacaactaactatcaaaaggaacagtagaatattctttctggaattttaacagaagaagaagagccttccctgtggattttctgagtgatatatggattcaagctctttacattctggccctgtctgccttcttaaacgtatctcccttcttctttttctaatattcctgtcacattgagctattctctatttcttagacacagtctacctctctgcctttgtccatggccttaaatgccttcccagccacaatctagctgttgaaatctcatccatccttgaatatctagctcatgtaatggtaatggccatagaacagcttctactaaccacccccagcaaaagcaacctctttctctctcatgtgatgccttatgacatttatttcataatcttgtcacatcctcactttatgatttctcgtatgtaatttaaaaaattacataatatctaacctgctagtttgtaagttctttgaggacaggttctatgtcaaattcatctttgtatattcctgacagcctagttacaatgatattaatatattggagtcacagttgtatttctagagaggattatatggctgaacaaaatgtttcacaatgatatgttcttctgatggaattttttaacctaagattactgagaatttcttggtcagcaaaaagacaggagtatatcattctgacactcttttgaggcacatgtttattcaatgtccaccctctcacaagcagatatttaataattaaaaaaagaaaatctgcagcttgattatatgcttagccaagaaattcttttgcagttctaaggaaaatctccagcaaacccaattactctcccagcaatgcacttcaaaggagagcagaatgcatttcttgtacagaattcctggatatgtttgatcattagttagggcaagtagtttgacttgaggctatttactcagcaggaataaaaagtacagcattgcttcaaccaagaggagtgccccataccttccccaagcagaatttaataatttgatctgtcagaggaggtacagaggttggctatagaaatgagtcacgaccagtcagatttggctgacttgtgggccattaaaaatgttccttcccccaaacggcattttttaggaataataataacagaaacagttggcaccatgtaattgaccaagaacctgagaatttcacagcagtacttatcactgaaacagtttttgtttttttgagtctaagccaaatccacacttgagtatttttttaatttatccaggtgttctatggctaatatttatttcatctagcaagtgccacaaagtatttttgatgtagtcaaaaaaagtatttctgatgtagtttaaaaaagtatttttggtgtagtcaagaatataacatgatattattagactcctaattacaaatatttggtagagactatcagtttaagaaaaaattgcattaaaatgtcaacttttttctttttttgagacggagtctcgcactgcacactgtcacctgggctggagtgcagtgacgatctcggctcactgcaacctccacctcctgcattcaagtgattctcatgcctcagcctcctgagtagctggagttacaggcgcacgccaccatgcctggctaattttttgtatttttagtaaagatggggtttcaccatgttggtcaggctggaagttttttcgaaaactaaatatatatttcattatataaggtagactttacactttttgggaggaaaatgcacatcaccttttaattttttttttgagacggagtctccctctctcacccaggctggagtacagtggcacgatctcagctcaatgcaagctctgcctcccgggttcacgccactctcctgcctcagcctcctgagtagctgggaccacaggcgcccgccaccacgcctggctaattttttatatttttagtagagacagggttttgccgtgttagccaggatggtcttgatctcctgaccttgtgatccgcctgtctcggcctcccaaagtgctgggattacaggcgtgagccaccgcatccggccttaatatgtaatttttaagcactttaggttttaattaaattttatttcagttataaaaatgttcattaccatttggcatattcctcagctaaaataattaacaataattaaaattacccatgcttgattttcttatttcaatttttataaaagttatgccttcagtttatagaaaataaagaaacttatgtacacatcgatgctttagacaatatctatttttcaccatgaatatcactgaaagaaacaagtatcttttcatctttagacaaaagaaaaaaaagtactagtgtatcttttattattggttactttaaaaaaagagtaaaactacttctgtaacattaatttttaaaagttaattctcatattctaatgggagtgtaatgagtttttctcacagtgaactctaatgagtttaggaacgtgctgccatatttatggtagagactatgcaaattggactgatgtttatttatgcatttatttcatttgggaatctagttttcgaccttaagtttgctggagaatttgttacaggaaagaaagtgtatgaagaagtcttcttgtcccaggtgtggaattaaggtaaaattaacaaggaattgaagttatctttgatcatgatttttgattccatttttattcactttgaggaagtgttgcctgttttttttttttttttttttgatgttcagcagagcagtacaatgcaacacacagaagcataatgttgaattttcataataatgtttgtgatgcaaatgaggcacacttcaaaaagtagaatgattagcatttcttggtaagatgacagtccccccttttaaaaaaaaattgttcattagttttatcaatagattacatatccagatttcaattttgagtgcatactttttgcttataattataatgtgaatttaaatagttttagattgtgcatttaaaacaattcttctgtcactgtattatactctgaattaatgagctgtttgccacctcagagccctttgctttgaaattcagtccagtttaaagtgaactccaaccatttcaggccagcagctcacagaaggttgcaggattaatgagctccaggggctctgtggcttccttagaagcatttatcactaaattctattcttagggaatatcatccttatgcaagaagatggggagctgaatgtggaaaaatgctattcaaacaaataatttgataattgccaatgaagagtgttctttcttctcactacagatgaaatacaagagatgcagctaagaccagagcttttagtttctctaactggagtgaaattaaaattgatggatattttgataagattactaatgtaggtgaaacaatgcttccctatagcttgttctacaacactgtactcattcacttactggacttcctagggcttacttaaagaacttgtacacatccactgtcaaatatacttctgcatacatatactcttggatatcatagcctatttataaaactgtatctgtctccctagttatcctgtaggaatagctagtgttttctctccttttagatcttctcaaggcatcctctgagtttataaaacagagagtaatatgggtgagaaagttggcccttgctctttttttttctttgagtatgctgtttttatttaattctcacaatatctggagatagtaatttttaacataatgaaacagatttagagcaagtgcatgacaagtaaaaagcagggccggaatttgaatccacattcatttgactctaagcctgtactgtctgatatagcaagcacctgtagttattgaccacttgaaatgtggtgattgctgcttgttaaaatcataataatttcgatatattcatgcaaataaatatattactaaaattctacctagagaggcatttcctgggagctgacaatcccctttttaaaataatgattattaattttatgagtagattatataatcggattttcatcttgaaggcaaactgtttacctcttgggagagtttgtgtacctgaggttgtgccgtctaattagggcagcctgggccaaggatggtaaattcatggcaatcacatggatactccacatcctccggcagacatcacttatcggtcgtggcatttttctcacaggaacagcattctgtctcactgagacacagccttggaattcttctcagtactgttcattgatccaggcagcccccacctcttgactggagttggcaagtgagataaacatgttagctgactctcttctggtcagggctctttggcacagttaggtgctctgaccttttgaatagacctgcaaaatgcaagcctatcttcagctttcaattagatgttaggatatgaaaacatgggcatctttaaattgatgaaatattcagccacttcaggtctgtttcttcccagctaatcatgcttgtcatctacattttattccaccaactttattcaggttttacccctcacctcatgattgctttattgctagaatgtgaaaatatcttctatgcctaaattgatatccttgaattaaaggtgtgttgatgttgcgactctaacttcggtgtgctggggctgtcttgcagcagtagggagtgaagtctaggcctaccaagcattacgtgatgtccttcctcaagccctctctcagccaggcacagtggctcatgcctgtaatcctagcactttgggaggccgagacaggtgatcacttgaggtcaggagttcaaaaccagcctggccaacacggtgaaaccccgtctctactaaaaatacaaaaaattagccgagtgtggtggagggcgcctgtaatcccagccactcgggaggctaaggcaggagaatcgcttgaacctgggaggtggaggttgcagtgaactgagattgcgccagtgcactccaacctgggtggcagggcaagactttgtctcaaaataaatacatagataagtagtaactctcacatctaaagagcaagagcagactgtagcagataaatgtcccaataaaaataggctcctaacccttactctggcatttgtgtttcatcgtagcaaatttggatgcaagaaagctattgaaactgaatcttctcctacacctgaagagatctattacttcaatcactccaccgaaaaatctaccaaagattaagtatgtttctctattgtattcctgcaggttaggattgttacagatcacaatgacttaatgaaatctcaatacttgtggccaaaataacgtaggatggagagccatagtttaaaagtttgaaagctttgggggtcatctaggacactgaaattctgcttgcaacttgtttagctggaaaacaaaaagcatgaagataagactggaagatgaacatctcataccatcaatatatgggtgattagaagctctacaacaattctaaaacccagcctaataaagtatgaaacattctgaggaatgttcataaagatatgcaaatggactttgaaatggaaaaaatgcaaatcagttgaggtggcacaggcctaatttacccattctctctcagggaatatcagagcttcacacatttaacaggaaatgtacacatgctgacttccttcaggtgaaaaaaagattccacctgcaactagtattaaatatttgagatttgtttgccactgttgtatcacagatgcttcaactagagtgtttaattttcacacatataccatttaggagctgtttagtcctctccctaatgaaagagagatgggaaatccaggacaccccacacttactggtaggtttccaaatgttccgctcttagatgccactggtacctctaaataattcaaaatatcgaagagctgactccacacagcagaatgtgttttcttagttggaattaggtctataatcagacagagatgtcttattagtcagaatggaagacaacggactggtaaatattataatttgaaaatgttgatataaaagaagcctcaacataggaaaaggtgacatgaatgtcaatggcaattataatatataaaaaagataatagtgttttagagagtgatgaatagctgtgggaggaagagttgaggccagattttgcaacttctaattttttttttaaacctagcattgacagtacagtcctgaattgttgtgttgtgataggacataccttttgctattaaaaaataaggcctcatattattattaattttttttggccttctgcctaggaaaagaagtatgtctttggaaataaaaatacacaaagtaagttgtcattgagggaaagagttaaaaagaatcacttaccttttatgaattattttttaagactacacaggtgagttttttggttttggaaattcttgaacattttgatttcattcttcctggagagccaccgatactggaggctggacaccacataacaaattaaccgtcctctttcatttgtaacctccagggagataagatcagtttagttgctaatgaattttggtccccagcacagaacaattacaatggaatatgaggacggtttcaagagcatcaggaagattttaccaaattctatttaatctcctctcaccctgtttacaggtcagcttattaaagttgaaaattcctggtagatggtttccatggagagagaaaattatctctttagataaactattctagggttaatttgattcaaccaacatttatttagagtttcacatgtgaaacacaatactgtcttaggagctacagggatactaagatgaacgtggaaaaaaatgattgcccttaattaagttggcatgaagttcatgtacacaaagatgtacacggatctaggataaaatgtggcaagtactatcatgtaagtataaataaataaaaaattgtactcttcatacaaagtcttgtttgcccctcataacaaccctatttgaagagataattattcccatttcacagaaaacaaaacagtgtcataaagcagcacatctggtaagtaaagccaggacttgagcccacgctgtataccagccatcccacagagctttcttgatgctagggagaagccagtaataaagcatttcatagagaaggtggcatggtaatggaccttgaaagacaggtgtcatctcaaaaggtggccagaggggacatgtcagagagtcatgcatgaaagaggaaatttaagctttaaggacaggacagatgagacttccaaggggagagcagagattgggaagagcatctgaaagtgagccctctggaacactccatgagggatgggagcaggcgggaggaggaagcgcaggagccagctaaggagacagggaaagagcagtctggccgatgtgagatcatcttggacagcgaggtggccaagaaaccaaggtacaacagtgcagaaaatcaaagaggcccccacagtagtccgtttcagagagaaagatacacagagctaaaaggaccccaagagtcttcttgatctgggggtcactggtgactatagaaagaatagttttattagagtgatgataagccatagatcatgggaaaaattgcagtgggcaaaggatgaagtaaaaggggaagagggtgacatgaaagttgatcactgtttcaagaagtttagtagtggaggaaagagggaatagtggtattagttttgcacactcacaagcccaggtaggatcctcattttggagagcctctggtaacatctgataagcgagcaggccccttaggtggctctgtgacagagcttttgttctgaggatgccagcatgaggccacactttagtatcaagtcacaggacccctgcacctttgtgtgtcagcctgacctggggcataggactagagggcaatgggaaatcatacttgtccagttggaagcaaattttttgcagaaatttgctttcatggcttaacattcataatgccttaggttgggaaaccacccatgcccatttatgggccatggttaattctgttttattctgttcaacaaacttatccctaggtactctgtgtgaagccccactgtggctcggagtctacagcatgtttcaaagacgttgctgtcctcaagaaacataatctctttggggaagcaagaagcaaaagtagccctttactgtagtctgatgaatgttgccgtgtaggaatgggtgaagggcctggtcatagaaggacttacatatcacgcttggcactcagatcttactctgtagataatggggaaattctatagtgttttaataggaagcagcttcactgttttcatttattctcactgaggtgtgaacagtgtgtgtgtgtgtgtctgtgtgtgtgtgtgtgtgtgtgtgtgtataaatggggatagagaagcaagtttgtgacatataaagcaacagtctagataagaaaccttgaccttaattaggccagaggaagtgggtttggagagggcaggtgacacttgcttttgttagtgactgaattcactaacaaaaggggtgcggaagagttaggttgcataggtgcttcctgggttttttctggttgactggaaatgctttcatggcccgtcttcctgtctaaattaagatgttcatagatgttttaaaaatagggtggagtctggaggtagaagacaaagctgtataaagtcaaagtagggagaaaaaaaatgaagaaaggcaataaagagaaatagagacagccagtaattatttgctgtcacaacccattcttaggtcacctttcggtttcagttttccagcaatacttttctttttttctcctcttttcattattaaatgccttaagaaatgagtatgctgcatcgatagagttatgatggcttacatgagaagagcttctgagaagtgagttcctggaagcactgtggtggtggccaagtatttgcttataagattttatttgacatctataaggagaaatatacacaaacttttttgttttgttttgttttgttttgttttggtgctggaagtgggaaaagtaacaagaatttaatgagtaataaggaaatgtaagaggaaccattaaacataactatagttacatggaccctacttactccaagtgtattttagttagatttgggtgtattttgtgtctgttaaggcaggtgggcagtttgttcatttggctggaatcctggggcaattaggtcagcattaggggcttagtatttctgcaggccatttagttttaacctgctccatgaccccaggacactttctacctcatcattaccctgatttttgtccgtgagttcagggaggcaccaatcagagaatgtcgatagctttctagcacatccatcttcaccaggagaaagctgtggtcagataagtaggattcccctttacataaaaagaacagcctgttccatcgttagaaaaattagaaactgcggtgagaagtgcaataattagtgactactgaatgcttgttcttgaatttgctttataaaaaatgggatctgggagccttgttaattatatagctttgtaagaatagtttttctataactgtattagtatacttaatcaatgactcatagaatactggtaactaatagacctggacttaacgcctggaatgtcctactaagcatggtttggtgagctgtctactttgattctaggatagtttatgtttaattatgccacaacttgggcttatgctatgtcttgatgtaatgcaaataaaatagattatattttacactacaaagttcattaaaaaacaaaaacaaaatccttaagcttgtcactcaaaagtaaacatctgtatccaatgcaggaaagaatgcaggtttcgtggggactaaaacaacactaaggtgagctctctttaagaaaaagacaaatgggccgggcacgatggctcacgcctataatcctagcactttgggaggccgaggcgggtggatcacaaggccaggagatcgagaccatcctggctaacacggtgaaaccccatctctactaaaattacagaaaattagccgggtgtggtggtggacgcctgtagtcccagctactcgggaggctgaggcaggagaatggcgtgaacccggcagacggagcttgcagtgagccgagatcgcaccactgcactccagcctgggcgacagaatgagactccgtctcaaaaaaaaagacaaatgtacaatataaaattaagtataaagtggttatttaaattcagtctttcctgtaaggtgatggaattttcaaaaagtattaatagttgagaaaggtttttctccattttataactctcgattgataataacgtgtacatttttagaattgtggttaaacttgggaagacttctttaggcttctttcccgatgaactgcaagattttacagcatctcaaaatttctggtgcagggactaatcttaaatactttggaactggctgtcttcattaactagcttgttaccatagatttctcacatttgctaattaaaaaaatatgaccatatgaacacattgccaggaccccatccaagtccttaaaagggacctggcgggggaaggtccctgaagcttaagctccattgtttcatggtaaatttatctctgatctgacagcatcataattttccactgaatctgtccaaacagtattatactcaatagtccaacaaaacaacataacctttcatacttaatacaataagtcaattggggaagaattcagaattttagtgatcctaccaagttttttttttttttttttttttttttttttaataaggcacagctcaattcttatctcttggtttgactggcatacaatggcttattgtaagactattacgttaatatctttgtatcttttacaagctttaatttacccctgatagcatgaaacgagactaaattctcatataagaacatgaaaacatttttaaagatgttatctcttatggtatgtcttatagtccactgactagattagttgtaggcatctaaaataacaagtaatctcaacagatagtatatagttaaatagaaatatcgtatttctaagcaattaccttgtaaagagaacccttaacattttaaaatgttgttatttctaagcctaaaataaaatgcagcttgttatttaaaagatttcagaagagatataaagatcccattgcactttacatggctttgtgttaaatttatcaagatccattatattacatgaaacatacttagtttcattaaagatgcttgagcctctctcttttttatgcttcctgccccctctatgtacacaaattcagcaacctaatcatgttgcctttgatcaaattttatttgtatttttccccagtaatgctgtctggtggcagttaaatagaatttaattaaaataaatattcacatgctttaatagagattaatgatctgatttgacttagtaaaatttggcaaaaagtctagacgctgtaagatatacctatattacttgacttggataaaggtttaataaaacacagccagcattcaaaaaaagggagaaatggggaaatccagttataaaagctatctgagcatttagctagaactatgcatacacaaacacgccctattgaatttgtgtccacaataaaaattgggctgtttcttgtttttctattttattacaaccataaaatgaaagtgtgaataacaaggcaatccacttgttaagtggcaatttggattgacaagctattttcccaaatttaatttctggatctgtacttctcagcctttaatgtgaacatgaataacccaggggtggtgtgaaaatacagattcagattcagcaggttttggacaaagcccaagatactgtgttctaacaagatcccaggtagtgtccatgctgctggtgtgaggactgcaccttgagcagcaaggtcctagacagtgaagtgaagagactagatttgggatggttgccgccaccatcatcaccacaattgtatggataataatatgtaaatgaccccacctctcaaatatacagtcctttcacatatttccatcatctcattttggtcttcacaatatataatgtcacatgcgtatctcagcctgagtgccactgcttgtaaagccaattaattacataagaatattaaatttcagagtcttaacccatatagtccagcataaacaaagcatagctaggtttatctttccaaagggtattctccaaatcttgttattttctcactcaagattcatccagtggaatatctcctctgctccccaatcccataaaccgttatccctattctctctctgttctccaaggctgatcatctcactgtcctccacacagattagttttatttatgaatccaaattctgcacatgcagttgcctgaccaagaatgctcccacttatatctcctgctcttcatgaaatctggtaaactacttcctgcacacacaggcgttgaggggcctggccccttatcatctgacagacctgaacaaggtgaagacactctagagctgttggaattgttctcatgtatgctgggagatattttttagcttccttatgtgctgcattttaaaacaccctaacatttgtgcccattaactcccaagccctgtttcttttagataatgtatcaagcaaatttctatagttgaagttctgaagtgtgacaagggagccctgccttagcacacatgtccagatgttgacactacaagttataagcagccttcatttacaaaattcagacttaaaagccacgaagtgaataggtaattaatgcggaaagtggcaagatttgatttaaacagaaggagccattagacaattaaatactaatttaaaggaattctcacattaagttcaataaaattaaacattaataatgaacaattaatacctttgtggagttatttagtcaatagggaactgtgctttttttgtttgttttgttttgttttgttttgtttgagacaaagtctcactcttgtcgcccaggctggagtacagtggtgcgatctcggctctctgcaacctccgcctcccgggttcaagcgattctcctgcctcagcctcccgagtagctgggattacaggcgcctgccaccacgcatggctaatttttgtatttttagtagagactgggtttcaccatgttggccaggctggtctcatactcctgatctcaggtgatccgcctgcctccgccctccaaagtgctgggattacaggcgtgagccacagtgcctggccgaggaatgttttatataatagtcccacttgtaggatatttgttagaaagagagtcacatgatacatttttatcactcttatctgctacttagagatttggcacctatagcaaggtgataaatacgccccaagggtgcaactggaaaatgtggttaacccgatgcaggagtctgagtggaactctgaacaggatgagacaagccggcagtgacctgttgagcccttggaccccagaatttctcgggttattgtttctccgaacagccactcagaagagattctttgagttgatgcaaaaatctcaaaacttactgtgtgactttgtggtagaaaagaaaaaatgcaatttggatccagattacaaacttgattgtgaaaaacaaaaacaaaaacagatagtccttatgattttggaatgatacagttaagggtggtgtaggagatcaaataaattatcctttaacatccagactataagattttgacttctacctacccaaagcacttgggtcagtatacgttttagtgcactgatgcatccacttgcccgtgtgaatgcattaaggacaggatatcgtattcttctaagcaaaaagattgcagcatactctacgcacagcactgggtagaaatcccactattccacttcgtagcaatgcgactttaaacatgttttcaaacctgtgtgagccttagttcatctgtctgtaaaatggtgataatagtagtactcacctcaaaggttgttgtaaggattacatgagtaaagtgaaagttttgatttaggggaaaagaggcagaacatgaagtactaatttaaagaaatattcaggtaaagcctatgagattaagtagtcacgaatggttaatacttccatgcagtgccatctaatagggcttcactatgatgatgcaaaggcatgagaatgatataatggactctggggactcaaggggaaggttgggaggggggtgagcggtaaaagactacatattaggtgtagtatatcctgcttaggtgatggctgtggtgcactaaaatctcagaaattaccactaaagaacctatccgtgtaaccaaaaccacctgtaccccaaaaactattgaaattaaataaataaataaatagggttcactgccaagcaaatagaaagcattctataaatgttaattatagaaagtgttctatttaagtgttaattattataataatcatgattgctggtgtggaattaagaaaaaggcaagggctgcatctttagaaatgctttaattcatgtaaagtgcttaaaacagtgcctgtgtgcatgtgtgcttcataaatgctagtcgttgttattataagagttactatgatcatgctagtgctcatccttacctgacttctggagtacccatcatattcaatattccaaaagataaacacaatactatttgttggatatttatcttttaaggcaactattaaaccattggaatggtgattttctgagagattcttcttttttaaaccattgacaactttattctgctattgagattttttttcagagccaacatttctttcatttataattctactttggaaatgcaaatgttatccatttttccaatgcatagtttcaacttactagttagctctgtaaatatcatttatgagactgacccatgttagatctttgctatggtctgtggtttgcaataattgtcattctcagttcccttaagtactaaataggagaaaagacagtagaatgttaaatcaggacaggggtctttggaggtcactctgtccagcatcctgattttttagataaggagacatgacttgtccagtgtcacctagcagctcagaggcaaatccaggacaacattcttaaaggtcatacattgaccctctgttaaataagtgaacacataagtatatccattaatttcagattgttttaagaataaaaatcaaagttatataaggttcctgaataaatctcatagcaggagggagaccatgtgataaaaccttcaaaaaaatggaatatattgtctggttgcttcctgaattgtacaggttactatttcatttctgaatatggcctcaaataaattgaaaagtacatcccttaaatccttgtcaagtgcaaggtctgtgtcataaatgctttcaatattgagggggaacaggacaaaaatttaaggaaaagaatttatgcaaaagattgaatcaatgctttttttggataagcaaagcaatctgtgtgataattctactttcctcctcccctttgtgaagctgggtgggggtgggaggattagcaagaagggaggggcctaatttatggcgagagtgagaactcttttcaagcctgtgggcagaaaacaccgctgcacctccctcccggctggaacctgctctctgtgatctgggactcctccgggtctctgtttgcctaattgcaacttgtgcttatgccctccagttctcactggcccctttgatgcttttcagcaagtcctctgaaagcagcaggacaaaatgggaaggtaagcaatcctttcacataaaagagggcagcaaaacccaggtggaggtccctgctgagatgctcccttccaaggctgtgaccacacagcctaagcaaacactgtgactagtgccagcaaatgaaatttacagccctcttaacctgcaagccacagccagcatctcactccactctccaaaataaattcaacgtggctattttagaaaacatacttatcccaggttttccttttgggcatctaaggactgaattagatggtctccatctctaactacatccccattctggagactttaaaaaaaaaaaattgctttgtttatttatgtgttcatctcatgtttatcagttcagcagttcacagtttttattctgttatataacaaaggagcctaacaaaggatcacaataggaaaaataatttaccccacatggttacaatgaagagaatttaattaaaggaattgttacaaagtgtgggcagcattgagggaactgacacaagatgttgagccactcaaagactagcaactggtggaagccgttactacccacttaggcctacctaaatgggcaatgggaagataatgttaatggagcccagtgagctctagagcctcggaggaagggcatcctgcagagatgttgttctcagtcttgtctactcattggaatatcagggaaacatactaacagctgggttccacgtcctagagattttgacgtaatgacttttttttgtggtcatcaagacacagtcatagaaagacacagtcactgactaagagacagtggcaaagctaggaacaaacaggaaagaaataccctgaccttcctctcctactctctgatatcctgctgatgcctccaattagaagccagactatgagggagctgggggaatgcactctgcatggatcaacctcctgtagtctatgtagtggggaaaatgggtgaataaccagcacagagctcacaataaaccccacaaacagcctctgtccctcccacacacaaccccaggaattagaaggaagggcagactggcactttctcattaaggtaactcactcatgccatcttggcattgagctgggcacttttaggtggaatgacctcccgaagggctaaccccatctggcacctcttgacaacgttccttcttaatatcagtggctctcctgctgctggccaagcaggaccccaaggtccactgggatgtacatacttatggtattatgctctgcaatacttgtgggggctgtggaatgcacacttccaaagtgaaataggacattggaggttttatatataaatatatatatatatatttatatatatatttatatatatatatttatatatatttatatatatttatatatatatttatatatatataaatatatataaatatataaatatatataaatatatatttatacataaatatataaatatataatatatataaatatatattatacataaatatataaatatatataaatatatataaatatatatttatacataaatatataaatatatatatatataaatatatataaatatatatttatatattaatatatataaatatattactatgtatatttatatatatttatataaatatatataaatatatgtaaatatatatataaaaatatatattaatatataaaaatatatatataaatatatataaatatatatataaatatatataaatatatatatataaatatatataaatatatatataaatatatataaatatatatataaatatatataaatatatatatataaatatatataaatatatatataaatatatataaatatatatataaatataaatatatataaatatataaaaatatatatataaatataaatatatataaatatatatgtataaatatatatataaatataaatatatataaatatatatatataaatatatatataaatatatatatataaatatatatataaatatatataaatatatatataaatatatataaatatatatatatatatttttttttaatagagaggatgaagaccaaagcagtgagttccacctaagctggcccttgccttttgtctaacaggaaacccagtccttcctaatgggcacagaattttcagagaagagagcagaagttgagttggcatacctactgtagtgagggattttgaacaatgagctgtacattcctatatgggagccaaacttttagttaaatagtaatacaaaaatgctgatgtggatgccacggcttcctcctttcacacagaagatgggcagtgactacacatttaggttcaccttgcatgaagccacgctatagtttctaataaggtattattagtattcactagccattctccaagggttggcttcaaatgagatcagtaaagcagaagcaaatcacccacgggttctttcacagtttctttcaccctaagcctctcatttcactagacaactgtaggaagaaaaacgagatccctgaagggcagcaacttttcataaactgcacttgcagttttgccaatgcacatatctgtgggctcattgcacaggcagcgcttatatctatgggcacatttcacattgtagatttcttgtcctttctgattttctccccgatcacactgatacaggccacttccagtgcctctgtaaagctccaaggggtaaaggagggcaggggtgaggagtaaaggaacgattcttacaggtgttgtgaacacgactattttatatcaaatgcttctaattgaatagtttaacttaaaaacatgtatcacaaatacagtttgaccaactgtaacaatatcaaagcatattgaacaggaagtgaaagtctttgggtgtggatagagatttccagaaaaatatagttacataaatgtgagtttccaaattgtaaagaagaaaaaagacatatctggcttaatatatataacattaatatcatgcatagagattctattaataacatttgtcagccactattgctaagagctttacatccattttatcctcacatcaatactattaaagaggaactattattatcttcatacgatagatgaaaaaacaaaggctgtaagagtttaagaaacttgtccaaaatcatgtagctagaaagcggccaagccaggattcagaccttggttaacccacttacaaactctaaactcacttctccattgttaaacttgactagtgcattggcttacaatgaagtttgccatattcttccctcaaatctgtatttttaataagttgctaggtgatttttatggtcaggagaagtggggccatactacatgatgtaggctatttcctgagtatagataatttctttcttttcccttaggtgtccattttctaaaatgtggatgagaacactctctatgtgtcctgcaaaatttaaaaagtttccattttaaaatatgttttataaatactaaataacatgtccttttcttgctgcctaagacatgattattggtatgaaaatgctatgagaagtcctatagtaaagacatttttgtccagagaatctgacttttgtctttctccagagaaagcaacctgacttttgtcttttaccaaataatatctgtttgtgtatccttcagttgtgccctttggagagggctatttctccatgtaacttcatgcagttacaagtcctatgatagctttatatggatttataaatcagtaaatttttttatactgtaaaactttaattttaagatttcaatgtttttattcattttgaacatatagggtaataatatcttctgaagccaggcaaatctactattaaattttgctttctataaaaacatagttgttagataactaatactgtgcgaacaaatttcttttccctatagagaaatagtgagtgttgaaccgacggaccttgtctttagaataaaaagacttataaacacttgtaggccagctccatgagaatatgccagctggaggaattttagtgcttctaaagataactgagaaagcagtggctctgaaggttacctttttctgctaatggatgtttagatctaaaatcccagtttgctttaaaaaaaacagtagtatgttaagaaggtttctagacctgtgctatcagtgtcaatgtaagtcttataagttccctatgagaatgttaaatcacaagggcttagggtatataggagttaagtgatgctttcagttgatgttgaatttcatggtgactccagagtcacataatataggagcttccaagcttgacaaattgctcatatatacgtaggcagaagtggctgatcactacagtgctggtcctgggcctgtttggtttgtgtccattcttgtctttcccctactatgctgtatcacaggggaacatacctcccacaggctgcatttcccagcctcccatgtctgactgctaacagttgggtcaatggtaggcattgtcaggagattagagggcagaagaaaggagaagccagggaatttctgccttggcaacgtctctgcctccatgatgctatctcctgccagagaagcctaccaaggttccagcttactccatgtaaccctggtccctgtgctctggtgatgctacctcttctgtgtgccctttgtggtttcctgcctttggtaatccctaggttgactcactgctacttatttggcttttttttttctctcctattacctataaaccaacaccctgtgttaaattcccttaagttactcattggtttgtgttctcctggttgaaccctgattaatgaaatttccatttaaataccaaacgtttcctggagttcgttattctagtggaataacaaacaaccagctccatgaattgatggcttttcagaatttattgtctccacaatatttgtttcaaatcctcttttaataatcactattttaaaacttaattactactactattgataataataaatgtacccttaaatgtattatataccagatttggatttgcatctgtgtgtcatatgctcttagttcaactctttctttattgctcacctgaaataaagcttcttttgccagttctatttaattaaagattatcctgtgatgagaatgcaagcctaggttctgccttgatttatatggcactgctttttcttcaaacactaagtgatttgtagcaagttctcaaaaagatgtgcttgcaactttcattttctaaggaactggaaggcagccataattttctctttgaaagttccacctctgttagagtatgtatagaggtcaagttccaaaaatagcttcataatgtctgactcccctttaatgcagtttgattaatctttgtgtaggattcctggcaaatgataggcacaaaatgactatatatgaaatgaataaatgaatgaacaaataagtgaatatagcaactgtctctccatagttatgcatacaattagctattttttgactcaaaattaaccaggaaaaacttaagttatccttccacaaggtgaacttaactggatgtgtcttggtttgaaataccagcaaccagctgcatactgtaggagctatcagagcaaaactcaggtgttgacactaaagattaatgaaccacctttagttaattgatcacatccaaagtgcactcccttcagccttttgtctgtcagttggcagagggtccagcaggtagacacactccattgctcactgaaattaaaatttaggtaatttaaccttctcaatgctatagatgatgatttttttaagttgcagtggaaacaacagagcaatttctgggtgagtaggtcttcttggtgattcataatttagtagatgacatgttcaaatttattaagttggcctgagcataaaattgtccaggagaacaacagttaatctacaatgctgcagaggtatctttcaggaacaatacaatccccactactattacatattgggctttttaattttaggcttgcaggtaaagagtgagcttttcagtgtttgcttttcaatgatatacacgtgcaggagtaacaattctagtttttgaatgtgggtaggaaggcatgcctgagtgtttatccggggagtaagcaattttgtacatagaatgtaagttggataaatatgcatttgctttaggttaaggtgttaatgcaaccttgtcaagaagaataaatctgaaaagtggttaaatcaaagctatttgattttaaagaataaaagtaccatctttcaaacgatattatctttgtctaacagtaattttcccccctgcctgtaatttcagagctctgtgatgtggaagctgtcaatgttacgtaactgagagcaatctgacttctgtcattgtgtgcattcctcaaggatcgtgtttaggtggccctacttgatgcttttctaaaaagccccattctacttctaagtaaatactgagttcctggagaaacctgatgaaagaaggcataattttgatagctgctttgtaaatagtaggaataagtatgtggcattattttctttgagggagaagaaactttttatttgggtgcgattcatatgagaacatacttactgtagattttgaaccttgatactggcagtgtggattggcctgtaaattgatgcttttgtttctggctgaggaactgcaaatatgccaggtgacattctctttgaagtgtaaatgttgtttcagttgaattttttttctagtacacttggaaagtgagtttcatgcctatgaaagagtctggattctaataaacattattcctagacacaggaaagttgctataagcgatgggattttgaattctacatggattcctgtttaacaggtgacttcacaccttaaccttgaccagccttctatctacatctgccatgttgatttcttttgtatattcatttcttgttacttccagcggtaattacatttctaggatatattggtgtattttggttgtctccaagtccccttggattctgaggccaccattgtcctttctagacaaatggaatggcttaagcctccacacagtgcactttgggaggtcctggattgtacttgacatttccaaggtgtctaaaaagtctgatattgtggtgtcacctctttctccaaattcctgctcccagtttcatctttaatgaccgatggtcactttctgccctatcttgcaccatctgcctttaagacacccctaaggcttatacctcaatcacaactgatttttcctcaaagttcagtgaaggagagggcaatagagtgaagaatttgttgctgtcatccaaatataaaacaggaaacacattatattttaatataaaagcattattcctagaaacatattagccattctctgccaaaaggacattatcactgaccttatactttattaggcccccaaacccaaccatcttgagagggttccatctctctcccatatctttttcttttttctttctttctttttttttttaagagacaagttctctctttattgcccaggctggaatacagtggtgcaatcatggttcactgcagccttgaactccttggttcaagggatcctcctgcctcagccttttgagtagctgggactgcaggtgtgtgccaccacacctggctaatgtttcttattttttgtggagacagaatctcaaactctggagctcaaatgattctctcaccttggcctcccaaagtgctgggattacagacatgagccaccatgcctggcctcccatgtctcctgttccagattctagttccatactattggccactacaataagaaaatccttgttattttattaagcagatgacttgagctttcaaattctattccagcctagagtctagggcccaactttgcatactggactagaatcattaaggtgttttcccttttcccaaatgcaaatgtctttactttcacaaatggatcctcagtaccatcagaaaatttgaaattgctgtgttttcctttcaacatattacagatcacattctgatagctcctcctcaactcaataaagtaaacatcatggttacaggcagtgtgtgggtggtattggtatgtcgaaagtgggtgcagaatgagactgtatgtattgccatattgaactggagaagcaaaatatgttaaagcacctggatatctttctttgcatatctctcctgtggttcttggtcaaggactatcgttgatacaggaccagctatgtaagccggagggcacagtgcaaaattaaaatgtggggcccttgttcacaaattatcaggaactccaaaagatcacaacagagcactaaaaggtcacaacagagcaccaaaccttgagtggccctttctaagcacaggtcctgtgcaatagcacaggtcacatacccgtgaagccagtcctgtgttgatggttgttgttgagtgagattttaatacatgtatatttatagtctgagatgcatttgactgccacctttggagaaaatatgtgctagagtagaaaaaataatttgaatggcagtaacaaaagattggttgccttgagaagaacattcttttgtatccgttagagtttcatcagagaaacagaaacttctctagagtttaagttggaaggggttttatatatcaatgaagtatttctaaaactgttggaagtgttagaggatcaaagctcaaggaaagccgtcattagctttcagagaccctggaaagtgtaggaaacccacaaaatcattagtgatgtccaggcttcctgcagtgctgtgaaaggtgattttcaccaaagccgtggcgctgcctattcctgcacaggagcaatgggttgctgtcaacctctctccctctttctttatcttgcataaatcttcttgttgatgaaatttaaaatggtaaataagcatttaaggggatctgactgctacagctagatgggaaagccaaaccccttttctcaacaaggaataatttgaagaaattggattcttcattgttggtaaagtagtatctgccatttgcataaatatctaaattgtagagagcagccattattagttaaagtaaatgctacatgctataatagataaacactaaaatctcaatagcttaatacaatgagattttatgtctcgttcacctcaaatttaaagagcagctgggaagacggcagtaactgcaccatacaaccattcaggaaccagggctcatggaggctctgctattttttaagcttttattttagttcaggggtacatgtgcaagtttgtcatataggtagacttgtatcatgggagtttgctgtacagattattttgtcacccaggtattaagcctagtgcccattggtgatttttcctgatctctttctcttctcacactctaccctccgatatgccacagtgtgtgttgtttctctctttgtgtccatgtattctcatcatttagctcccacttataagtgagaatatgtggtatttattttctgttcctgtgttagtttgctaaggataatggcctccagctccatccatgtctctgcaaagaaaatggtctcatttctttatggctgcatagtattccatggtgtatatatgacacattatccagtctatcattgatgggtatctaggttgattctgtatctttgctatcatgaatagtgctacaatgaacatatgcatgcatgtgtctttatgatagaatgatttgtattcctttgggtatataaccagtaatagcactgctgagtcaaagggaatttctgtctttaagtcttcgaggaatccccactctgtcttccacagtggttgaactaatttacacttccactaacagtgtacaagtcttcctttttctcctcaacctcaccaggacctattattttttttttgactttttaataatgtccatcctgactggcatgagatgtatcttattgtggttttaatttgcatttccataatgatcagtgatgttgaggtttttttcatatgattgctggccatgtgtatgctttcttttgaaaagtgtctgttcatgtccttgcccactttttaatggggttgtttcgtttatttcttgtaaatgtatttaagttccttatagatgctggatattagacctttgtgagatgcatagttagcaaaaatgtcctcccatactgtaggttgtctgttcactttgttgatagattcctttgctgtgcagaagctctttagtttaattagatcacatttgtcaatttttgcttttgttgcaattgcttttagtgtcttcatcatgaaatctttgcccattcctatgtcctgaatggtactggtatacttgaaagagatagggggaatggaaccaacttggaaaacatatttcaatagatcaaccatgagaatttccccaacctagctaggaaggccaacaaattcaggaaatgtagagaaccccagtaagatacttcacaagaacatcatctccaaaacacataatcatcagcttctccaaggcagaaatgaaagaaaaaaatgttaaaggcagctaaagagaaaggttaggtcacctataaagggaagcccattagactaacagtggaccgctcggctgaaactcagcatacaagccagaagagattgagggccaatatttaacgttcttgaataaaagaaattccaacccaggatttcatatatggccaaactcaacttcataattgaaggagaaataagatccttttcagacaagtaaatgctaagggaattcagtgtcaccagacctaccttacaggagctcctgaaggaagcactaaatatggaaaggaaagactattattagccattacaaaaacacactgaagtacacaggccagtgacataataaaatgaccacataaacaagtctgaaaaataaccagctaacaacataatgacaggatcaaatatatacatgtgaatactaaccttgaatataagtgggctaaataccccaaatgaaaagccacagagtgtcaatctggataaagaaagaagatcatagatatgctatcttcaagagacccatctcacatgcagtgacacaaacgggttcaaaataaaaggatggagaaaaatctaccaagcaaatggaaaacagaaaaaagctggagttataatcccagtttctgacaaaatggactttaaaccaacaaagattaaaaaagaccaagaagggcattacataatggtaaagggttcaattcaggaagaagatctaactatgctaaatatatatgcacccgacacagtagcacccagattcataaagcaagttcttagagaccacagagatacttagagtcccacgcagtaatattgtgagactttagcactccactgacaatattcgacagatcactgagacaaaattaacaaagatattcagatctgaactcattactggatcaaatgaacctgatagacatctacagaactctccactctgccattttcaactcatggtttctgcagttgttgtgagcattgacactagttggcagaaagggaaagagggagagtggaggattttatggcaaatttttatgggctaaacctcagagtggcacttgtcactttttcccacattgctattgccaagttctggtcatatgaccccttctaattgcagaggaggctaggaaaattagctacgtgctcaggagggaaaaaaagggtaaacagctagacagtttctctcacatgatgtctgacagggatccaggttgcccttctaccatttcagtaatcagagagtcatcattcacgaggggaaaatggctagtggtatgaatagcttttggtattttattaaacctctttgcttctaagtttctagatctgtaaaatgagggtaagtgcatcttataggataattttgaggattttagatttgacacaagtaaaatggtttagtgtaatacctgaaaattagcaaaaaatataggaatattacccattatcattattattttcatcactaagtgacttagtttgttttcacactgtggtaaagaactgtccgagaactgggtaatttataaaggaaaggggtttaactgactcacagttcagtatggctggggaggcctcagggaacttacaatcatggctgaaggggaaggggaagcaaggtaccttctttacaaggcagcaggaaggagaatgaatgcaggaggaactaccaaacacttatgaagctatcagatctcctgagaactcactcactatcatgagaacagcataggggaaactgcccccaagattcagttacctcaacctggtctcccccttgacacatgaagaatatggagattacaattcaagatgagatttaggtgggaacacaaagcctgacaatatcacaaaaactctaagaaagggtagcatatttggaaataagttaatatatcaaatgtgctcaacgcatgcacagaatgtagtaaaagttcaatacatgtttttatcatctaaacttattgagtcttcctggtattatacttacatttattattatgactttctactcataagaacccctcagataaatttcattttcttttattaggtttctttttagaatattgtctgtctgcaactacagtcacttggatacatcactaggtttacatgtgttttaagtcgacttttgctagatgtagcttgatctttgaggctctgtgtaggcctttataaattgcccttcatttgtttattgagaattgaaatgaaaatggaatgctccagactcagatgatgggatttgaggtggaaaatctcattaatgcataaacatgtaaataaatcagttgtttctaaaaatttattcagggccgggtgcaatggctcacacctgtaatctcagcactttgggaagccgagacaggcagatcacctgaggtcaggagttcaagaccagcctggctaacataaaccctgtccctactaaaaatacaaaaattagccaggtgtggtggcgggcctctctaatcccagctactcaggaggctgatgcaggagaatcgcttgaacccaggaggcaggggttgcagtgagctgagactgcgccattgcactccagcctgggcaccaagaacaaaactctgtctcaaaataaataagtaaataaaaataaaataataaaatacaaatttattcaggatagcatattaaacattgattgatgttggtactttaacagataagaactattttaattttgtgttcaattgagtcaaccctaatttgtttagaaacttctggaattgaatgcaatctgttaaaagtaaagacgtgttaggccagataataatattgctttaagcttgcctatctctaacacttattaggagaatatatttatatctgtctttttaaagtaagtattgaaacagctttgtttaattctcttttggtaagaaagatttctttcataacatttgcataatttttaaaaaaataattgtacaaaaatcacagaaccagtaaagaaatatctgtgacttgagggtctcaggaaggcagtatcaaatggagattcatttatttatttatttatttatttatttatttattgaggtgctgtccttttttaagagtgtatttgttcctctttttgtaaactgcagacaacttgaactgatggtgaggtctggtaagaaaaaaaaaaaaaaaaattcaaagctaccaagggagaaaaggtgaatttcattggattactaaattcacaaacaaactttataggtcatcattgaacattttatttatattagaataagcaagcattgagcaagatagaaataattttgcttcaggttatcatcattgtgaactatcacaaggtataagcacagaaatgacagaagttctggcacagaacaaggaatttgcacatggtccaataacatgaacaaaaaaggttgtatttatttatttatttatttatttatttatttatttatttatttatttttgagacagagtctcactctgtttcccaggctggagtgcagtggtgcaatcttggctcactgcagcctccacctcctgggttcagatgatc

SEQ ID NO: 386 - DNA, 797 bp, Homo sapiens
tttttttttcttttctttcctttcctttgacagagtttcgctctgtcgcccaggctggaatgaagtggcacaatcttggctcactgcaatctccgcctccccggttcaagcaattttcctgcctcagcttcctgtgtagctgggattacaggcgcccaccatcacgcctgggtaatttttgtatttttagtagagatggggtttcaccctgttggccaggctggtcttgaactcctgacctcaagtgatctgcctgcctcagcctcccaaagtgctgcaattacaggtgtgagccaccatgcccagcttgaaccacttttattttattccttctcttccctaaaaaaaattgaggataagctctgccttttttcatcaaccataataagtatggtatccattcactacttgactgctggagagctcaggacatttggacagaatgcttcaaactggggccaaagtagcctgtctcctcagagagctgacttctgggcatacgcatctctgtagtgggaggccacatgaaagtgaacctaactcatgtacagaggtcatcgccatgtcacttcctagtaaatgctcaataaacttgtaaaccaccccctctctttagagccctacagttttgtccttattgtggtggtgaagttgggagttggttaggtggtcttatcgtcaccctgcagccccactttctcatcctgaaaaccctctttcccacaccgggtcatacagagggacttttgatgcttccagctagatggcaggggcatcctgtggcatcctgctgtgca

SEQ ID NO: 387 - DNA, 597 bp, Homo sapiens
ggtaaaataagttcagataaaatagtggtggtatttaaaataatattgctgaagtgcagattgaaatactttttaaacaactgaagttctgagtttttatagggaatttcatgtaacaagactggtttagaaacgtaaagttgcgcagtcaacataaataaatacagaatgccatgttctccacttctaagtaaagacagtgggcagcttctgtttctccttctatcaaggcttcaccctatcttaaaggtctgtggtgcctcccacgtgggacctgtctgctggtatgtgttaaacagcagaccggcccttctaccagatcttgatgcctctgattttctcctgcctacaagaaaatacaggcaaggttagtcaggtctggctatatttccactgttgtttcatttaataagatggcatctcctcttgagatatgttcttcttaccttttaagaagatactatttaagaagtgaactattcagtctttgtatactgaatgctttttccctaaaaaatgttaatcaagaatattgaatatttatggcactcttgatgctgcattttgaaagctgaaggaattactttagatagatag

SEQ ID NO: 388 - DNA, 58627 bp, Homo sapiens
cggggcgtggtggtgcgtgcctgtagtcccagctactcgggaggctgaggcaggagaattgcttgaacccgggaggtggacgttgcagtgagccaagatcccgccactgcactcagcctgggcaagagagcgagactccgtctcgaaaaaaaaaaaaatggtgctcccacatttctttcttgggatggaggaagctttcccagaagcgctcctgaccgactttcccacacatctcactggtcagaactgcatcacttgccgtttctgaccaatcaccagcttacattcatggggcacgtgcttacactaaccatggcactcctcgagctaagtggagctcatgcgtcatatggaggggtagtgactcctgagcaaaaccaggttcaaagagggaggggatcgtagggaaaagaatgtgcggaagtgcggaggcccagccaacagcctgctaactgcagatactcgagagcggccaccctagatcatctgacccaggctggcccacgctagaattgcccagtgacccgcaaggtcatgagctaattgagctaaataaaatcattgtgtttttttgtttgtttgttttgtttttgttgttttgttttttgagacagagtctcactctgtcacccaggctggagtgcagtggtgcgatcttggctcactgcaacctctgcctcccgggttttcaaacgattcttctgcttctgcctcagcctcccgagtagctgggattacaggcacgcgccactacacccggctaatttttatatttttagtagagacgggggtttcgccatgttggccaggctggtctccaactcctgacctcaggtgataggcccacctcggccacccaaagtgctggtattacaggcgtgagccgccgcacccggccaatcattgtggttttaagtcactaagtttgaggctattttgttttacagcaaaagctaactgatgcagacagggacaagtcagtctcatctctgtgcacccagcattgcccagaacagggcctagttgtgtctagggtctcatggggcagcccctgacctctatcttgcccctcccagcttccaacagaccctgtcccagctccctccaagctgagtgttggcctgatacctaccagtggagcgaggggaacacgaggactgccaagggcaggtaccgtgccaacccttcactccattccacaaagagactcatttactcctcatgacaatccagtgaggcagatgttcctgtcactttacagataagacaaatgagctttagagagagcagaagactcatccaagacctcacaacagagaaaaagactcctctggtttttgccttggagcaggaacttttgacaaggctgcgcagatgcagccacatgaaaaccgcccattaaaaatgtaatatcggcccggagcgggggctcacgcctgtaatcccagcactttgggaggccgaggcaggcagatcacttgaggtcaggagttgaagaccagcctggccaacatggtgaaaccccgtctctactaaaaatacaaaaaatagccaggcgtggtggcatgggcctgtaatcccagctactcgggaggctgaggcaggagaatcacttgaacccaggaggcagagattgcagtgagtcaagattgcaccactgcactccagcctgagcgacagagcaagactctgtctcaaaataataataaaatgtaatattcactcttatcaaataatggatgtcaccacaccccgaccctaattagtgaggactttcatgttctacttgtcttcatttaatcatcattgtataagagttttacaatatcaaattagtagatgtatattactgaaagggaaggactgttagaaatttacttgaggaatgtctgccactgggggctgaacacaaaagatcctattgtgacctgccagattattcattcacttagcaattcaacaaccatcgctgaatgcctactataggccaggtgccatgcaagacagatgtgctcccaccctcaagggttcacagtctaatagaggagagagatgttaaacagataactgtacagatggcatagctaattatattcgtggaagttcgttgtggcaaagacaggcatctcaatatttcaggagctcccctatattttctagcctcccttacagtcacatgactagttctgaccagtggggtgtgtgtaggagtggcaggctgaagcaatggagagctggtgagcctcatccctctcttcccctgccacagccaccttgcgcccacaagttcccttagctacaagctggaggagagccaccagatccaccttagatttcactgagcaagaaataaagcttcttgtgttaagtctttcagatttggagtttgtctggtagatagtgttaattaccatgactaaggaaaatttgccattagtgaagggaggaaaaatattctccaccagtaacaaggccatgtcagtctgctgcattataaaccccaaacagtagtttatgatcctctgggctggcaatttgggctgaattcagctgggtcactcctgcagctgcaggcagcaagcagctcgaatgtctaccttgccaggaaggctcttctctgctccacatggcctcgtcctccaataggcatagcctactccttcctatggtggtctcagggtttcagaaagcaacaagagaggacaaattccagtgttcaagctgcactagtgtcaaagcatatcaaatagcatgtcaaattccacatcaaattcaggatgcaggcaaattgattctttctcttgatgggaagagctgaaaataatgtgtggtcttgtttttcaatgtacagtggtcccatttatccaggggggatacattccaagacccccagtggatgcctgaaaccacagatagtacagaattctgtatataccatgttttttactatacatacatacctacgataaggtttaatttgtaaattaaactcttacaaattaagagttaacaacagctgggcacagtggctcacgcctgtaatcccagcactttgggaggccgaggtgggcggatcacgaggtcaagagatcgagaccatcatgaccaacatggtgaaactccgtctctactaaaaatacaaaaattatctgggtgtagtggcgcatgcctgtaatcccagctacttgggaggctgaggcaggagaatcatttgaacccgggaggcggaggttgcagtgagctgagatcgcgccactgcactccagcctggtgacagagcgagactccacctcaaaaaaaaaaaaaaaacaaaaaaaacaaacagttaacaataaatagaacagttataacagtatgttgtaataaaagttatgcgaatgtggtctctccctcaaaatgtcctattgtactgtactcacccttcttgtgatgatgggagataataaaatgcctacatgatgagatgaaggtaaatgaatgacatgggcattgtgatctagcgttagactactactcacctgatgatacgtcagaaggagaatcatctcctttgggtgatccaggatcatgaagccgtgacaatgtccatgattggatgtcaggagcagatgatgttaatgattaaccgtgggtaatgtctacaatatggatacagtgcaaaagggatgattcacatcctacgtggaatagtgcaggattgcatgagatttcatcatgtggttggctgcaggtaactgacattgcagaaagcaaaaccacagatcatgggggtgggggtggggaactactgtacaacatgagatatatttgatcaaataagatgaggtgcacctaaaactttccctacaggttgtatgcccctgagtaaattgcttggtgtctctggatctccagctgttccccttctctctgcatggctaagccctgtccgtcacttggggctggacctagagccctgcctggccactaagccctcagaacagggtttcttttttaaaaaagacagggtcgggaggtggaggttgcaatgagccaaggtcgcaccattgcactccagcctgggtgacaagagtgaaactccatctcaaaaaaaaaaaaaaaaaaaaaaaaaaaaaaaaaaaaagacagggtctcactctgtcacccaggctggagtacagtggtgtgatcatggctcgctgcagccttgaacacctgggctcaagctgtcccccaacctcagcttcctgagtagctgggagtgccaccacgcctagctagttttttaaaaaattgttttgtagagacaggggcctcactattttgcccaggctggtcttgaatgcctggcctcaaatgatcctcctgccttggcctcccaaagcactggggttacaggtatgaccactacccacaaccagaacatttctcaaatgtgattggttgatctcctgcatccatccctggggtgcttgtttaaaatgcagagccctggatcctcccccaacctagagagtcagaacatctgggcttctgcatcttaacaagctccctgggtgatgctgctgggcctccaagttggagaacctctgtatttgaagaaatccggactccttggggactcaaatcttatttcagctcttctctggactagtttgactttagccttggtgtaaaatgggtatacattttacacgcctgtgacgccaggatgcgctcacaggggagggagggctttatcagaggtcagaatctaagccaccactacagttgtactagatccaaggagaaagactcccaggcctcatttcctcatcgttctctcttctcttacctggctttatggttcttcatagcactgagcaccaccaggcagtgtattttatgttttttttgagctttataatgccagggactatgttttgtttataactgttcacccagttcctagaacagtgcctggtacacaggagtgctcaataaatgtttgtggaatgactgaataaaagttgttcctgtacagattccacctgcctagagcaaagccaggacactgattgggatgaacacatagcacatgccagacatggctttgagtgctttacctggatcatctcactttatatgtgacagccaaatggtccccagtgaccttcaccagctgctattcacgcctttgtacagtttcctcccatcctaagctgggctgaccagtgtaatgaatacaatattgtgaaatgagaaagtatgacttttaagattaggtcataaaatatgttatggcttctgccttgctcttctggatcatctgctctggggacagccagctgccatgttgcgaggacactcaattacccctgtggaaacttacatgtggtgaggatcgtaggcattctgcaaataaccagcaccacccaggcacataaaagagctttcttgagtcaatcctccagccccagtcaagccttcagatgactgcagccccagccgacatcttaactacaacctcatgagtgaccctgagccagaaccatctatgtagctgctccccagttcctaacccacagaaactatgtgatagcatacatgttgattgcttttttaagcaattaattttgggaaatttgccacatatcaataattaataacttgtacagattctcacaacagcctatgtgggaggagccatcataattaccattgaacagagaaagaaactgaggcccagatagggggaatctttgtccagggtcacacagatagtgaactgtagcactgagattggaacccaagtttgaatgactagagtctacccactgaggtgaaggtgttcaagttgaatgccagctcttcccctgaagggccaaggctgagaccagaaaacctgaaacaatatagctgcacccaatataaatatatgcaggtaactcagggctgatggtacatgaccataataaatcagcagggtcatcaggagaaaacaagacaacaggagcgaaaacagatagaaacaaatatgcccagagtttgtatatcagtattatcagacgcagattataaaacaaaatgttggccgggcacgggggctcatgcctgtaatcccagcactttgggaggccaaggcgcatggatcacctgaggtcaagagttcaagaccagcctgaccaacatggggaaaccccgtctcaaataaaaatacaaaaaaattagctgggcctggtggcaggctcctgtaatcccaggtacttcaggaggctgaggtaggagaatcgcttgtacccgggagggagaggttgcagtgagctgagatcgcaccatctcactccagcctgggcaacaagagcgaaactctgtctaaaaaaaaaaaaagtttactgcgtttaaataaataaataacctagaaacattgccaaagtatagaaaattatatcacatgacaacaaattttaaaataacctaacagaacttctaaaataaaataatacaataatcaaaatttttaggccaggcacagtggctcacacctgtaatcccagcactttgggaagccgaagtgggtggatcacttgaggtcaggagttcgagaccagcctggccaacatggtgaaaccctgtctctactaaaaatacaaaaaattagccaggagtggtggcagacacctgtaatcccagctactcaggaggctgaggcaggagaatcacctgaacccgggaggcagaggttgcagtgagctaagatcgtgccatttgcactccagcctgggcaacaagagtgaaactctgtcacacacacacacacacacacacacacacacaaattaaatttaaaagatgggctaaacagcaaactagatatggctaaagagggaattagtgagacagaaatcagacaccaatcacagattcaagaaactccataaattttacacatagacacatcatagtaaaagtgcaaaaagccaaagattttttttaaaaaactcttaaaagcactcagaggaaaagaatcagagattctaaaaacaaaaaacaaaacaaaacaaaaaaaccccaaaacaacaacaacaaaaaacaaacaaaaaaccagtactacaacatggataaacctcaaaaacgttatgtcaagaaaaaccccaaagttatgccaagtgaaagaagccagtcacaaaggttcacatattgtcaaaatctaattttctttttgagacagggtctcactctgtcacccaggctggagtgcagtgggacgatcactgctctacaggtgcacgccatcacactcggctaatttttgtattttttgtagagatggggtttcaccatgttgcccaggctggtcttgaattcctgggctcaagcgatccacctggcttggcctccccaagtgctgggattactggcatgagccactgtggcccatcagtaagatctaatttctataaaatatcaagaagaggaaagtctatagagacataaagtatattagtgctgtcagttggaggatgggaaacagggaatgtctgctaatgagtacaggtctattttggggtgataagaatgttctttctttctttttttttttttggtctgagacagagtctcgctctatcacgcaggctggagtacaacggtgcgatctcagctcactgcaacctctgcctcccaggttcaagccattctcatgcctcaggctctgcagtagctaggattacagatgtccgccaccacacctggctaatttttgtatttttagtagagacagggtttcaccatgttggccaggctggtctcgaactcctgacctcaagtgatccgcccacctcggcctctcaaagtgctgggattgtaggtgtgagccaccatgctcagccaaaaatgtcctaaaatttgattgtgatgatgggtgtacaattctgtaaatgttactaaaaactattgaattgtatattttaggtgggtggattttatggcatataaattatatctcaataaagctgtttataaaaagaacagcagttagattgacaggtgatgatatctcaataaagctgtttataaaaagaacagcagttagattgacaggtgatgatatctcaacagcaaccatttcccagcattttgggaggccgaggtgggcagatcatttgagcccaggagttcaagaccagcctgggcaacatgaccaaaccctgtctctacaaaaattagccagctgtggtggcacgtgcccgtggtttgcagctactcgggaagctgagcccaggagttggaggctgtagtgagccatgatcacgccactgcactccagcctgggcaacaagagtgaaactccatctcaaaaaaaaaaaaaaaaaaaaaaaaggcttccccaggccattcaaatgtacagccaaagttaagaaacattgtctaaagggatgtgtttccggcaaaagaaaaattatcccagatgaaggtctgaggttcattccttcattcaacatatggagcctccattatgtgtttggaactgttctagacaccaggaacacagcagtgagcaaaacaaaccaaagtccctgccctctaggagaggaaaacagacccagaataacataaataagtaaaacatgctccgttagacagtaatagatgctgagaagaaaaaatgaagccaggaaagcggatgtgaaatgctggatacgtgtgtctgtgaaatttcagatggagtaactagggaagatttttgggtaaagaccaaaataaagggaaggagggagccatgcagacgtttgggttatggcaggtgcaaaggccttagggcgggagtgtgtctgacttactccaggacccagcaggtcaatgggacttgagtggaatgaggcaggggcagggcagtcagctacgaagacagagatcgggaggcaatttgcgagccctgggacagatctcggattttgctttaagtgagatgggagtacttgggtcggggagtggcatgggtttgatttacattttaacaggactctccggcagctaggtggaaatggacggtagggggcaaaaagagaagcaaggaggcccaggaggaggctggttcaagacccctgagatgatggagcactgatggagctggagcgggatggggccggaggaggtgagggatgagattctgcaagtggagcccgcaggatctgctgatcgatgggacgaggaacgggagaaaaattaaagcggcgcatgaggcagacgaatgcaaacttcaccaatagctcaacgaaaagacagacggtgaccgctgagaggcagcgtcggatctgggtaagggcgggttcctgagcctgccaggcctggattcaaacctcggctgagtggccttggacaggtcatcaacaaacagagccttcgtttattcatgtgcaaacggggccaaggaccgggcctgccccgaggtatgcctgaggcttgggtgagcaggcgccgggctcgcagggcgcgctcctaacccgtccccagcggctcgacgctgtggatcccgccgccctccagccccggctccggcgccgactcctgctcaggctcctgctcctgcccccggccccgcccccggccccggccccggcccccggcccaccccggccccgcccccagcccccggcccccccggccccgcccccggccccgccccggccccgcccaccccgcctgcggcccagctccttcccgcggctctgcgatgcggcccgcagggtgacccgggcgggagtccggggacccgcgatcagccccggaggacggggtggggtcgccccaaacaggagcgccgggaccgctgggaccccgcactcggcgtccgccgccgccgggtagccgggcagtggaggtcccggatgaggcgacaatttttccggccccccctcccagtcccgccccacttccggggccgccactttcactttctcttccgccgaagccgctccccttgcgaagaactggggcctcccgggaggagagagggctttgccttgaaacccgggacgccaggggcgctcccgcaagtgggggtcctccgggacttggaacgccccggctgggtggtgtccgggcgtcctttccccgcttcttcccacctcggctggtcccgtttcctcctgcgcccagtgcggacctgtctcggcgcccgctgccctctcaccgccccacgcaggatcccggcctggtcaccgggcagtgtgatgcttcccgactgccgcggggacagcgaggcacacacagggcttgggccgcgccggaggccacacggcctggctgagttgctcctggtctcccgcctctcccaggcgacccggaggtagcatttcccaggaggcacggtcccccccagggggatgggcacagccacgccagatggacgagaagaccaagaaaggtgggcacaggctggaggtggctggggaacttccggtgggaagtgggccccgcaggacctggccttgcccctggccagaagggccttggagagggggctttagcctgccctccctctaccctcctccccatcagtttcctcctttggtacctgctggcttccagagccatcttggggccctgagaactccttgggctggctctgtgctgagatggggctaggggactcgcagaggacacagggcattgaacttggagacctcctgggctggtgggagacagacgtcagttgacctgagaagcaggggtacttgcctcttctcttgtcccctgcacctagggttgtagaacggaagtcagtcactgccttgctggaaaccctcccatgcccctctgtgttctccaaacaaaacccagaggccctgggtggcccacaggatatctgtcctcagtcaccccgccatgctcactctactggagccccactggcttccttcggttctcatccaaccattttttggccaaggcccttactcttccttccacctggaccactcttccccactggagcttgacacgtgcagcttctcctccttcaggtcttagcttcagtgttaccccctcccagaggcctcccctggtctccttaacctgtttatttccctgccagcaaggatcgcaatctgactttttttttttttcttgttaaacttgttcattgtctccccactgggcagggagatccataaggagaggggccctgtttataaatctctgtgggattccagttcctgggacagtgggtggcacacagtagaagctcaataactgcttgttggataaatgaatagaaatatgagggaccctgggaatgggaaggacaaacaaccaaatgagcctagtgtgaggaggagtggggaatattagagaacccctcccggagaaagggacttttagtctgggtgctgaaggatacgtaggagttcaccaggaagacagagaaagcagcacacacaaaggatcgcctcctttcctaccccattactctcagctcctgaaaataaaccctgtgctaactggctcctgctgtactggctttcagcagaggaaatggccctgagcctcacccgagcagtggcgggcggggatgaacaggtggcaatgaagtgtgccatctggctggcagagcaacgggtgcccctgagtgtgcaactgaagcctgaggtctccccaacgcaggacatcaggtgaggagtgcatggctggcctgaacccaagggacagcaggacaggatattcttgcctgtagaacagttcttcctaatggcacgttctggcttcaggaggcctggcttctaaccctagttatgtcattaatcaactgtgaaatacagagcaggtcacttcacctctcagtgtgtcctcattttaaaaatcagaccgtaacagtagctatctcatagggttgttaggaggtgtactgtattaggatgttaggccttatacaacagaagaaaacggaacagtgacgtaaacaaatttgatggcagggagtccagatagggaggttctgctcccgacagtcctcagaggctcatattgtttctctcaccattctgccattcattcccagattcctcatggtgcaaaatggccattccagctccatccagccatcacatcacaggaggaagggaagaaagacacccctccacactcttctaaagagcatagctcaaaaattgtacacacttcttccgttaattcctgtggaccagaactgattcccacagctacagttcagcttgaggggagactgtatagccaagatattcagctagaattcaggggttcgcttggtaagggaagggaagagaatggatactgtcggtctgtgctccaggagacttaaactcaatgctgaaacactttgcacaatgcctggcgtgttatgcactcaataataaacattagtgtctatcgttattttttgactgctttttcattactggatagtaaggcaatagttttatggtttctgatttttggttctcttggtgggtcccatttggtttttcttaaaacagttttatttatttatttatccttacagttcgaccatttaaagtatacagttcaatggcttttagtatattcaaggttgtgcaaccattgccacaatcaattttagaacattttcatcatcctgtaaagaaacctggtactcattagcagccagtcctcatctctctaccttttccctaactccccaaccttaggcaaccactaatctactttttatctctagggatctaccttctggaaattccatataagttgaatcatgcaatatgtggccttttgtatctggcttctttcacttaggatcgttttcgagattcatccatgttgtagcatgtctaacaacttcattcccctttttttttttgacatggggtctcttgtctaggttgaagtgcagtggtgccatcatcgctcactacagcctcaacttcctggattcaagcagtcctcctgccttggcctcccaggtagctgggactactggcatgtaccaccacacccggctaattttttttttctttgagatgggagtctcactctgtcccccaggctggagtgcagtggcgcgatctcagctcactgcaagctccacctcccaggttcacgccattctcctgcctcagcttcccgagtagctgggactacaggcgcccgccaccacgcccagctaattttttgtatttttagtagagacggggtttcgccgtgttaaccaggatggtctccatctcctgacctcgtgatccgcccgcctatgcctcccaatgtgctgggactacaggcgtgagccaccacacccagccacacctggctaatttttagaaagtctgtagagataaggtcttgctttgttgtctgggctggtcttgaacttctggcttaagcagtcttcccacctcagcctctcaaagtgctgggattacaggtgtgagccaccatgcccaaccagaactttattcctttttattgccaaataataatctattgtatagacatatctcattatctttactcattaaatcagttgatggacatttgggtgtttctattttttggctattataaacaatgctgccgtgaacatttgtgtccaactttttgtgtggacacgttttcatttctcttggatacacactagcagtggaattgctgggtcatacagtaactctatgttactttttgaagaaatgccagacagttttccaaagtggctgcaccattttacattcccaccagcatatatgagggttctagtttctccacatcatctctaatacttgttgttgtttatctttttgattatagccatcctagtaagtttgaagaggtatctcactgtggttttgatttgcaatttcctaaccatttgatgacaaatgatgttaagcatcttttcatgcacatattttctttggaggtttgcctattcaggtcttttgcccattttaaaattgggtttatctttttttttttttgagatggagtctcgctctgtcacccaagcaggagtgcaatggtgcaatctcggctcactgcaacctccgcctcccaggttcaagtgattctcctgccccagcctcctgagtagctggattacaggtgcccaccactacactggctaatttttgtatttttagtagagacgggtcttaccatgttggccaggctggtcttgaactcctgacctcaggtgatccacccaccttggcctttccaaagtgttgggattacaggcatgagccactgcacccggctgggtttatgtttttatattgagttgtaggagtactttattcattttagctagaagtactttattcattttagcttatcagctacatgatttgcaaaaattttctctcattctgtggattgtcttctcactttgttgatggtatcctttgaaccacaaaagttttaaattttgatgatgtccagttagtctatgttttattttgttgtttgtgcttttggtgtcatatctaagaaatcgttgcctcatccaaggtcatgaagatttacctctatattttcttctaaagattttatggttttagctcttacatttaggtctttggtccattttgatttaatttttatataaggtgtgaggtaagggtccagcttcattcttttgcacgtggatattgagttgtgccggcactatttgttaaggctgttttcctctgtttaatcatcttaaccctttttggaaattaattgaccataaatgtgagtgcttatttctggactctcatttctataccattgaactataatatatatctgcccttacgccagtaccacactaattactatagcttcatagtatttgaaatcaggaaatacaagttctccaacttttgttctttttcaatattgttttggttattgcaagtctcttgaatttccatataaattttacgatcagcttgtctgtttctgcaaaaaaaaaacaacaacaactgggaattttggtagggatttcattgaatctgtagatcattggccacttgattttaaacaaaatattgagatatctacttcttgaaatgattgcttgagacagtacctgtgtactccttgctatgaaaaatgaggaagttaacatactcatcttccacctttccttttccttactttttttgttgaagtatcattgtggacactttcccagttgacttccacttgatcccctgaattaactaactggcactggcgtttcctttgtaaaatgtacaatgtcagccaccatcttgctactaaagtgtggcctgtggaccacaacatggggggaatctcaggtctcacctcagacttgctgggtcagaacctgagttttgagaggctctgggcaaccggcacctctcagacctgctgttgggttctcatcgatggacccgatgcttcctagcaaatgatacctgttgtatgtgttattggtaataacatagtttacttagctattacattaattaataaaacatgagcgctgaaagagttgtttctgtgaaaataagctgattgctttaaaaagataagagacaaatcaccaaaaaaaaaaaaaaaaaagattaacacttttgggtgagacagtagtaaggaaatacagtaaaaatccagaagggctctgtgctctgatgcttcaggagtgtgtctaagttcttgctcgctttaaagaagctgctactagaaattatagatcatgattatcgatgtggttcatacaaaaaaaaaaaagaaaaatccctgggaaactccaatgagcaggtataaactcacgctgggcatggcggctcagcactttggaaggctcaggcaggagaatggcttgaactcgagtttaagaccagcctgggcaacatagtgagaccttgtctctgcaaaaaataaaaaaaattagccaggctgggtggcacacacctgtagtcccagctatttgagaggctgagatgagaggattattagaccctgggtggttgaggttgcagtgagccatgatcatgcctgagtgacaaggtgaaaccctgtctcaaagaaagaaagagagaaaagccattggctgtacacctagagactggccagtgaatatgcatttatagtatgtaagttaaaattaagtgtttaagctttgtctgcagctgtttttgtgattctctgctgttcaccagcgatcctgatgtcacattggatgagagagctccagctgtatttttttgttgatagtgttaagattatagctttaaaaaattttgttttctaacataattaaggcctttatgctttgcctctaggttgattctaaaagtgtaacactactagaaaggatttatagtattttgattatggaaatattattcactatagaataactagtgcagttgaaaccatatgcacttttatgtttcaaaacccttattgctggaagaacattttggggttaagatccagtccttttcattttttacttttcttctattctcctgtatcagactcatctatttttgtttttcaagaacttttcacgtggaaaatgtggtaaacttttagagtctttgcatgtttaaaaatttctatattttgctctgtcaattcattgatagttgactgggtattcaaattgtttacctgaagaattttgagagcattttctggactgcttttaaataaatttcagatattattttatccttaaatactttagtatgtgtcttcaaaaaattaggacttggcggggcacgatggatgatgcttgtaatcctagcactttgggaggctgaggcaggtggactgcttgaacccatgagttcaaaaccagcctgggcaacatagtgaaaccttgtctctacaaaacattagctaggcatggtggtgcgcccatctagtcccagctacccaggaggctgaggtgggagggtcacctcagtccaggagattgaagctgcagtgagccaagatcatgccactacactccatcctgggtgacagaagtgagaccctgtctcaaaaaaaacaaaaacaaacaaaacccctcaatactattatcacaccttagaaaaggaataagaattccttaaaatccgctaatgccctgtttatattcacattttcctatttcattagtgctttttacaattggtttcttcaaatcaggagccaaacaagatctacatgtagcatttcttactatgtcttaagtcccttttactctcctctatttttatgccactagttttttttttaagaaacctggtcttttgacctctagaattttccccatattctggatctatccattacctcttcatggtatgtattagaccactctagcattgctacaaagaaatatctgagactgggtaatttgtaaagaaaagaggtttaattgactcagttctgcaggtggtgtaggaagcatggtcctgacatttgcttggcttctggggaggcctcagtgaacttttactgaagcgggagcaggcacttcacatggtgagagagggagcaagagagagagttggtggggaggtgccacactttacaacagccagatctcacgaggactcactatggcgagaagtcactacagtgagcgcagcaccaggctgtgagggagctgcccctatgacccaaacacctcccaccaggcctcaccttcaacactgaggattacagttcaaggtaagatttgggcagggacaaatacccagactatcatggtgtcatttactatctcccgtttttcctgtaactggtagttagagataaagtttcaattagtcagcagtcactttttttttttttttttttgagacagagtttcactctgttgcccaggctggagtgcggtggcgcaatcttggctcactgcacggtccgcctcccgggttcacaccattctcctgcctcaatctcctgagtagctgggactacaggcgcccgccaccgtgcctggctaatttttttttttgtatttttagtagagacgggttttcaccgtgttagccaggatggtctcgatctcctgacctcgtgatccacccacctcggcctcccaaagtgctgggattcagcagtcacttttaatgtgcaggaactcttcctcattttttggttgcttcatgcctttccttgctttctgaatgcagtgttttcccaaatctctctgaaggtactagttagacttcactgttgcttattgttccataccctaaatgatctctgtttcctttggggtcggttctgttttttcatcttttcatgcttttgattttccaaacatgttggaggatcctcaagaaagttaaaaccactttctctggaataataccatgtagatttaaatcctgcctctggctgaacacagtggcttactcctgtaatcccacttcgggaggccaaggcaggaggatcacttgaggccaagagttcaagaccagctttggcaacatagtgagaccctgtctctacaaaaacttaaaaaattagccaggcatggtggcatgagcctgtggtcccagctacttgggaggctgagatgggaagagcccaggaggttgatactgcagtgagccaaggtagcactactgcactccagcctgggccacagaaagagagcctgtgtcttaaaattaaatcaagacatacaaatgaatcctgcctctaacagttattagttgcttagtttggcagagtcactggaacctatctgtgcctcacatttttatctgtaaaacagggatacagcagtacctgtctgatgggttggttgagaggattaaatgagttaatacacatgaagtgcattaaatagtcttagcacgtagttaacaacaacttctggtggtttcactaaggagcaggggagagaagacagaagaggttggagaggtcagggaggtgccagatcatggaggccctcgtgtgctgccacgagttgattctaagagtagcgtggagccattggaggggcctaactggtgggttctaataaaggaagaagcatgggtggggcctaccccagactggggtttgtgtgtgtgtgtgtgtgtgtgtgtgtgcatggccatgtgcctgtgtgcaaatatgtacatgtctgtagccggtggctgaggctggacccctggccagagcccatgctgagcccctgctgttctctgcaggctgtgggtgagcgtggaggatgctcagatgcacaccgtcaccatctggctcacagtgcgccctgatatgacagtggcgtctctcaaggacatggtgagtgaggaggcggagggcgacactggggtgaaggctctccctttcactcctgcttcctctctctcctctggccctcccttcccactctccctctctttgcccccaccaggtttttctggactatggcttcccaccagtcttgcagcagtgggtgattgggcagcggctggcacgagaccaggagaccctgcactcccatggggtgcggcagaatggggacagtgcctacctctatctgctgtcagcccgcaacacctccctcaaccctcaggagctgcagcgggagcggcagctgcggatgctggaaggtgaggctctgccctgagcaccgccggacccagcgggggccctggactcacttgagggcatagggcaagcaggggcagagcccctgggtttttagtcagggactcacccagaggaccctatccaagtggggaagagaggacctaagacacatgggagggagcatttcagggacccatcatgagaacagctggcacggggaggggtggactccgtccaggctccggcattcccagctgtgtgaccttgggcaaggttgctcctatctgctgcccagtttgctaaaatcataaattgggtatgacagtgatcgtgataactagtgtttattcttaatttttaacttctgaaatgtttcagacctacagaaaagttgctaaattttacaaagtagtacataaagaattcccatgtacctttcatgtgggttttaccacatgtgctttctttttttttttgagacggagtctcgctctgtcgcccaggctggagtgcagtggcacaatctcggctcactgcaagctccgactcccgggttcacgccattctcctgcctcagcctccggagtagctgggactacaggcgcccgccaccacgcccggctaattttttatatttttagtagagacggggtttcaccgtgttagccaggatggtctcgatctcctgactttgtgatccgcccgcctcggcctcccaaagtgctgggattacaggcgtgagccaccacgcccaacccacatttgctttcttttatcattctctttctatataaaattattttttttctgaaccattttgagagtaagttgcagacatgatgtctctttcccctaaataattcagtgtgcatttccttgaaaagaaaggtcattttcttacattactgggtataacaatccaactcaggaaactaacgctgatacagtactggtatccagtctacagatcttactcagattttaccagttgtcccactattgtcatttatagcaaaagacttggcattctgctgtcatgtctcagtccctttcaaagagtccaggccagtttcttttttttggcgggggttgggggctgatgtttcctccggagtggatcaagtcactgttttggcaggaccgcctcagcggtgctcttgggtccctcttggtgcatccttcaggaggcacggaagggctggtgttgtgctgggttttgaagctcaaaggacatagaagcatttatcggtggaatagggaccctgaccctgggggagccaggatgcccacttggccagatggaagctggaggtacccccagggaggagggagaggatagggggagggtctgcctggctggctcagggagacccacccccatgggtgtggaccaagtgggccgcgtggaaccaccaccctttaaccctcctccacagatctgggcttcaaggacctcacgctgcagccgcggggccctctggagccaggccccccaaagcccggggtcccccaggaacccggacgggggcagccagatgcagtgcctgagcccccaccggtaagctgtccttggcctcagtatcctcttctgtgcccctcccttgcctcaccctgcccagtcgggctcacagcaccctctgctcccaggtgggctggcagtgccccgggtgcaccttcatcaacaagcccacgcggcctggctgtgagatgtgctgccgggcgcgccccgaggcctaccaggtccccgcctcataccagcccgacgaggaggagcgagcgcgcctggcgggcgaggaggaggcgctgcgtcagtaccagcaggtgggcgggaaagtccctggacagacacctgcagaccgcacgggggaggtgtaggccaggaagggagacacctgcgcactgccgcgcctctccgttactgccttgcccctcccaaccatgctgctggcagtgaccctgcacctggctgtgaccctgcacctggctgtgacctgccctctctcaaaggtcaccctgtggctgagacccgctccctggctgtggcgcacatccaggttcacatgccccactcccacgtgggctgtggctccatccccagctttgacacaccacacgagtatggctggccatgaccccagcaccctagccatgaccccagcaccctagccatgaccacacctcagctcggacctcacccccacccgtctgtgacctaagcctgctccacctcgccgtgacctcaccctggactctcctactcctgacctcttccctctcgggctgggcccacccctgacttcctgagagcctggcctggaccctcgctgcgccctagggggatgacccccgaccccggtcctacgccttagccctaccccgcccccatcgtgacacacgcactaatgacacagacattgatccccgagtgctccccattctgatctcacccctggccccacctgcattccccttggacccggtgctgcccctggccaccccactcctgttcccgtctcagctcctcggcttcgtcacttccccacccctgacgttgagtggctccaccagccctggcccgggccctgccctgctacctgactcaccactcagaccccggcccccttccttaccttgctgccattgctgtctcacctggcgccttccgtggctacctggccggcctcccctcccttggcttccccacctccacctggcctcactcccagccccgcccctcccaacctgcctgctcctgcccatcccccaccccccaccccccatcccccagccccacccccatcccccacccccgtcccccatcccccatccctactggctcccagctttgcctgtggctggtctgacccagccctgaccacgccccctggcccttcccccttcggggtctgacccgcccccgaggccctgacccgccccgtggccccgccccgtgtgcccagcggaagcagcagcagcaggaggggaactacctgcagcacgtccagctggaccagaggagcctggtgctgaacacggagcccgccgagtgccccgtgtgctactcggtgctggcgcccggcgaggccgtggtgctgcgtgagtgtctgcacaccttctgcaggtgcggcccccagtcccacccccggcaatgcagcttaatcaaagccgccaattacgcagggctggacgtgggtggggccctgtgctctgatacctcattggacgcccgcgaaaacctacgaggtaggctccgtctccccatgttgcggacgaggaacctgagggaaagagaggcccagcgccttaccccaggcccacggctcatgagagaagcagcctagacgtgagcgcaggcgtggggggagactcccttcccctctacctttcgccgcccgggctcctgcagccacgctgctctcagcctcgctgtgggcatctgccagtttctgagtctcctgtcatggcccccccacccctgaatgtggggaacacagacccgctcaccacagcggacccttgtggagccgcccctgggtgacaggctccgtgcctgcctcctgcagcttacattccagcagagaggctgatgagaatcggataatcgctggttgatgtctttgtgaattgtgtcaaatgctacatacagtacattaagagacaacaggagtccttcccagagagggtggtctggaagcttccaaggaggtagccccagagcagggaccggaaggcctgctgtaggtgtggggtgtgggcctggcctgttggaggagactgaggaggtctcttggtggctggagcagagggatgaagggggtaatcagagcaggatagagaggtgttgggtacgtgagcagcagtgaggagttgggatttgttctgggtaggatgggagtcactggggagacatggctgctgttctgagatagactctaggggccagatggatgcagggagcccagcgaggaggctcctggagtcacccaggtgggggatgtggggcctggaccagagaatcagagcggcagtatggaggcagggtggaggccttggtgatgggttggtgagagggatgggaaggaaggagatattgaggagaagtccacctggggtgactgagtgaggcccctggggtcaggccttgccatgtgagggatggagtccccagtgaagggggttcctatgatcctaactcttttcccctcccctcccctagggagtgcctgcagggcaccatccgcaacagccaggaggcggaggtctcctgccccttcattgacaacacctactcgtgctcgggcaagctgctggagagggagatcaaggcggtaaggcctcagggtgggagacataccccaagtcccaactcctaaggaactgggccctgagcaggcagcagacatctttcttttctttcttttttttttttggagatggggtctcactatgttgtccaagctggtctcaaactcctgggcttaagcgatcattcatcctcagccccccagacatttttcaagagctttgtccatgtggggtgttgagaccccaagcagaaaaagaattgaggggagtagctagtcaagaaaccacatctatgaaggaaggacagcagagttgttaagaatcagggactcggctgggcgtggcagctcacacctgtaatcccagcactttgggaggatgaagtgggcagattgcttgaacccatgagttccagaccaacctgggcaacatggcaaaaaatattcaaaaaatagccaggcgcgggggcatgcgcctgtagtcctagctacttgggtggggtctgggatgagtgggctgaggtgggaggattgcttgagcctaggaagtaaggttgcagtgagctgtgattgtgccactgcactccagcctgggcaacagagtgagaccttgcctcaaaaaaagaaaaaaaaaattagtcagggaactctggagcctggtggcctgggtgtgtgaccacaagtcagatatttaacctctctatgcctctatctcatctctgttagagtcagagttacagcttctatttccaggattgcaaagattacagtagaggatatgtgtatagaattcatagtagtacatccaggcgcagtggctcattcctgtaatcccagcgctttgggaggccaaggcgggtggatcacctgaggtcgggaattcgagatcagcctgactaacatggagaaaccccatctctactaaaaatagaaaattagccgggtgtggtggcgcatgcctgtaatcccagctactcaggaggctgaggcaggggaatcgcttgaaccccggaggcggaggttgtggtgaactgagatcgcgccattgcactccagcctgggcaaccagagcgaaactccgtctgaaaatatatatatatatatttagagtagtgcttgtcacatagtaagcctttgttgttgttagcgcttactgtgtaacaaatcactgcaggctcaaaacaacagtcatttattcagctcataaatctgcaagttaggacagttggccctctgtatctgtgggtaccacactggagaattcagcaacggtggatagaacatattcttacaaaaaaaattacaataaaaaacaaatttaaaaaacaatacagcataaactatttgtataacatttatgttatattaggtattataaataatctacagatgatttaaagtgtatgggaggatgttggtaggttgtatgcaaatactgcactattttatataaggggtttgagcatccatggatttgggtatctgcaggggtcttggaaccaattctctggataccgagggatgactataatttgggctggacttacctggatggttcttctggtctgggcagggcctcgctgatttcacctgggcctggctggtgggtcagccgcggtggcctggtttataatggtctcatctgtgatgactgggatgactggggcctccttccacttcaatgtctcacccaccagcaggctgcccgggccttctcatgtcatggtggtctcaaggttccaagagcagccatggggagccccagtgcatgtgtactttctaagtctgctcatttctcacttgacactgtcccattggccaaagcaagtcccatgctcaagcacagagtccattgggaagggaccacccaaaagtgtggaatcggggagacagaaacaaattggagtcaccactccgccagtctgtcacagcgttatgtgtgtctgcatacgtgtgtgcttgccgctggcgctcttcatgaattcgttagcaggttctctgcctggctgctggtgatctcgagcaagttgtttcccttctgtgggactccatttccttatctgaaaagtggacagttgggcttgattcatggttttcaaactgctgggaaatgaccttcccagacttgggcactgtgggttcccaggccaaaacatggcagccgaggcccaaatgggagatccccacaaaacacatacacagacctcctctttatttctgtcccccctgcctctctcctatgcccctatttctcctgagaatgctcccaacttcaccaagtgtttatggagcccaagaggttctgcccctggggaaaagggggaggcagaagaggtagaactttgggagttcacagctctgatatcaggagcagccccatttttctctgttgtctctgggtggttgctgaggctccttcgctctggcctggagagacctcatgaccagtcattccatatgtccccagcacccatagccatttgcttagaggtttccctgtggagtccaccccagccaaggggcattatgctggggccaggttcatgccaaagggctgcatgaacttccctggagcccactggagttgatgtgagtctcagaaaatggtcaagtgtgacagagagaaggaggcagggatcagccaagtaatgtagtggaggttgtttttacaaaaacagaaaaatatgcctcaccacatagaaccagagcagaaatcagagagaaaatcacccacaaacccaggaaatcctccaattgcattttatcttatttccttcagtatctctgggcaaattttttttttttttcctttttgagatgaagtctcactctgtcatccaggctggagtgcaatggcgcgatctcagcccactgcaagctccgcctcccgggttcacgccattctcctgcctcagcctcccaagtagctgggactagaggcgcacaccgccatgcccagctaatttttgtattttcagtacagacgagttttcaccatgttggccaggctggtcttgaactcctgacctcaggtgatccacccacctcggcctcccaaagtgctaggattacaggcgtgagccaccgtgcccagccagatatgattttttaagtcaactttacttaagtatactttgcacacaataaaatgtactcattgtaagtatgcagtcaggtaaattttaacaaatgtaactctcgtaaccaccaaccactgttacatataacataggcatgatttctgcctcattgtaaccagcatggatacaatcgctttagcttttgttattttgctatagaatttttctaaagattattacaaatctcaatagcacatatactgtttatacctcttagttctagtttctcagtttgtaatactccttcaaggaatgttttgcatggtgtattcttttttttttttttttttgagacgaagtctcactctgttgcctaagctggagtacattggtgtgatcttggctcactgcaacctccacctcccgggttcaaacgattctcctgcctcagcctcccgagtagctgggactacaggcagatgccaccacacccagctaatttttgtatttttagtagagatggggtttcactatgttggccaagctagtcttaaactcctgacctcgtgatgcgcccgcctcggcctcccagagtgttcagattacaggcgtgatccatcattcctggctggtgcatcttatatattattttcttgggataaagttaaagaagtgggatgggtaccaaagggtcagaaaagtttgggatggttgaaacgttattgccacattgctttctcagtgctacgtactagcttactagtttgtttaatttttattttttatttttgcgggtacatagttggtgtatatatttctggggtacatgaaatactttgatacaggcatgcaatgcgtaataatcacatcatggagaatggggaatccatcccctcaagcatttatcctttgtgttacagacaatccagttaacctctcttagttattataaaatgtacaattaaattattggctacagtctgttgtgctatcaaatactaggtcttactctatttttttgtaccaatttgccatccccactcccctgccacgcctcactaccctttgcagcctctggtaagcatccttttactgtctgtcctcattagttcagttgtttcgatttttagcacctgcaaataagtgagaacatgtaatgtttgtttgtctgtgcctggcttatttcatttaacataatgacctccagttcttccatgttgctgtaaatggcaggattgcattcttttttgtggccgaatagtactccattgtatatatgtgccacgttttctttataggatactagtttaatcatgtctttcccaacattgcttattatttatgttcttttctttattgtgagaaaatagacataacatttaccattttaaccagtttttagtatacagttcagtggcattaagtacattcacactgttgtgcaaccatcaccaccatccacctccagaacttttagaaattccccccactttctttcactttctttttacttttcttttccttttttttttttttttttttttttttttagctaggatttcattctgtcacccaggttggagtgcagtgcatcagtcatggctcactgcatccttgaccttctgggctcaagcgatcctcacaacccagcctcccaagcagctgggactacaggtgtgagcaccacacctggttattttattttttaaaaaaattttttggtagagatgaggtctcactgtatttctcaggctggtctgaaactcttggcctcaaggaatcctcctgccttgactgacctcccaaagtgctgggattacaagtgtaagccaccacacctggcctaaaatccactctttgaatggagtttttcaacactatgaggattacatgaagaaaagagcctggggctgggttggagtttctgggctgggggctttctggagggtatttagtggtcaagggtcatatgtcaggtgttctgaatcctgagcagcaaggacatggtgtgttggcagctcctgacccctgaggattaccagcgatttctagacctgggcatctccattgctgaaaaccgcagtgccttcagctaccattgcaagaccccagattgcaagggatggtgcttctttgaggatgatgtcaatgagttcacctgccctgtgtgtttccacgtcaactgcctgctctgcaaggtggggcctgcagggactccccccacctagtcactgtcatcttgcctggagctcaccacactgcagtgcgtgttctcctgggaagggagctgtgacactggcctgctggtcatgacttagagctacatgtcagtgggagagtgtggcttgagcctgaactgagccctggccccacagacggagtcccagccccagccccagatggagcctcaaacctaggcagccctggttcacaatggagccccgaccctgggccagtctgaccccagtcacagactgaatcccagtcccacattgagccctgatcccatccaagtccatagacttggcctctgaccaaacctgaccctgcacttgtcacttaaggtggtcccatattcagctcagaccctgaaccgagctctgaccctggcttctgactgaatctgtgacagactaaggcctgaccctggccctataccacgtctccacccgtgtcctcaactgagtgctgaccccaaacctagacagccctacctgatccttcccccaggcctgtccccgccgcttcatctcaaaagttgaaggtgaggagccggtaaacaggtctggagcctggtctcagactcagcctgagcaagctcagtctggggtcattgggcctgtaaccccgggcaggcccttgttagggatgcagggtctcaccctaggggtataagggatttctgtgcccatcagaacttaaataagctgggtgtggcagcacatgtcagtggtcccagctactcaggaggctgaggtatattttgctgttagcatatgtgatgaccttgacttcacctccctggcgccaatatcctcttctgtaaaatggcttatgcattacaaagtgaggtcctgccagtgactacacctagaggcattaagtgcctttgtggactcctgccctgcacctcacctctcccagcttcttaaccccctgaggaaccttcttaccttgagtccctcacccgctacaggccatccatgagcagatgaactgcaaggagtatcaggaggacctggccctgcgggctcagaacgatgtggctgcccggcagacgacagagatgctgaaggtgaggctgggacagggccgaggcctagggattttaagttctgggatccaggtgggggctgggggcttcccagtaagggctgtgctcacacatccctggaggctctgacctcccttctggctgtcactcccatccggaggtgggacttaggccgaatggtcatgtcaggaagagcgtctgggtggagggtggagaccacaggaatgaagagggggttgctggatggagcctggcctggcagagccacacaggagagactccacagctctagagggtcaccaccttctccctgccatggggaggggccaggctgggtgactgccccagccccgccccagggccagcacctgccccactccaggtgatgctgcagcagggcgaggccatgcgctgcccccagtgccagatcgtggtacagaagaaggacggctgcgactggatccgctgcaccgtctgccacaccgagatctgctgggtcaccaagggcccacgctggggccctggggtgagtctttgctcgtggtggtgtggagagggtgcccttgtgggctttgccttagaggagggctgggaaaactacagcccatgggccatatccaacccagcacctgaatttgtacagctcccgaggtaagaatttttttttttttttttgaaacggagtttcactcttgttgcccaggctggagtgcaatagcacaatctcagctcactgcaacctctgccttccgggttcaagcaattctcctgcctcagcctcccaagtagctgggattacaggcatgcgccaccacgcccggctagttttgtatttttaggagagacggggtttctccatgttggtcagactggtctcaaattcccgaccgcaggtgatccacctgcctcggcctcccaaagtgctaggattacaggcgtgagccaccgggccgcaagaatgttctttacatctttaaatggttgaaaaaataccagaagatgactattttgtgacgtgaaaattacatgaaatccacgtttcagtgtccgtaggtaaagtgctttggagcacagccgtgttcattcattcacatgttggctgtggttgcttttacactacagaggcagaggccgtatggctgcccggcccaaaatgactggccctttgcagaaaaggtttgcccactcctgccctagaggacagcaagtaaaggttcgatctggagtcagaggtggattggcccctggctctggcacatactgactgtgtgattaggctgcctgccactcacctctgtcagccccatttcctctgtgaaatggagatgatagctgggcttatctcaggcttgttgtcagaatcaagtggaaaaattgcaagagaagtgcttagagagcctgtcacttggtgagcacccttgcagatggtagctgtcgttattaggggtgtgctctggaattgggggcctgttgctacgttcaggtagactttcagacaggtggaggcagaggaaactgccctctcgcatgctgacatgtctagaatatgcagagtggtcagatcctctccctggcctgttcccggatctaggcgtgggtagactgagtgctgtgggagcccagaaaaggcctcagtgactctccatcaggtagctgaggctgaccaggccattcttgcaggaggacctgcagaggcaaaggcccggggtgggagagcgctcggctgtgggggcagtctctgcactgcgctgacattctcttctcttcctcccatcctctagggcccaggagacaccagcgggggctgccgctgcagggtaaatgggattccttgccacccaagctgtcagaactgccactgagctaaagatggtggggccacatgctgacccagccccacatccacattctgttagaatgtagctcagggagcttcgtggacggccttgcttgctgtagcgttgtaggggccctgcctgcactgcggttgtccacggtcacatctgccccagtgcctttgtccttcccttggggcttgccggccagacttctctcccctgcggctcccacctctgcctgaccccagccttaaacatagcccctggccagaggccttgctgggtggagcctctgtgtgactccatactcctcccaccacaacactcatctgtcaaacaccaagcactctcagcctccccgccttcagctgtcagctttctggggctaacttctctgcctttgtggttggaggcctgaggcctcttggaactcttgctaacctgttcagagccaggaaggagactgcacagttttgaaagcacagcccgtcaggtccggctctgcgtctccctctctgcagcctgtgtaagctattataattaaaatggttttccgggaagggatgagtgtgatgtccttgagaggaaatgaatgtcctggcctgggactctacacacaggcaggatcctgaggtctctgggaactgcatcagaaagttgacttgtcagtccatctgtggtagaatgaggctgtgactgagcactgggacctttctaccagatgtggaccccatgcccagcctcaggggcaaggatgctcttgggtcaccgtcagccaggacaggtggagtgtgcagtgtgtcaagtctgcagagaaggatgggcttaggggcgggaggggaagtcttgccactcctgctcccttttgacctctcagcaggcatctagggttggcaggtagatagttcaagaaggaacgaagctgctgcagttgaggggtggggttgtccatcctattttctcgtctcaagcaagatggcacagtatcgattcagcagtatttactagaacccactctgtgctggtcggaggttactaagacagggtcctgggatgttcattctctaagtctttcctccgctctgtgacccaccctccttccccttttgagatctggtatttgatgcccaacacattgtccacgctgtgacgtgaccatcatcatagcaggcagagggcgcctctgctgctgaaggcctgtgattttgtggggaagggcctgttctagcaactggaaaggcactgccacctgccgttggatgccaggactcaagagctggccccagtcactgtgcgcagagctgtctgagaatgtgtgagtggactgggtccttcggcactgcctgcattggctcagggcagtcaaccgtcgcagaggatgaggggcacactcaggcagcctccccggccctggaggcagaaaggcccaggcagaaccactgactgggaggaaacagaaaaagcagaggagagccaggctgcaggcgtgtggatgggaccagctcaggcagacgctgtctcatacccactctcccctctcttgccagggcctggcctggtgtctctcaggagcctgggcatgagacaaaagcagagattgttctcttgtggtaccacaggctgtaaccagtccacccagtgttgttttagaaatttaaatcggttgcccatctttttaaattggcaacatcgtttaccacattaaaatctagatgccctgcttctcttgaaaatgtcaaagcttggtaatgccaggtcctcacttctacctggggggaatggagtcacagagatgtcaaatctcttcatggggtgtacaccctccagtttgccacagtcctcaccaccccaggactcacgccgaggcctttccagtgcccttgcaccatcctttttctcgtaagaggaagatgaagtggggctctacgcgcggcgtatcacaggtgagggcgagaccagcagagagggctgtgctggctgtggctttgctcggcctgccccatccatgctgcagtggtgcggaggagcagggagctgtgtagggccaaccccggttcctgcctcagctccacccgccttgcacctgcaagtgaaaggtcttaagacgagcaggcccagggcaccctctactgcagggtcaggtggaggtgcctccacctcccaaggctcacccatgccaggggcccagaacttgagaggccagcaccaactctccagggccgaacgaaaaccaaaccccagggctttggactcaaaccatcgagaggaagcagcaagaggtcccaaaggtacttgagtgacacaatgatcatcattctctcctcaggggcaggacaggggcaggggaaggtgagtggaagcccattgctcagataaagagcagctgccacggagggtagcccgtcggcctatgccggcgctcactggtgtcttcctctagtgcttggggctggcatggaatctgctcaaatgcaggcagctgaaggtgagcccgcagcctggtgatcccaagtgccaaccatgaggaagtctggagaaaagaccagggagcaggggccctcgtgaggagcaggaattggcagcaggggccaccagcagaacaccagaggggacagtggcagggggaggaagatacagccaggctgggtctcagccccagctgagggtctcacctcttagctggtgaaggctccggcctgttcctgctttcggtcaccacttcatccctgggtgatcgtgggcccggtgcagggctggctacaagtgtttgttgattggtaactgctcatgaaaatggcaacagcactagcacagcttcacaaatagaaacacatttcaccaacacccttgcaggaagccctccaggagggccaagaccatccctgctttactgttatggacgtgagcctccgagaggcagtgacttagatgctcacccagccaggaaggaaggaacacactcgaccctcagtctaagaccccatcaggccactaataattctccctccaaacccagctcaggtcaaggcctatcttcacccccaaatcatccctaaggcagcctcaactctccacagcactacagccatcctgcccggccccagtgctccacagaccctaaacccgagccctcccgggctttgttggccccaaaccacctacacttgttacgtgttatttttacactggcgtttcccctcagccttgcatactgtgtggtgttgtctgacaccacttttccagctctctgacaccaactggggctagtgtcaggttccacagattaaagggctcagtcccacacttccgatggagtcacagatggggtgcccaggctacccacacttcctgggctacccacacttcctgggctacccacacttcctggccaactacacattcaggggttcccatgactccaccccctcaggttcaataatttgcctgagtgactcagaactgaagatcaccctgccctgacgcttcctggtgtggtgtcctcaaggatgcagtgtgggcaggaacagccacgcttgagatgaacagggttagggatgggagcgactggcagccactgcaatctcaagttttggggttttttttgttttttttttgagacggagttttgctctgttgcccaggctggagtgcaggggtgcagtcttggctcactgcaacctccgcctcccaagttcaagtaattctcctgcctcagcctcccgagtagctgggattacaggcacccgccatcatgcccggctaatttttgtattttagtagagacggggtttcaccatgttggccaggctggtctcgaactcctgacctcaggtgatccacctgcctcggcctcccaaagtgctggaattataggcgtgagccaccgcgcccagccctgaatctcaagtttgtaaagtgctccacctctgtcactccaactcccaggagtcactgcttgggattgaaagtttccgccctcgaatcacctggtctttctggtgcaggagcaaccccgaggcaatctaggggccctgctctaacgaattcattagcatgaactcaaatgggctggaaaggggttatgaataacaaaagacactcaccactcacgaaattccaagggttgtaggagacccgtgttaggaacccaggagaaagaccaaatatttcttagtatcccacacatacccttcctttagttctccaattatcataattctattcatccttcacattccaccctcaccttctatgaaagtgccctgaatttgctgcaggatagattgctcctggagtgcagctctggtgtgagctttcagaggcagcgcagtgccctgggcagcctgcgtaatccacgactgtcagatcaaagggcagtgtgaccctggcccacagtggcaggagctgagtgccactggcttggccccgggaacctgcgcatctcccctctgagccaaggaaacaaacaacacagacaacagtgtctccccgatggccccatccccagggtggaggccctgcaccgggcactgctctgcgcgcgcgctccccagcagccagcagtgtctggaggatactggaaagcttggcaagagtaggctgagcagctcctctgtggacagaaagggcatgtggagaagcggcacatcaagctctggttaggatccaaaaccaaatgccagctcctaggatccccagaccagggtgtgaaacacaccaagagcaccccagacccgcaccagttgtgtcgactgtgacagtacccagagtggaaaaaacatgaactcaaactgtgttttcctccactgctctctcaataccaacagacatctgtggccaaatgtgttggggatttctcccctgacaccaagcaagcaagcaattctgcagcctacatcagctgggtatcctccaattcaattcagtgctcaccctacctatagtatctggaaatggaatccacaggttcaaggctctgtcccacaagaccgccgcctctgccacaacattggactgaccaccctctttgggtggcatgatttgccaagagtggctcacagaactcagggaaacttatgtttaccagtttattacaaacattattagaaaaggatacaaataagtaaacagccagatgaagatacacacagggtgaggtctggacgggtcctgggcaaatgctggagcttctgtccccatggagtgggggtgcgccaccctcttggcacatggacaagttctcgttcccctccctccacatgttcagctcttcagaagctcccgtgttcctgggccttttatggagacgtcattggataggcatggctgaagcatggcagctgtgttgagatgaaactggacaaaaagcataaggtctaaacccagcaaggcctgtctgtccagatgcttcttggcctctctgtgcagcgttcctccttccgggtatggggcagcaccctctctggaatgagggtcttatgagctacagtcagattaaagtctggtgttgagcaagtgaaatggggcaggagaaggtcacagacagagattccgttttctgaggcctgcagtgtcccaacattataacaaagggttatgggagtgatgaaccaggaactgtggacaaaaacatctacacacgtataaaatatcacagtgccctgggctgcagctggagtgtgtgggtcataattcttgcagatgaaacagaaacagcaagactgtaggtactgcccaaggtctcctagccagtcaaggctgaccaggagtccacagaccatggcacagttctgggcctgacatggaaggtgggagcatccagatcagagaccattcccactgagcggtggccaaggacggaatgacagaagaggtgattagtaaccacatatggctgtttatttgatacagggctctgtacaaaatatttacacatattctttacagaataagtaaaccacctgaaggtaattagataatgctttcttctcaatgacagggagaatcctggtgtcagcaaagttagaaaacagataaacattctccttccgaggccacaactcaagcaaatgccacttgcttcctaggatctgaaaagctgtggccttgggaccctggtcacatgcacctcctttcctcaaccccatcaattccttcagtatttacaaacaggcttgagtacttgtggaaggaggggcagctggtgccgcccactgagaggatgacaagagggccagcttgctttgggagagcactgggaatatctgccgcatcatcacctctggaagaatttcctttgccctgatgaatacaccactgtctaaattaatccatcgacatcacacttaccccacagtggggctcctgagccatggacaatgatccatccctttgagctttttttggttttaaagtgcgtagtggtggctgggcgtggtggctcacacctgtaatcccagcactttgggaggacgagacgggcagatcacctgaggtcaggagttcgagaccagcctggccaacgtggcgaaaccccatctctactaaaaatacaaaaattagtcaggcgtggtagcaggtgcctgtagtcccagctactcgggaggctgaggcagcgagaattgcctgaacttgggaggcggaggttgcagtgagctgagactgcaccactgcactccagcctgggcaacagagtgagactccatctcagaaaaaagaaaataataataaaataaataaaaataaagtgcttagtgtaactcagcggacagggctcccagctgctctggcacgtgggacaccctccaccctgcacacaacaggcatgcaaagaggactggatatggtggggtagagtgcttctggtgtgttcactttaagaaaacatctgccaagagagaagagtgcccaggaaagaccaggaaaatacaagtacatggctgcttcataccatataccccaattctttaaagcagcaaaaggcactttttttttcaggccagagtgaatctaaaacaaacctggctttgcttacagggaagctgtcccagaaggactgagtgatgcctcttgttccctaaggtctggagagtctttgcaagtttccaacgacatttccaaccaggtgggagagaccagcagttgacgagtcaagtcagacccaaaaaacgacgccaaggtagtgagtgggtgcctatttgggagtaggatgatttgaggaaaacaggaagaaaaaccggtcagaaagtggcactttggaagtggaaagctgtttgcaaatagcaactctggctaaagcgaaaatgttaatcaagtagaaagtaaaattcaggatcttagaagctcatccttctgatgagaactatttttttttccgtgaaggaactattattactttaaaagtgagggtaatttacatatggggtgtatatattctaaaaatagtaataaaagtaccttttataagcaatgttgtgtggcttgtagaagaaagcagggaggaaaaaaaggcaggcaaaactagtctaggtctaggccctaaaaatgagcttccttcccacttgactggaaacgcccatgtgatttctaggctgaaaataggtaggatttaacgagtaacctagttcccttctgtctctgatttctgatcagctgatggagctgctagtaagaggggccgatcatgctcccagacgagtcctttggcctcttgctctccatcccaagcctgactccttcagcagcagccccctccttctgtgtccatctgatgcaggcaagcaggagcagtaagagggcatcccatgttccagttcaccttctatggggtgactaggaggttcccggtaactagggcagcccaggcccagcaggttgcaaaagcagctgcaagcttcagaaacccacttcctccaacaccagggaggtggcagagagcccatccaaaagcccactgggagaggcataagattctgtgccaggcccccaggtcccctctgtgtcaggtaggctctgctactggcctctgaagtaaaggcaaacacaaacgggcagggcagggtggcaggaataaaaaactctggacagaaacccttttaataaaggaaattccacccctcccaatccttccatggaagggtgagaccttaatgtgatgtaagaggaaggtcttctctggctttcagggaaacagctgcagctgaaacttaggggcccattccagggcacttttcaccacagccagtgcagccgctccaagtgccactgtcagccccatcactgccaatttcacaaagcggttggtccttggcttggtcaggacatcttttgttcgatcttcaggccgcagaagtccccgaaaccgctgccgcagcaccatatcaggcctctgctgggctgatgccagctcaaagtctttgaaagtagaggctgccgtcctgcaggggaaagagacggaaggaaggaagtggtatgaaagaggaggaggaaagcaaaactacaccacataggctgcgggcagagcctttcattgctgggaaagctctttatgataaagacccatatgtctacagtggggattccactggcctaagctcagatctctggaaacatgccccaaccctatcccaccagacacaaaccttccctcgcttctgctcatttacagccacccccattcaaccagtgtcccagccttgctcacctctcagcttgctgttgggcagcggcctcccgagcaagttcggatgggggaaactgaacaaaaaggtctcctgctctgctgatcagtgtctcatagggcaagtcctgagggatctgggacaacaggtggtggaccgaggccatgtcacagtcacagtccaggacttcctgctcgcgatacaacacaatctgtggggaggtagtaaagccttgcagtcagaggccagacacacagggcctgggccacctgcactccattatccttgcagatgaatttaaactggtaacagacaggactcagcccaaatgttgagcaaactcttgtatccatcaaggaagtaataacatatatacgctcagtgctactcctactctctggcccttcctgcaaacttccaccacatgacatgaaaggctgaccagttacaatctaagtccttcgggcatgctgggctgctcaggtgtccctttaagtcttgaaagaaatgaaggagattcttttaggagaaagtaggagaattattgggagattcctggagctccagcatagaagaaatggttcaaaacagtagaaagaacagtcttgctccctttaagcatcttccttctgactgttggtccacaaatccacagatgctcaagggaccagtggtcattgaaggacttccctgaattcccatctccaccccatccctcaagacccttctactaactgaagcccctaccctccaccgcaagccgcctcccttgtctgtcatgacaccagatctcttcttttcttaaatctggagttgacagcttacgctactatttccctaattgtgttcatcagctgaacatatattccagacaatgtcaacaggaaccctgacaattcacaatgcagattagcattttaaaggttcagaagtgtcatgcagcaaaaaaaatctgattttgtttatacccagcatttcccaacttactattttttgtgtgtgacacccccattaatactgcacagaatggtgtccagggacaccagcctgggaagtgctgtcttttgcatctttccataatccccaggtttcccttcagggaaaatgaccacagtgggatgggtgatggtgaacccagctgctggctcgtggcctgtacctaccacggctgcaaagtaaatcggcatcagtgggtggcaggccaggaagaagtcatataaccgcacgacgtgcctgaagtcagacaggacatgcccaaaccaggtgatgagccagctgagggcaaagatggtccctacctcagcactagaaacaaaggaaaggcaggtgtcaggtcctgtgggccatcccttccctctctctgggccttatagcgctggtgagaaggaagcatttaggaataagatttctggaaaattcagttacctaggaattcagcatcttctccttacaaaatatttaatacaaagtctttaaggtgtaccacaacactaacaccacaacagggtcctggctgctttatctcactgggtgctcgcctactggccaacaaatgtcaactacaggaacgagaagcagttgttttcagagaactacgccatgattctccttctgactaagtcttacccttctggggggcacaggtacatattcccaagcctgaaaacatgactgcattaatttttctgttaacatgagacaactgaaatatcttaagatgtagctgccagacacggtgagtcacgcctataatctcagcactttgggaggccaaagcgggcggatcacctgacatcgggagctcgagaccagcctgaccaacatggagaaaccctgtctctactaaaaatacaaaattagccgagcgtggtggcgcatgcctgtaatcccagctacttgaggctgaggcagaagaatcgcttgaacccggaagatagaggttgcagtgagccaagatcatgccattgcactccagcctgggcaacaagagaaaatactccatctcaaaaaaaaagaaggcatagccattaccttttaaaaaattttaaaaaaagaggcattggccaagaacacatttccaactaaacagagaagaaacaaaacatcacatgggatttgcaaaaaaatatttcttctctttggtacttgggaaataaaacaacccattgttggccttccccttctcgccactggatcccacaggactttgtgtttctcttgtggcaataacctcaacatcttaccttggcatacataccttatccacctctccccactagatgtaaactcaagggatgggctatgtcccccaaagagcacagtccccaaaaatgctccaagaactgaattacccagattgctggtgactggaacaactggggagaacttaacaaatccacccaagacaatgaggaaactgcgctcggcttgtgaggagtgtttcaggtgtgggggggtgtgggcgtgtgtatgcatgcacacagaaatgcagacacatatgtacctctgcatgaagtcatggagctctggattcacctggtcaatgatgggcatcagatagtttaatatatgcttggtgttgtccattgttggatccataaaatccctggagggagacaattcaataagcctggttaccaaacacttagatcagggctcagggtggcgagggctcaaactcctaaaaaagctgaccagaaaacaggccagtgagttatccccaggacggctgaggagtgatgcccgtcgtcttgtgttcctctctactggtacctgaggtggtgggtagataatttttctaccagggatgttgccagcctctcgcctaccaccagcagaaatgtgaccacaatgtcatggtagccctggtagtagtgcagctgagggttgcgctccaagatgaggaggatgatgtcaatcagttcttcctggagcccttctctctgttcctctggcatgcctggggacaggaacagagatgcctttgaacataccaagcagcctagttaacaaggaggtcgaagaaggccagcaatgaattttcagagaaaaaaggaaaatgaattacaaataatttggcaacgcatatcaagatccactgttgataccacctggcatacaggaaaaggcagctgctagctttccagtaggggaagctgcagatgccaccctaaccaagttgctgcagttaatactgctgggacacagtatttaactgcagaatttcaactatgggagccacagacggcctctgcctcccgaggtgatgcactgacagagctcagcatcatgtctgcaggatttctatcaacagcgcacagacctcaatctcacaatgaagaaatacccaatatccccaaaggaagagaaatttaactctcatacaatacaaaggaactgttccagattaaaaatggctaaagatataggacaacagcatgagaaacgcataaatctatatttccttttccagtgaagcacattactcgaagaaatggtgaaatgtgaataaaatctgtggattaattagttaactatttttcagtgttgttactgatgttgctcagtgtactgtgattacatgagagccttatatttaggaaatatgtcctgaaacacttggggtaaaaagatgtcatgtttgcaacttactcttaaatagttcagagaaaaagtgtatgtctatgtgtaaagcgaaggaaagacagaaagcagctaaaaaagcaaatgtaggccaggcgcggtggctcacgcctgtaatcccagcactttgggaggcagaggcaggtggatcacgaggtcaggagatcgagaccatcctggctaatatggtgaaaaaccccgtctctaataaaaaatacaaaaaattagctgggcgtggtggcaggcgcctgtagtcccagctacttgggaggctgaggcaggagaatggcatgaacccaggaaccagagcttgcagtgagctgagatcgtgccactgcactgcagcccgggcgagagagcaagactccgtctccaagaaaaaaaaagcaaatgtagtaaaatgtgaaaacaaaaggaaatctgggtaaaaggtatctggggaattctttgtcctatttttacaacctttcagtaagtatgaaattatataaaaataaaaaaattttaaagttacacggtcccctttaaaccaaagcaaacgttacaggaaaaactgatcctcttgatccaaagatgtattatagctggaaatagggaagcctgtctcaggagttctttcagggagttcttttactgctggagctagtgctgccagcagtaaaaatgccttggccttatgagccaggttagaagaatggcacatgcacagcttctccacaccattagctttcagttacaaacacatactcagagagagaaagcagctaatgtaagggcccaaactaaaccggacaaaggattgcaggtaagagcaaaactcacctcttgcccatatttaccccaccccttctcaaataaaaagcataccctaaaagataaataaggaaacgaagcaaacccagggctgctgataggtgaagcagtgaaaggagtgagagtaaaaattaaaccctgtgtgaattttcagcagaaaagcagtgagccaagcccagaagaccatgaatggaaaaagaatatgaagccacactgtaagttcagcctacagaaagcgtatcacagatattacatcaatggaagaggaataaagggttcagagggaaaacaggttacctaggaaaaaatgggggtggctcttgcctgtaatcccagcactttgggaggctgaggtacgtgcatcacctgaggtcaggagttcgagagcagcctggccaacatggtgaaaccccatctctattaaaaacacacacacacaaaattagctgggcgtggtggcgggcacctgtaatcccagctacttgggaggctgaggcaggagaactgcctgaacctgggaggcggaggttgtagtgagctgagacagtgccattgcactccagcctgcaacaagagtgaaactctgtctttaaaaaaaaaaaaaaaagggaggcatctgtcctatatgatctcatccaaaccagcaggctaggaaaagggaatggaccgtgggcatgtgcttttatcaaaaccacgctggcaggctactgctacctgggtattgcaagaatctgtccagggagcaagaatgccagcaggaaagcagccccttcaacaacaaaagccaggccagagcacagtgcagaagagggaggcagccagcttagaggctcctgttccctttagcaattctcctctcttcatgacctaaaggtggagttgccagaggaagaaaaataggtcatccatgtgaggtttgttgcccagttcccttcactgtgaaaattgagacaacggtccttcttttctttcttcctgaaataaagaggtaattttaggaatacattcttttttgtttgtttgttttgtttttatttatttatttttttatctattgctgcttaatttgttaattaaggaatatactcttacacaaacagggaatggcctctcttccctctaaggaatcttacatatgtatgcgcaaggtaccatcgtttttaaacctaattaagatattactcattcttgttggtgcccaattccacaccaatctgctctttaatgccagactgatggctctaacaatccttattaactcctttttgtggcttcaaggaaaaacaaaaacctcttctctcattcaccacctctaggccaggagaaattatttttggttcaggctttcacagtgggggtctgaaagtgaccagtcaagaaaaggatgactcagcaaaaggagagctctgaaggtccctgaggcggcagggtccagcatattaggtcacatggtatgacctggaacagatacagtctttccaaatgtggcaggaccgggagagcttctcaccaggagggaaccgccgcaatgaccgccggacgtccagcaacacttgttggtagtccttgctcatctgccgtaggttcttccctattgaaggaaaaggcacgttattgcaggaatgcctgagaagccagaccagaagcaaaacattctgggatgacacaaaaggcctagagggcacatgtcagcttctcctgaagaggatgatatgactcaagatacaacatttggcagggaatccctagtttggttccaaacattatgtttcctgcaagtcacaatgaccctaagagaagggagcacagactgcccaggagacaatacagcagggtgggaaggagagcaaagacgtaaggaggccaggcgcctcgtgcagaaggccactgtgcatcactgggaactgctctgaatttcaaagtccacagctacaaaatgaggatattccaaggatcaaataaaatcatgaatgtgggaacaacagaccactgaaaaaaaccctaacgcctataaagttgtgggagcactaagctgtttagaaaggtatattgagactcacataaagaaccacctaacaactcttgacccagcaattctaaaactaaagagctgcaaagaggagacagtccttgtgttcagctgctaagtccaatacagcatgaaaggaggcagtctctagccattatacatataacaagtgtacatttcctccaaccaaaccaagtgctgtataataagcgtacatttctctcacaacccaaatccaaagctagtaaggctgggcaacacttcctcacacgtaggcttcacggtataaaaagatgagggaagtttggaacctgatagaagaacatcatctcaggattcagggtgtgaacatggcactgccttagccttccaacaaaaagctgactgctctgaagcagccaattccaaggataataacaagtggcaactcaacacctactgggtgacatcatgacgctgtgaactttttggtggcagaagtcctgtttcaatcatctccagtacctggcaatcatagcacaactaatatttgccaactgaaagaatcctcagcacttggcattttgccatgatggcaggaaagctacaaggtgagtgcactgagtgaatgagcagcagagtggattcactgttctacaggacttttactattttgaacttcattccaaggaactcttttcaccacatgggccttgcacattagttaggtaactcttttcacagaattacaggattttagaactccaaaggatttcagtatttcccaataaaaagagggtgttttctttttttttgagtatctcactctgtcgcccaggctggagtatactggcgcaatctcggctcattgcaacttccgcctcctcggttcaagcgattctcctgcctcagcttccctagtagctggaattacaggtgtgtgccaccatactcagctaatttttgtatttttagtagagatggggtttcaccatgttggccgggctggtctcgaactcctgacctcaagtgattcacctgcctcagcctcccaaaatgctaggattacaggcgtgagccactgtgcccggacaaaagagggtgtttttgtgtgtgtttaattttactttacttttagagattggatcttgccatgttgcccaggctggcctcaaactcctgggctcaagtaatcctgcctcatcctcccaagcagctaagactacagccgtgcaccaccatgtctggctagtttttaaatttttgtagagacagggtttcgcaatgttgcccatgctggcctcaaacttccagtctcaagtgaccctcctgcctcagcctccgaaagtgctggaattacaggtgtgagtcacctcgcccagccacaaaatacgcattttttttttttttttttttttttgagacggagtctcactctgtcacccaggctggaggacagtggtgcaatctctgctcactgcaacctccaccttccaggttcaagcaattctctgctgcagcctcctgcgtagctgggattacaggcacctgccaccatacctggctaatgttcgtattttttttttttttttttagtagagatggggtttcaccatcttggccaggctggtcttgaacttctgacctcaagatccacctgcctcagcctcccaaagtgctgggattacaggcgtgagccaccacacccggcccaaaatatgcatttttaaaaaacacttgccaagcaagtatgcagaacaaagcatatgcatttttaataaattcacttgcctagccaatattttaatccctaataaaaaaagaacttgcctgggcgtggtagctcatgcctgtaatcccagcactttgggaggccgaagcaggctgatcacttgaggtcaggaattcgagaccagcctggtcaacatggcaaaaccccatctctactaaaaatacaaaaattagccaggcatggtagcgcatgtctgtaatcccagctactaggaaggctgaggcaggaaaattgcttgaacccagggggcagaggttgcagtgagctgagattgtgccaccgcactccagcctgggtgacagagcaagactccgtctcaaaaataaataaaataaaaacaagtaaaaaaagaactcattccacttttgaataaaattctacttatcggtttggccttattttcagagtgggcccaagcatttcccaaaacaccctagatttattcatatacccttggtttgaaaggaccataaaaattaaagatcctggaattcttttccccctgtctcctagataagctcccctcacagcctcccccactccccttacctgatataggaggtgggtcattggcattgacattgaggagcttgggccacacttttcgtctgatctcatcagtcaggagccctccttcactgatagccatgcgtctaagggcagccacatcagtgggatcactgttcagagcctggtgtatctctgccactttctttttccttttggcgttaaagtctgaagataaggatagggaagaattaggcgcacattcagcacgtgcatattttctgcctaggactcaagctcctttttgatatgaggtacaggtaagtatctcctcttagctctaagactgcctgctggcataaagtctcacagccagatgcactattcatttcgggcccagtctactggacctcatggtgggaggcttggagagcccactataaaacagattttaaatcaccgatttttaaaaagatagtctctttttataggtctgaaccaaaaatcataggcacagactggaaataattattagttgttgttgtttttaagagacagtgtcggctgggtgtggtggctcatgcctgtaatcccagcactttgggaggccgaggtgggcggatcacaagttcaggaattcgagaccagcctggccaatatggtgaacccccgtctctcctaaaaatacaaaaattagctgggcatcgtggtgctcgcctgtagtcccagctactcaggaggctgaggcagaagaatcacttaaacctgggaggcggaggttgcagtgagccgagatcgtgccactgcactccagccaggatgacagagcgagactccgtcttgaaaaaaaaaaaaaaaaagagacattgtctctctaagttgcccaggctggcctcaaactcctaggcaaaaccgatcctcccacctcagccttccaaacagctgggactacaggtgcatgccaccatgcctggtccagaaataattacacgtacttttttttttttttttttttgagacggagtctcggtctgtagcccaggctggagtgcagtggcgcaatctcagctcactgcaacctccgcctcccgggtcccggttcaagcaattctgcctcagcctcccaagtagctgggatttcaggcacgcaccaccatgcccagctatatttttgtatttttagcagagatagcgttcacaacgttggccagggtggtcatgaactcctgacgtcgtgatcctcctgcctcggtctcccaaagtgctaggattacaggtgtgagccaccacgcccagcctatatgtacttttttttttttttttttgagaaggactcttgctctgtcgccaggctggagtgcagtggcacgatctcggctcactgcaacctctgcctcccgggttcaagtgattctcctgtctcagcctcccaatacattaaaaaaaaaaaaaaaaaaaaggtaagtgaggctgggcacggtggctcatgcctgtaatcccagcactttgggaggccgaagtgggcagataatgaggtcaggagttcgagaccagcctggccaacatggcaaaacctcatctctactaaaaatacaaaaattagccaggcgtggtggcatgcacctgtaatcccagctactcgggaggctgaggcaggagagtcgcttgaaacccaggaggctgaagttgcagtgagccaagatcgtgccactgcactccagcctgggcgacaaagtgagactccgtctcaaaaaaaatgataagtgaaaaaagaaatgtgttaaaatcagacagatcttggttcaaatcctggctctgccacttatctgatccataatcttggacagatgacttccctgctctgggcctctggactgacaccctcttgtcaggatagttaccatggtacacagtagatacttactaaatattagctcccctcctcactctgaaacaacatgtattttacaaatcaacctacagatatttaattagtacgtaatatgcaaagcactaaggagatatactgtgtaagtaacaagcaaggaattacaactataataaacgctcagtaaattcaggcatatctagcagttagtgtcaatgttttcatacaagaatgtccattcttaattcccaaacttcacagagcatatacatctcttactgtaacaattttttcctgttgtttaaataggaaaaatgcatgtcaccaaaactcgatactacattgaaaacataaccacatgaaaaggtctcctgttacacgctactacaactggtaaaaacattagaatcacatagagatttttttttttttttgagatggagtctcactgtcgcccaggctggagtgtaatggcgcgatctcagctcactgcaacctccctgtcccaggttcaagtgattttcctgcctcagcctcctgagtagctgggattacaggcatgcaccaccacgctttgctaatttttttttttttttagacagggtttcaccatgttggccaggctggtctcgaactcctgacctcaagtgatccacctgcctcagcctcccaaagtgctgagattacaagcgtgagccaccacgcctggccaacacagagatgttttcaaaaccagtgtcaaagggtacttgggtttccagtgtggctggtgacactgccaccagacactgccacagagaggctgtgacactgcatacaaaggaactgtttcttaaaaaccatagtaagtaatgttttaagcatcttacatccttatgtgatagtctgttattcatagacattttgccatgtttaaattactttttaggactggtccctgagtggtgctatttacaactcattgattacaatcagttagatttctttgttccttttccacgcccactgcttcacttgactagccttcaaataaataaataaataacttttttgggaaattggttgggaatttgtggttagtagctatcatatcatttttctatgtgaaataacagagtattgctttttggcctttggctgagatcaggggagataaaggagtaaaaggctctgaaagtttgcatgcagaatgtctgcttttagggatggcttgtggaagttaaatggatgatgcctgtatttcagttctttctagttgccagtaccattgagaaaatatgtcaaaaacacaagaaatgttacacaagacaacaccaaacgtcacaaggcagtagactataattgtcaaaaaaggtgcatgcagacaataatggccaagagctcaaagagactgcagtgggtcagggccaagctaacctgagaagtgtaccttaaaaaggaagaggagcaaaactctcttgacatgcttaattgtgatgtttaatgaacatccttgcagtgtaagacgacctttttaaaatacattcttggccggggacggtggctcacgtctgtaatcccagcactttgggaggccaaggcaggcagatcacctgaggtcaggagttcgagaccagcctggccaacatggtgaaaccctgtctctactttaaaaatacaaaaaactagccgggcatggtggcaggcgcttgtggtcccagctactcaggaggctgaggcaggagaatcgcttgaacctgcaaggtggaggttatagtgagccgagatagcgtcactgcactctagcctggacgtcagagcaagactctgtctcaaaagaaaaataaataaataaataaattctctcggcttcagacctacctatctttggtgtctcaagttaaacccaaagcagcacccatcacatctgccttttctttacttttgtctcctattgcttccagataccttcttccttttcctgcaaagcccattctgctggagtggaaaagtccaatgccttgatgccagggtcttgttcagtcactcaagatggagtgtagtggcacagtcatggctcactgcagcctcaaccatatatatatagtttaaataaatcaataaaccaataaattctctcttaatgatggtttgagcctcaccacttgattaggacaatcagcataacctgtagaatcttatttggaattgaattctgtattgtaattttgttcctgttcatttttaaattttatttttctttcactgtaaagatgatactctgctttaaatgttaaaagtgtacaagcaaaaggccgggcacagtggttcacacctgtaatcccagcactttgggaggctgaggcaggcagatcacgaggtcaggtgttcgagaccagcctgaccaacatgaggaaaccccgtctctactaaaaatacaaaagttagcctggcctggtggcgcacgcctgtaatcccagctactcatgaggctgaaagaggagaattgcttgaaccccggtggcagaggctggagtgagccaagatcgcacaactgcactccagcctgggcgcgacatagcgagactccatctcaaaaacaaacaaacaaaaaaaagtgtacaagttaaggaagccaggtacaatggctcacacctgtaatcccagtgctgtggagggccaaggtgtgagaatcacttgagtccacaaaatcgagaacagcctgggcaacaaagtgagaccctgtctctacaaaaagtacgaaaagttagccaggcatggtggtcccagctactcaggaggctggggcgagaggatcacttgagcccaggagtataaggctgtggtgagctatgatagcaccactgcacttcagcctaggtgacagagcaataccctattatcaaggcactggacttttccactccagcagaattctaaattttatttaaactatgtagtatatattaggtgcaaggcaccagagttcatgtgaagtggaagatatcaccagaaggtagggcagattttagaaataactaacagaaggtacattaggttttagaagggacaccaagcatcttccccagcaatgttctagtctgaggaaaaggaggaaggtgtcctggtgacctgtctctaaaaacaaaaacaaggctgggcacggtggttcatgcctgtgatcccagcattttgggaggccgaggcgggcagaccacctgagattgcgagtttgagaccagcctgaccaacacggagaaaccccatctctactaaaaatacaaaattagccgggcgtggtggcacaggccggtaatgccagctactcaggaggctgaagcagaatcgcttgaacccagggggcggagattgaggtaagctgagattgcagatcgcgccattgcactccagcctgggcaacaagagcgaaactccgtttcaaaaaaaaaaaaaaaaaaaaaaaaaaaaaaaaaaacaggctgggcgcagtggctcacgcctgtaatcctcgcactttgggaggccgaagtgggcagatcatctgaggtcaggagttcgagaccagcctgaccaacatggagaaaccccgtctctactaaaaatacaaaaaattagccgggcgtggcggcgcatgcctgtaatcccagctactcgggaggctgaggcaggagaattgcttgaacctgggaggcagaggttgcagtgagccgagatcatgctatatgccactgcactctagcctgggcgacaagagcgaaactccgtctcaaaaacaacaacaacaacgacagcaaccacggacggtggctcgtgcctgtaatccagcatttttttttttttttttttttttgagacggagtctcgccctattgcccagactggagtgcagaggcgcaatctcggcttactgcaacctccacctcccaggttcaagtgattctcctgcctcagtctcctgagtagctgggattacgggcacgtgccaccatgcctggctaatttttttttttgtatttttagtagagacagggtttcaccatgttggtcaggctagtctcaaactcctgacctcgtgacccgccagtctcagcctcccaaagtactgagattacaggcgtgagccaccacacctggcctatcccagcactttgggaggccgaggtggatggatcactgaggtcaggagattgagacgagcctggccaacatggtgaaactccatctctattaaaaatacaataattaggccaggtgcggtggctcacgcctgcaattccagcagtttgggaggccgaggtgggcagatcatgaggtcaggagatcgagaccatcttggctaacacggtgaaaccctgtctttactaaaaaaatacaaaaaaattagccaggcgtggtggcgggcgcctgtagtcccagctactcgagaggctgaggcaggagaatgaggtgaacctgggaggcggagcttgcagtgagctgagatcacaccactgcactctagcctgggtgacaagttctgtctcaaaaaaaaaaaaaaaaggcagaaagaacatggattcacctgcttatacaagaaaaaaggaaaaaaaaaagtgtacgagttgccttgttacaataaaactaaatgtgtatacacacaaaggaaatggaggacattcaggggctgggatgaagggtacagaagaaaggccaggagatacggcccttccatttgacagtaaatagactaattaaaaaatatttatgtagtatatattaggtgcaaggcaccagagttcatttgaagtggaagatatcaccagaaggtagggcagattttagaaataactaacagaaggtacattaggttttagaagggacaccaagcatcttccccagcaatgttctagtctgagaccattgtgagtctacaaactgtttctatgacaaagctgtacattattattattattattattattttatttttattttttgagacagagtcttgctttgtctcccaggctggagtgcagtgaagcaatcttggctcactggaacctctgtctcttgggttcaaaccattctcgggcctcagcctcccaggtagccaggattacaggcgcatgctgccaccacacctagctaattttttgtatttttagtagagacagggtttcaccatgccaggctggtctcgaactcctgacctgaagtgatctgcctgcctcaggctcccaaagtgctgggattataggcatgagccatcaggtctggcccattattaacataaattaaagttggtactaataagtcacaggtgagctacctatgagacctgaaacgtaaaacccacataaacagaggcactagctggtttggagccatgtgcaattggaagtgcgacagaaagataataggagtaacttttcacctcggtaaacctgtcctcctggcttgactgctgtttcctggtaacctagtagggtgaccatttgtcctcatctgtctgagatcttcctggtttatacctagagtcctggcacaattgttcacagcaaaccctttctgctccctgtattctcaaatatgtcccagtttggaagccaaattaaatggttacctacctagaaatcattaaaaataaaaccccttctgggcacacctataatcccagtactttgggaggccaaggtgggcagattacctgaagtcaggagatcgagaccagcctgaccaacatggtgaaaccctgtctctactaaaaatataaaaattagccgggtgtggtggtgcacgcttgtagtcccatctactcaggaggatgaggcaggagaatcgcttgaacccgggaggcggaggttacagtgtgccgagatcatgccactgtactccagactgggcaacagagtgacactctgtctcataaaataaataaataaaaaataaaataaaataggccaggcgtggtggctcatgcctgtaatcccagcactttgggaagtcgaggcgagcggatcacctgaggtcaggcgttcgagaccagcctgaccaacatggcgaaaccccgtctccactaaaaatacaaaattagccaggcgtggtggcaggtgcctgtaatcctagttacttgggaggctgaggcaggagaatcacttgaacccaagaggcggaggttacagtgagctgagatcacgccactgcactccagcctgggcaacgagagcaaaactccgtctcaaaaaaataaacaaaataaaaataaaaatataataaaataaaaaccactgccgggcatggtttttagtccagacgtggctcatgcttataatcccagcactttaggaagccgacgtgggcagattgcttgaccccaggatttggagagcaaccagcctgcacaacatggcaaaaccttgtctctacaaaaaataggtgggcgtgacggcgtgcacctgtaattccagctgcttaggaggcagaggcgggttgtagtgaggcatgattgtgccactgcactccagcctgggtgatagagtaagactctgtctcaaaaacaaaaaaaaatctccaatttcttctgtcagcataacacctagtcaattgttcatgagatgtgtcaagctcttgactcaggtgtgtcctttcatccattcatccattcatccattcatccgcctgcccatttgtccagtcattcatcagtctgtcacttaatgggtgtctacttgtactaagcactgtactggggataaaaagatgaattactccctcccagcccttgaagggctcacagtagggacacaaacaattattatatataatagaatctgagggattatgaaaatccagaggaaagaatgactttttttcttcttctttttttttgagacggagttacgctctttgttgcccaggctggagcgcagtgttgcgatctcagctcactgcaacctccacctcctgggtttgagcagttctcctgcctcagcctcccgagtagctgggattacaggcattcaccaccacgcctggctaattttttgtatttttagtggagacggggttttgccatgttggccaggctggtcttgaaatcctgatctcaggtgatctgcctgcctcggcctcccaaagtgctgggattacaggagtgagccaccacacctggccaagaatgactacttctaaagcagtcaggaaaggcttcaccaagaatatattctggatccttcttttaatttttttttttttttttgagacagagtttcactcttgttgcccaggatggagtgcaacggcacgatctcagctcaccgcaacctcc

SEQ ID NO: 389 - DNA, 47165 bp, Homo sapiens
tggaatctggttcctgtggttcaacgataggctatgtcctctgtcacatgctccacaggggaccatgaaggtacctgtccaaacccaaaagccagtgatcctgtgggtctcttggtgaaggagcagctcagagacacgtttgggcacagcccgattttctggtaccaccatcctggttccatttcctgctcttgttcttctagccttgaatcactgtttctagcatcagcacatcatcatcctttctggaatcagggtgagtaaaatttggtgataaatgtggacaacccaacaaagaacattctcttcccaactcaaatggggagggatctgggacttacagactgcttcagccctatcaggagtgggctgtggcaggactgtcactctcctgctgccttgtctggacctggtttgagcctggcacaactctgggctctgtagggagtacagagaaaccccaactccaacacacacacacacacacacacacacacacacacacacagctcagggcacaggtagacacggagccacatagccacaggaggacatcaacacacatacactgagtacgtactgtagaccaggcgctgaggcactagcagaatttggataagtagagaagaaggtggcagaaacacataacctgcatttcaagggtaatacaagatctagctgcctagctggagggggacatcttcattcattcattcgttgtaccaatatttatcaggcactcttctaagggatacagctgaagagatctggggccatagaaaggtgggcttccaccccaggtgagcactttaatgggcctgtggagccccagcaagttgctgagccgtggactggcaggagcagtgcccaagtctgggctgcacctgagcagggccccagccagctcttcccagtcacaggcaggggctggcttcaccttgggcttcagggcagttcccacccaaaagtgcagcccctctgcagtgccctgggctcagctaagactggctcctggctgtaagaacatcggcctcttcccctccattggggttgagtgggcagagcggttggcctcagcacatgatcattccttgcctattcactcatcatcccaattagtgagctggtgggagctgccccctcatttccacaatgatctatctgcacgtgcctaatcccaggagctgagccaagagaaaaagtgatagcaaggtcttgagacttctctgaaggggctgggctggggtgttttggggtagagccactgaaattgacgggtccagggaggacctatggagacccaaatttgaaatctggtgcctatgtcaggaaacaggacaaaagctggtggattaatgacagcatttcacatcaaggctcacagagttgagcattctcagaccaaagagtccatcttttctccatacacaaggcgaggggaagcagggagaaatacaagaaaacaatcacaaaccaaagctgaggccagcagggacaaggcaccgcagcgtgtttttggctgcttctttcttctctgtcttctcctggcagagtgcagcttcccctttgctgaccagacagcactgaccatcggcctcgagagatctggactcctttagcccaagtcgcttctagttgctgttgacacattcaccacctgcttcctgctctgccagagccactccagggagggcgtgatggggaagaagagctctggtccctcctgtctgcacgcagtcccaggtcagagacagctgcggtcacagcctcttcccctcctctctctgcatgcagccaccccctgcctcctgtcactagctcagctcaaagggcacctcacaaaacaagccccggtgtgcacagggacatacgtgcacccaagatgttcaccacagcattgctttagcagaattcatcaggtcagtacaacaaaagatcacacattaaacataagacagtcagagagtgggaagttgtttataatacactaagtcagtggttcacgaatttgcagagcagcagaacaatctggagggtttgttaaaacacagaccactggaccccacccccagagtctctgaggtttggggttgagagggaaagcaagaatttgcacttctgacaagctcccgggtgatacggatgttgctgtcaagggtcacactttgagagccactacattaagtaataaagaaaattcaaaaatatatgcaacctgatatcattgtggttatgtgtaaataaatgattaagatactggtggggcacagtgactcacacctgtaatcccagtactttgggaaactgaggcagatggatcacctgagatcaggaattaaagaccagcctggtcaacatggtgaaaccctgtctctactaaaaatataaaaattagctgggtgtggtggcacacgcctgtagtcccagctactctggaggctgaggcaggagaatcgctttaaccagggaggtggaggtggcagtgagctgaggtcacaccactgcactccagcctgggcgacagagcaagacaatgtctcaaaaaaagaaaaaaaagatactatcagtcactgtctctgtgtaatgacatcgattcgaggctttttatcattttatttttttttctgaaaaaaagttgtctgcagtaaacacagttatttttgtaatgagagaaaaatatttaggcacttccttcatgacacctccccaggcatccccagagagaagtaactgcccctcccatctccccctttctgctggtgtcctgcggagctctcccttctgccttgtgtgggttaagctgtccccacacctgtccccatcaataggcaggaaatgccttacacaggaactctagctcaggcacctccctgtccccacacagggcctggcatagcgcatctttctccatccaaagccagtgggaactcacaaagtggggtggaggtcataaaacgaacgtggactccccagtccagtggcctgggacaagcctgaattctgccactgcttggctttgagctgtttggtcccaactatgggttctgggttctggaatggcctagcctgcccccactggccaccagcttggccttcatagcacccaaaaccatagcaccaccccagttggctccacatcaaaggccctcccccaccaggaagcattctggttaccaaaatggtcattggtgatggcaccattgtccagagagtccctgcaggcctggagatgcattccttcaggcccaaagacatgactagaaaactgcacaattgtcctaactccaacacttaccagtagcatgaccctatataaataaacttgctatctctgcatctttatttacccacttgtcccataataaggttgcattagagaagtgacactcacactgccccctcctcaacctccccctgacagacatgattaatcaatcacattatcctatctccctgagccaggaagcagcctcagaattttcttaacgctaatttccaagcatagttctccaatgcaagcaaaccttcaagataaaagttattaaaattaattaattgattttttaaaaatataaaagccatttgccattgctgacctatattattccctgtttccctgaaacctagaacaatgctcagcagagtagccatagtcaatcttcgttcaatgaatctacatggatacacaccagctgtcaccggttattatgaaagggaaatctttggtagccaccaaccatcctgtgcaaactccagaccaactacttcctccttccaggatccctgaccattgagttggcgccctctgctgtccgttggctggtactgcaaaggactgtccattctcagccctaaggaactgtgaaaattgagcagagaacgatgccagccattgacctcgtagtaaacagacccaaacttcctcatcatgatgacctcctggggtggctttggatgcagtcggctgcaagccccgccagacaccatgcacgtgagtatcatttagtctctttgagctttgttttatcctcctcccctctccttcctgtgtcatccgcagaactgagggccctctgttccaattctctcactccacagctgataggattgaggccaagtgaggagaggggatcagttcaaggtctcacacaccactcaaaccagaactcgggtccccatactcccagctctgggctcattgacacaccaggttgccttcctcttctctaacaggtgggacaggacaggcacagtggctcacgcctgtaatcccagcactatgggaggccgaggtgggtggatcatgaggtcaggagtttgacaccagcctggccaacatggtgaaaccctgtctctactaaaaatacaaaaattagccaggcatggtggcacacacctgtaattccagctgctcaggaggctgaggcaggagaattgcttgaacctgggaggtggagattgcagcgagctgagatcacgctattgcacttcagcctgggcgacagagcaagactctgtcccccaaaagaatcagataggaaagaaactgccctgggcttggagtccttgcgttctccaagggcttcacccacttgccgcggggtgggggacggggggtgagttctgcctggagctaaggagttagagggccccagttcaaactctctggcatcttctcgacatctctttaccaagatctgcctcatttggcctctacccatctctctgatgtcatctccccacccttgccccccattcactctgctccagccataacggatggcctcgttccaacctcagggctcttgcacttgctgtggccttttgtggaacctcctgtccccagatcttcgcatgactgagtccatcctgtttttcctcaaatgtcgtctctgctgagaagccttcctccaccacctgaaggaagtcctccctcccacccccacagaggttttgtctgtgtcctagcccccagcacttgcatgggcactcagcaggcactcaactaacagttgttgattagatgagtaaattaggggcttgaaagggagacacgaggagagtcctagaaagggagtcaggggtgaaagacgtgagttgaaggccacctccactgctgggtgaccccaggcaagtcacaacctctctgagcctcaaattttccaattccatggtctgttcatgcctggacagcctgagactctctgatcagggagacttcagagcctaccccagaatgcaggcccctcagacctagtgaggggggatggtgggcttctccttcctcccctctctatggtcccctccactagtttcaggtccaaacccctcagggaagggacagaggaagccaagacgaatgggcatccccactccccaagggcaggcagcccacatgaggcctctaggataattacagccagctgggctgcctctaccccctaccccagctccctgctccctggaagctggagaagctcagcagctgcccacatgtggttatttgaacagggagtgggagagggagctggcaggtccactgctgggccatggtgccagctggggccagccctgcctgacagccttgcttgagaacccacgtgtacaggcagggccaggaacgctgaagtgctggggctcagcaacttccctcccaggctgaggggagcaagaggccacaggcctcaggtcagagccacatgtggctgtgggctgttgtcagcagatccctgcacagtgtaaagccacgctgcaagctgggagtgagctgctgacagacgcaggcccacatgccctgaggctgaaaggcagggataggagccagggccagacccccgaggggactctagggagttcagatggggcttcgccatcaggcctgggagccagagccacggccagctgctctctgctcacggggaacgggacgtcaagatgagccagggtggtccccctccctgcatgaggggcttctcaatgatggggcatgttggataccatgttcccagcttaccccagtagaaactgccttcaggcagggaaccaacctggaaggactgagtcactgattcatgctgggatgtcaatgaccaagggtagatctgaagagctctaggtgtgaagcttctggggttcagagccctccaacacattatcctaggaaaacctggcagaaaatggaatgacttggttttgtgttaagttctgtgcgtgtgtgtgcgtgtgtgtgtgtgtgtctgtgtctgtgtagattaagacagaattgtctgacatcttttaaatgtcccaagagatcctcagtctcaacaagtgcaaaaccaactcagaatctacccttcatccaagccagtcttctctacggggtctctcagcacccccaggtcagcaggcagaagcccacgcctcagccccatctccatctcccatcctttgctgattcccagaggtttcccctcctgaacacctctcgagttgaccacttctctcctaaatagtggcaactgtgggtttccccatacagacctgcccccagcatgcgtgttgggcccctaactgagccacatgagatgaagacattgaccaaggtcacttctttttttttttgagatggagttttgctctgtcaccctaccaaggcagcccctgccctcctctttctcttgctattcctgctccatcactcttaagggtagggtgtggacaccacagcctgcactttcaagctccagccgcattcttgcaaatgacaacttcttcaccaccctcagacccaggggtctataccccagaagcagatcctcccctaggggaatcggaatgaggaagaggctcctgaaggaagaggggttgtgggtagaggccccaagaggcaaatgcccttagcccatagactcttctttccatggggagaggcatgagccaaggagagccagagcagggccctctaaagtacaaagcccagggaagggttcaaggacaggaatgtcctcatctctgctcggacctcccctgccaatttcgtccctattagaggcaaccaaagagatctttttaaaatccaagaggatcatgttacactcccctgctttattccctcaatggctctccattgcttttaggatagctgcaaagtttctcaagcagcacctatgagaccctcagggtccagcccctgccagcctctccattcttatttctagccctgcttcccctctctctccactccagtcacataagccttccttcagatccctgtgctgtccatggtgcccacccacagacctttgcacatgctgttccctctgcctggaatgctcttccctctccacctggcctagcacactcctccacaacctgcaagtcttggttctagtgttacctccacagggaagccttccaggatttttctgcctagagtgatgtccctccccagtacagattctcatagctccattgccctcactcaccactgtggcacttgggagacaacttgacacttgcttgtgtgattatttgattcgtggctttctccctctgcctaagggttccatgcaatcagagtccagtctatttttgcattgcatcctggcacaaatattaacagctgacatttgctgagtgctaaccatgtcaggcattgtgctaaatattttccaagcattattttgttgaatcttcttgacaaccctatgaggtagacactgctatcattccatttggcaaatggagaaactgagccacatgggatgaagacattgaccaaggtcactttttcttttttttttttgagatggagttttgctctgtcacccaggctggagtacagtggcatgatctcggctcactgcaacctccacctcccgggttcaagcaatcctcccacctcagcctcccaaacagctaggattacaggcatgcaccaccatacctagctaatttttttttttttttttttttggtagagatggggtttcaccatgttagccaagctggtctcgaactcctgaccttaagtgatccgcccaccttggcctctcaaagtgctgggattacaggcatgagccacggtgcccggcccaaggtcacatttaataagtggcagggtgggacccaaccaaggcagtgtcagtgtcagatgagagtccgcaggcagcactgcacctctcttgtttctcccatagcattgcagtctctccatggcacatgctgcaagaacgttttcaaatggacagaaagaaacacacacacacacacacacacacacaatctggaagaacatgcaccagaatgagaacagatgtggtttctggttggtttgttttcatctttcacttattgtgtgttccaatttttctatactaaacaagtattgttgatgcctttaaattgagaaagaaaaacttaaaatctctttaactttgagaaagaagaaagaatggaacgaaatcaagatgtccagagaaatggtacaccattccttccattccacccaaagccccaccttggtagaagatgcaaagcactttccagatataaagtcctggtgaggtggcaggaagaatgtaggcgctggcttcaaacagacccagatctgactctcagcttcactgtgtggctttcagccagtgacttaacccctcctctgacctcagggacctcctctgtaaagtaaggtcctactgtctctcctccaggactgccatgaagactagagagaaagtacataaatgactcagcatgggatgtggcacataatagatgctcagtgaatggtggtcatcagcttcagcccgccctcgtgaacagacaagaggcagcgtgggcacctcacagaacccaggttcccacacaccatctggccccttggctgggcctcttgtgagccacgttcctgccctctggctccagctgtcttctctctgggtttcactgcttggctggctggcttaggacactggacagcctgagatgaccccagggcaagctaggggtggcaaccccaggacacaggccacccagacagctgttttcatgcctccaggcatcccatggtgggtagagaatatgatcccccactaccacatccccaccatctcccaaggaggacagaaggagcatttttttcacccaggtggaaatgccaaatcggcttctgggggctgtggtttggagatcctctaaggggacactcttctgagacctcggggagcaacacagagggaggcagagagaaagcgggagagcgaggtggggaacgggccacctggaggccccgtggcatggctcgcctggtatttactttctgccacagccttgaataccatcgggctcagaaggaatttccaagaagatcgaaatttgaggaaatcaaagtttaattagtcacagctgccgtaatgtattccaggtgatggctggcacggctgtctcccctccagcccctgacgcctttcaccctctacaggggcaagtaaacactggggtgtttgcggtgggagcccttctcccgggtcagctgagcaggaatgggggggtgaggagagggccacgtgcggcctctggccacctaggctgcggtctgagagagaggactgagggagccctccacgcagccatcttcgctcctctccactccctgctccactcccatttggcatctttgcaagtgagagcaaaggccacgtggaacgctagggatgggctcagagtcatgggattaggtctcagctcactcctcagtgacagtgtgagcttggacaagtcatttaactgggagactggcaaaacaggcaggagtcagagggcctgggtttgaatccagctctgccactcagctgtgtggccttgggagagttcgtgaaactctctgagccttcattgctccatgtataaaatggagtcaggcagagactcatgggattcctgaaagagtcaaacaaagtaatatgagaatgacgttagtgcagagctgagacaccacaagaattcaatgagtaactgcagtgggcctcagttttcctatcgtcaaactagaacggggatcctatgctacaacagatgaataagtgctttcagctcctaacaaaagcccacgctacaggcatgcatggattagcctatccgagcagtggtccgcagagagaagtgtgctgaggcacccgcggtgtgggagggttgcaccaggcatcctggtgtagagtccagctgcagggctatgattggggcatggactgataaggtgtgaaacgggttcaggtgatgggacttgtctttggttcaccctactctgggtctatgctaaactgaaccacgtcagacgtcacttcagccaactgaagtgtatgacccccttgctagagccatgccagtgggtgccaccagcactcctcccactctgtcatcagatcagaaggagtttccatgctcccagcttagcagctcatcagaagctggttctgttcagttccaaccaagtctggggacagggacagtggctggggcttgcctttcaccttgctcctgcctccactaagccctagctctaccccatgcctggggatctgagtgtccagggatataaaaagagactgtctccaccaggcacagtggctcacgcctgtaatcccagcactttgagaggtcgaggcaggcagattacttgagcccaggagttcaagaccagcctgggcaaatggtgaaaccccacctctccaaaaaattaaaaaattagccgggcctggtggcacatgcctgtagtcccagttattagggaggctgaggtgggaggattgcttgggcctgggaggtggaggttgcagtgagcagaaattgcaccactgcactgtagcctgggcgacagagcgagatgaaaagaaagaagaaaggaagagagaaagagagaaggtaggaaggaaggaagggaagggaagggaagggagagagacaaagaaagaaagagaagaaaggaaaaggaaggacggaaggaaagatggaaggaaggagggaagggaagggaagggagagagacaaagaaagaaagagaagaaaggaaaaggaaggacggaaggaagggagagagggagggagggagggaactgtccccaaggacacagaaagcaccatgccaggtggctggtcagtgggcaatgcttctgctgccatgaatgggaagacccacatgtgcgctcacagagactgggtcatcggtaggcacgagctcagctccactcggctttctgaggtctgctgcagacagttcctttgggattggagtctgccatgaggtggacttgactcctctcacatccacgtgatctctccagggcccactccttgtcctcttccctgccagccactctccctctgtctctctccttttcccccatcactgagagtcatttctagtctgtttttgaaactcaaagccaagaattttttccttttctctcttcatttccccttccctgagtcaatgaactgaaaagcccagccaactgaagggaagggtcaaggagaggaagaaaacaccagaaaccaaaacctcccagccaacagttcaaaaccagtatctcactacacagtagaggcagcccatgtgtagccccaagtacaccaccaccaggtatgcctaggcaaccatgttaggtggaatattttccttggataaatgtgttattcatgaagactgtcatttgggcagtatttatcttcctcttactctgcagcggtgattgagaagtaacggtgtggcaggcaccatttgttgcctgtgtgcagccaacctgcctctaccacagaggctgaaaatggcagctggtcactttcccagcctctcttgcagctatagatggtcacgtgacccaattctggccagtgggagctgggaggaagttggctgaaatgacttctgggaaaagtttttctctctggtttaaaaaaaagaaaagataggtgaggaggagacacccttcctgctcatagaggatgtgtgaggtgagaagaagacatccctcctgctcacagagggtgtgtgaggactgttgctgtggcagccatcttgtgaccacaagagaacaagcctgagaacaaaagcccataattggaaagcccctggttctctgaggatataattgtgtcttgtataatcaacctgcagacttcctgttaaatgagagaaggagtgggaaacctcttaagtgaattaaattttaattcacttacttgcagccaaaagcagcccaactgactcttagaaagcgtttcagaattctttcaggtctgtgctacttagggctctttttagttgcaagcagccacagcaaaccaaaccaatttaaacttgctcagccaaaaagggcaattttaaacattaatatatgtgagtgtcttacgaaactcagcggaaatatgactgggcctcagaacacttggaaccaggaaccaaaccaaagactgtcgagattttctctctgactctcatgttgtgtctcactgtgtgaggtaataaattcctgatagtctttttattgcaataagtctgattgtccagaattgactttttaaatttaattttaatatgccttgagaagaaaaatgaacatatttcttagctttaaaaccgttaaaactgcatttatattgcagaagtacttttaacccatttagactgcgaatgattttcctttaatgcactaagcgtgtgtctagaaggatctggaaacactgtttccttttctgcagacccaccatgtcccattctgggtgcgctgagagagtctaatgatgagaaatcttcagatgacaatgtggaagaaggctccctctctggtgtctcagtgaggaagccagcgccccagcggccagactcgcttcacttgggggaactccatttctgctatgcagagaccatctctctccagagaacctgctgcttcactttcctaacatgagttcagcattcggtttcaaatcctctgtcagatgccaacacaggaagaattttcagtgtcaccatgactccattaacctataaacgcaacattttgagtatgttgtgtctgtaagaagtaaagtttgtgaggttttttttttaagtctaccttttacattttttttttaagatcaagttttgaggccgggtgcagtggctcacgcccgtaatcccagcactttgggaggccgaggcaggaggatcacctgaggtcaggagttcaagaccagcctggccaacatggtgaaaccccgtctctaccaaaaacacaaaaattagccgggcgtggtggtgcatgcctgtaatcccagctactctggaggctgaggcaggagaatcacttgaacccaagatgccgaggttgcagtgagccgagatcgcgccactgcactccagcctgggcaacagagcgagactccatctcaaaaaaaaaaatcagattttgaaatataaaaatttgataataacacaatcaaaggtgagtatgagagaaggtgaatgggcatgagtgaacgtccaatgtcacacgtgtgtggatggtttggggatttgtgtgttttcaaagcttctccagtgatcctggggcaggaggaaccactgtacagcgtgagtcccttgaggacaagagcccaggtcttatgcatcattgagtctctgcccttaggacatatgtgactggcacatagtaggtgtttaatcaacgtcctctgaatcaatgaatgaggaagagaaaaggtagcagtgcagaagtcaagaaaggattttctgtaggctcttttccaatcataaaatatcagagaagctgcttctactttgggaactagcctctcaagaaaagggctggggaccaggaggtaggggtgggtctgccaggagttcaaagggagccagggccctgctggggatgctgaactgcagccagggctgggctcagacaaagcggcttctcagaagccccctgcccacggggaggctcactgccctgctctaggccacaaggagaaaacgcgtttgtttacttgacctgaatgacatgtttattgagcccccctcctggggatgccaagggccttttaacaagctccccagagggtgagttctgaaaatgagtcgctgatgagccagaaatggaatttgcgagtttgccttcccagtctggtcctactggcccaaagctgctgagcagctgggcagaaggtgctgtcttgtgaatcaggggccttggcctgtcccagcaggcagggcactgcgggcagggcagaactgggatgacccagctgtgtcacactcaacagcatctagacaatcaaggcaaaagtggtttgtcactctagttgtctggatcaatcttccactgcagttagcttgagtagatggcagcaaatgtgatggggaaaatggactgagggagttttttgtttttgagatggagtcttgctctgtcacccaggctggagtgtagtggcacgatcttggctcattgcaacccccaactcccagattcaagtgattctcctgcctcagcctccagagtagctgggattacaggcacgaaccaccacacccagctaatttttgtatttttagtagagacgggattttgccatgttggccaggctggtgttgaactcctgacctcaggtgatccgcccacctcgggctcccaaagtgctggaattataggtgtgagccaccgcacccggccaagtttcttgaacagaaacacagttttctttctctttggtcccaccaatttcagttcttgcccaacaccagctactcaaagaacgctgttcctcctttgattcaaccctctcattttgcagctgaggaaacagaggcccagagaggagaagtaacctgcctgagtagtaaccagctaggtgccttccatcaggatttatagtttacaaactggcatatctacatacttactcttgctcagtccttacaataaacatgagctaggtattagtaccccatcgttgtattttatcataaaattactttccattatttttaaacttgcctcttgttttcctcagcattctattttaggaaatacgttcttttcttggatcttaccggatgctgctgctgttgctggtcctcagatggcatttgggatccaccgctctagagaacgctggttgaggccctgcgcagtggctcacgcctgtagtcccagccctttgggaggttgaggcaggaggatcactcgcggtcaggagttagagaatgcttgctgcctttactctgattgttcatttttttctctctgtcctttctttcttctcccttatccttttctttctccttcatgtctacctttttctccccttccttctctacttttatccttaaggggcagcccagagtctgtcttgagagtgaagaaatatgagttccagttcctgtgttgtcaccaccttgctgggtgacctcagacaaattacttctctctgggcttcagtttccccatctgtaaatgagaggagaggctgcgcctttgctctttgaaattgcttccagcttggaaagcctgatatggctacaagtctctggaattctgccgactcactactgaggcaaatgcattttctgcgttctgatctgttggctgaagtctttttttttttttttcttttttagatggaggtttcctctgttacccaggctggagtacagtggtgtgatctcggctcactgcaacctctgcctcctgggttcaagggattctcctgcctcagcctcccaagtagctgggattacaggtgcccaccactatgcctagctaatttttgtgtttttaatagagacagggtttcgccatgttggccaggctggtctcgaactcctggcctcaagtgatccacccacctcggcctcccaaagtgctgggattacaggtgtgagccaccatgcccagctaagctggctgaagtcttaaccagagaaattggggtacatcagtaagaagtcagaccaaaggggacaggctggtattcattcccgctagagagagtccccctcaatgtctcactgctgaatttaccagtgcctcctcactggtgacaggggcgcttccatgcactctgctccaagattatgggccatcctactttgttctctgttattgagtgtgacgtggctgtcactattgattcagcattattgagagagaagcttcttatttcctcttagggattttgacggcaatcaagatatgctggcagcaggggaccaatggaaacttggtaatggtctgaaccttttatactccattatattcctttgaaaaaaattaaaattgctcttaaaatggttaaataaatatttaaaagttaagtagccttaaaagatcaagatctttaaggaaagcagctcatgaacataacacgatacctttcttacaacgttcattcaactctactcattctaaccatggttttgtctgcagtgttgtcaaaatacttcttccaatttcctctcaaattgattttaagaagacagtattcccagtgggccttcccactgagcgttgatgttctagggtttgaggactttcaggagtgggtacttaaaagcccttatctttgttccttctaataaaagagatgtgattgcctgcttttgagtaatcacaaagcaggttattactggtcttgagaaaaggtcacatggctgaaggtgttgtatttacatcctattgatgctgtagcaaattaccacaaacatagtggcataaacaacaccaattttttaccttaccattctggaggtcagaagtgtcactggactaaaatcaaggtgtgagcagggctgtgctccttctggaggctccagggaagaacttgttccttgcttcttccagcttccagaggctgcctgcattccatggctcatggctgtcttctctcttcaaagccagtagtggcatcactttgacctctgcttccattgccacctctccccgttgattgggactctcctgctgcctctttccctttaacgacccctgcgattacattgaatacacccagatagtccaggagaatctccccatctaaagatccttgacttcattacatctgcaaagtcccttttgctgtgtaaggtaatgtgttcacaggttacaggattagaatgctgacatctttggggtgccattattctgcttgccacaggtgtcttttgacttcagggaaattaatgtgatagagtgcagaagtaagccagattcttcccatccctatactcatgccccttctcaacatgacttcgcaaccccttccatcaagaggttgagtctatctctttacttttggaaactgggcttgaccacatgactttctttggccaatgggacataagcaaatatggcacaagcaaaggcattgcctccttttgctactcccgggagccctgtgaccatacccatgcggaagagcccttggtaacctactgatagtaagagacatagcccagtcaccccaggaaacagccaaccacgtactaaatgtgagaccgttgtctgtcagctgactgtggacacatgaaagagctcagccgagactaagagaagaacagcccagctgatcccatcccaaattgccaaaccatagaatcctgagtaaataccttcctgtttcaagccactatatttctgtgtggttgattatgcagcaaatgctaactgacacaactagggaccctcttttgtgcaattagatagagatttttccattctgatctcatgtcaaacatttcctcttgattctgatgggtaattcaggagaaattcaaatgaaatgaaatgaatttctggtgaaatgaaatttacaccttaccattattacagagaggtagataactttccactgaccatttaaaaataacagaattgcttcctaaacaaatgtctaagactcttagacaagagtcttattttctttactagactcaatttcctggaaggcagaaacaatgtcttttggctcaggtccctcacagagcagggactcagggtggcgaggggtaaagaacatgggctctggagtcagaaatacctgagttcaaatcctcaggtatttgaactttgtttgctaattacatgaacttaagcaatcagatagaggagcttaggcaagttacttttttttttttttggcttgttttcagatttattttctttcttttttttattatactttaagttttagggtacatgtgcataacgtgcaggttagttacatatgtatacatgtgccatgttggtgtgctgcacccattaactcatcatttaacattaggtatatctcctaatgctatccctccccgctccccccaccccacaacaggccccggtatgtgatgttccccttcctgtgtccgtgtgttctcattgttcagttcccacctatgagtgagaacatgcggtatttggttttttgtccttatgatagttttatgagaatgatggtttccagcttcatccatgtccctacaaaggacatgaactcatcattttttatggctgcatagtattccatggtatatctttgatgagttgagagaagaaggcttcagacgatcaaactactctgagctaaaggaggaagttcgaacccatggcaaagaagttaaaaaccttgaaaaaaaattagacgaatggctaactagaataaccaatgcagagaagtccttaaaggacctgatggagctgaaaaccaaggcacgaaaactacgtgacgaatgcacaagcttcggtagccgattcgatcaataggcaagttacttaacctctcccgaaggcttgagtgggaggtgggaaatggtgatccaatcaggatcacccaccttctctgttttagccaacagaagccgtccaaggaggatttggggggattgagagttgatggccagattttaaaagtggatctataaggagagaagtggcaggtgctgaggaaggggttggttggcatgcaaacccaggccctccaggagcccacgtgcagactggcttaggtggagcttaggcaagttacttaacatccctgtgacttgtttttctgacccgtaaaatgggaataacgaaagtacctaacaaatagaatggttctgagaattacatacaatatgggtaagcacttagaagaatgtcaggcacaaacactcaaaagcattagggattatttaaaaataataatcccaggggagggcacatagtaggtgctcaagaaaggcttttccatttgacttggatttagaggatttgggtctggaaggaataggaagcaaaatttccagcgccccaatttaggcaaacttctgttctttgggagaggctgagacattatgggtgtcagctctcctcatttagaagtttaccctcacatcaacactcgaccctcagttcctgattagatcctgattcgcagtcacgccagagtaacagaaaccttgggaccttcacgattcagtgctactcccatagtaactagtctctaaatatgtcctctccccaaaccaatgaaccatgcctcccagtactcaatgcaacaaaaggatggcatgtgacttgagagactaggtcatatgacttccaaggttttggccagggcctcttggaatgcctgccttgggtaaaaccagacaccatggaagaattccaactagcttgagtccaccatgctgtaaggaacctcaactagccacacggagagtccatgtggcaagagagatgccaaccagcttccagctgttctagccacccagctgaggtgccagacacaggagggaagaaaccgtcttggacgtcatgtccaggtgagccaccaggtggctccagctctagttgccacctgactgtaaccccaggagaggcctcaggccagaaccactcggccgagccatgtcaatctacagaaccaatctcattatcatgagataatacagttatttgaagccacttggtttgagtggtttgttatgcagcagtaaataactagaaaaacttgcaaaacttaaccatgtgttcgttccgttagccatttttttcattgattcaaccaacaaattttggaaacaagcaaatacaaagtccaatatggggccctgtgaggagtttgcattcaagcaacattaagaatctgtttctagtctggcgtggtggctcacgcctttaatcccagcactctgggaggctgaggtgggcagatcacttgaagtcaggagttcgagaccagcctagccaacatggtgaaaccccgtctctactaaaaatacaaaatttagccagacatagtagtacctgcctgtaatcccagctactcgggaggctgagactggagaatcgcttgaactcaagaggtggaggttgcagtaagccaagattgtgccactgcactccagcctgggcaacagagcaagactccatctcaaaaaaaataataaataaataaatctgtttctactggccaggcactatgcaggcacttccacaagttctacagacattaaactagctgttacaagtttagactctggtatcagactgactggattgagttctggctttaccacttactagactttggacaatttgcttaacctcttttgcctcagttccttcatcaataaaatatggaggatgaacatgaaccttatagggttttgtgaagattaaaagatccacataaaatgcttacatgctggtaacagagtcatcactaaacaaagggaaatattgttcataactgcaaccagcttctgctttcgaggaacttagaggtatgtcacagacaaaataatatgccagaaatgaagcaagcacccatgagtgtttcaaatgaatgagtgactccgtgcaagatgaaaagtaccctggtcatgagaaagggggagatgggtgctcaaaggcagaaggatgttgtgggtgttcaaacgtaggagaattacttctggctgagatgctcgtgggaggcctcctggaggaggtagcttttgggccagccagtgaggggtggagaggactttagcgtctgtgatagggaaaccacccttctgggaagtgggtgtggaacagcatgagcacacaaacccaggccctcaggagcccacgtgcacaccggcttagttggagcattgagtttgggaggggagaggagagacagaggtatggggccagatcatgatttgacgacttcctatgtttatgtacttggtggagcctccaacacagagccaggcatgtaggccagggaggctgtccaaaaagggccttcctgagggagagggaatggcagaaatcaggccctggccccaaccctggctcagcacccaggggaccagaggcccagccagccaggactgtggttccttctttgtgctcttggttcgtggtgctgtggagactgtgtattggaggcagcctgggtatccattccgtctagcccctaggagggctgggaacttgctggagaaccaacctgggctccacacactcattcctccaccttcctcagcacctaccacttctctccttttgaggccactttttaaatatggccatcgcctctcaacccccaaatcctccttggaagacttcttttttttttttttttttatacagagccttgctctgtagctcagactggagtgcagtggtgcaatctcagctcactgcaacctccacctcctgggttctaagggattctcctgcctcagcctccccagtagctaggattataggcgcccaccatcacacccagctaatttttgtatttttagtagatgcagggtttcaccatgttggccatactggtcttgaactcctgacctcaagtgatctacccgcctcagcctcccaaagtgctgggattacaggcgtgagccaccacacccagcccctccttggaagacttctgtcagctaaaacagagacagtgggtgatcctgattgagagggacgccctccctacctcccacccaggccatggggagacatggaaggcaccagtcctccatccttcagtgagctggttcaccatcctctgcctctctcgactcacagagcctaggttcagatcccagctccaccaccttctagctgtgtgattctgggcaaatcacaccatttctctgggtctgtttcctgatctggaaaatgaggagtacaactccaattcttctgtagggattgaatggaaaaataaaggtgaaagctcaggacataataaatgcacaataaacacaagggattaggaccttccatagaggcttccctcttccctccttcttccctcctgagccccctgcctcacacctggagcccatctcgcggttctgtccaggatccctgagcacaccctccctgatctcctggccctgcctggccagcccattgccctgggggctgcctggccagggggcccacttcttgctgggctgccagaggggccttgagtgttgaaatccttccattccacaaggccagaaacttgattatggtattaattaaagcaagatgccaagtctgggagatttattttcttttccatatctgtggctgtaaatgccactcagggagctcaaaggcccgtgtcagcctgcatcaggctcctgaacagacgttctgttcccagtttggtctcctcagcccctccttctcagcaccaggaaggaagtgtgtgtcgtgatacccacgcctcaccccaatttcccctcctccttctgcacaaggcgaaaagggggaaatacctgggcaatgtggggtggggatgaaattttccaagaaatttgttttaagtttctgcctcatcattataggactttcacgtttctatttttagctgcgcaaacgagccaggcccacattcccctcatctccccctgccccaacctttatttatacaaagcacatgctggaatcattatttaaaaacctccaaacccataattgctcaggtaggtgaagaatgcagcctttatggctgtcgcttgcggagagggctgcagtgttagtggggaactatggcttattcatatgtgtaccaccctgtacctcacccaccctgaacccctggaatgcccagaagaatcaagtaacttagaagcatttgtgataatagagtttgagcattttataagaggaaacggccctacagtacagacgaaacttgtcccaagacccctccaagatattgttgtcgtcactgggattcgaacccagagatgtctcaacttccagcatggtactagtcattctaccctaccatgaaaattagtggaaagctggactgcctgagtttgaacctcagagtgccactttatttttatttatttatttatttattttgaggagtcttgctgtttcccaggctggagtgcagtggtgtgatctcggctcactgcaacctccgcctcccaggttctagcaattctcctgcctcagtctcccaagcagctgggattacaggcatgccaccacacccagcaattttttttttttttttgagacggagtctcacactgtcacccaggctggagtggtacaatggcgtgatctcagctcactgcaacctctgcctcccgggttcaagcgattctcctgcctcagcctcccgactagctgggatcacaggtgcctgccaccacgcctggctaattgtttgtacttttagtagagacagggtttcactatgttggccaggctggtctcgaactcctgacctcgtgatccgcccacctcggcctcccaaagtgctgggattacaggcgtgagccaccacacccggccagagtgccacttattaactgtgagactttgagcaacttttatcaaacccttctgtatctcagtttccttatctatcaagtgtggattacaaaaatacccacctgataaaattgcgtaaggatttaatgagtgcctgaaagagagtaagcctgaggtcctagctcggatttccccagaaagcagagccaagccattagccacgccgaggagtcatgcgttcccacgtagggagtcgcttttctctctgtgcagtggggaccgtggagtatagttaccactgctgtgttcttctaggaggatttctcttcaccattgtcttccagggtcaccccagggggtggtaactgtccatgttttgccagtgctatatatggctccaacctacctgtgaaccagccgagttcttttcttcagttgatcctaaagaaccctctgaggccatacttgtgagctgagtcagagctatcagtttggccaggtgcagtggctcatgtccgtaatcccagcactttgggaggccaaggcaggaggattgcttgagccagaagttcaagaccagcctgggcaacataacaatacctggtctctacaaaaaataataataataaaaattagctgggcgtggtggcaaacacctgtggtcccagctactcaggagactgaggtgggaggatctcttgagcccgggagtttgagcccaggagtttgaacatagaccctggccgggcgcagtggctcacacctgtaatcccagcactttgggaggcttaggcaggcggatcacctgaggtcaggagtttgagaccagcctggccaacatggcaaaaccctgtctcaactaaaaatacaaaaattagcatggtagtgcatgcctgtaatcccagctactcgggaggctgaggcaggataattgcttgaacccgggagatggaggttgcggtgacccgagatcatgccactgcactccagcctgggtgaagagcaagactctgtctcagaaaaacaaaacaaacaacaacaacaacaacaaaaaaaaaaaaccatagtgagacccatctctattgaaaaaaaaatagagaagtgtcagtttggaaaaggtagttatatgggttctgccctgctatctgttcatataatttatttgtgcctgctgaacctgcttggacccaaccccaaataaaccatttccatcatataactcgaagcattataactagcatttttatttggaagctctgacaatacacagctcacaacagacaggcagctctgccacatggtcacctgcattccacagtgaagtactccatatctaccattgttcggtgtcatgccaggagctgcttttgcaatggagagtcctctctgccagagaggcctggccttgatacagaactccagggatctgtgctctgaccctccccgtggatctcacaagatgctctgcatggtgtgccgatctagcagcgacacctctgacactttcagatcagctggatcagatggtctaaggggcacagcagcttgtacctagggctgcattatgactttcatggacactaggcattcctgccttagcggacctcgtctttcatctaaaaaaaaaaaaatgtaaggccaggtgcagtagcacgcctgtaatcccagcactttgggaggccaaagtgtggatcacctgaggtcaggagttcaagaccagcttggccaacatggtgaaaccccatctctactaaaaatacaaaaattagccgggcgtggtggcgcacacctgtaatcccagctactcgtaaggctgagcaggagaatggcttgaacccaggagtcagaggttgcagtaagccaagatggcaccactgcactccagcctgaatgactcagtgagactccatctcaaaaaaaaaaaaaattaaaattctcttttgtgactccattggtggtataaaaatgaacataatctagaatggatcattattattatattcatttttcttttgattttaaaataaattaaaatctttttgtgggctcatgaaaatattaggagccctcctccctgtggataagcaggccccactcgcactgcagtctggacacactgcagaaccctctcttgctgtctgcctactcaaaactggcagctttctaagtcatctaaggaatgagtcagagcagtattagcaagtatgctaaaagctgcctccaaactccaaagggacccaccaggcattgtgtctatttcttagcagtaagatgtgtaaggtacaacaacttgtcctttactttagaggaaatgtactagcacgccccagaccactatatccccgcaaacttcaccaatgtggcaggtctgcaaatctttgtagggcttatatgtctttccagggtatttaaggtactcactgcagcctctgactcctgggttcaagcaattctcctgcctcagcctcccaagtagctgggactacaggtgcatgccaccacgcctggctaatttttgtacttttagtacagacagagtttcaccatgttggccaggctggtctctaactcttgagctcaggtgatccacctgccttggcctccaaaagtgctgggattacaggcatgagccactgcacctggcgagattgttttaatcttcagtatatgagggaaaagacccactatcatttaccatctaggactaatggaacactctttttttttttttttttttttttgagatggagtctcgctctgtcgccctggctgtagtgcagtggcacgatctctgctcactgcaagctctgcctcccaggttcacaccattctcctgcctcagcctcccaagtagctgggactacgggtatctgccaccacgcctggctaatttttgtatttttagtagaggcagggtttcaccttgttagccaagatggtcttgatctcctgacctcgtgatatggaacactcttaaatattttaaatctttttttaaaaaaaacttacaaaaataaaaacaaagggagagtgaagaacaactttattatatattctaaaaagaatttaaacataacaaacctaaatttttatttcttattttcctggtttggaaggtacatactttaaatggacaacagtctctgaatacacctaaattctcatcaactgctatgcacggaccaggaacacatgcatcttataaatacagatttcagattcaaaatgcatctctattggattctagcttctcatcatttctgattttccttcttgcacttgcaaactcaaagtgcaatactttaagaatttttttaagcaggaacacgtgtactttattgaatgccattgtagaaaagtgtgtgaggttaaagggctgatacaggactcggctccaggggcaggtcgaggaatggaaggtggagtgtgtgtgcgacaggtcgtgggcagagctcctggcctggatgctgcctcctgttctattgatagacttgaaagatcaacactgggatgaagatgagcagaatgctcatgaggatgcccagaaccagggcccagacgttcaggcacttggcggtggaggcacaggcctggcccccggttaggtcgccaaccatcttcctgtccctagacttcatggagtaggtgactgctatgaagcccaggcagcaggagttcatgaagagggtgttgaacagggaccagacaacatggttgggcacagaggtctcgctgtggatgtggatcacggtggacctcgggggagcagagttgtggggtgcccccagcacagccacctcatgctcctacttgagcatctgatagtctagggggcagccggtgttggcgggagtgaagaaggtttgggcagtgtggttcatggttactcaaagacatttttgaaattgttaatggcttataattttgttgaagacaacacaataagaaaactgtagactgggttgggcatggtggctcacacctgtaattccagaactttgggaggccaaggtggacagattacttgagcccaggagtttgagactagcctggacaacatagtgagaccccatctatgcaaataataaaaaaaattagctggccatggtggtatgcgcctgtagtccaagctacccaaaaggctgaagcaggaggatcacctgagcccaggaggttgaggctgcagcaagctgtgatcacaccaccacactccagcctgggtgacagagtgagaccttgtctcagaaagagaaaaaaaagaagaagaaagaaaactatagggtgatactacactgatgatttataatatttttccatcatcctcctaggcaattccatcatcattccattttcttattattttagtcttttccgcatagcttagaatagttaataagtgatgatgaagtaatttctaggctgaggaaatggcaaaatttttcaagagataggaaaaatgagatcatacaattccataatatatcttagatttaagaaggtgtccaatgggcccgtgtggtaattgcaagataaagcaatatttttctatttaaaaataacatacaatttctctttttttctttggaagatctctaaggaagaataagagccatgaaatgtcaatccttacaacagaactgctcaaaaaagaaactaactagaaccctgattccatcctaagaattaggatacactaagcaaaagctctactctcaaataagagacttagtgcagtggcataaagctaagtcttgaattctgaaccttgaggtaaaatgtattaggagaaagtgactgggactgttggtaccatattagttggggtaagataagctgctataatatgagaagaccctaaaatgcagtgtctttaagagcaaaaaaggcaaacatattcctgctctcgttcatatccaaggtgaaagtttacaattggcaggtatctcgactccatgtagagattcagggattcaggtttcttccatctggaggctctgacatcccttgggaacatgttatcactctcatggttgaggactcagctggagggaatgggcagagctcacagagaagacccagccactttctcaaggcttggcctagagagatatgcatcacattctattagtaagaacaaggtcacatgaacactctcagccccaagggaggctgggacttgtggtcgggctatatgcccatgaaggggaggagaatgaactttggtgcacagcaagcagtctctgccacagggaatgacacgatcctttgatcatagcaaacaagtccatttcatctcctaaaggtaataaataattggactacattacaaagcagtaactctggctgggcgcgttagctcacgcatgtggtcccagcattttgggaggccgaggcgggcagatcacttgaggccaggagttcaagaccagcccagccaacgtggtaaaaccccatctctactaaaaatacaaaaaaattagccagatgtggtggttcatgcctgtaatcccagctatttgggaggctgagacatgagaattgcttgaaaccgggaagcagaggttacagtgagccgagatcgtgccattgcactccagcctgggcgacagagcaagattctgtctcaaaaaagtaaaaaataaggccaggcgcagtggctcacacctgtaatcccagcagtttgggaggctgaggcgggcggatcacctgaggtcgggagttcaagaccagcctgaacaacatggtgaaacccattctctactaaaaatacaaaattagccaggcatggtggcacatgcctataattccagctacttgggaggctgaggcaggagaatcgcttgaacccaggaaggagacagaggttgcagtgagccgagatcacaccattgcactccagcctggcgacagagcgagactccatctcaaaaaaaaaattaattaattaatttaatttaattacaaatcagaaataaatagaaagcagtaattcttagtgggtcaaagttgagaatcaaaatcaccatggaagctctttctcatttagttttactgaatcagatgctctgggagatgacctaggcaaatacatttggtttttttttagacggagccttgctctgttgcccaggttggagtgcagtggcgagatctcggctcactgcaacctctgcctcctgggttcaagcaattctgcctcagcctcccaaatagctgggattacagacacctgccaccacgcctggctaatttttttgtatttttagtagagacagggtttcaccatgttggccaggctggtttcgaactcttgacctcaagtgatccacccgcctcagcctcccaaagtgctaggattacaaggcatgagccaccatgcctggctggcaaatacattttgaataaattctctaggcaattcctctatgattaagatcttctgttcattagagtaagaaaggtaaatccagtgtctaaggagtccctttctgtagttagaggccttgtgtggggatttgcctggctatggtttgtgtcctcatgggattcctgagattgtatcatatcccagcctgcgatcccctccccaagcccagatctggcccttagcaggctctgagtaattgtttaacgtattatttttactctcacaaccgtaagagtggggaagtcctctgaaatgccattaaactaacagatagaaactctgtatgtcccttgactcaatctggtttcaaaaataagcataaataaaccatctcagagaaaaggcatttcaaaagtgtcccctcccatgaagtgaaaccatcactgtgaggccggagactcctgaatgagctgaatgatgcaaaactgtaacaccactctctgcaacagccctgggcacagcaactacttccaccccgtccccagtgggtgggactctctggagcagagctcccccagcttgaatgtgaaattgcagatcctgcttcagtagatgtgggggcgggtgctgagatgctgcacttctaacagattcccagacatggccaatgtcactggtccacagaccaggctttgagtactgaagttctagaatgcaaatgagcaggcaaaggtaagctgtcttagagcaaatgcagagactcccacctggcagctgaatccatagtttactccttcccatcgggtcctctttcctccctatttccagcctcttgtctttggggactggacagatatctgttccaaacttgagggtcttatagcacccagagatgtgacctaaggtgaaaggtgaaatccggagcttggagtccttttctctaagggaattatcttcaagcatcctctggatggaacagagacctaatgaagtattttctcaatgaccccaaggccaagaacctcagaacaggcagaaggaggttgttctctccagcataaagaaaggaactgtggtagatttcctgggtcctattcatttgcgacatttaacagactttatgtctggaccatatgtattcccaagttcaagccgaatgcactgaatctctcagctgggaagaaccgtggtgtcctggttcaaggatctattttcctgattgagacagacaggcaaaaaataacctaaggccacaaagttaatactatttccatgtttctgggcttctagcctaggcctagaggttttcccaagaagtcacactgcctaccagacttgtaggaatggaggacaagctgcatgcccagccatctccctgcctggcagctaggcagaagggactattggccacgggccatcctgggtcccctgacttgacccccaagctgcttgccttgcagaacgccctgtttaatgctttattcctcccagtgtttcattattgattcagcccctcgctgccgggtctgaccaagtaagctgtgagcgtttgtctaatgtcaatttcatcaaaaatgcaggagttggggttttactcgtctgtgcgctacctagacggtttaagtcgatgattagtggtttctgtgagccaaagagggcgctggcagcccacaggctggtttctggcttctctgaagcgatgctgggtccccaaagctctggagaacccaacagcctccatctcgttaaggtggggatgaggcttgggatgaggggattgactgacgtggagagttaggaggttgggagtggttttttcaaacaattaccagccaagtttaaaaacaaattcagcaatgcattattatgttgtcattaaatattacagatgcaaatctaatgagaaagaaaaatgtttattctttcatctatttaaaaatgtttattgagcacctattatgtgctaagcgctagactaacagaggttaatgaggcttacaaggttctaattctcatggagctgaaattccatttaagagagaaaaatcaggctataaaatagaaataataatagtaacagtaaaggtttactgagtactcactatgtgctaggtaatatgctaagcacttcacatagagaatgcttctattttcaaggtatatttttaaagcctgtatgtatatctgctcatagaaaaaagacaggaaggaaaaagcattaaaagacattatcctcagattataagtttatggaagacttttattttcttctttttactaatctgaattctctaaattttcttggaggaaaggcatgttcatgtgttgcaaccttaaggaatcggtcatgagaacttgaaccagaggtaagaaaaatttttaaattaaaaaattaatgaactaattaattaattaaaaaagaaaatagtcagagaaccttaaaatgcttctcatttgctgcctgatgtctccaggctccaagtatatgaggcgaggtgctggcctgctccagccactctgggttctgtcccagctcggaaattcaccacctcttcctccctggaggatggagtcgctggagaaccctgatactgtggtccagcgccatttggcttgtggtcagggctcggggagggctgaggcatctgaagattgagcctgtggaaaggaaccctttaatgcaatgtccccagatgggcattgggagccccactccctcctggaggtgtgcaggtgccaggatccagcctttcctactaatgaaactccaatcagatcgtgacagcaggggctgctggccagccccactggacccctgccctggtcagggaaatggaggatgacagctatgccactgtctgaaaatcctggtgcccctgaaggccctgctgggctgctctctggctctggtgtacccggaggggagacaggggatggctgccccacagtgatcacggtaaccctaacaacaatgttacacttgaggaaatccagctctgagttcttgacacacagggaggcctgacaccaaacacttgacatttcttcattcattcattcaatcttcagtattatcattatcatcctccttttacctatatggaaacagagacccagagaggtcaagtcacttgcccaaagtcacacagccagggagcgtaaggctggaaggtggactccagatcccacaccctaaccattcagcaacactgtctcccattacctgtctgagatctctggggacagcgccgtagaaggctgtcccaccaggactggacacatgaggaggagagcagctctggtccccgaggaggcagcagaacacttgagtaaagggtaacaggcaatgggtgtcaggcagtcctggctttgaatcctagcctagacacctactcactgtgtgaccttagacaagtcattttacctctctggggctctgttctctcatctctgcaatggagatgtaatgcctaacttttcagatggcaggcaggttattttcaacacagaaaattactagtattgattgaacacctgctacatatgccagaagctgtgcaaagcacatcacatgtgctagttaacctttttaataccctaggacactgtgattatctccactttacagatgagaaatctgaggcttaaataggttaagtacttcagaaggttaccagaaagaagcgaagccaagatgtgaacccatgtcctctaagggcacaagccctaggctcagcccatctgccatatgtgccacctgtgcatcaaatgaaatgatgcttgccaaggactcacgtcaagtaaccagagctgtcattgcatggccacaatgtggacagagaaaatgcatttgcacctagcccagcgcctggcactttgggagccccaataactgtgtgtattaatggttccagttgtctcaggcatggcaaggctacctgtagcagccaagacctcttcgcctctttgttcagcccagtgagggctcctggggaagcaagcaggtcccatctccccaaaactctacagttgactagggaagtgaagaaagacacagctgcagcagttacataactgcttcctcctccacaaaccaatgagagcagataggagccccttgaaccccttccagccctaatgcacctctaatcctgcacaggattggcatgaggtgaaacaaaaagaatgtggttcaagtgctgttttatcaaaaatgttcctaggcccgggctgcccacggaactttttctgtacaagcatcaccggggggcccaacatccctctcaggacagcagtagatctttaggaggctctagatcctggtgtcccagggtgcaagaagtgcgtgtttgtgttctccattcatcctgcattgaccctacatttaaaggccagttgcttccctgtgtccatcagaggcttccagagctcctacctgattccaggtggactaaatccattgtcaagttctcccggccccctagacctgcataaaagacagatttgttacaattggaagagaccctaccaacatcccattgtgatctattcactttacagatgaccaaaccaaagcccagggaagttaagtgacttggccaaggccacacagctagtgaatgatgtcactggaattagaacccatatctcttggcacctaattcaatactgcttctgtcactgacctgtttcctgagcacccagtaaatggtaattatgtattgcctgataaatgatgactccagactttgggtcttggtgatgtttcttgaccctgaatccgagaggtcttgcacaggccacagaggattcttgggtggtagcactgcacaaagcagaagggaaacttctggaggaaggccatacctcttacctccaccctcaggatagagccacatgctcaatgcattccaatccaggatccagttcttgctctgccatcttaggctagtcatttcctatgtgagcccccagttcatctgcaaaatgaagaggaaaattctttatgggctcattgagaggtgatatagtttggatgtttgccctccacatctcatgttgaaatttgatcccccatgttggagatggggcctagtgggaagggtttgggtcatggggatggatccttcatgaacggcttcatgccatcctgcagaaatgagtgaatttttgctctactagttcacaggaaaactgattgttaaaaataacctggcaccttcctcccctttctcttttgctcccttcctcactcattatgggacactctatctccccttccccttctgccatgattagaagcttctgaggtcctcaccagaagcaaacattggtgccatgcttcttgtacagcctgcagaattgtgagccaaataaacctcttttcttggcaaattacccagtctcaggtattcctttatagcaatccaaatggactaagacaggaggaataagtgaaataccacgtaaaatgtagggtgcagtgccaggctcaggacatgctcagaacaggcagggccaacatcctcttggtcccaatgtagacaggtttgtgtgagaagatgaaaaataggatcaaaagtaagtcatcagatctaagacaacattgatcataaaacacaccatgaatgtatgcaccactcagaatggaaaacactgcaaaataaactatgactccatgctttctcatcacttagaattttgattacatgcttagagaaagctttttcaacttacacgcggattttcatctatcccgcttgcacatacataaaatgaaataaggcacctaaatttgttaccatctccctaaaaccgcttcacattcaaagccaggctcttctgaattcctttcaacttagagtcattggagttcctgttttcccacacaatattgtcctcttaccttcaagagcactggtgatgtggcattttccaaatgattccatgaaagaagaaaaagcgaggagtactgggttcttaccccagctttgtcattgtgtggcgctggctcacttttgtgttttgttggtttggggggtaattttttgtttgtttgtggggagttttttgttttatcttttttttttttttaaataatagagatgggatcttgccaagttgcccaggcaggctggtcttgaactccggggcttaagcgatccattggctcacttttgactcctgtgttgggcaacgctgctaaacatgtcagagtcaccattttcccacatccctcccacaaccattttgttactaatttcccctcggattttctaccaagccactccctcccattctgcaagtgttgatacgaaagcttttcatgtttgcccaggcaactataagacaccactaatcgtaagacgcgtgaaactccagaggtgtaaatacatggaaatatttgttttatagaatgactgattttgaaaacaacatttattaaggctccactatgagccaggccccatgcaacatttcgtttgtttgagtttattatcattcctttatagatgaagacacagaagctcagagaggtaaagcaatttgtccaacgtcacacagctaataagtgacaaggccaggattggagctgaggtctctttggccttgtcaccatagaagagatggatcctttcccaggtatttcctccaacctgacttctgagtccaaggggttcctgcaaaattaaatcagtcctgactttgggaagcccttcccatcttttgatttccttgttttagagagtaataacaatagttctctgtgccaggtgttattctagccactttatgtgccctagcacacataatgttcccaagtccctaatggagtgggttctatccttagccccatttcacagattaagaaactgagggggtgcggagaggtaatgccaggtacacagctaggaaagggaagggctgggattcaaacacaggcagtttggctccagacctccctctcctagcccaccccacccaccatgtccccagactagcacaggaaaccctctgcaaccccaagccccctccccatccccattgccctgaatcctgttgactttcgtggtggccaggccccactcccactgtgctgtcaggctcaaggcagatggatggccttccctggctaggcttggcttcccagtttcttcacactggacccaaacacaacacaatctagcggccctggctgctcttcagaaaaatacgcaaggcgggtgtggaaagaaatctaattagaattccttagagccccagcaattcctcttattaaattagttccctttgaagtggaactcagctcattataataatttgaatgctgaggaattgtcttatatgttcctgtctgagaaaaattgcttttacaattgcatttatgcatgtcctggtctctgtccattgggacaaaggacagctgtcgatgctaagtggttcctgctttggagaagagctgggggagggtccgggggatctgctgccctgtgggctggagctgctgaggtgcaagtggtaggagctccacatacatgagggggacaggctgcgtaggtttcctccaacatctcagccatggcccacatcagaaagctataccaggacatggaggctggtggggaactttagaaagtccaggtcaacattttcgcatggactgaatgacccagaaaaagagatgttcaaatacagacctcctggcctgcatcagcctctcctagctacagataccagtgccccacccccggagattctgattcttcaggtcagcagaggggtactagaatctgtgcttttttaagctccccagggtaattctgagatgcagccaggtttgggccccactagcctggggtgattggggaccctgctgcagtgccttagccctgatgttacaattggaagggaccctaccaacatcccattgtgatctattcactttacagatgaccaaaccaaggcccagggaagttaagtgccccaaagggagccactggacaaaacagcattctctactgttatagaaggggattcaaggactccccgtgttacagaaggggattgaaggaccccccccccaactccgccggcccccgttacaaacggggattcaaggacccatgagccggcaaaatgctgcagggtctgtttggcggctgattgtctttgttgccctggagtctgggagaaccgtccctacagagtccctggggactcctgtctcatactggcctgcttccagacacctctggttcagtgatcacatttttgtgccctttattgaggacataaacagcaggtaatatttgccctgaaagtcctaaaagaaatgtggtttttgggattctgacatctgcccatcctttttgacgtagttcaagtctcacctcctattaaaaaaaaaaaaaaaaaaaaaaggccgggtgtgatggctcatgcctgtaatcccagcactttgggaggccaagacgggtggatcacttgaggtcaggagttcaagaccagcctggccacatggtgaaaccccatctctactaaaaatacaaaaattagccaggcatggtggcggatgcctgtagtcccagctacttgggaggctgaggcaggagaatcacttgaacttgggaggcagaggtgcagtgagccaagattgcaccactgcactccagcctgggtgacagagggggattccgtctcaaaaaaaatttaaaaatcctttgccaaataccccagccccatacctgccccacgcctgccccatggctgctatcccttttctggcccctacaacccctattctccatattgacccccaggccaccacctgaccatgtccctggctccctgtggcttctcactctccctgacctctacacattattggtgctatggggattcgaagccagcagttcaattttattgcgtgctgtctatagtaaatggagccccaaaatggatcttcacaaaagccagcctggaccagggtcttcatcggagatctgatctgttgtcccttaggagatcccggtgggccactggaagctcaaggaccagggcccatcattccctctgtatagatgaggagcctgagccccaaccaaggtcacacatgccagagtccctactcttgtcctcatccttcatccacccatgtggcttcttgttccctctgagtaagcagattactgcaggggtgttcttgcctcctgagcaactatttcccacccaacagatcttctgagaagattccacatgtgccccccaccccaccctcttcctgcagaggaaggagctgtggagtcagaggcagctccaaccccctgggctggtcccagagagtgtggcctggacaaggctctgtgcagtggcagatcataagaagaaggggacacgatgttcttgaaaagaatcatgtcagaaaaatgacttagtctcaagggtcctttgtgctcaatacagcttctctccaagtcacacccacttcccttcctgacccaggcagggactccacagcttggggtgtaatgagctaccaacaacagtgtttttccagtgactcttgttcctacatccccttgaatatgagaccctaaaaagaacagatccaaatatccaatttctgaagatgttttcaccaatgatcattagtctaaccctgacatggaataaatccaacccttgcactagtttgcaaagaatactcctgctgtgacattccagatgatgtcaaaggctagcaaacccaacagcttgcagcagaacaaccacagggtgcagcctttcagactactctgcttccttcttctggtctctcatccaaacccttaattactgtctatccacactgcactctactgtgagacacacatactgcaaaaccagagactcaagactcagaaggcattttccaaagccttctgaatcccttccattacctttaactgtgaggttgccaaagcacatttgatcacttgtgaccccttaatccttgcaacaaccctagggcagatttcatgtgagcttggcatcacataggcttgggttccggtcttggctctgctactctatgactttggacaagtcatatactctctaagcctcagtttctgtatctgtaaaatgggaatgataatgccagcaggtttactctaagggtttactgagattgatatgtaaatgtcttatctcagtgcctggtagagattgactacaatgaatgttaagcattattattaaccatcatcatcatcatcatcaatcatcatcatcatcatcattatcttccattttacagatgagaaaactgaggctcagagggaaagtggtttcccaagagacacacaagtacatgaggagtcccagaggcaaatatatctctctgattctaccttctgagccctttttattcaatgatgctgcggagttcagcctttagggtgaatttaggaacaaaggcccctaacaaaacaaaggctcagaaaagatcaagatcgaataagataaagtgacaaggggacaccacaaaggatccagatgaagagggagatctccatggattcctgccatagctccttattgacacaaaacacaaaggaacattaggaaaaaaaaaaaaaaaagattggacaggagtggaggtagaagaacaggaacctcagagactgaggaagggagctggaacattaaacaccaaacccgtcccaaatccacggtcccgctcaatgctccctaagttaggtagaccctcagcgccagcccctttgtggatggagaaatagctgatgatcaacgcaaaggactaagcactgctgccaaaagccaccagccccagagacaacagaggctcccaaatttctagcctctgatctctgcctcggaacattcttgggtcaaaataaatgtgggaaccctatggtggagtcttgaagctggaaaaaaaatccaacatgtcgcccaatgcagcccagtccttccaggcaaaaccacaccagaactattcccgacagatgctaattagatgaatggttttaaattaaataatagggaatgggcagagcgaagggtgccaaggatcattgaaacagaaatgttgtccagggaaaatagtggtaaagaccagaattccttatgcacacacaaaggaagcgcaacacaggtcgggacttgtttagaccccaaggactgatgatggagcagaagctactcgtccccaggcaaccaggggagagctttggcctgggcccctccgattttcagccaagctgctggtgtcttcctcccctgaaggttcaccaactacaggagaaggaagaggccttaaagccctgcaaaggccatctctccagcttcatctcctcccctccagcctccctctcctctaaggccaacacatagtactgctttccgttcttagaatgcgtcacactttccctcctttgcaagtgcagttccctttgcctggaacatcattccctcagtcacctctcactcccggtcctcttgctaactcctacccttcctgcacgcctaggcttaatcctgggaaaccatttgccacccccttccgcaaaaaggcacaggctcctgctgccagtgcctggagagctccttgtgtcccaccccagcccagagcatgtcaaaaagaagagatgaatgccaatttcccatagtgtggtccactgcttccatttttgaggcagaaagtaatgagcagtgggtatctaatgtgcccttaaatatctttttttgttttttttgttttttttgtttgtttgtttgtttgttttgagacaggatctagctccattacccagcccagatctagctctgtccgccgaatggtgtgatcacagctcactgcagcctcagcttcaactgcctggacttaagcgatcctcccacctcagcctcctgagaagctaggaccagagccatccacccatgccaagctaatttttaaatttttttgcagaaacgaggtctcactatgttgcccaggctagtcttgaactcctgggctcaagcgatcgtcccacctcagcctcccagagtgttgggattacaggcatgagccaccgtgcctgaccaagatctttaaatagtaataaaacagacatttattaagtgcatctcatgtgctgtgcgctgttccaagtgcctacactccccatctcagttaagcacacaccaccccacgggcaggcagctgctatcattatccctttctcatggtggggaagtgaagatcagaaaggctgaataacttgctcaagatcacaagtctggacttgactgcaggcctggctgatcccagagcccagatcaagagtctcccctggtgcctctcccctaaaaccacctcagaaaccccctggtgtgtaactctaaaccatgcctgcggcaaactcagcccatttcctcttctcgcatcttaagcccagatggggtctgagtgacacttatctcataccctgtcatagagctggagccccacaggaatgtggaactccccatggacagagggcaggaggaagtgaccgccggcccgaagggggcttggtccactgggtccaaaggtgccgtctggccctggctgccacatgcctcgtgtccacaaagcagaagtcacagggacagggaaggaagcccggcaggcagactgtcatcacaggtggtgtgtcctcctatccagggacaagcagaactagccaagattgccttctccacgcagcctctcctgattccacacttgtgacttcatgttcccagagcgctgtgctggcacgtgtgctatgatcttgactctgtatgcaccccgacgcccagctacaagcagctctacccttacctaacctttaaattgctcgattgcctcatctgtaaaaacagggatgttaatagcacctgtttcacggggttattggaaggtgtgtgtacatacacacacacacacacactcatcaatatagatgagtatagattgtgtgtatgtatacatgcttagaacaattcctggcatatagtaagtgcttaatgaacattacctattcttattcatgttaagtggctatgacaatgtgccagggaaggacatcacttgtaatgacgggggataacacctcttacaaaatcaagttgaggttccccaaaactggtctgtgaaacagcctccagggggctgtttgttaaagagacagattctgtggtcccactcctagatctaatgattttaagtctctgagatggagcccaagaattaatattcttacaacctgtccaggtgattagaacaatcagccaggggctgggcacggtggctcacgcctgtaatcccagcactttgggaggccgaggcgggcggatcacgaggtcaggagattgagaccatcctggttaacaaggtgaaaccccgtctctactaaaagtacaaaaaattagccaggcgcggtggcgggcacctgtagtcccagctactcgggaggctgaggcaggagaatggcgtgaacccgggaggcagagcttgcagtgagcggagatcacaccactgcactccaggctgggcaagagccagactccgcctcaaaaaaaaaaaaaaaaaaaaaaaaaaaaaaaaaaaaaagaactatcagccaggtttgggaccccctaggctagaccaagtgtttccccagcaaatgagggtgtggactctgctgccattctaaagccaagaggggtgctttctttcctatcatccatctctcctttcttcctcccttgcttccttttttcatcagcatcttgaacttctctctgcggctgttcttttgctacaagaactccaagtggaccctgtcctgaccacgtgcatcctaagtacacggagtcttgttttccatccactaaatgtcgttgaccagtttacttttcattccctgcacaaataaacgtttgctacaaacgtgacttgtgcatggccccttgacggcaggggccaagtctgttctactagaaagatgccttggagaccatgtattccaacctctctctttacccctgaagaacctaaggtccacagaggataagtgatttttacaaggtcacacagcaagcaaccagagcggagatgacagctcaggtctctggcttcttagctgctgccctttccattgtcacaggctcctgttcaaaataccccagaaccactcatttatatatcgattgtgagtatatgcattacaaagttttatttattgaatactctatgtactaggcatggtgccaactgctttacctgcattctgtcatttcagtttcataaacagttcagaaatgagaacattattatcctcatttcatctctgggacaactgagcctccaggaggtgaagtgacctgctccaaaccacagagctggaaagagccaggattgcaacccaggcctgtctgattgcagagcccgaactcctggctgttatgctggtccttgagctcttgcttctcacctcaaaacctgcccttccatgtctactctgtgatgctggggcagggaccccacaaaccagtttccgttaaccagctagtttgtttctgcctacaggggactaatgggaggctggaaaggctggaggaggaagggactcactcccttcgcttcctgttcctgaaagggtcaccctcgcaatgctccttcaccctggcaggagcaagtccttcctaagcagcagctgaatctgcttacagtttttccagcaattgcagaagcagcttcattgcctgtcttccttaaaagtttgggtccagggaccacggggcctctcctgtgagattaggaataccagccccagctgcgcagtaccctctcctcagaaggccgagtttctctaattcccacttcttccttttcttctcccagctctaggggctattacttctataatacctcagcgttctattttgacccttttggttacttaattaacaacatcagaggcccggcctggtggctcacgcctgtaatctcagcactttgagaggccgaggcgggcggatcacgaggtcaggagttcgagaccagcctggccaacatgatgaaaccccgtctctactaaaaatacaaaaattagtcgggcatggtgacacgcacctgtaatcccagctactcaggaggctgaggcaggagaatcgcttgaaccagggaggcggaggttgcagtgagccaagatcccgctactgcactccagcctgagcaacagagcgagactccgtctcaaaacaaaacaaacaaacaaacaaaaaacaacctcatacctaattaacaatatattaaattctgtctccttcaccttggcagccacaggtctttctgggagtggcagctgaatccactttatagtttttccaacaattgcagaacagctttattgcccccaccctcactcacccagatccccacactagcctgccagtgcctcctcctcagaggtctgggttccagtccgatgggcctgtggacccagagatatgggcaccagccaagtgcacctgatggatgtgaccaatacattacatggcacagtttaagtcactaaagatgtttcaaataacaagaggacctgtgttaatgggcagagggctcagcaggaagcacttttttttttttttgaggtggagtctcactctgtcactcaggctggagtgcagtggcacaatctcggctcactgcaatctctgactcccgggttcaagcaattctccctgcctcagcctcctgagtagctgggattacaagtgcctgccaccatgcctggctaatttttgtattttttagtagagacagggtttcaccatgttggccaggctggtcttgaactcctgacctcaagtgatctgcctgcctcagcctcccaaagtgctgggattactggtgtgagccaccatgcccggccaagaagcatctactgacaagcaggactgtctagaaggagagagtctgctccttgctacagaaagggcttgggcagcaaactaagtccagtggggtagaccagacctggtgtgtgaccaacactgcctgttaacactgcctgggatttcaccaaagcggacatacaaatggcaaatcagcacatgaaaaggtgtccaatgaaacttcaataaaatcacatggtcccaacacaaagaaataatccgtgtttgtggtgatagatatactgatgaccctgatttttttcattacacattctatgcatgtatccaaaaaaatcacatgtacaccatcaattagtataattgtatgtatcaattttttaaaaattaaaaaagcaatgaaatgttactacatacctatcagaatggctgaaataaaaaatagtgacaacattaaatgctggtgaagatgcagagaaactggatcgttcagatgttgctggtggaaatgtaaaattgaacagccattggagtttggcagtttctttgagaactaaacatgcaactatcatatgacaattgcaatcctgggcctttgtcctagagaaatgaaaactcatgttcaccacacacaaagctgtaaagaatgtttatagcaattttatttctaacagccaaaaactggaaacaatccagatgtccttcaacgggtaagtggtgaacaaactatggtatgtccacaccacagagcacaactcagccatagacagcaacgaacccttgctacgcacaacctggattaatcttcggagaattatgctgaatgaaacaactgaatcccaaacggttggatactgcacaattccatttatacaagcttcttgaaatggcaaaactagacatagaaatggaaaacagattaggggttgccaggagtaaaggaggagtgggggcagagggaagtcagtgcatgagggatctttgtggagatgagactgttctgtatcttgactgtatcaacggcagcatccttgttctgatgcctacgatcaagaggtagatagatagatgatagatgatagatagatagatagatagatagatagatagatagatagata

SEQ ID NO: 390 - DNA, 1309 bp, Homo sapiens
caaaaagataaaacctacaaagaaaaagagagtgaagaggagagagaaccgtggatcagatataataaaaaaatagatgggatggtagagtgggaacctatttagctgagtgagccactgcctaactgcgtacagagggggatactgataagcaagccagccagccagcattcttcacctgccttcatcttagaatgcctgcagctagattcgaactcttctgtctggacttcagcaggtccttttctagagagcctactgccatcacagaagggacctgctgataacctgcaattgtggtttccccaagcaaaaagtgagctcaccatctgatcactgttcattgaatttacagttgaacatgacccgtgcacactaagcctcgtttggatggcctgtgttcattagacaacagaaaagctaaaaggaatgaactgaataaaagaactcggaagaaatagatgatacaggcaataggaaagaactaaaaaacaaaacagaaaacatgaataggtctcagatgataagacactggattcactaaacaagaacaacatgcctacaaaggaagcgagagagagaaggaacaaatcgataacaagaaacgatgcttggaaataatatgatagctgaaataaagtagtgcatgagaaggctggaagatgtagttcattcttccagcaagtaaaagaaaaatataaagaaatgtaaagtagaagggaaaattaagaaagttagatgatcaacccaggaagtacaaaatctgcctaaagttacaaaaaagaggacaaaaggcattggaggataataaattatcaaagtaatactacaggaaaatttccctagtaaattatcaaagtaatactaggggaaaatttccctgaactacaaaacaaaacaaaacaaaaaacagtagtctcttggttgaatgaaaaagaacccatactactgagtgaaatttcagactatctggacaagtcacttagctatttaatcggttataccacgagatacttatggagggtattagaacaattaatgatagtttcattaaaaggtaagcaaacaactttgggaggccaaggcaggtggatcacgaggtgagttcaagaccagcctggccaagacggtgaaaccccatttctactaaaattagctgggtgcggttgcaggtgcctgtaatcccagctacttgggaggctgaggcaggagaatcacctgaacccgggtggcagaggttgcagggaggcgagatcgtgccactgcactccagcctgggcaacagagtgagactgtctcaaaaaaaaaa

SEQ ID NO: 391 - DNA, 4826 bp, Homo sapiens
gggtcgaggtcgacggtatcgataagttttttttttttttttttttttttttttcctttcccctccccctccctctccaagccggaggggtcctgaggtgacagcgcctgcaactgaaatttcagcagcgggagaagatggacaagagaaagctcgggcgacggccatcttcatccgaaatcatcacagaaggaaaaaggaaaaagtcatcttctgatttatcggagataagaaagatgttaaatgcaaaaccagaggatgtccatgttcaatcaccactgtccaaattcagaagctcagaacgctggactctccctttgcagtgggaaagaagcctaaggaataaagtcatctctctagaccataaaaataaaaaacatatccgagggtgtcctgttacttccaggtcatcaccagaaaggatacccagagttatattgacgaatgtcctgggaacggagttaggaagaaaatacataaggaccccacctgtaactgagggaagtttgagtgatacagacaacttgcaatcagagcaactttcttcatcatctgatggcagcctagaatcttatcaaaatctaaaccctcacaagagctgttatttatctgaaaggggctcacaacgaagtaagacagtagatgacaattctgcaaagcagactgcgcacaataaagaaaaacgaagaaaggatgatggcatttctcttttaatatctgatactcagcctgaagaccttaacagtggaagtagaggttgtgatcatctcgaacaggaaagcagaaacaaggatgttaaatattctgattcaaaagtggaactcactctgatttccaggaagacaaagagaaggcttagaaataatttacctgattctcaatattgtacttctttggataagtcaacagaacagacaaaaaaacaagaagatgactcaacaatatccactgagtttgaaaggccaagtgaaaactatcatcaggatccaaaactgcctgaagaaattacaactaaacctacaaaaagtgattttactaagctatcctcacttaacagtcaggagttgactttgagtaatgccaccaaaagtgcctctgccggttcaaccactgaaaccgttgagtactctaattccattgatattgtggggatttcttccctggttgagaaggatgagaatgagttgaataccatagaaaagcctattctaagaggacataatgaagggaaccaatcactgatctcagctgaaccaattgttgtttccagtgatgaagaaggacctgttgaacataaaagttcagaaattcttaagttacaatctaagcaagaccgtgagacaactaatgaaaatgagagtacttctgaatcagcattgttagaactaccattgattacatgtgaatctgtacagatgtcatctgaattatgcccatataatcctgtcatggagaacatttccagtattatgcctagtaatgagatggatctacaactggattttatatttacttctgtttatattggtaaaataaaaggagcttctaaaggttgtgttacaatcacaaaaaaatatattaagatcccatttcaagtgtccctgaatgagatttcattgctagtggataccacacatttaaagcggtttgggttatggaaaagtaaggatgataatcacagtaaaaggagtcatgctattcttttcttctgggtctcttcagattatcttcaagagattcagacccaattagaacactctgtattaagccagcaatcaaaatctagtgaattcattttccttgaactacacaatcctgtttcacagagagaagaattgaagctgaaagatattatgacggaaataagtataatcagtggagaattagagctttcttacccgttgtcttgggttcaggcatttcctttgtttcagaacctctcttcaaaagaaagttcttttattcattattactgtgtttcaacttgttctttccctgctggtgttgctgttgctgaagaaatgaagctgaaatcagtatctcagccctcaaacacagatgcggccaagcctacttacaccttcctgcagaagcaaagtagcggttgctactccctttctattacatctaatccagatgaagaatggcgggaagtcaggcacactggacttgttcagaagttgattgtatatcctccaccacctactaaggggggattgggagtaactaatgaagatctggagtgtttagaagaaggagagtttcttaatgatgtaatcattgatttttaccttaagtatcttatattggagaaggcatcagatgaacttgttgaacgaagtcacatttttagtagctttttctataaatgcttgacaagaaaggaaaataatttaacagaagataatccaaatctttcaatggcacagagaagacataaaagagtaagaacatggactcgtcacataaacatttttaataaagattacatctttgtacctgtaaatgagtcgtctcactggtatctcgcagtcatttgttttccatggttagaagaagctgtgtatgaagattttccacaaactgtatcccagcagtcccaggctcagcagtcccaaagtgacaacaaaacaatagataatgatctacgtactacttcgacactgtctttgagtgcagaggattcccaaagtaccgagtcgaatatgtcagtaccaaagaaaatgtgtaaaaggccatgtattcttatactagactccttgaaagctgcttctgtacgaaacacagttcagaatttacgagagtatttagaggtagagtgggaagttaaactaaaaactcatcgtcaattcagcaaaacaaacatggtggatctatgccctaaagttcctaaacaggacaatagcagtgattgtggagtatatttattgcagtatgtggaaagcttcttcaaggatcctattgttaactttgaacttccaattcatttggagaagtggtttcctcgtcatgtaataaagaccaaacgggaagatattcgagagctcatcttgaaacttcatttacagcaacagaagggcagcagtagctagttaatctgtacaaacatgacacagatgttctctaagattactggaaagccccttaccagcatttgtgttagccagctcacagagaagaaaataacttgcagtagttttataataagtcattggaacattatttaaaatatgtaggacacattattagaattgttgggatctcatagatggaatgggaatgggggtgatatagataaacttactagatataaattaaaattttataaatatttcatatttttctgagtaaatatgattggattatgcaacagcatatgtaatatgggaatgttttgtagataataaaacttacatgatctgtacttccacgtgactgggtgctgaggggagttaaagcctccctggtgccagccccagtgcttgtcaaatttgctgacaggtcacatcatattgtaattctattctttgcagctcaagcatgcagtatgaatactgtgtattttttaaaaaaataatttagtatcaaggcttcagaaaatgccatttacggcatcccttctgtatgtaacaaaaagacattcataatgttaggaagatgataaaaattcgctcttttaaagtgcagcttattattctcaattgctaaatacgattactctgctttttttttttcatttcttttgatgtcatatgtgagtatcttataatttagttcatttgttcagggtaaaatttgaaacaaaaaattttacctgtgcaaaatagttttttaaaaattatacatgtagctcaacttgaggtactgctatataaatattcactcacattatcacggaatttatgtatagtttctctaatatagaagataaaattggtgtcctcataactttaacaaagaaaaccctcagtcctatttattaatgggtagaattaaatatataattttatagctcagtttacccagtattcatctgcaaagccagattgctctcattgcttttatatttttaaattgtagcttttagagacctatgatcctcatggaacttaattttttattaaatattcaggtaacagttctgaattcatgtgataatggtggcattatatatgattaaacacttcagaactttctaatgttatcaggagtattttgagggagatatgattatattgtattttctcagataagaaaaatgttttttaacaatattattttaatctgttttaagcatctcttagatttacattataactacataaagcagtgaagcaaaggcaaattaagataaagctagaaagtctgaacattttatttcaaaatcatacgaatcggggtcagttaagcctcagtattcttagcttttgttgattttggcactatctttatattattaaatatatttgttgtttggatatttcatataaagatggctataattacatatttcattcccaatttgtgtgtgttggggggtacttttaaaggtgactattgttttgtacatctaattttgggaaaccaagtctataagacatcttgtgatttcttaatgtttttgtttgtatgtttttcaaagatatcactgtcctttatcatgttttgaagattgtttaaaattcattttcctaaattaatgtgcaagtaatgttttgaggatatcggtgttttatattaaacatatttccaattcaaaaaaaaaaaaaaaaaaacttatcgataccgtcgacctcgatgatgatgatgatgatgatgatgtcgac

SEQ ID NO: 392 - DNA, 3005 bp, Homo sapiens
cttgacttgactggtaagagctgttgtgaaggtacatcttacttacttacctggaagcagtgaggcagtcaagaattatgtgctgtcagagctggtctcagcatgatcaaggaagtgtgatcattggatatttttttcttgtcaattttattattttttaaagtgtgacttttattgatctccattatcaagtcacagtaatgaaaggcagtaatagaaataaggatcattcagcagaaggagaaggggttggaaaacgaccaaaacgaaagtgtcttcagtggcatccattgctagcaaagaaacttcttgatttttcagaagaggaagaagaggaagacgaagaggaggatattgataaggttcaacttcttggggccgatggcctagagcaagatgttggtgaaactgaagatgatgaatcaccagagcagcgagcccggagaccaatgaatgcatttcttttattttgcaaacgccatcgctctcttgtacgtcaggaacaccccaggcttgataaccgaggtgctaccaagatactagctgattggtgggctgttcttgatccaaaggaaaagcagaaatacacagacatggccaaggagtataaggatgcatttatgaaagcaaatcctggctacaaatggtgtcctaccacaaacaagcctgtgaaatccccaacacccactgtcaatccacgaaagaaactttgggccttcccatctgactcttcaagagacttgccaagccccaagaaagcaaagactgaagaaatgcctcagcttaactttggaatggctgatcctactcaaatgggaggcctgagtatgctgctgttagctggagaacatgctcttggcacaccagaggtatcctctggcacatgcaggcctgatgtttcagaatctcctgaattacgtcagaagtcaccattgtttcagtttgccgagatatcttcaagtacgtcccactctgatgcttctacaaagcagtgtcaaacatctgccttgtttcagtttgcagagatttcttcaaacacttcgcagttgggtggtgctgagcctgtaaaacgctgtggaaagtctgcactctttcaactggcagagatgtgcctggcatcagaagggatgaaaatggaagaatcaaagctaataaaagcaaaagaatccgatggtggaagaattaaagaattagagaagggaaaggaagaaaaagaaattaaaatggagaaaacagatgaaactaggttacagaaggaagcagaatttgaaaaatcggctaaggaaaatttaagagattctaaggaattgagaaattttgaggcattgcaaatagatgacataatggctataaaaatggaagatcccaaagaaattagaaaggaagagttagaagaagatcacaaatgtagtcattttcctgatttttcttattctgccagtagcaagataataattagtgatgttcccagtagaaaggatcatatgtgccatcctcatggaattatgatcattgaggatcccgcagcattaaacaagccagaaaagctaaaaaagaaaaagaagaaaagcaaaatggatcgacatggaaatgataaatccacacccaagaagacttgcaaaaagaggcagtcttcggaatctgacattgagagcgtcatatataccattgaagccgtcgcaaaaggagactggggcatagagaaacttggagatacccctcgcaagaaggtccgcacatcctcaagtggcaagggaagcattttggatgccaagccaccaaagaaaaaagtgaaatcaagagagaagaaaatgtcaaaggagaaatcctcagacaccaccaaagagtcaagacctccagatttcattagtatttctgctagcaagaacatttctggtgagacaccagagggtataaaagcagaaccattgacccctatggaagatgcactaccacccagcctatcaggacaggccaagcctgaggacagtgactgtcacagaaaaatagaaacttgtggttccaggaaatccgagaggtcttgcaaaggtgctctttataaaaccctggtgtctgagggcatgctcacctctctgcgagctaatgttgacagaggaaaacgaagctcaggaaaaggaaactcctctgatcatgaagggtgttggaatgaagaaagctggacatttagtcagagtgggaccagtgggagcaagaagttcaagaagacaaagccaaaagaagactgtctccttggctccgcaaagctggatgaagaatttgaaaaaaaattcaacagcctccctcaatatagtcctgttacatttgaccggaaatgtgtacctgtcccaagaaaaaagaagaagactggaaatgtgtcctcagaaccgactaaaaccagcaaaggaagtggggataaatggtcaaacaagcaactcttcttggatgccattcaccctacagaagccatattttcagaagacagaaacaccatggagcctgttcataaggttaaaaatatcccatccattttcaacactccagagccaacaacaacgcaagaacctttggtgggcagccaaaagagaaaagcaaggaaaaccaagattacacaccttgtcaggacagcagatggccgggtatcaccagcaggaggtactttggatgacaaaccaaaggaacaactgcagaggagtctccctaaagcaactgagacagactgcaatgacaaatgctcacacaacaccgaggtcggggagacgcggagcagtactccagaaatgcctgccgtgtctgcgttctttagcctcgctgcgctggctgaagtggcagccatggaaaatgtgcacagaggtcagaggtcaactccgctcacccatgatggacagccaaaagaaatgccgcaggctcctgtacttatttcctgcgctgaccagtgaagcgccctttcattgtaaaacattgtgctttacctactaaaaaaaaaaaaaaaaaaaaaaaaaaaaaaa

SEQ ID NO: 393 - DNA, 5894 bp, Homo sapiens
ctctgcctttcctctcgcagccacccttcctctcagaccagtacggtggccgacgggagtcagacgctggggatgaatgaaggatcaacaaacagtaataatgactgaatgtacaagtcttcagtttgtcagcccttttgcttttgaggcaatgcagaaggtggatgttgtttgcctggcatctttaagtgatccagaattaagacttcttctgccctgtttggtacggatggcactttgtgcacctgctgaccagagccaaagctgggctcaggataagaaactcatccttcgccttctttctggagtggaagctgtcaactccattgttgcattgttgtccgtggactttcatgctttagaacaagatgccagcaaagaacagcagcttaggcataaacttggaggaggcagtggagagagcatcctggtatcacagcttcagcatggactgacgttagagtttgaacacagtgattcacctcgtcgattgcgtcttgtgcttagtgaactgttggcaattatgaacaaggtgtctgagtccaacggagaattttttttcaagtcttctgaactttttgagagtccagtatatttggaggaagctgcagatgtactttgtattttacaagcagagctcccttccttgctccctatagttgatgtagctgaagctttgctacatgttagaaatggtgcctggttcttgtgtctcttggtggccaatgttcctgatagttttaatgaagtttgtaggggcctgataaaaaatggagaacgacaagatgaagaaagtcttggaggaaggcgcaggacagatgccttacgcttcttgtgtaaaatgaatccttctcaggccctcaaggtccgaggcatggtggtggaagaatgtcacttgccaggccttggtgtggctttgacattggatcatactaaaaatgaagcttgtgaggatggagtgagtgacttggtttgttttgtaagtggtttgcttcttggaacaaatgcgaaagtccggacttggtttggaacttttatccgaaatggacagcagagaaaaagagagaccagcagttctgtcctttggcagatgagaaggcagcttcttctggagttgatgggcattcttcccacagtaagaagcacccgaattgtggaagaagctgatgtggatatggagcccaatgtgtctgtgtattcggggctgaaagaagagcatgttgtgaaagccagtgcactcttacgtctgtactgtgctttgatggggatcgctggactcaaaccaactgaagaagaagctgagcaattactgcagttgatgacgagccgtcctcctgctacgccagctggggttcgctttgtttcactttccttttgtatgctactggccttttctacacttgtcagtacacctgaacaggagcagctgatggtggtgtggctaagttggatgataaaagaagaagcgtattttgagagtacttcaggcgtctctgcttcttttggggagatgttattattggtggctatgtactttcacagcaaccagcttagtgctatcattgacttggtctgttccactttggggatgaagattgtaattaagccaagctccttgagcaggatgaagacaatcttcacacaggaaatttttactgagcaggttgtcacagctcatgcagttcgggtccctgtcaccagcaacctgagtgccaacattactggatttttgcctattcattgtatttaccagcttctcaggagccgttcctttaccaagcacaaagtgtcaataaaagattggatttatagacagctgtgtgaaacctctactccacttcatcctcaattacttcctttgattgatgtgtacataaattctatacttactcctgcgtcgaaatctaatccagaagccacaaatcagccagtcacagaacaggagatactcaatattttccaaggagtcattgggggtgacaacatccgccttaatcagcgtttcagtatcacagcacagcttttggtgctctactatatactgtcttatgaagaggctcttctagcaaacacgaagactttagctgccatgcaaagaaagcccaaatcatattcttcttctttaatggatcagattcctatcaaattccttattcgacaggctcaagggctgcagcaggagttgggagggttgcattcagctttactacgtctccttgctactaactacccacatttatgtattgtggatgactggatttgtgaagaagaaatcacagggactgatgccctgctacggcgaatgctcctgactaataatgctaaaaatcattctcccaaacaactccaagaagcattttcagctgtcccagtaaatcacacacaagtgatgcagattatagaacacttgactctactctctgccagtgaacttataccatatgcggaagtgttaacatccaatatgagccagctattgaattcaggggttccacggagaattctgcaaacagtcaataaactatggatggttcttaatactgtgatgcctagaaggctatgggtaatgacggttaatgcacttcagccttcaataaagtttgtacgacaacaaaagtatactcagaatgacctgatgatagatcctctcattgtcctaaggtgtgatcagagggttcacagatgccccccactgatggatattaccctacacatgttgaatggatatcttcttgcatctaaagcctaccttagtgctcatctgaaggaaacagagcaagataggccttcccagaataatacaattggtttagttggacaaactgatgctccggaagttaccagggaagaattgaaaaatgcattactggccgctcaggatagtgcagctgtccagattctcttagagatttgcctacctactgaagaggagaaagcaaatggtgtcaatccagatagcttgttaagaaatgttcaaagtgttattaccaccagcgctccaaataagggaatggaggaaggagaagacaatttgctctgtaaccttcgagaagttcagtgccttatctgttgtctcttgcaccaaatgtacattgcagatcccaacattgctaagcttgttcactttcagggttatccatgtgaacttttgcctctgacggtcgcaggtattccatctatgcacatctgtctagatttcatacctgagcttattgcacagccagaacttgagaaacagatatttgctatccagttgctttctcacttgtgtatacaatatgcattaccaaagtcacttagtgtggctcgtttagctgtcaatgtcatgggaactttgttaacagttttaacacaggctaagcggtatgctttttttatgccaactctgccaagtttggtctctttttgtcgagcatttcctccattgtatgaggatattatgtctttgctgatccaaatagggcaagtttgtgcctctgatgttgccactcagacaagagacattgatccaattattacacgtcttcaacaaataaaggagaaaccaagtggatggtctcaaatctgtaaagattcatcttataaaaatggatccagggacactggaagcatggatcctgatgtacagctctgtcactgtattgaaagaacagtaattgaaataataaatatgagtgttagtggaatttaaaacaaaatttaaaacaacaaaaagttgtttgctgcatatacccaacatgaatctgcatattagtaacaactctaaactgaatgggaacagtaaagtattgtcttggaatcactaaaacaattcaattcaacatgagtatagtttagaactttatgagaattatgcttgcttgtttctgattggcacatctttggatctactttgctgatatgtttctattgtagcagctgagctttttttttttccactgggaacacatgtaagaaactcattattggaaagggaatttggccttgtatttagcttttgaagtgaagactgccatgcctttaatttcttataaaaatgagtctgtgggtagccctagtgtttattttaactgtgagcttgtaacagaatgtgacaaagatgcaaagatgggagaggaaaaaagggtaaagggaaaggagaattaaggaaataataggagttaaaaacacaagtagaaatctcaaagatttgcagtgcaagtaatagtaatgcaagttggaattctagttctcaagaaagagtattgagaagacttttaaaaaggcaagtagcttttgtaaatgatttctgtggaaatacagatgaggatttaaagatttcacatatttgcttcaatttttattaatatatgaagccatatgtttaaagagatacttgaataatttggaattttaagatactggtgtaaaagtgtttacagaaacatctttgttcaaagaagaacctgagagatctcatttagttttatgttttaaatttatttttataatgctttattaacttacctaatgctcagaggggggaaatatgtatcaaattaaatgaaggtagagcaataaaacccactggattaaagagctcttggtttgtcatcaggattataattcatatcttactttgagaagatctttgagtaagaaaatgcagtgtttgaacctgaggaaaagttaaagtgtagaaaatattgtcttgccgaaggattttgcagtcctctgtcagtaacttccattgattaggcagacatattcaggtaaaccctaatcattaaaaaaaaattatcaatgtagaaagtaattcccttttttctctctgagatatacctcaatcacacacttccccacccccacttgaaacagacctcttcacttgtgttttttttttttttttcctgaggtggagtcttcccctgttgcccaggctggagtgcagtgggatgatcttggctcactgcaacttctgccacctgggttcaagggattctcgtgcctcaacctcctgagtagctgggactgcaggcacgcgccacctgtatttttgtatttttagtagagacgggggtttgccatgttgcccagactggttttgaactcctggcctcaggtgatctgcccaccttggcctcccaaagtgctgggattacaggtgtgagccaccgcacctggccagaccgcttcacttgtaaaagaaattaggctaataagaaggtgtagtttttgagaaatgaaatttaactttagccttttcactagtaaatagtcacatctcattttcttcctttgtaaaatggggttactactggccctacctcatattctatgagaatgagtttgtagctgtttcaaatcatgaagtgcatagtatcacatgtgatagaatatttataactttttattagatgcttaatgttcaattaagtaattttgatgtgaaaaataaaagtaataaaagtatcttaaaaatagcataagaattttcatatttttaaacaaggcagttttgtagtcccttaagattaaatacaactgctccttttttttttaaactgaggccttgcgatattttgtgtgaatagatatgccctaggagttcagaaaaagttaaaagtatgttttctaattaaatgcagtgcacattcctggatcaatattcaaagactggtcataacctgctgtgttaaaataatcacatatgctctttttcatcagatttgttgatgatgtaaataaaatgtgtaaatatattagtaaatgttaatattcatgtattttaagttaaggttataaaatttgtcacaatgtgtttttttattcaagtgaaaacagatgtgtgcagctattttgaatattggtttataaacattcatattctttatcaaacaaaaaaaaaaaaaaaa

SEQ ID NO: 394 - DNA, 4333 bp, Homo sapiens
cgcagagcgcgcacccaagcggccggacctccccgactcccgggccgcccccgtctcgcgccctgcctccctccttcggccttcacctacccgcctccggattggccgctaggaatcccgcccctctaaagccctgcctgctattggtcacgattttataatcaatggataaagtgggaaaaatgtggaataacttcaaatacaggtgtcagaatctcttcggtcatgagggaggaagccgtagtgaaaatgtggacatgaactccaacagatgtttgtctgtcaaagagaaaaacatcagcataggagactcaactcctcagcaacaaagcagtcccttaagagaaaatattgccttacaactgggattaagcccttcgaagaattcttcaaggagaaatcaaaattgtgccacagaaatccctcaaattgttgaaataagcatcgaaaaggataatgattcttgtgttaccccaggaacaagacttgcacgaagagattcctactctcgacatgctccatggggtgggaagaaaaaacattcctgttctacaaagacccagagttcattggatgctgataaaaagtttggtagaactcgaagtggacttcaaaggagagagaggcgctacggcgtaagttctgtacacgacatggacagtgtttccagcagaactgtaggaagtcgctctctaagacagaggttgcaggatactgtgggcttgtgttttcccatgagaacttacagcaagcagtcaaagcctctcttttccaataaaagaaaaatccatctctctgaattaatgcttgagaaatgcccttttcctgctggctcagatttagcccaaaaatggcatttgattaaacagcatacagctcctgtgagcccacattcaacattttttgatacatttgatccatctttggtttctacagaagatgaagaagataggcttagagagagaaggcggcttagtattgaagaaggggttgatccccctcccaatgcacaaatacatacatttgaagctactgcacaggttaatccattatataaactgggaccaaaattagctcctggaatgactgaaataagtggggacagttctgcaattccacaagctaattgtgactcggaagaggatacaaccaccctgtgtttgcagtcacggaggcagaagcagcgtcagatatctggagacagccatacccatgttagcagacagggagcttggaaagtccacacacagattgattacatacactgcctcgtgcctgatttgcttcaaattacagggaatccctgttactggggagtgatggaccgttatgaagcagaagcccttctcgaagggaaacctgaaggcacgtttttgctcagggactctgcgcaagaggactacctcttctctgtgagcttccgccgctacaacagatccctgcatgcccgaattgagcagtggaatcacaactttagtttcgacgcccatgacccgtgtgtatttcactcctccactgtaacgggacttttagaacattataaagatcccagttcgtgcatgttttttgaaccattgcttactatatcactaaataggactttcccttttagcctgcagtatatctgtcgcgcggtaatctgcaggtgcactacgtatgatggaattgatgggctccctctaccctcaatgttacaggattttttaaaagagtatcattataaacaaaaagttagagttcgctggttggaacgagaaccagtcaaggcaaagtaaactctccggtccccaaaggttgttaactaggtccgctttcatgtgcatcagacagtacacctatagcaagcacacgtagcagtgttaggctttttcatacagtatgtaagcttagtgttagtatctgtcagatgctacctgctgttacttattcagataaacatggtgcctattggaacaatagcggatagagctacaggtgttcagtaagactacaaaaacattttgcctatttcgctaacagtttggtttttaatggctgtggtatttgagtgaggcaactctggggcatttgttatgaagaattctatttcttactgaagaacaaattattaatattggatgagtatttcaacagtgtgactaatgtttgaaattattttttctaagagtttttctataaccttccaaaagtcgtgatgtttgtagttactataaatcaagctttggaagtccaaaaagaataaaagactgccttccttttagaaaaaaatgcaattttctggccacaagggcatagtgcagttcacttacgtgttgatgtagtttataatcagacgccttttctcttctgcaaaaggtactgttaagtaaaccagattttctaaataggcattcttaaaatttcagacttacaaagctagtagtagaattttattgaaaggcctaggtattaattttttaaatgagtgctttaacttaaaacaggcgtttggaatagctgctgcaatgtagtcttgtgtgtgatttttttttaagttgatgtgcagtctaattgttgtttcataaaagttggatctgttcctatgcccaggatgattttgtgaaccgtgaagtacgtgagactagaagacgcccaaacaagtcagataatagtaactacaatggttgctgatgttgagattattgttgaactataattaataatttggatggcagaatttatctcttttttgtaaactctcataactgaattgcttaagtataatttatagaatttcagtgcagttcattcttaatggaaaatctgaaacctaaattgcagatttaaaaggtactgtacaaccattatatctgtaaataacttagcacctttttgtcacttagaataatatgtactactacttgagtgagcgcttttggaagttatatcaagttctagtgtttgcttcttagtaactgaactgaatttacagttctgtcctagacattttgcactaaagtagccgaatccactctcatgtcttttcgttaatgtgctctgtaccactggtgagtgctccatagtttccttacctgctgctacagaatgttattttacatccctatggctattgccaaggctacaaaaaaggaaagctatatttgtatgcaacactaaccttttgactgctaatgtatgtttctgcttgctgtgccttgttatggctgctttttttgtgctaataaagtatgtttggtgttctccttgtatatctgctgttttatacatttgcaacaatttctcttgtaaatggaatggtttggggtttttaaataagcattaactaacaacctttctatagttaatgcagagttaatgaacagtctaatattgacttatcagaataagctaactctaaatttaatgctctacatcttatcagtcataattatatatactgtggaacagtatctgtagttactgcaaattactgtacagtttaggttataacagaaaactgacagagaagtaataaacctattgatttctctgcttataaatgaaagattgaaactatccaatgacatattatagtaaatgagtatctgtaacctcccactgcatcagaagcaggttaaatgaagtcttgtgaatttgtaatagatcagtaccatttattggtttggggaccatcttaattaaaaataaatgcccaaaatgtagaactttaaccaaagacttgtcccttttaaagcaaaatggggattgaagggacttataatttctgttgtttctaattaaagtccctgaagatcatataccaaagtgtttgagaacttcatccaaacctactttaaagcattatgtgcaattaagttgttatgacataattatattgcctaattgttgggtcttttttcttgagcttataatgtacctggaaaataaacctcttgagaaaaagaaaagttcatactgattattggaaaaggactatatatgtgagcaagattgtgttttagagaggaaacttgaaactccaagaaagcacttgatgtttttatatgcttgtagcaaattgatgttctaactgtagttttatagaaagtattaatgcttttatgtatttcaaaactttcatatgttaaatggaaattgttttaaatgtgtttgagtttatgtaagcatgtatacactgtgctaaaagtcacatgtttcagtttgtgtataatattaatatgcaatttttggtttaaatttttgtcttaaaatattagtggcttacattttaaaaaagaaaaatcaccagcatgaacttgcaaaaaaaaaaaaaaaaaaaaaaaaaaaaaaaaaa

SEQ ID NO: 395 - DNA, 57759 bp, Homo sapiens
ccgagtgtgatggtgccctcttggagtcccagctactcaggaggctaaggcgggaagatcatttaagcccaggagatggaggctgcagtgagctgtgatctaccactgcattccagcctgggtgacagagcaagaccctgtctaaaaaaaaaaaaaagaaaaaaaagaaaagaaaagaatgagtgggagggcgaggcgcggtggctcacgcctgtaatcccagcactttgggagtgggaggtgggtggattacctgaggtcgggagttcgagctcagcctggctaacatggtgaaaccccgtctctactaaatacacaaaattagctgggcgtggtggcacacgcctgtaatcccagctactccggaggctgaggcaggagaatcgcttgaacccaggaggcggaggttgcagtgagccgggattgtgccactgcactccaacctgggcgacagtgagactccgtctcaaaaaaaaaatgaagtactggtacctgcaacagacacaaaagccacatattatatgattccctgtgtgtgaaatgtccagaagaggcaaatccatagagctgacaagtagaatggtgattaccaagagcttaggagaggaagggctaatggccttgaggttctttttaaggtgatgagcatgtttatttggagacagagtctcgttgtgttgcccaggctggagtgcagtggtgtgttcacagctcactgcagcctcaacctcctaggctcaagtgctcctgccatctcagcctcccgagcagcttggaccacagggctgaaccatcacccccagctaattttttctgttttttgtaaaggcaaggtctcacaaaatcccaacatgctgggattacaggcgtgagccaccatgcctggcccctactcattcttttttttttttaagatggagtcttgctgtgtcacccaggctggagtgcagtggcacaatcttggctcactgcaacctccacctcctgagttcaagcaattctccctgcctcagcctcccgagtacctgggattacaggcgcctgccaccacgcccagctaatttttgtatttttagtagagatggcgtttcaccatgttggccaggttggtctcgaaatcctgacctcaggtgatccacccaccttggcctcccaaagtgctgggattacaggcatgagccaccgcgcccagccgcccctactcattcttaatcacaccacctgactttctccacattgatcacattaggatattatcttgtttatttacagaaaatctgtgtccctcttcagtgcactggactcttcggtgcactggatgctcaatgcaggcactaagttttgtctgacttaccactggttgtatgccctgctcacagctggtgaatgagtgattggaaacacacctgctcccttgatttaggcctctgggaaacaagggcaaggtaagttcaggaagaagaaagacctcgtaatttccaggtaggaaaaatcctttggtgtggccgtgagacactgcattcttcttggccacagctccctctgctttgagaatcacataatcaactttatctttctctgaatcgttcacataaaagggaggtgttggaacacaaggtggaaatgggtgtgttggcggtggctgaggaagtcggggcaggaggagccactgtttctgggaatgaattcctgaaacttgctggtcccaccaagatgcaaatcttgcggcagtttttacagttatcctgtggaagaagtgaggatcccactccaagcccaggtcagaatgctgataatcccctctgatcaggtttttttaattttatttttattttttgtggtttggggaagatttgccaactgtatcctcttttctggcaaggaaaatttatatctgcccaatgaaatcaggaatttaacttcattcattcaacagttatttaattctatcctctactagattcctacagctgctgtaaccctaaagtaccacaaactgggtggcttgaaacaacagacacgtagccaggcgcagtggctcacgcctgtaatcccagcactttgggaggctgaggtgggcagatcatctgaggtcaggagttcaagaccagcctggccaaaacggtgaaaccctgtctctgctaaaaatacaaaaaaaattagccgggcatggtggtggcgcacggctgccattccagctactcggaatgctgaggcaggagaaccgcttgaacctgtgaggcggaggttgcagtgagagcgagactctatctcaaaaaaacaaaacaaaaaaccccaacaacaacagacatgtatcctctcacggttctggaggccagaagtctcaaatcaaacgattagcagggccatgttctccctccacaggctcttggggagaatgtttctctgcctttctcttcgctgctggtgttgctggcagctcttggcactttttgggtgtaggctcatcactccagcacctgccctggggtcacatggctctctcctcactgtgcctcttctttttttatttttgagacagggtctcattctgtggcccaggctggagtgcagtggcacagtctcagctcactgcaacctcctcctccccaggctcaagtgatcctcctacgtcagcctcccaagaagctgggacttcaggctcatgccaccaagcccggctaatgttttgtatttttagtagagagagcagtttaccatgttgcctaggctagtctcgaatacctgagttcaagtgatctacttgtctcagcctcccacagtgctgagattacaggtgtgagccactgggccgggccctcctctttttttaaaaaaacaaaacaaaacaaaaacatttattttaagttcaggggtacatgtgcagctttgttatacaggtaaacttgtgtcacgggggtttgttttacagattattaatttcatcacccaggtattaagctagtatccattagttattttttcttttttgttttttttttttttttgagacagagtttcactcttgttgcccaggctggagtgcaatggtgccatctcggatcactgcaacctccgcctcccgggttcaagtgattctcctgtctcagcctcccgagtagctgggattacaggcatgagccaccgtggccagcctagttattttttctgatcgtctccttcctcccaccctccacccttggccagaccccaatgtgtgttgttcccctctatgtgtccatgtgttctcatcatttagctcccatttgtgagaatatgcagtatttggttttctgttcctgcattagtttgctaaggataatgacttctagctccatccatgtccctgcaaaggacatgatatcattcctttttatggctgcatggtattccatggtctatatgtagcacattttctttatccagtctatcactgatgggcattgaggttgattccatgtctttgctattgcgaatagtgctgcagtccttttcttctaaggataccggtcatattagattatgggtccactctcatccagtataacctcatcttaaatgatatcttaattatatcttcaaagaagtaaggtcacactcacaggtactggggttaggacttcaacataggttttttgggggaaactattcaatgcctaacacaacctctccaagaaaaaaatcttactgaaattttaattggaattgtattcaatttatatcataattgggggattttgacttttgtgttttttttttttttttttttttgagacagagtctcgctctgtcgcccaggctggagtgcagtggcacgatctcagctcactacaacctctgcctcctgggttcatgccattctcctgcctcagcctcccatgtagctgggattacaggtgcccgccaccatgcctggctaatttttgtatttttagcagagacggggtttcaccatgttggtcaggctggtctcaaactcctgacctcaggtgaactgcacgcctcagccttccaaagtgctgggattacatgcgtgagccaccatgcccggcaactttttctttttctttttctttttctttttttttctttttttttttttgagatggcgtcttgctctgtcacccagactggagggtagtggcgccatctcagctcactgcaacatctgcccccccgggttcaagcgattctcctgcctcagcctccaagtagctgggattataggcacccgccaccatgcctggctaatttttgtatttttagtagagatggggttttgccatgttggccaggctgatctcgaactcctgacctcaggtgattcacccactccgcctcccaaagtgctaggattacaggcatgagccattgcgcccagccaaatttatttctaagtgtttcatagtttttgtctgcatgctgaatgaaaatgtttcttatttaaatttctaggtgtttattgctacagtgtgagaaaactattgtgtggttttttttgtttgttttttgtttttttttaagatggagtcttgctctatcgcccaggctggagggcagtggcttgttctgggctcactgcaacctccgcctcctgggttcaagtgattctcctgcttcagcctcactagtagctgggattacaggtacccaccaccaggcctgtctaatttttgtatttttcgtagagatggggttttgctatgttggccaggctggtctggaattcctgacctcaggcgatccacccacctccgcctcccaaagtgctggcattacagaagtgagccaccacgcccagccttgtttgatgtatatttatcctgagactagccatctaaccaaactttcttatttattccagtgttttgaaaaaataactagtatgttttgagttttctaagcacacagtcctataaatagagaaatgattgaatgttgcatcttagaatattttgcaggataggaaaaataacctagggctatctatcagctggccatgacagctttccacaaggtagtgttaactaaggaaagcaagatgtaagaaagaatgcttaatataatctcagttttgaaaaacaatgagtgggccgggtgcggtggctctgccctgtaatcccagcattttgggaggctgaggccagcggatcacgaggtcaggggtttgagaccagcctggccaacatggtgaaaccccgtctcttctaaaaatacaaaaattagctggtgtggtggcacgctcctgtagccccagctacttgggaggctgaggcaagagaatcacttgaacctggcaggcggaggttgcagtgagccaagctgcaccgttgcactccagcctgagcgacagagcaggactctgtctcaaaaaaaaaaaaaaaaaaaatcagtaaaaggcaatatgtgtgtattaggatatatggttttttctttggtttttttgtttttgttttgttttttgagacagagtttcgctctcgttgctcaggctggagtgcgatgcgcaatctcggctcactgcaacctcccgctcccgggttcaaacgattctcctgcctcagcctccctagtagctgggattacaggcatgcaccaccacgcccagctaattttttgtatttttagtagagacagggttttgccatgtttgtcaggctggtcttgaactcctgacctcaggtaatccgctcacctcggcctcccaaagtgctgggattacaggagtgagccactgcactcggccaggatatatgttttgtatatgatttcacattcatagagaaaatacagaattttaggttaacatgagccactttgtgtaggtggggaactaacatgggggcagaaaggagaagagaaggagataagcagaaagtgaaattaaacaacctgccaaaagatccaaaatcattatgacatggtcacatttatgcatgtatgtaatttatgtgtgtgtgtatacatatatatttgtatatgttcatagaaatttaaaataatttcttttttttttttcttttggagatggggtcttgttatgttgcccaggctggtctcaaactcctgggctcaagcagtgctcccaccttggcctcacaaagtgctgggattacaggagtgagccactgcacctggcctaaacatttttttttttttcagatggggttttatgctgttacgcaggttggagtgcagtgctaccatttcagctcactgcaacctctgcctcccaggctcaagtgatcctgccacctcagcctcctgagtagctgggaccacaggcatgccccaccatatgtggctaattttttgtatttttggtagagacggtttcaccatgttgcctaggctggtcttgaacttctgagctcaggccatccgcccacctcagcctcccaaagtgctgggactacaggcgtgagccaccatgactggccctaaaataatttttaaatgaacacaaaaacaagcaaacaagcaaaatgtagataaagtggctgttgaagacaggccttggctgggttctggaatagccgagatgaggaaggctgcaccctcaaggacaccccacagagaacctctgactgctggtgacaggaggaatgcaacgacaacggagggtcccactcaccagcatccgtgccctgtgttgtcacagcagcccagttttcctttggggaaccacctcatctccccatcccttctctatcacctgcactgtgtatcatcttggtgggaccatcaagcaagacactgcccagtggccccgtgcggtgtggctcacgcctgtaatcccagcactttgggaggccaaggcgtgcagatcacttgaggtcaggagttcgtgaccagcctggccaacatggtgaaacgccgtgtctactaaaaatacaaaaattagccgggcatggtggtgggcacctgtaatgccagctgctcgagaggctgaggcaggagaatctcttgaacctgggaggcagaggttgcagtgagccgagatcacgccattgcactctagtctgggcaacaagagcaaaactctgtctcaaaaaaaaagaacactatgctcagccccagcagaggtggctgagtcttcagggcagccagccagatgctcctctggaaatgtgactcaggaatgaagggccaagcacagttgagcccaagctctcaacatgaaggcctcttggtcttgctccttaaaaccaggaggccgggcacagtggcccacgcctgtaatcccagcactttgggaagctgaggcaggtggatcacctgaggtcaggagttcgagaccagcctgactaacatggtgaaaccttgtttctactaaaaatacaaaaagttagccaggtgtggtggtgcacacctacaatcccagctactcgggaggctgaggcagaagaatcacttgaacccaggaggcggaggttgcagtgagctgagattgcaccagtgcagtccagcgtgggtgacagagtgagactccgtctcaaacaaacaaacaaacaaacaaaccacactaaataattatgagaatgcaaagtgaaagctggagcaagcagaattaaggctcaggaggagggtgggtctggatctgggaggatcacaaaagcaagccaactcccccaggcctaagggagaccagcttgcagttagacacaactgagggaaatgggctgacatttcctgtatcttccaggtgtaagccccagagaaagcaagtcactggatcaggaaccatggtctcctggatccaaatctaggcttttctcccagaaaggacatctgccagggatgcctggtccaggtggtggaggctgggtggctcaccgttctgtggtttccgtcttcgtggagagtttattccctcacgttgatgatgacggaagggcagggcttcttcaaggtggctgcttcactggtttgtgatccacccagtgtactcggagagcttctcgccacactttttctgtaatttgccagaaatagtaaatattttaggcttcatgggccgtctgttctctgccacggtgctagactttgttgtagtgacagcagccatactgtttacatattatctgtggcagcttttgacaccatatggagtagaaagcctacattttgctatctggttctttacagaagaagtttgccaaccctgtcatatagtatgaacatctttcttaccaccatcttttttttgagatgaagtcttgttatattgcccaggctggaaacaaactcctgggaccaagagatcctccccattcagcctcccaagtagctgggactaaaggcacatcaccaagccctgctgcttaccaccaattttttttttttttttttgagatggagtctctctctcgcccaggctggagtgcaatggtgcgatctcagctcactgcaacctctgccatccgagttgaagcaattctcctgcctcagcctcccgagtagctgggattacaggggtgcgccaccacgcccagctgatttttgtatttttagtagagacggggtttcaccatgttggccaggctgttaccaccatttttaatggctgcattttgtttcccttccaccaatgcttccaaagctgcttagtaatgacattcaaaacagaatctgccaagataagacaccttttgaatagcaataggaaaagtatctgcaaatcctgacttctcaaccagccctgccctagtgtctaagctccgacgggctgaaaaatgggcattttctaagtcatttctcctgatccaagatcttgaaactcttcaaacttataaattaggccacctgctgagcaatcctgtaggccctgtcctaagatgactcagggcagtctcttcttttccctgtaacctggtcctattcacgtgaagctatttttcagctatttgcaaaaagctccttaaaatctatttttccctttaattatagtttgcagctggtctttctgaaagcaaagaatttattgcttgccaagggccattaaagatcaagctgggttagggggtctccttgctgaatccagggaggagggttcaagacagaggctatttccgaaccagtttttctagttcccaggcactctccggattcttctctgggtttacttttcttaggtggaaaccctacctagatttgcaaatgacgtggagctctttgtcacccaagatcccttggggctcatgggtcagtcattgtttggaaagtgttgcctcttaggcttttctatttttataaaagagggattactgtctttgctccctgtaaccttggactactgccaagttttcttggtggcattttcacttgataaatatgagcctttctgctcctgacccagaagagtgcttctcctagcagtctcaggagtttcagacctagttatacccctgcatttatcgcctcagacatgtcaaatgcagatgtcacctcccaaccaacttttagacacattggtggagccagaaagatataaaagattatcattatgctaattttttaaatgtacagaactgccctttttaatctttaattttggagttttagccacaactcctttaaaataaaataatataataattttttttttttttttgagatggcgttcgctcttgttgcccaggctggagtgcaatggcgtgatctcagctcaccacaacctccgcctcccgggttcaagcgattctcctgcctcagcctccctagtagctgggattacaggcatgtgccaccacacccagctaattttgtatttttagtagaggcggggtttctccatgttggtcaggctggtctcaaactcccaacctcaggtgatccacccacctcggcctcccagtgttgggattacaggtgtgagccactgcgcccggcctataattttttattattaaatgatcattagagaataaataacactgtaggacaaattttccccttccatttttttttttttttttagatggagtcttgctctgtcacccaggctggagtgcagtggtatcacctcggctcactgcatcctctgcctcctgggttcaagcaattctcatgccttggcctcccagtaggtaggattacaggtgtgcaacaggcccagctaatttttataatttagtagaggcaggatatcactatgttggccagactggtcttgaactcctgacctcaagtgatcaacccgcctcagccttccaaagtgctaggattacaggcatgagccactgtgcccggcccccccgctttttttttttttttttttttttgagagtgtcttcttctgtcgcccaggctggagtgcattgttccatcatggctcactgcagcctcgacctccaggactcaagcaatcctcccaccgcagcctccccagtagctgggattacaggagtgcacaacccctcacccagctaatttttgtattttttgtagagacagggttttgccatgttgcccaggctggtcttgaactcctaggctcaggtgatccttctgcctgggcctcccaaagtgctgggattacaggcatgagccaccgcacctggctaaatccaaggatttttgtatccacgggtggatcctggaaccactgcgccagggataccgaggaatgattatacagaaaaaggaaattttctgtatacaaggagaacccagttggaaacacctcagcatttgccttatttgaacacagtttaaacatttggctgcctgcaactaactgaagctcagctagctattggttaaaagaatatactcctaatttagcctctcagttaatttatgtgttatgttaggttacagttcattacataaaggccaaagtatggaagcctcctcaggccaaatttagtttaatttaacaattcctcccttttggtcggtctcaattttgagagactgaccaaaaccttgacactactctctgtcaccatcatccgactaaatacggaacttacttagtctctgtatacaattcacaagtcacaacagttgaacaattctttatcttctggcagatctagttcaaatgagaccgttcaacatttgacgaatgattgtatacaaacatttaagatgtgagaggataggatacggtgcaccaggaggactattataatggctgtcaggagggttacaccaaaaagactgaagtgtactccttaacaaaagcttgtaggaactgaacccatccaaatcaaagttcaggcaatatagacagctcaataatatttggccatggtctgtattctggatttgatggcaattaaggactatagtttggtgtaaaatggcctgatttaaagaggtatctgtttttgttgttagcctgataatacaggctgtagcaatctagagacttaccaagagaacaagatgagaaaagcttggaaacaccaagctggccatccaccgctgaggaggcccgtggaccaactggtggctgctcccataaacacatcatctgttccttttccttgagaaattctcttttttattgttgttgttacattggcaattttttttttttttttttttttttttagctagagtctcgctctgtcacccaggctggagtgcagtgacgcgatcttggctcactgcaagctctgccttccgggttaaagtgattcccgtgcctcagctgcccaagcagctgggattacggatgcacaccaccatgcctggctagtttttgtatttttagtagagacaaggtttttgccacgttggccaggctggtctcgaactcctggtcttaagtgatcctcccaactcggcctcccaaagtgctgggattacaggcatgagtcactgcactcagccatgtcttgagaaattttcttagtgtatttggtagcagtgtctaaagaaacaacagtatcagccacctttttttttttttttttggaggggtggacagagtcttgctctgtcacccaggctggagtgtgcaatctcagctcactgcaacttctgcctctggggttcaagcaattatcctgcctcagcctcttgagtagctgggattacaggtgcacgccaccatgcccagataatttttgtatttttagtagagacggggtttcaccatgttggtcaggctggtctcgaactcctgacgtcatgatccgcccactcagcctcccaaagtgctgggatcacaggcgtgagccactgtgccctgccttcagccacctttttaattaagctttctgtagtaggaaaatcaaaagaaaaatagatacaatattccgttttcttaaaaaccatatacaaggctccgacttgagacagaaggagatctaaagcaggatgctctgctaggtgtttttgttgaacacatgtattatcacccactttttagaaagtggcttctacccctctgaacagcagggaggtctggctgactgcaaggtccaaggtgtttccccagtttacagatgagtgtcaaattctatactactagtgtcccacaactgccaagagtgagcctccagaaacctcactggaatctttcctcgatgaaactaacttgtcttcataaaccccataattgctcaggtttttgctaaagcataaaccttagctaaggccattcataaactatggttccatggattttcctggagagtaaaggaaaggattaagacagcaaaaaatgaagaaaagaaaaagaatgctgggtgtggtggctcacgcctgtaatcccagcactttgggaggccgaggtggatggatcacctgaggtcggggggagttcgagaccagcctgaccaacatggagaaaccccctgtctactaaaaaaattagctgagcatggtggtgcacgcctgtaattccagctacttgggaggctgaggcaggagaattgcttgaatccgggaggcggaggttgcagtgagctgagatcatgccattgcactccagcctgggcaaccaagattgaaactccgtcaaaaaaaaaaaaaaaagaaagagagagagagagagaaggagggagggagggagggagggagggaagtaaggaaggaaggatggaaggaagaaaggaaggaaggaagggaaggagggaaggaaggaaggaaggatggaaggaagaaaggaagggagggagggagggaaggaagggagggagagagggagggaaggaaggaagggagggagggagggaaggaagggagggagggagggagggagggaataaggctttcctgatggtagaggagccttgatcttggaaaagccgtccaggtctagaacaccatctgcttctggggagaaattttccccagctagctttacattaaagtctctaacggaggccaggagcagtggctcacacctgtaatcccagcactttgagaggccaagatgggtggataacttgagggtcaggtgtttgagaccagcctgaccaacatggtaaaaccccactcctggtatcaattttctgtgttagtttgttctcacactgctataaagaactacttgagactgggtaatttatgcagaaaattaatttaactaactcacagttctgcaaacttaatgggaagcatgactgtgaggccttgggacactgacaatcagcagaaggtgaaggggaagcaagcaccttcttcacaatggcggcaggagaaagatatagtgaagggggaactgccacacacttttatttacttttttttttaatttatttttttgagacggagtttcactcttcttgtccaggctagagtgcaatgacacaatctcggctcaccgcaacctccgcctccccggttcaagcgattctcctgtgtcagcctcccaagtagctggggttacaggcacatgccaccacacccagctaatttttgtatttttagtagagacggggtttcaccatgttggtcaggctggtctcgaactcctgacctcaacctcccaaagtgctgggattacaggcatgagccactgcactgggcctgaatttactttaatttaacagaatgcaattatgggcaatgagataaagaggaaaatgttctgacatttctagaaatttgctcacacctatatgaaatcttactttctttcattatctcacctgatactcataaaaactttgtgcaagggattttgaggagtactaatatttaggagagttgggcagatgaacaactaacaaaggtaaacaatcgaaagatccaagaaaccaagtgacgttattgtttcaaagaggcaccgctccacaatttcaaaggctgctgagaaattaagaataagaaggtgacctgtgtgtggctgatagatgaacaaaatggaagctattagtgagcttggtacctttcttgagccgtattgcttattcatatctcattccatttgtcttgatattctgcccagaagctgggaccatgctttgcacatggcaagtgcccattttatgtctgttagtagcagttttgctgagtgactgaaaccagagacttagcagagatgggtgtgctcagagttggcctccactctattcccattacaaagcaaaatacaatacaaagcaaaatacaaatacaataccaatacaaagcaaaattcccattacaaaaactcatcgccagacagttctacttacaggaatttgtcctaaagacagttcccccaaagcctgagatgctctacttacaaggatattaattgcaatgctatttgtaatagcaaaaggcgggaaaccacctaaattccaccaactagagattgtgcaataagctgcaaagcatccagtcagtggggcaataggatgcccctttaagaaagaacaaggctggccgggtgtggcggctcacacctgtaatcccagcactctgggaggctgaggcaggcagatcacctgaggttcaggggttcaagatcagctgggccaacatggtgaaaccccatctctaataaaaatacaaagattagcctgatgttgtgatgcgtgtctgtaatgccagctacttgggaggctgagacatgagaattacttgaacctgggaggtggagggtgcagtgagctgagatcataccactgcattccagcctgagggtgacacagtgagaatctgtcaaaaaaaaaaaaaaaggacggaaagaaagagcgaacgaggctgatgcctctgcactgagatggtctccacgatgtatttgaaaagtggagagaaaagagggcagaaccttacggagggaaaaaaagacaattaaaagaacagctgggccagatgcagtggctcatgcccataatctcagcactttgggaggccaaggcaggtagacatcttgagctcagaagttcaagaccagcctgggcaacatagtaagaccccctccccccaaccatctcaacaaaaaatacaaaaaatagccaagcatagtggcatgcctgtagtcccaactgcttggaaggctgagacaggaggattgcttgagcctgattgaggcttcagtgagccatgatcgcgccactgcactccagcctgggcaacagagcgagaccttgtttcaaaaaaaaaaaaaaaaaaaaaaaggaattatttcaatggatcttgcagtattgactggatagaaggctggaagccaataaagcaaagagaatacaaatagactgactgttctagaaattctatgggtaaaggaagaagggattaattagaaagcatacatttatttatgtatttatttattgagatggagtctcgctctgtcacccaggctggagggcagtggcgcaatctcggctcactgaaacttttgcctcctaagttcaagtgattctcctgccccagcctcctgagtagctggaattacaggcacccaccaccctgcctagctaatttttgtatttttagtagagatggggtttcaccatgttggccaggctggtctccggacctcaagtgatccgcctcccaaagtgctagaattacaggtatgagccaccgcgcccggccagaaagcatacattttttatttagattgtatgcttatctggcgtggcttgatacgggggtgctgatggggattgggaggtagagaaataccctcccaataataatagccaaacgcaacatagcacttgtgatattttctgtgaattttattagtatgaactcatttcaacctcctaacaaccctgtggggcaggtccttttcatacccccatttgtgaggacacagtggcctttctaatatcacacaccagcaagtgtcaaagcttcaaacccaggcagcctggtcacagagagtcacataactgctctgcaaacctgcctccctctgcttcagaggggctcagattcggggtttacctctcactagctgggcaagcttaggcactggccttctcagagccttggttttctcgccgcagaatgagggtaactgcagagttgttgagaagcatttgaagcacctgattcttggtgctcaatacagggaacgtgtgatagttactgccgacttagagcagagcttaggcaggcactgcaccaggatttgactattgatgcatctccaagctgagcctcggtaggcctgtggtcccatgctagagagcagctgccagtgcctccatctgctgcaaagcttggctgtgtgtggatgggtgggacaagtcactccagaagcttctccccttaagacatcctgacattaagggatcttcttcctttgctcctctttctgtcctccctgccccccttcctccctccctttcttccttaaatgcccaaagtcagttgataccttttcttaagtaactcaataagcaatacaggcagtttgctcatggttggcagtgggcaggattaagggaggattagggccctttgtcaatgtctcatctcctgtctgcagagacaagacctgaaggattgctaaagaatgcccttggtaacaactgtttctccaggaccttgtttggcttccccctggctgggtggaacccgctgtgtgcagccttcgcagggaggtgggccgaaggctgccaacgttggagcaggtgagctatggcatttgcattgggctgggtctccattcttgggccaaatcaactcacctcttgggcgagttgcttcagacttcagaaacaagccacatcatgccgagaggctttccccccagttccagggcccaagggtgcaggcacatagccagcccagccttctcttccctgtgtgttcccttctcccctgggtttctcctcccttgtgaagaaacagcacacctgcttttacacaaggccagtcctccacgggcgccctcatcccaccccttttgaccttctcaaggactacaagtctctaatgatcctctccctctcctgactcatccatctctccctctcccttgtgactcagcagtgtacagacctgcttctagattaaaacaaaaacagaaacccctccgaccaccccctccaccttttttcctgcttttcctcagagacaaacttctcagcaccccctgcctcctttcctcaattcccgtccattctccagcccacttccagctggctttggcacccactgtccctcctctcagattcactcttgtcaaggtcaccaggaatacccggtgcacagtacaacaggcacttccatgtcctcgcgggatgggtcttcccagctgcacttgacgcagctgacccagggtgctcccctgcttcccctcctggggcacgctcatggctttcccgcctcctccctctgaccctcctgcctcctccctctgatcctcctgcctccttcctcggacccagggcgctctcctccctcctctcctggaacacgctcatggctttcccacctcctccctggccatctcttctcagtcttcatttccaacttttcctctttctgttctctgaatgttggctttctgcatggctaagccctgggtccccctctagctagactctcatgggatggtctcatccatggccaaggtttttaacataatctagaagctgagactcccatattgcatctctggtcttgctgtcaactcacatgtccgtggcctgctggatacccctgttctgtctcttgggcattccacacttagtgtttcctaaatcagactgtccagggccttccacattggtttgctcccagtctcccttggagccggcactggtgccacccttccacctggtgcctggctgccaagcttgattccctcctcctcctccctaaaccctcccctcctcagacctcactttttccatcctcacattgccaccctaggccaggccaccatcagctcctgcctggacactgtgacagcctcctaagtgatcgacagcccccatttttcacgctgctgccattgagatctttctagaataaaaatcaaatcaagccagtcccttgcttaaaaccatttcacgctccctattgctcttcaggtgaagctaacctccttaacttggtttacacagcccttcccagccagcccctccctgcctctcccacctccagtgccacccccagacctcaagtgatccacccacctcagcctctcaaagtgctgggtggtggctcacacctggcgtcgtcctcttcctcccttcctcttcccctgccccttccccttgccctcctcctcctcctactcctccttcttcctcctccttcttctatgagtggtcagttattccaatgatagattacagaattggcttctgcctttcaaaaattaaatcataacccatctcctgaagtttgaacacagccttgcctaattttgtttcatttatgttattgttatcactacagttatttggggtggcctgaggacacggctggagctggagtgtggctgtgacctcctcttgacatctttctgcaccactattaatggtatcccaagtgctgggcacagaggaggagatagatcaatatttgatgaataaatggctgggcgtggtggctcacgcctgtaatcccagaactttgggaggcctaggcaggtgaatcacctgaggtcaggagttcaagaccagcctggccaacatagtgaaaccccatctctactaaaaatgcaaaaattaggccaggcggggtggctcacgcctgtaatcccaacactttaggaggctgaggtgggcagatcacctgaggtcaggagttcgagaccagcctgactaacatggagaaatcccatctccactaaaaatacaaaattagccaggcgtagtggcacatgcctgtagtcccagctactcaggaggctgaggcaggaaaatcgcttgaacctgggaggcggaggttgcagtaagccgagattgcgccattgcactccagcctgggcaacaagagcaaaactccgtctcaaaaaaaaaaaaaaaattagctgggcatggtggggcatgcctgtagtcccagctacttgggaggctgaggcaggagaattgcttggacccaggagacggaggttgcagtgagccaagatcacgccattgcactccagcctgggcgacaagagcaaaactcagtctcaaaaaaaaaaaaaaagactttgatgaataaatgaatgaacgaatgaaatcactctcaaaccagagcttcaagtttcatgttattggcctggagcggttaattttatcagcatacacaagactctcagtctccaaatcatggaactataggatggcaggatgggagaatccctggaccacccagggcccaacctccaaatttatcagttgagccagctgagccattgctcacccacagttgtcccggagcaggcaggctgcctgcaggatggaagaacgtggaggaggaagggtgtgcaggggccaggtcttacctggatttgttgattttattctcaatatgatgagaagtcccgagagactttaacataatccctgatcttattttattttattttattttattttaaagatcattgcaatccctgcaaaaccagattcaggactggagagagaaaataaggtatgggctggggagtcaacacacatttgtgcctctttgatggcaaggcctaggaacacatgcctggggtcagcttgccatcatgtggccaaacctaaggactgcacatctcccatcttgctttcccagggctccgtgtacttgtggagacaggatttggacccaggtctctcctcccaccaaagttcagggtctataggcctgagttcaagtcccggttcctgcactcccagccatatgaccaaagaggattcaggttctgtatccgactcatggggacagcaacacactcatctctcacagtgaagacccagtaagaaatggcagctgtcagccaggtgcagtggctcacgcctgtaatcccagcactttgggaggccgaggcaggcggatcacgaggtcaggagatcgagaccatcctggctaacacggtgaaaccccgtctctactaaaaatacaaaaaattagccaggcatggtggcgggcacctgtaatcctagctacttgggaggctgaggcaggaaaatggcatgaacccaggaggtggaggttgtagtgagctgagatcgcaccactgcactccagcctggcgacagagtgagactctgtctcaaaaaaataataaataaaaggccaggcgcagtggctcaagcctgtaattccagcattttgggaggccgaggcgggcaggttgcctgagctcaggagtttgagaccagcctgggcaatatggtgaaaccccatctctaaaaaaaaaaaaaaaaaaattagctgagtgtggcggcgtgtgcctgaagtcccagctactcaagaggctgaggcaggagaattgcttgaacccgggaggcagagattgcagtgagccgagatcgcaccactgcactccagcctgggtgacagagtgagactccgtttcaaacaaacaaacaaacaaaaaaaataggggctgggtacagtggctcacacttgtaatcccagcactttgggagaggattgcttgaggccaggagtttgagaccagtctgggcatcatggtgagacctccatttctattaaaaaaaaaaaattataataagtaaatgtctaaccaccttatcttagggaggaagaaactgaggctcagagaaaagcaggtagaaagcaagatttctcgggccaggcacagtggctcacacctgtaatcccagcactctgggaggccaaggcaggcggatcaccggtcgggagtttgagaccagcctgaccaacatggagaagccccgtgtctactaaaaacacaaaattagctgggcatagtggtgcatgcctgtagtcccagctacttgggaggctgtggcaggagaatcacttgaacccgggaggcggaggttgtggtgagctgagattgtgccattgtactccagcctgggcaacaacagcgaaaccccgtctcaaaaaaataataataataaaagaaagaaagcaagaattctcaaggctctgttcaaaatgcaggacttccactccccaggtcagcagtgagcccaaggctctagctccagcggaaggctggacagtgttagggccggaggtgccaggcaggcaccccagaatgagatgcagaaacggccagtgaggacagaagccatggtgctttggaagcccagctccttcttcctgctgatgaacaggcatccagagagcctgtgagcggggctgtgtgctccaggtcatgtcccaggtgtacagaatttcaggaatttagtggagctctcgcccagcaattttttgctttacaggagaggaagctgagatcctgaaagaggtggggcccggcccagggtcactcagcaattttcagtagctgctccctactggggaactgtgtgtctgaggtcgtggccatctgtccaaagagcttcttctgaccaaagtgctcattttcatagtgtgaccacagaggtatgtattttataaccttacctcatttcatcatcccagcagccttgcagggaggtttatttccattttgcaaatgaggactctgaggctcagggaggtgacgtgacatgcgcaaggctgggaggggtgggtgaggacttgccctgtctccactggcctccagaccctgcgctcacagctggtcccgtgtggcattacaagaacatttgagcttctcaggagggttaataaagggtgtaagaaaggacagatctttaggagggccgtcttcagagtttacttctctgtgttctagagagaaccaacgaccctcatgcattgctttttggcaagggaaatgaaggattcaggacagtgggcactgggcacccacagggtttattcaagcagccgaagctcctgcttcagaaccttggcacggttagggcccaaataagggtcttttccttctcactttgaacacagcctcgcctaattttgtttcatttatattattgttatcactgcagttatttggggtggccacccccatcccacagctgctcccacccttctctgctgtagaaatggaggagggaaggcccagtggctccagtgtgaggggaagagacctgactgcacctgggctgtgtcttctccgtccacagtacacccgtgggaagaggagtcggggcatcccttgctggaaataccccagccctgaaggttgctggcaaaaccaccatttaattcagaacaaaaagtctgctccaggagcccctgagagcgtcaaaaagaacaaggtgggtgggttggggggaaacatcactgagaggctacctaggcctggatccccggcagatgcaggtccacaacccgacgccgaccactggccggccctcccgagtgtctgactgcgggactacctggcatccactcgaagagaccagcctggggcatccctccctgcgccccaacccctgtggacactccctcgggagcatttctaactaggcctgggtatgtgaaaaaagaggaatcctttcgcagaaggcaggctggacctgggaaaacagttctccatggatggagaagtgaggggataaaggatgatgaacttagctgttttctttcctgtccacattgtttctaggttctttggaaccaggggtcatcttttatctcccacagtaactcatgtctgccttagacttatttccaacccctcaagatcagttgaagatctttgtaggatctacacattcatactttacttactgacaccccacaacctgtaaaccataacaaaatgcacctgctgcacacatctgaaaggttttctttttttttgttttgttttgtttgagacagaatcttgctctattgcccaggctggagtgcaatggcgtgatctcagctcactgcaacctctgcctcccgggttcaagtgattttcccccctcagcctcccaagtagctaggattacaggcatgcaccaccatgcccagctaatttttgtatttttagtagagacagggtttcaccatgttggccgggctggtgtcgaactcctgacctcaggtgatctgcccgccttggcctcccaaagtgcttggattacaagcgtgagtaccatgcccagccaacattttctttgctataaaatgttttaaaatgtataactgagttttgccagctgaatatagttcaatttgttcttgtgattcaaactttattatgtttttatataaagctatatcaagaatccaaaaacattctatacatttggaagtttaaagacaagcctctaaataggtcacaatcaaagaggaaatcacaatgtaaatgggaaaatacctagaactgaaggacaatgaaaaccctacctagttaaatgcgtgggaggcaggtaaggttgtacctaagagaaaatatatggccttaaataaatgcacatatataatcaggaagaaagaccaaaaaataatgagttaaagtttcaactcaacaaattagaaaaggacaccagagtaaatccaaagaaaatgaaagagaatgataaaaataatagtagaaattaattagaatgcactcagagtatcaacaaaaccagaagttggctctttgaaaatgaagacaaataactaagactaataactaagacaaataactaagatattatttatgaaaaaaaagaaaattatacattttatgaatggaaacagaggcactacagacatggtagagattaaaaaataaaaggacaagccaagcacactggcatgtgcctctaatcccagctacttgggagactgagacaggaggatcacttgagactaggagtttgaggctgcagtgagctgtgatcatgtcactgcactccagtgtgggtgacagagggcgaccctgtctctgaaaagtaaatacacagagataagagaacactttgaagcagctatataccaatgaatttgaaaatttagaagaaaacgacaatttcctgggaaaacacaacctaccaaaatcacttttgaggactgcagtacacctacattcattatattgaatcagtagttttacatgcagccaagagactctacaaaacctctgtgattttgcaagaaagtcctaacaaataaaaaacagataatccttgtattgttccagagaataaaaaatgagagaaaactccctgtgctagtctgttttcacactgctataaacaacctctctggccgggcgcggtggctcacgcctgtaatcctagcactttgggaggctgaggcaagcggatcacctgaggtcgggagtttgagaccagcctgaccaacatggagaaaccctgtctgtactaaaaatacaaaattagccagacatggtggtccatgcctgtaatcccagctactcgggaggctgaggcaggagaatcacttgaacccaggaggcggagattgcagtgagccaagatcacgccattgcactccagcctgggcaacagagcaaaattccgtctcaataaaaaaaaaaaagaacttccctgagactggataatttataaaggaaagagatttaactgactcacagttccacatggcttgggatgcctcaggaaacttacaaacatggcagaaggggaagcagacacatcctacatggcagaaggcgagagagagcgtgtgtgaaggaggaactgtcaaacacttagaaaaccatcagatctcctgagaacagcatgggggaagccacagccatgatccaatttcctcctcccctgacacgtggggattacaagtttctcccttcccatgtggggattacaatttgagatgagatttggatggggacacaaagtcaaaccatttcactccccatctcatttgtttttcttttgagactgagtgtcactctgtcacccaggctggagtgcagtggcgtgatcttggctcactgcaacctctgccttctggtgtcaagcaattctcctgctttagtctcccaagtagctgggattacaggcatatgccaccacatctggctaatttttgtatttttagtagagatggggcttcaccatgttggtcaggctggtctccaacttctgggctcatgtaacccacccaccttagcctcccaaagtgctgggattacaggtgtgagccacctcacccagcacccatctcatttagtgaggctagattcatcttagtacaataccagagaggagagaaacaaacaccatggccagtattgcttaggaacacagttcaaaaatactacgtaaagtatcattaagccaaatggaactaaatatggagaacatatattttgtgtgccctctgtggaagtccctgggacagggtggggcagcaacctggcagggagctggtgctcatattgtcagggtgcctgggagatccaatggcccagtagttgaggagatttgctgcacacagggtgacggagaaaatgagtcaatatatggaggatttcagggatccaagtttcttactttcttttttttttttaagagacagagtctcactctgttgcccaggctagagtgtagtggcgcgatctcagctcactgcaagctctgtctcctgagttcacgccattctcctgcctcagcctcctgagttgctgggactacaggtgcccaccaccacgcctggctaatttttttttttttttgtatttttagtaaagacggggtttcaccgtgttagccaggatggtctcgatctcctgacctcgtgatctgcccgccttggcctcccaaagtgctgggattacaggcataagccaccacatccggctcaagtttcttattttcagagaaaaaaaaagtccaattatggaaggaggaaatgctagaatgaatcctggggagctttttggaatgggaagaattaatatgaatgtgtttttccatataaatatataaaacaatcaatgtaaatgtgtacacacacacacccataccccagtagtaatgagcacacttagtagtcagatctttgtttctaaacaccaccttccactaaaagaaaccagacctttgagaggtcaaggcgggataatcccttgaagctagaaatttgagaccagcctgaccaacatggtgaaaccccgtctctaccaaaaatacaaaaaaattagctgggcaaggtggcgggcgcctgtaatctcagctactcaggaggctgaggcaggagaattgcttgaacccgggaggtggaggttgcagtgagccgagatcgcaccactgcactccagcctgggcaacagaacaagactctgtctcaaaaaaaaaaaaaagaaaaaagccactaggttttgggtaatttgtttacacaatagataactaatgtgcgtggaaatacaagtgaccaaggaattgcttattgctttttgtatgatcttcatctctcccactgctcattccgcatcatcccccgactttggccatctgcaccccagttgccctcaaccaaagtcaagctccactctctaagctgggcttgtactgtcggggttcccttgctgacggctctcctcatgagactctgattttccccaagacagaccttccccctccttttcctttatatgttgagcagcagggtccctagtgttgggcaaagaccctggcagacggtgggcggttaggaattgtcagtgggaggagttatacccagtcataattgaggacccagtgatggttggatttatgatgactgccaggcaccgtgctgagttctgcaaaccctaaattctagaccaggggttctcaaagtgcactccccacccgagcagcatcagtatcccaaaattcctgggcctcaccccagacccactgaatcagaaactctaagggttgatcctagcaatccatggcttaacaatttctctgggtggttctggtccacatttacatttgagagccaccgttttggagtttgagaagacaatgaattagggcaaatgggtcaattcccagcagagagaagcaagaatcttttctgaggcccacactgaattccagctctttcctgggctgatgttaccattgtccttcatggggtgggtccacatttccagtcgcccacctggggagctggtgcagcagagaatgtgcttaaggctcaaatcccagcttttttcctgttttaaatctcggctttatttacttttatttctccaagtgggacttcatgtgacttatgggggagctattttgtttgtttgtttgtttgtttgttttttgagacggagtctcgctctgtcgcccaggctggagtgcagtggtgcaatctcggttcactgcaagctccgcctcctgggttcatgccattctcctgcctcagcctcccgagtagctgggactacaggcgcctgcaccacacctggctaatttttttgtatttttagtagagacagggtttcaccgtgttagccaggatggtctcgatctcctgacctggtgatccgcctgcgttggcctcccaaagtgctgggattacaggcgtgagccacggcgcccggcctgaataagtaaatttaaaaaaaaagaaaaaaaaaagaggccgggcgcggcggctcacgcctgtaatcccagcactttgggaggcgtaggcaagtggatcacgaggtcaggaattcaagatccgcctggccaagatggtgaaaccccgtctctactaaaaatacaaaaaattagccaggcgtcgtcatgggctcctgtaatcccagctactagggaggctcaggcagagaactgcttgaacccgggagctggaggttgcagtcagccgagatcgcgccactgcactccagcctggcgacagagggagagactctgtctcaaaaaaaaaaaaaaaaaaagagccaggtgttggtggctcaggcctgtaatcccagcacttgggaggccgaggtgggtggatcacctgatgtcagaagttcaagaccaacctggtcaacatggtaaaactctgtctctactaataatacaaaaattagctgggcatagtagtgaacacctgtaatcccagttacttgggaggctgaggcaggagaatcacttggacccaggaggtggaggtcacaatgagccgagatcactccattgcactccagcctgggtgacagagagagactctgcctcaaaaaattaaataaataaataaatatcttatctagaggcagggctctgtgtgtgtgtgtgtgtgtgtgtgtgtgtgtgtgtgagaaggaggaagggacataggccaggcacgatggcttacgcctgtaatcccagcactttgggagtccaaggcagacggatcacctgaggtcaggagttcaagatcagcctggccaacatggtgaaaccctgtctccactaaaaaattagctgagtgtggtagcatgtgcctgtaatcgcagctactcgggaggctgggcaggagaatcacttgaacctgggaagcagaggttgcagtgtgtgagatggggccattgcactccagcctgggcgacagagcaaggctctgtctgaaaaaaaaaaaaaaaaaaaaaaaaaaaaaaggagtggggggcgggggacagagagaggcaggctactttatagaattccctttctctgtcaggtgtttggagctcatttttcattttattttatttacttatttatttatttttgagatggagtcttgctcttgttgctcaggctggagtacaatgatgcgatctcagctcactggaacttccacctcctgggttcaagtgattctcctgctccagcctctggagtggctgggattacagacgtgcgccgccacccccggctaattgttttgtatttttggtagagatggggtttcaccatgttggccaggctggtctcaaactcctgacatcaggtgattcacccacctcagcctcccaaagtgctgggattacaggtgtgagccactgtgcccaggctgttttttattttattttattattattgtttttttgagaaggagttttgttcctgtggcatgatctcagctcactgcaatctccgcctcccgggttcaagtgattctcttgcctcagcctactgagtaactgggattacaggcatgtgccaccacgcctagctaattgtttgtatttttagtagagatggggtttcatcttgttggccaggctggccttgaactcctcacctcaggtgatccgcctcggcctcccaaagtgcagggattacaggtgtgagccactgcgcccggctggtctttagagcttattttcaagcccatcacaaagtccactcctcctcaccaccccatgaactttctcgttgttcttgctgctatctagagtgccattcctgtctttctccttctcctagaagttttatgcaatccatagaacaatgcagaagtgacggggggttgggggaggattaggaggaggaggaggaggaggaggaagggagaatgaactgctcccagttctctggcatgtatcctgccccttgcttcatgctcatgaaaaacattttatagcatatttacagctgcttagatgtaggtgcaatgtatccatggaaataatccttgcaggatatacaatttattgtgtaagttaaggaataaaatgtcagaaggatgaattatgtgcccagtgacatatagcaacggcatggctgagattagcctggttatcccaatcactcctgctctttcccaaaaaaatgagtgaggaatgtgccccagctcctccatgtctaacctccgtgctgagatgtgctgagcacctactatgtgccaggcaccgcactgagctctttatacaattagatctcattgtttcaccaccacattgcaaggcagttactgtatcatcctgattctataaatggaaacagtaaagctcagagagatactttaataactcaaccattgttacccagcctgggtgtggcagggaagcgatctgaacccaggtaacctagcttcgagactgtgggcttcaccactgctttctattggcaaccttcagatagtttctttctcttgaatatttagtatattcgtttctattgctgcttcaacaaataagcacaaacaacacagatttattctcttacatttctagaaggcagaggtttaaaatggattggtgggaccgggcgcctgtaatcccagcactttgggaggctgaggcgggcggatcacgaggtcaggagatggagaccatcctggccaacatggtgaaacccagtctctactaaaataaaaaacttagctgggcatgatggcacgcgcctgtagtcccagctacttgggaggctgaggcaggggaattgcttgaacctgggaggcggaggttacagtgagctgagatcatgccactgcactccagcctagcaacagagcaagactccatctcaaaagaaaaaaaaaaaggattggtgggactatattccttctggggtgttagagcaggatccatttccttgccatttccagcttttttttttgtatttttagtagagacggggttttaccttgttagccaggatggtctggatctcctgacctcgtgatccgcccgcctcagcctcccaaagtgctgggattacaggcgtgagccaccatgcccggccccatttccagcttttaaaagccgcctgcattccttggctcctggtggtcacctccatctttccagacatcactccagcctctgcttccatcttcagctctcctcctctgactcagatcctcctgcctctcccttctggaaggcgccctgtgattaccttgggcctgcccagataatctgggataatctttctatctcaagatccttaatttactcctatctgtaagatcccttcgccatgttaggtaatatatccataggttgcagggatttggatgtggacagcttttgggggctattattggttctaccacatttggctgtttctattttgtagactaataacaaaaaacatttttgaatgccttcatagactttaattccattagcttaattccacctgaaaaacctgttgatcgagcaaaactaggttatttggacttcctgcagtaaaggagaacaccgtcaacagattcaaattagggaaattagggaatggtatttatgggtttttagggccctggctgggtgatgttaaagcaagtcttgcaaggcaggaaactggttgcgattggggagtttctgacataagagctttggaatggtgggcccaggaagacagggttttgaactcacatctgatgcataatcttatcttccagagcaggtatttttttggagcaagaagtgaagtgacttttgcctgtcttgatattgcttaacccaaggattatgttggttttagcccttgctaattacaataatagtatttttttgagactgagtctcactctgtcaccacgctggagtgcagtggtgcgatctcggctcactgtaacctccgactccctggttccagtgattctcctgcctcagcctcccaagtagctaggattacaggcacatgccaccatgcccagctaattttttgtatttttagtagagatggggtttcaccatgttggacaggatggtctcgatctcctgaccttgtgatgcacctgctttggcctaccaaaatgctgggattacaagcgtgagccaccatgccaggccataatttccattttttagagcacctcctacaggccaggcaattttgaatacattttgacaattacaacaaccctacaaggcaggtatttcaacttaatctcagtatggcgcaataactcccctcttggattttggagtcaaaaagtcttggataaaaatccgggctcctccacctacctgccaggtgaataggcaggtaagttctctgggtgagtctccatgtcttcatctgtaaaatcaggataatgcttcccacttcgagtgtgtaggagtgtgcacactgtgtgcccacatgagtaaggggaccatgcttccctgtcattgtttttgttttgttttgctttaagacagagtcttgctctatcgccagactggagtgcagtggcgcaatctcagctcactgcaacctctgcctctcaggttcaagcgattctcctgccttagcctgtctagtggctgggattacaggtgcatgccaccaggcccagttaattttttatttttattttttttgagacagagtttcgcgctgttgccaggttggagtgcagtggtgcgaacttggctcactgcaacctcggcctcccgagttcaagtgattctcctgcctcagcctcccgagtagttgggactacaggcacacgccatcacgcccagctaatttttgtatttttagtagagatggggtttcaccatgttggccaggatggtctcgagctcttgacctcatgatctgcctgcctcagcctcctaaagtgctgagattacaggcatgagcgactgcacgaggccatttttttttttttttgtatctttactagagacggggtttcaccatgttggccaggctggtcttgaactcctgggctcaagtgatccacctgcctcagcctcccaaattgctgggattacaggtgtgaaccagtgcacctggccccctgtcattgttatcattgttagtagtgtccttttttattttttatttttttgaggcagaatcttgctctgttgcttaggctggagtacagtggtgcaatctcggtttactgcaaactccgccgcccagggttcaagcgattctcccgcctcagcctcccgagtagctaggataacagacgcatgccaccacacccggctaatttttgtatttttagtagagacagggtttcagcatcttggccaggctggtcttgaactcttgacctcgtgatccaacccccttggcctcccaaagtgctgggattacaggcgggaaccaccacgtccgaccatgtccttttattattccccaaagagtccttccttagatgatgaattatatgggcacagttccaatatggtgacactatgcttattacttttactcagtaggtgaaaggggatggatcagtgagcttaggtgacatgcttagggctgcacggctaattgggaagaattctccaagctaaagctgcatagcagaccaggtgctatccttctgcctggaacaactcaacacaatgccagactttgtaactatgtatttgtgtgatttgtttcgattttgatgtttttaattgagacagaatcttgctctgttgcccaggctggagtgcagtgattggttcactgcagcctcaacttcctaggctcaagcaatcctactcctcaagcctcccaagtaattggaactacaggcatgcatcaccatgcccagctaatgtttgtattttttgtagagacagggttttaccatgttgcttaggctggtctcaactcctggcctcaagcaatccacccacctcagcgtcccaaagtgctgtgatcacagggcaaagccactgtgcccggcccatttatgttatttttaaatgaaacctgtcttccaccaggctcagtggctcacgcctgcaatctcagcactttgggaggctgaggtggtcaggagttcaagaccagcttggccaacatgttgaaaccccatctctactaaaaatacaaaaattagctgggcgtggtggcgtgcacctgtagtcccagctactcaggaggttgaggcaggagaattgcttgaacccgggaggcagaagttgcagtgagccatcacgccactgcactccagcctggtgacagagctagactctgtctcaaaaaaaaaaaaaaaaaaattggtgaggaagagatcattcatcattgtcactgtatttgataaacatccatctcccacagctgggcagacataagagcggggagaaattctggccatgcactgggcgctctcaggtatggtttatatgcctggctagggcctggctccaaatgtcccccagcaaacaggtttgttttttttttttgtaattaccatactttgggcttggccctcacaagattatctcccttgaattagataggatttttttggacacgatgaaaaaccgtgcctcctcttaacagttactatattataatgctatgccttggtctttactgcgggggtctcctagttccaggaggatattaacccacacatatttgtgtatttagatgaaggtaatatatggtcctggtattaaaacttcaatcactatagaagagtttttaacaagatttaaaatatgtgcagaccccatgactcagcagtttgaactccaggaacctcatctttaaaaacatgcaaccagcaggtgtgcagaggatacttcttttatctctctttgtaaaagcaggaaaaactggaataacctaagggtctattgaggagagaggggttgctgacttacacatcagggtctatccatacaatggaatgcctctcaggtgtcaaaaataaggaggctgagctgaagatggtatcaaggatttggcattagagaacaaagcaaacattaacattatgtatgcttgcacagagatagatactcatataactgcctagacaagggcctaaaaatgcaaagtacttaaatctgttacctctttggcattttaaaaagattgtatttagataatattgaggtcattttagaagacacacacttactgcattaaaacaagcaaaagttgaacaaaaaggtaataacgttaagcaggttacaattccattgtaagtaaatggtggtgttaatagttcaagtgcttccttggtcactttaagattgtttttccagagctgggcagcaggagaaataagttaaaatttcattccgacatccccctgccaaaaaatagcctgaaaattcagcctcagctctggtctgaatccggtgacaggactgactaccaggagatctctcagcctctgcgctgctgactttggggtctgagtcattcttggttctgggaggctgccctgtgcattgcacggtatacagaagcttccttggcctctacccattcgatacctgtatcaccccctcccagttctgacgaccaaaaatgtcttcagacccagatatcccctgaagtgcaaattgcccatcccatccccacctgtggttgagaatcactggagtaggatgatggacgtcagggtttcctgggatccacctggttggtgtctcatgaactgaggaaattactaactgcgccccctttccttctgtaataaaccacatggtcactctggctccggccctttttccctagaaaaatgtacccatgcttgtggcatcataatccccatgtctgtcattctcgtcaacacttctcatggtttttgtcacgcgcgtccgtgtgaagagaccaccaaacacgctttgtgtgagcaataaaactttttaatcacctgggtgcaggcgggctgagtcttgtatatgtgcaggtcacacaggggataagatgacttagcttgggctcagaggcctgacagttttggtcgtagccatcttcgtggatgcatgatatacccttttgaaacttcttccagaactttttttctttttcttttttttttggagacggactcttgctcggtcaaccaggctagagtgcagtggcatagtcttggctcactgcaacctccgcctcctgcgttcaaacgattctcctgcctcagcctcccgagtagctgggacggctgacacacaccaccacgcccagctaattttcgtagattttgtagagacagggtttcaccatgttgcccaggcttgtctggaacttctgggatcaagcaatcctcccaccttggcctcccgaagtgctgggattacaggtgagagcaactgcgcccggccttcttgtcttagatttgttttactcaaagccctgtggcttacctttatatgaagttccaaagaaggacattttaacactcctgtacttaaatcactacagaagcatgtttgggtgaggaaactctatgaacttggtttctaaagaaggccttccagccacgggcacgctacacaatgtggggccatttattttgcaaatcagtaagacttcaaaatttaaaaaataatagtataaaaatgaggatggaccgggcgtgatggctcatgcctgtaatcccagtactttgggaggctgaggtgggtggatcacccgaggtcaggacttcgagaccagcctggccatcatggtgaaaccctgtttctattaaaaatacaaaaagagcttgaacctgggaggcagaggttgcagtgagtggagatcgtgccactgcactccaacctgggcgacagagtgagtctccgtctcaaaaaaataaaaaataaaagaaaatttaaaaataaaaaataagttaaaatttggatgaattgctgggggaatggagaaatcaatttctatttttggtccttctgccctgtttttgtttgtcttctgggccatgcagatgtcttgtttttataattaaaaaactaggcggggtgcagtggctcacatctggaatcccagcacttagggaggctgaggcaggaggattccttgagcacaggaattcaagaccagcctgggcaacatagccagatcccatctctacaaaaaattttaaaagttagccaggtatggtaatgcacacctatggtcccagctactggggaggctgaggcaggaggattgcttgagtctgggagatcgaggctgcagtgagctacgataccagcatggccctttagcctgggtgacaaagagagaccctgtctcaaaacaaaaacaaaacaaagtattttattatacgtaagtccaaacacattagcacaggccctgaagaacagcagaaattgcacctaaatctccttctccccatgtacatatccaaccccaccccttgttcccatttgtgctcagctggggtcaaggtctcaccatcagagctggcttccgaaagggctcctttccctacaggtttcccccactggactttacctccagatgcccaggacatgggacatcatgcaaagacctagcacgtggtgagcatttagaaaatatttacagaattattcacagtatttgttgagcacctactgcttattcatatcagttatgatctgctgtgcactgctgagcactggcagaaagagaagaccctgagcatcttaaattcacggcagttgccagctggagttcccatctgaatttcctggaggaaggcagaccccatcgcgactttctttctttcttttttttttctccttgaggctgagtctcgctctgtcgcccaggctggagtgcagtggtgctatctcagctcactgcaactgccacctcccaggttcaagcaattctcctgcctcagcctccagagtagctgggactacaggcgtgtgccaccacgcctggctaatttttgtatttttagtagagacggggtttcgctatgttggccaggctggtctcgaactcctgacctcaggtgattcaccagccccagcctcccaaagtggtgggattacagccataagccactgcgcctggcctcttcatttttttgagaccaagtctttctgttgcccaggctggagtgcagtggcacgatcttggctcactgcagcctccaccttctgagttcaagcgattctcctgcattggcctcctgagtagctgggactacagatgcctgtcaccacgcccagctaatttttgtatttttagtagaaacgaggtttcgccatgttggccaggctggtcttaaactcctgacctcaagtgatccaccggcctcggcctcctaaagtgctgagattacaggcatgagccactgtgcccatcccccaccgggactttctaattcaggaattctagagtgggaccctgtaatttgcatttctttttaaaattattttttgttcttttcttccccgcccaccccaccccgcgccccccacccacccagcttttcctgactggagaagaacggggacagaaggcctgatttgcatttctactatttcccaggagatgttgacgttgcaacaaagagaaccactcaaagagaatagctctgtgagaaccaatgttctagagtttaggaagaccatcaattggggtaaatgagccaattcccaggagaaaaggggaaggaccttttctgaggcatgatctgaatttccagggctgatgttgccctttgttatttccacaggggatctgcgttttcaatcgctcacctgcagagccgccagattctggccaatctcggcttttttccctctcactgtgggttcttcagagccccatggtttagacacaacggtggattctcttgtgccccaattaccacatgcgtcatggggagaagagcttgaaccccccagagggtcaggtccaggtgagaattgagggtgacactgagagaatttagctaggtgggcgctgtgtaccgcatcattgcctgctcctttcgcagttttgcatttgtgtgttgtacagctacgtgtctcaacctagaaggatctccaggatgtatccttgggtggaaaaatttaggtactagaatctaggccgggcgcggtagctcacgcctgtaatcccagcactttgagaggctgaggtgagtggatcatgaggtcaggagatcgagaccatcctggctaacacggtgaaaccccatctgtactaaaaatacgaaaattagctgggcacagtggcatgcactcgtagtcctagctactcgggaggctgagccaggagaatcgcttgtacccgggaggcggaggttgcagtgagccgagattgcgccattgcactccagcctgggcgacagagactcctccatctcaaaaaaaaaaaaaaaaaattagccgggtgtggtggtgggcgcctgtaatcccagctgctactcgggaggctgaggcaggagaatcgcttgaacccaggaggtggaggttgcagtaagccaggattgcaccactgctctccagcctggatgacagagcaagactgtctcaaaaaaataaataaataaataaataaataaatataaaaattaaaaaaattttaaaaaagaaatctatattgagttttgtacctacctatgattcatggatacctaccagggaaaaagcagaataaaaacatgcacagaaggaaatattccaaattgtgcttgcctgggtggtaacttgctataatgttttacttctgtaatgggagggagtacacacgtggctattctattattcctcccatgttttcctatctgaaatatttcatattttaaatgtttatgtaataaattttgtcaacctctttcttcaagtcttggtgttaaaatcatgtgtattactaaatcttttttttttttttaaatttaagaggcaggatctcaccctgtcacccaggctagagtacagtggtgtgatcatagctcagtgcagcttcaaccttttggactcaaataattctcccacctctgccttcccagtagctgggagtacacgtgtgagccatcatggctggctaattatttttatttcttgtagagataggatctcaccacgttgcccaggctgctctcaaactcctgagctcaagcaatcctcctgccttggccacccaaagcgctgcgattacaggcatgagccactgcacctggccttaaacactttttcttcctaatatatttttacaccttcagctgtttgctatatctaacggccagccctccatatccatggggtcctcattcatggattcaagcaactgcaggtggaaattattagaaataaaaaaggatggttgtgtttgtactgaacatggacagtttttgttattattctctaaacaatacagtataacaactatttacatagcatttacattgtattaggtattaaagctaaagactgcacagcaggtcctcaaataactttttttttttttgatggagtctttttttttgatggagtcttgctctgtcacccaagctggagtgcagtggtgtgatcttggctcactgcaacctccgcctgctgggttcaagcgattctcctgcctcagcctcccaagtagttgggattacaggtgtccaccatcatgcccagctaattattgtatttttattagtgacgggatttcaccatgttggccaggctggtctggaactcctgacctcaggtgatccgcccgcctcagcctcttaaagtgctgggattgcaggcatgagccactgtgcctggccaacattctttcatttaacattgtttcattatatcattgatgagaaaacaaattggttttgtttatacatcctttccctttaagtcaaagtttctaagaatcttaactgtatacagaaggatgtatggttggttacatgcaaattctccatcattttatgcaagggacttgagcatccatggattttggtgcctgaggagagtcctggaaccaatcccccatggatactgagggacaactgtaatcttttttggaataaggaattaaaaatttccccaaaatgcttctccttaatgtcatttattgaataacttgttatttctccactgatgggaaataataccttttaccatttaccaaacccccatatatatgtggatggaattctaaacaccttattctattttattaagttttctgattaccctataccagtaccagatcacttaattaaaattggtattattatcaagaggacacgtgcttctggtaaatgatgttgagacaacacctagagagtttaatttcccacctctcctaaccgcacttcccagagacaaagctctgggttagggttcgcagcaggattaaggagcaagagcccagctggggtgctggggagcatgcagggccttaggaccagcgaagggaggttgcaattatttccccagggttctgggtggtccctgttcattagctagaaatgatgcacctttggggctagcaatgcgctgtggttgttagtactttattgatgaaaaaaatgaggtcatgagtggctgtctaatccaaaatcatactgctagggagtaggtgaaattcctcaagttaaagttgcatagcaagacacatgctgtttcttttatttggaatatcttccctcctccatcactctttcacatgttgtagcacatatatgtgtatatatatggtgtgtgtatatatatagtataaatatatgtatttattttatatattatatatacacatatattatatatatgtatgtgtatatatataatatatatcacatatattttatatatatgtatgtgtgtatatatatatgtatgtgatatatatatatatatgtatgtgatatatatatatatatgtatgtgatatatatatatatgtttgagtcagggtctcactttgtcacctaggctggagtgcagtggcacaatcacggctcactgcagcctcaacctcctgggctcaagtgatcctccccactcagccttctgagtagccacgactaaggcatgcaataccacatagatatttgattgctgtgtccccagtagaccagaaactccaaagtgttgggcactaggtctattttgttcactgctctatgcgcagtgcctgtaattgtgagagtgtatggtaggtgctcaatggatgtttgtggatttacaggaaaacccttatcctggtgcctaggaaagggttaagacatactaataatttcgggcctagtggctcatgcctgtaatcccagcactttgggaggctgaggtgggtggatcacctgagatcaggagtttgagaccagcctggccaacatggcaaaaccccgtctctactaaaaatacaaaaagtagctgggcgtggtggtgggtgcctgtaatcctagctactcaggaggctgaggcaggagaattgcatgaacctgggaggcggaggttgcagtgagccgagattgcgccattgcactccagcctgggtgacaagagtgaagctcagtttcaaaaggggggaaaaaaaaaaaggctgggtgcagtggctcacgcctgtaatctcagcactttgggaggccgaggcaggcggatcacctgaggtcaggagtttgagaccagcctggccaacatggtaaaaccccaactctactaaaaatacaaaaattacccgggcatggtggcacgcacctataatcccagctactccagctgaggcaggagaattgcttgaacctgggaggtggaggttgcagtgagccgagattgcaccattgcactccagcccgggcgacagagcaagactccatctcaaaaaaaaagaaaaagaaaaaaagaaaaaaagacatgcgaataattatgtgccagagggcttttgatcacagacaggctcagtctccaaatgtctagtacagaatcctctaaagatgttcgcaagtccagcgacatggtgtgcattccagtaacagaaaagcctctgcttccatcaattatctgtgtaggtgctgtgaccccgtgcctgagtaacccagagtctgtgagtaacagagcagtcctcattttggttgcttttatttaaacattggtaccaagccacctttcaataagttagacccggccagtgtggtggttcatgcctgtaatcccagaattttgggaggctgaggcgggcagatcatgaggtcaggagctcaagaccaacctggccaatatggtgaaactccatctttactaaaaatacaaaaaaattagccgagcatgagggcacgcgcctgtagtcccagctactcgggaggctgaggcaggagaatcacttgaacccgggaggcggaggttgcagtgagcgagattgtgccactgcgctccagcctgggtgacaggaggctccgtgtctaaagataaaaataaaaataaaaatgtaaataagctagacccaggaagcagaaatcatgcccatgccctgggttgtcttggttatggtttatgtgccagtgcttttgttacctgtctcctggatgggctattcaggcttacaagactttcccttaatcaccacacctggggagtgggggtgtctcatagatttgctgccacctgataaaatgaaaattctaaattctcctggaatattttcttgtttactagaataacatatcctacaaatcttggtctcctaccacaggagaaaattattgtttttatgtatcaactaacttacattccttaaggtggacttttccccagatgttaaaaaatgcatgctgggcgtggtggctcaagcctgtaattccagatacttgggggactgaggtgggaggatcttttgagcctagtagttggaggctgcagtgaactatgatggtgccactgtactccagcctgggaaacagagcaagaccttttctgtatttacaaaaaaaagagaaaagaccgggcatggtggcttatgcctgaaatcccagcactttgggaggctgaggtgggaggatagcttgagcccaggagttcaagactggcctgggcaacatagagagaccccgactctgcaaaatataaaaattagggccccaatgtctacgcacaccggaagacagaggtcctctttccttgcctaatgcagccatggctcgtggtcccaagaagcatctgaagcaggtagcagctccaaagcattggatgctgaataaattgactggtgtgtttgctcctcatccatccaccagtccccacaatttgagagagtgtctccccctcatcattttcctaaggaacagacttaagtatgtcctcactggaaatgaagtaaagaagatttgcatgcagcggttcattaagatcaatggcaaggtccgtactgatataacctactctgctggattcatggatgtcaacagcattgacaagtcgggagagaatttccgtctgatctatgacaccaagggtcgctttgctgtacatcgtattacacctgaggaggccaagtacaagtttgtgcaaactgagaaaaatctttgtgggcacaaaaggaatccttcaaatatatatatatgtgtgtgtgtgtgtatatatgtatatatatttatatatatgtgtgtatacatatgcatatatatttatgtgtgtatatatgtatatatatttatatatatgtatgtgtgtatatatatttttttcccaaaggaaaaagaagacgtgagccaccgtgcccagcctccacaattgtattatacatatatcaaaacatgttgtacactgtaaatatacataacttttatttgtcagtttcagcttaacaaaactagaggaaaaggctagtagagaacaaaacgagatacgggcatagataataatgcagaagaatggacaagtatattgccaggtggtagatttatataaaattgcaaagaataagatcctcgttataaaagctgtatgtgaggccaggcgtggtggctcacgcctgtaatcccagcactttgggaggccgaggtgggtggatcacctgaggtcaggagttcaagaccagcctggccaatatggtgaaccctcatctctactacaaaatacaaaaattagccggatgtggtggcgggcacctgtaatctcagctactagagggggctgaggcaggagaatcacttgaactcgggaagtggaggttgcagtgagccgagatgatgccaccgcactccagccagggtgacagagcgagactctacctcaaaaaaaaaaaagctgcatgcagatatatgtacttaaatatatagaaaagggactcacaggatatttaccatgtttccttctggggagaagcgaggcaattcctacttgttggtatgggaagagcacctaccagggcagagtctgagagaaatatcctattaacctcaggaataatgttcaattctgggaaaaagccaggaagatggacatttatgtgttccatggcaatacacgtatacatattttaagagtattttataaccaaaatgtacgtatgccttcctggattttaaaaatacattaataccaaaagctaacaaagttatcaagtggaaaaaaatgcaagtctctgtctttacccacccaccactcacctgccttccccacttccaggcagccaccataaacaatgttcccttagatgtggaattgttcctttgtaagtaaatattgttgttaagagaaaatgctaatagcaagggttttctgcagcgaattttgatggctatgcattgggtgtggtcacgggaggagaaagaaattaaaccatccctccaatggagggggaaaaaaggaaagaaaggaagaaaggaaagagaagacgatgacccacaaaatgagtacctctgagtctgatccgaaacccttctacacatagtgtacaggcacaacagttgaccaccaggccttaattattattattattattttttttttttttaaagcagagtttcgcccttgttacccaggctggagtacaatggcacaatagcggctcaccgcaacctctgcctcccagattcaagcgattctcctgcctcagcctcccgagtagctgggattacaagcatgtgccaccacgcccggctaattttgtatttctagtagagacatggtttctccatgtaggccaggctggtctcgaactcccgacctcaagtgatctgcccgcctcggcctcccaaagtgctgggattacaggaatgagccactgcacccggccaatttttattattttaaaattgtatgtaaagatggagactcactatgttgcccaggttgaactcctgggttcaagcattcttcctgcctgcctaggcctcccaagtgctgggattacaagtgggagctactgcacccaaccctgccctttaaataatattgatgttaattagaataagagcagcagctattgtgcttgatcctgtttctttttctttctttttcttcttcttctttttttttttttttttttgagacagagtctccctctattgtccaggttggagtgcagtggcacgatctctgctcactgcaacctccgcctcctgggttcaagttattctcctgcctcaacctctggattagctgggattacagacgtgcctcatgcccggctaatttttgtatttttagtggagacggggtttcaccatgtttgccaggctggtgttgaacccctgacctcaagtgatccacctgcctgggcctcccaaagtgctgagattacaggtgtaagccaccatgcctggccctttttcttttttataaattgagacagggtctcgctttgtcacccaggctggagtgcagtggcacaaactctgcttgctacagcctcaacctcctgggtttgagcaatcctcctgcctcagcctctcgtgtagctgggaccacaggcacatgccaccatggctggttaatttttaaatttcctgtaaagacggggtcttgtagagaacagcctaggctggtctggaactcttgggctcaatcaatcctcctgcctcagcctctcaaagcgcttggattacagacgtaagccactgtgcctggcctacccatgggggtcccaactgccacattttctgccgcttgggttcacccatccctctcctccacccgtccctcctttctcagtattgtaaaacacaccccgacctcatatcattttacccagaaatatatcagtgtccatctaagcagataaaggcgttcttgcttgtttgtttttctaacgcccagtgtgatcgtcactcccagtacacgttaataaaaatttctgggctgggtgcagtggcttgtgcctgtaatcttagcactttgggaggccaagacaggggaatggcttgaggcaaggaatttgagaccagcctggacaacagagtgagacccccatctccacacacacacacacacacacacacacacacacaaattagcgcggcgtggtggtggaaggctgtggtctcagttacttgggaggctgaggtgggaggattgcttgagcccaggaggttgaggctgcagtgagccatgattgtgccactgcactccagcctgagtgacagagtgagaccctatctcaaaataaataaataagccaggcacttattaattctgtgactcccatctgtaatcatagcacttggggaggctgagacaggaaaattgctcaaacctgagagggggaggttgcagtgagcagagatcatgccactgcactccagcccgggcaacagagtgagtgagacttcatctcaaaaaataataataataaatgaataataatttcttaccatctaacaacaggtccccttttcaattctgtgcttttaaatgagaccagaggaagagctggaaagctttggaaacttgccaaacattgtaaagcacttaaatgaatgtcttcaagggctgtgctcaaagtgtgatccccaggcagggccaccaaaccaccctggagcttgctagaaatgcaaaatcccaggcccagggccccagatccagtggaactgaactaccgctggaccaaaaccaatggatcattaaagtttaaggttggctatctccactgtgtggaaggcagtggctggtcctctctgaattaatctactttttcttgaggcctggatcttgctggttgatagcagcttcactgagtcttcccaccagcagtgagagcctgccatgtgttaaacatcaaccaggcctatggggacagttgaggtcactgccgttgacaggctcctattctagtgcaagatacagacaagaagctaataaatgataaagaaatagagtaatcccaggttgtgattattaacatatgagttgtgcgaggcctccccaacaagcctattgaaattgcaccagcagagccaggtgcggtggctcacacccgtaatccctgcacttcaggaggctgaggtgggcggatcacctaaggtcaggagttggagaacagctggccaacatggtgaaactccgtctctactaaaagtacaaatattagctgggaatagtagcacctgcctgtaatctcagctactagggagactgaggcatgagaatcttttgaacctgggaggtggaggttgcagtgagccgagatcgcaccactgcactctagcctggttgacagagcaagcaagactcagtctcaaaaaaaaaaagaaaagaaaagaaaaagaaatggttccagcgcctaaggtgtcctccccctctggctttactttgccctgtggccctgtttccagatgctgggccatgcatcttactacttatttgctcattgcttttctcccaggccaggaagtaatcatcacacacagactgccatatacccacccttaggacacagaaggagtaggagaaatacttgttgaatgaaagctactatgacttttcaaacaatgagagtgcctaaaagtgatcaatacctgattagcgattgttttttaatacatctgattcctacccatgggaagagttcctatgtggaatgaggctacaattctttcactgaaaataaattgcaccctatcctgggtgctgctccaacctcacctcagggctgggagcctggtgctgccacacccttgccctgagcagaagaatccggaagaagcctttggccagagccgcaggtgagtcatttgaggactctatgcccttgtggccatccttcggtcacctgtctggaattttattttttttagcccccgggctctgcaccaaagagctggctttttttgttgttgttccagctatacctaaaagggaccagcctcattcatataaagatctcagatctctcaaaaggcatctacaaattaagagtaattctgctcaaaattaaaggaaaaacatttttttggcggaggagggaattgtgtagagttgaagaaatccaagagattgtaaagttcttgtggagggtggagtcagtgagaggaggcagagaaacaaggcgaaggcctttgcgctccatctggtatctgtgtccaatagatggtttcacccacagcatggcagagtccagcaaggatccaagaatatgcaggaatcagggaaatgatgaagacagcactttaaatgggagggatttttaagtaaatgctattaggccaatcaactggaagtctattcatttgcaaacagtaacatgaggcttcctcctcaaaccccaaacacatatacacgcacattccacagttccacacgggctcaagacccaaaccaaaaaaacaaattctatgagaatgcttgatacaagactaataaaaagaagactgggccaggtgcggtggtggctcatgcccataataccaacaccttgggaggcctaggcaggaggatcacttaaggccaggagtttgagaccagcctgggcagcacggtgagacccccgtcactacaaaaaatacaaaaattagctgggtgtgctcgcatgctcctgtggtcccagctactcaccgggctgaggtgggaggatcgcttgagcccaggaaatggaggctgcagtgagccccgattgagtgattgaacctgggtgacagagcatgaccccgtctcaaaaaagaaaaaaaaaaagaaactacactttcagggataatttctatagttggttactagagaagtttctttaaatatgtagagcaccatttaaacagaataataaaaaggctgtgagcagtggctcatgcctgtaatcccagcactttgggaggccgaggtgggcaaatcgcttgaggccaggagttcgagaccagcctggccaacatggcaaaaccccatctctatgaaaaatccaaaaattaagccgggtgtggtagctcatgcctgtaatctcagcactttgggaggccaaggcagacagatcacctgaggttgggagttcaagaccagcctggccaaaatggtgaaacctcgtctctactaaaaatacaaaaattagccaggtgtggtggtgcatgtctgtaatcacagctactcaggaggctgaggcaggagaattgcttgaacctgggacgcggaggttgcagtgagctgagattgtgccactgcactccagcctgggtgacagagcaagactctgtctcaaaaaaaaaaaaaaaaaaaaagagaaagaaaaatacaaaaattagccggacttggtggtccacacctgtaatctcagctgctcggaggctgaagcgggagaatcacttggaccagaccctggagacagaggttgcagcgagcagagattgcatcactgcactctagcctgggcaacagagtgagactccattttaaaataataagaagaagaagaagaagaaaaagagaaagaacactaaaaagatagtgcaatggtaacatgagcaaagagcttaaacaggtagttcactgaagaaggaatacaagtaaatacagtaaataccagaagagttgtcatcaccataccatttctaccatcagggcgcacagatactaaaatgacaaacaaacagaaaatgagacatagctggagataccgtcgaagaagggccaagaatgttgcttggcaaattcatgtaaaagagcagtaagatcttctttaaaaaagctgtgtgcagaaatatgtacttaaatacagtatatagaaaaaggactcaatggctacagacttcttaatcctggttatttctgtggagaagctagggagttcctacttgttatagtgtaccaagtggaacatccattgcaggtgaacttaccaggacacaggctctcttcttcgctgtcggcaggggtctaattcaattgatgggagcatttgagaacctaaatgtagcattagctaaaaactcttggacactacaccctcccttcttgcatttaccctatagcatgtacctgtatgattctgtaagtcctatagatactatgggggatggatccattacattctgtagcattgaacttcccaaatgctcacagcccttaggtcctaaacagcctgtggggtggcttttgcttgggccacaggctatattaaaatatattgcaatcaagcaggggaatagtttaatcttaaagcaagtggtttagcacctggtgtgagaatctcgcttgagccgcctgcctggccctaaaggggacatctctaaacatctgcctctggggttctgaagtgtgcagtggggagtcaccttcacagagaggacttgctgtgacctgtaagacaccatgcctcttctctttccttccgagtgctgcctgacagtgtcctaagtatttgtttgtggtggtttatcctccccaatcatggtaagctttgtgagatcaggggctttgttgcttttgttccccggggtccccaagccaggcctggcatctgggaggtgctcagagtgtatctgttacaggaacaagaaagtcttatccaccgcccatgcagcttaagtaaagcattgtatttactaaacactcgctgtggtccaaatgctttgttgagcaaggtagataagaggatggatgtttgtggactgaaagaaccagctcctgaccccacccttagtgctccaattctggctgagctctgggtgccccagggccttgctatcccttcccctccccctgcttcctctaagaatcttctccatccttcaagaccctcaggattgctgcgaagctctctcacccctggactggaccagaccacccgtagcctcccatagcaccctcctgtatcacctctgtaaatgctgggctggttatggaactgtccaccaagtgcgaaggtttatctcccactgctgatgggaagccccctgaagatggggatttttggcctcttttttttttttttctttgagacagggtctcgctgtcgcccaggctggggtgcagctgcacaatcatggctcaccacagccttgacctctcaggctcaagtaattctcccacctcggcctcctgggtagctgggagcacaggcgcgtgccaccatgcctagctaatgtttctattatttgtaaagactgagtcttcttatgttgcccaggctgctctggaactcctgggctcaagcgatcctccctcctcagcctcccaaattgttgggattacaggcgtgagccatcacgctagccagattttggcctctttggttgagtgtcagctccccagcacagggcctgggaatctgtggaatgaatgcacgagtagtaccagactgacaactggggcagaggtggggaatcccagcatggagggacctgggcagacctgggtggccagtctgaaaggtgatgcatgtgattcaacacctggcccgagaggggaccacttaggccttcccgggtgctcatgccacagacacatgcagaccctgggcacagcctgaatgaggcctttgttaggatgaagggtttggctttccaagccccccaagcgctctgcagacattacttttcacttatctctcccccatatcccaagaggttgagactatcattttcattttttttttttttttttttttgagacagagtcttgctctgtcacccaggctgaagtgcagtggctcgatttcggctcactgcaacctccgcctcttgggttcaagcgattctcctgcctcagcctcccaagtagttggaattgcaggcgggtgtcaccctgtcccgctaatttttgttattttttttttagtagagatggggtttcaccatgttggccaggctggtcttgaactcttggcctcaagtgatccacccacctcagcctcccaaagtgctgggattacaggtatgagccaccacgcccggctatcatttttattttaaaagtgtggaaactgaggcacggagaggttaggtcgcttccagtgagggatgaaggtgggttgaacctggagccctgggaccccaggtcagtgcagcctcacatggagccagctgcctcggtcctggttgcacttgaggccttgctggctctgacactgacaaagtttgaaagttccctcctaacctccctgagcctcagtttcttcgtctgtaaatagaaatatgcaaaggacccatttcacagggcatcgtgaagctcagatgacctcgtgcacagggcccaggtcaggtggggttcctgctgtgcggggctggccattcgcatccctgacctcctggcggtgcctgttccatgcccagcgagccccagaggaacaaatctttcactaatgctcattacgggttaagctgaaccccacctttcacatgcaagaggccttccctttcctgtgggaggcaggagggcatcctgattagcaccaagctctggacccaaggtttgaggtttggctctggggccttggacagtcttccaacttccctgtgggtgaaatagtcaaaacccatgtttccatctcagggatgtgaggaggatcttatctagatcaatgcccagaaatcataatgcactgtgcctggcacagagtcggtgcccaggcagggtctcagcctcattatcgatgccactcagccctcctgccctcctctgtggcctggcttaaagtcttcctggtggaattaggcgcccaagctcagaagtttcacctgttccaccaaggactccagagatcttcatagggatcccccaagtcttcgcttggacattatgatgtttcaccttaggtgtcaagatgaaggcacacgtggtgcccagacattagtcaaacattattctggtccaggcatggtggctcacacctataaacccaacacttaatctgtgcattttattttattttattttattttatttattttattgtttgagatggagtcttgctctgtcacccaggctggagtgcaatggtgcgatcttgactcactgcaacctccgcctcccaggttcaagtgattctcctgcctcggcctcctgagtagctgggattacaagcgcccaccaccatggctggctaatttttctattttaagtagagacagagtttcaccatgttggccaggctggtcttaaaatcctggcctcaagtgattcacccacctcagcttcccaaagtgttaggattacaggagtgagccactgcacccagtcaatctgtgcattttatactttgtaaactagatctctataaggttgatttaaaatgttaaaaaagaaagtaagcagctgggcacggtggctcatgcctgtaatcccagcactgtgggaggccgaggcaggtggatcacctgaggtcaggagttcaagaccatcctggccaacatggtgataccccgtctctactaaaaatacaaaaattagctgggcgtggtggcaggtgcctgtaatcccagctactcaggaggctgaggcaggagaatcactgaaacccaggaggcggaggttgcagttagctgagacccagcctgggcaacaagagcaaaactccatctcaaaaaaaaaaaaagaaagaaagaaagaaagtaaggccgggcgcggtggctcacgcctgtaatcccaacactttgagaggctgcggcaagcggatcacgaggtcaggagatcgagaccatcctggctaacacggtgaaatcccgtctttactaaaaatacaaaaaattaactgggcgtggtggcgggcgcctgtagttccagctactccagaggctgaggcaggagaattgcttgaacctgggaggcggaggttgcagtgagctgagattgcaccactgcactccagcctgggcgacagagcgagactccgtctcaaaaaaaaaaaaaaaaagaacgaaagaaagtaaatatatatccatatatggaaaaggctaattttatggaggtcgttgtgattctaaccattgtagagggtacctaagaggaaagggagactgatcctaacaactcggacctgaccctggcatgctgctcagcctcactcagggtgggaagcctgggcactcccacactgtgtcctgtgctgccttcattgaaagaagtcagaagaagccttaggccagaggcacaggtaagtcatttgagaactctatgcccttgtggccatcctctgggccacctgtttggattttgatttgataacccagggtttctcaacctcagcactgttgacattttggaccagataatgctttgttgtggggactgtgcttgtaggatgtggagcagcattgctggcctctacccactagatgccaggggcaccctccctagtcatgacaaccaaaacatatccccgaacctagctgaatgtcccctggggggtcgggggcactaaatcgccttggttgagctactgctttaatataagacttctgccccagggcttgccctttctagactgaaaagagaccttatctcagcctcattagtagaaagatatccagtctttaaatctacccattctgagtaattccacacaaaattagagcaagatttgtttatgtgttggaaggtggggaagaacaggacacattggttctataaccttactggaagacttgaacgagggagatgaggcagaaattgaaacaaggctgaaagctacaataatcaaaacagtctggcctcaacataggaatagactcagtgggacagaatcataggaatagaatcaactaaacaggtaagagggtgcagaagaaggcacatggatagaggtcagctcattatatgattaaaggtgacatttccaggccaggtgccatggctcttgcctgtaatcccagcactttgggaggctgaggtgggcgaatcacctgaggtcaggagtttgagaccagcctgaccaacatggcgaaaccctgtctctactaaaaatacaaaaattagccgggcgtgatggtgggcacctacaatccaaactactcaggaggctgaggcaggagaattgcttgaacccgggagatggaggttgccatgagccgagattgcgccactgcacttcagcctgggcgacagtgtgtgactccgtctcaaaaaaagaaaaaaaaatgcatatcaaatgtgcactttgttttggagtggattatcttgttggcaaaaaattgaggactggtaaagtaactctcctccctacaacatctggatttagcacttttcctgcattgctgtagggaagatgagggagtgggaccttttagagactgtagtctcctacagccttaccctggcagcccccaggccctaaatagcctgtggatgtgtttgtttgtgccacaggttactttaaaaggcagcttgactcagcttgttagggtgtgtgctcagcacctagtgttcacacatttttgacacctgcctggccctgaagggtgagttactaaaccactatgttccctggttccttcaaatgcaaaatgaacatataatccttcctacctcacagggttcatacaaggattaaatgaactagtacatgcagagggctggtgaggaacatgcggtaggcctgttagccatgcggcatatgaaaaaagcctaacaaaagtgaaaaaaaaaaaaaaggccaggctcagtggtccccacctggaatcctgtcactttgggaggctgaagtgggagaactgctcgagggccaggggttcaaaaccagcctgggcaacatactgtgacctcgtctttgaaaaataataataataataataacataacaaaaaaaatcctaacatcctaacacggcagttattatcttttttttttttaagatgagatcacggcactgcactccagcctgagcaacaagagcgaaatctccgtctcaaagaaaaaaaaaaaaatttatgttgctatgttgcccaggctgatgactccactattgttattaaaaaagaatttggctgggtgcggtggctcatgtctgtaatcccagcactttgggaggctgaggcgggaggatcacctgaggtcgggagttcgagaccagcctgaccaacatggagaaaccccatctctactaaaaatacaaaaattagccaggtgtgttggtacattcctataatcccagctacccaggaagcaggagaattgcttgaacccgggaggcggaggttgcagtgagccaagatcatgccattgcactccagactgggcaacaagagcaaaactctgtctcaaaaaaaaaaaaaaatacaattcattatgagccagatgtgatagctcatgcctataatcccagcacttcgggaggccaatgcaggtggatcatttgaacccaggagttggaaaccagcctgggcaccatgggggaaaccccctctctgcataaaatacaaaaatcaaccgggcaaggtggcatgcac

SEQ ID NO: 396 - DNA, 2475 bp, Homo sapiens
ggaaaaggaagagggagtggtcagatgaatctgaggaggagccggagaaggagctcgcccctgagcctgaggagacctgggtagtggagacgctgtgtgggctcaagatgaagctgaagcaacagcgagtgtcacccatcctccttgagcaccacaaggacttcaacagtcagcttgcccctggggtagatcccagccccccgcataggtccttttgctggaaaaggaagatggagtggtgggacaaatctgaggagtcggaggaggagccacggaaggtgctcgcccctgagcctgaggagatctgggtggcggagatgctgtgtggcctcaagatgaagctgaagcgacggcgagtgtcgctcgtgctccctgagcaccacgaggccttcaacaggctgcttgaggatcctgtcattaaaagattcctggcctgggacaaagatctgagggtgtcggacaagtatctccttgctatggtcatagcgtatttcagccgagccggcttcccctcctggcaataccaacgccttcatttcttcctggctctctacctggccaatgacatggaggaggacgacgaggactccaaacaaaacatcttccacttcctgtatgggaagaaccgctctcgcatacccttgctccgtaagcgtcggttccagttataccgttccatgaacccgagggccaggaagaaccgctctcacatacccttggtccgtaagcgtcggttccagttacgccgttgcatgaacccgagggccaggaagaaccgctctcagatagtcctgttccagaaacgtcggttccacttcttctgttccatgagctgcagggcttgggtttccccagaggagttggaggagatccaggcttatgacccagagcactgggtgtgggcgcgagatcgcgctcgcctttcctagagctccagggaccatggaggcctgaggtcatcggcctgagagaagaacaccggacccaggggagatgtggattttcagcaggaactttattccaatgctaatggcagacaccaggaaggaggagaggaaccatttgtgcagatcatctagaagaacctggaccattcttgatggagctgaatacagtgatcacgttgtcctcctaggagcaggggtggggggagggggatggggtccttctaggagtccttggagaaaagtaagaaaccaggagtgtttccagttccaccctttcctggggcaccaccaccctttttatattgctgaattccaacctccctggggcggaacctggaggtcctgtttcttacggacttggttgccacagtccaggagcatttgaaggcacaatgcaggggctcagattggcacagaattcttttgtgaaatatcagtgccacagattgtaacagatagcttcatgcacactctgcattttattggtttgtttggaaaatgttggccattgaattattcatagatttatttcaaatagtttggaaattgttgtacttttgaaaacatgctgttcctgtagttttttgatgagagttatagttgttatatatacataaagataattttcttttcatttttaagagacaattctttttatcctaaatattttatcatctttaaatttgtttctgtattattatatgtgctcctgaagcgagcactctttttatctatgatacttccataataatctcttctatttatagctattggtagttcccctaaattctgacgatagaaatttttatttgctgtttaggtttgtgactgaattgtgagaattcagttgtgatttttaacatgtgtcagatatatatactaacacgtctaatatatactattttattggtttattttgaaaaacatgggtatagaattatttaaatattattttatttatttaaatatttattaaatatatttatttatttaaatgttattattactttaaatattattttaaatattttggaaatactggtatttttgaatagatgctgtttctataaagctgtgtgatggtattataactgttatatacacatacatataattttgttttcctttttaagagaggattcttttcatcctaaatcttttacctttcaatctttgtatctattattacacgtgctgctgaagggagcatggtttttatctatgatacttagttaacatatatattacatttatagctatgtagtagttcccctaaattcttgtaaaaataaatttttatttgatatttcatctatgtttgaaatgtgagaattcagatgtaattttttaccttgatttggcatgtttgtatgttactttaaagaggatgtgtgttctaaaggaggacatgagctgtgtgttttcaagagaacaatagagtgtgtctcttggggaaacgtaataaaaatgaacttttctcaccttcaaaaaaaaaaaaaaaaaaaaaaaaaaaaaaaaaaaaaaaaaa

SEQ ID NO: 397 - DNA, 2193 bp, Homo sapiens
cctttgagcagtaggaattggcttgctgcccatgggcacctggctggagtaggcagtgtaggctgagggctgtagaaggccgggtttcattggtttgtacccaggtttccagaatagaaaaatgccacaacctcctgagaagcccagttcatggtctctcacctaagttgtggttcctcactgatgacttttctggccccaccacagatgataccacctttataagcacaaatgttgtctgtggatttaatgtaaatgtgaaaaacaaaattatttcaaaaactttacctgtgtttcttcctgcagctagaaagtttgggtcagagtgaactggcttcaagacttaccttgaattgtcaaaattcttatgtggaacctcataaaattcgggacatacctgtaactattatggatgtaagcttccttttaagtaaaatagctgctttactttttaaaatgtgtatgtcaagatctcctataaaactatttgataactttcaatgtgcctcttcaaatgctgccttggcttttgtttttaccctccagctttctcaattccaaaataatctgtttattgcttatcttggatttctttctggcaggaataacaccattgaaatcaaaataggccgggcacagtggcttatgcctgtaatcccagcgctttgggaggctgaggcaggaggattgcttgagtccaagagttcaggaccagcctgggcaacatggtgagaccctgtctgtatttatttaaaaaaaataaaaataaaaatgaatcaaaataaatttaaacaagggagtctacccatttgatgtatttttgctgttctcatcaatagatattgcaccatatattgcacatatatgggcagcaaagagaaggtgcttcacaagggtaacaagggtagagaatcaagaattccatagtttaattaccacaaaagcttgcttatttttttattgtggtaaaatgtacatttaaaatatgccattttaaccatttttaagtgcatagttcagtggcattaagtatattcacagttcggcaaccatcaccattttcacaacattttcatcattccaagaagaaattgcatacccattaaacaataactcctgttccctttcttcccccggcctctgataatcaacggttttattttctgtctataaaaatttacctattctagaacctcatataagtagaatcatacaacatttatccttttgtgtggccatttcacttagcataatgtttcacaagacttatcttgaaatgttatacatgtgtcagaatgtcatttctttcttttttttttttttttttttggaaacagggtctcactctgttccccaggctggagtgcagtggtgcaatctcagctcactgcaacctctgcctcccgggcccaaacaatcctccctcctcagcctccttagtagcttggaccacaggctcacaccactacgttcggctaattttttgtagagatggggtttcaccatgttgcccatgctggactcaaactctgggactcgggctgtctgcctgcctgggcctcccaaagtgctatgacaggcatgagccaccacgcccggcctatttctttttaaagctgaataatatctaccaataaaaccaatgttggtttataccacattttgtttatccattcatccgtcagtggtcacttgggttgtgttcagcttttggcaattgtgaatagtgcttctatgaacattggtgtaaaagtatatgtttgggcagggcacagtggctcattcctgcaatcccagcactttgggaggctgactcaagaggattgcttgagcccaggaattcgagaccagtctgggcaatacaggagaccctgtctctactactaataaagaaaattaggccgggcgcggtggctcacccctgtaatcccagaactttgggaggccaaggcgggtggatcatgaggtcaagagatcgagaccatcctggccaacgtggtgaaacccgtctctgctgaaaatgcaaaaattggccgggcatggtggcacacacctgtactcccagctattcgggaggctgaggcaggagaattgcttgaatctgggcggtggaggttgcagtgagctgagatcgcaccactgcattccagcctgccaatagagtgagacttcgtctcaaaaaaaaaaaaaaaa

SEQ ID NO: 398 - DNA, 3905 bp, Homo sapiens
gcgacgtcagaggcgcgggtgttcgcctacgtcactggggcgctacggtgcctggagctgggcggtcttctcgtcagagtggggactggtgagagcgacctccccgccaggtcctgtgtgttgccggctgaagaagggtagctgaaaaattcagacccagcacagtgtttatgttggtcaaaaatagaaaactatggcgcggccgaggcgggaggacccttcaggccaagagcagcctagcaacatggcgcaaccccatctctgtagtcctacctcagccccccagctacttgaatccaaagattcaaggctccagtgagctatgatcccaccacagcattccagcctgcgagattgagatgatgattattccccaccttctaagagacaaagaccaacgagccaccacagccaccagtcccagaacccgccaatgctggggaacggaaaatgagggagttcaactctggccctcacaatccagtggaggagacgaaactcatctgcctctgtccctctgggcacgcctcatgccaggtgcatctgtggacaggggccacgctcctgggcttccaaagttggagaaagctgccaggctcaggtctgaaggccagaattctacagtaagtcctactgagtcaaggtgggagcagggtcggtggcttccgaggctctgcgggagaatccgtttcctggcggtagaggtggcctgcactcctcagcttgtgctgcccgtctcgaatgactggagtttcctgcttctgtcactacacctcccaccctctcccatcacctgctctgctcttacaaggatccgagtggagtcttgctctgtcatccaggctagcagtggcgtgatcttggctcgctgcaatgtctgcctcctgggttcagatgattctcctgcctcagcctcctgagtagctgggactgcaggcgcccgccaccatgccctgctgttttgtatttttgagaaatggaataatcgtatcgctgatctatgtaaacaaattgaagaattgtctgaaagaaaatatgacatgaacttatgaattcaacaggtgaagatttacaacttgataaatcagctttgtgagctcgagctgtaaaagccaaaggtccggtgatgatcccatacccttttttccagtctcatgttgaagatttttatgtagaaggccttcccaaaggaattttttttttttttttgagatggagttttcgctcttgtcgcccaggctggggtgcaatggcgcaaccttgctggtcactgcaacctctgcctcctgggttcgggagattctcctgccttagcctcccgggtcgctgggattgcgggtgcccgccaccacgcgaggctaatttttgtatttttggtggagatggggtttcaccatgttggccgggccggtctcgggctcctgacgtcaagtgatcttcccacctcgactcctgacatcaagtgatctttccgcctcggcctcccagagtgctgagattacagacgtgaacccatgcctggccaggaattttgtttttcaggaaggctttctactaatggaattcctggccttgagaggatgttactttcgaaggaaaggatttttttgttattaaaagagccacctaagctgaagattcccttgagaacaagtactgtcctgcggtttcatggcccttcttccatttgtggttcttgcgaagtggaatttaaatgacatcttatcaagatggataaaccctagtttcccagtgctggaatatagaaaatggatggacaagtaaatcccactcagcacccatagtccaggcatggggacctcaacacacctgagccccagacatcacctttcattctggacctaccatgaaagacttctgaatccaggaagagaaactgactgggcaacatgttattcagaaacaggaccttgccctgtcactcaggatggagttcagtggtcctatcatggctcattatagcctcaaactcccaggctcaagcaatcctaccatgtcagccttcccagtagctgggactacaggctggagtacagtggcacaacctctgctcactgcagcctccacctgccaggctcaagcaattctcctgcctcagcctcccgagtagctgggattacaggaagtgaccgcacaatgactcaagctaccacatactgttgattgtgaaatgccagttgaagcatatgtcctgcgagcttaggggtgctacaagttgaccactgcagcagtaaagatgactctgaagaatggcgtgggatggatcctttcgaatgcatttgagcagcggtctccaaccacagggccacagagctggagctggatctaccatgaaagacttctgaatccaggaagagagactgactgggcaacatgttattcaggaacaaaaagatttggactgtaacttaaaaatgatcaaataatagtgcatgcatcaagtgcaatgggaagctcttctggagagtgagagaagcttccagttaaggagatggggtctcaccctgtcacccaggcttgagtacagtagtgctatcacagctcactgcagccttgaactcctgggctaaggatcctcctacctgagcctcctgagtagctaggactggtctccctctgttgtccaaggctggagtgtagtagtgctatcacagctgactgcagcctcaaccttccaggctgaagcgatcctcccatctcaacctcccacgtggctgagactacaggtgcttgccactatgcccaactaatatttggaatttttgtatacgtggattccagaggggtgacagcgaaacgtgggaccatccagttgcaggaaaacaagcttaacacgcccactgattctacattatgctcctacctcccggcagcctctccaggcccagaactttctccagtcagcctctacagaccaagctcatgactcacaatggcctatttaggcccataccctacgtcacggcagtctccgcagatgaggctactgcctcacaacagcctccacaggcacagctccatcgttacaatggcctctttagacccagctcctgcctcccagccttctctccaggccctgaactttctcaagtcgacctcaccaggcccagctcatgcttctttgcagcctctccaggcccagctcctgcatcttggtggcccctccaggcccagcctctgcctcccgtcggcctctacagtcccaacatctgtctcacagcagattcttcaggcccagcatctgcctcactgtggaccccccaagccaagctcccaacctttcagcagcttctacacacccagctcctgccacccagtggcttctttaggccaagctcatgcttcacaagggcctttccaggcccaacttttgtctcatggcaaccttccctggccagattcctgcctgtctcccagcagcctagacaggcccaggtcttgcctcacactggcctctctacatccagcttatgcctcacggtggcctctccaggcccaactcctgtcccaggacgtcatctccgggcccaaaacttactcaagtcagactctctagtcccaactgctgcctcctggtggcctatgaaggcccaaaatctcctcaagttggcctctccaggcccagctcctgcctcctgtcagcgtctagaggcccaacctctgcctcatgggggcttctccaggcccacctcttcctcttggctgggtctacaggcacaactgctgcctcacaacagccttttttggcccagttcctgtccagctcatggcggccaatgtaggcccaaaacttcctcaagtcaaactctccagaccccacccccagatgcatttattagaaataataaagttctttcttagctaaaaaaaaaaaaaaaaaaaaa

SEQ ID NO: 399 - DNA, 1935 bp, Homo sapiens
cttagtttgcacacaaacaccaatggatgaacagtccctagcttcctgcggctgcgccttgacccctacaagctttctcaagcgcctgcgcgagatctcaggtcccgcccttttgtctcagtgcgctggcgcagggcagaaaggtggggcttcggtcctccagacgaatgccagcgcggctgcgcgctggggggtactccctcaccgcggctgcgcgggagccaggccgccggctgtcactgcggttgcgcgcggcgagcgccgatcccggggcgcctgcgcgggtggctttgcgggcgctcgcggtaagtttgcgccaagtgcgcggcagccgggacgcagacggcggcggcggcgagaggcggagcccggggaccaccccccatcaccctccccccagtcacctcacgtaccacaacctcacgtaacctctcaccccccctccgatacccccagccccgggatggcagcgcccgccagccttcccggccggaccggctgtcgccagtgccggctttagcctgtgggactaggccccgccgaggcctgacccccggagccgggacccactgtgcagccagcagccgggccgggactgaggggccgctcccccctcgcggcccgtcgggaggacgctgtcgtcccggggactgggggccggggggtgggggggagccagggcgaggaagtcgggacccgtattgggaaaaaagcggggccggggtcaggagcgccccctcccctcacctcccccctccccccggggttgggggggccggagcagagagcacccagcccgggaggtggatgaatgtgggagaaaatggagaccaagacgatcgtgtacgacttggacacatcaggggggctgatggagcaaatccaagctctgctggctccccccaagacggacgaggcagaaaagcgcagtcggaagcctgagaaggagccccggagaagcggcagggccaccaaccacgacagctgcgatagctgcaaggaaggtggagatctcctgtgctgcgaccactgcccggctgccttccacctccagtgctgtaaccctccactgagtgaagaaatgttgcctcctggagagtggatgtgtcaccggtgcactgttcgccgaaaggttctagcaagaggagaagaaaggaggaaaccacagggaaaaatgttaagaagacacagcatgaattagatcacaatggtctcgttcccttacccgtcaaagtctgcttcacgtgtaacaggagttgccgtgtggctcctctcatccagtgtgactattgccctctcctgtttcacatggattgcctcgagccgccgctcactgccatgcccctgggcagatggatgtgtccgaatcacatcgaacatgtggtgctgaaccagaagaatatgacactgagcaatcggtgccaggtgtttgatcgtttccaggacaccgtttcgcagcatgtcgtcaaagtggacttcctgaaccgaatccacaagaagcacccccctaaccggcgtgtgctccagtcggtcaaaagaagaagcttgaaggttcctgatgctataaaatctcagtaccagtttccaccccctctcattgcacccgcggccattcgggacggggagctgatctgcaatgggatccctgaggaatcacagatgcaccttttgaactctgagcacttagccacccaagcagagcagcaagagtggctctgtagtgttgttgcgctccagtgcagcatattgaaacatttatctgctaagcagatgccttcgcattgggactctgaacagacagagaaggctgatattaagcctgttattgtgactgacagctcagtcaccacctgcccaataaagcttgacaagacaaaaaaaaaaaaaaaaaaaaaaaaaaaaaaaaaaaaaaaaaaaaaaaaaaaaaaaaaaaaa

SEQ ID NO: 400 - DNA, 196337 bp, Homo sapiens
gaattctttatgtccaagatttctgtaaagttcttttttgtgatatctatctctattgaattaatcattcagatcatgaattgtttttctgattttgttgaattgtctatttatattctcttatatctcactgagtttccttgaaatcattattttgaattactctcccggcatttaataaattcctttactttggggtctgttactggagaattattgtgtttttttttaaggcatcatatttccttgctttttaatgtttcttgtgttcctacattgatacctgcacatctggtgaaatgtttgcctcttccaattttatgcaatagttttgtaggaagtgactttgtgggaaatgtagatgagtcctagggtgtcagttgggtagctgagtgaattcattagtatagcctctttgccgtttattcagctataatctactttaactctgtctgcaaattcctaagtagcctaggctacaggagttttcagtggtggcagtgcagccttgccaggggtgggctcaccaggctggttctcacagcatgcaagtaaggggtcagccagcttggaaattggtccaccaagggcagggcctccagactgtctctcaggccaagggtatgggtgcatggtgagtgagtagactggggattgacttaactaggggcaagccatccaggttgtttctatgactggggacacctggctaaatcaccagaggtagatttactgggttgtttctagccagaggcatggattcatggcagttcagccaggctgaaattaccttctatgctgtgcaggactggagtcatatcatttccaggcccaggctccaagaagtgggggtcatggcattgcagtcacccatgtgacttccttggaatgagcccagaatgaccaggaatgactgcattggaatgaccacgtagagcctcaagtttggagaggtcccatggttactggtccctagagccaaatgcactttagcagcggctccactttcaagatggtgtactgctgcagccgcgtgtgtcctggttgggggtggaggggttgcaaggttgcaagggtaacgggtaatgcacaatgtgtgctcctaccctggagtaatgtaaccatatgaattccaggcagctccccactccccaaactggactctggacttgtgaggactgtgcgatttccctgtagtaagaattgcaagtttctgcagtggcaatgagggcttgtgggtggcatcttctgcttacctttttcttgcaaggggcaaggaagtccctcttggcttagagctgatttcagtgggagagacagggtggcagaggcaggatgcctcatttccctctatgctgtgatcctgggcttctgtgctccacagggattttgccactcccttgctgcactccagcgctttctttcaaacattacagttgaattttgattgtttgttgttttgtgttttttgtgtggaagacgtgagcaccagtaacctctagttagccacttagctgacatctatcattccttttaataaaaaatgtggcatggcacagatactagctactaaaaacttaacaattttattaaaaatttgcttaattgcctccaaatgagccttaattataatgtcatagacataggatatatagctctgaaattcggagaagcattctgggccagagattataaaccatcagtctataattccagaatcttctgcttccccctttggaaaacaatgtttactatctctgttccacaagttctcaaatgttcatgtcatctacaagtttgtctggcccatgtaatatagaattcaatggggcctggaagtctgaaactcagttagcatatccaggtccttccttggtctactcttctatttagtattttaatttcctcttagaaatgctttatctatcctacccagtttgaaaattattctccctgaggagaagatagaagcaaaattatgttacggaaaacacatgggctttaaagatacagagtcaaaatttcaggccctggaactaccattaacacatggtgtgatctttggcaagttattcagcctctttgacatacagtttccttaccataaagtggaatttaacaatattctaccgtgcactgtttaatcagaacaatattgtaattacgaaaaagatacaaacagacaaaagatacaatttcattcagtgttgttgaagaataaataaaactactcctcaaaaaaggcttcacagatcagaagaaaaagcatcagttccctttggagagtcaagcttccctgatcttcaaaactccataaagatgctctaccaccaagatatctactgatcattgtgaagatacttttccaaattcttaaagaagttcctttgccattaccactgttttttctcttttattcttatgtcttctctaatcctttttattcattaggtacaagttcctggtgacaccccaaacacattcctgcagaatgagttgatgggagttctgtttgcagggtcactttcccaagtagacaccctctgtgaggttaaggtttttaggtcggctgaaatgtactgctatgctttgtactcttggagatgctgtgaggattaaaacaggactccgaaaataaaactttctcacaaaatacagttcccagcttatttttcaatatctttcctattttcttgtaagttaagcatattttggctgcaaatgacagcaaaattcaactcgattcaaacagtctttaataataaagaatatttatcacctcgtataaaaaaatgccacaggtaattccagcctgaggagaggagtagcctaatgactcactggatgcattttctgttttctccttcccctctgtcttttagggtcttccatttaatttcacaactctcccactaaggtagaaaaaatagctagaatagttcaagacatcacattgtctctacatcaactcatctaagagaaggagtgtctgatagctcccacatagatcctgggatttgtactttttcattggccctaactgggtcagatatccatccttgaagtaaacatggtgattagaagaaaagaataaattgattgagttaagtgattcaagggccatctcgggaatcgaaaatggtatcattcccacatgaaacttatatatgagagtgaattcaaaaaaagaaaaccaggatactattggcaagaaagctacacagataacttataaatgtttactacgtgagttcattttctttctccaaataaaatgaagtacttcttgactatctctggcttcagccttcgtgatgcctttcctataggttcatgctgctctcttgtatttcttttttggttatctgctcttgtccacagtttgtttcaaagctgaatctaccagaggattcccaggccattatattggtttctgtaatttcttcccccttttctttctcatggagttacttagaattatgtgggtagaattacgtttttaagctcaaattccataggcacttttatgtgttttccctatattcctctgaatgtcttactaaaggaatctgacagtagtggcaactatattgctattggatgaaacagaacaagcatctcagctagcccctttccttcctttctattatacatgggtagggatggaacagagatttaagtgtattatgggagtaaggttgaaggaaaccattgcatttttcttttctactaaatgaagaaaatttattgagcaatatttaaaggggtctaataaaaaaaatctgattcctgactgctatcctagaaatctttctcctgattgcaacctaggcccacctctctcctgacccgagtttcctgtgagagtaagaaatgtttgtggtgatgagaaaaactctcaggttgattggctgattgtatgccatattgttttatctatactccattagcccaggtaattaagagttgacttcattttcctctctttctgacattcttcaccccctactcacacaatcattttatcactctctcacactctatctgtatttcatctaaaagtatgaaatatttaaaatattcctgttagcaatgaaccatttgatagctcctattatagtgagttggggatgcaaataaagatggtcaatttcaatgaaattttgtttcaagtggaattttgtgtgtcttaatgaattcagtgatttgcatgcatgttcattagaagctcttttatatttttaattgctccaacttaaaatctttaaaagccagatagtgagatactcacaatgaagaagatagaggcaaggttcaaacatacatctcttttgtgtatgcaatcaagaaagatatcagggatatgtctcataccattaacattcacccccaaccccactccacacacaaaatatactgacacaattatctcagttacataactggcacaattcccatgacacatttaattatacattatgatgtgtttctcaaaaactttgaaactctatcagaacgattatgaaatagatgtgcccactttccttccaatttgtggtgataaatttttaagaaaacttaaccattatttcatttgccttctaatgagagattcagctttcacaactgcattcttatcattgaatagtgctttttactaagaagttggtatttgttttagctcagtagaaaccttatgttaacaaaataaaatgctttcctggttctttcatgataacctaatccacttggccatattcattgtgcaggtgccaaatttatgtgattgcaatgggaggtttggtcctaagccaagagttaactaagccttctgagaaatgataaatattagctcttaatatgcaaatatatatcaaattatttgttcattgatactttgtctttaaaaataaatgactgagggacaatactatccattgctatgttaaaccttataaagttctcttcatttgttgcttccagctaaaatgttcttctaagaaagagcagatcttactggattgcctttccagcaaaaataaatacttttgttgctttttaccacaagcactttcaaaagcctgcttaaaatagaaaatagttgtattccaagggagcgcctggagcctaccacctaatgatagagccaagatagagaaactggctaataggatcatctgtaagggatcagctgtgagggatcagctgtgagggagctggaactcagagacaattcccaaaactaaagtccagcagagttcagaggtttccagaaatgccataaatggaggaaaacagaataacataatcaagtaacaacgccatgggctaggccactggagacagatgggcatggaaaagcgttcacagaaggcaatagaaaggaaaggtcaaatggagccacactggaaaggtgagctttgccacccccttacgtctgcatattgtatttcactggctactttgtgaatttcaatctcacaagactaatttgaagagcttactgtattttctacagcttggtgctaaaagcagcatcatatgtgcatacaagatatttaaagatgaggagcaatttggcatcagttcaattattctgtcaccccccaaaaaagttaaaaaatgtattatctgtataaagtccagccaactaatgggttcttgtggcataatgttatgttaaagaagcatcaatagagtctccaaactagtttaaaaacactgtaaatttttactgaagcctttaataaaaacaccaaagaaggaatatatccagaaaatctttggaaatattatctttccagtcttgtcaacctcttccagatgtggcaactgcccccaaagtccctatagtttcaactccccaaaagtctcttccagcctggtataccatctcttgtatcctccctcacctgtctctggtgcagcttctttaatatgtggctcattttaacctttctgacttgtttcacttttcctgttcctcctttaccaagattctgtgcagcaaaacaatgcctaggaactcatacagcaagcaacaaaacaaaacaaacaaacaaaaacaaaaacaaaaatcctctccgttttccaagattgttgatggtcagagatgtttaaaatactttgtaatttattttatcttctcccacaaatagcatataaggtctgtccttttaaagtagcagtttgtcaaggagtaaagttaaaaaggaaaaggactttgtcttcaatttacagaaggcaggcaaagctttcatttgaaagacaccaaagcccaaaattcttgccatgtgcatacactaagaagactttgaatccaactgtacaaaatcaagttgaaaaaaatagttaggtcaagctcaaggataaactaggattagaattcccagcacttagactagatctgggtatttgtatttctttcagtaatttactttctgatattaacaattttattataccttttatgataattttttttgaattaacaatcatcagatgcgcaaaattactcatttatctgtattacctttgcctaaaatctggctgttgaaaccataaactcctatccaggtccaaatagtggcagaacattgtaactgcaggtgaagaaggaggaaccactgtcacttgagtgacaggaagtggtaatcccaaatcagatagatcatgtgcaagagtatgataagaatatttgagaattaatgagctttaatatttattttgcatttctaccagcaatctttttcttccttattgcactctatttaatcattgtttaatcaggaaacccaagagaagatgtgaaaaatataggcaagaagtagctaaggtccacggtcaagagaaatttgattgtgcaggcaactgaaggggcaaattaagggcaaattaccagcaaaaaagtcaaattaccagcatcaaagtcaggtgcaaaggaggtagaacaattacagtaactatgtcaatctttttgttatattagtattatctgcccaatgcctagaatacagtgggtccctaatagttattagttccttttttcttcctctttctcattctctgaatttatttttatacttaagggattagttaccaccaaaaatgtgtatgtatcaatttgattcttactgaaagtagacaccatgcaaattacaaatttcaaaaataaattatagctctgccaatgctgtgcagtggccttagattatagctactctatagcctaagcttcctgtactctataccatgaaatctttatctttcaatatggataatagctcccccaaataatacatagcacagtgcttgcagcatgattttggactagagcagataatcttctctattccagatggcaactgggaaacatgaggctactaaccccgtaccaagtgataaagacgagactgagatgtgggaaatagaatggacaaactagtgtgaataaggtaggctagagctgacatcatcccggaggcctgcccactgggactacagctgctaccaccggcaaatgttttggatatgtcatctaccttagatatagtcatctgcttttgtttaattctcgattgcaaattaccccaaaacttagaagtttaaaacaataaacatttattatgtcatagtttctatggatcaggaatttgagggaggcttaactaggtgtttctggcttagggaccttcttggggttgcagtcaagatgtcagatgaagttccagtcacctgaaggattaactggaactggagaatgggcttccaagatgattactcccacagctttggcaggaggcctcagttcctctctggctattggcaggaagccttagtttcttgggtctccttagggctgcatgagtgtgctcacaaaatagcagctggctgtccccagaaagagtgatacagagaaagagagcaaggcaaagaatgcaatggctttcattacctagtcttagagctacacatgttacttcctccatatactatttgctggaagcaaatcactaagtctagtgcaaactcggagagagaaacatcaggatctacattaaatggagagaatagtcaaaaaatttatgtatgtatttttaaataccaaacctacaaagactcaaggatctttctaccctcccttaagcaatgtctgatactgtgccttacatatctgatctagaatttcatcaaatatagaattaaaagcagaatacatgagcatacagtaactaggcagaggagaattgtctaaaaattgagaacactggcaagagagattgaaaaaagctggaacaagagagacacaatttgcatttggaatctactttaagtatatgaacgaagacattcaaattcaaacacttctcaggataaaaaagtgaaaggcatcgcttctcctctggtcattctgaggcttcatataagaatagagtgtttatcagttccaggagccttttggtggcgtcttcagggctttctaggtatggaatcataccgtctataaagggagagagtttgacttattcttttcctatttgaatgccttttatttctgtctcttgcctgattgccctggcaaaaactttaagtactatgttgaatagaagtggtgagagtgtgtatcattgtcttgttccagttctcaggggaatgctttccgtttttgcccattcagtataatgttggctgtgggttttgcatagatggctattattattttgaggtatgttcctttgatgcctagtttgttgagagtttttaacatgaagggatattggattttgttgaaggcttttttcacatctattgacatgatcatatgttttttgcttttaatgtgtttaggcagtgaatcatatttattgatttgcatattttgaaccaactttatgtcccaggaatgaggcctatttgatcatgaggaattaactttttgacatactgctggatttggtttattagtattttgttgaaatttttgtgacttcagtaaattatcaggatacaaaattgttgtacaaaaattagtagaatttctatacatcaataatattcaagctgagagccaaattaataatgcaatcccatttactatagccacaaataaaattaaatacctagaagtgcatctaaccaaggaggtgaaagatttctacaaggataactacaaaacactgctcaaagaaatcagagatgacacaaataaatgaaaaaccattccatgcctatggattggaaaaatcaatatcattaaaatgaccataccgcccaaatcaatctacagattcaatactattcctatcaaactaccaaaatcatgtttcacagaattggaataaactattctaaaatttatatggaaccaaaaaatggcccaaatagccaaagcaatcctaagcaaaaagaacaaagccagaggcatcacattacctgactttaaactgtaccataaggaaggctacagtaaccaaaacagcatgatactggcacaaaaacagacacatagaccaatgaaacaaaatagaaaacccagaaatgaattcgcacacttacatccatctgatcttcaacaaagttgacaaaaataagcaatgtggaaaggactccctagtcaataaatggtgctggatagctggatagctatatgcagaagaattaaattggacccctacctttcactatgtacaaaaattaactcaagacagattaaatatttaaatgtaagatttcaaactataagaatcctagaagaaaacataaaaaatgacattctggacatgggccttggcaaagaatttatgattaagtcttcaaaagcaattgcaacaaaaacaaaacttgaaagagggacctaattaaactaaagagcttctgcacagaaaaaaatatatatatatcaacagagtaaacagacgacctacagattgggagaaaatattcacaaactatgcatccaacaaaggtctaacatccagattctataaggaacttaattcaacaagcagaaaaacaaataacctcattaaaaagttgacaaaagacataaacagacacttctcaaaagaagacatactggcagccaacaaacatatgagaaaatgctccacatcactaatcatcagacaaatgcaaatcaaaacctcaatgagataccatctcacaccagtcacaatgactagtattaaaaaatttaaaaaacaacagatgctagtgaggctgcagagaaaagggaacacgtacacacagttggtgaaaatgtaaattagttcagccactatagaaagcagtttggagattccttaaagaactaaaaacagaattaccactgggcccagtagtcccattcctgggtatatacccaaaagaagataaatcattctaccagaaaaacacatgcacttgcatatttattgcagcactattcacaatagcaaagacatggaatcaacaaaggtgcacatcagtggtgggctggataaagaaaatgtggcacatatataccatggaatactacacagccataagaaagaatgcaatgtgctttgcagtgacatagatgcagctgagagccattatcctaagcaaattaatccagcaacagaaaaaccaaataccacatgttctcacttataagtgagagctaaacattgggtagtcatggacataaagaaaggaacaatagacacttgggactaatgaaggaggggttaagagttgaaaatccacctgttgggtactatgctcactctatgagagatgagatcatttgtatgccaaacctcaccatcacacaatatacctatgtaacaaaccttcatgtgtaccacctgaatccaaaatgagagctcacattataaaactaaaaagaataagaataatcaaaatacttttttaaatagtggagtgttgggaactaagatattgaagattttgttagaaaatatagattagagtcatgcatggatggacactcataactgcccccaagtgacttgcctaaaaaaattactgtaagtgagagggacttgggaagctgagccctagatatgagtgggtgttggaattaccacgtttgagttctaaggcttataaattgagatcaaggttctctacatggaagtttcagtgctattatgtccttcaagaactttaggaaaacttgttgttaggatcaaaatctgttcatagagttctatgagagagaggaggtggatttacccatgggtacactaattttccaaagaagaaaatcagcaaaactgctgttttttatccaatctatgatattatgtattgattaccattattttatgtagtaccaatggtagcaattacattttaatgtaattctttcttttcacttaaaaaatacttattgaaagagctgttttcagatttagacagattttgtcactatatcattcctcataccatcaagaggattggtgactcaggaaaaatgctgtactattgtctccaatattttcttctaagtcacttatatctatcccctttgcaaattattgttattattattatttttttttagatgaagtcttgctcttgtcccccaggctggagtgcaacggtgccatctcggctcactgcaacctccacctcccaggttcaagcaattctcctgcctcagcctcccaagtagctgggattacaggtgcctgccaccacccccggctaatttttgtatttttactagagacgaggtttcaccatgttggccaggctgttctccaaatcctgatctcaggtgatccacctgccttggcctcccaaagtgctgggattacaggcatgagccaccatggctggcccccttttgcaaattttgatggcaacactttttttactcaattgaatcacgtgatgctagatgctaactgacttctgtccaaagtcagtaagaagtttctggtaatttaatgtgtggtatcctgcacaattcatgagccagttcacatatgttactcattgctttgaaattcctttgatctgttccaagggatttggtgatttctcctgtcttcagttgcattgcttagtgcataataggcgatccttttcctgtatcttagtgacaacatataacacagtttcagctacttgtaggcatcttccttgtgtaggtcgggtaatgcatataggtatttcttttgctagaaaatataaaattgaagtcccttgtccaatgacaaatatgcctttctgtttagtttttacatacaacttttcttttcaatgaacaatcataatgtaattgtgaggacatcttaagtgcacaaattcagcattcataatgtcagcaatgcactaaatgtaactgatgtaacaaaataggaacagctgtaactattactgcatgtactaatatactaacattacagcatgtcctaataactcttttagtgactgccatctgctaacattaattacaggacacgttttcatttcagaggtaaaatttaaaataagtacatcttctaaataatgaaataaaatttttcataaaagaatctatttttcatgctagacaatactactgtgcgttagctacttcaagagctttatctctgaggatgagaggggaaaagtcattcaacttgcccaaactaatatattatgttatattattgtggctattaaaatgcaagaaaaaataagtaaaactagtcaataaaacagcatggaaggcccccaaacaaaccctggcacatgtaagaatcatgctatgggaaagacggaatcatgaggcaagggtagtgaaaaaattaagctgaaaaaactagttcactgtttgggaaaaaattaaataaacttttgtttcttaccatacaccaaagtaaattctggatacgttaaagatttatatgaaaagagatggccgaataggaacagctccggtctacagctcccagcgtgagggacgcagaagatgggtgatttctgcatttccatctgaggtacccggttcatctcactagggagtgccagacagtgggcgcaggtcagtgggtgcgcgcaccttgcgcgagccgaagcagggtgaggcattgcctcactcgggaagcgcaaggggtcagggagttccctttcctagtcaaagaaaggggtgacggacggcagctggaaaatcgggtcactcccacccgaatactgtgcttttccgacggccttaaaaaacggcgcaccacgagattatatccggcacctggctcggagggtcctacgcccacggagtctcgctgattgctagcacagcagtctgagatcaaactgcaaggcggcagcgaggctgggggatgggcgaccgccattgcccaggcttgcttaggtaaacaaagcagcctggaagctcgaactgggtggagcccaccacagctcaaggaagcctgcctgcctttgtaggctccacttctggggggcagggcacagacaaaacgaaaagacagcagtaacctctgcagacttaaatgtccctgtctgacagctttgaagagagcagtggttctcccagcacgcagctggagatctgagaaggggcagactgcctcctcaagtgggtgcctgacccctgacccccgaggagcctaactgggaggcatcccccagcaggggcacactgacacctcgcacggcagggtactcctacagacctgcagctgagggtcctgtcttttagaaggaaaactaacaaacagaaaggacatccacaccaaaaacccatctgtacatcaccatcatcaaagaccaaaagtagataaaaccacaaagatggggaaaaagcagaacagaaaaactggaaactctaaaaagcagagcgcctctcctcctccaaaggaacgcagttcttcaccagcaaccgaacaaagctggacggagaatgactttgacgagctgagagaaggcttcagacgatcaaattactctgagctacgggaggacattcaaatcaaaggcaaagaagttgaaaactttgaaaaaaaatttagaagaatgtataactagaataaccaatacagagaagtgcttaaaggagctgatggagctgaaaaccaaggctcgagaactacgtgaagaatgcagaagcctcaggagccgatgcgatcaactggaagaaagcgtatcagcaatggaagatgaaatgaatgaaatgaagcgagaagggaagtttagagaaaaagaataaaaagaaatgagcaaagcctccaagaaatattgcactatgtgaaaagaccaaatctacgtctgattggtgtacctgaaagtgatgtggagaatggaaccaagttggaaaacactctgcaggatattatacaggagaacttccccaatctagcaaggcaggccaatgttcagattcaggaaatacagagaacgtcacaaacatactcctcaagaagagcaactccaagacacataattgtcagattcaccaaagttgaaatgaaggaaaaaatgttcagggcagccagagagaaaggtcgggttaccctcaaagggaagcccatcagactaacagcagatctctcggcagaaactctacaagccagaagagagtgggggccaatattcaacattcttaaagaaaagaattttcaacccagaatttcatattcagccaaactaagcttcataagtgaaggagaaataaaatcctttacagacaagcaaatgctgagagattttgtcaccaccaggcctgccttaaaagagctcctgaaggaagcgctaaacatggaaaggaacaactggtaccagccgctgcaaaatcatgccaaaatgtaaagaccatcgagactaggaagaaactgcatcaactaacgagcaaaataaccagctaacatcatcatgacaggatcaaattcacacataacaatattaactttaaatgtaaatggactaaatgctccaattaaaagacacagactggcaaatgggataaagagtcaagacccatcagtgtgctgtattcaggaaacccatctcacgtgcagagacacacataggctcaaataaatggatggaggaagatctaccaagtaaatggaaaacaaaaaaaggcaggggttgcaatcctagtctctgataaaacagactttaaaccaacaaagatcaaaagagacaaagaaggccgttacataatggtaaagggatcaattcaacaagaagagctaactatcctaaatatatatgcacccaacacaggagcacccagattcataaagcaagtcctgagtgacctacaaagagacttagactcccacacattaataatgggatactttaacaccccactgtcaacattagacagatcaatgagacagaaagtcaacaaggatacccaggaagtgaactcagctctacaccaagcagacctaatagacatctacagaactctccaccccaaatcaacagaatatacatttttttcagcaccacaccacacctattccaaaattgaccacatagttggaagtaaagctctcctcagcaaacgtaaaagaacagaaattataacaaactatctctcagaccacagtgcaatcaaactagaactcaggattaagaatctcactcaaaaccgctcaactacatggaaactgaacaacctgctcctgaatgactactggctacgtaacaaaatgaaggcagaaataaagatgttctttgaaaccaacgagaacaaagacacaacataccagaatcactgggacgcattcaaagcagtgtgtagagggaaatttatagcactaaatgcccacaagagaaagcaggaaagatccaaaattgacaccctaacatcacaattacaagaactagaaaagcaagagcaaacacattcaaaagctagcagaaggcaagaaataactaaaatcggagcagaactgaaggaaatagagacacaaaaaacccttcaaaaaattaatgaatccaggagctggttttttgaaaggatcaacaaaatagaccactagcaagaataataaagaaaaaaagagagaagaatcaaatagacgcaataaaaaatgataaaggggatatcaccaccgatcccacagaaatacaaactaccatcagagaatactacaaacacctctacccaaataaactagaaaatctagaagaaatggataaattcctcgacacatacactctcccaagactaaaccaggaagaagttgaatctctgaatagaccaataacaggatctgaaattgtggcaataatcaatagcttaccaaccaaaaagagtccaagaccagacggattcacagccgaattctaacagaggtacaaggaggaactggtaccattccttctgaaactattccaatcaatagaaaaagagggaatactccctaactcattttatgaggccagcatcattctgataccaaagcctggcagagacacaacaacaaaaaaaagaattttagaccaatatccttgatgaacattgatgcaaaaatcctcaataaaatactggcaaaacgaatccagcagcacatcaaaaagcttatccaccatgatcaagtgggcttcatccctgggatgcaaggctggttcaatatacgcaaatcaataaatgtaatccagcatataaacagagccaaagacaaaaaccacatgattatctcaatagatgcagaaaaggcctttgacaaaattcaacaacccttcatgctaaaaactctcaataaattaggtattgatgggacgtatttcaaaataataagagctatctatgacaaacccacagccaatatcatactgaatgggcaaaaactggaagcattccctgtgaaaactggcacaagacagtgatgccctctctcaccactcctattcaacatagtgttggaagttctggccagggcaattaggcaggagaggaaataaagggtattcaattaggaagagaggaagtcaaattgtccctatttgtagacgacatgattgtatatctagaaaaccccactgtctcagcccaaaatctccttaagctgataagcaacttcagcaaagtctcaggatacaaaatcaatgtacaaaaatcacaagcattcttatacaccaacaacagacaaacagagagccaaatcatgagtgaactcccattcacaattgcttcaaagagaataaaatacctaggaatccaacttacaagggatgcgaaggacctcttcaaggagaactagaaaccactgctcaaggaaataaaagaggatacaaacaaatgggagaacattccatgctcatgggtaggaagaatcaatatcgtgaaaatggccatactgcccaaggtaatttacagattcaatgccatccccatcaagctaccaatgcctttcttcacacaattggaaaaaactactttaaagttcatatggaaccaaaaaagagcccgcattgccaagtcaatcctaagccaaaagaacaaagctggaggcatcacactacctgacttcaaactatactacaaggctacagtaaccaaaacagcatggtactggtaccaaaacagagatatagatcaatggaacagaacagagctctcagaaataatgctgcatatctacaactatctgatctttgacaaacctgagaaaaacaagcaatggggaaaggattccctatttaataaatggtgctgggaaaactggctagccatatgtagaaagctgaaactggatcccttccttacaccttatacaaaaatcaattcaagatggattaaagacttaaatgttagacctaaaaccataaaaaccctagaagaaaacctaggcattaccattcaggacataggcatgggcaaggacttcatgtctaaaacaccaaaagcaatggcaacgaaagacaaaattgacaaatgggatcttattaatctaaagagcttctgtacagcaaaagaaactaccatcagagtgaacgggcaacctgcaaaatttttgcaacctactcatctgacaaagggctaatatccagaatctacaatgaactcaaacaaatttacaagaaaaaaacaaacaaccccatcaaaaagtgggcgaaggacatgaacagacacttctcaaaagaagacatttatgcagccaaaaaacctatgaaaaaatgctcatcatcactggccatcagagaaatgcaaatcaaaaccacaatgagataccatctcacaccagttagaatggcaatcattaaaaagtcaggaaacaacaggtgctggagaggatgtggagaaataggaacacttttacactgttcgtgggagtgtaaactagttcaaccattgtggaagtcagtgtggcgattcctcagggatctagaactagaaataccatttgacccagccatcccattactgggtatatacccaaaggactataaatcatgctgctgtaaagacacatgcacacgtatgtttattgcagcactattcacaatagcaaagactcggaaccaacccaaatgtccaacaatgatagactggattaagaaaatgtggcacatatacaccatggaatactatgcagccataaaaaatgatgagttcatgtcctttgtagggacatggatgaaattggaaatcatcattctcagtaaactatcgcaagaacaaaaaaccaaacaccgcatattctcactcataggtgggaattgaacaatgagatcacatggacacaggaaggggaacatcacactctggggactgttgtggggtggggggaggggggagggatagcattgggagatatacctaatgctagacgatgagttagtgggtgcaacgcaccagcatggcacatgtatacatatgtaactaacctgcacaatgtgcatatgtaccctaaaacttaaagtataataataaaagaaaaaaaaacttaaaaaaatatttatatgaaaagaaggaaaatcataaaataattagatcatctctggttgccaaatggctgtctaagtgtactagcaaaagaagaaataaatatggtaacacaaaattaaacacttctatacatagcaaaaggccagtgacaaataaaaatatgtttgccacataaatataaaatgataggttaatatttttaatatataaagagctcttacgtttaataataaacatataacccatagaaaaatggatcagagaaataaacagtaaattcacaaaaatgcatggtaataataagtaataatgagaaaagttaaatctcaacaattttttaaatgcaaggtaaaattaaaacaaaagttaagtatttttcatccatcaaggtatttaaaaaccaaatccaatagccaccataaatgagaatgtaaaatgaatagtctcattctctgctatagggttgtaaatcagtccatctttcctaaagcaaaatttagatactattcaaatgtatgttttctttaacaaaattaccattaccctatactttcaagaatttatcctgaataacaatttagctatgtgcaaagagatttatatgcaaacatatttatcacaatattatttttgatacttaaaaaatcagaatcaatctatctgtgcaaaactaaataaatagttaaatctgttattataaaccttttgatggaataatgtataagcatcacagcttgtcttttgtagactttataatgacagaaagatgatataatgtctagtgataaaatcatgacacaaaaccttattcaaaaggaaatatttttaaatgttggcagtacttacactgtatagcagttaattttgatttatttctgatacttttctatgcctaaccaagatttctacaatagcattatgtttgtaaccaggaagtgagggaaaaagagagaactttggtcaacataataaaaaggcaagagcaatgcagttttttaaatcagatagtacagatgctaaaagacgtctcacacacattgttacatacaattgtgatttataattgttttctgtgcttgaaaagataagaatgttgtaactatgctttggatcatgaagagtaaaaacccaatattttattggtaagagaaaattcaatttaaatatatatttgtataatttcacattataactgctatgtacttttgcattatttcataatgcaacattttgaaatgaaaattagcagtctattttatgctaatcaaggactcttgttatctaaaggttaaggaagcacccaaataaaaataaataaaggcatttttcatcagaaaagactggatattttcttctgattcagaatatagccaaattgacacataactatagataatttttacaataaaccaaattctttcagcatcataattgagaatacaccactgtgtacagaactgaaatgatcataccaaagttcttagaaagttgtctctaagacagattagagaataaattcgtcatctttatggctatggctttttcaccccgttcctccaaggtactccaactctgattaccttctccaggatgaaggcaagagtcagcctacatactcattaaagtggaagatatttcaaacagcctgccactttcatcagcttgctatgagaaacaaaatttatttcactttttactagatccctaacacacagagggaattcaaaatgtctccctggagactggaggttgaacacttaggtggtgttttactgtactatctgactgtgaaaaacagtatttttttctatgggcatggaaagccgaatgcacaattcacctttgattgatgggtttatcaacagtcacgtagcagttacataagtagtgtagcttccccaattgttttattaaatggcaaatactgtggaaggaaaaatgtcatttctagcaaatatgaaacttttaaactatttcaaagtaaaggaaaattgagtggcagtttacccagctctcatgctgcaagatttaacacactaaacttttttccaaagctacacaattttaaagtgatgtctgtctgatttaatgtgtttaagcaaaaggatttcccaaaacatatctcatttgaaaccgctatcccagtggcagtaaaaatggcatcaattacagaaatgttaccaacaacaaaaacattcaattcaccaacaaaggtcagcagtaaatctctctaaaatatgtacagctcataaaactaatgggtttgcaactgtgattgaaacagatgttcataaaatcagcatttaaacatgaagatactgtaaaataaatgaagatgagattaatttaacaagttaattccaaagctgaatggggaagaaaattaacagaaaggcatacaactcgaagtgagacgcatcgcattgtaatcaaagaaaagagtactgcagtgggctaacaaactggagtgcataggaagaactttgtgtaaggagtgatttgaatctagcattctaccttatactgttttattgggaaattactttgcattctcaggttatagcaatataactttaaaagataagggcatttggtcagtttcctttcttcatcacttggaaataggggagtcatgtgaactaattctagttttaccaaaacccccacgaaaacgaaaaaaattctaggatcattaacaactattattttcaaatgccaagtttgggggtgcaaaggcaacagtggagttcccagaacacctacggaatgtttaaaaatttatttcccaaacaggtgtgagcaattatgcaagcatcataaacatgtgcctatagcctggctgagaatagcctccctgtttgcattttgtttctacaaatcaaaggatgctgcgagggtcatttctggggcagagaagttgcacgctactttacatatccacacacaaagcaccaccctgaacccggaggcatttcccattatcctcttgggtgtgaagtaaatcttgaaggacttcttaagtgtgctctcaccactctaagcagcaggcagaatttgggtggccttgccgtgctccagcctcctgctgttggctgcaatctttcttgtagacgctgatgaagggcatgagggcaactctgactttaaatcttcataaaataaagacaactgtgactgaagtttagtttggcctgcttacataagtgaaacagggccacagtgttttgcacacattttctgccctcagaaaaagaggacaaagaggttagcactgcactggggcgaaaggactcggctcctcggctaggttatggggagttttggttgtaatgaaaatagatttcatactaaaataatctttttagtgctggctataggatcggctcatctgaagagtagaaagttaactcttgatgaaacagtaggggtctttctttgtgacttttgacataattcaccaaacagctcaacttgaccaaatcaattggtgtatatataaacccttaaacaattagatgcctttctttaaacaaaagccagctgtataagcatccactaattagccatgttgcacttcttgagttcttttgttttattgactcatctcttcatgcatattatggccatatagttgagttcattaagactgagcatagcacatgcctgtaatctcagcactttgggaggccgaggcgggtggatcacttgaggtcaggagttcgagactagcctcgccaacatggtgaaacccccatctctactaaaaatacaaaaattagtcggatgtggttgtgggtgcctgtaatcccagctactcgggaggctgtagcaggagaatttcctgaacccgggagacggaggttacagtgagccgagatcacaccattgcacttcagcctgggtgacagagcaagaccccatctcaaaaaaaaaaaaaagaaagaaaaagaaaagcagaatagtattcttatcttgctggaggaaaataagtatatttgaaaaaatctgaaaatagttttcttttaaacaaaatatgtatttgttcgtattagaaaacatttttgctgattttgaaattagtatgggtttattataatttggaacatttaaaattgcagaaagaaaaaatgttaattaacctagaatataaccacccagagaaaattactactaacatttataaataaactttttattttaacatagtcttagatttacagaaaaatagcctacactcaatttcccttattatcttacattagtataatacacatatttattacaattaatgaactcacattgatacattattattaattaaaagtccatacgttattcatacttcttttgtttttaccaaatgctctttgtctgttctaggagcccatctaagatatcacattacatttagttgtcttgtctccttgggctcttctttagctgtgacagtttcttacttcccttgttttttttctttttggtttttagattttttgagatggagtctcattctatcgcccaggctggagtgcagtggcacgatctcagctcactgcaatctccacctccagggttcaagagattctcctgcctgagcctcccgagtagctgggattacagccgcaattcaccatgcccagctattttctgtattttcagtaatgatggggtttcaccatattggcgaggctggtcttgaactcctgacctcaggtgatccgctggcctcggcctcccaaagtgctgggattacaagcgtgagccactgtgcccggccactttccttggttttgatgaccttgagaggtttgaggagtctgctcacgtattttgtgcagtgtccctcagatgagatttatctgattttttttcaccgttacgctagaattacttatttaggggaggagaaacacagaggtgaaatgccattttcatcatattgcatcaaggatatatatgtcttcaacatgactcaccctatatcagcacaataaggttaaggtcttcatttattagtgaagactgacaaacactaccctttttccccacttccatactgttctttttggaaggaagtcaccatgcacagaccacatatgaagaatgggaagttatgctatactttcttgagggcagagtctctacataaaatagttgaaattattctgcatggaaaatttgtctattcaactactttttaaatttattcaataatttatttatatccatctcaatataaatggactcatggatatttattttatactttaggtaataatattatactagtttattttcttgaacaaattgttccagctttggacattgggagtgctttcaattggctcctatgatcctttaaacatccccatcactgtgaataggttttttatttgtaggttttgttatggttgttttgttattatttttgctaacttattttcttggttccaggctcatcttgaatatttccagcccagttatggagtaagccatttctcccagttatcctggttcctttgattggagaatattagaaacctataccatggtgctaatgcatttgttgctaaaggattgtctttctttgagaccctgttcagctgacagagcaaggaaatatatgtgtgtgtgtgccagatgatgtatatacacatatctctagatatctctttatgtaataactatgtctatattcagctaaacatgagtttatgtctctaactctaatccattaccatataaatcattctagcctcatccccttaattctctgtaacctcccactccagcaatgagaaaacaggctgacactctccatttacttagtagttcctctgcagtgtacacatatagtggtatcacaattgttaactcataccttcttgagaaaaaatctttatcaaatagagtgcaatacttatgtacagcttcttttgaatttagtcttataaatgcacaaagcatttccccctacacacacacacacacacacacacacacacaccccaaattcggtaaggttgtgtcataggtttgtgatgcagttagattgttttgtcacattctgcatttcatcctggaatatcccaattttctaaaagagttttttaaacttgcattcattaaggtttattctttatgttttatggattttgatgaatgcgtagtgtcatgtattcaccatcatagtatcataaaaataattgtgtaccaccctaaaaaattccctgtacttcacccattgaactctccctctttcctatcaagccactggtcacctataatttactacttttatagttttgccttttctagactattacataattggatgaggacagtatatagctttttcatgctgttccttcaatgaacagtatgtatgtaaaattcttctatgtcttttcagggcttgatagttaatttcttcttattgaaaattatttcattgccacggtgcaccacaatttgtttaattcacgtattcattcatcttgatttcttccagtttttggcaaacatgaataaagctactataaacgttcacatacagatttttgtgtggatctaagttttttcatcagttgggtaaatatttaggaacaccttatcccattgtaaaactatgtttagctttgtaagaaattgtcgatctgtcttccaaaatgaccatactattttatattcccactagcaatgaatgagagtttatgttgttccatatttttgccagcagttgatactgtcaggattttttttattttagtcattctgatatttatataatagtgattgttttaatttgaaattttcttatgataaatgatgttgagcatctttaaatattatttgccatttatatatcttctctgatgaggcacctccccccacccaaatttttctcttctatagtcctactttggctaacttggatttttttgttttatataaattgtagaatcagtttgtcaatagctacaaaaaagagtaatgggatttttattggggttgagtgaactatgtaataagttggaaaaaaattgacatcttaacaatatttagtcttccagtctatgaagacagaacatttctccatttgcttagatctttttcatttctttcatcataagtttatagttttctgcatatagactctgtattttatttgtacctaaatattttatatttttggtaattgtaaatgacatttgttttcagtttcaaattccaattgattattaccaatataaagaaaaacaactgactttcatattaaccttgtatcctgagaccttgctatatttgtttattagttccaggaaagttttttgttttgtttttgtcaattctttgggattttctatataaataatcaagtcacctacaaacaaaaagacattttatttcttccttcccaatctgtatgtttatttccctttcttgtcttattgcactagctagtactttcagtacaatgttgaacaggagtagtagaaagggacttccttgccttgttcctgatcttagagggaaagtattctgttttttatcattaagtaccatgttagctatagagtgtttaatagatgttcattatcaagttgaggaagttcctttctattcctagtttgctgagagtttttatcataaatgtatgtgaatattgtcaaatgctttttatgcttcaactgatgtgatcgtaagatttttctttaatctgttgatgtggtagattacaccgatcagtttttcaaatgttaaatcagctttgcatacctgcaataagttcaacttgtcagggtatataattctttttatatattcttggattagattggctaatattttgctaagaatttttgtgtcttagttcaagagagtctatcgtttgttgtattttattcatctggtttttgtatcagggtactggtgcctaataaattaagtttgtaagtgttccctcctcttcaactttctggtagaatttttataaaactggtattattttttccctaaatacttggtagaatttaccagaaaaccatttgtgcctaattttgagatttttttttaaatatggtgcaatataagtgtgcaagttcagtgttttaaatatagctcattagttttcacagcatgacttccttcatgaaatgatcttggcatccttgctgaaatttagttaaccatagaaacattgctttatttctggattctttattttattttattgatgtatatgtttattcttatgtcagtatacacagtcttaattactattgccttctagacctttgctctgtttttttagattctgtattctacaaccttgttgaatttgtttattagttataattgtcttttagtggattccttaggatatacaagatcatatcatttgcaaatatagttttacttattgctttgtaatctgaatgctttttattaactactttttccaatacagaccttaacacattagtcataattattttaaattacacgtgtgataactttaactcctgtgacatatctaagtgtggttctgatgcttgctttgcctcttcaggatgtgtttttgcttgctttttggcatgccttgtgatattttgttgaaagccagatatgtagtatcatgtaataggaatggaggtaaataagccattagtgtgatgattcattttaatctgactaggaattaggctgtctttgatattaattataactgtagatgtcatagtctttaaattcctcttgtgtgcttgtttttatctcccaccttgactttgggcttccctaaatactcctcctcagagagagtctgtgtcttgtagctctttccaccgtaatccacggttgttatactgaaggcctggtggtattgtggtcaagtgagaagaaaggttgtgttctatagttttatatttaaatctaggtcttttactgtgcctctttctctgttctatgacctgaagtgttttctacggtggtatcgttttatgttgttgttttgttttgttttgttttgcctgattttgaagagacaggatgtctagaaaggactagagagggaagaaattccttctcccagctagaataaagctctggtaaagattttttccctggatagtaaacttttgttatgaagaatcctctgggtgtatttcacaatgattagtctttccttctcttaccagagacacaaggcgaatcattcttggatcttcaccatgagaacctgctggatttcctgaaagaaaaacttgccaaaatgcggggtcctccgagatggtggcccccaggagtttctcattctcacattagtccacactccacctgcagtaatttgttgaaattatcagttagatgttttaccagtttacggctacagatgattctgttccaggtaagcaagtgtcagctgtgactctcaaacatttgtctttctctgcagatttcagagtagtagtttgcccggcaacttcagttctcaattgggtcagtttgttcaactatttcttcttgtaagaatgggagggatgacttccaagctctttacatatcagagctaaaaccagaaggtgcactattaatattctgataaatatgatttatgtttttatgtgcatattttacaaattttacccattgtttttacaactaagatcaaaatatgtaatcctttattgatctgcttttttcccatttaacaaaatattgtgaacatttttccatatatacctacttatctgtgctacaaattttaatgattgcttgcattccacatgtggcttgttaagaaaaaatatacagaacgtaaatatggcaaaaagctgagccctttctatgttaaatctggcaaaagccccccataagattgtctataaagataaaatgtattcaacttaccttttactatttaataaagattccagaattagtaaagctaaatgttaacctgtggaattttttctgagatgtaaatattttctttccaaggggaacataactccaaagtttagggtttattgccctttaggatataagctggttttataactgaaccaacattattatactaatattcatttattaaattgttaatgaatactcctcaaatgctctttgagccagtcttatcatcttacagatttcctcattaattaataagtagaataaaatctttaatatgcggtcatgtatttgcatgagattcttaattttacatttctgaaaattacttttttaccatggcttaccaagatttatgcaactgttccttaatttggagggcattaggttttccttatgtttggtattagaaatagtattgtgatgaacaaaatttaaaaaaaatatacaattttttaactttaacttttattttaagtttaggggtacacgtgcaggttagctatataggtaaacttgtgtcatgggagtttgttgtacaggttatttcatcacccaggtattaagcctagtacctattagttatttttcctgatcctctccctccacccaccttccatcctccaataggccccagtgtgtgttgttcccttctatgtgtccatgtgttctcatcatttagctcccacttataagtaagaacatgtggtatttgtttttctgttcctgccttggtttgctaaggataatgacctccagctccatccatgctcctgcaaagaacatgatctcattctttttgtggcttcatagtattccatggaggtgtatgtaccacacaaaatatgtataattttcctcatctctgataggaatcttccttctttaagatagattcctagaagtattatttctgaatcaaaaaagtcttaattttttaaatcatgttgcttaatttttaaaatcagctgcttaattttttaaatcactcactaatgtgagtgcagatagagtgtggactaatggtagaatcctcttgcccttcaagaggatgtactaattaatcctctcaatcacaggggattataataatgccctaacacttaactccaccctcccaacaataaacattttatgtattttaaacatttgaacattttgtagacataatgtctagctgtttgttttacattttttttttttactaaattgattaccactgaggtacatattcttcgtatattctggagtttttgcccacctatttgtatctcttatttgagaattgcagatttattgttcattacccattttcctgttagatacttgtctttgattcattgattcataaaactctttatatatcctccgacatctggtcgcaaaagttcgtcatagtgtgcctattgtttcttaatttcatttatggtatgttttgggcatacagaagtttttatattttatgtagtcaaaattattttctactttcttttcttttgtatttcaaatatttactaatataagattgtcaatactgcattttctaattgtctagtaattccattttctgcattaactctctaatatgtctgcaacttattttggcataacatgcaatgtagatgtatatatataaaatagatatattttttcaaattgtatgtatctatacatctacaatgtacagatacaaattttttcaaactgttaaccaatttcctaagaattgatattaaatatcctttatttcttttctgatatgaaatagtgacttttaaagacacaatattcttatgtataaatgttgtgtctaatatatattctgctctccaaagcatgtccattcttgcaccaatacccactgttttaactacgtagtactttttaacaattgcagtgcaattcttttcttgtatatctaatttttttatcttcttgcctacacatttctctacataaactttaaaatttgacaattttttattttaattgaaattacggtcttaaaattaactgggaacagttggtgacttgggaaatattgaacatttctcttcaggaacataaaatgttccttttattagactcatctttaatattcatcagacacattttttggttgtcttcattaatggttccacatagtttttcttggatttgttactaagtggtttatatttttgttgttttgaaagcctagaatataacaatttttacatattccatagtcatttccaaactaaatgtgttttctttggttacaagtccaagattatatatgtgtgtattaagtcagtcttttgagttctcaaattctctctatcttatttcttttatctacatgacacggctcaaagataatttcacaacaattttaggcctgatatttatagtcatatgtgtctcctcgttgctccaaggcaggtattatatcaggataggtcttaatcgaagctcagaaccctcgttgtactttataatcatctgagtagcttttttaaagtatgaattcctgattgcacatcccagaatgatacaaaaagaacctctgcaagtgagggcctggactttagtatttttaaaaaggtttcacaaatgattctaaggaaccagagtttaaaatcactatcctaaataattatcataataatataaaatttactaaataaatctacagccaatcacatatcacattaacaagcatataaaatgctttctggatgctcaaaatatttgcctactaagccaccatcaaggtagcctgtgtgtctgaaaggaaaacagtgagcttcggaaatctgagttctaattatgaatctctaacaagctctaccttcaacttgaatcgcttttttgttatattcctctcctcgttttcatttgtagtgtcggtgggatgaactaaaggatcactaggagaaactctaagcgcaaccacttaaaaacatttctacgtcactgatatatgaaagcaactcaaaaaacaaacaaaacaaatacaaatagggatcacatgaaggtatgcaagtagtaaaagtcttgcttagcctgacagtgaagtttaatatggagtttcaaactcagatgccttcaggagccaaaaagttaacatcaatttacaaagcagccaggtctcagagatacatatggtccccaacttatgatgattcgactcaggagtttgcaacttaacacagtacaaaagtgatacacattcagtaaattgtactttgtgaacacccatacaaccattctgtttttcactttcagtacagtatttaataaattacatgagatattcaacattttattataaggtaggctttgtgttaggtgattttgcccaattgtaggtaaacgtaagtgtcctgagcatggtgttttgtttgtttgtttgttttgagatggagttttgcccttgctgcccaggccggagtagtgcaatggcacaatctcagctcactgcaacctccacctcccgggttcaagggattctcctgcctcagcctcctgagtagctgggattacaggtgcctgccaccacaccagctaattttttgtatttttagtagagacagggtttcaccacattggccaggctggttgccaactcctgacgtcaggtgatccacctgcctcagcttcccaaagtgctgggattacaggtgtaagccaccgtgcccagccctgagcatgattaaggtaggctaggctcagctgtgatgttcggtatgttaggcatattaaatgcattttttacttaatgatatctccaacttacaatgggtttattgaaacataaccccgttgtacatagaagaagatctgcatggggtttattgtcaacttaagatttatgcaatgtctaaaggtattccaattcaattatgtagaccagtagtctccagagcagggtgcgtttaacccagcagctacaccaaatcacccattgggctgcactaaaataataagttttattaatatttagtatgtggatagacagtaatgaatataaaaatttataaattagggtgcctgtatttaagaaggatactcaaaactttttcactcatttgatacatgattttaatagaatatttgaatgccaatgatatgaatcagttgcttatccttaaagaagttactttaacttccctgaactccaaattcaattgtaaaatgggactaataacaaaactttccttgtatgactatggtgagatttaaatgagaaaatgcatacagctctcaatccatgttagatattattataaccaattagtatccaaattagctctcctatgccctgctgcaaccatttctcttctggccttcctaattcaaacccttctgctatattaagtctgttaacacaattatatatctagatcactgcctaaacgtgtcaccatcctgcttaaaacacacccttgttcatgcacacatgtgcacacctacacatacagatcagtagttggtttgccactgcctatatagagagcaaactcaatagcaaacccagcagtcaagaccattcacaaactggcccttctcaacttttcagactattgtgtcagcactcaccgatacaaactcatggttacaacggcccactggcaccagactctgctttcttcaatgttccaagcattttgtttgtctctttggtgaactcctttcctttgcattcccctccccacctgaccaacaaagtcccactatttatgcttgttggttatttaatattcccacagtatatccagtagtaataggagtagaaaaattagaatgtttttaagatggcttggaagacatcaaaacttgccaattatgacaagccaaatgaggagttgccatgagacttaagctgaggattcaccaagcttaaaactatccaggttgatatgattactgtccagtggaagctacacctggaagcaagagaaagacagggcatgggaaaaagaacaaagcagggaagaggaaatactatttctatcaaaaagaaacaatggagactacttactgcgtaggctagatgtttgatgatctgtaagtcattcagtgattcttagtcttacctcctctgtcacattgaggaagctaaaattgaaaatatatgagattcagattttaatattctgttatactctctacaaagagataaaaagtatacgtttatgttgttgttcacgtttaacctactctgtgcatgtgtatttaatcctgaaatcaaaaggaggatgtttacatcctttatactttggacatagaaactctctaaactgacctaaataaaacaagtgccatgtaaatatctgagtaacagaaagcaattatcctctcacggcgaagagagaaccacaataaatagatattccagatgggaagttatcctgactcaatcttcacctcttctttattacccaggaggactaaggttgccattccaattagattcctttattgtaaagatatacaagtgtttttttggtttacatagtttgtgtgttactccttaagaatcatttgaatattatatttctataaactaaattatttgaaataaaccagaagctctcactctgcaaagaaaacttgtgatggatttctttgtgaaataaggaaacttttggtatgatagatactcaggggtgtctgaatatcgggctttttaaaagtttaaaacatctagaaatgcatgtataaatataaatgataacataaattgtacatataaatataaatgtatataaggcagaacagttgaaatgaaagtggtcatctaaatctgcatgtactgtccaatatggtagccactagccacacgtggctattgagacttgaaatatggctggcccaaactgagatggattattaagtgaaacacgtacacggtatcttgaaaacttaatactaagaaaggtaaaataccttattaatagttttatattaattatatcttgaaataagatttttatatattggattaataaaatatattattaaaattaatttcactgttttattatttaatgtggctactagaaaaattaaaatgacatatatggcttacattgcatttttatggacaatgataacctaaaggccttcaatatggagttctacctagagaaatgcatgcacgaaacctctacacctgtattcatcacagatacagaaagacaggaattatggattgtgagcaacttattttcctatttaagtagaacttgttttttctattccaaactgaacatctaatttggaatggattcccctgatgacatttaccacaaaattttatatgtagataagataaaaatattgtcagtaatgttgcaagcctttcttcattaaaagattttctagctgcacgcaacatgagctttatatagcctgcttagaaaagaaagtacttgagtagcagaatgtacaacacaaacaaacaaaatgcaaatattggaagcacagaagtgacttcagttatcaggcaatgctttgctgcatctgaagtcaaagatacgcatgctactttaattagtgattgaactaaaagtaggagttttaatctggtttaaagagtgatcttctttcattaaaaaataaaaagacaaaaaacaacttttccttgaaaaggtctgagcctattgcttaaaaaatgatctggcttgacttagacatataaatttttcaaggacattaatattctttggtataacacttttgaagtgggacagctatactaatacatggggctaaaatttttaaatccccatgagacttttctcaaaaaggtttagagctgtaactaattagaactaaaacatgcctatggagattcaggttctcaaaaaaactgtcctgatagtgaaagcattttggaagacaaaactttgtttttctctttgcctgttgtttcctgtaatgactggtaataaaacagaaggaaacacattttagccctaagacacatctggaaataatatttcaaataatcgtcctatgggtctaccagaatggattttaagcaccctggtgacctacttcccttacttctggaaactctctagatgaaatcagaagattattgacagtactgtgatgttcttggggcccgaggaaaataaatatgcattcctctcttttaaaactcacccatgttcatagcaatactattcacaatagtcaagaggcagaagcagcccacgtgtccaccaatggataaatggataaattaaatgtggtgtgtacctgcaaaaacattattcagccttaaaaaaatggaaattgtgacgcatgctacaacttacatcaaccttgaagacattatgctaagtaaaataagccaattacaaaaagacaaatactatatgattccacttgtatgaagtatcaagactagtcaaactaatagaaaaaggaagcagaaaggtggttgccagggaatgaggagacaggggaatggggagttactgtttaatggatgtaaagtttcagttttgcaagatggaaaagttctgaagattggttgcataacaatgtgaatatacttaacactactgaaccatatgatttgaaatggttaaaatggccaatttcatgttatgtgtttttgactacaattttacaattttttaaataaaaaaaacttcagcagtagtatcttctttctttaattcgactatttgactgattgggtcaagaatacttacgctgttcagaagacagcaaaaatccacttgtgcaaaaaagttcatagggtattcagtgttgcaactcaagggccttagagacatctagccactgtcgtacatgcaggagtgaggcgcagggaggcaaagtggctttaacctaagaccatgtagttaatttgcagttcaaccagtgcaaaaaggtaaattccttcacatcacaatacactgacttcttacatatctcagtgaaccagtaaattctcttgaaaaacgtattggtatgaaacttttttaaaaaatgaaaaaacaacttatgtgttaatcattgctgaggtcttattttcatcaattgattgcttgttccaaagttctttagcaaatgtgaacagaatgaaatgtagaaatgaggtatcattagtatacgacttctctgaatgtctagatttcagcaattcattttttctggttttggtctttaacactaatatgcatggctactgaatcatttgttcagaaagctgcaaaattgtgagaagggctatggtgggattcatgtgaattgcatgtctaaaaggacagttttcttaagatgtgtgattaaccataattacttatgcagaatacctttctaaagagattgaggcaaaatacaaagaaatcaataatgggagaaagcattcactattagagcttcctctttagttttcagaatatttagatgatgccttctcattctaaaacttctaatccatctctactgcattctgcacccagccttccagaaagccaggcttgcctagccactgacaaacataactctttcatacttccttctctttcattgagaagaacaacaaaaattcccaatgttcacaagcaatgttgaccacaatgctcacattctctttctattccagatgagttgtgacttataagaatatgctcaaagtggcttttgcttttaattcggtcagtctcttgagtgcaacatctcagtaatattattattgttattgctcaaaggtatagttacaactgtttataactgctgctccccacctatcaatcaaaagctacctgagtgtgctacagtgaactcagaggagggcaccatggaatatttcaaatcattgaggggacactgcagtacttggttgcaggaaacgtggatgccacacaaactactagctccagggagttggtagtttcaacattaactaacactacatttactagatgacaccatatttttgtgtagctgggtattcagaggttgttgtaatataaatcaagtactatgcaaaatttaatgtagaccaagaaatgagggtagcattgcctagtttgagtccaaggtttgagaagttatgcagtatgcaacagatatgcatatcctattagtaaatagctgtggttatttaataataaaataacaatagtatttttttctatatgtatgtattattttttcacatggctactaaagttgttagaatgtaaatatacattgacttgtttggacgtaagcatttaatagacaattgttaggtatatattttgccccggggtcaccatgaactgaaaaagtttgggaacttctgctctaaaaggtcctagcattgatattgtggtaatttgaaatgtttgagtctctgcaaataacttctatggaatacctgcttgttttataccagattattgatgccccaacatatcttattatttaaaaagttggacaacagcagggaatgaaaatctacttagaaataccagtgctaaatgattaaatggcctccaacctaaacttgaatagattccttgtttacatgatggttgtaaagcttgttaaagaattgatcccttttttgaagccatatactgaagagctcttattctattttaaagcaaagtacaagaaccctctagccttagcattcctgaccttgccaaaatgcatcagcaagtgaacatcaatggtgccccccacaatcatctctcagtgaggtgtgtttccaagcaagcaccttcaggtaaaaattttcattactttacacgttttcttggaaaccaggtttccaggatcccaagtatgattgcaaggtcatgatgaaacccatgggaagaggtcatgtaccggttttatgcatcactatcaaagccaaaggaagtgattttggactttctggtgtaatattattaatcagtttcttgattatgtaacacattcaaatgcttgaaatgcccctaatttgatttaaaatttcccctattacaatcacagttctgtatcagttggttgcaatacatgttctataggtagtgatcaattttgatcatgtttatcttttgactttctaatctaactttactcaccttgtcttttgctaaaagtgacctcaaatatattgagaaaaagtagagtaataaattctggtaaaaaaattatggtgaagcttatttggactttcttgaagtaatttagcaattttgccaacaacattaatttcacgtcattcaacatgttcctacatgttcagtaatagtatctagtagctgaactatgggacaacttttggagacctgtcttaattatctccatcaacaattagctaatgatcaacagacaaataagaatgtatcctagatgttcctttgcctgtagctagtcttcattcattatagcctaagaggttttccttgttaaaagccatgtggctggaacagatggtctgcatgtgttatctccatctttatcagcattgaggacatttctgttggggtgacttgacagtagcagagtcttcaggagtctttactctacagccatctggcattgagttttcagctagaacccctgaggtttcatgactatgtcaacatgaaggaagtaataagtctctggccactgcagttgctgaagtgagtgaccagaaacttctatgcctactaatgtaatgcagagataatatttttttttttttgagacagagtcttgctttgttacccaggatggaatgcagtggcatgatcttgactcactgcaatttccacctccggattcaaccaattctcctgtctcagcctcctgggtagctgggattacaggtgcatgccaccatgcccagctaatttttgtatttttagtagagacgaggtttcaccatattggtcaggctggtctcaaactcctgacctcgggtgatccacctgcctcagccttccaaagtgggattacaggcgtgagccagagataatcttgaaattggtgctgtctccttaatagtcaaaatattataagattaaactgagagcttgttttatgtcaatagttaacatctaaacccaaaagacctaagtgcaaatgtagcccttgaacttcatagcagtgaaagcttgagtaaactacaaataccctcgacctcagtttcattgcatgtaaaataggaataatataaacacttaaatcacagaatgattgagagactaaattcaaaagtgatattcaaatgagttataattacctgaggggaaaagtaagtaatctgtttgattttagcattttattgtgtttaagtttctgttagtatttgaatgattgtgagttactagtataatggtaacagctcaagaacatttttgcagtagtaaaatcttctgtggaaggcagacttgtttgctacttccttaacgcaacaggcaagtatgcatttccttaaaagtaccttggtaatatggaacaaaaagttactttttagagtacctcaaatacttcatacttctcatgaagctttcagtcatgacagtgctatcataacttaaccttcttttcttctaacccaaaaaatttgacttctggaaaaatctcttctcaatttaaattccaatttttacttctatctttttctctcaaaagctgggagattttatttttttttagctttgtgtttccttagttgctcttaatttggtttcatgcgtaaaacattctgaaaatcactttcttgatgaacattagtaaacataaacaaagagggaaacatcctgaatactcaaaatttcctatttccactgccttcatcttagacacaccacccagggacagatagttgccttatacaatttcggtagaaaatgtccaatccttattattttaattgactcaagattgactcagtctgaggcctgctttggatgccacagcaaaccattccgttcctgtcaggatctggaagaaagggggtttttcctgcctgtcggttaatccaaatcacttgaattacattcttctcttattgctgactctgcctggcagatgcaaagacattgataaggactgatttcctgcaattgaatgaaatgaagatgcttctgtactcttaacatcagcttgggcccactttagcttttgatttagttttgaggaatggtccctcttttaccatcactgtgtcggagtttattttattttaaaatttctatcatgaagaatttcgtaatagcacttttattggccaaatactaaataattatttaagacaagccttacatacggaaaacaaggatgtgtagggtttggggcttttcttcccccccggatgcccaagcagtttgagatactgctcatgtgaccaacttgtaccagtttgcttgggactatctctgttttagcaccgaaagaccagcaacccaagaaacccctcagtcgtgggcaaactgggagagttggtcatcctaacaccactgaacagtgcaattgatttgggtgatattctcctttgagatcgtaactttccctgaaactgtttctacacaaagctcctttcatagacatgagctctgtattctgtaagttcagcttgtctaatagtgacttgagggccgggcgtagtggctcacgcctgtaatcccagcactttgggaggccgagacgggcggctcatgaggtcaggagatagagaccatcctggttaacacggtgaaaccccgtctctactaaaaatacaaacaattagctgggcgtggtggcaggagcctgtagtcccagctacgcgggaggctgaggcaggagaatggtgtgaacccgggaggcggagcttgcagtgacccaagatcgcgccactgcactccagcctgggcgacagagcgagactccgtctcaaaaagaagaaaaagaaagaaaaaaaagaatagtgacttgaggtcagagaactcattttatagatgaagtgcccccttcatttacaaaatgctctcttttttctaattctaagcatcctattttcatctctttccttgttgtattcatttataagctttgcttgaaatctttctaacttaagaagttttaacttaagaagtcagttcaaagaggaataataaataatgctatttaaaataataactacggatttctctcatagtggagttatggatgattttattttcttcttgcctaaatcacactgtgtgtgtatttttaaccaaaatatctcctaaaatccagttataattagattttaaataatttaaattaaattgaatgtataatggtcaccaaaatccatctatagaacctcatcatttctggttagcactgcccatgggaacacacacaggaaattacctagatcttctgtccagaaagacatcatgccagaaaaaaaaaaagacactggtcagggtccaagaaataaagtagaaaagttggagaattgtgaagcaagtcaaccaagtgacaagctgccaggatcagttgaagaatgaatgagattcaggaataagatgaccagaggcaaagtagatttttgatgaataaaagagaatatcaggaaaataagtatcagaatgttttattggaccagggaaattttcattcatttatttgttcatttattcactgaaaaatatttagtgcatgctgtctatgtgccagcatttatattattaaccaaaggtataagaaaatcattgccctttgggaacctatattctagtgtggtagtgacaatatctaccaatattaatataataagtatatagtattttttagagtggaaagtgttctgagtaaaaacagagtaggcttagaggcatcgagaatatagatagggtgagtagaagaaggattgtaatattaaaatgcagagcagtgaaagattcaagtagtaaaagttcttagaagggaccaacattacctgtagaaaacagtgaatgaaaacaatgactttgtaaaaatgtgccgggattcagaacgctgtttgacatctgaactgcgagacttggtagtatgaaaaagggacaatgtgttaatgtcaactggatcccgcccagtttgggcctctttaccttcaaatttgtctgttcctatttgcctttactacagatgagatgagtgaggcagaggtgctaatagtttctaaagtattatggttgggaactacagaaaagttattttgtgtgggccaccattatccagcaaatatttcctattgtgatcgggggtgagatacaacccattaatgcttcctagtggtgcaaatagataagacagagttttctattggtatccttttctccgataccaaatgctgctgaaaaatatttttagtattttaactaatgattgactttattgtgtatgtgactacatttatgtgttatagaagtgaatgatagactttaaaagattttgaactacgtggataaatgaagccattaagccagtcataacaggaaagccctttggggaggaaatgttatattgccagtaacccaacatcctgtaatgtacaatatttaaagtttccttttttaaaattcactctttgactgagtaaaactcagttctgcaagaagtgcagaaaagataagtgtcaatggatgaatgaatcaatgaaaacagaggtgaatgtaataataactacaaatcctcatgcactatgaaaacttagtcatatatctactgttgctttttattgagaaaactaagtctcccagaggagaaacattatataaattgtgctgtttaaaaattgctgtgttcattatgaggagcttaattatggtcatcacttaccaaaaagaaaatcaaagtcttgtcgaagaattcataataatgaatgtttctcattaaaaattaatgaacaaatggcttattctgaaggtatggaggctgtgggaatatcataattttcctttcttgtttaaaagaattaatattcatgcaaattagatccaaattactacagtttaggtggttacttagtgctatagaatatagatttgtttttaccatggaagccaattatatttgtcaacacaggctagattatgttatgataaacaaaccttgaaatctcagtggtttaataaaacaaagctttcttgctcatgcaaaaagcagtgtaagacagaatgccccttcaaagcagctctcctctatatggggactccacaagctgtgctgctttcattttataccttggccatttcaactttcaggatcactatggaacaaagagaggtagaaggttgtgcatcagctcttgaatgcttcagcctgaagtaacacacatcacttctgttcgcagcccagtgccacctggtttcaacgaacatagctgggatatgtgagcgagcagatggatattcagtgaataataatgtgcctacaacagcaggatcaaatccaaaagaaaagtattggtgaaagacatataacctactaggtaggtactgctaggattgtttgcataacattggaagaaagaaaagagaatacttcaacacacaaccaaaatcagctctgtgccttgaaacaataaagtaattcacgaatccatcaattagtaatataattgccactggatccatgtgactgtaaaggtactgcaataattgttcacagccagagagggatcaaaccatcagtgcaaaagacatttctctgaggaaatccatctctctaaggaagagggaaggagttggttccttgagtgtggggctataaatatcagaggcaaagacccattcttcagatggatgtactattctgttaaagtctgaggaatgctctctcttccccagattaataaggaagagagtgccttgactagaaagaaaaagctctccattctgaagtcttgtttcagaatgcacacaatttaacttcactttcttcatccctaggctaaaatagcaaataaatgaaggactgggttaattaaatgcatattttaacagcatttatctggcattgattggctgaggccacttacagtaaagcgtggaatagttaatacaagtgttggccgtctcctaaaggaggtgacctcaaggttacataattgtagcagtaatttatttagcttaaaatgaatgtgttctcaattaggttggtaggcattataataacacaagagggatttatatttgcttatgtctaggctatgagggtttcgttattggatttgtttgcctatatttagtcctccaattcatgattcctcccagttaagagcaggaagtttgttcatgctgattaataggggcccagtcctaatgttgcagatagttacctaatcccgccagaggcagcaagggagcagacacatagcacagatgccagaagacaggattatctggtgggttctgctcatgggaactgttcctcccccaatacagatccatcagtgccttaaatttgccccataaattggtactttatatgaaaatattctaccaatggggcacttctgagtttatcacaggatttatcatgctggaattaatattttttatctatatcgcaattcttttaatctagtggtcaaaaaaatggtaattcatgatgttctttggttgaatttgaactcctgacttcttttagataggagaactaagatgcctttaccattccttggtcagacgtagtaaagacatttttaaaaataaacatgtgaatgggtgattctttacccaccctatctacctggacctctgtgaatatttgcttatttgcacacatgctaagtgtgcaattagtcattctgtatgaacaaatgtaattattattattattttcatttatttacaagcttgtcagagatggagagcattagtcaatcacaagggccaacagagcctgcactggaagtccagggctcagccagtagatgtctctgttagactcactacagtgaaatgttcatgcccccttgggaggatgccagcccttttgggctcagtgtagcctgtttgctacatctatatttttgtccaaaattttaaaactataaaaagaaaatctggcactagttgtaccatacttgtgttccagtttatactgtcaacttcagagcctggcttctatttagatcacccagtgagattcaagggctcactcattctcctgatggagacagggttactctcccctttacctccccctgcataaaatataaccctatgtgcaacctcccttctccagggaaactgaagctaacactcacctcactgtctgctgagaggccatctgctttgctatgcaggctttcaccacaacaaatttatggtctttgggaataatagggagcttttttgtgtgtgtgatctcttatgcaacagattcaagtaagtgatcaaatctgtgaaatgtgctggagatgaaaactgtcaccagagcaagaaggaaggtgtatagatgtgttctcgaaagcaaagagtactcgctaccaactcatttttgtttgatgtacttcagtggctttgcaacccacagaagcagtttcttcaggtatctgtcagaagaggatatgaggcctttatatttaaaggctacataaccaagtcacaattacaaatcttctaatcttaggaaacactgtccagtggaaggaaaattggcccagacattaggagacctgtgttctactgccaattccttctttcattctctgtgtgattttgagttacttaacttctatgatcctgtttagttctctgtgataggagataatgagacttacttctcagattgtcctgaggcttaaatatcataatgtatatataatcctcctgaatcataataagttactatttattccttttctcctccttcttcttttctcattgatcaaatcaacaggaaggctaagatgcattttttaaaaaaattgataagggacttaagtagctaaaataaagctttgtgattattaaagcatatcagagatttttatttactgggctctataacaccctcttcattcctttgaccacaggacacgtgttcagagtcagaagaaacaatgcaggtcctattctgtcagattgttcccatattctttggtttgaaagctattgattaagctatgttttcttagctatcacgttgtgagagacgaagaaggacatttgcaccaataaatataaactataagaagcaaactatggataacttctctaagagccatctttcaccattggtttgtgtgtgggtttatagagaatctgctttcctcttggtcctctgctgatgggaagaagtctctcaggttcctactgtcagggcatcactcaatagcctggggagaacatctctagaagaacatctcaatgctaactgataaattgcatgctagataggagttgaacaatgagaatacatggacacggggagggaatcatcacacaccggggcctttccggggggtggggggataaggggagggagagcattaggacaaatacctaatgcatgcagggcttaaagcctagatgacgggttgataggtgcagcaaaccaccatggcacatgtatacctatgtaaaaaacctgcacattctgcacatgtatcccagaacttaaagtaaaattaaaaaataataatacaataaaataactttaaagagaatccaaatgagggaattctgcatgctgaaaataatgacaggagtgagtgggttggaggatattcaaaaaagaaactaatattgataaaaggaaaaaaagctggacaataaatggaggaagagaggatgacattttaggtactgagaataagaagagcaaaggaagacagactttctggaggaagtggaaaagttctcctctgcttcactgaaagagagtatactgaagttttgagtgtattcacaccaaacagatgtgaagagaaaatgcaaatcctttacttcctaaagctgctatggccatcatgagtagcaaggggagactactcctgtttaaaacccagtgcaatccaatatttctctaggtttgactcaagcaccttgaggttgctggtcagtcttacagaatgtgcttccttttcttcattctctcttttactggcctctgatgcagggtacctttcctctaccagaggacttttgattttaatccagcctcccctttctcttaaaggacaaaccaaacttgtcagtctgtccaataaagctctgaagatagagaggcagcaaacagatatgaccctagccgtctactgcctcagtttcctgttgccctttctcaaatcactaggctgggaaaaggtcttgcctgaggtgctcacattttttttcctttacaaaaggacatccatactccctgttttcacaaaaatatatgtgtccataaaatgtggtgggagaaaactgacttacccatcaaaggatataaattgagagactgttcaaaaatattatatatagttcaaagccatgcaaataaaacagagttcttatatgtgtgacttcgaaacactttaaaaaattcctttttcagtactgcaagggccaaggtcatgtttgcattttgttcatatttcaaacaatcagcctatagtcaggatacttcaattttcattgttttaaggttttggctccagaacaatagacgggaatgtgtccggagttgattccttcccatgggtttgtggtcttgctgacttcaagaatggagccacggaccttcagggtgagtgttacagctcttaaagatggcaaggacccaaagagtgagcagcagcaagatttattgtgaagagcgaaagaacacagcgtccacaacgtggaaggggacctgagcggttcctgctgctggctgaggtggccagcttttattctgttatttgtccccgcccatgtccggctgattggtccattttacagagtgctgattggtccattttacagggtgctgattcgtccattttacaaacctctagctagctgcagagcactgattggcgcatttttacagagcactgattggtgcattttacaaacctcttgtaagacagaaaagttctccaggtccccactcgacccaggaagtccagctggcttcacctctcaggaacaggctcatattctaacgaaacatatatgtctcttcagcagtgatgaaattgccatataaaatgcacacctgacaattagaatagcaccaaacatttgaatccatttgatgctaaggctttttctcaatatccaatttgtaatgcttatgagtcaggtcaaatggaaacattgcacaaagatcatgactataaccacagccacttggaaattaataactttttttaaaaaaagaaatttctggaaaggaaaacctttagaaaagatgtggctctgaagcatttatcctctaagtctgtaattgccctgatcaatggagtttagctccatgaaagtgaaggctttccccagaagatgatggagaccggccttgtcctgcagctgtttcataaaggcctagaataaatttcaatttcaataacttcattggcatgacaggggagacttgttttgtgaaggtcaatataactgaagccctgtctaagaattggtctctccctgtccatatttggactatgtaacagacagctaaggccgcagctggcacttttttccctaccttcttaccctctaccctttctaatttttctacaaggagtgtgtttgggaaaggtaagcgatttcagaaaatatgctacttttaaatgtctccagttgttggacttttgccaaatgttgtggtcattgagcttgaaactgataaatctgcagagagcttgtgaattgaccttttggaaaaacaagctaggatatctgtaaactgtttcttttctggcacggcaagtgggaatatttctacatttgtgaccactgcccatttgaagaccttaaatgaatggtcaagtcaggattggaacctgctatggtgaaaaaaaaaaggtcaagaaatatatatacaccggccaggtgcagtggctcacaccttaatcctaaccctttgggaggttgaggcaggcagattgcttgagcccagaggtcaagaccagcctggataacatggcgaaaccctgtctctacaaaaaaatagaaaaaagccaacataataggacacacttgtggtcccagctattcggcaagcagaagtggaaggatcacttgagcccgggaggtggaggttacagtgagccaagatcacaccactgcactccagcttgggtgacaaagccataccctgtctcaaaaaaaaaaatatatatatatatatgtgtgtgtatatatatgtatgtgtgtgtgtgtatatatatatactgctcatctacagtgtgttcatgaaagtctggaaacataggcgaattacatataatgccatcaaagacatctccaatctgtaagacgaataaataatatgaaataatattaatatatccttgctaatgtcagcaattcttataatattaataatattaacatagataatatcattttcacctatgtttacggactttctgggcaccccgcacaatatgaccccaaatgtaatttttaacatgtgtatatatgttatatatttaaaacaccagaaaaatatacagcaaaatttcaacagtggttttctctgtgaggtgaacttatgtagcattttaattttcttctttacttatctgatttttccagtgtttctaatatcagcatgtgttacttttgtattgagaaaaaattaaaaataaaaaacaacagaatgcaacagaataaattgtgtgtccacaccattactgtacaatgcactggtaggtaaactatacaatagacctgtttagatacttggaataatggttgtgagacccacactttgaagatacatggcatgttttaagaatttagagaggaaagaagcgacaggaaaagacgagtagcaagaaatatcagaaggtccaaatgtctgtctcctaaggcatttataagaacctctgtgcaatcattttctcttcatgggaaaggaaagaatgtgatagagtggtttcttcatctttgatttcttctgttttctttgactatatcaccaaaagccttctggaaacacacttaaagatccatatatatttaaattaaatagaatatgctcttgagacattaccagaaagagtcacatatagataaatcataggcttgtgctaggcatttttaaatataaaagtggttttaatgtgtgtgataaaataacagaaacaaactattggttaggtttatgaggattaacagaagacaatatgcttgtgctagtctgcaaccagttccaggagagttattgtgtaatgcgaatgtgtctatgtagaattattactataatctacagcagtggttggacccaagttcccccacaataacacagattgaattatgaaatctaataactttggagagagctttgtcctgaaactgaatgtgtccggtggtttttatgtctctcagacctcttatagattgttttctctgccacaatttctatagccttataaaacttctcatatgtttaacctgtatgcacgaaacccatgagatgaaagtccaatactgccgaggtagcaattgctttccctgtaaggaagaccacatgttcccataaactttaaaggcagagcataattttacttttctctcatggaatatttctaatacttaagtgtatacaacatgacccaagcatatttgaggtatattcaaaagctgtccaaggacaaaagtgaaaatattcaggaatgcaaacagttctgtgtattcatgaagggctggccattccatcacagaacactgactttatgtctcattggcatatgtttctcttgcttttgagaaaatgacttgtaggttattgtaaggaaagagtttctattctgtagatgttgccactagcagatgaagacctaagccctccccaaccatcttccccaaaataactactgtaccacagcagcaccacaccgtcctgtagtcctgtactgtacaagacaccacactgtcttcaccaaaccacgtctgaatagaagaactccacagagcagtttgattgagatgaccatgttgcttgccatttcggtacatttttaataaaaattctttcaccttgatcaatccatgctcttcaatttagaactgagacacattatgatacagtattaacacttgaaatcatcttataactgcttgctttcatatttggcatcactattgtaccaccttagaaactgcttctattgacctttagattaaaaatatgttgaattatcatgattgacacttttaaaatgactcattcttgccaaacacagcataacaactttttaacattcccttttctttacaactgccacaactttcattatgtgaaatatggctgtattatacaccacctctcattgcctaacatgattttttttcagagttcaggaagatttacatttggagctaaatgtttcagtgattgctctgttgggtttcattataccagtgtagttaatcaaagcaagtctggccttgctaccatgattcactgtatggttttttgaacttaatcatttacacagaatgaatatacacattatcaccagggctggatttctttaacagcctgcatgacacggtactgtaatgcctttgtcaactgctagttttcccagggactctgcagtttgctgggggttttgataagacatttcactgatgggctttcggttagaaaaaggcaagtgggaaacccctaggtggagctgcagagagcagacgaaaggcccactgacttgtgtatcaccaagtggggctaacggggaatcctttcatttgtacagagtgtttcttttcatagtgtgtgtggtcttcacaatcataattaacaagtaacttttcttcactctcattcctaatcccatcataaattattggctgttggcatctgggcagggtttggcagaccttgaattttaagtcagcctgagagaattacagggattgttgtctctaaactgaagaagctaattgtataagcattaacacatgtgaaccaggcctaccaagcctaatttctgagcagccagaaacgatgctcctatggacaccagattccttagcaaaaagcagacttgcatttgaccagaaccagtggagagcctgttccaggcccatggaatccaatgtcaatttttcaggaattctatgagctggttcttaaacgccaccattatttaaaatcaaaatatataaccttttaattaaataaattatatttttaaaaagatggtaaatactcaaaactcatcacttcctaaatattctaccccgtcatgcaattttttacacccttggttattcgtgtctatcatatctggatgggggaaatgctatggaatttcacaactctgcattcagtgttgtcatgttggtagactgaaatcagccacaatgggagtatttgtatcatggaaataacaaatgctacaaaccaaggcttcatttgttgctttgcctctgccttgtgtgtaagggaagtactatttaattttacctaccagaacactaagtctcagaaaagttcagtaaatgattttggccctaggattccactgcagggttttctgactttgcaaatccattatcttaagtcttctgttctatacctccctttagcggggttttcctgccactgtactatatacactcataaaaactctcagtggcattaactgctgtttggttggtgtattcattgtatgtcttgggtaaggtataacaagtatgtttaaattgcatatgcgttttttttccaaagaaccagttatacatttaccaacatttcattatccagggttcaagccttgattgaaacaaatctacccccagaacatactgaaaagtactttctggaaataaatatatttctgttcattaaaaaatccaattactagaatttacaagttattaaacgtctcattgcttttcttcaaccactctttcagactcggcatcactacccctaactttgctttccggcatttctcaaaatgttcccatttggtttcaacatttaagcaacatgaaggctatggaatcagaaatgtgaaaaggaggcagttatacagacatgcaaaaatgcaccagcccgagtgcacaggcttaagggtatgtgcacttacccttttttgatttgaaagaatcaggtattggactacctgagcctgtcttctttgcatgccattctgatttgctttccatggagaaaacgacccgtctatgggaaactggggtaatttttcaatcaaatactgcattgctgatataggatgaaggaaatgggtggcatggttgctgagagacagactgcaagtctcataaaattatattgggcctacccacttctgtttcagatttccgtagcattctttgtgaggatagtcacaaaagaagtactaagttgctgtgtgtgtgtgtgtgtgtgtgtgtgtgtgtgtgtgtgtgtgtgtgtttatcttaccagctttgtctgatatttaaattttgttcgggtgaaagaataaaaagtacacatgctctatgagtggaacctctctaatggaatattttatccccagccccatatgcaaagctctttaaatggtgattcagaaatctgacctgacacatttcagtctttctgttcatcattggtaccatacgcagcaagaattaccttcagctttactgctgaccctggaagtcactgtactctcacgactttatctacaagggcatgaagattgtttcttcaaaactcttagtcacggcaaatactttccacgtgtgtactgccatcaacattgttgcctgtttggtagcttttgatggaatgaaactgacaagtttctgcctcacacctgacttgagaaaggcccttagatacttacaatggaaattgtttggagtgttgcagttagatacaaatcatgctctaactttccaagaagctttgttacaacatgcaaaacaaacaaaagaaaggtagcaaaactcttcaagcagttaaaattgttacgcaaaagcaaaagcaagtacagagggtaatagaattcattgaactgtaaaacctaaaaacaaaagaactgaattcagctaatcacaaattttgtcaattgttgattttttgtttttattctctcttactaaaaatgcactacagcaggcgtttttccttatacatgtatacatttcctcctcagttggactaagaataaagtattgtgcaaacagtaggtgcatgaaaattctagtccactaactgactttaaaagctgtgggattctacaaattgacccattaagcagctgttcccacctttgtcctatgaacactaaaatgcacggttagacctcaaattggtttggtagtgacaatcttgtctggtgttagatccaggattccaaaattctagccacataacaggaagctaggaacataggggcagagatgcctgaagatttgaccttccatgctattttataaaggaacgtttatagcttgtttccttgaggttgctggggggaaaaaaagcagtgattgtgtgctgtaaacctttaggagaaaacaaacttaacagtatgctttggtgtaattcaatttagttgaatgagcaatttccattttggagtttagctttcagctgacatgttctgtgactttggccaagtcactttaattcatccactgtcgtatctatgaaaagggggaaataatgcttcactggaaattttccctagagttccagaagatgagaattctggccttgctatctataagcgctcagaagacttaagctgggaggttcttgtgcattcctggcataatggcagcagggaaaaaagtcattctgaagagaggcacagctgcagagagaagctttctcagcacaaagcaagagtctggcctcttgagtctctgaaacactcaaattcactgaacgcagacgacgaggaggaggactatatatacttacatattgatctgcatgctggggtttcaaatgtgattcattatgtaccatttcctttaccctaatccatctgctaaggttttcttctcctgtgcagaaggaatttgaaaaagaaatgtgactttaactgagaagagagtaacagcatgacatagttagcaccacctgcactaagaaagattcaagatggtatttgtcaaatattggaagatgtgtgtctgctagctgagggataacgggatgttttcagagactgttttaaagttctatggccaagaaaaaagaagctgcatttgcttctcataatagtggttatcatttctcttgtgaaatgtttatctactgatgatctcactatggcttcctttggattgtcttcttgttttattttctctcactagaaaaagcaaacatcttggttcctgtctctttctattataagtactaagcatgtggaaagttaaaacaaaggctgcacatttccaaggaactggataagtacagtcaagtggatcctaatcgaataccacagtgtgggcatttggtaccacatgcttgttgatttggaaagaagtgggaagaagagatggataaagatgagaaggaggcagagtaaagagaaaagaaaattaagtaaacactgaagagcatagccccttagatgggagagaataaaacactactcagctctgtttatagcctgtcgactatgctttatgtatacataattcctaaatttcgtatgttaaaatcagctaatcttcaatcaggaataaggaaaatcaatgtatcctacctatatgggtatttaagtttttagtctactgatttgtttattatccacacatattgaaatgtattgacatcacaaaattgtattagatacagagtctgctctatagctaaggttggagtgcagtggctcaatcatagttcactgcagcctcaaactcccaagctaaagcgatcttcctgcctcatctccagagtaaccaggacaacaggtgcatgccatcacaccctgataatttattttattttattttattttatttatttatttatttggtagagacaaactcttgctacgttgcctatggtggtctcaaactcctggtctcaagtgatcctcctgccttggcctcccaaagcactgtgattgcaagcatgagccactgtgcccagccccaaggtatttattacagttttatttttttcttttattcctgagacaaaagtaaaataaaataataaaattatgttactaaaaatttggaaaatagagaaaatgagaacaaaatgtgttcataacataacccatgatgaccatacaactgttgatgttggcctttcacctttttgttccttctctttttacctcgcatttttacataactgcaattattcaaatatatatatatatatacaaattttctgttttacccattctccataagattatatttggatcattcttatgtcattatatgtttcaagaataaaatttaatgactgcatattatttctgagtggattataatttaagtaaccgggcactaaatccaaaaaatattaatatacattacttccaaaaccggagtccaaaagattggaatacacctacctggaaaaagttaatgatgttactttataacaactcctctatactattatgtactgtgaagctccaggagagaagctttcttagtgtgttcttttctcaaacttaattaaacatggaaccattttcaccatgacattatacaacatagtgctcaccacagcacactttggaaaacaatgatatgaccatttcctattgtttaatagctaggttataagaaatttttcactataataaataataaagaatttaacatcatatacaaaaagacttttctatttagaattatattctgggaatcatttctcagaagttaaaaaaaagtgaaaatgtttgtatattattaaagtctttgatacatatcaccaaatttgcttccttccttcaacatccttctggcaaatatcatttccaaatattaagtaaggtctttgatgcatatcaccaaatttgcttccttccttcaacatccttctggcaaatatcatttccaaaagtgaatacggtattatggacaatcactactgctcttggatttgagtatgaatgagaaacaaaccaaggtacgatcagcaatgtatttccacactatactaggcacacacactgctggtctccagatgtatacgccctgtaagatttatggactttatgagtttaaaagtaaactacatacatctgactattgtatactcagattataggctaagattagtttttacaaatcataaagaggctgaagattgtggtagtgtgtttttgagatacctagaaaggagctgacacatggtgtatgctcagtaaatgtttactgcataaaggaatgattacattcatgaatgcatacccacgaaatgtttccttttgatcagttatcttaagatagcgcccctttcacccattacctcctcaccatggagcacttagccaatgcttaaaaccacagatgatccaggctcaccatggaacttcaatatggctgactatggtcagccatattcattgttgagacatttgaaaacgcttattcaaggcatgatgggagcagtgggccttgggaactacccgccccttgctacctatatgacctctctggcaaatcttagacctctctgggattccattacttcataaagaaaataatgatgataagccccttcttgggtgcctagaagctcaaagagatataaaagcacttcgaaaagttaatatctcactgaaaatataacatattattatttttaccaactccacagtactcatcctaaacagtggggcagagaatggaatggagcattaggggtttgtggattaaagagaaaaggcctgaagataacaccgatgtttttcctggaagaacaagtcttccccttaccgaggtttccagattctttagaagttgccagaagcagcagacttcagagtaatttgctgatttaaaatatacatattattgacaacggggactacatagtatttcttttatcctagactttttttttattaggttttaatcaacatgaccttgtgaaatactttgaaccctgattaaaaagcaacataaataaaggtgagggagaaatgaaagcagtgcagcagacctaaataataaattaatgaaagcacagtgataattttatgtaattatagtagacacttaacattcataaggggtacagacctttggaatccccaaatttgtgacttcagaaataatagtataagcattcctattgagaggcatacatttcttgggcacaacgttgtaacaatttaactacagtattattttaaactttgaagtttagatcttgctcaagtaatgattttggcagtgaccagcaaatttttctgaacagtttcatggatctaatttccttgtttccacatcaagtttatgatggtcttatctatattatttacttaagtcactgccaaatagatattatgctcatttattttcccaaaactcatagttactgtccaagagcccattattcttttgacttatttttttttatttttatttttttgagatggagtctcgcactgtctcctggcctggaatgcaatggcccgatcttggctcactgcaacttctgcctcctgggttcaagtgattctcctgcctcagcctcctgagtagctggaattacaggcgcacaccaccatgcccagataattatttgtatttttagtagagacagggtttcactatgttggccaggctggtcttgaactcctgacatcatgatccacctgcctcggcctcccaaagtgctgggattacacgcatgagccaccacacccagctcattctttattttttacagctctattaaggtataattgacataaaaaactgcatgtttttaatgtatgtaatttgatgagtttgaatatatgcaaatacatatgatcatatcaacacaaccaaggtaataaacatatccatcaccaccaaaagtttccttctgtgtggggatgggaggagaggtgaaaacacgtaatacaagatcgatcctcaaaaaagtcttaagtgcacaacaccatattgtcaattataggcactattttgtacagcggatctccagaacttcatcttgtgtaactgtaagataaagttacattgaacaaccactcctcatttcctttgctcttgtcagctggcaactaccattctattttctgcttctgtacatttgaatattttggatacctcatacaaattgcaaagagcccattatttctatatttttccttttctttctctttctttctttctttcttccttccttccatcttccttccttcctttgtctccttcctttcctcctccctcttccttccttccctccctccctctttctttccttccctctttccttcctttcttctttctttccttctctcttttcttttcttttcatcttttgtcctttctttccttcctttcttccttcttcccaccttcctttccaatacagccctgagaactataagattgctggcatgtactccagaaatatttcctgaatgttttcttacatttcttcacattcatatcagaaccaagagttggccttttagggaggacaattaattttcctcaaagaaataaagtgggtttgtttggggttttttactcatttcatgaaagttactgtatgctattctcacccctgatgttaccttctatgtggaaaactccaacagaataacacacttttggcctctcccttttactgtatgacagtggttctcaatcaggggagattttgccttagcaatgtctggaaacagttgtcagcactgggggacagcatctaatgagtagaggccagggatgctcctatacatcttgcaatacacagggcagcccccacaacaaagaataatctgacctcaaatgtcaatactgctgagtattaaaaatcctgacctagagaactagaataaaattaagcttagtagtattaaggacttttataccagtctcttgttctttctttttctctttgacatttgcctgcctgcatcacatagcatctgtttgccgtattccatggggtaagtttacagggaggacctgcagtttgagggtgtaagttcaattcagaggagtgatagcaagctcatacatctgggctccctatgccctattagtttaaaaagtttaaaaaggacatttttaatctctctttgcttaagtcctgcatctctctctctcagttcattctggatgtaggcaggaaaggtgactatttggggggcttcctcaagctcccaaattatatctaataatgataacatgagatacaaatgcctaatggtcagctggctgtactgactacctaagcctcttccttcttcacaccagctctgttaatgaacagctaaaatggtcacagcagtgaatgctgaaggtctgatagttaggaagattgaggtcctacagaggcagggaaactgaagagctaattaatttaaaaatgtaagaatgacaatgaataaaaacaaaatatatacacatggtacccttttgggacatgcctactagtgtacctgtccccaacttaaagtgaacatagtctttctctccagaatacatcttttcacaatgaaacctacattttccttagggaaccatgttcttatactcttggtctatgtgagccaactccatacctggcttcatgggtaagcatgagatagagaaacagctcatgacagtcttgactcttccgggcctccatgaatagatcagcagtggaccgaagcccagatcagaaccaaaccaatactagaattttgcgagaaaaaaactggagagggacactttttatttctgctggacttgggctatgagtatgatagcccgagctgccataaacaggatgcatgaaatagaaatcaacattcagaatgttttacaaaccaagagatgaagagaaagagttcagattctaatggtatcatggctgagattcaatcatggcaaaatctcggatttctcagtcacatgaaccaatgaatttcactaccatcaccctttaaaaaaaattacatcagatagagtcttgagtaatagggacaccaactgtagactcaccatctcaatctgcccctaaataaaataattcctccaattctagatatttatacagtgctcattgtcttcccaaattatatactcttcatttcccctcttgatttcacttgttcagatgctttggttgcatttgaaaacattttctatttgtcagtgaatattctggcagccatgggtaagacgatgccacaaacagggtcatgggtgaaacagcatacaaagatgtgatcttggcatcgtacctgatcagactcttggaaacacccaccaaatgctattctacaataatgactaaaataacaacaaaaccaattttaaaagcccataccgctaattagcattttactgctttctcctcttatgctctgtgcactctatattgtcgcaagtacttctcccaccaaccctctaatgcagtctaaattctctactttatagaggaggaatctgaaacagagagaggtttgacaacttaccagaggttatgaagttagaagatggtgtcagtcctgaaaattagatcagactccagaccctgtggccttaatcattgttctcttttacttctcaagagtactcactagtgagttcctttgcaaggtttcacagcagtctgatggaaatcaatggcagggatccttactcatctttcccaggacattcagtcataaagtgattcctttatggcatctacagggaacaatgtttaaaatgtttacctgtgaatacaggtaaaaatatgtatcaggagatgtgacgcccatgtaaaagatgccaacccagatggttcttgtaattattggtctaaccttcatcgatcgcttacctctctgaggttcagtttccccatggcaaatagaagaggctgtagtagagtgtaatgacaatggtagccattgactgagggcctactatgggctaggcattctactggcccttcacatccatcggctctaagcaattgctaatgcctttttatatcttaaccttctgccattatagggcctctgtgaaataaaatgtttctgaaagggacatcggataatacaaaaatacaacaggttgaaaagagtttgattaaaaactctgaataatacaccctcccgaaagttaatttttattttgttcttcacagggcagcattgtttggacttggcaagcgtgcacactgcagccattatcctggttctggggcagcaaccaccagctttggtgtgactaagaaacagaatgcttagagctgagctcttggtggcctgcttatccacttggctgggtcctgctgtcctgctgacacccaatggacacgtgagcagccagaacattttgtgaatatgcaggagtttcctccaaggaccacaaaaggcctctatgactcagagaaaattaggttcctcaactgtaaactgccctttgggggaaaggaagagaaattccagaggaggggaggaaaaaaagataaaattcatttcaactactcctcccaattacgattaaaacaacgaagacattacatgccaattgcacgttttaggtactggcctgccttggagtcatcttcaaaccggtttcctctgtatgtatttatttttctttaagtatcctgagaagtgcacattattatcttctgtggacatctttagtaaacagggagcttaggcatgtttgcattgttctggcttgttgcagttgttgacctgattggatcatggactgctttgatcacttaaaaatgaaagcagtttttactgcaaattgtgctgggatgatttgaaaaccaaacaaaccaaaaggacatgttctatttattctttattactcacacatttaaagaacacacagaccttcctcccctcaatccccaaaatatgaatgtgtttagaagatacatttaaaaccaccttttcttttagccttgcaggcaaaagcctctggagggtgcttcgtaaaaagggtctacagcttggcaatttcgatttggaaaagtacactttaaattatttctccccactctcaccgaagtcctgttttacaggcttgggagtttccttttgaacactaacatttattggccatataaccctggacacaatagctaaaccttaagtttcattttcttcatctataaaatggggataactgttcaaaaccttattgaaaggatgaaatattttaaagcacattaggcattcaaaacaaatgtatactgctttttcttatggtgttattttttccatttacaaatgagaaagttgaatctcaaattaaatgacttgtccaactactcacagcacacaggtagtagaatctagaaacaaattctattcttgtgccttaaaattcacttcttcctcttttcttcatataatagaaacatctacgtaaagactttgtactactgcatgcacactgcttcaagattagtcccttgtcaccccctattagatagtcaatacaaagtcccttgtattaagacatttgaaaactgccattttctctatattatttttattaaaatgttccctaattaaaatatactatttttaaaatgaattgagaggcaatagttttaaaactactagtggcataatgatgtatctgttcctgtagttgccttttcttgtcttttgatcaacagcggtgatatccttatcttctcagggctgcagtcctcaggttattaaaagggaacaaacaccctaacaggcttgtacctttgattttctgccatactctccaagttaatgagtaagagggtcaagggaatttattcctgtgctttaggaaatctacaaacaatattaaaaaagaagttggtggcagattaagaaacttttaataaccttgtgcaaaccttccagacactcattactcagcttcagttagcacatataggtgattgaaatatgcaatttcaaaatatgctgtgggagttagaagagagccagcagctgacagagaagtagtttgggcaagaaaaaaggaggcttcgggaccaaggagttcagtgagaaagtcagctcttttattttgctatatttgaacgaaaataacccataagaaggaatgttgaaagctttgcagggtcttgcatgcattccattttgaaacccgctaatgaaagaccactgattgatttatctgaggcatatatattttcattaaaagccaacactgtattctctcttctctctcttgctcttgttttcttaagacacttttttcccaagcaaataagaagcttcctaactgctttacccgttccagtctaagaaatggagattccaagatattttcctatttatctttgaacaggtgtttatcttcctaatgctatgtttctcagacccaactgtaaatttgcacatagattgagattatcaactagatttcaactctaaccttagctctttctacttctgaaaacttgtgccagccatattatggtttaaggcaggttgtgttgagtattatatccacatttgacagaacaatgcctaaggctaagaaaaactaagtgacttatccaaagtcacatagctactggtagagtttagaacatttgactgagatcaagctataatagatcccaagtccttgggcttcatcctaccattcatttcctccctgtaaaaaaatgataataatcatctctgctcttccttctcacagaattttttgtaagaatcaaataaactagtatttgtgaaaatgttttatacacccaatttagaaaggaacaagtatggatgtttcagggagaatacagaaaggataattagagtgaaggaagccacagggtcaagagcatccaggaaagagagattgtgttatagtttggatgtagtttgaccctgccaaaactcatactgaaatttgatctttaaggtggcagcattcggggatggggcctagtgggaagtgtttgagccaggaggtagatccctaatgaattgactaatgccctccactggggtgaatgaattcttgttctcactggaatggattggttgttaaaaagaatctggcttcctcagtttctctctcttgcttcctccctcaccatatgatctctttgcacttgtctactcccccttggctttctgccatgagtggaagcagcatgaggtcttcaccagaaggtaagcagatgctattgccatgccctttgatcttcccagtctgcagaactgtgagctaaataaacctctttttcttatacgttacctagtctcatgtattctgttttagcaacacaaaactaagacagaatgtcatacctaaaatacagttgacattataccgacttgaatgggaattcatgtggtagagctggggttggtaaactttttctgtaaagggccagagggtaaatatttcaggctttacagcccatatgttctgtctcaaacactcaactctgcatgaaagcagccatagacagtatgtaaataaatgagcaaggctagattccaataaaactttatttatggacactgacatttagatttcatatcttttttcatgtatcataaaacattatacttcttttgatttttatttcatttaaaaatgtaaaaactatctttaactcacagggcctccataaacaggcagtgagtcagattgggcccacatggacatagttcaagattcctgctatagggcaatgaaaaatgatacgttgttgactcatttgggtaacatttgataggcaatacaatgtcactaaagttcattagcaagaagattataagtttggagtgcttagggctgcaaggaaccaagaaagctgattaacatcagctatgatgataagagcatgtatattatggttaacaagaaatctgaatgtagaaatttgacagtccattcagaagtttaacaatgtcctcagtgatccagactcttttcatccttttgtgcctccattctcagcatttggctttccatatttatgcttaatgctgcactgtccaatgattgctgccacagcttcaagcacaatgtcctcacaatagcatccccagcataaaagaagggtaagattgttcacccaaaagctcttcccctatatcagtcttttttttcaggaagcaaatgctttcccagaagccccaccacagactactcctttgctaaagttgggccaggtgaccatatctttgcattgcaaaggaaaataaatttctcatggttggcttacgccaatcatcatttatcacattgggccaaacaaaattaggattccattagcaaggaagaagtcaagcaatggctgttgggtaggccactgacaggacctgcttcaatggaagaagaaatttttatgggaaattgagctagaaatcaagctgaggtaggatgaaatttttggattcccacaagctctatcttaccacataatatggaattattaattaatgcttctttcttataaaaggacaaaaaaaatgctgatggccaggcctatatcttatttattagggtgctctctatcaggcatatgtttgcaattcttttggcattgagaatacttgacaaattgaaatgttaaggcttgcaggcagagctaaataaataaatcttccagaaaaaaaaaaaaaaaaaagagtgtctgaattaaagagaaagaagaagaaatggaataagaaagatgaatgttcatgaattgaagcatgtctgactttattttccctgtgggaaaaactgcagtcttcctgggagcaatgcctgatccttgctcatgcctcctactattgttatattctcggtggaatggaaaagactggattcagcctttctgtgtcacagtgaatcagccaaaaaaagaagaagaaaagttatcagtattctactacaaaatggctaagaaaaaaaaatctgaatgtattcaaaaaaatttcactaaaaatgaaaagacagactcatagcatgggtatttcatcagtaacaattgggagctagattgtcaactacataaaattagatgtttcatcttctgttcttttgttttaggagaaaaatgtaagaatgtgttatagtctcttctaatttgtaaactggtagccaggcactctgagaagatggcaacaccctagtgattaaggtaagcaaatctttgttactagaaaaatcaagagaaatatgactgcctttgtgtctaatttttgagataatatattgtgagttcgatgttgtcatgaaataaaatgtacagcaaaagtcaatctgttacatcattaataatatgcttatgatttgtcacactgcatggtaaaaagacaaagacagtaaatagtttatttgcatggatataattattattcattttatgtaggaaagccgagattttatagtgtgtatttttctttttttttttgttgtttttcttttttgtttttttttcttttattattataatttaagttttagggtacatgtgcacattgtgcaggttagttacatatgtatacatgtgccatgctggtgcgctgcacccactaactcgtcgtctagcattaggtatatctcccaatgccatccctcccccctccccccaccccacaacagtccccagagtgtgatgtttcccttcctgtgtccatgtgatcttattgttcaattcccacatatgagtgagaatatgcggtgtttggttttttgttcttgtgatagtttactgagaatgatgatttccaatttcatccatgtccctacaaaggacatgaactcatcattttttatggctgcatagtattcaatggtgtatatgtgccgtattttcttaatccagtctatcattgttggacatttgggttggttccaagtctttgctattgtgaatagtgccacaataaacatatgtgtgcatgtgtctttatagcagcatgatttatagtcctttgggtatatacccagtaatgggatggctgggtcaaatggtatttctagctctagatccctgaggaattgccacactgtcttccacaatggttgaactagtttacagtcccaccaacagtgtaaaagtgttcctatttctccacatcctctccagcatctgttgtttcctgactttttaatgactgccattctaactggtgtgagatggtatctcattgtggttttgatttgtatttctctgatggccagtgatgatgagcatttttttaatgtgttttttggctgcataaatgtcttcttttgagaagtgtctgttcatgtcctttgcccactttttgaaggggttgtttgtttttttcttgtaaatttgtttgagttcattgtagattctggatattagccctttgtcagatgagtaggttgcgaaaattttctcccattctgtaggttgcctgttcactctgatggtagtttcttttgctgtacagaagctctttagtttaattagatcccatttgtcaattttgtcttttgttgccattgcttttggtgttttagacatgaagtccttgcccatgcctatgtcccgaatggtattgcctaggttttcttctagggtttttatggttttaggtctaatgtttaagtctttaatccaccttgaattgatttttgtataaggtgtaaggaagggatccagtttcagctttctacatatggctagccagttttcccagcaccatttattaaatagggaatcctttccccattgcttgtttttctcaggtttgtcaaagatcagatagttgtagatatgtggcgttatttctgagggctctgttctgttccattgatctatatctctgttttggtaccagtaccatgctgttttggttactgtagccttgtagtatagtttgaagtcaggtagtgtgatgcctccagctttgttcctttggcttaggattgccttggcgatgtgggctcttttttggttccatatgaactttaaagtagttttttccaattctgtgaagaaaggcattggtagcttgatggggatggcattgaatctgtaaattaccttgggcagtatggccattttcacgatattgattcttcctacccatgagcatggaatgttcttccatttgtttgtatcctcttttatttcattgagcagtggtttgtagttctccttgaagaggtccttcacatcccttgtaagttggattcctaggtattttattctctttgaagcaattgtgaatgggagttcactcatgatttggctctctgtttgtctgctgttggtgtataagaatgcttgtgatttttgcacattgattttgtatcctgagactttgctgaagttgcttatcagcttaaggagattttgggctgagacaatggggttttctagatatacaatcatgtcgtctgcaaacagggacaatttgacttcctcttttccaaactgaataccctttatttccttctcctgcctaattgccctggccagaacttccaacactatgttgactaggagtggtgagagagggcatccctgtcttgtgccagttttcacagggaatgcttccagtttttgcccattcagtatgatattggctgtgagtttgtcatagatagctcttattattttgaaatacgtcccatcaatacctaatttattgagagtttttagcatgaagggttgttgaattttgtcaaaggccttttctgcatctattgacataatcatgtggtctttgtctttggctctgtttatatgctggattacatttattgatttgcgtatgttgaaccagccttgcatcccagggatgaagcccacttgatcatggtggataagctttttgatgtgctgctggattcgttttgccagtattttattgaggatttttgcatcaatgttcatcaaggatattggtctaaaattctttttttttttgttgtgtctctgccaggctttggtatcagaatgatgctggcctcataaaatgagttagggaggattccctctttttctattgattggaatagtttcagaaggaatggtaccagttcctccttgtacctctggtagaatttgactgtgaatccatctggtcctggactctttttggttggtaagctattgattattgccacaatttcagatcctgttattggtctattcagagattcaacttcttccttgtttagtcttgggagagtgtatgtgtcgaggaatttatccatttcttctagattttctagtttatttgcatagaggtgtttgtagtattctctgatggtagtttgtatttctgtgggatcggtggtgatatcccctttatcattttttattgcatctatttgattcttctctctttttttctttattagtcttgctagcggtctatctattttgttgatcctttcaaaaaaccagctcctggattcattaattttttgaagggttttttgtgtctctatttccttcagttctgctctgattttagttatttcttgccttctgctagcttttgaatgtgtttgctcttgcttttctagttcttgtaattgtgatgttagggtgtcaattttggatctttcctgctttctcttgtgggaatttagtgctataaatttccctctacacactgctttgaatgcgtcccagagattctggtatgttgtgtctttgttctcattggtttcaaagaacatctttatttctgccttcatttcgttatgtagccagtagtcattcaggagcaggttgttcagtttccatgtagttgagcggttttgagtgagattcttaatcctgagttctagtttgattgcactgtggtctgagagatagtttgttataatttctgttcttttacatttgctgaggagagctttacttccaactatgtggtcaattttggaataggtgtggtgtggtgctgaaaaaaatgtatattctgttgatttggggtggagagttctgtagatgtctattaggtctgcttggtgcagagctgagttcacttcctgggtatccttgttgactttctgtctcgttgatctgtctaatgttgacagtggggtgttaaagtctcccattattaatgtgtgggagtctaagtctctttgtaggtcactcaggacttgctttatgaatctgggtgctcctgtattgggtgcatatatatttaggatagttagctcttcttgttgaattgatccctttaccattatgtaatggccttctttgtctcttttgatctttgttggtttaaagtctgttttatcagagactaggattgcaacccctgcctttttttgttttccatttgcttggtagatcttcctccatccttttattttgagcctatgtgtgtctctgcacgtgagatgggtttcctgaatacagcacactgatgggtcttgactctttatcccatttgccagtctgtgtcttttaattggagcatttagtccatttacatttaaagttaatattgttatgtgtgaatttgatcctgtcatgatgatgttagctggttattttgctcgttagttgatgcagtttcttcctagtcttgatggtctttacattttggcatgattttgcagcggctggtactggttgttcctttccatgtttagtgcttccttcaggagctcttttagggcaggcctggtggtgacaaaatctctcagcatttgcttgtctgtaaaggattttatttctccttcacttatgaagcttagtttggctggatatgaaattctgggttgaaaattcttttctttaagaatgttgaacattggcccccactctcttctggcttgtagggtttctgccaagagatccactgttagtctgatgggcttccctttgagggtaacccgacctttctctctggctgcccttaacattttttccttcatttcaactttggtgaatctgacaattatgtgtcttggagttgttcttctcgaggagtatctttgtggcattctctgtatttcctgaatctgaatgtttgcctgccttgctagattggggaagttctcctggataatatcctgcagagtgttttccaacttggttccattctccccgttactttcaggtacaccaatcagacgtggatttggtcttttcacatagtcccatatttcttggaggctttgctcatttctttttattcttttttctctaaacttcccttctcgcttcatttcattcatttcatcttccattgctgataccctttcttccagctgatagcatcggctcctgaggcttctgcattcttcacatagttctcgagccttggttttcagctccatcagctcctttaagcacttctctgtattggttattctagttatacattcttctaaatttttttcaaagttttcaacttctttgcctttggtttgaatgtcctcccatagctcagagtaatttgatcgtctgaagccttcttctctcagctcgtcaaagtcgttctccatccagctttgttccgttgctggtgaggaactgcgttcctttggaggaggagaggcgctctgctttttagagtttccagtttttctgttctgttttttccccatctttgtggtttttatctacttttggtctttgatgatggtgatgtacagatgggtttttggtgtggatgtcctttctgtttgttagttttccttctaacagacaggaccctcagctgcaggtctgttggagtaccctgccgtgtgaggtgtcagtgtgcccctgctggggggtgcctcccagttaggctgctcgggggtcagcggtcagggacccacttgaggaggcagtctgcccgttctcagatctcccgctgcgtaccgggagaaccactgctctcttcaaagctgtcagacagggacatttaagtctgcagaggttactgctgtctttttgtttgtctgtgccctgcccccagaggtggagcctacagaggcaggcaggcctccttgagctgtggtgggctccacccagttcgagcttccaggctgctttgtttacctaatcaaggctgggcaatggcgggcgcccctcccccagccttgctgccgccttgcagtttgatctcagactgctgtgctagcaatcaggagactccgtgggcgtaggaccctccgagccaggtgcgggatataatctcgtggtgcgccgttttttaagcccgtcagaaaagcacagtattcgggtgggagtgaccagattttccaggtgccgtccgtcacccctttctttgactaggaaagggaactccctgaccccttgggcttcccgagtgaggcaatgcctcaccctgcttcggctcgcgcacggtgtgcgcacccactgacctgcgcccactgtctggcactctttaatgagatgaaccgggtacctcggatggaaatgcagaaatcacccatcttctgcgtccctcacgctgggagctgtagaccggagctgttcctgttcggccatcttggctcctcctaatgtgtacttttctttatgagtttaccattatctgtaaccatgtcaatatatattacctcccctaacattttttatagcttttctccattacatataaagacaatgtacattcacagtgcaattcataccaagagtcacatgctcctttacagacatatttctgaggtctgcttccttcatagccagagtttcctaagcactttaccctcttagcctcaggtctaatgcccctgtttcagtaacccctcacattcctgattacttcttctactcttcccgctcctaccatctcccattactctagacagggatgacaaaggagtttcatctagaatgccaactccaggtgaattgtactggttgcttggggagctgtatttagaaaaactgtgagaatgttactatgggcctgggatgtaaagagagctgggtatctgtctttcctcattttagtggttcttagaagttattgtttgatcctccctatacttgaggagaaccagccctcagtatcatagccactgaagaatttaagactggaagaagtaaggggcatgataccacagtggcctgggccacaggaacatcctttcagagagaaaagggggagggtgggtagagaaagagagagagagaagatggccaaagaatggactgaaagcaagcatggacagaaagaatagacaccaaaagaatgaacttgagaaagaaagaagcagataaaagttaagagtgagaaccatttaagcaggaagaactgttttcaggcataacgtcttaggcctgcaaaatccattctctacgttaatgatctttatgggaacagctgttaaacaaagtaggtctaagaaaaaaaatctagttactgcattgttctctttaatgtgcatgagaacaggcctacacacacacatgcatgcacacacacacacacacacaaacacgcacaggtgtacacacacactcaccaaaagatgcacacagacacacacagtcttatctttttataccattcaagttgcttccgcttggatcttcatgcttcttagaagtgtcatccttctcttggattctcctgtcaccatggagaaattggttgtgcagacccagagtcaaaagctttggctgttttcttatcagtatgctgcatttgcctagaggcttattttcatttcaggtgtgcttttcttgccagaaaagcagagtgggtggctgattacaaatagaggccttaggcggtggtaattgaagactggtaaaaccacacagtttagaggaaatattgcttctgactaagtggagagagactagaaattttcaagtgaaaataggaagtgcagacaattgtcaataactccaaacaacaaatgttaaagcatctggggaaaactatctgcaagattgcattcaagttaaacttctgctcttgaaatcaatcctacatattgctaatattgattgtgttgccctcacctagaaattgacctgaggtcattttaaaggccatcctcactattgctgctcccctcccactcccactaaaccctactccccaccttgttcacccatccctgggattctctaaacaaactgaaaacttttattccccagttcagttcacatggatggactgcctgtcatgtgctaggtctaggggttttggtagatgaattgggcttgccttaagtttacaatctggaaagttagagaaaaagaaactaataaatcagaaagaaaagtaacatccttgcttaaattggcactgaggtgtttatttctttggttatatctcacagttgtccacaaaaggacctcagtgatggggagaataaacacatatggttgacactctagggacaaagcccaaaatggttcatcacaatcacaaaatatttttagaagtatcttgccttatatttgtagttttcaaccaaccatgacttttccacccaactacaggggacatttggcagtgtctggagacatttttggttgttacaactggaattgcgcatctgggggttgaggccagggttgctgttaaacattgggcaatgcacaggacacttccccgcagcaaagaattacccagcccaaaatgtcaagtgctgaaattgagaaaccctgctttatattaaaatacgtgcacattttgtattccactcaatgttcagtataatattatttacacatttttttctttgagtaaaattgacactgcaagaaaattggtcatgtttatctggtgccctagcctgaggtctggtacatggccatgaaccatgctttgcaaaagatggccctatccctgtctttcaattgattccctcattttacagcttagctctgaccttctctggaagacatcccagtgtctcacagttgatggttgtctgatttagcaaataaaaatactgtttcctggttaaatctcaatttcagaaaattgataaataattttttagcataagtatatcccatgcaaagtttaggataattaaaatttggaatttgaacttgggatttgagtttcagataaacagcaaataatttttgaaatacctgtgtgtcccctgaaacatttgggatctagtgatacaaaaaagtatttactttttaattctgaaatttgactttaactgggtatcctgtgttttatctggcaatcccactgcagttgtgcctgttgtctcctctcaatatctatgatattatgaggactattcctccctctatactctcagtgactacatatagacctatttgcaagcatgttttaaccctctgagtaaaatctacgtttcatagtttttgttctttttgcctggaaaaatgccctgaacattgcaggaactcaaaaaatattttgtggatgatgcatcatgtcattgtaatgctacaaggggaaactagaaactttattaggtatcattgtataataggtgatcaaaaaactaggattttagtagtgagtattgattagggcagcttggctatgagtaccagagaccaaaaaaaaaaaaaaatcatttctaaaacaagacagaagtttgtctctctcttgtgtaaaagcaggctggagatcaactgggaaaaactggtgtggagtctccatagccagaggcccaggctttttccagcttctcactctaccattcctagggtgtggccttcacactccaaatgactgctggagatccagccctcatatctatattccataaaccaaaagggtttatggaagaaaagatcatccctcacgttaaaaatgatttcctctacttgtgtatcactgaccagaacacagatatatggtcgcacacagctgcaagggtggctgacaaatgtggtctttatttcaggggagaagagtgctcagctaaatgtgaggttaatatgagagtaaagtggaaaatggatatttgatgggggaaaggtacagactatacagatctcttctggcttcagttgctaactctcttaccacttttaaaagtatatcctttattctgaaaataactgggaaacagaaactagaagattcccgatccccatcacaggtattcaaagctttgtggttttcaaatgccacctctttcacccagcattctcagattcttcctatttcttatgtgccccttatgaactatccaagcactcaatgtgcctctcctgggtgtgcaccatttttttttttacctcacatcgtagttttctgtgtgagttcacatttcccccactagattgtagacatcttgaggacagagtcagttttaaaatcatgtctctggcctcttccctccctagtgtgtcttacatacactaggggtttaatatttgttccataggtgaacaactctctcgtacctgagggagagaagtgacaacctgtcatgtgcccataggcatgcaagggagatgtccacgttatctttagtggttgccaagataatgtgctgtggagattatttcattttgttaggcagattttgtaaaaatgaaaaatgagtttgtttcaagactacagagagcttttcaatgtagctgatgtaagagtctcaagatttgggataaaatcctacccaaacctgctcatgaaagctgcacgtctgcaaaactcgccattaccgaatgacatggtgcagaaaggctgttaggaaaggctaatgcctatacatctggtgtaatgaagaaatgggagggttaggcacgggaaaccacagctccaacagaaggagctgaaaagatataggtaagattagtgacatatgtaaaggcccagatactgtgtgacaaagtctacccagctgaataggccgaagccagaagtaataggaaggccatgttctccctaatcctccaagataagctgttccatccagaattatcagccaacaatcttcagggtatccggctgaaaatgaagtttcagacggctttgattcctcatccataaatgagaaagtgcctgaaggatctttatttattctcgctcccaccgaaacactcttcaaaaagtgccaatatactagcaacagatgcataaagcctcccttcctttgattgacagaacatgatataaagcaaccctcacttgacatttcagtttcataaggctcctagcagggggaagaaaaaagaaccttgaaaaaaaatccactagaaaataaagaggatttatgcaaactcacgtgaatgttttcagaatcaaatttaacagttttatttctctgcagcccttattcgatattttgggttgcagatgaatcatttcagcaggagtaatttcagccatttgcttattaatgtttatggcttattaaaacaaagtatttacatattaatgtttgttgattactggatgtttaagttgcttagttgtaaatgattgagatattcactctagggaggagatatttaatttggtgttgtgtgtgctttaatttagatttcaaaatcagtaattgaatgagaaaatgtcatctacacctatgcatttcagttttgaaaggtcatcccgtggttagtttatacattttcaaattcttgttacattgctcaataagatattaaagtcaagttcaccctatacatatttctttcaattgacatataaatgttctgtttgaaataataagtaaatttaatgcctacatatttcttatggaagaaaggttggaaaatcttctagacgagcccgagagaaagacactaattctttttgttttatcaaaggaatttatttttatatttaattgctctctgactttttttgcaggttgtctgaagttggagttcttcatgctctgtagaaactgtagtgtatagaattccagcattttcctgacaaacatcaaagctactttggatccagggttgacttcgcatccctcaaagagcatttcaaatggcaatcttcagactgcaaagaaaacttggggtgagtaagagcaaaagaaagaatataccaaacttgacaaaccttggcttgataaaagtcagttttatttcgaacacaatttgcttgtctcctcttgttttctccactttctaaccagctaaacagtagtgagcaaacaagtgttgccaataaccgtatcattttttcccatggtaccagtggtattagtgatggagtggcttaatatattggttatttcaccagaaggaagtggaaacttgaggaaaggaaagcagagtaacgatgttcctagcaatggtacttttgctggcacagagatactctcagagaagccagaaatgagtgattgaattgctccctccctttcttgattggatgagagattgctgtaatgcttctggattttaaccaactaccaagaagctctaaggactctttaatgaagagtaatcttcacctttgaagagaaagccttgtctgaattcctatagtagaaagaggagggattaggctgcaaagattgaaaagacagtatatagaaacaagtatttacataaatttagggaaattcattttacttctttgtgtctccgcttgctttctccagttgtgacttctcttcactcttagtaggagacagaattctactccccctttcacttaggattggaatattctatctttgatacaataattcaaatgagacatgcaaaattaatgaaagagcatagatggggtggagtctcaggagtatacaattaggccctagaaaaaaaattaactaaatttagtgcatatgctcaactgtggacactgaatcagaaatagattgttaaattttaaagcatacatgaaactggctcctgagaagttcaaggcttggctaccaaagacatagatgggaaatggattttggctaacaatcatttatttatttatttatttatttatttatttattcgagacagtgtctcactccgttgcccaggctggagtgcaatggcgcgatctcggctcagtgcaacctccaccaaccaggttcaagcaattctcctgcctcagcctgctcagaagctgggattataggcacgtgccaccacacctggctaacttttgtatttttagtagagacagggttttgccatgttggccaggctgttctcgaactcctgacctcaggtgatctgcctgcctcggcctcccaaagtgctgggattacaggtgtgagccaccgcacccagcccagtcattcattcttaatgactctatccccttgaatctattttatcagtttgcttggtgattaaattgtatcatggcacaaaatgtcatcttttcatttaaacctcacagagacacccaagataatacaggctaggagtggggatgttgtagcaggagcttccaacctctctaggaaatgtaaaaatgtcctgcagtttttcagaaggatttcatcataactggaccttgaataacgagagacgcttataatcagcagagagtattagaattaatctggttggtatagaagcttcttctaaaaatcaatagtccttttttttaatgcttagggtgaggctggaattttgtatacttcatctcatgtaagtttcacgataaccctaagagatgagtactattgtattcctcatcttacatcgaaggaaactgaggcttctttctgagcttaactaagtaaggttaggtaaattgccaagaccatacagctaataaatatctcaacccagctccatattcagctctgactacaagtccagcctatggtcactgctttatattgctagcttctgactcttcgttgggagtcacttctacacattgcttgcccacacacttattttatattgtaatgaaaaagaaaccaaccgtagcctatattttacttgtaaaatctttggatcttcaggcataatgaaactatttcacaatatgcaatgtgcacgggattgccacaatataattatggtatcagtcagtgttgtgtgtgcatgtatgtgcttgaaggagtcattccatcattctaaaatgtactttccatgcataagaatacatactttgctaaatgcatcatgtcagaatgacacttataatttcaggatatgtacaaattaaatctaccacttaaaatgcaaaaacctcgagtagactagattctaaagctggccatttaacacagaattattgattaactcatgctgtgctatacaggcaaatcttacatttaattgacattggtacgagtcacgtataagctggtgcattttactataattcatggtcactattaatcgtctaaatttcttacaaatgcagatcgttcctggcagaggaactggatatgaatgtggacaaatcaagattcccttgttccctcaccaggccttctgtacaagtcagtaatagattatgttcaaaataaaaagtatggttttttaaagatataatcatactctcattagcacaggagatgcattgttggaaatggaaatgataaatgaatcagtaccatagggtgtgaaggtgtggttcctatgtattgaatatatggcatatgttcaatcatttacagtgcctgaaatagtctctgttcgagagcagacactcaataaatatttgaatggattctccattcacttgaactcccttgaaatcatcacaagtcatgggacattatttctcctggatatcagccaccccactgtagtccttctccctgtctgcagggatgtctgcctgtcttctgcatatcccagttgtgacctgatctttagcctctgcttcccctcctgcaagcttttcccttgagagcacctcaagccaccatcacccttgaattttaaaatcacacttgctagtcttacttgccccacttctgccatgtttactatcacactttttatcagctattatgcgaaagaattgttcagctgaacacaaagcaacagcagaattagagactcaagagagtcaacaaactcattgataaagctttcgaattgaggaaagtggtctgttcccattcacagacacagccaagcactgcaatgtactcttcttctatactggctgccctgtcataagagaatcaagaatccattacattaaacatagatctttaataaaagtatttctgagacagagtaatataacaaatcggtagtataggaggaagtcttaaatatgtgcctgtattctaggtataaaacagaagatttttattgttttactcttctatttttaaatttattttattatgcataccataaagtgtacaaatttaaaatatctgttttcatgaattttacaaaagaaacacaaccaccacacagcccagatataaataattaccagccaaccagaggcctctctcatacccacttctaatcattacttaccctatccccaccccacatcaaaggagctctcaaattgattatcaaagatcagtttacctgtctttttacttattataaatgtattacatcatgtagatttcatatactgtagactcatctgtgtcttcttcactcaatcttttacctgtaagatttgtccatgttgttgttactattctcattgttatgtagtattattccattgtattataatttcagaattaatccattcactttgtaatggacttttggattttcatcagtctgagactaaggtgaataatggtgttataaacattcttgtacacatttcagtgcacatacttaacatttctgttggatatacaatcatgctccacataatgacatttcagtctgtgacagactacatatgtgacagtggtcccataagattataatacagtattttggctgggcgcggtggctcacgcctgtaatcccagcactttgggaggccgagacgggcagatcacgaggtcaggagatcgagaccatcctgcttaacacagtgaaaccctgtctctactaaaaatagaaaaaaattagccaggtgtggtggcgggcacctgtaatcccagctactcgggaggctgaggcgggagaatggcatgaatccaggaggtggaggttgcagtgagctgagatcacgccactgcactctagcctgggtgacagtgagactccgtctcaaaaaaaaaaaaaagattataatacagtatttttactatagcttttctatgtttagatatacaaatacttacctttgtagtacaactgcctgcggtattcagtacagtaacatgctattcaggtttgtagctcaagagcaatagggtagaccatgtagcctaggtttgtagtaggctgtaccagtgatgaaattgcctaacaatgcatttcttagaatatttccccattgttaagtgatgcatgactgtatatctaggagggaaattattgtattacaggataagtatattgttagtttttagaaggtattgccaaaccgtttcccaaagtgtatgagaattcccagttactctacgaccatcaagcacttgctatattctggggacctggggtttgagtttgttttaatcattcttgtggatgtatagtagtaactctgtgtgattctatttgcatttcccagatacctaatgctgttgaacaccttttcatatgcttattggtcacttgaatattctttttcataaaatggttgttaaaattattggccattttcttgttggctatttatttcttattgatatacagaagacataaattaacagataagatacatgtatagatacacaaaatcataggaattctttgttggagatatatggcaaatttcttccattctctcactagtctttttgttattgaatggtgtcatctaataaaataaagttctgaattttaattcattccaatttatcaatctttccttttatggctattagcagcactcctagacttgaaaaagaaaaaagaaaaaaaaaactgcctaactggaggttaaaaaaaactcttctaagaagctgtatggttttaattttctcatttagttctaagatgtttctggaattgattttttgtgtatggcataaattaggggccaagattttttaagttgggatataaaattaatctagcactatttctaaaatgcacctcattttacattggactactgtggcacattttttgtaaatagttatttatgtgaatctgtcactgggctcttttttctcttcatctatttgtccatcttggcatcaatactattttaattaatatagtctcaataaatgcttacataaaatctccaacattctttctcttcttcaagattatctttgctattggcaaatctgaaatttttattgtcattttattgaacctgtagataaatttagaaagaagtgacatcttaaacaataattagtctcctaattcttaaaaatagtatgagcatttatttaggtattttatctcattaatctttttttagttttccgtgcagaaattttacacatactttgttaaatttatccctgtgtattttattttttataccattatacctgcctatttttcatactattatacctgtgtatttttcagtttttgtacatgataatttgttgctaatatataaaagcataataatttctttaatattgctctgtgtttatacatagagtttccaggttttcaatgtacacaatctcatcgtctgtaaataatatggtttttcccctctcttttcaatatttataccctttatttttcttgctgactaggacctccagtaaaatgtcgagtaaaagtgatgataactgatatcattatgcctttccaaattcaggataaaaaattttaacaattcaaccttaaggattttttgtatatttttgaagatatccattattagatatactaacaattgtgttatgaataagtgttatcttttacaaaatattgttagtacacctattgatataatcatgcattttcttctttattctataaatgaaatgaattacattaattgacttttcaaatgttaaactaatcttgcattcctggacaatgctaacttgctttccattattctttatacattctgctgggtttaacttgcaaagattctgtttggacattttgcctctatgttactaagaaatatatgttggcaaaataattggtacctgcttctcaattagtggcatcatgtggctttctgcagatgttttgtaaaggggccaataacctctttccaccaggatattgatattcagtgctgtgtctcttatacgataataaggcttcgacatccatgagcaaaatttagctaagagttttgagttttatgagttgtcctgtgccctggatcttcatagcaagtggtagaatggaggcagtggctcagagctttgtggacatgtctctgagcccacagctttctgttgtagataggtatgatgaatccacgtaacgatttgccttcagggtaaattccaaactcttaaatacagaacccaagacctgcaggtcctgggatctatagatctctcaagtctcataccttactctgcttcctagctccctcttgcaatctagaagtccaatgcactatccattgcactacagagccaggtcctcttgcaatctatatggttcatatgtactgacttacttatagttccttgaatatatcaagctttcactcattttagagacaggacctgcttttctcctgccaggacctactttttctatttaggtattgtctttttttagtgtgccttattatacagagatatcacagaggatggctactatgtcttactcatctttttatcctacagacttgaccagtatataagaggcactctaaaacaatgtttgtttgaaatgaatgaatttatgaaaatgtatttactacaagtctcctatgttcattgtcatctcagtgtaagaactaaggaccaggccaggggcagtggctcatgcctgtgatcccagcactttgggaggccgaggcagacagatcacctgaggtcaggagttcgagaccagcctggccaacgtggtgaaaccctgtctctactaaaaatacaaaaattagccaggcatgttggtgggcacctgtaatcccagctactcaggaggctgaggcaggagaattgcttcaacctgggaggcagaggttgcagtgagctgagattgcaccactgcactccagcctgggtgacagagtaagattctcaaaaaaaaaaaaagaaccaaaagataagtgagaaaagcaataatataactaacttattcactaattaagtcagcaaatagctactgaatatagataactgacatctttatgctttccgaattcagggttaaaatgttcagtaattcaactgtaagttgattattttttgtatgtttttgatattgcgtgtagtttttgctaggcacaatgctacatatagtcaatggatgggttagaaacactcaagtttatagtctatctggggagggagagaatcaagttaacataataaaaaaaaaggtgtgaattttaaaattataacttgaaataagttccacaaagggaaaaaacacagcattaaacttcagaacatagagaatggggaacgcttattacagagagaactttcaaggtagcctctctgaggtggtgtattaggccattctctcattgcggtaaagaagtacctgagactgtgtaatttataaagaaacgaggtttaattggctcatgttcttcaggttatacaggaagcatagcagcttctgcttttggtggggtggggggccaggaagcttccaatcatggcagaaggcaaaaagggaggagtcatcttacacagcagaagccagaagcaagagaggggcaagggaggtgccacgcgtgtttaagggaccagatctcatgggaactcactcactattgtgaccacagcactaagggggatagtgctaaaccactgatgagaaatccacccccatgatccaatcaccctccaccgggccccacctccaacaatggaagtacaaatcaccatgagatttgatggggcacagatcaaaaccatattaggtggttactattaaggagccagtcaaaactcttacctttatacattctgaaccagggtacttaaacagatcataatttttctcaggttggtttatctcagcagttctcaaagcattgtccagagaccagaaggggttccaaaactctttcagaggagctgtgaggtcaaaactctaacactaagatcataatattatcttgcctcatttactctcattatcttataaaggtatggtgatttccagaagttacatggcatgtgatgtcacattagattgaatgaataagctgtcctttattaaaccaaatgttaatgagatttgcaaaaatatgtttaacagtgccattttctcactcaatatttttgttttagacagtatagctatgttgataaaaatgtgttatttggcctggcatggtggctcacgcctgtaatcccagcactttgggaggccgaggcaggcggatcacctgaggtcaggaattcgagaccagcctgaccaacatggagaaaccccgtctttactaaaaatactaaattagccaggtgtggtggcgtgtgcctataatcccagctactcgggaggctgaggccagagaatcccttgaaccctggaggcggaggttgcagtgagctgaaattgtaccattgcattccagcctgggcaacaagagagaaactccacctcaaaaaaaaaaaaaaaagtgttatttatgttaacatgtcatgggtttattattgctattttacaataatttaacaaataccttaacaatttccaagttttaattttcaatatggtaaaaattgatagataaagccccataaaccaaagttcttttgagttctcaaaagattttaggaatataaaggggttctgagatttaaaattctgggaactactggttttgctagtaaaattaagaacaggtaaaaagaatattatcactagacaaactgaaagatacctaagatgatatacaaaaaatgatccctgctaaccctccaactttggacataaattgaaaacatctgtctgaaaactataacattcagtcaaacatctccaatgttccaaaaatcccaatgtgtagcaggttatggacaaaacattctgagtatttgagtgagcaggggcagggctccatgaggaggaaagttctggtccagttatgtggtgccccatagaccctgattgagtgttttccattttaattggaaaacttggcagcctcttgtttatagcacaggggataggaaatcaggcattcgtaagtgaaataaaaatagaaccaactcctcaatttaaagttctggaatcttttccttgaaatgttgcctgcaggtctctccacccaattattctgcaccaggactgctcagccactgtccaagatgatcaatcctgaacctaacaccataaaatattcaaccctccataccttggactgactgctctctgggcattgtaagtgcagaacctccgtcatatttttgcctaatttttactctcatcagtaaaactagaagtaataagactcccaacgataagagatcattatgaaggaaaagtttcttcaacatttattttttaaaaacttaagttcattcttctgtcattccaaagaaaaattatccattttatcttataaaatcatatatattttacattttatctgaaatgaaactagtgcccccctacaccaccaataagtcaagaacaacaaaaagagcccactaaaaaaagaaaagattgaaaatagcagaatatattaaattggaagattattgtggatattcttatagtcttgatgtgctgtaccctaagaaacagtttttccaccatattttgcaagcagaaattattatattactttgtgaatccttccatttgaatttaactttttgaaggttctagtctacttttcccattgtaaatatgctcatgcagatttatatgaagtaatatatatgaaagtgctgtacactatagtatatacactaatatattggattattgttgtaagtaaagaaagcaaaataaaggccaggcacggtgcctcatgcttctaatcccagcactttgggaggcagaggtgtgtggatcactttagctcaggagtttgagaccagcctgggcaacatggtgaaaccctgtctctatcaaaaatacaaaaattagccggacacgaaggcacacgcctgtggtcccagctactctggaggctgaggtaggaggattgctttagcctgggaagccaaggcttcagtgagctgtgatcaccccagtgcactgaagcctgggtgacagagtgagacctggtctcaaaataaataaatttttttttaaaaaaagcaaaataaaatatgatcttttaaagtaaaagctattgatgatattcctatctaatcaccttccatcaatctgtaataatgccttactgaatccaaagtctcctttttaattgactaatggaacatttctagactgatccattggagtatagatgccatcaagtaatccatttataatctggagccatttttgtttaaagctgtccaagtgcttcttggatacttatcaatctattccagaaagattctctattaacaaagttctacaatatgcattcccctacctgcccaagtattgaacaaaaaaataatggtttgtaggtattataatagacaatggccaaaatttaccattatgtttataattatttacacaaatttatttaagttcaatgatacattctccggagctaggtttttcaattcagaaagtcaatgggttttcagaaccaaaaagaaaagaaaagaaaagaaaagtcaagcattagaataacaaactcatgataattgtcattcctgttctgaggactcagtttgtttgaaaagatttaactaccaaaaagaaaaatagtattcaatgaatgtgaggatgtggaatcattcatatatttccttgaaatagattcttaataatagttaaaaagacaacactacactgtaagatgaagctacttcaatgtaattattcagtcatcaaagactacgaacatataaatatgaattttgtcaacagaattatgtaatgtcttccataaagtggccatttacttcgaggcctctggtcatcatatcattttaacattcttaagattttcagtattttatgactatgatttggaaaggtgaggggaggtctgcagaaaatattttacttcatggatatgcttgtgtgtatgatcttaattattcaccaaagtttctacgtttcatctttatttccctgatagtatcattctaaaatgaagaaatggaggctgggtgcggtggctcaagcctgtaatcccagcactttgggaggccgaggcgggcggatcacgaggtcaggagattgagaccatcctggctaacacggcgaaaccccgtctctactaaaaatacaaaaaaataagccggcgtcgtggcgagcgcctgtagtcccagctactcgggaggctgaggcaggagaatggcgtgaacccgggaggcggagcttgcagtgaattgagatagcaccactgcactccaaagggaaagatgtaaaaatatgttttcttcttaaatcttgtaccatcctcagcaaatactgttgagaacttcacccctggttattaagagaaacaaaagtaatttacaacacatatttggcacatagacgtccaaaggagacacctcctatccttaagtgcaatatattcttagaaagaaagacatctttctgaggaaaaagaataggcaagggtggaatttcaagtttcagctttatgatataaatagctttgcttatattgaagaagaaagaagaacaaggcaccttcaacagcccttacacatttctgggaggtggtagcaagtgccatgccctacactgcccagcattcataataacttacaacaatacaatcatagcttttgccccaaataatttcttctgccaatcatacatgataaattgtattatgagattattagcacatagttaaatgtatttaaattgccatttgtacagctgatggagatttctgtaaatgtagactagcatcagagcctacacaacatggaaaatagcatgcatagcataaatcaggcaaaatatttgagatcatgtatgcttaatatgtgatacatctgaacatttttcattagcattttggcattttctttctccatcctagctctaggttgtgttgctaatggacaatgtagagggtataaagtatccaacttccttcttcttttccttggttggagctgagcaatccgttggcacattcagtgaggcaggagtggttggcagggttagggctgatgaagaagcctgtgaaatcaaaatattgactacttaggggtgttgaacaaataaatgaataaatcgatgataatggcaagcaggtttctcacctttggagaagaaattacaaatatagaaagatgaatgctgcaattaaacctgcagtactgaattggaattggaagtgtcagtgtagaatcatggtttttaaatatacataaacagaaatagatagagctgtaggtgtgcatgagtgggtgtgtgtatacatgcacatcttttctggctctatctgcaaaaagggcctagatgcaatgacaccctgatagaaataaatatccagggtactcaggtgttgatttcaaagtagcattcgctactaagggaaaaccaaaggtcctcggtaagtgactgaatcaaggactagggcagggaaacaacaaaataagcctggaacatcttgtgccagaaagtaaaagcacgttcaaagaattgtgaggacaagtcaaaaggacaaaaaagccagcttgaaagggcttttattagcaaagcctgggacaacttgatcatcaagtattgtaattacaatattggagtgtaactcattgagtaaaagaagattctgagccaatactggtatatatggtaggcagatagataagataaatgatatatggatggatgaatggatgaatagatggataggtagatagatggacagatagctctaccttatagtagaatgatatacatgtaaaaggaatgatagattatacaaaatcacaatttaccacccattatagaaataatttatgtaggcaagagtcatcaaaggatggtaaaactagtgggtgaaagctcgagaaagaagatatttatagtctcaaactattccccacaaattacttatttattacttaatatgtacaaaacatatattaaatattctaaacctagaaaataccatctaaacaaagtgataagacttaaacagcaccaagaatgagacaatggacattacatacctgcagaaatgatgtactaagaacacaacatcaattcatggtacttcctcatacaatgtataaatcacaagaaaacatgagatgaaactaaattctggaacattctgcaaaataattgacctatattctctaagaataccaaggtaataaagacaaggaaagtctgaggtgccgggcgcggtcgctcatgcctgtaatcccagcactttgggaggccgaggtgggtggatcacaaggtcaggagatcaagactatcctggctaacatggtgaaaccccatctctactaaaaatacaaaaaaattagccaggcgtggtggcgggcacctgtagtcccagctacttgggaggctgagacaggagaatggcgtgaacccgggaggcgagcttgcagtgagccgagatcgtgccactgcactccagcctgggcgacagagtgagactccgtctcaaaaaaaaaaaaaaaaaaaagactgaggatcttttccatattgaagaaaactgaagaaacataacaactcctggacttcataaacaatgttattataattggcaaaatttgaatggggtctatggattagatagcaatattttatcattgtaaattccctaattttaaagatttgattgtgattacataggagagtgtccttgtttttaggaaatacacattgaaagtaataagatatcatgtctgaaacttactctccaatgcttcagaaaagtgtatagtaatatgcacatattatgtatattgcgtgttgtttgtgtgtatagagagaaagagagacagagagaatggtaaaataaatgcactaaaagaatatttgggaacttgattgaggagtactatcaagattgagagatctttgtattgcttctgcatcttttctataaatttaaaatcatttcaaaataaaaagaaaaaagcttaattttcagtacccctcaataaaaagcaggaagccctcttttttaaagcgacaaatatgtgtgtgtacacatacacacacaaatacaagaagcaatgacccagagtctacaaaaaataattcaaggttatattaaactatcaaaatataacaaggaaaaatggttgtctatttcacccagttctgtctcctagaagataaatctcaaagtttgggttccaaatttatgtccacttttctctgtttcaatttattgatttccagtttctcagagaattattttggcagattgtaccctttctaatatttctcagtgagaccaccttccaaataattctgtctaaagttttataaatgttctcaatataaccacatatcatatctcttccatgtagaaaaacagagagattttttaaattcgtagacaatacttagtattttaatttgaggaattgtgcctgaaaattaactttttctccccctagtgtttggacataaagcatggggcttggatggtaggcagggaagacaggtatcattagaggtgtttctttccaggataggggttttgtaatacaataaatttcatgttttctgtgtgattttctttaattctagatattgactttcatgattaaagtttaagactatcttctaggtaggatatcttttgaaaagaaaatcttggtctcaatattagagtgataagctataataagcaattctctgtgttacattcttttaagttttaaaattttaaatcaattaacaattgagttttaggaagtacattagtcagggttctccagagggacagaaccaataggatatatatgtaaaggggagtttattagagagaattgactcaaactattataaggcgaagtcccatgacaggccatctgcaagctagggaaacagagaagctagtagcctggctcagtccaagtccaaaagcctcaaaaccggggaagccaacagtgcggcccttagtctgtggctgaaggactgagagcccctaggtggccactggtccaagtcccagagtccaaaggctgaaaaacttggagtctgatgtccaagggcaagagaggaagcaagcctcccgcaggccatgggaagagagagctagccagagaagacacagcaagctgcttatccccttcttcagcctgctttgttcgtgccatgatggcagccaattggatggtgtgcactcaacgtttagggtgggtcttcctctcccggtccacggactccatgtcagtctcctctggcaacaccctcacggacacacccagaaacaatacttcaccagccatctaggcacccctcaacccagtcaagttgacacctaatattaactatcacaaaagttataaacttttcccccaaaagaaactaaatgctgtgtttgctacattgggatgatgaaaaaaattgagttttggtagaaatcccagaagtgttacagaagtcccagctagattcaaaatggtaatgatgagatgatgacgatagtagtggtagtgatggtgctgattgtgaggatgattataaagaagaaggaagagggaattagaatgactatgttaatgattatatgtaccaacatttgagagcctatttaggtcctgtttaaagtgccctgcatacccttagcatacttaatcattaaataactccacgaggtaagtattatcattatgcacattttggaagtgaaaaaaaatgagttgcagagagatcagataaattgccaaaggtcacagaatgaacaaaaggtagaaccaagctccaaacccaggtcaatatgtctccctcgcagtaacatgttgaattgggagttgtccttctccttcctggcccctctaccaacacacatcaactatattccctgaattttcacagaacatagaagttggatggaaaataattttaatcctgtccactgttgtacttcagatatacagacatgtatgcctgacatcatatataggggactatggaagcaacgttatagatggcaaccaagaagcctgtgtgttagagaagagagaaattcataagtgagggcaacctcggtaactgcttgaagggagcaagagcagtggttcatgatacaaagcagacattactagaatctacactaacctagagaaagtgtttctatgtcctgggaagttgaaaactacattgcaaatctgaaagaaaaacaaccgaagattccagcaactctgctgagtggccctctccctgtcccattgccactgaacaggggatataagagggagaaggcactacccagatcacagtggggaaagcagtcacctcaatcacgttcaaggtagagaaggtcaacacaactgcctgggcagccagaggggacaacaagagccagcaggcatcagagcagtccagcactcagccaccaagaaggacaagctgagaaagagctgcagccgaggcaggcaggggagcagcaaagctggggtgtacatttcaaactaggacacctttcttagaaacctgaactgagaccccaaaaaaacagaaggactgagtttctctgtttaagagcgagagctcgtcagttctgaaacctagaagtaaaagcctgaaagtggcctattctcaggtctacacagtctaggcacccaagcatgcttgggttaacactaatttaatgacaggctactctatttttaataaatatctagatttgctttcttgtattgagtccttaagatgcctacttttgctttgtaagtttctgttataaaagatgagccaggaaaacgtaaactatgattctgtgtattttcctaacaaaccattcaaccatccaaatgtgaaaactgatgatttgctatctttcaaactgctcttcccacacggtggtaaaagcttgtttagacattcaaagggatctggtgcactaccatgacttcattcattcactcattcagcaaatacttgttgagcgcttactctgtgccaagtacttgatatgcacaaagcaaagattccccaccctcatgaagtttgtagtgtggtgagagagatcacttacataatgcataattaataggttaattattggggatgttagaagacacaagtgctatggagaaaagaaaaagtcaagcagagtaaaagaaatcagaaatggcagacaagggttgaagtatcaaggttgaagtattaagtggtatgaatagttttaacatttcgtaatggaaacagtcagaaatgtttaatgtgacccattcccaggctgtctccaaatgcaccaccaccaactcattataaagttgtccagataagaacttcaaattggaattatttaacttggataattctggttattaaatgtaactatttaacattgtataggatgacataattgagtgatacttcatagagttgtatagctttcgaagtgaaaaaggtctaattagaaaactaatgacttctcatctcatgggtaagaaaattagaccctgagaatttaggtgatttgaccaaaatcactgagtcagtaaatagcataaaaagaactaaaatgtagttttatcaaaaaagtattttctgtaaacacaaatttcaatttttttgtaatgagtttacttctctatttcctgtttactttttattcctaatgcccacacaattagggaatttcattcccaattcatcctgtttctgcctgccctgcttatttagtttgtgtgtgtgtgtgtgtgtgtgtgtatgtgtgtgtcctttaaggtgtttctttatgcagatacaagaaaatatgaatatattatttaatcacttgttaatacaaaaataacatgtagatattgctctatactttcatttacttgtcttttaaaagagattccttacctatttccttaaattctgcagttcctatcttgcagtgaaggatataatactagcaatgatcttttcttagtagagattgagactatggaacagagttctttaatcaaggtgcagataacagaaagcctgacttacagagatccaaacaaataggcattttattcttctcttacaacagaatccctgaagtcagtggttactggcattgagtcagcagttcaggaatgaatcagggacctggatcttgttttctcatcctaccattcttgaaagttggcttttaccttcttgcttgcaattgtaaaagcctattgtacctttaggcattatctacatggatggagagaggtgatgaagaggccccctcctcaatcaagtttgcattattgttcaggaaagaaacccctccctgctagccctcccattacacttcactggcaagagctgagtcacatgcccactcttagatcaatcacaggccaagaggaatacaattatcttagccgtataaaccaatcagatatatagggatgccaattttttgtaatggttgcatagtattccattgtacagaaataagtggttctctattgatggactttagattgctttcaatcttacactattgcaagctatgctgcaatgactatttctggaattatgctattttgcacaattgctactttatttgaaaaaaaaatctagaagtacaaattattttaaccaattttaaatggaaacaatgttccaaaatacgtagtgcacaatgaaacatgatgacatgtttatgaacattatttttaggttgattgatctgatttaatgatgtttcattcattgattcaacaattatttttagattcactactgtagagagagctctgtataatttcaaggaatacaaccataatctttgctttcaaaggacataaaagtttgagaatttagcaggctgaagttaattaatttaaaactttttctaatttaatgtgtgttttactattgataatgttcaaatggaggcaattaatcgacctttttctccctaaggtgtatataatcatttttccaatagggaaaagcaatccttcaaaattttagacactttactaaaataacttatcagccttagggttgctattaatatattaattttgtcattgttatggtgacttcaaataagtctagtttgcagtttgacacactgattcctctggggttttttctacactttaaggtttcactgtgcttccttggatataagttttgtaaaacagttcctgaaggagagggaacaatagcccaactcttaaagaacaaaatattattttcaagatttttttgccacatatttttcaggaaagaattcagaagtaaaggcattcgttaaaattttttcaaacctaagtgtaggacactaaagacacccattctacgaaattgacacttacagagctgacaaattgcataaagggtctttgtggatattgatactagttatgcagacaaaagaggctctccaccaagaatttatcaagggagtctacagaaaaactaattgcccaaatctcagaatattcctagctagtgttgttaaggaataaataataacaaacaattaagacaccaagtataaggaaacaaatatcttaaggttacaaaagcaattcatctaaattgaggacctccatgaagagggtttgagtcagatctagagctgtagtccagatttgaagtgaattgctagtttttgtagagccagggaaagccctggcttcagaacggtgttgtgattgggagcatagtgatggctgaggataggatgctgtggatcatatcctcagcatttgatagtggaagcatcccatgagtcaatgatttaccttctgagtctcagtttcttcagctatttgacaaagataatatgcctacttttattcaagacctgaacaaaaagaatctaatgtaactactagacaatctgcaatgtgttgaaacttgcatatgagtatgctgtttggtttttgctgggcaccttggttagcatatcactaaagactttcccaggcctgacctgagccttcttttccagcaccacctgtctttacaccttacctcataaatttcactttcaggaaaaaaaaaaaaactccccataatgccacatcgtagttccccatgctgtttcacatctctgttcctcttgcctggaatacttgctctgttttcctcatgactagctcaagggtaacatccaccagtggtgttttgctcaccacttgctttctcacagggacaagtcatgcatgtgcatgtgtacccatgtgtgttgggaatgggaagaggaaagatggcaggaaatgggcaatgaggcttgttgtggtttgagtttgttccccacaaagttcatgtgttagagacttagtggccattataacactattaagaggtgaagcctttaagaggtgattaggccaagagggctacatcctcatgaatggagtaatgctgttatcttgggagctggttagttattgagggagtgggttcttgataaaagggtaagtttggccccacttccttctgtcccacatgcttgcttgctctctgccatgggataatgtggcatgaaggccctcaccagaagccagcaccatgctcttggacttcccagcctccagtaccatgagccaaataaagtttcatttgtataaattacctaatctgtggtattctgttatagcagcagtaaacagagacaagtaaaacaaggctgaagaggtctttcaagaccagattgagaagggctttacatgttacagtaaggagttttacctaatattatgggcaaaatcttagggaggttacagagtattttagtaatgagaggatcagatattttttatttaggaaatgatctgactgcagtgaggaggattgactggagagaaagaaaatgtcacaaatccaaatagggcttgccagacaaagaaaaatttcactatacattgtcttctcctctcctttggagtttccagaagttagtgggtttgtgcatgggtccagtgagggtggtatttcacgggaatcctggagacttataaagcatcatgaagtgagtgttggggtccctgaggcatgagtctaattgtggcagcccagcctctccccaaggtctgctctcagccactctctctttacaacagaagatagaggacaacattaatatattctaataataaaaaatagagggaaagccatataaataggggaagacagcaaatgaagaaggagcatgcttagaagggcagttaccacctgggcgctgtagctcacacctgcagtcccagcactttgagaggccaaggcgggtggatcatgaggtcaagagatagagaccatcctggcctggccaacatggtgaaactcagtctctactaaaaatacaaaaattagatgggtgtggtggcacgtggctgtagtcccagctactcaggaggctgaggcaggagtatctcttgaacctgggaggtggaggttgcagtgagccaagatcgtgccactgtactccagcctggcaacagagtgaaactctgtctcaaaaaaaaaaaaaaaaaagaagaaaaaaaaaaggacagttaccatttttgttcatcacctctctgccagtggcttttccttttacagtagtcctcaactcaaattttagaatgcactggaatcatctggagggctcattaaaccatagactcagtgattctgattctataggtttaaagtagggccaataatttgcgtttctaacaaggtcccttgataggctgatgctgctggcccaggaaccacactttcagaaacagtcttattttctctcttgaacacctcaataacatagcagggtagtattaacagaagaagaaacacttattgaagaattaagtggccaggcgcggtggctcacgcctgtaatcccagcactttgggaggccgaggtggatggatcacgaggtcaggagatcgagaccatcctggctaacacggtgaaaccccgtctctactaaaaatacaaaaaattagccaggcgtggttgtgggcacctgtagtcccagctactggggaggctgaggcaggagaatggcgtgaacccaggaggcggagcttgcagtgacccgagatcgtgccactgcactccagcccaggcgacagagcgagattccatctcaaaaaaagaaaagaaaagaaaaaaaaagatttaagtaacctgccctctgccctaggtcaactagtaagtaggaaacaaaacttggaagtcagattctgttgggcttgaagtccacacttttttacctcacactcctctttcctccacagatgtcttgagacagaggacagggcagaggaagctcccagctatttcctttccatcagggtccaaagtacccacagcacagaaatatgagggtggagtttaaaggaaaatcttgtacctctgagcatttctttttctccagaaaccatttcaactccttgagttcctcactgtggcccagaaggtgatatccagatacttgcatgtgctcagataatatctcctctgagggaggcacaaaatgagcatcccacttttctacatgcaagataatgcctggaagcgtgtgatctgtccacatgcatcttgccttgtatgccttttcaagcgagttccagcctccctcatgcttacatcacttacccccagcacttccaagtgattttataaggaatcgccccactgtgctccctgcaggcctttccccatttttcataaatatttctacatgctatagatgtcccatcaaaccctgtttccaactttgaatgatttgtttgaatgccttcacttgcttttgtccacttcgggctagaacaaaaagaaaacaacaaaaccaaaaaattaaaaaacaaaaacaaaatcaccctggaaaagcatttactttgaatatacctgtgctttgaaattaattgttttatctataggtaataagtatgtaaaaagccaagatgctgcttttgaccaaaggaatcatttaaacccaacgtttcatttttactcctttctgaaaggtaatattcaacttacaaagagggcaaggtttgcatgaggagactttaaagtctttctatgttatttatactgcgtatgttcccacattgcaatcatcaaaagaaggctagttctcccaagatttttttttctacataagatattgttgtttttcagggttttttgtttgtttgtttttctgagtaaggaggtagtaaacatcaataaaaaattttgcctaaaacagaccttcataatcctcccaaattttcaaacttacttcaccagtatagtttctatggacttagtaacttagtattcactgagttaggcttgttataatttcatattccttgactttaggtggcatttttgtccatgtggggtttaatttatttattattattatttatttttagacagggtctcactgggtcacccaggctggagtacagtggtgagatagttgttcactgcagcctccacctcctagacccatgcaatcctcctgcctctgtcccccaagtagctgggactacaggcataagccatcacccatggtgaatttttgtatttttttagagatgaggtttcatcgtcttgccctggctgttctcagactcctgatatctagcgatctgcctggctctgtggggttttaaagccattacactgtatacagtttaggtgaggttaaaaaatagatataggtgagattaggtgaggttaaaaaaatataaatctagattttaaaaatgtaatgcattcttcctcttcctctcacttttcttcttgtctccttccttctttccttcttacccttcccactttctccttgtccctttccctgtcctttcaatcccttccctaacacttcagcccaaaagctattcgtcagggccgagcaagacacagtggggaggagggctgctcagtttcacacgttaaaactccagtaagatgaagagggttctgtgctaaggtatggtggtgatgggtggcccagcatgtaaggttgccagatttagcaaataaaaatacaggaagccctgttaaatttgaatttcagataaacagtgagtaatttttagtacaagtatatcccatgcaatatttgagacatacctatataaaataattaccgtttatttgaaattcaaatttaattggatgtcctatattttatctgccaactctgtgtctgagcccagtgtggatgggaagagcattcacatggggaaggggcagagggggcagcaggttagcatggggtgccagagccaagcaagatgccagggacatccccaaaagagaaggacaaaggcccaagagattgtttatgcgcctgggaattgatcaaataagaaaatgtattgaggaaaattttgaagatgggagtcacaaatttggagtgggagaaaactagaatgaaacatgttatgggactgattgagcttagagataccagtgtgaacatatggttgataactttaaaatgccatatgtacatatttgctttatattcatagaatgcctctagtgcacaaaagagttgcagcagtgtttatctctaggtagtaggagtgagtagtggctggggcacaaggtggaaaaattacttttccttattttcctttgctacttttaaaatttttaatttatatttaatttattttttaagtttaaattttaaaatttttaatttaaattgtgctgtgtacattatctgtactagaaaatgtatttttaaaatatttatgcattaaaaaataaaactggctttatttcaaatcagaaaccttagagattttctagaccaaattcctgtatccttgaggtcacagaaccaaatatagtagtgagaaagggctctggattcaaattctgatgctgtcacatggcagcacagtgcccttgcctctccgaatgtcgctttctcccactatagtacagagcacaaagcaagggctctgaagtcagcctgcttgaggatgagtcctgttcagcttcaccttgtcccattgcatgatcttgggcaagtcaactggcctctttaaactgcagactttgttatgattgcattagctttattccatcaaatccaagaagccctgggctgtttaaaatgcacaattattttatgttctactaacaacttttttaagtcctagaatttattgtaagttgtcaaccactgtgaaatgcaggctgatttcagagacattaaaatgtgaaaaacattcatcttagaatcaatgtagtatgatcgcacttaccaaaggcaaaaaaataacagaaaaagaggttcaatggtaattgagaagtaagtggacagaagtgaagaatatcaggctagcatccagtaaacattacagatgggagaaaaagggaagtgaagatacaatgggaggtaaatacttcaatctttgcacaatttagatcaagaaaataaaaacattttgcaagcacttgtaaacaaacaaaaaatataaacaaaatagaattggggttacctcccaggaaaggctgcactgttgtcaataatgtgaccaaggcgatggctcaaatcccagcactttgggaggctgaggcggatcacttgagcccaggagttgaagaccagcctgggcgacatagtgaaagcccatctctaccaaaaaaaaaaaaattagccagatgtggtggcgcacccgtagtcccagctacttcgggggctgaggcaggaggaacacttgggcccaggaggttgaggctgcagtgagctgtgatctcaccaaagcactctagcctgggcaacagagtgagattctgtgtctctaataataataatagtgtgaccaagaacggaaacccactccctaccttataatgacatgttaccaagaggcagcagatgtgtagttctaagttgggcacggaagcaggcagcattgaggaccagccagttgagttggggtatagactgcctctgggcttgcacctgggtgaagtcaaaagagataataaaaaggggatttggggaggtctgtaaaatatgtaacttaaggatgaatgcctgagaactctgggggaactctgggcctgcttaattctcctgttgaccctggtgagacacagaaattttcaaaaagagccagacatgatggtgcgtctgtgtagtcccagctcctgcggaggctgaggtgggaggattgcttgagcccctgagttccagatcagactggacaacatagcaagaccccttcatttaaaaaaatgttttaggctgggtgtggtggctcacacctgtaatcccagcactttcggaggccgaggcaggcggatcacgaggtcaggagattgagaccatcctggctaatgcggtggtttaacatgataagaccatcctggctaaccccgtctctactaaaaatacaaaaaattagccaggcttggtggcatgcgcctgtaatcatagctactcgggaggctgaggcaggagaattgcttgaacctgggaggtggaggttgcaatgagccgagattgcaccactgcactccagcctgggtgacagagtgagactccatctcaaaaaaaaaaaaaaaaagttttaatgtaaataataataataattaataatatggctctgtacctagttggccttcactatccaccaactagtcagcactctataccggaactgagtcctggaaggagggaaccatgtattggtggcagacagtggcactgttcagtatcactgcttgggaagaggggagtcctgatttcctcgggagggtcagggagggtggggttggggagtggagtgttgaagagggagtagacacttacctcatagaggtgttgtaggaattaataacatcaccatgtctggtacatggtaagtgctcagtaatgctagctattgttaaatgaaaaaaaaaagctttttatgccataaaatgctatgcaaatatttatattgtgtaattttttaagcaccgtcaagattagatcctgattcttgagacttgcgattcagaccactttgcaacatgccacactgtgcttatttcatgtactattactttaaattgaactctttttcaataaactgcattatatatacttgttcataaacaatatttttgtgcatgggtgctgtgtatctttcagatatttccataatatatacacacaatgtaacacagaaatacagatttttcttttaaagagcaaagcttcagcagtttctcttgaattttattctgtcatttgactacattatatttctgatgttcaatttgtactgagtacattatggacttctctagggaacagaaagaattcttttaagtaaacataaaatgctttgataaatcaaaacatgcgaatgagatttctgttaaaaatgttccaatctgttttgagacttgaaataaagctgtctttaacataataaaacctgttaacctaaaggcaacaataaaataataataataactcatttgttatagaagtaatgcatagggcttattttgaaaggttagttatattaaatacaaagggaatcttgctataaaccagttgtaaagaaacttaaaagctgttaaggtctatgctatctgacttaagctgacaataagtataagtttttggaattcatatgtaaccatttatatcataaactagccattatgtctctcatgttgaaaagtcaatcatattctaaatattctggaatctcacctcagtgctagctccataagaacagggaccttgccttgcccatccacagctgtattcccagcaactagaatagtgtctgccataatagggttcaataatcctaaatgaatgaacaatatacatagatttttgaagatttaagaaatctcgacactcaaactttcaaatataggcccagagcagtggctcatgcttgtaatctcagcactgtgggaagccctgatgcatggatcacttgagcccaggagtttgaactacctgggcaacatggtgaaaccctgtctctacaaaaaaaaaaaaaatagctgggtatggtggtacaagcctgtaggcccagctacttggggggctgaggcaagagaatcgcttgagcccgggaggtcaagactgcagtgaaccgtgtttgtgccactgcactccagcctaggtgacaaaatgagaccctatctcgaaaaaaaaaaaaaatcccaaaataaaaaacaggtagttggggaatgataatttaaaatacaaaatggtcctgtgagcttgcaagtttgatctaggtcaaaatgtagtggaacagagatctgaaaatctcaactcagctgactaaccagctgtgtttagtaagctatgaagctgtgccatttaacttctctgagtttccgtttcttcttgccctctaaaatgactggaggtgaaaggagggaaagatggctggagctaatgattctaagggcccttctagtccccaaattctgtgagatataaagccccaccccaaggcatttatgtgtacgtttacacctttttacctgagatgaaggcagagaaactaatagctaagtcacccaaaattggcaatgttgtagagactgtagagtggccttcaaaacctgttctccccttcctcctgtgcacagagctaagctacatttccccttctcctgtgcaatgagttgtggccatgtggccatgttctagggaatagagtgttagcaagtggtatgcaccacttccaaacctggctcataaaacctcacatgtatgcactgccaaactcttgcccttccaacagtcaggaatgatgaactccacccccacctcaacacacacagccagagtgactttagaagccacatgttgaacatggtagactcactatcagtctgaattactgaataacttcatgcagtagaacacctactccctttctcacccccagaaaatttgggatacaattctccatgggtctctcaggtttttttgttttgttgttgttgttgctgttgttttgcacaccctatgagcaaaagcactcaatccctgcaattcttgactcaaggctattaaaaaaaggcatagaatccctttgttctgggctgtcttttcaagaaagtttgtgtagtgaacaaacttgaaagatagatagggtctcccttggaagcaaaggacagatttgtttactgtaccatataataaagatgatatctccctatggggcaaaaggcagctatgcttccagctaatttaaaaagttgtgggttctctaagctccagcatccttagctttggcataagctctctccatgagcagcactcaccagggacaatccatattgctcctgtgggacttgggcgacttgggggaactgacataaacatgaagcttatgttgcttgctatggtaggagtaataaagtcatttgtctctgacccaagaatttcatgtcttctgccaacttccatgaaactattatgggctaacttgtagtaggcttgcaagtagaataagatcccagacattcatagtacttgacacctgcttactttctcaccctagaaaacccctggactcatatgaataacacattacagtttgggtctatttttacaaccagtgcagcagcagtcacattcctattaaaaatcaacaagaagttagaatagattaccttatatttgtcaaataataagatgaaatttaaaaatatgagtctgttaaatgagatattcatattaactgaatacttttcaaaatgtatcaaagggtactgctatggttaaaatgtatgtgtgccttcaaaactcatacattgaaacttaatccccagtgcaatagtattaaaaggtgaggactttagaaggtaattaagccatgaggattacactctcttgaatgaaattagtgcccttataaaagaacttaagggatcctgtttgatcctttttgcccttttgtccttccatccttctgccatgtgaggacacagcaataagttgcctcttggaagcagaggtccctaaccagacaccaaatctgctgacgccttgttcttggactttcaaaactccagaactgtgagaaataaattactatgacttataagtgacccagtctaaggtgttatgttgtagcagcccaaacagactaagataggtacactagtcctgtaaggtatctggtgaaaataatgtcctatgtttacatgttttgcaatacattcactgttttatatctcatcccccttccctggagagtcacaatgcacattagcttattaacgattctgagaaaccagtaataagaaaactgtttgcattatttaaccagtagcatttcctgcactttttcagcataacccctactgacattctatgcaatgattgtccatggaatacacagggggaagaaatgcagggttagatcatttctaaaatccctttatgcatctatgatccaaatgtctgaaaataagtaggaaacacatttattagataaatatgaatacattcagtgcttcttaaattttaatgtgcaaacagatcacctgggaatctagttaaaatgcatattttgatttagaaatctgtgtaggacctgatattctgcatttctatagagttctcaggtgatgtcaatgctgctggtctacagaccattccttgaatagcaatactctagacaatatagaatctaaaaaataatggttacatttgtggttattgttttaagacatgtagcaaactaatcaataagaatatgttactacaaataagtttggttttgctttatttttttagaaatggggtctctattgctcaggctggtgtgcagtggaacaatcatagctcacttcaggctccaactcttgggctcaaacaatcttccacctcagcctcccaagtaactgaaactataggcacacaccaccattcctggctaatatcttaaattgtttgtagagatgcagtctcactacccaagcttgtcttcaactcctgagcacaagtgatcctcccatctcagctttccaaagtgctgagattacaagtatgagctaccacacccagctgtaaataagttttaattatatatttaaagaaacatggtcccaatttgttgcttcattttagacaactcgggggtgatttcagaatttctcagaaattcagaatatgtttacttagtagaaaatttgtttattcctgataaattcaggaatatatttacttagtagaaaaatgtatgagaatcagtttgggattctgcaccattgtgaagccttgtcccaacttagaaatttgcatagagacaggtcttctacaaagacacaaatagcctgtgagtcaacccagcagagggaattaatctggccatatttttacctatgcgcttgatatggtttggctgtgtccccacccaaatctcatcttgaattgtagctcccataatccccacttgtcataggaaggacccagtgggaagtaattgaatcatgggggtgggtttttacccactgctgttctcatgatagccaataaatctcacaagatctgatggttttataaaggtcagtttccctgtacacactctgttgtctgctgccatgtaagacatgcctttgctctttcaccttctgccatgattgtgaggcctccctagccatgtgaaactgtgagtccgttaaacctctttttctttataaattacccaggctcaagtatgtattcattagcagcgtgaaaacagactaatacagtgctctatactaaaagttactaaagtttattctctgcaaaaaatgctttttttcttttgttttctctcagttcacatttgagcttttttggcctatgtttcagaaattcttttccccactttgcacttataattgtgtagcagaattgtttcaacaaaatctaaaggggtgtgagatcaggtaaaaaggttataaggagatccacttccaggagcataaaaacataatatcaacgaagttacttccaacagtaaaaagagagaaagtttggcatgtgctaattaaagactatgatgtgtgtgaatttgtttccaattatgagatctgaatccaataatgaattctttgaacatctttccaaagaaacatatatggctctatataaaatttcataacaatccctaaataaaaataatttgcaaccttcatgatacacaagaagaaaaatgtcaaaggtacactgtatgttctcaatggaataataaaaaacatttaaaattataagcatctggggaaaattcatgatataacattatgttaaataaaaataaaagaaaatgtatcttttctataagtacacaacctaaaaaaataaaagaagtttagcgtgtggggtcataaaatcatgagtaaatttccctttcacatagatttctgttaatactgcatttctgctattggtgtatgttatttaaaataagtagaaaaacagttactaattatggcaataagacttagaaaaaataccttttttgttttattggtgttttttaatgtgttgaagtggaagaaatgtttatctatcagaattttctgtcaattttctgtctgtagtgtataagactaagctatatgtagggaatagataagaaacccagcagaaaacagcccactcaaagtaaactgctgaggggagtttaatagactcttcacaaatgtgtgggcaaggatttagggaaatcagcaaggaatcaggcagcccctgcactgccggagctgggggcagtgccgggctcacaagcagggagctattatcactcttggaaccaaagggaaaaggatggagcagtcaatggaagctgggttgcattccttaatggaaaggctaccttagggagggaaacagctaatggacagcatgctgacagggtgagcctaaggaatagataccccaacctcacagtactgacgcatcctaatcataaatcccaatgaagccaaagaacaaggtagctggttggtgcaggtcagctctccaggggcagagatagagaaaaaaggcatgtggatatggagagatgtgtggacaataagcagaacaaggggttatagaggagtacaggaaggggatctgtacatttacacatgggttcacacagggcttatgctaagggcttcaggctaatgctaatgaagaaaaatgtgactaaaggcacttctgaaaacctggagcattgcgtaaacatgtttatttctccttatgtgcaacagtgcccgtgctgtgtttgcttggctgaaataaaatgttccaagacatcctgcacaatcctttgcattaatagcaagagctaatggatcttaaaacaagaagaatcttatcagacctgtgtctaaaaacctctcctgcagaaacgaagaaaatttttgcaatctacccatctgacaaaaatctaatatccagaatctacaaggagcttaaacaaatttacaagaaaaaacaaacaatctcatcaaaaagcaggcgcaggatatgaacagatacttctcaaaagaagacatttatatggcctacaaacatatgaagaacgcttatcatcactgatcattagagaaatgcaaatcgaaactacaatgaaattccatctcacaccagttagaatggagattattaaaaagtcagggtacaacagatgctggcaaagctgtggagaaataggagcgcttttacactgtaggtgggagtggaaattagctcaaccattgtggaagacagtgtggcgcttcctcaaagatctagaaccagaaatactatttgacccagcgatcccattactgggtatatacccaaaagattataaatcattctactataaagacacaggcacacatatgtttactgcagcactatttacaatagcaaagacttagaaccaacccaaatgcccaccaatgatagattggataaagaaaatatggcacatatacaccatggaatactatgtagccataaaaagagatgagttcatgtcctttgcaaggacatggatgaagctggaagccatcattctcagcaaactaacacaggaacagaaaaaccaaacaccgcatgttctcactcataagtgggagttgaacagtgagaacacatggacacagagaggggaacatcatgtaccagggcctgtcaggggatgggggcaaggggagggaaagcattaggacaaatacctaatgcatgacaggttgataggtgcagcaaaccaccatggcacatgtatacctatgtaacaaacctgcatgttctgcacatgtatcctagaacttaagtaaagttattttacttaaagttaaaaaaaaaaaactctgctgatcacatctttttgtggcagattttatatatcatatatataattaataaatcatcctatgccctcatggagactttcttgacttctacatttctcaaaaaagatatttttttctagacatataaattgttgatgatagtgttggtgatgatgatgatgacagctatcacttattgaatgcttactatatgtgctaaagtacctaggaagtaggtaatattattgtctccttttaacatacgggtaaaaaactaaggctaaaggaagtccattaacttcttcaaatcatatcaccagaaatgactggggcttttggaggctgtcagactacagagccctcaattttaagcagtccattgcctttctgaaaacagtatattatatcttttattttaatattgagaaagttgattgatgatctttaaaacttttccttaatagctaattaaatgatatactaaactgtcaaagatggagaaagaacaagagaaaagacatcagagagggcatgaactgaggggagatggaggacttggaaagttctaagctgatttcagtctagttgttgtctcctaccattcacaaatgttctctgtgactttccatctgaactgacagttttcctttctttccttaaatgagtgtcgtgaacacttgggagctaagttggatcactttgtcgaatctatattaaagtcctacatatgaagctctaatagttttgtatgccagaggccttacatttatcccatgtcagttttgttcaatgaaattctaagaaatatgatggaactgtgcatctgaccacatagcatctgtcagtgtgaaactgctgtactaacatgtcaagctgattttcgtaaaacatgccaatcaaccaaacctgggggttatctatattacctaacatcaacgcttaaaacattaaaaaattataaagaaataaataataattcttactcaactttggaatatcaaaagataaatagccaattgtagattactcaggcttgatgcttctccacctctagactgcaaggcctgcttttctatttatcagatgatagtccatactatgtagaaatggaacccttcaataagttaattcagtgacttgttaacagctttgacaaaaaggttggtgacaaaagtaaaatgtttatataaaatgacatattgaatttaccagtgggattcaattattcatgatatctattaacatgaatgctgagaagttgctataaatttcctaaagcttggactgccccatagcttaacccatatttagcagaagagatgagaaagaattcactggctcctcactggtctgatttgtctggcggccatgcaccagtctgtgctgttgcagatgtgagaactgtaggctgatgaagacaaccctgttacattccttgtctttgccacatgttagaaaagactttatttgggcaaggcctggatttccaaaatagctttctgtagtggtcatctgttgcttttgcctttttgatatttattttcttcttttccaggtacaatacttcaaatttgctttgggaagttagccccactctgaatttcagaacatgtggcttgagatggatcttgtgatccatgcttaggctacctaagccctgaatttccttagccatattgctttttcagagtgggcacatgagccagtcctgccctaccatcaaaattccatctctttgggcacactgattggtttagaaataggcagaagcccaagttaattcaaacatagttaattctgaatcctgggaaggcgtgctaataaaattgtcttttttgctgggatgactagtgctaacaatgaaataatcttagagatttagagcacccacacagaggtcaagaatgaagcccacgaatgcaagacagagaaagtgaatgattcctgataacattgtttgagcccctggatcaaaccttgcctgaagataatgagtactgaattttcagtcatatcagccaattcctccttccatttgcttagatgagtttgaattgcgttttctgtcacatgcagtaagagagttctaaataatatatttctgaactacagttagtctcactttccaattctcctagaaaaatctccctattggtctcccttttgatctagcactctcctgttaaagaacatttaacaataaatctttagtgcttagcttgacaggcacaatctggcctgtcccttaacttggctgactcaggcatgtggcttagcagcatgaggccagttggaaggaagaaaaaataggacttggatgggaagtggtcagggtgctgtggcctccttggaagagggcattcgtggtgtctgggaatagtgccccgtggtcatttctaaaatcaggagtgaaataaatatggaagattggagacatagagcaaatatttcagagacataattctggtaaatctgggtcatcaaaaggagtcgggattctgcagcttaagggagaggtaagcttcccttggtcctttggtgcttgaacctgggtggaggcaggcaggcagccagccattggttgggccaccagagctcactctggagagcaacccatacaaagccccacctgcagggggaattcaggccactgccaaatgcagtaaccctgttgatatttactcaagaagtcagatggtcataagcctgctcctatgagcctttgatagcttcagttggagaatacagaggcaggaaaccaaggtagctgccaacaggtgcaacccactttccagctccatgcattggtttggagatcagcctagacttgggcttaagtcccagatccaccaccagctagttatacaaccttaagcaagtttttaaattacctatgcctcagtgttttcatccacaaaatagttatttttttcagaaagtaatgatgatgattaattgagaaatgtgtgtaaaatgcttagcacagagtagatactcagtaaatgctatttctcaggacacccctacactgtagcttacctgaatatcccatcttctatacatagctgcttctcccatggttacacatttgttttctccccttatgtttccctactgaaattctacccacccattaagatttaattcaaaagtcaccactttcctgaagctttcctcccaactagatggaatcttttttccgctgtagttcttcgtaaaggacagaaaccgcatacacagcagtagttcttaatcttggctgcatatttgaaccatttgaaaatctattaaaaatattgatgcctaggccccaatcccagaagttttgatttaattggtctggggtgaggctccagcatcaatttgtttaaaaagctccccaggtgatttcactgtgcagccaagatttagaactactgatggttgcataagtatgttcttaaataacgtttatcagtgaattcaagctaaggtattaatggcttaaagttttaatagactaatctttagaatacttgtgtttttattaaaagccatgcaatactatgctccaagaatacaaaagtaaacaatatttttttaatgtatagcccaaaggaaagaatcacaatttaactagggagatgcaaatagagctgtgagcatataatatgatatatgagttgtaccctaggaatgtgtcaaaaatagtttaggagcacaaagaggaaaagcctgctaatttagaggtggcagaaaaggaagagaaaaaacttcaaaatgtggatgagctgagtgttgaaaggtgacaacaggtttgcaaggtctgagtcagaaggcttttcagaccatatatgcaggtgtcaaaatgtgtggctcctcaccaaaaacccatctgtacgtcaccatcatcaaagaccaaaggtagataaaaccacaaagatggggaaaaaacagagcagaaaaactagaaactctagaaatcagagcacccctcctccaacaaaggaacgcagctcctcaccaacaacggaacaaagctggacggagaatgactttgacgagttgagagaggaaggcttcagaagatcaaactactccgagctaaaggaggaagttcgaaccaatggcaaagaagttaaaaactttgaaaaaaaaaattagatgaatggataactagaataaccaatgcagagaagtccttaaaggacctgatggagctgaaaaccacggtacgagaactatatgatgaatgcacaagcctcagtaaccgatgcgatcaactggaagaaaggctatcagcgatggaagatgaaaggaacgaaatgaagcatgaagagaagtttagagaaaaaagaataaaaagaaatgaacaaagcctccaagaaatatgggactatgtgaaaagaccaaatctatctctaattggtgtacctgaaagtgacaggaagaatggaaccaagttggaaaccactctacaggatattatccaggagaacttccccaatctagcaaggcaggcaaacattcaaattcaggaaatacagagaatgccacaaagatactcctcgagaagagcaactctgagacacataattgtcagattcatcaaagttgaaatgaaggaaaaaatgttaagggcagccagagagaaaggccgggttacccacaaagggaagtccatcagactaacagctgatctctcagcagaaactctacaagccagaagagagtgggggccaatattcaacattcttaaagaaaagaactttcaacccagaatttcatatccagccaaactaagcttcataagtgaaggagaaataaaatactttacagacaagcaaatgctgagagattttgtcaccaccaggcctgccctaaaagagctcctgaaggaagcactaaacatagaaaggaacaaccggtaccagccactgcaaaaacatgccaaattgtaaagaccatcaaggctagtaagaaactgcatcaactaatgagcaaaataaccagctaacatcatcatgacaagctcaaattcacacataacaatactaatcttaaatgtaaatgggctaaatgttccgattaaaaggcacagactggcaaattggataaagagtcaagacccatcagtgtgctgtattcaggaaacccatctcacgtgcagagacacatataggcacaaaataaagggatggaggaagatctaccaagcaaatggaaaacaaaaaaaggcaggggttgcaatcctagtctctgataaaacagactttaaaccaacaaagatcaaaagagacaaagaaggccattacataatggtaaagggatcaattcaacaagaagaactaactatcctaaatatatatgcacccaatacaggagaacccagattcataaagcaagtcctgagtgacctacaaagagacttagactcccacacaataataatgggaggctttaacaccccactgtcaacattagacagatcaacgagacagaaagttaacaaggatatccaggaattgaactcagctctgcaccaagcggacctaatagacatctacagaactctccaccccaaatcaacacaaatcaacagaatatacattcttttcagcaccacaccacacctattccaaaatagaccacatagttggaagtaaagcactcctcagcaaatctaaaagaacagaaattataacaaactgtctctcagaccacagtgcaatcaaactagaactcagggttaagaaactcactcaaaaccgctcaactacatggaaactgaacaacctgctcctgaatgacgactgggtacataacgaaatgaaagcagaaataaagatgttctttgaaaccaacgagaacaaagacacaacatactagaatctctgggacacattcaaagcagtgtgtagagggaaatttatagcactaaattcccacaagagaaagcaggaaagatctaaaattgacaccctaacatcacaattaaaagaactagagaagcaagagcaaacacattcaaaagctagcagaaggcaagaaataactaagatcagagcagaactgaaggaaatagagacacaaaaaaaccttcaaaaaaatcagtgaatccaggagttggttttttgaaaagatcaacaaaattgatagactgctagaagactaataaagaagaaaagagagaagaatcaaatagacgcaataaaaaaatgacaaaggggacatcaccaccaatcccacagaaatacaaactaccatcagagaatactataaacacctctacgcaaataaactagaaaatctagaagaaatggataaattcctcaacacatacactctcccaagactaaaccaggaagaagttgaatctctgaagagaccaataacaggctctgaaattgaggcaataattaatagcttaccaaccaaaaaaagtccaggaccagatggattcacagccggattctaccagaggtacaaggaggaattggtaccattccttctgaaactattccaatcaatagaaaaagagagaatcctccctaactcattttatgaggctagcatcatcctgataccaaagcctggcagagacacaacaaaaaaagagaattttagaccaatatccttgatgaacattgatgcaaaaatcctcaataaaatactagcaaaccgaatccagcagcacatcaaaaagcttatccaccatgatcaaatgggcttcatccctgggatgcaaggctggttcaacctacgaaaatcaataaacgtaatccagcatataaacagaaccaaagacaaaaaccacatgattatctcaatagatgcagaaaaggcctttgacaaaattcaacaacccttcatgctaaaaactctcaataaattaggtattgatgggatgtatctcaaaataataagagctatctatgacaaacccacagccaatatcatactgaatggacaaaaactggaagcattccctttgaaaactggcacaagacagggatgccctgtctcaccactcctattcaacatagtgttggaagttcaggccagggcaatcaggcaagagaaggaaataaagggcattcaattaggaaaagaggaagtcaaatcatccctgtttgcaggtgacatgattgtatatctagaaaaccccaatgtctcagcccaaaatctccttaagctgataagcaacttcagcaaagtctcaggatacaaaatcaatgtgcagaaatcacaagcattcttatacaccaataacagacaaacagagagccaaatcatgagtgaactcccattcacaattgcttcaaagagaataaaatacctaggaatccaacttacaagggatgtgaaggacctcttcaaggagaactacaaaccactgctcaatgaaataaaagaggatacaaacaaatggaagaacattccatgctcatgggtaggaagaatcaatatcatgaaaatggccatactgcccaaggtaatttatagattcaatgccatccccatcaagctaccaatgactttcttcaaagaattggaaaaaactactttaaagttcatgtggaaccaaaaaagagcccacattgccaagtcaatcctaagccaaaagaacaaagctggaggcatcacactacctgacttcaaactatactacaaggctacagtaaccaaaacagcatggtactggtaccaaaacagagatatagaccaatggaacagaacagagccctcagaaataacgccacatatctacaactatctgatctttgacaaacctgagaaaaacaagtaatggggaaagattccctatttaataaatgctgctgggaaaactggatagccatatgtagaaagctgaaactggatcccttccttacaccttatacaaaaattaattcaagatggattaaagacttacatgttagacctaaaaccataaaaaccctagaagaaaacctaggcaataccattcaggacacaggcatgggcaaggacttcatgtctgaaacaccaaaagcaatggcaacaaaagacaaaattgacaaatgggatctaattaaactaaagagcttctgaacagcaaaagaaactaccatcagagtgaacaggcaacctacagaatgggagaaaatttttgcaacctactcatctgacaaagggctaatatccagaatctacaatgaactcaaacaaatttacaagaaaaaaacaaacaaccccatcaaaaagtggacaaaggatatgaacagacacttctcaaaagaagacaattatgcagccaaaaaacacatgaaaagatgctcatcatcactggccatcagagaaatgcaaatcaaaaccacaatgagataccatctcacaccagttagaatggcgatcattaaaaagtcaggaaacaacaggtgctggagaggatgtggagaaataggaacacttttacactgttggtgggactgtaaactagttcaaccattgtggaagtcggtatgatgattcttcagggatctagaactggaaataccatttgacccagtcatcccattactgggtatatccccaaaggactataaatcatgctgctataaagacacatgcacacgtatgtttattgcagcactattcacaatagcaaagacttggaaccaacccaaatgttcaacaatgatagactggattaagaaaatgtggcacatatacaccatggaatactatacagccatgaaaaatgatgagttcatgtcctttgtagggacatggatgaagctggaaaccatcattctcagcaaactatcgcaaggacaaaaaaccaaataccgcatgttctcactcataggcgggaattgaacaatgagaacacatggacacaggaaggggaacatcacacatcggggactgttgtggggtggggggaggggagagggatagcattaggagatataccgaatactaaatgacgagttaatgggtgcagcacaccaacatggcatatgtatatatatgtaacaaacctgcacgttatgcacatgtaccctaaaacttaaagtataataataattaaaaaaaatgtgtggctccttcctattcatataccttcctaatccaaatgatcaattgctaatagagagaattgcaaacacattgagaggaagttttgaagcaggaggtctatttcccaaattacacctatatcagaattttcagaccatatatagaggtgtcaaaatgtgtggctcctttttattcatataccttcctaacccaaatgatcaactgctaatagaattgcaaacacattgagaggaagttttgaagcaggaggtctatttcccaaatcatacctattatcagactactttggttacaatgaaccagctcccagcttcagttatttttaagagagaaagttgacctccaaaaccagctcatagaaaggatgggtatgacagggttcagggataactgtaccaggaacagaatgcccccaaggttctattctcctcctgtccagggactgcttctctttggatgtcaatttcattgccacaggcttgttttgcttgtgcttctgtggctgatgtcagtccttggattcatatattctcacctgtcccacctatagaagcattttgaatggcctaaattaggccttgtcaactcctagaccaagcattaaagcaagatatggggtactctgattaacctagtttgattcaagcacctatctctggcaatcagtatggccaaggaagcaaagtctatgggaagttgtcagcttccattcaagtaagtcttgtagttaaaataagcctttcttagagtagacaaggtgagtgtggcttggaaaagagtgttgggctgatcttagagataaatctccaccactgtccatttcatggccacctagctctctcagtattctcttcttaccatttaaataatttcccacatgcctctgtgggtgattgcagcaacttccattaagaggtggagtctattaccctcttccttgaatctgcactggccttgtgacttgctatggccaataaaagtgacagaagtgacagggggctagttctgagcctagacttctaagggccctatgtacttctactcttttaaaaccctgccaccaacattagaacagtcccaggctaatctgatgaagggaagaccctgtatgcagagccagattgttttaggtgagtccattctagaccagccaaccatcagccaaaccaccagctaagttacagatgtatgagtaagccaagatcagccaagcctagccaagactagaagaactacccaaccaagccacaaactcatgagctaaataaatggttgttgttttaggctaccaaattttgtggctgcatgttagcagaatttttgtggaaatagataaccaatacagctaacagtttacaaaatgcaataatcctacatataaccacagatacaagcagcccacctaaatgccaattgcttaatgtccagtatcatgggattatgtctcttccggtccattaggtacaaatgtgactattctgacactagtacttaatgatggcagaaaattaggataataccaatcaaaacttcccacttagacatggggaaaacaagagctacatgagggggcaatgctacctggcactgatccatgctattgatccttgcccccaagggctccaatttcttttgggagtcaccactaggcactgcatgcatggccttagtaagaagataattccagcttcacagaaaaaaacacaaaaattatcctgctggacagggataataagataaatgatagtcttagtgggtctcactggcatctgtgtgttgaattgttgccctggcaatatattgagttcttcaaatggccaagctggtagctcaggttctgccagctgggtgattttcctcctcaattttttttctgcaacaaccctaagggaagggaaagagccttggaaagtttgaaaaattcatccatccagttcacctacagttggcgcaggaaatcccagaggcctaaggatttccttggggcttaagcaatcattgactccagtattcaggtttgggatttcttctgcaacatcacagccacctagtcaccagcaccaggaatgtggtccggcctgatatttgaactaaacgtcatcctcacttttttctcctagcttgtatctgcttaggagtttaaagaatcatatctctgcctccgtcttgtggttgggagaatggatagagagggaaggcaaaatgaactttctttaaactccaggataatgcttgggagggcttggagatcagacttcctaatttgtctggattttcccagtattccacttcagcttgagctgagaaatggacttttacaatttgccagtgcatgaataccagacattcagcaatataatactgctcctgaaggacagaaatggatttgcttaacaaagctatttctctcccctgccagtctgcattcagcaagggcaaagtgtggcttcctcttgcagcaccatactgaatgccctaagaggaagtccccacacttcactatcatgatatttttcctaccacattctctaaaacttcagccttcatggacatgtggtttgaactccaagaaaccatagacgacagtttaaccaatagtgtcaaatctgccaggatttgagccataagcttggtagactgtttccagaagaagggtgctctacccagaacatcaactttctggacaaacaaaacaaatccttaaccactaccactttatattaaacactgctctggaattgccaactctgattgattggtaggggcttcgtacagtgctgtactgagagggattctgaggcagtctggattctgcgggaaagaatgcagtgattaattagttatgtctgccaaggtcaagagataggagagtaatgagatatacgtcatgttttccacccttattttataacaattaggcttaagatcaggtctgttacatggatttttcttttaaaaatatgaatttcataatttgataagtatttgagataaaatttgggaagagtctaatatgaaaactaattaccttcacttcgcagtagaataccttcacttttcagaagactagttcacttgtttatataaataaacattgtccacagaagattttgtttgtactccaaaagttacaaggcatccccagttgaaactgttgcatacttaagttacacatctttttcctcttaaataaaatgtcagacaataactgaacactttatatcctataaaaatgattctgagtttttgaggctcagatataatacttgctttgcctgcatctcagtcctatgaagatcagatgcactttgaaaatgttaaaatactgtacaaaagttatttttattgctttccaccttgaaaactctaatactctatgtaaataatttttgccatcatggacttttttaaaaaattacttggctccttatcattgatccttcttcctttaggggaatgatctctcaatgtcccttgaggttgctccaatctcctttggggttgcctacaactgtgagtgtgcctagtggtagacacacctgacagtgacaacttgacttgagcatctcctgagaaggaccttgtatgggggaagcacctgaaatgtatgttcagagtcccaagctaaggaatctgggagtagtcaacctagagatccattctttatctgtgaggaacatctgagccctgtcctatagaatgcaggccatacaggggattgaggccttttgtttcagtttaaataaaggttgccaagtggaggttgttagaggagaggatgttaagtgaaaatgctatataaactgcacacctttggcaagtggttgtggttctcctgtccagcccatcaccactggactctctcccacgcatgtaagcccccagtaaaacccccatgtcttgtttgctggctctgggtctcttctctgacctcttgaacctgggaatatccctttggagtctacaagcatttggcacaacactgtggccttggcataatggtggtctcatcatccccacccacaaaaaaatagggcaacagtggaggcatcgttttccttttctgaaaaggaaagcttccactcattttctgaaatcgctggtgtctagacatgtgagaaagctcagcagaatttgatgctgtctccaacgatactagctcttgaatacgggcaaaagtcagcagcggcagcagcacgtgtggtcacagccttgcttgaaggctgcattggcggtggtgttctgattctgacctgaccattcctgagagtgagcatgctatgcctcctggtgcctggctttcttgtcttccctctgtttctcaaatcacgtttttcagtctcacagtgaaactcttcatatccagtatcttctatgaataccccccttccttcttgtatttatattttaatgtatttattgcttaaaccagcagtgatttctgttacaatcagaagccttcaggaatgcaatcatagataggagtaataacatgaactctgtgtctgtattttgtacattgggcctgaaatgtggtgggtgctcaataagtaattgctgaataaatgcaagtgtggactataactagcctctggtctctgtgctctaattagccacatgaggaccccaatgcaggtccagacaatgtgtctgagtttaaggcaggtaaggccatgccagctaagtctgtcctctgatgagagaggtaaattatctcccagaaaccatcacccagaaaactttcacttattcctctttgatgacctctagctcctgtgaagtttgggaaatcacttatcttgcctggggctggttcctttcttgccacaaatagatatgagattccataagtaaggaagatatggataaatagatattgggtagacaactaatgatgtctgagagaaaaaagaattaataaaaaatagacaataagtctggccctctgagcatcagagactactatgacttggatatggtttgtctccaccaaaactcatgtttaaatttgatccccaaagcagtggttttgggaggtggcacctgttaagaggtgtatgggttggggtggatccgtcatgacaggcttggtgctattcttgctgtagcacgtacgtgagttctcactctcaggagactggattagttcttatgagagtggattgttgtaaaaccaggatgcccctcagatatccccctcttcccatgtgtctacctcccctttgaccttctctgccacgttgtgacatagcatgaaagaccttgtcagaagccagggccatgcccttgaactattcagccagcaaaaccatgaatgatataactccttttctttatagagaaccctatcttgggtattcttttatagcaacacaaaatggactaagacagagaccatgggactctggaccactaaggaaacaggagaacttcctaatgagcgtaagtccaggcccccacactccaatctctctgccccaggcccaacatagatgtccctacagaagacctgttaagtctgaggatgggggtttattttcacacaaaaacatgtaagctttgattggagaggaggacttatttattcagaggaatcagaattactccagctgactaaggtcttataagcctggaggtttctacccgaaggcaggggtggtcctaaactgcctggaatgaaaggctcaagtctgtgatgtattttcaaggatgcagctcttgtggccaaaggttctgtgtgctgccaacaatccagctgaagccttctctgactgccttacaagggctgctgcatagtaacctggccccggcctgccccttcaggatacaacatcccacgagaccccactaacccagcaatgacccttgccactctaacctttctccaagctctctgcttctgaccacaagaactaaacactcccatactgtgctccacgaaggctccaaacactgggaccgagtcatagctaattggttttttacaagcctaaaataatccagacagttaaatattgatgttcatttctgggtagctataaacacaaaaggggtgaaagagcatgttttatggcttcctctcattcattctttacatgataatggtctttagtcaataagcccagctttataaagaggggattcatttgaattaaaagggatgttccaatgtgctttatgtcattgtgacacaatggtccatccacttggtgacatctaccctgttcacctagcacactcctactacacaagtaatcatcctaataatgacagtatcctttggttccaataaaacaccgttactattacaatacagatcatagaatcacaatttgctatttatgcataattggtctatctctcaaagacatagatagttggtctacttctcatagacatttgtgttaaaggtaacttatatttatgtatgttctcatgttatcactttagattctagacttctcgagggcagtgtcttcattacacattcacttatattactaatcagatattgatagaaactagtttctttcatttttctattagttgataaacacctaactgggcagcaagaaaaaagaaacagctaaacttattttaacaccccaggaaatttcatcttcttcattaattttggcagtttttctacctaacactcagcttattttggaagaaatgctcagtctttcagatttgtgagtttgctccatgttcttccccaagacatctcctgtgtccatttgaagaggcggggcttgggtggctctgtgtagtagttgggagacagggtcctcagaacagcagagtccaccctggattctcatgaggtctactgcagaagacccatgagctgggaaactaatgaccacagaaggttgctttctttccagaaggttctgctgggacctggtcctagagcctgggactagtgtaggtcatggccagttttctttttcagcttgatctagagctggtcacctccctggtgacttagtcccatgttcacccttgctggtgcaggactcccaggagatccaggcccagccactctgccaggcagtcctcaattgctgcccctaacacagtgactgccctcctcctagaaggttcttacctaactctccttgagctttccagaccctccttggatattctagagttcattcatgctatggagaagcagaaaatgatggaggaggtccactttctacctcaccctgggcgacatgtgggtttactttcatatggccttcctggttgctgagagcagtctgtgaggacagagtcctagatggaaaggagcacagacgccactctcttcccctttctcctcaacctaacacatttcgttgactctaagatgccattggtgttgagatataccattgttctatgtactactcctactactaataatataacataataataacctaataataatgcccagaaagctgtgacacatcctgatgcatcctgatttcagatatggaaaagcgtgaaaagatatttattaaatcagttaaatgatttatgtttctgatatacatgtctacccaaggaacattggccccaagagaaaagatggtagcctaaccactactatccttcctctcctcccacaaccctcagaccaagaggaataagtctggggtttttcatttcctatcattatatccttctgctatcccagggtagcaagcttcactgcctagcttctcctctccatggaagaaatcattatctagtcacccatgcctagctctatttcttttgagatggagttttgtttttgttgcccaggctggagtgcaatggtgtgacctgggctcactgtaacctccgcctcctgaattcaagcaattcttctatctcagcctccggagtagctgggatcacaggcactcaccccaaaacctggctaattttttgtatttttagtagagacggggtttcaccgtgttggccaggctggtctcgaactcctgacctaaggtgatccacccgcctcagcctcccaaagtgctgggattacaggcatgagccaccactcccagcctcatgcctagctcttgatgtcacaatatgattattctggaaagttatttctgttttgacaaagcctggctttcaacaataggttgacttgtgacataatccccttttgaatatcaaaaattgaatattaggtctttttttcattttgaaccatatctataacaatccaaaaattctctgaggcatgtttttcagatgtctctggcagaatagggaaaagttcagtttgagaaaatacaaaacaaagtcaaagcacattaaaatattacaaaaaaaagttattctgtttcatttttatcttctcacaagacctactgtgaaacaatggacaaatttgacatacagcaaattctagctgaaaaacaaaggatgaaaatatttatatgtgtttttctagttcttttttgtgagtacctttgaaaatataatttgtatcattgactttcttgtaatttctcacacaaaaaaaagctaaattaggtcttgttttcaaggaactcaccaggaatgatgacttagtacttgatatctttgctatttccaaatgaataatatctgtcccaccaaaaataaccctgaagccttatatactttgtatttctttgtgttgcaatctttggatgaggagtgaacatttgtttctttttggtattctagtagtaacatctcgtaggcaaaaaaaggtacaaataaaaattgttattattatcttggtatgaatgtaacttttttagtattaatttggggcaggccaaaagagaaatttcagaagcaggacttgtaatatagaggttttgtgctgttactgaaactttttcttcctggcattctttaaaaagaaactttcctgagatgcctggtgaggtaacacgagtggcttctctggccaggatttagctgcctcccaggaataactatctcctaagggcctggctccttggtagcatgtgctaagacactgaagacgaaatctaactacaattctaaagtatttggcaggtcaatagttgatagcgctagaagtattcaaaagaaatcataatatgattgtgttgacttataaaagaggtagctgaaagaagtgaaaaaagtctcaatcacgtggcatttcttcttcaccaaagcttcattatttctcatattttcagtgttttaatcgtagaactataatttaaaatataatttttgggaaactaatatctctttatgcattttgaggtgtgatcttgcccatatctggacaagatatgggcaagatatggcaagatatggacaagatcttgctcatatctgggcaaaatgtgtgtgtgtgtgtgtgtgtatgtgtgtagcatcaaatctctagtaagcccagctttaatatggaagtcataaagaggagaaatgagtgaatgttgctgaaatttactttatagatgttgcttttggaaaccgctggtgagctaacgtactatcagttttgcaaactgatctttagaatcctataataaataaaaagttttagttataagattgtcatatgtattggaggaattactagaagggggacatttctttttatgatgactattaatggctttctctagttgcaagtatgatccaatatttcctcacccgttttttcttctatttgtaataggccctgtgccttactccaagaagtgtttctcaccagcgattaataggatgcaacacacaaaaagggctggtgaatctgtttgttacactctacttactaaggctatggctacaatactccagtgctgaagtcagtgaaaaggcatcatccaaacacaatccaaggaaaatgcaagctgatacagcacaaagatgctttgtttaagaatggcagaaatttccagcaactatctgggagaaaaaaaatgcaggatgggagggaatgtaatcaaataacaaaacaaacccaaactaaaagagaatctttataaaccagcacaaggacactttgtttttaagtgcacacaatgaattttaaagatctttgttcagaagggaaataaagtattatgaaggactgacacatttgatggatggatggtttctgaaaaaccacattatcaattactttttccttgtttggctccagtccagtaatttttatttgaacaagccacatgctagcatggttttgattgcaggaagtaactggttgttgttaaaggatactatttcactgatgagcttatctcttcctcccccctgccctttctgatgggaatccgatatgaaaggcacagcttcagttgttataaacagagtcagggattgtttgatagacccacccgtgttttgctttcagcattctgtggtacaatccagacaatgtattcagcagggcttcagaaaacaaaagttgaattcggcttatttctgttctcaactctgacatgaaattttgatatctctgatgtttgtctctcataaatctaagtttgttagcaaaaaaaaagttatgaatattatattcttttttatattagactatctcaagtgaagcctactgagaaaaaagaatctttatggaacagtgaagctaaaatgtatcaaagatcttctcaaacaatatagtgccttgtactagctttgcttgttttctaatcttatcaaaacaagtatatcagaacattattagtgtaaatataagaaatacagctaattaagctatattattaagtactctcagttttcccttgcccttaaagaaagatttgggggcagtcatcagtggacaggaaattatctatgaaatcaattgctgacacacacagggctgtgtgtgtgtgtgtgtgtgtgcgcgtgtgtgtgtgtgtctgctagtcaagatatcttcctttatgattgaatattttttgcatgttaccatgcctgaaacttaaactatttctaagttcccagggtatcatggtaactataggctttggaaagttatttaagtatgtttcctagttctatattttaaacactaattttagtgattatttctctgctgagaattaaaagtaaaaaggtggtcttaaagaataggccatttgattattcatcagaacatgaaaacaattccaaatgaattagaatttaaccttgttcaatggaggaaatataaatttagcaaccattttgttgacttactaattcacatcaaaattcttctaaagattttgcaacatagatgtataaaatatattattaaccacaacttattccctgaaaacaaaatgaagaaagcaaaacacatttcatatcaaaattatgtatctaaatatcatttctttctgatgtgaaggcagcttggaaaacagcaaacaaaacaaacccttccagaggaaaaaaagtcctgggtttgaatttgctggttggctgaacttagacaagttagggaacctgaggctccatggattcacctttaaaaagaagatgagatggagattatgggattgtattcaatcatttatattaggatgtgtggcacactcaataaatgttagctaccaatggggttgattacagaacctagctgtggaataaatataagtcctttccaggatataagagagcttggtgaggcaagattcatattagagactttccagtactctaagtctttatatttataatatcaaaaacaaaattatacatccctttatatatttaaatattcagttgaattactagttagtactctatttgccaattcttcctccctaagctatgactttgtatatatttggttttaataattagtaaagttctagttgtgtatgcagtagctttacagataataaaaatttaattaaacttactttgatgcaactttgattatacattttcctaagcattgcataaataattcaaaaatgtatgtgactaacatccctcattcatcaaaaatctaaagttctctcaaattttcaaaagctaagtgttaaatgtggttgtgttcaggtattttaaacatcctgctctagaactgatagaaaatgtacagttaaccatactttttgcccagtacagttattatagtttttttttttttttttcagatagagtctccctctgtcacccaggctggagtgcagtggtgcgatcttggctcactgcaagctctgcctcccaggttcacgccattctcctgcctcagcctcctgagtagctgggactacaggcgtccaccaccatgcccggctaattgtttgtatttttaggaaagatggggtttcaccatgttagccaggatggtctccatctcctgatctcatgatctgcctgcctcggcctcccaaagtgctgggattacaggtgtaagccaccgcacctggccattattatagtttttataggttagaggagatctctgaatctaatttttacaacatgattcacatgtttactgttttcagagcaagttgttagagaaggattgctggccagcaatgtaaatgttataaaaatgtttccaaatttaatttgcaataaatatctgacaattcattcacattttcaatgtcttatgaaaatatatttatatatgaaaattgcgatcataataaataattttccgaatgattaatcacatgttaaaaatttcaaagaatataagttcctctaaggatttaaaaataaactgtttcctttcaagaaagcataaggaccaaatttcttaaccttataaaggaaaaagttctttattgcttttaagtccttgatgaaagtcattcctggagattataagattattttcagaatgactttccttttaaaaactgtaatttctctttaatttctcactggaaaaattataaaaggtgcctcagtctggattacaaattgggaatggcgagttatttttgcatttctctctttcatatagatgttgcaaaaattagtcagattcagaaatctaccctaagctataaaaacactacacagtagcagctgtacgggggaaaagtatgccaatcatgctaatcatagattttctatgaggtgagagtagatgagggaaggagaattgctagactgaatggtgactgagtggcctctgctactgagcatttcaaaggggcagatataaccaagggatggggatggttgttattccactttcagtgtgtgcccgtctgactcattaactccctccatcccccaaaacttcagtaaaggcattcacacatggcttgggtcacggtacttcagaagagtacgggatgtcccaaagggtagtctggtgtggaaaatggacagatgagcagggggcatagaagggagatcaagctttcatcagaaacaagaaatgacagagaaacagaggtactcccacagcaatccctggagctactgagaaggatgttgaacttcttattgtacttgggttgatggtgagtcattcttgtctaaagctataaaaacaaggaatccagcagaggctggagatgagggcatccatttcctgacatatgggttatactgataacacctttctatacatacacacttagattgtagagttggtgtgtacctgtattgatacatacacaccaactctgagccaggccagtcactgttctccgagttacagttttcaaatttttaagatggtcacaccaccacctgctctccccatccaacaaggttttggaaggaaggaaaaggcatgtggaagcactttgtaaagcacaaagcataataatcattgtaaggcattaaaaggcagctctaggctgggcgccctggctctcacctgtaatcccagcactttgggaggctgagggaggtggatcacttgaggtcaggagttctagaccagcctggtcaacatagcaaaaccccgtctctatcaaagatataaaagttagccaggcctggtggtcacgcctgtaatcccagctactcaggtggctgagacacgaaaattgcttgaacctgggaggcagaggttgcagctgagatcccaccattgcatgccagcctgggtgacaaagggagactttgtctaaaaaaaaaaaaaaaaaaaaaaagtcagctctagtagaatagaaaaaaagtggaatttgaaaagtcaagtttgattcccaacttgtttgctttactacttgtataatcttcaagaggccattggtttctgtgaacctagtttcctagtctgtaaaatggggattataatacccattctgcttctctgctggtacctttacatagtaccagaggtaataatatgtaacaacactatgtaaacactcggggttcatataaaaataaggtatcaaatggtctttcttgcagacatatttaataaaaacctataataaaagcattcaaattttgttctatataaaagcaaggagcagaagcagagggtgtccccatgaatgaaaatttctcagaatatcattgtctttttgaaaagtagtagtgcactggactagatattacactgtgaatgatggctcactcacactattttacaaggattgctattaaaggaagtcatgtgatttaccagaattgttccgggctacataatattgaggacaagtcctgaattgaattatagcagtaggagcccacatagtagcattaagaatatagttccttacagtttagatcattttatgagacaactaatcaattttcaacaaatgcgtctgcagccactttcccccaaataatcttcattgcaagagataattttttcagaagtattaaaaaggggtaaggaaaatataatcaacctcagcagatgatcctaattcaaaatccattccatatgaccaactctgagatgataaaatacaacattttttagagcagcaaatgtttgcatttaggggaaaggggtttagagatcatacttacctcccttaaggataaaacacaacatagatgagaccagaaaggttaaaggggttacccaaagttagccagatcatggtagaccgtgaattgacccccagttctaatgaaaataatactagactttccagccaagcgtggtggctcatgtctgtaataccagagctttgggaggctgaggtggttagatggcttgagctcaggagttagagaccagcatgggcaacatggtgaaatctcatctctaccaaaaatacaaaaaattagccaggtgtggtggcctgcacctgcagtcccagctatctgggaggctgagatgggaaaatcgcttgagccagggaggtggaggttgcggtgagctgagatcacgccactggactccagcctgagcaaacagagtgagaccccatctcaaaaaataaataaataaaaataatactagactcttatgaattattttcttgtacaaagcagtaagatgtttacttacactttcctacacctaccccattcccgcaccactcatttcagaaaggaaatgcgcagattttctcctgtaatgtctgccctataggctgttgtgatagttagcaagagtgggagcctgtggaaaggcacggcaagagcagctgcataggtgtgaaccctgctgttagttgaaagtaaaaggactagggcttcagcactgtgcatctctttggaacttccttactgagccttcagacactctgaggtcggaggctgaagggagtgagccatgcttcctgcagccatggtaattctcagtttcagcctttgcacagtggcagctgcaacacagtcatctccctgattcaccctctgcccccatttttgcaataaaacatctgcttgaaaaggagtaaaccaggcaggtgagttggatagtgctcaaattacatactttaattgaatactcatttgtggaattcaggtttatgcaaggtattaaatcaggaggtaggagacaagagttctgatctctgcttcagtacttacaagccatataaccttgggcaagtgacttatttctgagcctcagttgattaatctttaaagtggggataataatatcttgtttgcttaaaggcaggggaatgaaacagaagcagctgttaaagatcccttctagattctagaaaattaaagacaatgtgagcgttcctcaagtaagggagtcatttttagtagtgtatttcttagatatgatctctgttatagagtataaataagttcacagctctttttaactattcaagacaactgttcagactagcaagaagtcagggtctccctcagctccattgttgacataaggtgtgcctataaaagtgctatgcagccttatcttcctcacacactcagctatttatcccgaagcaccccattaatgccaggatgtctaatccaaaaggagatttgtatcttcaataaagagttatttccgaatgagaaagatccatacttcctgcctctgtattgcagctagtgaatttgggtcactggtccattctcctgttgacttcagctgcgttctagatagcccctcccacatacaccactgtgtctgcaccataatctccgggagggaagagaaagcttcagtgctccttcttgcctgcagacttaattagggataatctcaaagcattcaaataatgtagcgtttcaataaggacagttattttgtcccagaagcctccttagtacctatgcaaatttgtccactgcactcccaagccaagttccctccccacaaaaaggcaacgggtacctacattccttttatccatcaagataagaagggacatcccaacacaaagatagcttggcagtcttcaccactaaacattgaggcagctggcaacaaacctctacctaaccagacaagttaagaaatttgtcactctctttagcattgatgtcctgaatctttttcaataatgagttttctgtccagttctctctatcttaacatagatgggaggatggtttctgagcaagtcaattgcagatctagaaatggatgtgcatgtccttgattctctatgatcattgctgttctagctatatattcaatgcagagcttgacattcaaacttgcataggcatcctctttccaaattaaaatggacccatcactcattagtgggggtgaggtagtggcagtaccaaaggatgtgtgtgggaagggcagcatatgtgcttctgtactctttatcagctgcccccaattaaaaacaattgataattctttaatatgacaaagggtactttcttaatcttaggtcaagtatgaacgtgggcaccttataccaagttgatatttgtaatgatcttgtcactccctgcttacgagcctttctccctccacaatggctattataatcagagtagaaaatgaaagcttttattaggcataagaagttcaatgtgaccagaacccagtgatgtagccatgacctaatcttatattactctgtgtctagcatgtaccagtctttaaaaaatgctcacattcaccaacacttcctcaaatgaggcttttgaatccacctgaaatttgcttctcagtgatttttgctttggctgactctttctaggcattcaggcttctgcttaaatgtcacctcctccaagaaggcttctatgaactcccatctgaactagttctactactcctgtcactccttcatattatgcaactgtttgtctatctccccccatcagaatgtaagctccagcaagaaagacactttgcttatgttgtttactgtatcaatcgggatccgatcaagagagaaaaacagtaatttcaacaaggaaagttcaatataaaaaattattacctataacagggaattggatcaaagggagattggtaagaggtaaagagagctctaaataatacagaaatagagatataaggaacagctacttactaaccctagggctgagatacagcatctcaaaaagagctcctccaagacacagacacactcttagggctggctgagatccagactttgctggagagggcacagttgtaactttctgaatagcaggagagccctgctagaattctgccttctggaacttgctagaaatccacattccagaactcgttggaaatccattctctggggttccaaggaaagctgctgagggaggtgactcattagaggcacttgctccaaagccacctaaggggcttctggaggaagctgctggctgctgggtgctgctgcttgctacctgtgctgtaggaacctgcccagtatgcaaccagagccaggaaccaggaaaccaaaccctttcctcctgcaatgtctctccagcgccttctattgacctagcttttttaacagctggaaaatatttaaagggctcagattcagtttcactaggcaggcaatgaggatgaatttggagctaagaggcaacatattaataatagccacttttattgtgaaatccccatattctggcacatagtaggtttaataaatatttggtgaagtaataaataaatgatttacatctaaccaaagtgaaaagcatgcttggcatatgtcacttcaagattggagctttcaggcctagcttttaacatgaaagttgctgccaagtgcctcccacatgaaaactctggaacaccccacctaccccccactctgtggtagggataagacaggcctccagataacatcatagcttggctcaacagttagcgagaagtgcaatgagagaagcacagcagagaaaaggagaaaaagtggccatgagccccacttacagtctgtgttacggctagggctgggccgccagttgctgcatttgcatctttctgagacattgaggtgagttacatagctctgccacgtggccaaaatgtgaaacacatccaagggctatattttaatacagaacttaaaaaataaagaaacatcttgacttctctagccactttcctgttgacacaaaccatcgagagagattaggggaaagatccttgctataagtgatctgatatttcctaacagagcaaagtttcctctttgtccactgaccctttcaatagttcttcgggttctattcttagaattctcgtttcctgtcctgagagaaaactgcacagaatttcaataaatatgacccaaatgatgtggaaacttcctataaggatgcaatgaggtattcattcattaatgccatcaacaaatatttactgagcaccaactaccagacagtgatggcagacataatttggggagtttggagtgcaactgtgaacacaaccaggtccctgttctcatggaacttgctaacattctggctaaaatagagaacatggaacttcctacagaggcactgtgggtgatttcacaaaccattgaaaagctctagtgggagcaagcaactaaccaaccttagaataaaacatggttgttgctggtgttcttagaaacttcgctgtcctcgtgtgcaaattgtatcactaaagtcttctcacttttgattcttgggaaggtttcagggcagggctgtctaatggaaatatgtaagcctcataatttaaaatcttctaggaacaaagttaaaaaagtaaaaagaggctgggcacggtggctcacgcctgtaatccaagcactttgggaggccgaggcggacggatcacctgaggtcaggagttcaagaccagcctgaccaacatggagaaaccccgtctctactaaaaatacaaaaaattagctgggtgtggtggcgcatgcctgtaatcctagctactcgggaggctgaggaaggagaatcgcttgaacccaggaggcggaggttgcggtgagccgagatcgtgccattgcactccagcctgggcaacaagagcgaaactctgtctcaaaaaaaaaaaaaaaaaaaaaaaaaagtgtgtgcctgcagtcccaacaacactggaggctcaggcaggaggatagcttgagcttcagagtttgaggccagcctaggcaacacaggaagacccccatcaatacaataaataaatagaaacagacaaaattaattttactaatatttttaattgagttattcaaaatatcacaattttgacataattataaattattgagctgcagttttttcacattaattttttcaaaatgccacatatatgtgtacttacagcacatctcattttgaattggacacatttcaagtgcttaacagtcacatgtggctaggtatggaacagcagaggttcagaaaactgtcaaaaggacttctctgtcctcttattttggggatggaggcgaaaatatttgccgaattgaaacattctgtgaactttggctctgggtttttagtatgaaattagaggcaggtgaagaccaccatagccttcctttgcaccagctcactacagtggccagaacggaaggaggttcacagaacgtgctaggttggacattaagtcaccgagtcatccactgaggaaagggatatcattaagaagaatagttttccactaacgccgaaccggcggcaccatctcaaccaacaggtcaagttacagtaggcaagcacgcatagaaataaacgtctaaaacccagcctgttacattagccaacactcttcttgactttttccgaattttttccctgtccccaagattagccgctcgctagaaaagactgcgagcctcagcagcctccccttgaactggggcgctgcctccagctggacacggactaaggatggaaaggcgcactgacggaggccgcccccatttcccaggcccctccctaggggtgcccctcctcagccatggctgcccctttctctcctcctccagcatctgcccctggggccacccccacctttccgccatctctcgggcccgcgtggcaccctgctctgtttttaacggggataaacttgacttgcttctccaaagagcgggaaaaagaggcgcagtcttggtactgatctgggggagggaacgtcccagggcgcgcaggggcgttttctacccgtgccccgtcggcctgctctgttcagtaccgaccgtgttcggggttcacgtggcccagtcggcaaagtttctttggaggtccagcgtctctgattcccggatcttcagccccacccggagcccccacggttactgccccccgcgacccccgatggagcgtcgggatgcgctttctctccgagtgcctccgggggtggagggagggaggcctgtttcggaactaaatggcaatcacagcccccgcggggcttggagggacgagctccccgcccaccccgcggccccggccccagccagcatctcgcgactccatttctggctctaaacaagaacggggaccgagtcgcgttcacacggaaaattatgccggctccagcggcgcgtaaaattgatgtgaaccgaacgaagtaagatcagcgtgatcctccccctcttgtctcaacaggggtttcggcgcgttacacaaggccgagcttgtctctttaaggagacattggaccctaattagtccgcattcctggcgcggctgcggagcgaggggccgaaggtgtctgggttgggagacgggtgggcgggaggacgagactcggaagaagatcttttgaccagcccccaggctcaccgctccctccaccctctttattttgccgccaccaccaccaccaccaccaacacctaattctgaagatgcagccagggcagcagcaacagcagcagccgccgattctcccagccccacgttactttgattgacagctgaacaaatgttttcccggttcgaacgctcgcgctaaggaacgtcagccaaggcgaagctccgccttgggcgggccatctccgccccgcctccgccaacctcattcctcttcgttaattggtcggagctacaggcgacgcccggcccccacgtgggtttcagctgggttggctcctccccgctggcttgccatttgtcagcagtgaaatgatgggcactaacacagaacggcgattaatgttcagccacctctgattggttggtggagacgcctaccgcaacgggggtgggcggggcgcttggagagctcgccagagcgctcgcatggcgggccggtgattgtagtcaatctggccgtattctcaggcagggtcgcccggggcggactacatctcccgggatgctgcgcggccgccccgcggaagattgtgaatatgtatcagaatgttaatgattagctgctgctaaatttggtcaaagaagtcacctacacagagcgtgttgttagagctgtgctgagcgggtgtttgggttgttggctgctttcttccccctttctcacacacttgtatattattttgaggtggtgttcgcagagtttgaaaggagagagaattaaaaaaaaaagccgcaagcgtttcactcttttatttttataatccccttcaatttggggttaaaaaaaagacaagaaaacaggaaggaagagaaataaggaaatgagatgtggtaaaagaagctaaaaggtgccttttaaaagatcgttgctgtgaagtgaaaaaaatctccagagaaaccaaaaagcaccgccgagacctcttccgaaccaaaggagtttgtgtttgcttttagggaagaagaaagatcattcattcggaggaataacaaccaattaaaagacaaataaaaaaagtttggagtgggacgcagagcgagcgagaggagctgccggcgggcggtggggcgcggagcccgcactttcccggccgggtgagcggcggccgcggcgccgggctcggcgggtgcgcctcggcggagcgaacgtcggagcgttgccttgggagacgcgcgccggacaatgcccgcggcgggccagtgacgcccgcggggaatgcggagcggcccggcagccggcacccagccgccgccgcgcgttcctgccgcccgtgtcacgcgagacccggcgggggccgggaccgcccgagccgcccctcagaccgagccggccgcctccgctgccgcggccgcctcctcttcggggtcattaaagccaatgagccgcgcgcctctgccgagcgcagccaactaaatcggcttggatgattcgcgacctgagcaagatgtacccgcagaccagacacccagtgagtgcgggcggcggggcgcgggctcgccgggtgctgggggattccccgcgtcgccccctgcgcaccgagttgtgtcttttggccggaggggcgtggagagccgcccgaaatcggcgccccgcgccgggagcagcccgcccgccatcacccccaccccccggcgcggtggccctcggagggggtgcggagaggcaattgagttgtagccattttcttattgttgtctttgaagcccctggaagccgcgccgagccgtttgcggtccccgcgccgcgactcctcgagggggggtggcgagcgatgaaggaggcgcgactccgcgcccgggcggggagggcgccctcggcagcggcgctgctgggctggctgcggtttggaagtgcggggcgccggcccctcgcgccgcgggccgccggggcgagcgggcgaacgaacgagccgagagggtggcggccgcctccctcctcccccggcctgaccgcagcccgacgccatggcgcgggtccccccgacgggccagtttcgattccgggtgaggagggagtgggcgcggcgcgcgggtccctgggtgcctgtctttggccggggaggggagacgggactcgaaccctcggggtccggggcgcgggggcctgcgggcgggagtatgcggggccccaggaccacctcgaaaccagcctctgcctgggctgttgggcgcgaggagggttgcgggaggagagttttaatctctctttgcttgcgtgcgcgatgaccctcaccccccgctaacgccgcatagtaggttttctccgtctccctgcttcgcctgtgatgtgggctaattaaatattttattgttgttcttcaggcaccgcatcagcctgctcaaccctttaaatttacaatttccgaatcctgtgatcggattaaggaagagtttcagtttttacaggctcaataccacaggtaacgatattgactttagctgatccttctgtttgcttagctcttgtctccccgacaaatacacacaaacacttaccctcctccttttttgtgggggcgtcacaaaggtattatttttttttctcggtgggcagaaagggcaaatcaaggcctccttccttaggcaggtgtaaataaattaaacatttcttctaccgtaaataaaaagaaggcagaacaatcgaaactggggagacttggaaaacgctgaggccaaactttcgatattgatttattggggccgggagaatgaaaggttgggaagattctggggccttttgacatccttggttctttattactccggacttgattccttctcacttttttctgccattccactgaagagctgagagcccagggaagtcggagtgagcgatttcattacttttatgctaaaaaaaaaaaaaatgttttcatcttatagacgatttttagacttagggtgcctttgagacatttttctttagctggctttttaatgatgcctaattcttatttcataaatgcaagaaccaaaacaaaccactgaacccgattgacactttgcccctgggtggtggtattcaacttgtctgtgtgttttggagggaaaaaaacaagatatcattcataagacatgcttgattcatattttcattaatctctttgtagaacattaaagaaattcccttgtgacgttttggaggacttatttgtgcttgtatgtgcagtcattattgaagtttattttcgtgtttgttttattaagtgaatattcaattctggaggaagttcctgaattaaactgattagaggatttgtttccttaaaacttaattaaaaaaaaaatcctaaaaacaaaaaaccacatatatgatccttattgaaggggcaagtccagactggttccaatcacccctttccccttccctttccataatgatgggggtatttatttaagattgttgatttagttgtttgtaggtgagatttagaatatgcgtttaagagttgaaggatgtaagttaagatcattgtacttagagtatcttatgtcttgaacagtctgaagctggaatgtgagaaactcgccagtgagaagacagagatgcagcggcattatgtcatggtaagaaaaccatgtcacagattcaaagtgcctattagtttggaataccaaaaacaagaatatgtttaaattgctgggggctgcaagatagatcacagtcaccctgccagtgcagttgaagttgtgggaatatgtctattagcaacctgtaattctaggctgttataacttgcctttgacaactggctttgattggaattttcagaaagttcagccacatggggtataattttctgtgctttgtttttacagatcgaaaaaaaataaaaacaaaaccttgtttgttttgtcacaagcaaaaatgtttttgtgttagtggctttctttgttgttttattgctcttgctccaaacaatttttgccagtttttctgtatgctgttaacattgtaaatgtcttattattaaagacattattaaaaaataatgttttatttctttgaaaaggagtgatggataaggaaagacagcagaccatttttcaaatttttttctctttatgttactattacattaatatttgtatgttttcaatttctgtagtgttatattggtttgaggaatgttgtagtctcctgtataactgatgtgttctgccagaatttctatgccagttatactacacgttcaaaaaaccagatctgcttttacagaagtattatgaagcatatttttatgattgtccaagaaagctccagaataacccactcatttatttttctatctagcttttttgctttgaatgtgtgaatatgagcagtacactaacaaatcagaaatcaaactctaagtagcatcaccttttccaaccttcctttcaaaacatcagcgtttgtataaggcattctttgctgttaacttgcctgctgtgcttaggaattaagagtccgtaggataccaaattttcatcagacttttttgatgcatctgcttgggatgtataaagaaactggagatgttaagaatgctgtgtttgaatttaatttttcttagttttgtgtgttttctcttagaatttgtgtcttaaggtggttaaagatagtgatgggctcttgatttattggcataggttatatgaagatactggtttaggtgaggcttttatgtttgtttcagatttacttggggcattttgaacaaactagggagattgtttgatgaaagtcatgcatttaattgcttttccttctttgacagtattatgaaatgtcctatgggttgaatatagaaatgcacaagcaggtaagttatttctttataaccattttaaatgacagtaatactgggacactatgaaaagaaaattgtatgttttgcagttttattctgcaagccgttgtggctacctgtatttaaaagtctgggtagtgaagaaaatgctgttttttcatgtgtggctccccatctttctttcatattatcctaatttttataatttaaaaatgttattttaaaaagtctgaatacatattaaactctgtacactttcaaaagcaggatgctaaattttaaaatcctcttgttattcttctgaaagagttgctttatgtattttgggcattgcaaacttgtcttgtgaaagagcttttcttggaaaatattaaacagtaaaattaaattgtgtggcgccttcgttggcttgatgtgaaagaatggatagagggtgagctgggaggatgaaaatgaaatctgtggagctacaaaagaaattgatgtaaaatccttgtactggtcccctgaggctacttagttgggtcttaccaagaactataaccgttacttccaaaatttgtacagagtaaatgagcctgataggaggatgtgataaggttcaacattgggtcttgaaatctagcaattagttcagtagcaaaaaaaaaaaaaaatgattagtcagaaagcactgagagatacgactcaaacagtcttctttttgtgcaggagactgaataaaatggtttggcttaaatttcctagacagaagaataatagcgggtatatctatctatatatatatatacacacacacaaatatatatacatacatatatatatataaatattgtttggcgatagtaattcctctaggaagcatttatttttagtgatctcctagtggaagcacttcaggtctcatcagccatttcagaataggtgtgtatgtgtttgtctgctgggaaaaagacaagggaaaacttactgcttttcatttcctatttatggtcaaggtggatgtcattactttctaagttgagaaaatatgaaatgagcacatactattaggccttcactatttatggattcctttttgggtatagttattttctacatgctcagaacatcccagatagtagatctttaagagatggctgttagacaataaggcaatctgatgaatagtattggaaaacaaaaagttggaaaaaaatgagacgttgcttacattgaggacttttaatttcagatactgttttactttgtatgctatttggttatgtcaatattagcattatagtatagtttgaatggcctgttgaaattaaattcttattttggcatctttgtcatttctgtttagattagtaatgtaaatatcttctgcttaaacaaaatctgttcaatcttgtggatggacttctcttagttctaccttacaggaataaattacatgagagatattgtttgttaattatcccattacatttcctttgaggtctggatcttgtgtatgtctctttttttgtctgcaccccactccccaaaattaattagtgtctttttaaagattggaccagatgattaatttagtccctttatttctccttctgtatcttgtttaccctaaccacttagtttccaggtctccttgtaccatctacatttctaagaggcacatagcttgtatttggctgtatgtatttctttttcgagggggtatgtgaaatcccttaattttacacattttatactgctataattctgtcatcttcttgtccagctagcctcaaatgccatccatttaaaattgagaacagtacattttccctttttttcgtttccttttaaattcaatcatatcaagaatcctgagggcagtttatcacattatgaaatacagacagccctgcaaaccacctacttattatattttctttctttctcccccttaagcatagaggcatatctgtctttatttgttttcctaggcagacagccttagttcctcttagcctctcttccagatgtactcgctggatacccttgtaatggaaagcagcaataatgcagggaagttgccctgcggcataattgggcctagttctcaagatcgggttaggtttattcacttattagatttgtgtctcgaagggttcaacagtaggagtcccgggagcccttggaagtaccctagtaattggtggccctgatatttgaaacctttgtgtattttttggttaacgttcctgttcttcttggctgctgctagccacagaatatttatttttagagaaatttttcattggaacagaaaatggtggttgtgatgcagtcatggctctgtgacttagcaaactgataaaaagataaaagtatgaagcaaagacaaacagggtggaggtcggtgttctccctcctaccctttctatgtggtgctcatcatcagtccccctgtgttgattctgatagagaactataaaatgaaacctatggggaatttgtcattctgaaatgaaagctaatgtaattagtaccaattaaagtacatttagtaaattggatttaatcttaattaagcctgcataatgttgccaatttttaacaattatgtttgagaacataattaatttaaattttggtaactgagtaaatagcattagtctggtagaattagtggattttttttttttttaaaggggaacttggtgatatgacgtggaattggaacataaaatatgaatctaaatttctggtaatctttaggattgatagagctaagcagatgaagcaaaaaaaaaaaaaaggatgaagtattctaggctataatgggaattaatgctgtgccattgtctcaagttctagcataaaagtgaagatgacaaataggacatggttagaaatggcacatgttttagtgtgacgtcttcaaaatggaatttttaaaaatgaaagaacataggcccttattccctaaggatttccctaagtgtatggtttttgttttttgttttgtatgagacagctgacccagggtttagttgttaagtttttttgctgattgttcttctttgtaaatacagtgtggcttctaaatgggttggtggcttctaaatggcacagtggggtgatgcatggagttgatagcattactaaatgctgcttcttcccatctttcacctgtaatgctgtcattaaagaagtcctcactgatggactctgacagcagtggttaccattctaaaaagtgagtattggatatagattaggaacagtaggtatgtgaattcaacctataggaactatatggagatgaacataccatcttttgaaaaggggagcatgagaacatctatgacttccttatagttagtattctacaatgtgaaagcttcttcatttgaattttagtaatcatcaggaaattttagaaatctaaaacgcatagaatctgaaagtaagtactgcacatttatgtatgttttatgtgtgtatttttatatgtgtgtgtatttgtgtgtgtgtgtgtgtatatatatatgtatatttaatcaaagcaagaaaactcctgtttcacttaaagccatgtaaattttattacgagacttgggccacaaccatttgagtgctgctaaaatattaattgaatagaaatgaaagggccttgccaactgataggatatcataatcatagcctctttggtcgatggtaaatgatgataaatgacattaggaaccttttagcaaactgtaataactacaaggagggaagcagtatggatttgcattgtatctgataccctctagtaccaagtggattgccaatactgcttgtttagcattttctaagggcaataagatattgatttctgacttacaaggaacagctctattttcaccattgaaaagtattgcaggttgttaagaagaaattgacttgaagaggccgactgctgcccatcatggagcaaataaagcaaaactgccgaagcatggtggagcagcgagacgggccctcagcaatttgttgctattaatttaccatgctcgacagcaaatcaatcggcatctacttcatctgctggagaaaatgctgtccagggcagataaaaggctcggcatggtacagagaatagactggattggccaaaagcaggctgcagttaatgtgtaaataagtgaaatcaaggccactgttgcagaggaagctgttgttaattaggttggtgttttttagtgaactattttagaaagcagctaggatttggagagtaagaagagatttattgagattgaagtaatacatgactggcatgacattctagccttgagtgtacttgaatctagggtgcagtaaatttatttggggacactgcttgctatgaagtttgttgaaagttcattttagaccacatttcccttatgataactttttttttcaaccttgccagttttttgcacatcttctgtcttattgtgtactcttagatttagaagagtagatggaggagtaggtgttttagtatggaggcacaaatgtgtctgttatattcttacccagtgcctttttttttttcagagataggtataattgaactcttgtataataatgagagtgaactatcatggaagatggggtgttctagctgaaagtaactaataaatgaagattttgctgacagaactttatcttgcttcagaaatattaggaaataacaatctagagggcctgaatagtgggtagatactactagattataaaatcttaaagatgacaagtgaaattttgatgtctgcataaacttcagatacaattataagactatgtgtgtgggggtgggaagggttcttgtgtttttggttttcattaaggtttaaagccaccttttctaatttaagattatttacacgctgataatattccacaattaatgttaacggagtgaagggtattggtggtgttttttcccctttacctctcatttgggcattttaaaataggaggccaacttcatttactcctgtttagtaaatctaaatgagtgtaggttttaaattagattttttcccaaaacccttcagaaggtctagtattagggcagttgataagtaagtggaagcaccttgggcaggacccagtgacctgtccttttacttattacagcacctgcacgggaagcagatctggaggatgaaatttaacctgttacagtgtgtgtatgttttagggtgtgtgttttccgaatactgtggggagttccctttttccttctcccatgatggattcttttgtctttctagagataccataggaggatatctggatttttcacctaaggcagtgattcttgagtgaaattggaatttcctttcaatagaagtaaacatttattatatatctggcttgcgcttaccactggtctgggcacactgccaaaattcttatcgttagttctcataatgatcctaagacagggattatatccaatcaaaagttgattaaacagggtcagctctgcacaaggtgatacagctaatagttggtggattcaggacttcaaataaatttatgtgggaggatatctcctgggagatgggtttgctatgggttagagattcaggccccagttcattcctgaaatagagagtccctgaactttaggctcatacgcagaacctcttgagttgggggattctctgcaactgcctagagtccatggatggctcagcctgccctctgcttgcagactgctttcagtgggtgagagggtgaggttgctttcactcggaatctcccacatgtgggctagggaagctgcttgcttatcaagatggaatttgcttcctccctaggcaacctatttctcatttgtttacaaacttgttcttctctttaacttttatcttttcctgtggcttatgagagtgcctacagacaaggggctgtttgttaatcaccatcttgtgggcttttgaagggggaagctgggaggggaaaatgtgatgttttgtagcctctttgtagtttagaaagaggttcgtcgatgcaggaaatcacacaactcagttttaaatgaaggcagatgttttgcttttactgttaaaagaatttctttgcagcattcaaacaaaaggatagttccttttcactgccccttaatccctgctggatattatttatttgtatttattattttgatgggcaaagttctttgtatctaggtatatatcactttgatctgtgtaggaatgatggaccggactaatgagctacatctctaggtgctgttgcagcactggtgaaggagacaatacaagcaccagcccattgttcttcacattcttcatttaatctttgctttcctagaatacatcttttttatttcttcttttttttcttgtgttataagataggtagaggaaaccagttgggaattaaatgtttaaaaaatgcatttataagttatttgtgtttgtttttaatgtggctttttttttttttttttgcctttgatgtgattcgatggtttggtttaccacttctggacagcaataatgtatttggtggctagagaaaagagggacagggatgtgagttctagaaggcactttcttgatccctctacacaccctcttaaaatgactccagcgttccagcaatggtggtaggttcagtggtcctatactagctaagttattaccagttttgtaagctgggctgttggagagaagcaggggggcagcacatttacgcatgggcaatggagtatttacactgataatgacagtttgcaaggcttaggacttgttcaaagtaagtatactgcgaacagtttatgaaattattactctaaagaggaagggcctcagaagttttagtcagaagcaagagttagagctgttttgtctttgccttagtaatagctctcagtggtagttgttttctatctatggagagggatttagctggcattcatcaccacaaatctatataccctctctcttttcattggaacttacccagcatttatgccaggctgttgctatttctatatcattgacccaaaacttatccctggagagctgcacgtgtaacccttattccatccaggggtgacacatgggcagggtgtggattttcttagctggttcatcaaataagcagaagagaagtactctgggataccccttaggtactctgtcctctggtgagtggatcgcactgtcatctcttttgaggatttgcccacacacatttcaagaattgtatggtggaggcagcttctgcgtttcacggaatgaaaggataacttctctcccggtgcgagacaatactctatccccaacctgggctggctgtggtgtgcttgggacctctgcagggccctgttgcttgcagcaacctaggcaaagtgagaggttggggaaggaggaggggggatattggctttttcatttcttagcaggcttatttaactcattattattattattattattgtaatttgggttctgtccttattttcgaactatgtattctgtttctgaaggtctgtggatgattttggttattgaatttgaaactgcaagaaaatataactggaaagaatagtcatagtagaaattataagcactagtactctgtaacaccctttctttacagagagcttaaggcattttatatgttctctttaatgttccttatgttctgtgaagcaggtagcaagcttggatccatgtatttatttaaatagcttctgtcagtggagtacccaacagtttgccaagcagtgtcattctactggcctcctttaatagataacactgaggcttaagggcttaagagactagcccagtgtcacagtcagggaggatcagcacgggggtggagataccagagttcacgcaggtcagcgaatgcgcctgaggttgcatagtgagagtcactggcagaagaggaaatagtaggtttcttgacttcccttccagggctcccttcgctgaccatgctgtttccaaacagcaaataacatgcttgtttctatgatgtgtttggctttctgcaacatgaggagcatggtgatgctactggcagtccaagagtgttacaccgtcatctctagtgagagatctgatctgtgtttgtgtttgaggacagctcctccctcccctcccttctaccctctcattgcctctgccctgcccaaagggagtctaggatcagcaatattgaaatataaagccaaggtccacttttagaaaagtgcttgataaaactggctatctggcattcctgaactgtaccatgcaaacacactgtgttagatacttacctgtttatttcctgtctctctctcgtgctagattgtaagctccatgaaaacaggagcttttattgtttactgctgtgtacccggtgttgagccctgtgcctatcgcatagtagatgctggtgcgcaataaaatatttggtgaatgagagaatagcagttagagctagccaagaatatgtgtgatttaatatttttaagggtatattaggttgcaagatagataacaaatactgaatctcaggcatacttaggtctgtgttgtctactagtttgtggaaaagtgacacttggaaagaggaagcaaaagcaaccgaacttgctgtgcctttgaggaacaagttagtatagctaaagtagaatgtatgtattttagtatgttgagtctgcctttttaaagatgaaaacatgaatcattccaaacagaatttaaaattcagtttgaacgtcactgtatcactagtcagtgtttatctgaataattcttttactattaataggtctgtgtacctgtggtttgaatgaatgtggagcaatatcgatcttgactatattgtgtgtttagctaacttccctgcaaatcagtaaaaaatgcaaggttttagttcttttcaagggacaaggaattttgaaaatgtcttaattttttttattagtagagatagtataacgttgttgaaagaatagtaatcataacagtaagcaattttagattgcttatagtgtcgataatatttcacttattcttacaacaatcttatgagattatagtagtagtattatttccattttacgtatgttggggctgagacacagagagcttaaatagcttgcttgaaatcagctagccggtaaaatagatcttgggtttgactcaaggtcagaacgctggtatgacagatatttctgccttattccagttgatatgtttggaatactccaccatcagcatacttactaccttcccccaaatgcttgactgattccggagcctcagattctagttctggccttgctagtcaccagctttgtgatattgctgagtaccgtacctttaagggccatgcttttctcatctttaacttagggcgtaagtgaacgcccagatctcttttagctcttttggttaaaatgaccatttcagtttggtttgttgctgtgatccagtgaacagaaattgaatttttttttttcagtcttagaaagtctcttttagcacttattttcagaatttttaaaatccaaagttacccaatgtgcctaggagtagaaatgtatatttatatactattaatactttattttttataaggtactttctcatccttttttttcatgtaaaccccaataataaagcattccccccgtcctgtggatgaacacagtgagacgcagatgttagatgacaaagttcttcacttaattagtaggtggtttacaattcactgattctcttatggccagcgttcaggctaaagtaatgttgacacagaagtagagcaattttcataaaacatgtaatataaaagtatatataacataaaatatatcagtatgtctttaaagtgattagtttttgtacttttcctttggcatatattagaaaacttaggctgggcacgtggcttacgcctgtaatcccagcactttgggaggctgaggtgggtggatcatgaggtcaggagatcgagactgtcctggccaatgtggtgaaacgctgtctctactaaaaattaactgggcgtggtggcgcatgactgtaatcccagctactcggggggctgaggcaggagaatcacttgaaccagggagtcagaagttgcggtgagccaagatcgcgccactgcactccagcctgacgtcagagcaagactctgtcacaaaaaaaaaaaaagaaaagaaaattgtgtgacttctgaaattgtatgaattataaagtgatccaataattttcttccaaagatgtgcaaagggactatgtagcagtttattacctgttgtgtaattagctccgggggttactcttctagaatctaaggtaggtgtcagtttctctagcttgaggtaaagcgtgtctgtaaactgtggcttacagtgagcttgacatctcaagtcctcaggactttcttgctttgtcccatcaaggaccctttccttagggaagataaattcattgtaaataaatgacttaatcataagtagaagaagggagaaatgtttaatcttggccttttggagtttataaatcaaagacacagtagagatcaagttccttcattaaagtgtagttccaaaaaggaagaatgtggttttggttttaaaaaatttttttatttttaatttttaagagtacatagtaggtgtatgtatttatggggtaaatgaactattttgataccggcatatagcatataataatcacattcgggtaaatggactacccatcaactcaagcatttccctttttttgtgtgggttagaaactttctagttatactcttttagttacttttaaatgtacaataaattattgttgactgtagtcactctgttatgctatcaaacactataccttattcattctgactatatttttgtttacagaagaatatgttttgttcactgctggtaccactagcacctaaaacaatgcctggaatatagtagaagaaatgaatgaatgaatgatggaacagctaaaggagtggtttaattttttcattttattgcatttcatgtagcatcacatattctgagtatcagccacctttatataagctgtcttcgtttctgagtgcttagggagggcctggctttatgctgagcaaaaaaggcctagataggcaatcagagagtgggagttcttatctcagtctgctacaggtccttgagctgctgattggcatttttaaaatttagaattggattcatactttgccagatgatttatttctaagatatctttcaactcttaacatcatatgatgtttaaatgaccagcttaaaaataaaattcatccctacttccattgctcggtactataggcatgccattttagtaagttaagttttaagataatttttataagaggaaatacagccaggtttttttttgtttttgtgtttgtatttttgtagaatctcactttgagcaatgttaggctattgtgtggacagctaaaacaatcctaatattgccagtgtttcacaacctagaaccatctgctgtgttgctttttttgcagttgtagctgcatcttcctggtccttctataggctaagagcacatcagtaagtacatatagttaacagatttttcatatgtatatcttgggcaagtgttagtgataataagagcagttaaaatttatcgagtgcccactggataccaggtaaagcactaaatgcttcagatgtattaatttgtttaatttgtaatcttttgaggaagggatctgattatccttattgtgtatgaggaaactaaggtaaagagaagctgagaaatttgcccagggttatatatagctggtaggttacagagtaggggtgtcaaggccaggcattctggcttgagaacctacattctggttttgaaccactggcaataaatgtctcataagtgactatggtaaacttctttgtttatccttgcgtgtgtgtgtgtgtgtgtgtgtgtgtgttttgagatagagtctcgccctgttgccaggctggagtgcggtggcgtgatctcggctcattgtgatctccgcctcctgggttcaagtgattctcctgcctgagcctcctgagtagctgggattacaggcccacaccaccactcgcagctaacttttttgtatttttagtagagacggggtttcaccatgttggccaggatgggcttgatctcttggcctcgtgatcccacccacctcggcctcccaaaatgctgggattacaggtgtgagccaccgcgcccggcctatccttgttttctaaatgaaaaaacaaatcgtctgcttctgtgttctgtacacagtgagcttaaatgttaaaaataatagctggtatcatttgggtattttgttttgcaaattaacacactagattagtggactcattcattggttcatcttttatcacagattctactgtttgtccgtggctggataaccacaggcctctagatatttttgtacctctgactgtgagatttctaaaacaggcatggcaccttcttttataaccacgtgtcacatgggaatgttcagggaactgtaaacttttgagtgcctgcctggggtggaggagagatggaggttcttggctgggtttgaaaggttctatatagttctggaatttatatgcataattgtgtaccttttttgtgggggcagaatccatagcccttactggttcaatgaggaaactggaacccaaacaaaagaattagggaggtactgtgctagagcagtggttgcaaactggagcagttcctttcctcagaggatgtctggcaatgtgatgatatttggggttgtcacaacttggagttgctactggcatgtagtgggtagagtctgggatgctgctgaacatctgcatgtacaggacagccctctacaacaaagacttagctggcctagaatttcagtagtgccaacactcagaaactctgctccagagagaagaaaatactattaaattctgttgcctttttatggcccggagagttataggtttggggcataatgacctctttgagtagagaaaggccaagtatgagcattgtctggcttctctagttaagtcaatttgagagaatcctttaaacgtacttaaccttttcaggttttttcctccctttcccatgatgataagcagagtggggttggtggtagttaagttctgaatagagatattacatgatcctttgtaatcttccttttcctaaagaagggaccgtgataaaccttctcggtgggagggacttttcacacttaagttcagcttctcactggaaatcagcttgatttccactgaaaacatccagatctttgtggtgctactactgcgcaaggcagaagacattttcagtggaggtattggattggcagaaatttctttatgtgagacccattagtcctgtcccccatcgaagtcactagaattagtcttactccttgtctaggtttttcagaagtgttgccctttattagccttcctttgtccatgctgggcattctcagtcattttaaccattctcctgagacaccagtctggttggtaccaagatgtatatgatagaccgggctgcctgagaattcaacgtgacgtttctggcctgattctacccaactgaggcattagggcagatcttattgcaaagtagcccttctgctctttctctttagggcaaagtacattatatttgtctttgtcatgtcctgatcacactgtaatacacaaaatggaaccttgagttttgtaagtaacctgagtccacaatatgggttcgtttttatttttgaatgtgtgggcgctgatcagtgaacctgttttacttggacttcttttcccccaacaaatttcactatgctgcgctatgaatgtgggtggctgttttaaaggcttttgattttgcgggggacagagaactgtttggaaatgtggttttacctctggctagcttggttaacccccccaaaatatagtcaacctaaagtggctagtgaaaaaacaatagcagttctgtagctgcttgtttgcttgaacattttttgggtgagctaggggaagacaaaacacttgtttgggcttcttaatgaagaaattgtgtccccaaaattccaatgtgtgcttcttaagcttccactcttctctaggttctgggcatggggaggtaaactttggcacccctacttgcttgtaagttttctctttacatttcagaggtgtcagatttaggagaggctgcttgtaagttttctccttatatttcagaggtgtcagatttaggagaggctgcggcaggcaaagtacattatgtacaaaaaccttccttttgtaatatgggagctcatttccaaaggctccatatggctagcctaggaggctcatagtaaagacctgctttagttgtaagcagagctgataggagggtttttttataatctaagcaataatttttaggttattttgcatcagtttaggatgcacacttgtgaggtggtatttatgccttcttcccagattagatttacaaatcccactttcttaagatacttgattttacattttgaatcatgcttttttgccactttctttctgtttgaggctcaccgtgcaaattaactttctaaactgaaatatttagcttctcaaatggaaatacctggaactggatttattataaaggttaagaagattataacctaaatacttaaacatgaaaaaagtaacttaatcttcatgagattgttttattctttcattgggagggttacttggttaagagccagtagtcctggtcacctcagagggaatgcaaaggctcttattctttcatccagctaatgttaattaacctcatactatgtgcaggttgctttgagggctagcagttaggaaaggtaggaggcttgcctccatggagaatctagtctttttacttcatttggaccactgtaaaaaatataaagcagtgcagtggatacacagttgtgacataggtggaagagaagggggtctttctggctccttgagtgattaaggatgctgttacggaggaggtgggcacagtttagtgagacctcagaggatggggagcacttaggcaggttgaaaggaaagggtaggattccaagtggaagccacagagactggaaactgctgtgcatattcaggctgtgtttagtgtttccagctttattgagtggtagaggagagaataattgggaatataggtttgggatgcattatagaaggccttgaatgctggtggtagtgcttgggctataaaaagaaagcaaaggggagattaatcagtagttggtcaagggaccatatctgttttgctaatttgttcagcagctagcatgaggcctgagaacaaatgtcagtgaatgttgttgaaacgatttgagtggagaggggcgtgactggagagggacagggtggaggaagtgaagtctgaactagggaagtagaactggaaaggaggaatccctatgacttgacatttcattgggtgaggagtatggaaatgcataggaggaaaggccctaagacattgatgtctgcagagggacagagtcatggtaccattcattgatagaaaaagatactttagaaggggagaacttggtgttgataatgctgccaggtgtggtacctaggaaggagggagtgaaagaaggaagaggaggagggaatgaatgagtttgttgcttcttttgctttcgttcatcaccttactttcatctctcctgccaaatttataatccttccaagaacctcaaggattctttccacatcttctgtataccacagtggactttgccaggcagccttttgtgggcatgtgttttaggaactatttgacgtttgtaggagtgtggaagagagtttcttcttcttcttcttctttcttctttcttctttcttcttctttcttctttcttctttcttcttcttcttcttcttcctcttcctcttcctcttcttcttcttcttcttcttcttcttcttcctcttcttcttcttcttcttccttctgcttcttcttctttcttctttcttcttcttcttctttttttttttttttttggaggcagggtctcactctgatgcccaggctggagtgcagtggcgtgatcatggctcactgcagcctcagcctcctgggctcgagtgatcctcccacctcagcctcctgaatagctgggactaaaggtgcttatcaccacacccggcaatttttgtattttttggtacagactgtgtttcgccttgttgcccaggctaatctcaaacttctgagctcaagccacacgcccacctcatccttccaaagtgcaaagtgctgggatcacaggggtgagccactgtgcccagccagagatagtttctgtcattttgctcggttactgccattacctttatatagacatagtggaatttgtaaattcaattgatttttaactttttcgtctgtaaaggatttttaacattagaagtaggtacagaatactcaaaattattcttctatcattgaaactctttgttgcagtcattcttttcttccattttttatttcttgtatgacttggccaacaactctggatatcagtgattgtgtatcctttttaagttgagaaatttcatgtagacataaggctgagtcaataattgtcttgggcaactactgtgtttcaaaagaaataattattcccattgttcattatgtccctgatgagctaaacactgaaattacaatagatgctttagtcaatgtgaattatttgtgtgtggttaattttcttctttttttctccctaatgtgaggcatattctgtattttcaacctttaccccttttagacacttgtcttaagctgccttggttgaatgagaacagcagtgatagtaaggaaagttaagatgaaattaaaaaggccatagagtacatttttggtaaaccaaaatattgcttggtggcataaagccacagatccattccaaaaaaaaacgaaaaccgaaatgtggttttgctgtctgtcatgcagtctgtttcaactgtcagaaacatacgttgctttatgggatgtttttttcaagtctgaccgcagcttttaatttccttcattccacccacacctcctaccacacacccatgtatctagtactaatttataggcaatttgaatctaatgacataatcatcagcaagcaaaagggtcagcacttgtggcaaaagtttctttcttggtgtgctaattatcagttctacactcttggaaactctaaacagtcagaacacagtgattgtccttgttcatggacttttcagtctaagttagattgaggcctttaaaagatgggtttgaagtgctttgtatttttgctaaaaacataatattaaagaaaattaaacaatattcagtgaattttagaaagcaaaagaaagaaactcactcatgttcctacagttgtgccttaactgctgaccaggcagaggcatccctgtgtctccatcatatatgctgtgtctgatggagatcatgtcacccaaatgaaaaaatacttttctagtctaggttcaaagggtgatacataaaatacataccacaaaaaattaatgatacaatgaaacctcagatctttaaaattattattgacttattggtaactttacagtttcttcaactccttataggcaatacgatcctaaatatttttaaaaatctagtcctaattcagccagtaacttcctgtgacattggtaaattatttaacttttctgagtctcagttcctcatccataaaacaagggtctaggactggatttttactttttataacatgttggttcccaggcccctgatctgggccttaggcatcagtatttttctaaaagctacagaggtgattttgatgtacagcaaggttgaggaccagcgaactagagcagtgctgctcaaaattcaatgtgcatacaaatcactgaaatcagattctgtttctgtaggtctgggttggtgcatgatactctccatttctaacaaaaagatcaggtgatactgatactgctggtccactgaccacattttgagtagcaaggagccaaaacatctccaaaatgtcttccatttctacattgtatctccatggtatagtttatatagttcatgaagtctgtgtgctgcttgaatgagatctcacatttagtatgttaagattgatagtgtattatcttattatctgcacaacctctctttgcttaagctccatccagactcatgcatctttatttttgtttttgttttgtatttttttttttgggagattcatgcatctttgaaacaattcctcatattgaagtcattttaatagtaccttgctttagacagcctgacagctctagctggtggctggtgggttgttatatttgctgtagagaagagggttttcatttctttcttcttcgttcactccactccgacagatacttaggcttttgtattgtcacctttcctctcttcaacaggtaccctccccatattgacctcttgtattttggggtaaatgggcaaaaagaatcatgaagtgcattttgttttaattttgttctcatgcatgtacattctctgcagaaaatttattaagcgtaagtttaagggagcaaaactccaacttaaagctcaaacatacttaagctgtaacattttttaactctgtactttaaccatatcacttggcaattgtttttagaaataagaaaatactatttatagtttgtggttctttatttttgtttgctgcagctcaatctcacattggcaggcatcatgacccagtagaaagacccctgaatggtagtgtctggagagctgatattctaagccttcacccacccttaagtagtttttgcaactgtagacacttgggttctgtaagtaaaccagggaagagattaaggaatgctccatttcttagggctgtgttggagaatttggttaccttggaagaacatacctatcacctaaagtctaaggcaataagaaattatagtttgcgattggggaatgttgcttcggagcagtgacactcagagagtggtccatggactggtgcaggtctgtgaactatttcttaaagatgggtgaatgagataaggtacttgttacttgtgcaaaaattaactcactgttttcttcatagagaatgtctttatttttaaaaaacaaaacaaaaaactccattgaactaaacgtagttaaccgttatctttttgctgatcggtaacaatgtgggaactagctactttctgctttagaatacttaatcggtcaaaagttgtatcaggttattttataatttaagaatagaccaaagtagaagttcataaaatgtagcctaaaaaataaaaaagtaaatttaaaggcaagttaggttaaagataagaatcaaattcaaggtggtctggacgtatgtagcatagttaagtccaaggcagttaacacaggttcacaagtagtagcttcttacagaagctgtaagaagcactgcagtttgtgctttggttaatgcaaaacttgtttaaattcttctgagtgcttctaaattatctgagagaatttttgtttttcattttttgccatctactttttttttttttttttgagacggagtcttgctgtcacccaggctggagtgcagtggcacgatctcagctcactgcaggctctgcctcccgggttcacaccattctcctgcttcagcctcccaagtagctgggactacaggcgcccaccaccacgccatgctatttttttgtatttttagtagagacagggtttcaccgtgttagccaggatggtctcgatctcctgacctcgtgatccgcccgccctggcctcccaaagtgctgggattacaggcgtgaggaaccgcgcccggccgtttagtatctacttaatcgaagagaacatacctctgtaagtcacaaagaatttttattctgtagtcttaaatttcaggaccatgttattgtctgagaagctttaaaattaagcctgcctcgcctcctcctgcctgatgatattctttatactttactactatatataaaattcactgcatctagggcaagtatctgttcaccaagaaaagaggaagggagatccttcaccagtagcaaaacataaatactgagaatgtcttttctgggtaaaagtgcaagaaaagtagaaaaacagcaaattttctggggctaggcctgtgagctcactccttccaatcagtgaggaggcacttgtcttctgccactgtaccagtgagtctggcatccccatcccactttagatctgttccctagccacctcatggtccttgcagcccttcccctgtgtagtataaattagtaagggatgctttcttaattgagagacagaaagagccctaagcttgaatcgatacctaacaatacagccactcaatttgtagcactatctaatctcagttctgtcttaaaacagaactacttaccttaagggattttattcgtaagcctaccctcataaatatttctgtcagccagatatggggcagccattcttcccatttcatgattatagaaatggagtccagaatcattttggagtttgcttattaaagtcatggtttagctagtctagaaattagagtcacactaggatttgggactgcacagctgtatagttcgtaatatttggtgttcttttcagaatgttttgtcacttgattctgaattcttcccatgcctttccataattgtcccctaaccaaatcttgacacgagcctgtgatttccctattttaatgaatggtaggaagcaccatatcatccaggttttacacactggaatcattgattccgtactcccctggttgtctaatctagtgaagccacatagtctgctagttctccatgtgcagcctgcctcctttccttgctctcaccacggtcaccatcactgaccatcagaccttgttgtcatactagaggctatggtggtctccaggctttttgtctgcagcctttgccttctctgttctcttatctgggcttgctggacctcccggtctacttttatatctaccttttggtgttgggtcattttttagggtcccttctctgaccttggaaaatcctaccagtatttccaatatggctctgtcctcttctctgcttactttgcccttttatttaggtaattttattcactctgagtagatgaatctcagggttttttttctactagcccagacccttcctctgagaccattgtatgtcctcatttgccttgaatgtctcatagatacttaaactcaacaggtcccaaaatgacatagtccccccacaagcctgcttagtgattcctatctgaggaaatgccaccaccatccacccaatttctcaagccagaaacccatagaggcagctgattattgtccttccctcttattcattagccacacccagtcaaacatgaggtcttctggtatcaactcccagttactcttgcatttgtttacttttctccagctatatgatcatggtaaattaaccactgtatgattctttggctttatctgtaaaatggggacgagagtaatcctcttaaaattgttctgaacattaagtgaaatatctggcacagagcaagcgttccatgaatgttaggatggtgaacacccttggccaccatatttaaaaggactcactggcctggcgtggtggctcacgcctgtaatcccagcattttgggaggctgaggcaggcggatcacgaggtcaggagatcgagactatcctggctaacacggtgaaaccctgtctctactgaaaaagaaaaaaaaaaaaaaaaaaaaaaacttacccaggcgtggtggcatgtgcctgtaatctcagctgctcgggaggctgaggcaagagaattgcttgaacccagggggcggaggttgctgtgagctgagatcgtgccactgcactccagcctgggtgacagagcaagactccgtctcaaaaaaaaaaaaaagaaaaaaaaaaaagactcactacgagtaatgcaatagcctcctaactggtatgtcctggatagtgataattctggtccactaggttcttttggatctacttctccaccttcaccttgtgctgatactaccctttcacttttttatttgaacgtcagtgtcccatgctggtatggcaggctttgctgggaatggtcttacccttttctctgcccctttctcctttgtgtgtcagactcattttaccctcagttactcagggaaatagtcctctaaaaagcatttaaaaataccctgcattctgtatttgtttcaatgtctgtctcatttgctagattatggactctgtaagtcctatcttgttcctgtactgtttttttcagactataatgcagtatatggcagagtagcagacaataatcgaaagttatgaaattaatatggctcacattactctctccccaaagccagaagggttttcttcccctcctcactcttagatttccagggctcctctgtgtagtagctagggcacttaacacatggcgtttgttattgtgtttatttatatttgatcttccccccccagattataaacacctcgagttcagatcagttttgcattcagaactgctgtttctaccagagcttctagtttagagtaggagccagtaactgaaaacatcttgttgaatttcctaagtctgaggtgctttggaaattcattttgttcctattctgaaattatctttcatcctccatctttcctcttgtggtatgttttgtggttataaatctcttctttccgtccacaacattaaatataatcagtgccaagaggaggatggaggacagaaatgcactgtggtgtcttgacctgtctggtacttatcataactttcctaggaattgaccttgatgggcccttactgccttctaaataaagttcaaaccccttagtgtggcattcaagaccttccatagtctgaccccagtgaacctcttctgtccttattttccactctattttttattgcatgcatcctgtgctctagcttaatggttttcaatcctgcctgcacattagattcacctggggagctttaaaaactgaagccagggtcctgtctttggagattgtgagttaattcgtctggagtgaggcctgggtgtgggtgtttgtgaaaggtccactagtaatgctgatgtaaggccagggctagaaactactgacaagctcagtgtttcccacggaatatcatctcctctccgaattttgacgagaaagggtcccaaagtcaaagaagcttgagtagtaattgcttttaatgtgctcctttccaaagatgtacaacgaacactatcaaatgaaaggctctaagatacccaacagtaaagaaaactgtttaactttcttcatagtgtgtgaggtcgtctgataagagacacttttatgtatataatacttgttaataacatctgcaacatgtggtatagaaaatgtttttagccacttctcaacttttgagtcacttctttttttgtccttccctgatcatgtcatccaaatcagacccacctcctgccccagggctctctcttacacccccaattttgtcttcatagcacttctcagtatctgaaattcctctttatatacttgtatgtttgcttctgtctccctccacctatgatgtgagctccatgaccgcagggatttacttgtcttgttcacccctctgtcttcattcagcatctacaatagtcctgacaaatagtaagtagatatttaataagtatttgttgaatgggcaaaaatacacgggcagtaatgcattcgtggtttaggctttttctaaggtgcatttgtttaaatattttaaattgcctacagaatttaatttaaaagcaacctgaagtacattttaaaagtaactaggaatataggaacacaatagtttgctttacctttaattttctcaacctgcctagtcaagtattaaaaaagaagaaaacaaacaaaagtggatgtgagcctgattatagggaaaatgctgttatttttctgattatagagagttttcagtttgtggttggggacttgttttttctgatttctcagcctgtctcgggtggcttcccccagccattgaaggaacttgagtgaggaatcagtgaatggtagtggactttgtgtgcagtacaccaccccaacaacaaaaacacacaaaaacagacaaggaattaatttcagtaaaaacttcctaataattaaaaccctcctacagtgtgagagtattcagacaggtttgtcagggacagtggggaggcagtttgtgtatcagaatccgtatgtggaatcccaagttcggttgcctgctgctcaacacgtgatgctgcagcaactcttggaccttgttcagaagggatttgaatagcctgttctctctaggggtcctcatgctgcagctgtgcccatggctccccaagcctggctctaactgtgttgttttgagcagggttaataagcacgaactcgtctacacattgtagtgtgtataattcctgagctccaccaccacaccttgaattatcaggaactgaccttttacttcctgtggacctagtgatgccgtcgcatgagtaggccctttccttgggctattaaaatcatcaagttggttcactcgagataacattatagagatttctcatgaacgctgtatacaaggtgctctcctagggtgcttctaacaaatccatcagtccagtgggtcaggtgatcagcaatctggtataaataatctcaagaaggaggttgagctgcatttcctttattatattttaaaataatctttaaaacacatattttgccaaggtttcagataggaagctttaatcatttattcacccatcaggaattgtccagaatgaatttgcatttccttttgttgcacactatgataatttattattcttttgaatagcatggtatcctaaatgccagaaaagatgtgtgatgggaaactaaataaaccatatcagaatttaagcaagttttctggatagatattcctttatggttgatatattaatgtgctttagctacaggcataccttgttttactgggtcttgctttattgtgcttcacagagactgtttttcacaaattgaaggctgtagcaaccctgaatggagctgttcttccaatagcctgtgctcacttcgtgtctctgtgtcacattttggtaactctcacaatgtttcaaactttcttattattactttatctgttacatgatttgtggttagtgatctttgatgttactattgtaatagttttagagtgccgtgaactgtgcccccatcagacagcaaacttaattaatgtgtgtgttctgactgcttcatgctattcccccttctttccctctcctcaggcttccccattctctgagacaacagtattgaaattaggccaattaataaccctacacgggagggcctctaagtgtacaaatgagaggaagagtctcacatctctcactttaaatcaaaatctagaaatgattaaccttagagtggaaggcatgtcgaaagccaatgagccaaaagctaggtgcgttgtgcccaacagccaagttataaatgcaagtaaaaagaagttaaaggaaattaaaagtgctactccagtggtaagaaaatgaaacagccttattgctgaaatagggatagttttagtggtctggatagaagctcaaaccagccataatattcccttaagccaaagcctaatccagagcaaaacccctcactctcttcaattctatgaaggctgagagagatgagaaagctgcagaagaaaggtttgaagctagcagaggttggttcattaagtttaatgaaagaaaccatctccataatgtgaaagtacaaagtgaagcggcaagtactgatgtggaatctgcagcaagttatctagaagatctagctaagatcattgatgaaggtggctacaccaaacaacagatttgcagtgtggataagacagccttctattggaagaagatgccatctaggactttcatagctagagaagagatgtcagtgactggcctcaaatcttcaaaggacagacagactcccttgttatgtgactaatgcagctggtgactttaacttgaagccaatgctcatttatcattccaaaaatcctagcgcctctaagaattatgctaaatctaccctgcctgtgttctataaatggaactacaaagcctgggtgacagcacagctgtttatagcatggtttactgaatattttaatcccattgttgagacctactgctcagaaaaaaagatttctttcaaaatattactgcctattaatggtgtacctagtcacccaagagctctgatggagatgtacaaggagataatgttttcatgcctgctaataattctgtagcccgtggatcaaggagtaatttcaacttttaagatttactatttaagaaatacattttgtaaggctgtagctgccatagataatgattcttctggtgaatctgagcaaggtaaattgaaaaccttctggaaaggattagccattctagatgccgttaagaacatttgtggttcatgggaggaggtcaaaataccaacattaataagaatttggaagaagttgattccaaccctcatggatgcctttggaggggttcaagaccctgaggatgttctttgggggtggaccttgaagatgtgactgaattgctgcaatctcatgataaaacttgaatggatgaggagttgctgcttatggatgagcaaagaaagtagtttcttgagatggaatatacttctggtgaagatgctgtgaacactgttgaaatgaccacaaagaatttgaatattacatcaacttagttgataaagcagtggcagagtttgagaggattgactcctctgaaatttcaaagaaattctgtgagtaaaatgctgtcaaacagcatcacatactacagagaagttctttgggaaggaaaagacccccagtgctaacaagcttaattattgtctgtttttgagaaaatgtcatagccctccaactttcagcaaccaccaccctgattagccatcagtattgagccaaaaccctctgtcagcaaaaagatcatggctcactgaaagctcagataatggttaacattttctagcaataaagtatttttaaattatggtgtattgtgtgtgtgttttttttaagacataatgctacttcacacttaaactatagtacaaacataacttttatgtttgtactatactgtagtacacacatgtactgggaaaccaaaaaatttgtgtgactcgctttattgtagcattcactttattgttgtggtctggaactgaacccacagtatctcttgtgtatgcctgtattcccaaacaattgtagcgtgcctgcaaaagaattcatgagattctaaccacctaaactgtagtttcttctatttattcaacaaaagcgtattgagtgtctttgacataccagccactggggctataagacaaagctatctgccatggagcctacattctctagaaccttactactaggggtctggtctgtggaccagcattttcagcatcaccttaaaatttgttggaagtatagactctgaggcccttttccaatttggattttaacatttccaggtgattagtatgtgcattacagtttgagaagcactagtctagtccatgtaaacaaaaatatatatgagataatttcagatgattacagatgctgtcacgagaagacaaaactataatggccagagagtgggaggaggacgagtaattgaggatggtaagtgaaagcatcagagggagtgtcctgtgggctgagacttaaatgatgggtggagatgagccatgggaagatctggggaaggtggttccaggtagagggaacagcaagtgcaaatgctaggaagagggactgtctccttgttccttgctatgccctctgctctagccaggccagggcccatttattcacttgctgactgtgcctgcacctgaaagtgtggtggaagtgtaatggcagagtggtatctcagtaaacaggaaaaggccaaaacttgggttttgataagagcagctactcatagtgagaaaacaatcaaagggattgtaaggatgttttggtaatgacagcttcaaagaattggaattttatataattgggaggagggagaagaaaccactagaggccatatgctggaattggaagaagaggaaagaaaatactgagaaatgcaggatagatggagatttcctgaaaaacagagaaaagaagtaaacagacaaggaagctttagcctcgcctgagaggaaagaccaaaaaatagagcatggctctctgtataaaaggtggcttgtttccctgaaggtaggcatccttgatgagaactgagtaaggacgattagtctgttttgttttgttttattcctgtatccaaaattcctttgtctttaggtatttctcacatcattttgatcatacatatatgttgggaaaaatcaagatgaataatctccgtttactctgggaacaaggagtatcttcttccctctactgtggctaagtatggaaaagcttaattgtaaatcagcattcaaagacaaccaaacatttatttatgtcagtaggaaagaggaaggtgtgtgagagagagaaggaggaggaggaagaagaggaggggagggagagagaagagaaataaaatgtaaagcaggcagctggcaaggcttgctctgacacactggctgaggaaagagctattggtagaacttggatgtcttagtaatcagagtaatcaggttctctgaccggttccaccttgttctgtgcaggctgaaagtaagctctctagagaaagtaattttctttctctgctccttctgacatcccacttttccctcccatccttcctttctattttccctgcctctcccctctggtagaactgagtataaccgtggtaacattggttacagtgttttctagacttgagaactgaaatgatttgaccttgtacaagtaactggatgtctggcacaatgatcgtcattctcaaccttgataatttatctctctcgatcactgttaacattggagcagtatttaaacacaataactagagcccagaatatgcatgtaggcgaataggcacctatctaggatttctcttaaagatatacctctagagagctcacatggtaggaggaaaaagagggtgctcttttttttctttaaccattgtaaaaatgcttcagtaaaatatagcttgagctctggggatagactggaatagtaccatgaaatgtgggtataccgtgattctcttcaagaaggactttgttctgcttattcccacatgagcaccacaaacagtagccccatgtatcttgttaggacaaataaatgggacacttgagaatatccagttaactgagccgcacattgggtactttaaagcacacttaacatgcagtaaaatagcataaatatgagttcaaaacacaaaccaagttgacattgcttgtggtatcatcattagtagaatcattgctttggttaaactccctgggggaagcagtggaagggaggtatgggggttgtgaaaagagattcaatattgacactttcacattgtttaagatgatacaaattaactactctgttatagacagtatccttttctcactggagtaagtaggatgggcagagcttttaaaaacagcaagtcttagttttaatcagtcctttaggaacctgatagatggcctactaattcgattcttataatgttatcaactttgttttattgctttattaagcagtagtagttgttttttttttttttttttttttttttttttttttttttaacaagcacttgaactgaaataaagcttaggcatgtggtttaccaacttgctagctatactgacgatacctttggtctaaatctttaagctttattccagtcaggcttttttttttttttaagaatacctaagattagtgtgtgtgtgttttttttttttttttaaatactttttaagttctagggtgcatgtgcacaacgtgcaggtttgttacataggtatatatgtgccatgtggtttgctgcagccatcaactcgtcatttacattaggtatttctcctaatgctatccctcccccagtcccccactccccaacaggccctgatgtgtaatgttccctgccctgtgtccatgtgttctcattgttcagttcccacctatgagtgagaacatgtggtgtctggttttctgtccttgtgatagtttgcttagaatgatgatttccagcttcaaccatgtctctgcaaaggacatgaactcgtctttttttatggctgcatagtattccatggtgtatatgtaccacattttcttaatccagtctatcattgatggacatttggattggtcccaagtctttgctactgtgaatagtgctgcagtaaacatatgtgtgcatgtgtctttatagtagcatgatttataatcctttgggtatatacccagtaatgggatcactgggtcaagtggtatttccagctctagatccttgaggactcgccacactgtcctccacaatggttgaactaatttacactcccacacagtgtaaaagccttcctatttctccacatcatctccagcacctgttgtttcctgactttttaatgatccccactctaactggtgtgagatggtatctcattgtggttttgatttgcatttctctgatgaccagtgatgagcattttttcatatgtctgttgactgcataaatgtcttcttttgcgaagtgtctgttcatatcctttgcccactttttgatggggttgtttgtttttttcttgtaaatttgtttaagttctttgtagattctggatattagccttttgtcaggtgggtagattgcaaaaattttctcccattctgtaggttgcctgttcactctgatggtagtttcttttgccgtgtagaagctctttagtttaattagatcccatttgtcaattttggcttctgttgccattgcttttggtgttttagtcatgaagtctttgcccatgccagtgttctgaatggtattgcctaggttttcttctgaggtttttatggtgttaggtcttacacttaagtctttcatccatcttgagttaatttttatgtaaggtgtaaggaagggatccagtttcagctttctacatatggctatccagttttcccagcaccatttattaaatggggaatcctttccccattgcttgtttttgtcaggtttgtcaaaggtcagatggttggttataggtgtgtggtgttatttctgaggcctctgtgctgttccattggtctatatctctgttttggtaccagtaccatgctgttttggtaccagtaccatgctgttttggttactgtagccttgtagtatagtttgaaatcaggtagcatggtgcctccagctttgttctttttgcttaggattgtcttggcaatgcgggctttttttttggttccatatgaactttaaagtagttttttccaattctgagactttgctgaagttgcttatcagcttatggagattttgggctgagacgatggggttttctaaatatacaatcatgtcatctgcaaacagagacaatttgactttacctaattgaacaccctttatttctttctcttgcctgtttgccctggccagaacttccaacactatgttgaataggagttaatagctaagattagttttatgtgttacatgttattaacacttttgtaaaattgatttttgataaggtaaaaatggagttgtcagtttagagaaatagtactacttgaaaatttttccttatatttagtctggattttaagttagaatttctcattagtcctctgactttttaatctagggtcaggcaagatcagtttcagaagttgtacagtttctttagaaaatttggaacaaatcaagatattttctgattgaaattttaaagaattgcagtctttgttctctagtggtgaagtgaagtgataaggttgcaagatttatttgtgtttattccaaaaagtatttcaggcagggtaagtaggacttctttgtcacctttttaaaaaatgttgatattaaagtggatgaatgtatgttcttgataaacattcaataaaataaatagattcatctttaaaaaaattttggcaagaaactgctgtacagaaaacgaatggtaaaaagttattcttcaggaatgtttcctaaaactgtaattgctttaagttagctgctgaaatggtttcctaataacgctttgttattctgttttatttcaacaatacatatgtagtaatgttgttcctattttgatgagagacaaacccatcaaacagtttttaaaatcaacaattgcttttgatatatccgtttgattactaaaataaagctattggtactttcacccaagtttattatgtttttaaaataaaatttatgtctttttaaggaaatcatataggctgaaatgatctaaataaaaatcagatttttattgtatcaggtctatttcagggaatgtagttaaattcaggtatagggttaactaagtttttgtcttttaaatgattagtaaaatttgttatgtgataaaggaaatatgtatttggtattgtgtgcgttagtatttgttactttttaacctagtgattgagttacagctttcttttcaacacatgacatcactttcccatgatgtaagatagatgataaattttccaatgattcttgagttttggagtatgaagaaataaaggataaaagattcttttctgtgttttcctgtttcgttactacctggtcatgctcctaggccactgtccatcagtactgtagagttagcctgttgacagtcacatgtcatgtgttgagtgcgtagccaagggattttcgtagaatgccttttttgtctttacatttttctgagatattttatccaaaccaaggttttctttagcagggatggtgatcatttttattttatttatttttttgttggagaatggtgtaaaggtgggtaattttgagagagaggaaatagaatggtagtgagttgagggtaggaaaatacatctgcaacttttattgttttttaaatgagcatcttgatagggaagatagaatggaattgtcaaaaattgttaatgtgtttgacaaagtgtggctgtcagtatgatctttttgttacattttgacatgaacaattgtccttttattggggctgttaatgctattttagaatatcatgagcatctgaaggcaatagtttagcagtgtccataaagcatcaaataccattataatatctagtaaccctaacagcaatatttcagaatccctgcctgtttaaatgggctatctgtgaatgtacttgctcagggatgcatgacccacatcacctataaatttgattggaagctaacagtactggcgtagcctgatggatagcagattagagccctgattaaccatgtgattcaaagactgggaatatattgtctaagcaagattcatcagatgcaatcagaatttcaagtggtcagatgaaattcaaatgtgtgttgtggcttttcctcccctattgcttttcctcctaggttgcctttttttccttctttccccaaagctgaaaaatacttctttgatgaatctgctccttaccctaaagctgtctgtctgttattcatcagaaagcaggtcgcagttcagtgagcagaagaaaagattttaatagaagctgtgccaagggctgtaatgcatcattttagggccctaattacattacaatgacaaatatcaatggtgacaacagcaataacctacatcctttaatggctgtgctggaaaaggagtttgggccccacgccattatattagactcagtttcaaaacataggccattagaagtgtgtgtccacagtgttattggctgatcgctaaagcccagtggaaaggcctgtaaataaatgatgcctccctaaagctgggtcctgtgggacaaaagaggcgaaattagatgaccatgggagcagcagtgtttccgaggcaactttagatttcaaagtgaagaatgacctgcttaattttatgaaatcacacacacaccccacccccccactgccaattagcctgaccatgaaaatccattggcatgacaacttaaagaaattaagaagtcttttaaacaaaaggagatctttaacggaagtttggaaggtttctgccctcccgtttctgttgtgtgtgtgttaacctatgtgattgaataaaaaggctcttctcctttttacatttatttttaagaaaatgtagaatttttttaaaaaatagttgctcagacttaatacagcctaggtccaaaattttatttcaccagatgaataagtttccttagagtcgtttttattgcctagattatgtaggcgaactaaagaactcagttttcttatgtgcccacacatttttcagccctcctagcaagggactattttatttatgtaaacaacataatgacgaaaatatgcttggcagatggttctaagcattagaatcatcagtttggtctgccccaaagtgtctcattatcttttattctctccccctccacctctccctgcaaaaagcttaacaaccaaatgcatttgagatgctgtactttcagcctggtgaatgctactctatttttattgctcaccctggaatttcaccccataaccactgtggtatgttcgtccaggtggagagtggtttggtgattcccattgcagctcttcatggtggcttaagcattcttaaaggatggctaaatgctccatggggccagtgcagtaaattaaatcaggtcagcacagttgggtccttattcactgcagcttattggtgctgggtttttgtccatactgttaggaatgcaggctggaatggaaagcttggatttgaaacttcatggtgaatttgtgttttcttttggctggtaaagtttttaaggtgctggcatttaaaagattgcatagctacacagttagaagggttgctgatgaaagaaggaagcctagattgcacaagtagagtgtcactgtcattctggtaatgacttggcaagaaaaggcattttgggcctcacataaaatgaggaactgaccctggatggaatttaagaatgtcttagggatagtaattgctttacattttctgcctttcaattcttcttagctctctttcctccattccatcattaaaatataaactattttgtatgtacgtgtattaaaaaaaactgtgtatttatacatcacaaaatatacaaggcaccatctgaaaaatacaaattaagataaacattggtaaaactgtgagtaactttttaaagaaaacatgtagtggtggtttttcttttaacttactgtagcatcttattggtttaaaatgtctgtacttataaaaattattagagaatagactgttctttgacattgttgggacttttgcatatccacagtaaaaaaaaaaaaaaaaaaaaaaagttcccaaggatagtttccagatacatacagattgcttcctgctaagtgtaataagattttagcatatctcaacctctgcacactgaaaaccttggtaggacacatttggaaatttttatggttgaagaaaacattttgttctccaagaatttgtaagaatccgaattagccaacttttttgggttgtttgggtgctgctgtttcagaagtttagggtcttgagtttaaaatcacagcaccaatgtttttaaagcaaaggccacaaatatagaaatccaatgatttgctaattgatggagttgagatgtaggaaagaatgtatctttacttatctaaattcttaagacttagaagactgcaggttttatggaaaacattagtatgagcaagggtcctggtgaaggctgttgaaaactgatttccagtcatggaaattaaattccattttatattgccctgatgcttgaaggttaactttttaagatgaatgctggttaataaattgtgctgttaatgtggcactgttgtcactgcttccttttaatgggcttactgatgagatagttttcctcttccttaggaaatatgccagccaaattataaagtatgttttaatatcatcctgttaatatttggggaatctgtaaccagctgactgttctctttattgctttcctttcccttattttttgcaggcagagattgtcaagaggctgaatgctatctgtgcacaagtcattcctttcctgtcccaagaggtaaggtagttgattttaggcactggactagaagttgccattttagtggttttgcagaaaagggattgtagaactgactctctggccttgccagtctcttggtgtttgtattttattttcatttctaagaaacagtgttctcactccaacttgtataccttagtaactttctgtgggatataatttatatgtgtttacataatggaatattttctagttgggctaagcaaaattcagtcgttaaaatattttgctatctttgtcgtgttgctcagaattatgcttgtttgtcataatggtacctaatagggtagactgaaaaattgccaggaaaacaggagcttactctgtactattgtcattgggcattaagaattggcagaagacatatcaaatggaaagactttttgtagtaaacaaactaatgaagcttttggctagctacttttaaacatttacttcttgtttcctgattaagtctttatattattgtgcttttgggaaaagacctgcaagatgaactcattgaactcgtttctctgagtgccacttttctcaaaattaggctttggtgatggtaggcttagcacattgctaaggcctggcatgcggctcactagttctcttgctcacctacaggggaagtgcatgccatcagcaaacaggcacaggttggaataaagcgatgcatttctagtgcttgttggcttccttgtggtttttttttctctccctgcttacttttggtagttacaaagttgaagtgagaatactggaaaaagataattttttgcttctggattactgaatgccttcatttgctcaggtaagatccactctaagaaggaaggagctaatgaaatatctgcatgtcttgtagccgcaatactttgtgctgtgggctgagaaggcacagaggcacttttcttcctaccctttcagttgttctataagtgtgttgtgtcactgcttttcaggagagaggttcattcacctgcttgccagcgggcatgtgccaatgttatgtggccaatatttgagcctgcatgtgtattatagatatgcagattgctgtatatgatttttttctttggtctggactgggttagacttgagtaactatgggtacccttcataggtatatactggggagggggcactcatattcacaaatcttgttgacactctgaattcacatgctcttttgggtcttgataaacaaagggtatgttgtcttttctcctcctttagctgtgaccacaaaacctaccaccagtcatgtccccatttgcctgtttttacttaggatttgcttatggctagattagatggcttggtgaatgagagtcaaggggtgtatctgcatttcttttggaaacctgactgccccctgcctgatccagactagtgtgtattttttactttaagcagctctgctttatggagatggagaatgggaagaatgtgtgacctacagagctgtaaccaggctggggtgtcatgttctaaggtgacagggaaaagttcgaattatccctggggtggtattagactttgggcctctgtaggcacagacccctgtatatgatcgctggtatggctttggtctcatcacatttctgcaggatctgtgggttgtgttcagaagtagaaggttgtcttggggatgttgatgaagctgatttgccaatgagttgttttcccacatgaattatgttgtttgtgtgagcaggcccagtgggaacagaatgtataatggtagtggtgctgagcaagactggactgaaattaattgtctaaggaagttgtacctgtaggtgaaagccatggggagatactgacaactcatttgctctagtctgggaagaaaggtgtcatacttaactgttgtcataccacttaactatttatttcccaaatactttgacatttcttggttgaaatccttgactcacgtataatgatttatgccaagcttgtgcaaccccagggcctgtgggccacatgtggcccaggatagctttgaaagtggcccaacacaaattttaaactttcttaaaacagtatgagatttttctttgcaattttttttaagctcatcagttatcgttagtgtattttatgtgtagcccacataaaatgggatgtgtgtgtgatttcttcttccagtgtggcccagggaagccaaaagattggacacccgtgatctatgccatggttttctaaatgctagttctgtgtatatattttcttttgcttactttagatttaatttactcatctttttctagtttcctaaggtatgtgtgtatcttttattgtgtgagacacaaacatgtttgtttccttcaaatcagggcatctctgatgttttttatctgaacatcgtccaccttgtttcttcttctgtgcattctgtgagcattggactccttgcttctgccctgaagccagatggaccataatctggagggaggggaggagcaggttagtagaggaagatgaattctgtttcctgtctcttcagaggcatggaaaatcactcttgcatggctgtgagcatcactgtgccaggactgaaggctcttaatctgatcttttaacaccggctctctgtgtgacagtctcgctaccaaaacggcagctgctgcattagaatttattttaaaatgtttttatttaaaaattaaatgatcgtatttaggaaaaagcaaaacaattcctgaagagtagtgcataagctaacagaacattggctggagcgattgtgagcatctgaagtcaggctttttggagtttgacaggaacaaggggtatatttacatactgttagatgaagtctctttttaatttagcccccatgtgttgattaatatacctgcttaatattgcttgcgtctggtttaccgcatttttttaaacttaaaaaaactatatagtactgaatgataactattaaatttagctttaacttcaagactttttctttttagaaatgagttgtataattgtgttcagaagtacttgaagtgtgtctgtatatgaaaatcacagaaaaatattttcctattagagtttactaaaacatttaaaaatattaaagccaatatatactttaataatgtgctgttgcactcacgtacaactgcttccagcgttacaggcatttgacaaagatattgccaactcttgtcattaaaagtgagtactcatcacttggagttcatagaatttcacaggattctcaatatcagaatttagaaaaaccttgtgaaccctcatctgtcccaagctgttcttttctctcacttcactttttagcttttaggaatggataagactcaaatttattcttcaaaaagccatctcaaggtggtaaacgggaagctcttttctttccctatttcggtctcatttgcaggggaagaactataaatatcaactctgagttggcagttccataaacaagagatgccaggatgatgacagttggatctgggtcctggcctccctattacaaatcgtgtggtttactctaactgggctaagctgggtgacctttagcaagtgatgtgcctctctaagcctcagtttcctcatctgtatgatgaagttaatcatagcgtgaaacacatccaatgtctgtgaagattacttgggattatacccaggtagcttagcacacaataagcacctactgccgttgactagtgggattaactacagtagcagcagtggagctctgtctcctcttgggaggagctagaaccagccctccctcccttttctaatcattgcatttgggaagaatgtgaattgattatcttcctctctaatgtccttatagaagaaaaaatgaaaattaaaagtgaacccagggccttgaactagctaaaaatctatgtttttgtttccattggcaattttgggatatggcttatagacccttagacctcagtgggtccttagtaaaactgaggattgccaataaatattgtattgcttccagtatcccagtaacaactcctcctccatcccccaattccaggaacatatctatgtagagagtctaaggtggacctaaaactctacatcactgttacaccctggcagtaagggacagcatttctgctaatttagaattgggctagctctccctcttcactagctttgcattgcaaagttgatctctctaagccttagtattcctgtagaataaggagagtaagcccacctttacaatgtgtattatatgtatcaaaatgtaacagacttggcatagggagtgccgtttccccacctgctcttttcctattttacttccagggaaatagattctatttcaggttatttggggtcctaagacatttggaaaggaatgacttagtaaaaactgggaagagttcaaggtaatatttcaaacgagctggctggcagtcttcctgcagagttagctaggccttgcagctccagtagctgcttccaacgatggacatttagctccacacaggttatctttcaggaggaagggaatttttttttttttaagtaaaccagtaggtatttttcttaacctgttagattaagcaggaaatattgtgcacttagttgaggacctgttggaggatagttgtgttttttgtactcttgtttccctataaggatcacttttaagatagggtatgtttcacagtgatccacaaggtgttcctaagatctttgagaacctcaaactcttgaaaagcagtaggtcagtaggtgaaaagtttattacgttatagttgaaaattattctccagggtacagttgtatttttcagaaacttgtcgcttcagtaacaaggagcacattcattggaagaggcacattaggcaagaggcaatgtaataaaagctggaggtcagccagacccaggactaaatcttggctcagccacttgctttctttaaaatgtggagcaaaatacttaacttttctgggctgcagtttgcttatcggtataatgggatacctgtactgtaggatttttatatgaggattcgtgacagtgtaaaaggacctcactgaatgtttggctgctttaacagagatcaaaggaacagtggttttttcaaggaaaaaaaaaaaaaagcttgtttctctctcatgtaatagtaacagttgacagcgaagccatctatagctaatttggtgactccatgatgttgtgaattcggttccttttatatcgacgttcatcatccttgcaccattgtgtcttgccccagcgtcagctggcaggaaagagaaaggaatgggcaagttatttccttttaaggttgccctctttgcagtggccagcacttagttacctgcccacagatagttgtaagggagatacagaaatgtagtcttagctgagtgaccattatgcccccctaaaacttacaccagtgtaagagaagggatactgggggacaactgccacttgcttccagacataatgctatgcacaaaataaaaattatggctattgttactgctaatggtttatctttacataacaaactctagctttgactatgtaattagcacatctcatgtttttcagttacataagatataaaataatgcatagttcttgttatagaagtctcttccttaccattcgaatgttggagaagagtcacccatcaggtattatttatcattcatacattcataggggatggaaaagaacctacatgaacagtatggcctctgtgggctgtctatatttgtgtttcttatgaccagtggcttcctaattctcatttattaaactcatggtcattgttacctttagagaaatggcattcatttttaaccttgttattagcagacttgtttctagtcactgggtgccaaggaggatggacattttcctccttctacactcctgtaattccatgactgttttttttggtggtggtggttgttttttgagtcgaaacagaagccgagctgctcagaggctgatggaggagccctgcaggctagtcctcacagcaatgatgaggagcacacctgggggcctgcacttgcacatgaacggagctgtttttcccttgcatcagttattttaagaaaatattggtttaacaaatgaaataaagaagacgttattctttttacaatatttaacaatagttctctgatcattagaatattgagaatataaaagggaaattaggacctaaaaatggaaaccttccatttttatacttattttacctggggaaaagggaacttccataccaacctgaatgctttctggtgcaaatttaattttaacttaaaacttggtttgtattgccctgttagcttttctaacacgtagtaccaagtagtgtttgggcactctccattgcatttatttggtagaaaataatagtcaattacataatagtgataatatgagtttatttgaattataaatccaacaggctagaaaagctagtcacatcaaacgatacataaactcctgttttggacatgccataaatttggtccatgtaatttgatggaaaacaaaccccttctactacattgtgatatatgagtatatctcagatgctgtttacttgggcatctcggttaatatggtactgaattacttggagccacattttgcatgtatagaataattgtgaaatgaaagttgaaaaatgtgatcagtcactttcatattgtgccttcgggaggaaatgaagaaaatacagtggttatatgcactggtggaagtgttatcgccttacagtcgtgccaggttaacttgtcttattgcttgttaactttgcgaggaatcaatggcttgtgataacaggtttgatataggagagcatggttaaaattgcagagatcccctggcaagtatgcagtgacatccctaagaccatcttcagaaagtgcttgtgttaagtgccagcagcctgcacagggcacgtctgcttcccagttggagccattttgtcagtcttggtaatatgttatgacagtgccatatatcggaagaatgtcctaaaatgaataatagacatggattggggcttctggggatttggcccagttttctgattttcacattaggttgtgggcatgggtaacttttcatttaaaaaatatatattttctcataatactgaatgagccatcagagagcgtaattctgtcccatattccgtggttgactgattggcttgctgtacctgaccatgtattttggtgacagttggctgcttggtgagattcatctggtggcatcatggcctgtttgacctcaagaagtgaaagatgattctcaggaggtagaacttttttcctgtggtttaaatgtgggtctctatccaaaggcagcaatgccaacctttatctgtatgtctcaacaaattaatgagtgtttgagaactgactcatttatttgacttttagttaggtagtgattagattattattagtggagctaagtttgaaggtaccttgagtagagctgcattgtccaatacagtagtagctatgtaaagttgaataaaattaaaagttcagtttcttagttactctagctacatttcaagtgctcagtatccactcatatgtggctagtggctgtcatattattagcacagatacagaacatttccaacattgcccaaagttctgttggacagcagtgaatttgtagagcttacctatccgtgaagaatgccctgtccccatgtaagtgagagtggagaaggcaaggccaggtaggcagtcagtaatgtgctcctaagagctttaatcccatgttccacagctaaaattgtttgggaagccaggtatacttatttactctctctaagctttgtggtgctgagataacctgcagtttaccgggtatttgccaaattaaacctgtgtttgtgtacgtgtatgtatgtgtctaagtaatatctaaagtaatatctaatttcttgggtgactgtgttgggctgttcttgcattgctataaagaaatacctgagactgggtaatttataaagaaaaggctttattggctcatggttctgtaggctgcacaagcatggcaccaacattacttggcttctggggaggactcagggagctttttttactcatgatggaaggcgaagtggtgaaagcagaaaaggagagagagattgagggggaggtgtcatacactttttaagggccagatattgtgagaactcactctctgttgcgaagacaacatcaggccatgaaggattcacccccatgacccagacacctcccaccaggccccacctccagcattgggaattacaattcaatgtgagattggagttgggacaaatatgcaaactgtatcagattaatgtttctttgaatactgtataggaaaggctgatttggggagattgggttaaatttaagttgatttgtactagcaaatttaatagagttgctgaaaaaggcttttagtgggattttttatcctgacttagcagacatggagcgacactttcacttgaatttgatctgcttggccatacctggagtaatgtgcactacaaggagactagccagaaggatggatgagtgggctagagcccatgacacagagaaattgttgagtgaccttaggatggttaacctagaagagataaaattgagaacatgcattatgcattgtcatatacttggagtgtcagtcaatggaggagaatttaaagacaaaactgggtccagtggggaagaattaatggcagggtagatttcaacttagtattagggctcattatcccaaaatggaaaaagcttgtccatgaggtagtgaattgcctttcacaggaggtgatcaaggagagactggttagggtgtgacagaggagattgattcattggatagagtagtggcctttgggctgtggttggtactgtagttccgccatcccaatctgctcagccccggcagtgtttagaaatttgcgtgcttttggtgatagggagagtcttttgttgattggttggttggttgattgttaatagtgcctggggtactctggcatctgggtctcatggtctctaaaggccttttccagttctgaatttctatgagtggcttcttaagtacatgtggctaatggcttctattagccaaaagggcatttggtccaagttcgggcctaagtatctttcaccctagaatattgcagccctctaactgtttacccttcaatctggtttacctctctgccatccaccttctttacttttcccagatccatcttactcaaatgcagaactgatagcacatagctgcttaaaattttttaataacatctcatttcctaccaggataaagtccaacttttttgcatgtcatgcaaagccctttgctgtttggcctcctcctgtcttgccagaattcatttcccactaatacttggttctttaaagcatttccatgctacactcatgtcttcatccattttcctttatttttctttgtgtgcacaccctttccactttaaagtgttcttgcttatgtgtcttatcatacccaagaaggccctatgaaattctactctgcttgtctgcagctgtgtcccctacctgctctccctcttccagccacacagacattcttgctcttcctataaggcccctacccagttctcttccctttgcctggaattc

SEQ ID NO: 401 - DNA, 3030 bp, Homo sapiens
ccccaattcccctcgaagatccaagtcattaaaacacaaaaatggggaacttagcaattcggatccttttaagtataacaattcaactgggatcagctatgagaccctggggccggaggagcttcgcagcctgctaaccacgcaatgtggggtgatttctgaacacaccaagaagatgtgcacaaggtccctgcgctgcccacagcacacagatgagcagaggcgaaccgtacggatttattttctcgggccctcggctgtccttccagaggtcgagagctccctggataatgacagctttgacatgactgacagccaggccctgatcagccggcttcagtgggacggctcctctgacctctcaccctctgattcaggctcctccaagacgagtgaaaatcagggatggggtctaggtaccaacagctctgagtcacggaaaaccaagaaaaagaaatcccatctgagcctggtagggactgcctccggcctaggttccaacaagaagaagaagccaaagccaccggcacccccgacgcccagcatctatgatgacatcaactgacttgggtgcaagggatagcctttggctgagcagagccctctctcctgacccccacccaggtggcatagcctggcaaatggacggctgctgggggttggggcttgggaagcttggtgggccaggcaggcagaggatccgattatgcgcccctggggggtgtcaaagtcctctgcaatggagcacgactcctcggcgtgcaggactcagacctggacatattatgccttggacataagtttggtggggaggcggttttcctatttattctgtgagttactggatgtccagctaggccaggggcctgacctgggcactgtgccaagcactgcctgccccccaccccaggaactggactaagccctgctgaggggcaatgtggcgacccgggaggctgtgggttggaagctgagcctggagggggcctgcctcggccgccctcagcaatgtgaatgggtccggtgcttggagctgaggggcaaggctgggcatgtcctgtctgtgtgcagaatcttatcaaatgcccccagtcccaggggtaggcaggcacagagtgctgtctgctgaggtgggcgtccagaactgccgccaccttccctgcccctcacaggggcagccctttcccctcagtccccatgggcctccttggcagcaggagctgtccttttgttgggtgccaggaaagggcctccagcctctacagcttcaaggaatgggaaagggagggtaggaagagggagaagtgtcagaattcctccccctgcctctcctccctgacccagggctggtgaggagtggggccccaaggtgagagggaacggtgctgctttatttgaaatgttttcttacctcattccctgccccaggaagggacccagcctcaccctcctggggtggccccgtgttcctcctgcccaccctgccccactgccctaccggggcagcccaggttcccaactgctgcttccacccccttcaccttgactggcttcagttcctctcagcgctcctgcctccaaagcgtgccctgtttcccttccttagcgcttttaagttatttattctgtacttgtggtttggggctctgaggaaaatcctaatcttgtgcctctccccctttgctaggagttgggtgggaagagagggtggcctctgtgccccaggttgtcagtggaggggaaggggtgtcactgcccctctgtgggactgtcatgccagtgtgcccacctgcctggtctacatcctaaagagatgtaccgtcccccctccatgcgggcaccaccactcccaggagccaagctggaggaccgcgacctgggctgggagcagagctgactgacatgggtggaggtgaccctgagccaagttctctggcacttgctggacatgtcccctaccctcttcccaagaggagccatcccacatttgggtagttagtacccaggactggttggactgatcgggttagggaccctagagggttaagggaacaacagagatggggctgcaatgcctgtctggaactccgctctcccgctggggtggttctgattgtggctcatgcctggttgcaaattggtttttaacccacaaattgtgattattttttaaaaagccaaacagattttggcaggagttagaataaatcccggggcctgggcttctctattcttggccctccgtagtctccctccgagaggaggccagagggagaggaggatctcagcaggcctctagccgcttccagatgcagtctggggagtgggctgaaggtgaagggaggaaggctgtgggccactctcccttctgagaggcagctgcagctcaggccctaatacactctttgccctgtggcctctcccttttccccccttctggttggaggagggagaagtgggaagtagcttgggaactggtttgtccacataaacttccccattgttccttggcccgccctcagggcagagcccactgcccaggctgggtaaagagatgggcttggtccagcagggaccctgagggaacaaacccttttccttctggggagagagtgccccccctaccatgtagttgaacaggggctaggagctccccactcccctccctctaacagcaggctgtgtgggtttcaattcccatccttcccaccccggctaggtgtcgtccaccctgtatcctgtgtctgagtgtgtgtgggggggttctgtactaatttccatggccggtggcttttccttccatgcatcactcccccccgcatgcccaggggccacccgcctggcattaccgcatgctggggtcattgggggaggggggtggggctcacgctgtcctgtggtcttgagatttttatttttgcatatgtaatccattctgtacaggtagctaactttgtaaacgctgtgtattccctctgcccccatggctgctggtgtaaataaactgcatctcccgttggcaaaaaaaaa

SEQ ID NO: 402 - DNA, 2787 bp, Homo sapiens
gtttgaagtgtgggtaaaggttggggttaagaaatcacagctttgctagctaaaagtggcataatcagttaataatgaaaaactcacagctttgctactttgagtttgaagtttgctagtttgaggccaccatccagaaatttaacaaggagatcctagaaatgagagacctatagagggctaacatggctccccaaccatctgtagcagacagctaaactttgcatgcccaggggatactcagtagagcccagcaaaaagtgaaagccagaagagacttgagatctgggtacaactttgaatgctaccttccatgcagactgttccatctgcagatgttggaagccttactggtgcaaggtggctgggcttaatctctgcccaaatccactggctgaccactaaactaagcagccactcactcattagggaaatgcaaattaaagccataacaacaaccaccagaatggctaaaattaaaaagactgacaatccaagtgttgacaaggatatgcggaaaccagaatcctctcaaattgctggtgggaatataaaacagtatggccatgatggaaaacagtttggcagtttcttaaaaagttcaatatacacttaatgtgtaactcagcaattctatttccaaggtatgctgtcaggaaaaatgacagcatgtgtccaggcaaagttggtatatgatgttcatagtgtcacccagcaagcaatcaatgggcctgcttcccaaggcacatggaggccaataccatggcgctggcttttgaggaaaaataagctttatcatgactggactggcaaggagccaggaagaagcacccaaatctgcctcctggagctggtagttgggtagagttttataagcatagggtaatagggtgtgatccaattggatcttgtgatgaagtgatgctggggggtgttttctgactggctcctgacatggggctatgccagagctcaatctggttggattctggatcctgttatgccatatccacttttttttttttttttttttttttttgagatagagtctcactcttgtcacccaggctggagtgcagtggtgcaatctcagctcactgcaacctccgcctcctgggttcaagtgattctcctgcctcagcctcccaagtagctgggattacaggcgcctaccaccatgcccagtatttgtatttttagtaaagatggggttttgccatgttggccaggctggtctcaaactcctgacctcaggtgatctgcccgcctcggcctcccagagttctgggattacaggcatgagccaccacacccggcttccacttcttagttcagtcccctctccttggttggaacatttaggttgcccctatagttgcatgcttggttcatctggacatgctcagcttacatgatgttcaacctgggggcccatggcaactgaaaaacaactcacaactttgttacagaagagatgaaccagattggtctgacgtggttaaaacagcagctttagctgtgattgaaaactggaactaatttatgtgtctgtcagcagatgaatggataagcaaattgtggtatatctatagaatggaataatactcagtaatgaaaaggaatggactattgatacatacagtgacatgtatgcattgcaaaataataacatgctgtgtgaaagaagccagacaccttttcctacaaaacagaatactgattccatttaggtgaaattctagaaaatgcaagctaatctgtagtgacagtagatcagtgcctgcagatcagaggatggcttgggagaggagggagaaagggattccaaaggaaagagcacaatgaaacgtttgggggtgatgtatatattcattatttgattatgtctaatgatttcatgggtgtatacatatgtcaaaactcattgtatatttaaatatgtgcaatttattgtatatcaagagtaactcagtaaagttataaaaactaaaactatgcccattcaaaaagcaaacagatgttcatagtaccattattcacagtagacaaaaactggaaacaatccaaatccatcaaccggtgaatagataaacaaaatttggtatgtccatatcagccatgaaaaggaataaaattctgattcatgccacgggtacatactacaatatggttgaacctcagaaacattatgccaagtgaaagggctctgtattgtatgataccatgatatgaaacttttagaacaggcaaaaccttagatcagatcagtactttgcctgggtgtagggtggcagcatggagattggttttaaacaggcacagcggaacagtttgggtgatggaaatgttcctggtgatagttgtgtataaattgtatgaaaacgtgtgcaattgtgtacttaaaatggataattttcatgacatgcaaattatacctcaagaaagccactaaacgtgggtggccactcaaaatttcaaattctctttaagatgaccattcaggtcaggcatggtggctcactcctgtaatcccagcactttgggaggccaaggcaggcagagcacgaggtcaggagatcgagaccatcttggctgacacggtgaaaccccatctctactaaaagtacaaaacgttagatgggcgtggtggcgggcacggtggtgggcgcctgtagaggcaggagagaatggcgtgaacccgggaggcagagcttgcagtgagccaagatcacgccactgcactgtagcctgggtgacagagcaagactccaaaaaaaaaaaaaaaaa

SEQ ID NO: 403 - DNA, 1072 bp, Homo sapiens
gcaagtaaaaaarawttattgctattccaggcttmaaatgagcmcaraamtcagggctggkgtgtgtttcaraagttgtwatgatgtaamagggtggtaraaaaawccaggcagtttgatgtcgaggccaccctctcttccttggacccctgctccaaaarcagctgctggtgaggctctttcccatctgcctcattcacccaamaggactccaaramtgaggcaggcagccttgtgatccccamagctcaaaggtgaraggctgcycawacctctcctagcactggaagagccttgtccttgggaccggamamtatggctttggccctgtggagararaaamggtgccamaggagttgtcttaaraggacaaggcatgcacggtctgarawcaraggttgtracgtggccacccatgarcmagttcgtttgggamamatcamactgcacarctttttaaaaaaawaattagctgcmaatcttttaaaatggtaaaawttcawatamaaatctggatttttggcttctctaggagtaaacattgaaactttttttttgagamagagtctcactctgtcaccaggctggagttttgccagtwtctggcagttgtyttcacagactggctatgcactctccaactgactccagtycttgccacccttaattwtwtttccaactggrgamcaggcctcagcagccttgtatcaatgggcacatgtgcygtgactttctgtgtwaraaatatttacattgtaatagcatctttaatcaaaaaggaaaaatcggctgggtgtwgtggctcatgcctgtwatccagcgctttgcaaggccaaggtggacaratcatgaggtcaagagatcgagaccatcctggccaacatggkgaaaccccatctctactaaaaawamamaaattagccgggcgtggkggcagggcctgttgtycaagctacttgggaggctgaggcaggagawtttctttaacccargavgcggrggttccgttaggtgrrawtscccmctkccctcmascctggkgaaaaatkaaatttgtttaaaaaaaaaaaaa

SEQ ID NO: 404 - DNA, 977 bp, Homo sapiens
gcggccgccacctcaggctgtggctctttgggcttcttcctaatgcagaagaagttgcccagcagcaaaatcagggaggaggtgagcacctcggcccccgccaggatgaacacgtacatgtagacgtgggtcgcatccaggagtttgcctcccgaaggggcccgacgagcacggccaccgcctccatcagcagcaccaggccaatggcactggagaacttgtgggtgcccacgatggccatgagcacctcgaactgcagggcccccaccatgccgtagagatgccaaaraagatgcagaagaccacgaggccgccgtagtcgcccgccgtagagcccgccaggtccgcgaggccgttgaagaacatggagaagctgaagaggtagacggagtagggccgcaccttcccaagcmccgccacgaagcccgcggccggccgcgcgaagatgtaaatgaagcccaggatggtgagcaggaaggcggccttggtgtcgggcacgcccaggtccttggcgtactcaccacgaacacgggcgggacgaagagccccagcaccatgaccgaggcggccacggcgtaaagcacaaagccgcggtcccggaagacgctcaggtctagcaggcgccgggagggtcgcggcggccccgagcccggctgggccgtgaccaccagggggcctcatgagtgcggcacacacgcagcagtkgagcagcaggccgcccaggatgaggaagccgccccgccagccgtaggcggtcctygcagcagcygccccagcgggctcagggcacacaggaagacagggctacctgctgccgccagchcgttggccatggggcgccgcttgctgaagtagcggttcagcatgawgagcgagggctggaagttgagtgcaaaccaaacccgtgatgacccagtggtgaggagactggatgagctcsgsaaargagsaccacaagccmasgagcaaaaracccc

SEQ ID NO: 405 - DNA, 700 bp, Homo sapiens
tawggctaaawccatttattccgaaawaaaaagcaaaawaaacaggagtcgcatcaccagggcgccacgaccccatccccgcctccttcctctgtcctawgctawmaawaaawaagtttcccagccccaaataattattagaacctcctccccatgtgccagctccaacctctgctaggtatgawamagggggsggccctacccctggaatatacaaaawgttamacagawamaawatgtacactggggaagcagggccaccccagcagcccgtgccctcgcctggtctamagttagccccactgtcctgcctcagctgcctctctgtgtaagaagawgggagcccccctgagggaaaaattgctttggtgagagtaaggaggscatgaggcgctcttccaaagaggccaattatatgagcctctggctattaaataamaatcatcatcatccagaaatttaaggagttagccctggccaaggtggctaagggtctacacatttgtctccccccattagacaggggtcttatttgctactgtaagagtaaagggatgactgggaaggggtggcaggcacatgatgggggcggactcccggccccacttctccaggctttgctgacagtggcctgctttttaaaatttttatcctgactttctttaatcccataacttttttcataatttttttttttttt

SEQ ID NO: 406 - DNA, 926 bp, Homo sapiens
  misc_feature (167)..(167): n is a, c, g, or t
  misc_feature (338)..(338): n is a, c, g, or t
ccaaaaatctgctatggacagactactggttcttgaatggaatcagtagtgctgtttgctccctcagatgtctgcttcccatagatcctaccagaaatgaagttagaatcttcctcttttctctctagatgctgcaatcgcttggaatcttgttcaaagattgagcngtgtaaaaaacgagaagcaaacaattcctgcctctcttgctcttcttctttatggtcctctttcttatcatccattttcccttctgaatyagtyctaattttcttctttttcatgtaccaggatggaataggtcttggagcagagtcaaccttttctttatctttgttgtntcgaaaatttgcaaatcgggagttccaatcaagaaaagaccaattttcttcacgagatgaagagagggatttagctctttcaagcaaagctttagtgtctggtgtgattgtcttatccaatgcraaagagtaaaatttgttcctttctaaagaactagagagtctttcatctcgctcacgtagcttgtcttctctgtgcctcaataaaaaagacaatcgagaactttcatataatgcagaggctctgggtgagttggatttgtgttcaccatcttcgtcagaatcagaaggcacctcaccaggttccagatctcgtacagacctttttcgaaggctatctctcttaattatgctgtgtgggaaactcacatcaaatctgccagcatcctgtttcatctgagagtcccaacgatttagttcatcttcagaattcaagacagaaagttttattttggccatatctgccaactgttctctcctgcbagaatcataaggattaaattttaaakactcttccctkamtkttatkttakaawaggggrggrctttttcatctactttaggrgaccytttwmtkamagtwkccta

SEQ ID NO: 407 - DNA, 529 bp, Homo sapiens
ttatatttgggaatcatattgacaggtcatgaaaatgagaccaaaagatctctggaagcgattaatgataaaatttcatggagaagaaggccttgactacggaggggttgccagggtgatgacaactccgtgagggtggagattatacatctctcatcatttcagcaacaaggaaataaattagtggcagagtaagggtgacttgagatctcttggaagcgaggatcctttaaaaatcctggaatatacactgcagtaaaagaacaaagcatacctcagccttaaacgactgaagaagaatgtcaagtggggaagtggctttggttttcagtttgtgggttctgaatccacacaaagacaggattgctttctgaaaactgaattaattattgtccttacctcaataagacaaaaaattagaatcaaaatcgttagtattacagtcacagatatcaccaagattagtttgttgttatagccatatcctggaacttctttcgtgagckaaaaaaaaaaaaaaaaaaaargg

SEQ ID NO: 408 - DNA, 974 bp, Homo sapiens
gatgcggggggaggggggtgcggcgagcggscccgctctctccccaccgctccgctcgcaccccagtgtaatgrgggtgrgsscgctccccgggggstggcccgggagggggcgcggggcacggttgatgcyggcccaggatggatcagacctgtgaactacccagaagaaattgtctgctgcccttttccawtccagtgaatttagatgcccctgaagacaaggacagccctttcggtaatggtcaatccaatttttcttwgcsacttaatgggtgtactatgcagttatcgactgtcagtggaacatcccaaaatgcttatggacaagattctycatcttgttacattccactgcggagactacaggatttggcctccatgatcaatgtagagtatttaartgggtctgctgatggatcagaatcctttcaagaccctgaaaaaagtgattcaagagctcagacgccaattgtttgcacttccttgagtcctggtggtcctacagcacttgctatgaaacaggaaccctcttgtaataactcccctgaactccaggtaaaagtaacaaagactatcaagaatggctttctgcactttgagaattttacttgtgtggacgatgcagatgtagattctgaaatggacccagaacagccagtcacagaggatgagagtatagaggagatctttgaggaaactcagaccaatgccacctgcaattatgagactaaatcagagaatggtgtaaaagtggccatgggaagtgaacaagacagcacaccagagagtagacacggtgcagtcaaatcgccattcttgccattagctcctcagactgaaacacagaaaaataagcgaagaaatgaagtggacggcrcaatgaaaaagcagcccttctcccagccccyttttcactaggagacacyaaccattacaataggagrgcaattaaactcaataaatttwwctttt

SEQ ID NO: 409 - DNA, 938 bp, Homo sapiens
  misc_feature (817)..(817): n is a, c, g, or t
tggattgtctgggatgacttgggctcatatccacaatacttggtataaggtagtagattgttgggggtggggagggagggatctaggatacagggcagggataaatacagtgcatgtctgcttcaattagcagatgccgcaactccacacagtgtgtaaaatatatacaaccaaaaatcagcttttgcaggtctttatttcttctgtaaaacagtaggtaacttttcctaggtttcactctttttagtgtactagatccagaaacttagtgtaatgccctgctttatatttctttgacttaacattggtttcagaaagaatcttagctacctagaatttacagtctctgtttcatggcaacactggataatggctttgtgaaatttaaaaaatttttgtagcgactgtaaacagaaatgccaaattgatggttaattgttgcygcttcaaaaataagtataaaattaatatgtaaggaagcccattctttcatgttaaatacttggggtgggaggggagaaagggaaccttttcttaaaatgaaaataattactgcyattttaaaatttcttgatcattgaatgtgagacccttccaacatgatttgagaagctgtacaagtataggcagagttattttcctgtttacattttttttttgttttkggggaaaaaattggtaggtgtctaattactgtttacttcattgttatattgcagtaaaagttttaaaamaamcattgcatgtttgcttttgatgtatmmmtttgtgaaatarmamtttggggscawtggwgaatksmachwttamtcyyccnttyttttccccttcccmacaaaaagtgtttaaacaatggtaadaaamkgcgcctttaaaaaccmcaaatgskattattcaaattatgcaakkttcaaaygggtkckawattgtaaagtgtt

SEQ ID NO: 410 - DNA, 979 bp, Homo sapiens
taattatgaagcgattgcttgagaaaataacatataaacatagaatagaatagactgaccaagatggttcacagtttctttttttaactaggttatttataatgtatttctgaaccacttggcagacaaattcacaacacttaatgttcatattttgagtaaaggaagctaaaaccatgtttgctttctggtactacatgcattagcgaaaggttaagtaagttttgttctccactgaagtaatacttaacatctcagaaaamattttgcatgttctgtagttttgtattaaatcagtcatttcatatgcactatatcaagtacaaacaggtagtttacctgtttatagtagtgtactaacaaagtctcccttgcagcttcagactgttatctataggcttatcgttcaaatacagcacttgaatatcccaagtagttcttctacgcatagctcacctttctaaacccagttaagcatggaagagaggtagtaggtaggtgcagtgtgtggaagctgcaaacaagtaggccttttattcattgatatcttttcccaagtactggattttaaatctgtatgtatctgtttgattttttttttctaatatttcagttgagctgctgttttcttccatgcaatattgtatactcaattgtgtatagaagaagctggtgagagtgccctcctacataaataagcaattgcagtgttttgcatgcaaaatataaaaaatttaaattgtcctgattctattttgtaaatggagaaacaatcatatctttctaagcggtaatggaggaagactagtgctttgtgcattttgatatatttgagttcattttttccacaatgtcatacttttgacgcattggggtttctcataagtatcctagttcatgtacatccgaatgctaaataatactgtgttttaagttttgtgttgcaagaacaaatggrataaacttgaattgtgctaca

SEQ ID NO: 411 - DNA, 1032 bp, Homo sapiens
  misc_feature (569)..(569): n is a, c, g, or t
aacaggaagaggacgaaaaaaataaccgtccgcgacgccgagacaaaccggacccgcaaccaccatgaacagcaaaggtcaatatccaacacagccaacctaccctgtgcagcctcctgggaatccagtataccctcagaccttgcatcttcctcaggctccaccctataccgatgctccacctgcctactcagagctctatcgtccgagctttgtgcacccaggggctgccacagtccccaccatgtcagccgcatttcctggagcctctctgtatcttcccatggcccagtctgtggctgttgggcctttaggttccacaatccccatggcttattatccagtcggtcccatctatccacctggctccacagtgctggtggaaggagggtatgatgcaggtgccagatttggagctggggctactgctggcaacattcctcctccacctcctggatgccctcccaatgctgctcagcttgcagtcatgcagggagccaacgtcctcgtaactcagcggaaggggaacttcttcatgggtggttcagatggtggctacaccatctggntgaggaaccaaggccacctttgtgccgggaaagacatcacataccttcagcacttctcacaatgtaactgctttagtcatattaacctgaagttgcagtttagacacatgttgttggggtgtctttctggtgcccaaactttcaggcacttttcaaatttaataaggaaccatgtaatggtagcagtacctccctaaagcattttgaggtaggggaggtatccattcataaaatgaatgtgggtgaagcgccctaaggattttcctttaatttctctggagtaatactgtaccatactggtctttgcttttagtaataaacatcaaattaggtttggagggactttgatctcctaagawtaaagttgcaaattattctgattggcttwaacccytwaagcttgataaaaatacttgtawaawggacgcatagtgytgcyttccttccaycctgccaccatcca

SEQ ID NO: 412 - DNA, 1112 bp, Homo sapiens
tttvttgattaagaacccatccacagtgctacatggaaactgcgtgtgatctgtgatgtgattgtccaatcagggctctccctggaaatcgcctaggaaaggaaatctaaggaaacacatcctggtgttgaactcggttcttcccaggtcacttgatccctgtagtgggaggggaatgaggtgtccgggctgggggtcggggagcagtcatcaagtgcagatgaccctggttgttctccagggcactggggcgtgtcaaaactggccgccccggccattccttcccacccgccaggaaatcctcttgctacctttgtcctgacaaaggttaggacagtgaccagggcctgtccatggtccccacccagaggccccaggcatgcactccccacagtgcctgaggctgcagtgtagactcctgacctccagtgggaggcaactcggacaagggtgggaggccccttctccgctcccaccaagaaagcccaagagtccagccccacaatggcaggaagccattcatttttttctaaaaacagtggacacaagtggggtggcctcaacttttgctgctgtgccaatcaaacctcagggaaagaaaataattgtgaggaatttaattcacttgatttggcttcattttcttgatctgttaaaataatcctcccatagcccccctgccagccccatctctgcacgaacctaccccgacctttctgttggaactgaaacctgttggtgtaaatgagaagccatggctgccctgggtttggagctcagaggcatctagaaggcaggacaagaaatctgttggccaaagggcaagacctgccacctctgtggaamtgcagggcctgccttgagaacaggttccccagctcccagaatggctgtggggacaggacaacggggagggaagggagctggcmargccccggagaaggggcaracctgtgcagcggggamaragctgamaactgtcggagagatgrgcgcggrasccactccmtggcmgggstggcgcramgcrctaraagtgcgygtyacycaggasygctbadaaaagggtgggggggggggggggggktgttgcrmggtggcataraaggaaa

SEQ ID NO: 413 - DNA, 892 bp, Homo sapiens
  misc_feature (389)..(389): n is a, c, g, or t
ataaytttatttactatttattgcacataactcagggtctttaattgctaaccaccgaagttcaaaggactatttttccatgaagtttaacattaacattagtgaattcatttactcatgtggtgttttttattgtaaacatctgaatgattcacattgccgtagatcctgaactcataagcgtggaccatgcacaggctggcagcaagccagawagccactctgcaagcaaacagatactctgcataaagaggaaattcatagcacaacattgaatgtscaacctaagtyatctcagaattatacatatattgactttttaattcacatagaatctggvactcaactggttggktggttggkgatggggttsccctgctttkgggggngttattcctgaaataattaaggaaatgggggttcaatctttcttcttagctgcttgttcctccccagcaccttcaactttcttctcctcctcttcagcttctttggtttcctctccttcttcaccttcacctccttcttcttcttcttttgcttcttcagactcttccttggcagcttcttcctcttcagctgcctcctcttcctcggcctcttccttgtccttctcctcctcctcggcttctccttcagaggggggctcatccttggcttcctcagcsttggcagcctcaatggtttcctccacttcgatctgctcctcttggacatggctggtgtagtaggacgggaaggagcgggtggacatcagataggagctggtctgtaaaccgccgtagagaatcggccaaagacctgggagctctgggagtagccactggttatgcttcccacgctggtgaaamtsagtcgggtctcctcgccttccaagagtttcctgtaasct

SEQ ID NO: 414 - DNA, 952 bp, Homo sapiens
cgcttactgcattactaaggaatctaggaaagatgactgctaattcagtacttgaaccaggaaattcagaagtatctttagtatgtgaaaaactgtgtaatgaaaaactattaaaaaaggctcgtatacatccatttcatattttgatcgcattagaaacttacaagacaggtcatggtctcagagggaaactgaagtggcgccctgatgaagaaattttgaaagcattggatgctgctttttataaaacatttaagacagttgaaccaactggaaaacgtttcttactagctgttgatgtcagtgcttctatgaaccaaagagttttgggtagtatactcaacgctagtacagttgctgcagcaatgtgcatggttgtcacacgaacagaaaaagattcttatgtagttgctttttccgatgaaatggtaccatgtccagtgactacagatatgaccttacaacaggttttaatggctatgagtcagatcccagcaggtggaactgattgctctcttccaatgatctgggctcagaagacaaacacacctgctgatgtcttcattgtattcactgataatgagacctttgctggaggtgtccatcctgctattgctctgagggagtatcgaaagaaaatggatattccagctaaattgattgtttgtggaatgacatcaaatggtttcaccattgcagacccagatgatagaggcatgttggatatgtgcggctttgatactggagctctggatgtaattcgaaatttcacattagatatgatttaaccataagcagcagcacgatccagagatccattgccatcagtgatctcactaaaaatatacagctacttcccagctaatctccacccaatgaatgatgatggtatagtatgtgcataatggaaagttaccttactgaaaaaaaaaaaaaaaaaaaaaaagggggg

SEQ ID NO: 415 - DNA, 1063 bp, Homo sapiens
ggctggtaccggtccggaattcccgggatccggcgaggaataggaatcatggcggctgcgctgttcgtgctgctgggattcgcgctgctgggcacccacggagcctccggggctgccggcacagtcttcactaccgtagaagaccttggctccaagatactcctcacctgctccttgaatgacagcgccacagaggtcacagggcaccgctggctgaaggggggcgtggtgctgaaggaggacgcgctgcccggccagaaaacggagttcaaggtggactccgacgaccagtggggagagtactcctgcgtcttcctccccgagcccatgggcacggccaacatccagctccacgggcctcccagagtgaaggccgtgaagtcgtcagaacacatcaacgagggggagacggccatgctggtctgcaagtcagagtccgtgccacctgtcactgactgggcctggtacaagatcactgactctgaggacaaggccctcatgaacggctccgagagcaggttcttcgtgagttcctcgcagggccggtcagagctacacattgagaacctgaacatggaggccgaccccggccagtaccggtgcaacggcaccagctccatagggctccgaccaggccatcatcacgctccgsttctgcascaccttggccgccctctggcccttcctgggcatcgtggctgaggtgctggtgctkgtcaccatcatcttcatctacgagaagcgccggaagcccgaggacgtcctggatgatgacgacgccggctctgcacccctgaagagcagcgggcagcaccagaatgacaaaggcaagaacgtccgccagaggaactcttcctgaggcaggtggcccgaggacgctccctgctccgcgtctgcgccgccgccggagtccactcccagtgcttgcaagattccaagttctcacctcttaaagaaacccaccccgtrgattccatcatacacttcttcttttttaaaaagttgggtttctcattcaggatttgttcttaggatttttcttytgagtktttasaracccggg

SEQ ID NO: 416 - DNA, 947 bp, Homo sapiens
cgcggggctgtgccacgccggcccgcagcccgggtatcccgcgcggcccagcgccaggaacaagaactggtgcgcctacatcgtgaacaagaatgtgagctgctccgtgctggagggaagtgagagttttattcaggctcagtacaactgtgcctggaaccagatgccctgtccgtcggcgctggtgtatcgagtgaacttcagacctagatatgtcactaggtataagacagtgacacagttggaatggaggtgctgtcctggctttagagggggagattgccaagaaggtcccaaagaccccgtgaagaccctccgccccacgccggctcggcctcgaaacagcttgaagaaagccacagataatgaacccagccaattctcagagcccaggaagactttgtccccaactggtacagcacaaccaagctggggtgtagatccaaaagaggggcctcaggaacttcaggaaaagaagatacaggtgctagaggagaaggttcttcgactcacaaggacggttcttgacctccagtcttcccttgctggagtgagtgaaaatctcaaacatgccactcaggatgatgccagtagaacacgggcaccagggctcagcagccagcaccccaagcctgacaccactgttagtggagacacagaaacgggccagagtcctggtgtcttcaacactaaggaatctggcatgaaggacatcaagtctgaattggctgaagtcaaagatactctaaagaacaaaagtgacaagctggaagagctggatggaaaagtgaagggctacgaagggcagctcagacagctccaggaagcagctcagggcccgacggtgaccatgacaaccaacgaactctaccaagcctatatggacartaaaatcgacgcctgaaaarcgragtcctggagggvmtgrcmgcgcgmaggstgacctg

SEQ ID NO: 417 - DNA, 873 bp, Homo sapiens
  misc_feature (34)..(34): n is a, c, g, or t
  misc_feature (547)..(547): n is a, c, g, or t
  misc_feature (624)..(624): n is a, c, g, or t
  misc_feature (663)..(663): n is a, c, g, or t
  misc_feature (672)..(674): n is a, c, g, or t
  misc_feature (678)..(678): n is a, c, g, or t
  misc_feature (680)..(680): n is a, c, g, or t
  misc_feature (683)..(683): n is a, c, g, or t
  misc_feature (687)..(687): n is a, c, g, or t
  misc_feature (707)..(707): n is a, c, g, or t
acagtatcatgtaactcgtgaaaactttacttanactggcagtttgccatatcagttgcatttgtctttggtacgaaaaaataaaacaatcgcaataatgtgcaagtatttgtcttcttccggtcaagtaccgaaatatgagttttctagagccatcttttttttgttgttttttgttttgttttttatacaatacacagactctgtggcatatatctacatttcaacatagtcctatatacattcaaaaaatctgaaaaagagttggaacaaaaaaacatttaaaccccataatttttccatctatatatcttgttttttctcattagggttttcatcatacaaaatattaccagttttagagtttccccaaaatacaaggcacaaagaatatgctttttttttcttacttgcacagacatttgtgtgtgtgtatatatatatatatatatatatatatttatatatatcadcttgagctctgacaatgaacatctaatasggcccacaggcacaagtgckgggkgtgccatatacaagggagaanaatgggtggggaaaaatagaacaaaaagcaataattctaaaaacaatttaaaccgactgggtaaaaaaatgcttccncaatttkcscgtgggggtcagagctaaatcggccacaanactgggcannncacnanttncacncccccaaaaggggttgcgtnaatakatttttgtawtctgtayttwacattttacvtwtacacawgattttcaatacvgttkcyagtttyagatttaaacttkgtttatgctctgaaaattcaataawcaaktttttttgakttttttmaaaaawtgytacatagtacmtawtacaatttaacccaa

SEQ ID NO: 418 - DNA, 1095 bp, Homo sapiens
tgtsttaaatmtcaaatgttttacacaccactttttcttcagaaagttcctatttaaaaaaagaaaaataaaataaagtgttttgattatttagggctgacttacatttcagtatgtgacaaaaattcaaacccaaatgcatctagctcactcagtttcagacaggtcctatgttcagcccctaaacgaatggcacaatgccaccaattttgggattcctgagtttggttcccttaagttctcagagttttcccaactctcaaaaccaaagcatcatgggagtgacagggccactggcaagactttttgccagtcagcctagttcttcttttaagatgcagtagtctcaaagcttaaagtcagaaaatcttgcaatacaagagtaactgcaagaacatataaagaaggaaaagaaaggacggggtttctagttgctaagatttgccaaacatggctacaaaactggtaaacaaacctttcttgagtgcaaagtccattagcccaacttgccatgaagagatttgaaataaaaatgaacaaatcaatttctgttgtagatacaaagcgaaaaaataaaattcaatcaatatattgaatttctctgagtttatcactagaactatttcaaaaggatgatcggggatagaatagaaatctagtcattcaaatgggaaggtcttggatgggtgccataaactcagctgtgaagattcaggaaaggaaaaataagtctggtcagcatcaggtaatctcagacagaaggratcaggraacgaatcagcctgcctcgggaaggaaatacaggkctaccatttttaggccaaagacacattcattcagggktgkgtgtaaamcaactcttgtawacaaaataacttcccatcagacatgcatgttcccaggaaaaaaatactgcrgcatgcccccctccccayattagckaataaaaccttcttgcagtacataaggaamctwgttctgtatraatatcataatttkgtwttcatgcccsacgrcccamacttccatrgtgggktaamatttkagggaaagaacatcyctaacccatgcctggaccakttctggcggwtcttc

SEQ ID NO: 419 - DNA, 1019 bp, Homo sapiens
ttttatttagtttcttattttaaaaaaggtagcatttcaacatataaatttagactcaagattacagtgtatatttgccaaaaggaacaccccgaaagacggccagcctcagagctgagagggcacagggaggcacactcctcacacatggagtttaagcagaagtgctttaagacttcacagcggcatttccctgttcctcagccccgcctccagggccatcactttggggcaacagcttttgctcatgtaactataaaacatctctaggaatgaaagcacagaggtcaatgatccagattttccacaacaatcatctgcagcaacaattcgacaggtaaagattttatttttataattcaaaagttcttttaaggagaactaaagaacacaaaattcatttataaagagaatttatagaattaaatgagcaaaaatgaaaaattattttctccatattacaaatgcctctataggataaggcccaggggaaagacccattcaaatctgggctttcctttcccaaataaagtgtttggcacaaccaacaaactgtcatgagactgacaggcctgacagctgaaagatttctagaagtggtcccatgacttttttgttgagcttcaacatagcgtacacaagagttgtcttaacaagctgcacaaactcaggccgaactacgcagcacactgctccagaaaagttaaactgaaggaaaaaaagggtccacatgaagtaggtctcctaatgccacaggttaactctgttgtttctcatggaaaattaaattcactggctgcccaggacgtcagtggaatcctgatctcctgggggaggtgacagctggagaaacaacttggatttaagcatctctgggccaggtgggaaggagacaatgatgaccaaggatgctttctaggtgactttttkttccacactatgtgggctccagataaacaatcttaaggagcatcagtgtgcttktkaccatggcagccctaggacttkgggcyttagaa

SEQ ID NO: 420 - DNA, 961 bp, Homo sapiens
actgacacaaatkgagagggaggcttcccctcccctgaaacatgccatcctctctgccctcagggctcagcacagggataagaaccccactccgcatgtccccagagggcagcactccaggggggtgggggggaggggaggggtgctctacgccaggctggggagctgggacaggagggaagacgtgcaccctcacctcttggctcaatccctctccccgggacctggtgctgcccccagtccctggggtgggctggcagacagggctcatgcaacaatgagtagacaggaggtggcacggaaacgtggccttggtgccccttggcgggggcgggaggactaaaggggccatgctgtggccacagcgggtccaaatggaagtatctgcagtgtacatacaggagggttggagagaggcatccttttccctaggctgtgcctggggacaagagagaggggaagtacagctggcactgccgtgccaggggcagggtccaggccagccgtgccacctgagcgggcacagcgagctggagctcggctactccttggcgcggccaatgatggtgaggatgtacaggaagatgttgatgatgtctgtgtacaggttcagcgcasaacacacatactcttctgggctcagggacagctgcttgttccccagcagcagctgggtgtccactgcgaggaagcaggtgaagagcagagcgcccagtgaggcgtacacgatctccaggatgcggttccggatgaagatgcagagaatggcgaagatgaagagcaccaccatgctcaccaggagcacgcccatgcatgaggtgaagtcgtagcgggtctgcatggagaagatgacgacggtgaagcagacggctgtggtgatgcccacggccatgatgactgcctcggtgttgtagaagctggcgatcatccccaccatgtacgacaggctggcggtcaggac

SEQ ID NO: 421 - DNA, 756 bp, Homo sapiens
  misc_feature (525)..(525): n is a, c, g, or t
  misc_feature (608)..(608): n is a, c, g, or t
  misc_feature (690)..(690): n is a, c, g, or t
  misc_feature (698)..(698): n is a, c, g, or t
  misc_feature (738)..(739): n is a, c, g, or t
  misc_feature (750)..(750): n is a, c, g, or t
ttgcagatgagcttatggggggcaatcttaaaaagtccacagcagatgcatccggctcgaggggccatcagctttgaataaatgcttgttccagagcccatgaatgccagcaggcacccctcctttcctggggtaaaggttttcagatgctgcatcttctaaattgagcctccggtcatactagttttgtgcttggaaccttgcttcaagaagatccctaagctgtagaacattttaacgttgatgccacaacgcagattgatgccttgtagatggagcttgcagatggagccccgtgacctctcacctacccacctgtttgcctgccttcttgtgcgtttctcggagaagttcttagcctgatgaaataacttggggcgttgaagagctgtttaattttaaatgccttagactggggatatattagaggaagcagattgtcaaattaagggtgtcattgtgttgtgctaaacgctgggagggtacaagttggtcattcctaaatctgtgtgtgagaaatggcangtcctagtttgggcattgtgattgcattgcagattactaggagaagggaatggtgggtacaccggtagtgctccttttgttcntgcttcgtttttttaaacttgaactttacttcgttagatttcataaatactttcttggcattccagtaagaaggaccctgangtgggaanttgtggggggggaggggggaagaaaggggacagctttggnnaccgggccccnttgggc

SEQ ID NO: 422 - DNA, 584 bp, Homo sapiens
  misc_feature (502)..(502): n is a, c, g, or t
  misc_feature (531)..(531): n is a, c, g, or t
  misc_feature (542)..(542): n is a, c, g, or t
  misc_feature (563)..(563): n is a, c, g, or t
  misc_feature (576)..(576): n is a, c, g, or t
gctagttattaagaacaaagggcatgtgtcgtaacaggggatctaattactgtaagccagaatgattgctgaaatgtcaaaatgtaagattgaatgaggctatttaaacattttagtatattttgtcttactgaaattgataaaaaaaaaaaactggcaatgtaactaaatgcgtaactaattacttgaaataaaaagattacttgaaattcaaattaagaaaaatccatttaaatatatttgtgggtgataatctccatctgcatccatttatataaaacttaaaatgccaaaaaataaagaccaatattaatctctttatttctgaatgagatgaaatcactgacatgtttgatgcttccactattagaatataccctttaaacacgaaaagaacaactgcaggagctttaacatccattatcatgggtgaacatctttggttacttctaaggacatcacacctaattgggaggttaaaaaccggaaaataaaagcttgnaccaaaatgcttggttttaaaaaggcaanttaattctgcnttctgaaattaagccctttanatccccaaggttnccttctgg

SEQ ID NO: 423 - DNA, 558 bp, Homo sapiens
  misc_feature (532)..(532): n is a, c, g, or t
  misc_feature (557)..(557): n is a, c, g, or t
aagacagagtctcactctgttgcccaggctggagagcagtggtgcgatctcagctcactgcaagcttcgcctcctgggttcacaccattctcctgcctcagcctcccaaggagctgggactacaggggcccgccaccacgcccagctaattttttgtattttttttttctttttagtagagacggggtttcaccatgttagccaggatggtctcgatcttctgacctcgtgatccgtccgcctcagccttccaaagttctgggattacagacgtgagccaccgcgcccggccaaaagatccataaactttgagtcaccagatagagctaacatttaccacagaggcatgtaaagaaaacgattctagcagagtaactataatacaaaagaacaatattccaattatgttcctatgttctatccaggaaggtttaagaggagccttttaaactggaactatattctaagaaggtgggaaaaaagttttcttttggttttcttattaaccgtaccttgaaagccccaaataaangttccttggttaaaagccctgggana

SEQ ID NO: 424 - DNA, 565 bp, Homo sapiens
  misc_feature (159)..(159): n is a, c, g, or t
  misc_feature (187)..(187): n is a, c, g, or t
  misc_feature (485)..(485): n is a, c, g, or t
  misc_feature (539)..(539): n is a, c, g, or t
  misc_feature (549)..(549): n is a, c, g, or t
  misc_feature (560)..(560): n is a, c, g, or t
cctgtttggtgccctagaggtttttacatcttggatcaatgcataatgggaaatacataacagcaaaaggtaacaagtaagagactttggaaaagacaatgcaaaaaacataaacaagatctccgaagactagaaacagattcccttaaagctctctgngcctttatatatcctgaaaaatcttagngtatagcttgggataggtataccccagttttggaaactactgtagaataaatggttttctaaaatttataatggatttaactcatgttaattttaaatgtctatatagttcacttactagtatttctccccataagaaaaacaccaaccacaccaatataaaatgtgagaaagaatctgatatgctgctttaaaaaaatcttcataaatattccataattttccattttggtaaattataatcttttcaacagacttattacccagtaaccaaactttttactaggatccccaaaagngcccccaattttcctaaggattaatcatttcccattggtatgacctgaaggttngggtcccttnaaaggcttttntggaa

SEQ ID NO: 425 - DNA, 556 bp, Homo sapiens
  misc_feature (460)..(460): n is a, c, g, or t
  misc_feature (479)..(479): n is a, c, g, or t
  misc_feature (522)..(522): n is a, c, g, or t
  misc_feature (524)..(524): n is a, c, g, or t
  misc_feature (532)..(532): n is a, c, g, or t
  misc_feature (555)..(555): n is a, c, g, or t
gtctttttaagctggtctgaacaaacatgcatatatggctacagattttccaagagttggattaacccccattttcaacccaaatattatgggatatggtcattatttggttcactcaaaatttatattttaacaatgcatcaatgtgacagctactttctattaagagtcattttgttagacatctggagtgaccaactgtcctgatttgccccggattctcccagttttagcaccgatagtcttatgtcccaggaaagccctgtcttggcaaataagggcagtttgttgccctgctgctagctctaggtttggacttcaggtctgtattgctgaagtgtctaaaagtggattttaagaggacttgctacaacaaaaaaaagctgaaaatttttaaatcttcaccataaatttccagccatattctactcaaaagatgatttttaaaaaataacccagngatctatttcatacacccngcaagaaaatgggttcttactttgtgggggaaacctaaaggtntnggggaaantttccctacccctaaaattgggnt

SEQ ID NO: 426 - DNA, 556 bp, Homo sapiens
  misc_feature (456)..(456): n is a, c, g, or t
  misc_feature (493)..(493): n is a, c, g, or t
  misc_feature (507)..(507): n is a, c, g, or t
  misc_feature (510)..(510): n is a, c, g, or t
  misc_feature (522)..(522): n is a, c, g, or t
caacaaacaaagttttctcgcttctgccacaatagtaaaaccatctgatcttgacaagataatggtgtcgttgactttgcttttttcttgtccgttggacaaaattggccaagaatataattggactgttatggccaataaaaacgaagtttaggtcaagtcttgtcaggatagcctgactaaaaacatctggctccttaatttaaaatagttcagacaaccagattcttgctgtgttttatgttaggttaacacgctgaactttaagaagctgtagactgcagtttgttgttatgagacctgctagctttgaagcctttcaatttctgtacaaagaatgattcgagaacttctgcacactggtaaaatggggagtcgcttggattgtagtaacgacagttatcaaaaattttggtcatatctgccacaaattccgtcagcttttcataatatcgnctttggactctttcttccatggtggcaaggtccatanggtccttaataccnccntaataatctggngcatcattaggggctactgggtcaaggaaaggcc

SEQ ID NO: 427 - DNA, 565 bp, Homo sapiens
  misc_feature (516)..(516): n is a, c, g, or t
  misc_feature (563)..(563): n is a, c, g, or t
gcttagcttgtttccccctgtgtagaattgtaacagatccatgtgttccaattattttcttttttaggattatatttcacacatttgggggccctttttgtacaaatattggcatgtaataaggaaaaattgcccatgatgctgagataataccagtgtttttagtggtagaaaatattatttttttataaaccatatctaaatatcttgagataaaaattcccctttgactttttttcctctcccttgtttggcaaattccattttaaaattataaattgctaaaaaatgtcctttccatactatttctctcttccttgtactcatcctaagaagtcttaaatctggaacatttgcttttatcttatctatctgtttcctggctactagaaagaaatttttttagcactcatatcaccctaccatgaaggtctaaatgtaagatgactgtaggacttgaaacaaaaaaaaattaaaaaggatccacactcattcttgggattttgaagccaaagncttttcctaattcttaaaggatattggggatgggttaacttaaaagngg

SEQ ID NO: 428 - DNA, 536 bp, Homo sapiens
  misc_feature (474)..(474): n is a, c, g, or t
  misc_feature (481)..(481): n is a, c, g, or t
  misc_feature (506)..(506): n is a, c, g, or t
  misc_feature (535)..(535): n is a, c, g, or t
aaagacagtgtctccctgtgttgcccaggctggtctcgaactcctgggctcaagagatcctcctgtctcagcctcccaaagtgctaggattataggtgtgagccaccatgcctggccataatttctcaaagtacaatataccataaggtaaaggtttgacattaatgacagtgaatatagattcatacttcctatcatcttcatgttaatttttaaacattttgtccaacttatcaggtcttattagtctgtgtttttattagatagccaataattttatcctgtaatatgtttgatgagcacagagtaggaaaatgtatccatttgcccttttcttgtgtttacatcatcgtcactatcttgcagaatttaaaaccttttagaacatgtgtccatgtggccacacatattatatgggacgaataaatccatataactaagcagatatagaatgcaaaatgctcaaagtaaacngaatgangaccccccaggtgaaactggtttangagctggggggtaactcatgggcacaatnt

SEQ ID NO: 429 - DNA, 591 bp, Homo sapiens
  misc_feature (493)..(493): n is a, c, g, or t
  misc_feature (535)..(535): n is a, c, g, or t
  misc_feature (576)..(576): n is a, c, g, or t
ctctttcaattgttcctcctcctccctgattccttcttcctcctcccttgcctcctctcccagagtatcataaaatactggatctcgatgagcagccttcctctgaaaatgcttagttttggatcctcctttaacaagtacaacttttcttttcaaacaagtacaaccaaacatgcagtctggtcggcggcagtgagcaggttggcgcttctccaaagctagactggaacatacacaacccagtcgacagaagtcattgttgcagggaggggctcgtttccttatgattgtgtggataggtttagttttgagggatgcttgagctgtaagtagagttgttaaggatacatctgctcgctcttctgtgatgtatgtccttggttttccttcccaaagtgcacagtcttccaggtccattagcttcacctgagatttagacaagcctggagggcgacttccctggtgctggtgctgctgctgctgtgcctgccgnaaactaatctggtttggaaatatatttcatccaaagttggcncaacaaagttatcgcctggatttttgaaaagaagcctgaanaatcttgggaacctt

SEQ ID NO: 430 - DNA, 555 bp, Homo sapiens
  misc_feature (436)..(436): n is a, c, g, or t
  misc_feature (445)..(445): n is a, c, g, or t
  misc_feature (514)..(514): n is a, c, g, or t
  misc_feature (521)..(521): n is a, c, g, or t
  misc_feature (524)..(524): n is a, c, g, or t
  misc_feature (544)..(544): n is a, c, g, or t
ccggaacacaagtttatttggcatttggatgaaatgattctcacagcatcttaagaaaggttagtgtcaacccaaccaaaaactaaaaacccttaatgaaaacataaaaaaacaggcatcaagacaatgtacagtatcaaatcccacctccgcatggcaggtcagagggcacctgggctctgagaaaccgtggcaagctggtcctagaggaggaggacccctggagcacaaggttcagcaagggtgaccccgggacttgctggtcagactggggactgcagcaggccttgcaaagggggcattctggatggtggtgcaagaacagttgagcgagtccagctctcctcatgctcccaagggcctcctggagccacagtggcagcggtgttccaggcagccctgccatgtggaccttctgcctggcccaacgtgccantggcctgantgcttgtggaggcccatggggaaaggggccacccagcaaccccgggcaggccaaggccacctttggaanctggatnggncaattttaccccgttcttantggccctaacg

SEQ ID NO: 431 - DNA, 554 bp, Homo sapiens
  misc_feature (545)..(545): n is a, c, g, or t
ggtgtctaatacttttacttcccagcagcataataccactttggtcaggttgaaccactgcacaattttgcagctctttcagaaaaataatgaaaacaattggaaagacatgatgtacatgcaaatggtgagaaaatgatactattgtccaatcctttcccgtaaatgtaaaatatccttagttcatctccaaactgtgtatttattataagcccttacatcagggattttgtttctttcagtttttgtagcaccaaatagacacagcggctaacaagaaataaatctgaaaagtcactgaaatatttatcacatgtcagaaattttctggtctgtacctttaaccatgttcctggcttcacatattcttcttaagagtaagctataacataagattgagttcccaccctgtgtttgctactgatgtgatttgtttaccatgaataatactttggtaatatcttttggatattactttacaatttccaagtattttatgtacagtgactcacttagtgactcattcattttaatggaatgggggnccccaaacc

SEQ ID NO: 432 - DNA, 552 bp, Homo sapiens
  misc_feature (506)..(506): n is a, c, g, or t
  misc_feature (543)..(543): n is a, c, g, or t
  misc_feature (545)..(545): n is a, c, g, or t
ggctattaaaaaatgtttaagttaatgaaatttacagtgcatattaaaagcatgatacaaatggaaatttaaaattttgtattaggaagcccagtttgctaaaagtagcattaatatcattcacatcagattttaatttgttacacatttttgtagttcagcaaaggcccctatgatgaaaaacaattaaaaagtgttatgacaaaaataattatctgtgtaaaaagggggagacccaaaagatttttcatatggttatttaattcagttaaatagaactgttatgaatttgagaggaatgaagatattcaaacactaacagaaaatcattagccttatattagagcattcaaatgcttatgtaactcttcaatccatctggcttcataaaaaccaaaattttgaacacaaaaaagtggcagagtttacattaccttttgtatgttcctaagtatgaaattgcatcaatttattatgaattaaatttgaaaagcatcacagatttnaaaaccaaggtccaaagagcctggatctttttaaatncncaaatcc

SEQ ID NO: 433 - DNA, 548 bp, Homo sapiens
  misc_feature (482)..(482): n is a, c, g, or t
  misc_feature (497)..(497): n is a, c, g, or t
  misc_feature (500)..(500): n is a, c, g, or t
  misc_feature (547)..(547): n is a, c, g, or t
gttttattcagttatcacctccagctttgtacttcagcagctgactttccttcttcactggggagcaaatctgcacttgccttaaatgaatttctatttttgactacttttcaaatttatcacatttttttcctaaagtaccgagaactaacctcatcttgtatttcttgcagcttcccaatgctgagggagtcttagaggcatttgctttgtttttattaggagtatggtttatagtcacccagccagaatgtgatatacaagggtttacaaggaaaagtagaaatgggtgtagatgtatgtgcttgttgtaagaaaaatttacacttacagatgaaagatccatatataatccagccacataccatggaaaggaaaaacaagaagaatatgtaatagtgatggttgccaaaacctatgcaccgtccagtccacaggcagtgttgatcatatcgagcccacagcagttgcatacatggcantggagtgaccctaanggntttcctatctaaaaggggcatttaaaaaaggccttacccaaaacccng

SEQ ID NO: 434 - DNA, 579 bp, Homo sapiens
  misc_feature (501)..(501): n is a, c, g, or t
  misc_feature (503)..(504): n is a, c, g, or t
  misc_feature (550)..(550): n is a, c, g, or t
  misc_feature (552)..(552): n is a, c, g, or t
  misc_feature (577)..(577): n is a, c, g, or t
acatattagaactcaatgaagaattatttaaaagagaggaaaggcagtgcagggctggaggtcctggagggtggcggcgggtcgtcctaactagcaggctgaaaggtgctggaggggatgccttcactcagaggaagttcacagccacctgccttggaacatgtacctgttcatcttttcgtaatgttagtattcattttgctatcttcctgttgccatttccaaacagtgtcagtatgtttttgttaaatacgaacatttaaaacatatcgtatctgtaagcctatttgggtgtcttcatttcatgcccgcactgcaccataatgagtaccacacaaagccagaggatgacacttcctccagaggtctcactgcacatggagaggttagccctggcattaaggggtccttggaatctctcagcagtcatagcagtcagatgcaccaagggcagcttgagtcaatctccttttgtacaaccaggccgttcctgcggttttnanngcttgccaacctgggcatactggaaaagccttaaccaaaactgggntnttaagggacctttcctttttaaaanaa

SEQ ID NO: 435 - DNA, 610 bp, Homo sapiens
  misc_feature (318)..(318): n is a, c, g, or t
  misc_feature (447)..(447): n is a, c, g, or t
  misc_feature (484)..(484): n is a, c, g, or t
  misc_feature (526)..(526): n is a, c, g, or t
  misc_feature (540)..(540): n is a, c, g, or t
  misc_feature (560)..(560): n is a, c, g, or t
  misc_feature (581)..(581): n is a, c, g, or t
  misc_feature (598)..(598): n is a, c, g, or t
aatcttttattttttattgcatacatcaatatttaacagaagaaaaataaagaacccctaatgttaaactgaattacatgttatcttctgattcttttcaatgtagacctaaattttcacatgtatcagtaaacacaatttatgttcttattaacatttttgaatctcacttttttgcatacaatttgacatatatcaatattattgaatggctatataacattctgtgatagcactagcaatacaccaaaatttacttaaccatttccaatcgttgggcttttttcccccttaaagttatctgagtggaactgctanaaaactttgtacaaatagcttttctttcttttaaatattttcctgggcatatgccactcaaagtgagtatgtcaaaagatcagttataaagccctttttatagtcttctacacagttctcttaaaaggntactaatacacaatgctgctgctataaggaccatgcnattaaaacagtttggctaatacaatacatgaactaattcaanttggctttttaatnttaggaaatttgaatacctnccaatgaattttaaacccttnaccccaaacctttaaanttgccaaaaata

SEQ ID NO: 436 - DNA, 534 bp, Homo sapiens
  misc_feature (190)..(190): n is a, c, g, or t
  misc_feature (274)..(274): n is a, c, g, or t
  misc_feature (378)..(378): n is a, c, g, or t
  misc_feature (381)..(381): n is a, c, g, or t
  misc_feature (398)..(398): n is a, c, g, or t
  misc_feature (405)..(405): n is a, c, g, or t
  misc_feature (448)..(448): n is a, c, g, or t
  misc_feature (486)..(486): n is a, c, g, or t
  misc_feature (498)..(498): n is a, c, g, or t
  misc_feature (516)..(517): n is a, c, g, or t
cacagacaaggttttgcccaagctggtctcaaactcctggactcaagcaatcttcttgcctcagcatcccaaaatgctgggattacaggagtgaagccaccgcacccggcttgccaaatcatttctatcagcactctcaccatagcttccctgctcaatggcctatggtatttcccatggtctgacacanaaacttccaattctgcctgataagactgatccaaccatatttttgacatcaatctaccacacaccctgtgttctcactgggcanagaacatcaatatgtataagagaacccatacaaatataatttgttgtttttaagttatagaaatgtcatgttgttttcttttctcttttctttattttcagacngantcttgctctgtccccangctggantgcaatggcgcaatcttgggtcactgcaacctcccgcccccangttcaagccattctcccgcctcaaaaccccaattggtnggaataaaagcnccggtccttataaagggnnaattttgtttttttgtt

SEQ ID NO: 437 - DNA, 576 bp, Homo sapiens
  misc_feature (9)..(9): n is a, c, g, or t
  misc_feature (27)..(27): n is a, c, g, or t
  misc_feature (165)..(165): n is a, c, g, or t
  misc_feature (313)..(313): n is a, c, g, or t
  misc_feature (320)..(320): n is a, c, g, or t
  misc_feature (508)..(508): n is a, c, g, or t
  misc_feature (517)..(517): n is a, c, g, or t
  misc_feature (525)..(525): n is a, c, g, or t
  misc_feature (553)..(553): n is a, c, g, or t
  misc_feature (562)..(562): n is a, c, g, or t
gagatggantctcactctatcacccangctggggtgtaatggtgtgatcttggctcactgcaacctctgcctcctgggttcaagcaattctccttgcctcagcctcctgaatagctggggttacaggcgcctgctaccatgcctaatttttgtattttagtaaanatggggtttcaccatgttgatcaggctggttttgaaatcctgacctcaaatgatctgcctgcctcggcctcccaaagtgctaggattacaggcatgagccaccgtgcccagccccatttgtttttttttcaagccaggcttcatccanaaaaaanaatctgtatcatccttgcttcatctatagaaatataatataaataaatttagcaagtgatatttcctcaaacttgtttcctctttcctcctattatctctactccgatttccttctactgtgctttttctattttcttaaatatttatgaatctcattgtttctttctctcaactgtatgttttaaanttcatctanttttaaanattcaccattgttacccccattcatttnctaattggnccaattaacattga

SEQ ID NO: 438 - DNA, 612 bp, Homo sapiens
  misc_feature (479)..(479): n is a, c, g, or t
  misc_feature (522)..(522): n is a, c, g, or t
  misc_feature (578)..(578): n is a, c, g, or t
  misc_feature (584)..(584): n is a, c, g, or t
  misc_feature (600)..(601): n is a, c, g, or t
atttgtaccgtttttatttgtaaaaataaccatctgaatgcatttccatagtatattacagttaagtacttcattacgttattagagcattcagtagttgcaaaagtattaaactgtgcttgagaagattcagattgtttcaaagtcattcactgaactaaaagtcattttccccatttttacagtcatgacatttaccagagtcattcaactccaatttacataagaaaacattatagacaaaatcccactgaaatcatcaaacaatattttatgctgttacaaatatgttatgcaaaatataacactggcaccagatttgtatcatcgtgctttacaaagatatattgcacatgctagagcataaaatatgtagacaaaactaccaaataaaagatatttgcattgaatttttagatcacataagaaacgcatagaaattacattttatacaaacactcagattgtcactatcttanaatgctttcccctataatactgacctatggttatagtttcgtnagacgaaagcattttagccctgccaaatccaacaattcctatggaaaacttaagcnttttcntatcccttccatggcnngttccaggggg

SEQ ID NO: 439 - DNA, 582 bp, Homo sapiens
  misc_feature (45)..(45): n is a, c, g, or t
  misc_feature (62)..(62): n is a, c, g, or t
  misc_feature (71)..(71): n is a, c, g, or t
  misc_feature (90)..(90): n is a, c, g, or t
  misc_feature (146)..(146): n is a, c, g, or t
  misc_feature (165)..(165): n is a, c, g, or t
  misc_feature (444)..(444): n is a, c, g, or t
  misc_feature (499)..(500): n is a, c, g, or t
  misc_feature (513)..(513): n is a, c, g, or t
  misc_feature (521)..(521): n is a, c, g, or t
  misc_feature (545)..(545): n is a, c, g, or t
  misc_feature (555)..(555): n is a, c, g, or t
  misc_feature (572)..(572): n is a, c, g, or t
gagtgaacaatttttattgaaaccctccaagattaaagaggaccnaatggtgagtttgggtnccataacanaaaatctcacctaactgtnccatcattcacaggaatgaacaaacccaaacacgacaaaattcaaattctcatgtnattgctacaagtgaatgtnaatgaactaatcattttatcataaccttcctttaatcatacgaaaaagggaatttacatggcataacaaaagatatgcaaaacttaatgaaaacacaattctcttaaatttcttaaacttatttttaaaggatgcagaatgcacttgaaatgattaaatgacttaagctgattcatttttttttattgcaaactgttttaacatcagcttaacccccatgcacggtattcaaaaagaacacagctttcgaattagaaagatcacttaaattaaaaaganaaattaagttctaaaattaggaaaacgctggaattccttttgaaaggaatctccnnttccattcttttnaaaaatcnaattttggttacggttcccccctnccggttaatntccaactttattccctnccaattaatt

SEQ ID NO: 440 - DNA, 545 bp, Homo sapiens
  misc_feature (436)..(436): n is a, c, g, or t
  misc_feature (451)..(451): n is a, c, g, or t
  misc_feature (460)..(460): n is a, c, g, or t
  misc_feature (501)..(501): n is a, c, g, or t
  misc_feature (511)..(511): n is a, c, g, or t
  misc_feature (513)..(513): n is a, c, g, or t
  misc_feature (527)..(527): n is a, c, g, or t
  misc_feature (543)..(543): n is a, c, g, or t
ggagagacggggtctcgctctgttgcttaggctggtcttgagctcctgacctccagcaatcctcctgccttggtttcccaaagtgctggaattacaggcatgagccactgtgctcagcccctttgaaaatattaattctgacttcctataattcccttctatctactcatgcaatacaattatattttctaatatacttaaaaattagaaaattataatcagagtacagatgtttctaccagattaaagctttaaattcaacgtttaatacctaagcttttaacctgtcttcagcaatttcaaaaagctaatacaaatgatcaacaacttgtatatatattttactagaagtgtactctaccatttctagaatacgtgtttagctttatgacataatttcaaggacgtattagacccccaaatatttaaaaaagcngaaaggacctatatnggatgattnaaaatctcattatcctacttcttgaagagctaaaaaaaaancaaccaaacncntaccccccaagttnttaacatttatccacngt

SEQ ID NO: 441 - DNA, 572 bp, Homo sapiens
  misc_feature (419)..(419): n is a, c, g, or t
  misc_feature (433)..(433): n is a, c, g, or t
  misc_feature (512)..(512): n is a, c, g, or t
  misc_feature (520)..(521): n is a, c, g, or t
  misc_feature (531)..(531): n is a, c, g, or t
  misc_feature (558)..(558): n is a, c, g, or t
  misc_feature (560)..(560): n is a, c, g, or t
aatttatcacgtgcttaaaaatcttcaaaatagcttagtgaggctcatgacagtgctggccccatggaaatgtagtcttttgttgcgtttaaacactgtcacaccatctatgactgtcccattggtctgaagtgtagtggcaaactaagcatcctataagacaagctaaagcttgctttttgccagtcagttgaaagtcttgcatctcttcactgatgcactttctttaggtattgatagtcagaagcacaaagcatttattatgcattcaatcatgtagctaaacaaaaaactgaagtctcctgaagccatttaaaccagccgttccaaaatctcctgcgaccactttgttagtaccgcaaaaactttcccactataaatgaaggaataaatggtagtgctgctctccagaatcctanggcactggttccgnattttggaccattggatttaactaataactggggcaaaagcctcaaaaaaccctgaaataaatttccagctttactggnaccagccnnaagtaaaaancttaatttgcctggtaactggatggcngnaaaatttaaatt

SEQ ID NO: 442 - DNA, 627 bp, Homo sapiens
  misc_feature (519)..(519): n is a, c, g, or t
  misc_feature (571)..(571): n is a, c, g, or t
  misc_feature (576)..(576): n is a, c, g, or t
caggcccgagctactcaggagagagggtctgtcgcttttaaaacgcattaaaggctctctcctggccttatttaacttgcctaagctaggtggagcacggctgagctcaggtaagctagcagctttccagcagaaggtgttctcccgaagaacgcagacctggggaagggttgactttttgggggcccctgctgagaacagttcaagagctccctaactgtagaggctgctggaggggcgaggggcagaaccccgggctgaatcatctcccgctttcccgggactttgctttcactttcctcagtcttgtggacagagtcaagtagattttcaaaagtgctccagaaaggccggaatagtcatgtagtggatgaaaagggcagtcacaaaactgcttaagaccagctgtcttgccagtaattgcagtgctttaagatttaattagtcacggctgctacgtgtatctgatgtagttaaccatggcctgtcatgattatattgctataaggaagggaacanaatctttatagtgtccaaagataattaattcttgtttaaatctttgccgcanagcanatatccgactgactggctcttagtctgtgactttgctctccgtgcacatta

SEQ ID NO: 443 - DNA, 715 bp, Homo sapiens
  misc_feature (376)..(376): n is a, c, g, or t
cggcttggcatctgcctcggtggacttactacctctagaaggaaatacctgagttcctctggcctcagctcctagagtgactggtgtgctgtccctgttactcttctgtcaaggtgacaactgtgtgacccatcatctgtgtgtcaaagcaaggccctgcctgggcctctgctcctgtgctgaccccaaaggcaaatgctttgctagtttccttccagttaatttcacctatgaatagatgtgtgttcagtggcatctttctctaacccccagcctcccttcccacagaggccaccgtcatggccagttgctgcagtttctttccagagaacctgtgtatgtgtaaagctgtacaggcgtgggtacaccacacagnctgtcttgcactgtggactgttgagttactagtacatctaggtaagcaccgcatatctgtattcatgtctgccttggccttttaacatctgtgtggtagccgtgtttgaatacccattccctttttgggaacccattagttgttcagcaatttttactgtagataaggctataccgatatctgtgtcatgggttttatgacatgggcagatatctgggagagaaagttcctcagaagaatctgggcacacatgtgtaattctaatatgatgacacccagtttcacctaagaggtggcccatgacttcccaacttaccagctggcctaaactgtttggca

SEQ ID NO: 444 - DNA, 647 bp, Homo sapiens
  misc_feature (536)..(536): n is a, c, g, or t
  misc_feature (541)..(541): n is a, c, g, or t
  misc_feature (644)..(644): n is a, c, g, or t
gaagaattaacgatatgttaacacaagttgactgtgatagaataattacaataaatatgcctattttcctttggggagaaaagtctaaaattctgctttatagaagctattctcagctctaaaagagcatatatgtagatcttcatttcttttcttctaacaattttaggggaaaatacaaaccttaagttatttcctgaaatatttcccaggatgattactaccttggattttaaggcttctttcttcacaagttctgactcttctataagcacaatcagaatggtcagaatgctgactctcctttaggtagtcagaatgggtcttccaaacctttgtatgagcccattagctgcctcagctttccctcaactttcaggaaaacacaggttacatattctttacgttactatgagaaactacctacattatttttttttaaattttatttttggctgggcacattggctcacacctgcaatcccaacattttgggaggctgagatgaaaggattgcttgaagccaggagttgcangacangcctaggtgacaaagtgagaccttgactataaaaaaagataaccctttccgacgtgatgacctacccacacgagcatgcctcttgcggggtctctcattcctntcg

SEQ ID NO: 445 - DNA, 700 bp, Homo sapiens
  misc_feature (532)..(532): n is a, c, g, or t
  misc_feature (658)..(658): n is a, c, g, or t
  misc_feature (663)..(663): n is a, c, g, or t
  misc_feature (674)..(674): n is a, c, g, or t
  misc_feature (686)..(686): n is a, c, g, or t
agcaattttggatggagctggaggatattattctaagtgagcaactcaggaatggaaaaccaaatactgtgtgttctcacttataagtgagagctaacttatgggtacaaaaaggtatacagagtgacataatggacactagagactcaaagtggggagggtaagaggggggcaaggtataaaaaaccacatattgggtacaatgtacactactcaggtgaccggtgcagtaaaatctcagacttcactactgtagaattcatctatatgaccaaaagccatttgtaccccaaaagccattgaaattaaaaaaaaaaaaatacacacacacacacacacataaagaaaaaaaagaaaattataagaagttaatattgactgacctggaacgaaaaaaccaagacagtatttagtcattaacattttgctatttcatcaatgtaaataattaatttaaatggagaggagtgttcattgtaatcataggagtacatacatgtttagctactaaagaaaaagtaatcagaagcanattcaatggacttatcagttattattattagacttatcaaagacttatcagactgatttttaaaagccttgtataataggtgcttttttgcacaacaataacaggaaaaaatggaggataaggttnacaantcatagtggcnaatgtggccttnccaatgatactaaa

SEQ ID NO: 446 - DNA, 698 bp, Homo sapiens
tgcatgattttattattattatactttaagttttagggtacatgtgcataatgtgcagcacagcatggcacatgtatacatatgtaactttaagttttaaatgtaaatgcctgaaaagtaactcaggatctagccttttcattagttttgatcatgtatgaaagcaagtatttatttcccccaaatgaaaccccagggcttccagtatttgtagtgatagtgtgaatccattaggtctatttttaattatatctgtcttattggtttttttttccacatttcctaactcacttgtgatattgcttcatataattcaactttttgtgtgctgggttcccatctgccccacaaaggcctctgtgcaaatctgatatcttgtttgaatgacattgttttgcttttaccctattgcttcgaatgtgtcccaatgttaagtcagttctcaacattaaagcattaaaaattagcttttttaaaatgctcagcatcactaatcattagggaaatgcaaattacaaccataatgaatatcatctcacacctgttggagggcatttatcaaaaggtgaatgatatgttagagataatgcaaaggaaacggacacagacattgtgaatggtatgtaaattagtccagtggggtggaaaacaagatgaagtttctctaaaaacttaaaaaaaaacttccctttgacccg

SEQ ID NO: 447 - DNA, 689 bp, Homo sapiens
  misc_feature (540)..(540): n is a, c, g, or t
  misc_feature (580)..(580): n is a, c, g, or t
  misc_feature (594)..(595): n is a, c, g, or t
  misc_feature (605)..(605): n is a, c, g, or t
aaataatttactttattacaaagatagtatacaatttctagaaaatacatgcatgtacaaagattgaaataaaaaaaacactcataaatatccagatttaaatgtcagcatataccttcctgatctttttctatcatactgtatctatcaacatctaacctgcttttttaactataagtcatacattttgccatatcagtacacttttttctgtaacattatttttagagcatatcaaaccatagtttatttaaccaatccccaattaattcataattagaatatttcgtgtttttccagtataacagttctataatctttgattataacctttgtgtaaattcctataagtattgagtcaaaggagacacacatcttttcaggcattacatataaaataaatactaaactagactccaggaaagtggtatcaattcacattcccaatagcactgtcccaatggggctaatttatctcctttttaatctcagcgtatttccagttataacataccatttttacctcttgattcaacaatngtacttagaagaaagctctaaaatcccaaactgaagcttncctttaggaccctnnctattacaantccgtatgaaagtaccagatttcgagagtgacatcaggccaacggaggggagtgaactactgggctctctccctaccacatatt

SEQ ID NO: 448 - DNA, 803 bp, Homo sapiens
aaagatttgaattttttttattatcccagcaaacattacactagagaaaatgattgggaaaatacaaataagttcattaaaaacacaggctgagtattcatatctattacattcagaagtatgcgaaacaattagttatattgcaaagctgtaattctttttctaacaaagcatgattttataaaactttaatgttgccactgattcaattttaatacaaaatactgatgtacacaatacaatataaaagttaactgtgtagtgccttgcacaaagggatatattaaggcgctttacaaatataccaatattttgacccaaattactttttgctttagattaaaatgaacaggctcaatgtgccactttaaataccacagggatgtttatgtaaaattttttatgtaaaataccttgggtaacagcagcaccaatgggtaaaaatcctcccactgcatgctgtaatttctaacacattaagtcagaataaaacgattgcactcacagctttgcactttgcaacagcagaaggttataactttttaaaaaagtcaatctcaaagtgactttttagtcatacattctatagtttctatttcaaataagaaagttgcaaagataccgcagtggggcctggcttatgaagggactggacaatgcatgacaatatcttcaattacataattatagaacacatcttataaatactattgagatgcgtaaaaaggggaagtataataaacacagcaagttttttataagaaaatattttaaaaggaaacattttgaacccaatggtttgt

SEQ ID NO: 449 - DNA, 612 bp, Homo sapiens
aactttttagagtataatgatgttctagggcatattgaggaaaatttttaaaaaatagattataatgatacatattggtatcattaagccaacagatttgagcaaatcaattaaggtgtcttattttttcatcaagtaattattgctgtggtctttctactccacaaaataattttttctttttacagttgaaaattaactgcattattaactaattaataaaataaatcaagtggtataagggattagtttaccctcaagccgatgactccatggctactgatattagttagtttaggatttttaaaaagcatatcagacccccagtttcaggaattgagtataaatattgcttcttgtcaccctgggacagtaatgccttatagtggcactagtcaccttaagtagattacacatggttgaggtgaataaagctgcatgggaatttgctttcgtgatatatttcatttgcaaacttctacataatcaagttttatgtttaaaaccatcggttctatatatctagctttaggaagttgcccttacaggtgggaccttttatgttaatctgttttctccccagtcatcttatttggcaaaaaaaaaaaaaaa

SEQ ID NO: 450 - DNA, 400 bp, Homo sapiens
gtgaaattaaagagccccttgaaatctctatatcacaagatgtacatgattcaaaaaatactttaacaactggagtggaagaaattaggtctgtagacatcattaatatgctgctgaattttgaaattaaagaggttgtggttactttgatgaaaaaatcagaaaagaaaggaaggcctttacatgagctaaatgtcctgcaacttggaatggaagctaaagttaaaacctatgacatgactgctaaagcttatctaaaaaaaattagtatgcagtgctttgatttcactgactctaaaggggaacctcttcacattattaactcttctaatgtgactgacgaaccccttctgaaaatgttactgacaaaggcagacagtgatggaccagaatttgacta

SEQ ID NO: 451 - DNA, 563 bp, Homo sapiens
  misc_feature (550)..(550): n is a, c, g, or t
aaaatgattaaatatgaagtaaaaaagcaagctaaaaattacacatgtactttgcaggagtatagactgtagaagatatatttgccattccttatacgtttaacttttgtgtgatttgccactttatatattaaatttgaataggtctcaactatttttttttgtaaaccagaggaataatactgttttgaatttcctaatttaatcctgaagacaaacttacttttatacccccatccatggctcactggtcaatgttttgagctatttccatttgttctcactcaggctcctatataaccctggcattagttatctcttttcgtctttttaaagcctcttggaacaagtctcctgccttccactctggatgtgttggtgaggtttgtgttggagtttgtggagacttgtgaatactatatccctccccatccaggggttccaacactgagcatctttctctcactgacatctttcagcaaataaattcttcccatatattgtcccttttgcactccagcctgggcgacagagccagaccgtgtctcanaaaaaaagttcct

SEQ ID NO: 452 - DNA, 685 bp, Homo sapiens
  misc_feature (493)..(493): n is a, c, g, or t
gtcagaagaggagcagagcagcagctccgtgaagaaagatgagactaatgtgaagatggagtctgaggggggtgcagatgactctgctgaggagggggacctactggatgatgatgataatgaagatcggggggatgaccagctggagttgatcaaggatgatgaaaaagaggctgaggaaggagaggatgacagagacagcgccaatggcgaggatgactcttaagcacatagtggggtttagaaatcttatcccattatttctttacctaggcgcttgtctaagatcaaatttttcaccagatcctctcccctagtatcttcagcacatgctcactgttctccccatccttgtccttcccatgttcattaattcatattgccccgcgcctagtcccattttcacttcctttgacgctcctagtagttttgttaagtcttaccctgtaatttttgcttttaattttgatacctctttatgacttaacaatanaaaggatgtatggtttttatcaactgtcttccagtagttgcttcctaactgcaagggcatctcattaattgagtagctcttgaaagagctttgagttagaaatatgtgtgttacaccctcacattagtgtgctgcgtggggaagttaacacaaatgttacaatgtatttttgtgaatgaaagttggatgtca

SEQ ID NO: 453 - DNA, 677 bp, Homo sapiens
  misc_feature (610)..(610): n is a, c, g, or t
gcacgagcagcaaccagaacaactttgtgcacgactgcgtcaatatcacaatcaagcagcacacggtcaccacaaccaccaagggggagaacttcaccgagaccgacgttaagatgatggagcgcgtggttgagcagatgtgtatcacccagtacgagagggaatctcaggcctattaccagagaggatcgagcatggtcctcttctcctctccacctgtgatcctcctgatctctttcctcatcttcctgatagtgggatgaggaaggtcttcctgttttcaccatctttctaatctttttccagcttgagggaggcggtatccacctgcagcccttttagtggtggtgtctcactctttcttctctctttgtcccggataggctaatcaatacccttggcactgatgggcactggaaaacatagagtagacctgagatgctggtcaagccccctttgattgagttcatcatgagccgttgctaatgccaggccagtaaaagtataacagcaaataaccattggttaatctggacttatttttggacttagttgcacaggttgaggcttcagcagctagagctcagtatactaatgccctatcttagtngagattcatagctatttagagattattttccatttaagaaacccggcaacaattttgcacggtcgtt

SEQ ID NO: 454 - DNA, 737 bp, Homo sapiens
  misc_feature (502)..(502): n is a, c, g, or t
  misc_feature (621)..(621): n is a, c, g, or t
  misc_feature (674)..(674): n is a, c, g, or t
  misc_feature (678)..(678): n is a, c, g, or t
cgggctgcaggctggcccagccactcttattcttgtaccacctcttcctcacatccttgaggagataaagaatgtgtcatggctctcctttctgctcttgatcatgataacgttctaaagggtgtggaataaattacagtacagaactggtgtgtgctatgtgacatgagaggtactgagattagtttatggaagtaacagtgttatagttcctttataaattatttttctctaacttcatatatgacatagttgctaagtcattttggaagtgttcgattgtgtatgcatcaccttgtatttgggcaaatacaatatatacaaaaaatattacacatacataacttttttttttagacagtgtcttgctgtgttatccaagttggagtgcaatgtcgtgatcacagttcactgtaaccttaaactcttgggcttaaactatcttcccgcctcaacctccactacaagcagtaattaaaaaaaaaaaaaaaaaactcgaggnggggcccggtacccaattcgccctatagtgagtcgtattacaattcactggccgtcgttttacaacgtcgtgacttgggaaacccctggcgtacccaacttaaatcgcttgaacacatnccccttttcgcagcttgccgatagcgaaaggcccggaccgaacgcccttcaancagntgggcaacctggaatgccaatggcaaaatggaagcgttaaaatttggtaaaaatcgcgt

SEQ ID NO: 455 - DNA, 664 bp, Homo sapiens
  misc_feature (612)..(612): n is a, c, g, or t
  misc_feature (647)..(647): n is a, c, g, or t
aggttaagagatttttaatttgccatatggtatgcctatgttgttaaatatacaatgaatctatggtatgatagcagtttctggataaacattacttgaggtcctaaaatgcagaagggaaaaagcagcttttgtcagatgcttactttgctttcatttcatctctaatattttggatggggaaccatccaaagcttctggccgcatgaaggtcaagtgtgccagtgtgcagctgggtttcttttccagaattaaaattattttgggtggtgctgagggtcagaggaagaagtaaaaattgtgagaaaggagaaacatgggcttggggagaacccagaattggggacagaagacctggcactaagctatagcacttagcacctctgatcttgtttttcctcgtccgtaaaaggagattaacagtgcttttctgcccaccttttggggagaagggaataatttagttggtaaaaaaaaaacttttgaataataagcaactctgtctttatataagtagccaagcattattaattatccaccccatatcactggtagatacctgtattcaagctatgtggacataaaagcagtcacattttagaagtcatgaangtggtgctaataaacctaatctacagaaattaatnttttttttatctctggg

SEQ ID NO: 456 - DNA, 323 bp, Homo sapiens
  misc_feature (58)..(58): n is a, c, g, or t
  misc_feature (60)..(60): n is a, c, g, or t
gggaaaaggagagaaggaaaagaaagatctccgagtttccactaagggttggggacantntgaaggagaaggggagctttttacaaatacctttggtctctgaacttcagtggcaaagaacagggatcaagttgaatgttctcagggctttggatcctagaggagaaacaatcagaagagcagaaatggttatccctgtttaaaataagccctcactctttaccacttccttaaaggagtggaggtgctggtagtgatggttagaggcaatgagggacggagaagttgctcccgtttcagagatgcttaaaaaaaaaaaaaaa

SEQ ID NO: 457 - DNA, 218 bp, Homo sapiens
aattcgcggccgcgtcgacacggctgcgagaagacgacagaaggggtagcttagaagcatggtaaagatgcttttaatttgcgtatttttatatagtaatgtctaacatggaattatctttacaggaaaaaacaaaaaagaaaaagaagcataagaaacacagtaaaaaaaaaaaaaaaaaaaaaaaaaaagcggccgctcgttgtcgcgcggccgcg

SEQ ID NO: 458 - DNA, 606 bp, Homo sapiens
  misc_feature (460)..(460): n is a, c, g, or t
  misc_feature (475)..(475): n is a, c, g, or t
  misc_feature (513)..(513): n is a, c, g, or t
  misc_feature (584)..(584): n is a, c, g, or t
cctcaacatgacaggtgtgagagggttgctgttgtattgcaatcatggtgcagaaataccagtccccagtgagggtgtacaaatacccctttgaattaattatggctgcctatgaaaggaggttccctacatgtcctttgattccgatgttcgtgggcagtgacactgtgaatgaattcaagagcgaagatggggctattcatgtcattgaaaggcgctgcaagctggatgtagatgcacccagactgctgaagaagattgcaggagttgattatgtttattttgtccagaaaaactcactgaattctcgggaacgtactttgcacattgaggcttataatgaaacgttttccaatcgggtcatcattaatgagcattgctgctacaccgttcaccctgaaaatgaagattggacctgttttgaacagctgcaagtttagatattaaatctttctttggntttgaaggacagtgnaaaaaattgcaatgaaacaatataccagcaacattaangaaaggtcatcgaatactccttcgccaattagaagaaggcataccttgggcccggtggagtccgcttcatncgcctttcagagcatttcattc

SEQ ID NO: 459 - DNA, 701 bp, Homo sapiens
  misc_feature (540)..(540): n is a, c, g, or t
aaaaaaggatttttgtcatgaattcactactgtttgcctaggctgtccttgggccagccacctggtttctcagagcctcagtgtgatccactggaaaatgtgatcatgttcaatgtcctttcctaatctgtcattctgtgaagtggtgcttccaggtcaaggaaacaaataggtcagaatgttcctgtggtcattgttctctttaggctcattttccatgaaatagttgtattcctcttcctgtagcacactcaggttaagttggagctctttaacctgggcattcttcccaatacttcattagaaataccgcctgcttcaaaatcacctttgtttgcactatctactacagcgtaatagacttctggctcagagagtgaaagctgtggaagacaactagaagaatatttatgttaactcccttattttacagctaatgaagttgaccctagggaggtttgatgactctccacccagtcccaaagcttctaaagcacggaatcgagttcctactgtggatttttaatcctcttattgcgnattttccacttgcctatctttaccacggagcttagcgcattttagggctttccaggagtactggccaggttccttgccctgttttttcttcctacacccaatatgttaagcagctgctgcttttggaccagccacgtgctggcccactatttcgggtcggc

SEQ ID NO: 460 - DNA, 422 bp, Homo sapiens
ctgccaccagtggtagatggtgaagatgaagtcctgtctctccttgtcttcgtacaagattcccaggagtgtgctgagtccagtcttgttcaaggcactgcccacaccccaaagggcagctgccacatagaggatccagctgtgttgcaggacccgaggcacaggggcccagaaaaagaggatgaaggtgagcagcaggtgcacccctgctccagccaccagggcaccgggcgtggcaaccacaggcccagcttgcccaggagtgaggcggctgaggcgcccaggctgtaagccacgatgaggtaagccagccgctccagccccaccgagcacacgccatagccctgctgggggacaaggggtgagtgttgaagtctggaacagcccagaccacagtctcagccctccccgcatcgcggggg

SEQ ID NO: 461 - DNA, 454 bp, Homo sapiens
tctgagtgaatgtcacaaggccggtgacaggagggggtggaggtgaggggacaaagtagaggccgagggtcagtgcctttggagaaagtccagagaggaggagcctgcacatctgcatccctccgccagggctgccgcgctccctgccacctaaatctgcatctgctccaggtatttgtaggtggggttctcatagccatggttctgcatcttgttcacgtgacgctcttctggggtgagcattggatcaacctccacgatcccgtggctgatggtgccatactgcctcttcctcagcatcaccaggctgatgacgatgaccgtggcaatggccactgcgatgaccagcacgccaatgagagcactgctactcatactgaagtcctgccgcagtgggcccacggattcccgctcttcctcgaggcctccaactctctcggcattggaaaatcat

SEQ ID NO: 462 - DNA, 477 bp, Homo sapiens
ccattctaagactttaagttctctggcatgagtttatctgcaatcataaactaaacaattacctaaacccaccccaccaatcccaaccgtaacaggccactgccaactaattgccaatatttgcccctcccctttaataaaacttttaagaagtcacattattggaaaacttaacttcaacatttggcctactcaagctcttctgaagttctcctgagatgactgaatatgaaccaaagctgcactgtgctgtacttttcagcttcaactgggaatactcttccaaggataaaagcagctccagtccctgaaggtgttcgtgccaacagcacagcggtacactccttctctaacccagtttgtcaatagtactatagcatctgtggaaaatcttagaaaaaaacattttctcccccaccctctctcttccctgttaagaccatcccaaaatgcttcaagtaaaaaataacaagttta

SEQ ID NO: 463 - DNA, 468 bp, Homo sapiens
gtttttgacgctggtcatcagtttcctttgcttctggatgccttctgcaccttgctgttggggcatcctcaatgcccatctgcagctcagcccacaggcccgtcctgggcagggtgccggggcctcaccatgcccaatggcagcaagccctgctcctagtacccccggggcttcccgtttcttgcatcaaacagcccctttggagaatctgatgacaggtgtggaagctttcccgagaggcagccactttagagggtctgacgctccccactagagagtcggcccacagtgcagacaaaacgcagatcttcctctagagagaacagaaggctggagaggagacgcggagccggtccgtggagtccgccagcctgggaaacagctgggcgctggggaagctgcagcctccctgctcccctgccaggcgtcgggcgagagctgttctgttccctgacaagcgcgtgggcc

SEQ ID NO: 464 - DNA, 476 bp, Homo sapiens
gtatttcaccgtgtttgcctggatggtctcgatctcctgaccttgtgatccacctgcctcggtctcccgaagtgtggggattacaggcgtgagccactgtgcccggccaaatccagaatccttcaccagtacccaacagtccatccacaatcttaacgattgccctctactgctccttgggccccctgtccccaaaagcctgtccaggcaagactcacagcctcagatgagtggcaaccaccagaagcggccgtctcagggctactgccatttgctttcgtgttcctcttcgctgctgctggaacaccagggcggtttctctgccaatattctttgaactttttcttggctgcagctaatttactctgtccagtttcttctgccattgtggggtggggagggaggcggggctggggccacgtcagccaaatcccagcgagcgctgatcaacacgtccagtcacccttaaagaatca

SEQ ID NO: 465 - DNA, 758 bp, Homo sapiens
  misc_feature (709)..(709): n is a, c, g, or t
caattataggaaaggctttattatagtttgaaagattgatattttgaggagaaaggcaccaaattattatttttactattttttgcatatggcacaaaggagatatgtgaagttcccactgtagagtttttaaaacctcccatcttggatcagtgtggcttcttcggtgaggtatcctgtcttcagagtttaaagcatttctcattgtatctatgaatagtcacacagccatgataggacactggcctgggcattgcagctacccctgtgatgatacttgttgcaggatcataacagagaatagtgtctgtggcttctccattttcccgtcttccgcccaggatatatattttaccattacacacagacataccacagttttcctgacggctgaatgtattctgtacgtgcatccagtaatcttcaactggatcgtaacagtatattgccttggtcagtccaccggcaacatagatcaggttgtttagggatacagctgttatacaccttttggcaattgggatagctgcacgaagtagccaagaattggtttctggatcataagattgaaccttatcagaacaagtattatcatcaggtcctccaccaatcacaaacagtttgcctacacagctagtcactgcaggagaactcacggcttccttaaggggagcactcagtccatcgatttgaaaaagaatcatacatnctaccgctgctagtctggttggcccatcatagccacccgacacatatac

SEQ ID NO: 466 - DNA, 479 bp, Homo sapiens
ttaaaaggaagtcatatgaattttaaaacagggaatgttcaaaatggtccaaatcggttattattaaaataaatcctgaatacaattaaagacaattttatatatatatatatatatatatatatatatatatatatatatggaattttaagaaaattaaattctctttcaaattagttttctaccaaatccaggatagataaaagcagagctggaatgattttgaaatctaaacttattttggctttgaataactttcaattcgattctcctaatacagaacatctgtttttggttgtggttatacgaagctgttatttcacagatagagggaaatggcagagaactgatcagaatccctttcgtggggtattttttttagaaaggaaaataaactaaggacaacattacattttccccaacccctcaatgtgtagactgagatcctgaatatcttgtcaaccattccagtttaacac

SEQ ID NO: 467 - DNA, 545 bp, Homo sapiens
tttttaacactctatccttttattccttcccaggctattgcaggaaaagtcttgtttcccaaacgctgtgcctttctcctcttgccttcaaccctggaggggcccaactacacaagtggcttatttggagaagggaatgaggttgaataaagaaagctcagcttccagaacaccacactctcttggttttctctgaccttaaggtaactccttctcagtcctttggctgatttcccatttcccagagagcccaagggctccatccatggctcttttctgttgcttctcagtaatactcagagacaatctcagtggcccctccagctgcatggctttaaatgccactgacatgctgatggttcagtagggggcgctgtggtgccctgccagatcccttcacacagccagtgcccaggacccccacccccaacacactaccatgcatggtagctgccagatgcctacagcctcttttccagagacttgccctcaactgaagtcacttgccttcaaatgtacccacactcccagagaacttctcacag

SEQ ID NO: 468 - DNA, 683 bp, Homo sapiens
ttctcctttttggtatcttctgttttaattttcttaggtttataatcagcatcatcctcatctcgaggtctctttaatggctttatatcctctttaggaggaacaaaatagccatcatcttcaggttcatctttaatttgtggtggactagagaagccattttccttctccttctttatttttgcatccccagaggctcgaaccttttcctcttttcgtttttccttgactctgactttatgtgtgcctttatgcttttctgagcttccatctttgtgtttggtcttctccttctctttgtgtttcttttcagaatctttatgttcactgttgctatgcttggacttttcccggtccttctccttcttgtgttctttgtgccggtgttctcgatctttgtgtttatctttgtgtttatgagaatcattcaatcggaaatccgcttcgatctgggaatcgttgtggaggtggtccccactcatgtcggcccggaaggacgagcgcggcagcaagctaggcggcgtgttggagactcaaacggcgaaccggcctgtgcgggcggacggtgacttctgaggctcgaagaggcacacgtcaacggcggttactgtgggcccgagactccagagacggatgaagctgctaccacggcagcgactctgcctgactgctggcaggcggcg

SEQ ID NO: 469 - DNA, 551 bp, Homo sapiens
gagacggggtctcattctgacacccagactggagtgcagtggcatgatcctggctcactgcaacctctacagcctgggtccaagcgattctcctgcctcagcctcccgagtagataggattacaagtgccctgccactacacctggctaatttttgtatttatagtagagacagggttttgccatgttggccaggctgttctcaaactcctaaccctcaagtgatccagctttattagtgtaattacactttatcagtgtaataaggcaaactttgctcaccacagacttcctccccctaccccctcccacagcctgtgtcactacctccccatcagaggcctcacttcctgtagcttggggtgttatttaagcttctgccatctggcccacattaaaaaatgtatatgctttttctcctgttaatctgtctattgtcagcttgttttatagattcaaattcttaaaccttcaaggtctagaaaggaagttccttctacccctccaatagtataaagaagtggagccttttggtaggtgatagagtcatga

SEQ ID NO: 470 - DNA, 743 bp, Homo sapiens
gcggccgctccaccgcgaacttctccgcgcactgcgcgcacagcgcctgggcctgggtgtccgcccgcgacgccagcgtccgcgcctgctgctcgggctccaggtacgacacgcagatgaagtcctgtacggaggagcgggaggcccgggccttgttgagagtacgccggcgctcccagcggtggatggagtcctgcacctccacactcagctgccgggtcaccgtgatcttgtcgtagctcttgatgtgctccagggccccgtaggtggtggtcagatagtaggaaccctcccccagctgcagggcggggtccatgagctccatcatgtactccacattgagaagcatctccgtgaggttgctgcgggccagcacatacatgagcacaggcaggaagtcatccgccccatagggcttccctgggttgccgagggccatggagtcgtagatgagtttgcaggtcttgagcaggatggagatcttcttctcaggtgagtaggccttgtgcatgctggtgaacttctgcaggatcttctccatcatgggcacctccggcacgctggtggtcacacctaggtcagtggtggtggtggccaggatcactaactggttctgcttgagctgctgcagcgaaccatacttgctgtgatctgatgcaggcatgagttgatggcttccttcagggcttcaagacacatttgtacaatgcagactctacaattgcttcgagctccttctcgga

SEQ ID NO: 471 - DNA, 784 bp, Homo sapiens
  misc_feature (621)..(621): n is a, c, g, or t
  misc_feature (626)..(626): n is a, c, g, or t
  misc_feature (699)..(699): n is a, c, g, or t
  misc_feature (750)..(750): n is a, c, g, or t
gctgaattgctgattttcctttttcaatagaatttaattctggagtgtgagcaggaaccagttaactacattcattgtccaacccccactggtttgaaagaagactccaaattcttggcatatgaatcagctgttcggtagctccaccttatccctgcagcgaagcagcagaaccgccaatggcggcacctcaggattcacactgtgggtggtgaggccttccgctgaaggaggtactggtggatgctctcagcatctcgctttagccaggcagcattcagcagaatattttcacaacactgctggatggtacgctcagctgaaggagctgggtgactctcgaagaaagccttaacctctccagccattttatcaactgcaaatccctcaactgatagctttattagtctggatattaagaatcctccctggtatcggttataaagttcttcccagttgtcctttatgaatttccaagcagctttcctaccatgcttgctgcctccagctactccaccaattaccgatacagtgtcctgtggacgtacctcttctgaaagtgcaaacgtgaggactttttgaatcaggtcaggcaaaagagtagcgccaaggactctatcnattcngttttctcttcttgatatctgcttgttatgagttttaacataatatctaaagagtgccatcaccatgcttcanaacagtcagatagacaggactcctcagatcagccggagagaatctgttttnccttcacgtggtcctttaaccgacgacggggctc

SEQ ID NO: 472 - DNA, 559 bp, Homo sapiens
  misc_feature (244)..(245): n is a, c, g, or t
  misc_feature (501)..(501): n is a, c, g, or t
gcggccgcagctcaccaccatcctgcccgccaaaaccgtcccgaagagggctggcagtggtagaggtggctgtggctctgggggtcccactccctgccgaggcctcactaggcactcctggacagtggtaggaggggagcaggggacagggcaggtaactctccactcccatcctggcccggccaggctcaggctccaagggctctgacgaagaccctggtaactgagggagagcctgacttanngggctgcggctggcacgggctgtccatggcagcagtgtcttcatcccccgggcatggagggcaccgcccgggcccatggtgccaccctcctccgcctcctcctccgcctccacttgatgcagctgggggccaccgggcctggtgtggggcagggtgaggcagggcagacagcaagagctcttctcgtgccctgggggttgcttgctggtccccaagtcctctgcggtccctaagggcttgggaagggacccttcanggtggctagagaaaggaaaaaaaaaaagggatgtgagagaaactagagacaggcaggc

SEQ ID NO: 473 - DNA, 551 bp, Homo sapiens
  misc_feature (490)..(490): n is a, c, g, or t
tttactgttgacctgtcactgtttattatttcagcactaaaactgaggagcctcaactgctggctcttcttccctttgtatttgtgtaaggagcactgcactcccataaaaggttttaaaatacaaaatgtacaagaacacacaattccaagtgctgtaaacataactgagaaccagttcctttactaaacatccattttataaaacacaaggtttcaatttgagcccatctgagccttaaagatccattctgaataccaaaaacagggcttcacagccaggcccagaagaggtctggtgataatggctggccctgggtggggatagtttacacccgggcagcagcaccacacatgaacccaaagacatgttctttttaaagctgttttcagccatgtttctctgtgcatctccagtaagcagaaggctacccattccattcctcaacccaagagctagcacagttagagtaggagggggtgcgtactancacgtgcccagttgctcaatgctgctagtagaaattgatttgcatagtccaatggatgtgt

SEQ ID NO: 474 - DNA, 774 bp, Homo sapiens
gtaatacatttttatccacatttgcttttgaataaagaaacttctaagactctgtatgcaaattaatggaatcacaagataataaagctttgattcatagacactcatttatccctccccccttccacttctcagaccacagagaacgtttgctcaaggcggatttaaattgaggagtttgttcaaaagtcttcctcgacctcaatcctatgattgtcgcagagcaacatgaagctagcagcactgactccaggaaaaaacgagcataacccagtgttgaaccccagcgtgtgggctgcagaggcaacatcagtcatcaagtccgcaagcacacaccaccagagaccctgagaatgtggctctctttctgcaacgcccttgtccaggcacccttagagatccagaattcagcatgtccttacattcctgagccacaccccggccaccatcccttgtgaggaaaagagggggtgagttaaacgaaaacgtcctaagcagccactcaggcccacactcttgggctcatatgcattctccagcacggaacgagaccttagacagcaagaggctacgtgccagttctttctctaatggctgagtcacctactgatttctcctttgctttttccatttaaactaaactcctctactcctcagagctcacctgccagaaccccgcttgggcgcacccctgtcaccggcaaagaagcgcccgatggatcaaggatgccctgtctctgggcctgggaagagcatgcctggcatggccatggt

SEQ ID NO: 475 - DNA, 526 bp, Homo sapiens
ctcattttagacctaagagttttttgttataagacaccccagttaagaaatattgaaacataagagacttgaccatcaagggagaaaagaagccaagagtgaaaaatgctatgaaagtaactccagacctgggcggggcgggaggtaggaggaataaggagaaaaggaggcataagtggaaaggccaggggcctgtcatctcagcagctccgagacttgtcatgtttgaaagtgcaaatgtcaatgggattttacccatcttgaggttgtgatcttttaaaaagctcaatgaatgaggaagtcaattccttcaaatgcaaaatagctggctttctggctggaggtttgttgggtctggggtatttcttccccatctacctcctctcccacccccaccccattccccaaagaaaggtacaaaaggttgcagttctgcagcattaccgttacagggaaggcactggttacccaccagcgggcggaaggaagacagggtcgtgtcacttcaaagctaagtgccatagtg

SEQ ID NO: 476 - DNA, 673 bp, Homo sapiens
  misc_feature (619)..(619): n is a, c, g, or t
  misc_feature (625)..(625): n is a, c, g, or t
  misc_feature (655)..(655): n is a, c, g, or t
tatcattaactttggaaactcttgaagcagttaaagtaattgatgttggagtatgctgaaatgcagtatataattccacaggaacctcatcaccactctcagttgcactggtatcaccatctgacatattttcccttttccggcgttgtagtagcactgccctctctttatccaaattcctaggctgacaacgttcacatagatatgtatcaggaatatgctgcctatcaatccccatgcagtcaatatgttgccaaacgctgcatttgtcacaacagatcatgtatccatcatcatgtgtaaaaccacatatgcacctggttacatcagtaccataacttccatcctcagatgtgctgattgtagtagcactggaagtttcatcaaaattaggagtggtaaatatgcctacttcatttttgctaataaggactgatggaggaggggaagccggaggtgtcggaggaggacgagcaccataattatggtccgcatagggcaaaccaatgtaactgtgtgaatgatgtgagctgctggtatataactggtggggataactgttggatttctcaactaccacagggctagcttctacggattctggttctgaacctgcagncatttncaagtatgacgtctctgctgtatcaacccncaatgggatcactatgct

SEQ ID NO: 477 - DNA, 397 bp, Homo sapiens
tttaaataaaactgtagtttggcttcatacctttaattcctctttcagcatgactacttcttctctaagatcatcccgttcactccttacggaatcaaagaactctttctgcctctctaatgcctgagtgtgcagcagagccaagagaaagaagaagatttgcacagatgagcaagttacttcagaagcaggaaccagaaggaggcttctaccatctaaaacactagtggactctagacattaaagagactctgcctaaagatactaacaaaatccaagtattaagcttttcgcttagtatatataatccaagaaatgttactgttcatactccatgaaagacatgcgcatcttgaagcacacggacacagcacggggccccagaggttactatatt

SEQ ID NO: 478 - DNA, 727 bp, Homo sapiens
  misc_feature (450)..(450): n is a, c, g, or t
  misc_feature (546)..(546): n is a, c, g, or t
  misc_feature (576)..(576): n is a, c, g, or t
  misc_feature (613)..(613): n is a, c, g, or t
  misc_feature (628)..(628): n is a, c, g, or t
cttcctcttcccttcgtcttttcctttctctttcttccctttctctctcccgttctttttctctttcttctctttcttgcttctccttttttagacgctcatcacgatcaggttcttcggttcttttccttaacttttcttttaattcttctacagtagctttaattttggcatagcccatgtgttgttttcccatcaaatggtcatctacccgggactgggcatctcctactattaaaaaggctccacatacttcacaaacttccatttgtttttcttgtgcagcaaagctttcaattgtcgacgttgtggaccttagcagttctctctcttcttttaattgctcaactaatttcatcatcccctgggcttcttctacttttccttcagaccctaattcttcaatctgttgcagaagtacatcaattttgtctgttagaacctgaattntttcttcatttttgcctgttgggccagcggccccagaagactgctggttttgagataatgccaaacgagcatggcctcgtctgatcctacgttctnacttctgcagtaagctctgaagtatcgcanaaaatctctctcatagccaaacttcatgaaacgagangctctctcatactgntttcgagatttcatcatgaatttttacacggaccagatcccgacgtggattgggacaattccgaggacaaaaccccagagatatattacaaacgcctct

SEQ ID NO: 479 - DNA, 523 bp, Homo sapiens
tttttttttttttgaagaggcaatttaattgaccaagttgaaaaaagtcattgtgaatgtgtgtatacatgattgtggccagttactcatttaaaaagaaactaaaacaaagccagaaggaataacatcctagaaagtgacaaatgactcctgcaagatacataaacctaaccttctagatacatacacagaaccttccattattgttttctgcaagaaacaatatgctctggcccatgatacttctgcagagcagcctccgtttttggcaaattcacttcaaattcagcccagctttatgaccccccgtctggttggtcctgtaaaatctgatagccgatatactgaacacctcctgtgagcgtcctgtgttacatactacataggtttccccttgagccttaacacctctgagacacaggtattattatccctatcttatagataaggaaactaaggctcaggatggttaaataatacatcagttatcttacttacgatgtcaggacttgaatcgaggact

SEQ ID NO: 480 - DNA, 645 bp, Homo sapiens
cttgggcgttggaccccgcatcttattagcaaccagggagatttctccattttcctcttgtctacagtgcggctacaaatctgggatttttttattacttctttttttttcgaactacacttgggctcctttttttgtgctcgacttttccaccctttttccctccctcctgtgctgctgctttttgatctcttcgactaaaatttttttatccggagtgtatttaatcggttctgttctggcctctccacaacccccacccccctccctccggtgtgtgtgccgctgccgctgttgccgccgccgctgctgctgctgctcgccccgtcgttacaccaacccgaggctctttgtttcccctcttggatctgttgagtttctttgttgaagaagccagcatgggtgcccagttctccaagaccgcagcgaagggagaagccgccgcggagaggcctggggaggcggctgtggcctcgtcgccttccaaagcgaacggacaggagaatggccacgtgaaggtaaacggcacgcttcgcccgcggccgccgagtcaggcgcaaggaggagctggaggccaacggcagggccccggccgtcgacaaggaggagcccgcggccgacgggaagcgggcggcgtccccttcc

SEQ ID NO: 481 - DNA, 577 bp, Homo sapiens
gtataatcagtgcttcataaaggcatcctaatttttatatctttaaagacaacctaccatgaaataagaagaatccataattataattctaaaaaccatgtaatcaacttgtgtccatgaactcacgcatagcagcatcctctactcagggacacattatgttgctatgaatccttttaagaattctttgagtttttcttcctttctacttctacctcattatattctacactttcttaactaccttgcagtcaaaagccaaactacctgggatgctgctcctctagtttgtcttcagctaaggatagaggcaaagaatgagggaaggggaggaaaaagggagcagggatacgagaaacagaaaggaagaaaaaagaatccttttattttccaccctctcttcgcccattttttttcttttcccttcactgtacatctaattcttttgacccacttcaattttcatcatagtaggtagagccacatcttgagaaaccttaaaactatagatttactacaaaaaagatgagctaatacaaagtctaaagtaaactaaaagaggggttgatttacatct

SEQ ID NO: 482 - DNA, 691 bp, Homo sapiens
cttctgaggatctccgaggtaaaactggttgtcccatcttacgaagaggagctagctgccattttttaatttcattatctctacagtctgatgaatttctgccttcaccagactcccgttttaaaattttgaccttgtgcttcactgtatcatctatatatttggttctatcatttgttgtgtgttttgataatccaagcttttcacactccattgttttatctccactatggaattcaactgtagcttggttttccaaagtatctggatctagtatttcagtctttttgtcttcttcagcacaacattttacacagacatattctttgtcttcctcgcccatctgctgtgcttgagaaagacttaacccaacacaatcaccatgaaaccagtcatcacatctcccacagccaaccataaacctgttgccatgtggttggttgcaaaacccacactgcttgctgggagtccacatatatttgctttcaaatgaggagctatgatcagagccttctctttctatggtacctatgttatctggaatgaacaatggtggctgatctaaaggaaaacttgtgcttgctgttctgttgccgggttgtaggttcttctcaggttgtttcaatgtcaatttatcctgctgcttgaaatgcctgaccccctgaggttcaacctcttgcgtcaccttact

SEQ ID NO: 483 - DNA, 486 bp, Homo sapiens
  misc_feature (310)..(310): n is a, c, g, or t
tttttgagacggagtcttgctctgtcatccaggctggagtgcagtggcgctatcttggctctgtaacctctgccttcagggttcaagcaatcctcctgcctcagcctcttgagtagctggaattacaagtgtacgccaccatgcctggctaatttttgtatttttagtggagacggggtttcaccatgttggccaggctgttctcgaactcctgacctcgtgatccacccacattgtcctcccaagtgctgggattacaggcgtgagccactgtgccatgaggattagtaaagtgcactcatgttaagtnaaaaatttgttttatgtttatgccgattatttgaagggtataataccttagacacaatcaaaacccatggggaacatctttagaattcatttttctcttttcttacaaaaaaagtaaataggtaaaatggaaaatagaagacaacctatcctatcctggatgagacacacacatat

SEQ ID NO: 484 - DNA, 485 bp, Homo sapiens
aatttttggtagagatgggggtttcactatgttggctgggctggtctcaaactgctgacctcacgtgatccacctgcctcggcctcccagggtgctaagattacaggcgtgagccaccgcgcctggcaaatttttaacttaaaaataaaatctgagagcaccattaactataaagtcattaatatgtctaagaaaattcacaaacctcaaagttaaaatatagctttataatctaaattaaaatgactatgattactatgtagcacacgcttaagatataattgtttgggaaataatttcaaatacatggcttcatttcaaaaggcagaggaatgttttctaaaacagatctgtcaagcaacatacaaggtatgtatcaaaacttttatcatattgttatagaaaacatgctacttgaatgttacataaaccatcaagtcacatatttataacctaaggatcagaatatccttcaatttaaattg

SEQ ID NO: 485 - DNA, 406 bp, Homo sapiens
ctgctttaaaaaattctgatcaacaattgaagaaataatagcaaagtttcttattaaaaagaacattttacattatacaatcactgaagcaacattaaaatgtactcttacattcaatgaaaaagagagggacagagtatgagaaataacccaccttctcatactccaaatacgtgggtactcagtaatgaaagtcacattaacaaagaaaagcaagttctcgcttgaggactgagaaaaaccaagtaatcctgagacaaattctgatgggtgaaaaagatgaaactgagattgcactctacagccccaaattgatattgcaataccccctatcagtcacaatgtaaagaggcctacaggtgtgcactgaattattcccaaaaccattcacccttccccacaccgt

SEQ ID NO: 486 - DNA, 510 bp, Homo sapiens
tttttgtagagacagagtctccctatgttgcctaggcttgtctcaaactcctggactcaagtgatctgtccaccttggtctctcaaagtgctgggattataggtgtgagccattgcacctggccaccaaatggatttttcaattcagttctggctaaatgaaaattcttcctataattttgataattatttcactgccagtcttagttttttaatgctggatgttttgaggggccagtaggtatcactttaaactaaaagctcccaatattttaaataaattttgattgagggtttacagaggtaaatgcaaaaataagctgttaatatgcaatctgtaaaaaaggtactaggttagagaaaaaaatgaaacatgtctaagttcagtgctgtttttaatcagggctgtatgccacctaacagagtgcctttgaaaacaagtttattgcatgctgatgcctagagaattcaatatgactctgataagcaaaacagataaagcaattggctt

SEQ ID NO: 487 - DNA, 514 bp, Homo sapiens
ttttttgttaatacaccacatagttgatggtattttattatagcagcctgaggggactaagacataagcaaatgcattgttgataaaacattctgtcaataacgtaaactgtgaaaattccaggaccaatcttgtaacatgagataaataagaatatttattatgcatgttttatacagtaacaccaaaataacgctcaataagttacacagctgttttctagaaacatggcaaaagaaaaaaaacagtaggaataatatgtattactcaaaattgaaaatatggtcatcttttaaacagatttgaattcatgatttctacgtaaacaaaaacatcataaatatctagaaataatcttttttaacaatgcactagatactatttaaaggctcaggtttaattggacattatttggtttaggcttatttgatcaatacatgcagaaaaataaattacaaacgtgaatttttaaaaggaatcaggatgtcattttgtactacaaaaattagatgag

SEQ ID NO: 488 - DNA, 433 bp, Homo sapiens
gcgtcgacctgccaccacctccaaagttgcttgcacagcagcatccacctccagatcgacaggcagtacctggaagaccaggcccctttccctccaagcagcaagtagctgatgaagatgaaatatggaagcaaagacgaagacaacaatcagaaatttctgcagcagtagaacgtgctcgtaaacggcgtgaagaggaagagcgaagaatggaagaacagaggaaggcagcttgtgcggagaaactgaaacgattggatgagaagcttggcatcctggaaaaacaaccatctccagaggaaattagggaaagggagcgagaaaaagaacgggagcgtgagaaagaacttgaaaaagaacaagaacaggagcgagagaaggagagggaaaaagacagagagagacagcaggaaaaggagaaagagctggagaa

SEQ ID NO: 489 - DNA, 786 bp, Homo sapiens
  misc_feature (115)..(115): n is a, c, g, or t
  misc_feature (325)..(325): n is a, c, g, or t
  misc_feature (405)..(405): n is a, c, g, or t
  misc_feature (513)..(513): n is a, c, g, or t
  misc_feature (639)..(639): n is a, c, g, or t
aaacaatggtttgaaacaattattggaatattgtccacaataagctggaagtttgttgtagtatgcctcaaatataactgactgtatactatagtggtaagcttttcaaacagcnccttagcacttttatactaattaacccatttgtgcattgagttttcttttaaaaatgcttgttgtgaaagacacagatacccagtatgcttaacgtgaaaagaaaatgtgttctgttttgtaaaggaactttcaagtattgttgtaaatacttggacagaggttgctgaactttaaaaaaaattaatttattattataatgacctaattnattaatctgaagattaaccatttttttgtcttagaatatcaaaaagaaaaagaaaaaggtgttctagctgtttgcatcanaggaaaaaaagatttattatcaaggagcaatatttttatcttttccaaaataaatttgttaatgatacattacaaaaatagattgacatcagcctgattagtataaantttgttggtaattaatccattcctggcataaaaagtctttatcaaaaaaaattgtagatgcttgctttttgtgtttcaatcatggccatattatgaaaatactaacaggatataggacaaggtgtnaattttgttatgattattttaaagatatgatttatcctgagtgctgaatctattactctattactttggttcctgttgtgctcttgtaaaagaaaaatatattctctgaagaaataaatagatttatggcacttggagtgcatcata

SEQ ID NO: 490 - DNA, 595 bp, Homo sapiens
tctcaacatggaaaaactgttcaggcacaaagattaaacaagcccgcgttgcatcccttggattgtactgaatcactgggtcccccagcctccctacctacccctgcaccccagatctgccttccccatattcatggcctcctcctccaaagcagcccaaagcagcaatgatatttactattttatatcaatctcttgctatatatatatatatctatatatctatatatttgtctatcctatatatacataggattttaatgctttgaatgagtgaaggagtgaatagggaaagagcacatgagtgaggtgtaaatgtcaccaaatgcattaagggacatatttgtaggagctggacatgggaaagggactattaaccaacgtggccttgccaggctgaaaaaagttttcctgggcgggataaaggagtagcaagcaagggggtcaccgaggccccaggtaaaggcatgcggggggccggaggagtcatggtgcagtaacaaggaaggaagacgtagatgagtgaggccgatgaaagaataacacgagggtacatgtataggatgagagagataggaggacaagataaaggggg

SEQ ID NO: 491 - DNA, 595 bp, Homo sapiens
aatcaatgatgaaattattatgaaaatagtcaatgaaagcagaaaccaactttactactagcattaaaagtctcttagaccagataagcaaagaataaactataatgtagtactcaagtaaactgaggtagtagaaagtattgaaaactttatccacccacctttctatttacattacttacaagagtttggttccatattagccttaacactctatagtatgtacaaaggcaacaattgagaagtgaaaatctttgaaaaaaatacacttttggaagggaggggctcttagaaaaaaagagaataattttaagagttatgaatagtgtaaattgaggattattaagcagtgaaacaaatattcagctcctatgggttcatgagggttgataccaaaagcaagggccttggctacctgagcacttttaaagaatatagtattgtttttgccgatgctttggtgcaatttttaatcctaattttcatttatgttaaattagtgaatatgtaaatattaatatttataagaacagttcatacttataaacaaatggtataaagtagtattctcattttgggaatctcagccttaaaa

SEQ ID NO: 492 - DNA, 485 bp, Homo sapiens
tttcaattaaatctcttttatttataaattactcagtctcgggtatgtcattagcagtgggagaacaggtaatattagcaccatgaaaacaggtaatattttactatgattttgatttgtattttcccagttattagtgatattgagcatattttcatatacctgttggtataagaaataaattctttgctcattttaaaatggagttatcagttccaatatgcttctaaagattagttggggctttgctgtaacatctagacatgtatatctgatttggaacaaatccacttcctctctgtgtagtgcctggcactactggcacctttgtcattcaaataggcacactctcctgctcccaggataggaaacctgcaagagaagaagcagaatcagttggccactgaacatttcttcaacagcagagagaatgaagatgagaaaatgagaaaactaacattaattcagcctctaaaaataatgct

SEQ ID NO: 493 - DNA, 590 bp, Homo sapiens
ttggcatatgaattttaatatataaaacaacaaatatagattcacagcatttaaaaaaatcattcaaataacattgtaaataatttttttttacaaaaaacttcaacaaaaatacatatcaagttacatcaatcttgtacactatactttggctgtcaacagcaaattcctcagttcagaagtcccattctttgacctatacagatgacacatcatcttgaagttaatgagctaaaatgttgcccaaagccttgcaaagtaggttagcgagtcatacagaatggacactaatatttacaaaaaaagattagaaagattaaaagtattttctaaatataaaatgtcagtgcctgtgagataactaaaggcaacaatgtaaagtatgttgtagctaagtaaacttgtatcaaatatttaagcttttgctttttttttcaagatcagtcatgttccacttatttttccaaagccttttgaaatccactttcattgcatcctgaaaacaatgagactttaatagaacaatttgcagattaggttattatgggaaagctgggtctgctagtagtttcacctagttgacttgggtc

SEQ ID NO: 494 - DNA, 303 bp, Homo sapiens
catccttgcctaatttcattttcttctgggtcttttgttttctttctggagaatctagcaagatatctggtggaacatctcgaggtgatgaacaaggtagagactgagattgtaggattaaaggtggtcttgagcctttaggagttccttcacttccagcaggggagcatactggctgtggagatctcaagggaaaagatgcagcattcctcattgttgaagaatctccatcgtcactacttagcctgtgcaccatgtgtaggtagtcctcacttgaaccatgtctaggattatcagcatgat

SEQ ID NO: 495 - DNA, 514 bp, Homo sapiens
gtaagtcatcagttttacctacttttccagcaagacggtcattgtttcttaatgacttttaaaatccttttagagattaaggatattaatcttttatgattaaatgtgttgcaaatatatatatatatatagtgcccaggtattctgggaattccccagattcctggtactcccccttcactgagcaaaccctaaacagaatgtaaagtagcatgttccctgctgcggaaaaaaaactcagcatgatgagatgcctgaaaggtcatctaattcaacatactcatttctcccatgaggaaaccaaggacttgagagaagtggttaagctgctgggggcccacacgaggcccagaaactgaaccagctgagtcagcacactttccatctacacaggattttttcagatacacattatgcctacattgtatagcccatacttaatttccttaatattttaagcacaatgctcatatagctagatagacatgccaaattattcacacagtagcaacct

SEQ ID NO: 496 - DNA, 588 bp, Homo sapiens
ttttttagaatcaaaaatagtacttttattgctggttatgctttcttaaaagtaaaaattattcttgattgatgtgacttgccagaatgtttgaaacaccagtgaccaagggtcactatatctgcccccaaacaattccaccatgcttacttatatagcactcaccaaaccagaagagaggctgggatattctcaggccactgcactgagcatcaatatgaaagaaccatgaatgatgcaacaactgagttgatcttctacctcctctgcccaccctgactttgcaccccaaattctttcagtgtcttttcaaggtacaaccctccttctgggcacaggttggctgggtcacctcaaggtatgttccttcattctgcagtgatttcctgcctctgctcaattaaggaagttgagaatacagataactcaggatcatgtttaattatgtaaaaaagctctaaagtcaggtaatggttgtcatgtgcttctcttgagcagtctgaggagagaatagaaacagaaacctcttggggcctcagtagacgcagctggccgtcacaggcagaggctctggtaagtgcaggaagc

SEQ ID NO: 497 - DNA, 619 bp, Homo sapiens
tttttttttttttttttaacatcgcatggcagatgggtgttggaataattactttctccacaatctatcattttaatagtttataatagtgcagttcatggaaacatgccaagtccaacaaaagcacaacagattagattacagtcagattgagaagactggtgtgcgttggcagatagacgtgctggacatgctccacacgcgacctgcagacgggacatgactgggaaagaaaagccacagtctctgttagcatgcaagcctcggtggggggcctgtgtctctgtgcacaccctggtctctagtgcatttaattttctaaatcaattgtgatcacagtgatttctagctttcaattggtagagatctttgctgtctcacaggttgaaagtttatactttacaagggcttaaaaataaatactatgacatagtataaactgaaggaaattaattacatttttagtgaaacgctaaagaaggtacattgaataaagcaattactgaagacgtctttctgtgcagaatgtggtctctacatgagtagactataacacttcaggcagcaatgcaggagaccttcttgaaattgtgtgtccttagctcagctgactgactca

SEQ ID NO: 498 - DNA, 646 bp, Homo sapiens
  misc_feature (624)..(624): n is a, c, g, or t
tttttttttttttttttgcagaaatattcccaacagtgggtatttttacaaacagtatctttcagcctgtctgtagggcctttgatactgtctacagtttttttaattgaatatctaaaagttattacaaaaatggaaatataggggaaatgacctgcagaaatcaaataatttaaatcaaattaaattttactcttctccctaaaaatttgcttcattcttttagaggaaaaagtacatagaaaactgttgctgttctctacaaagatgacggctcctacctttttgattttctttatcagatcctgaaaccagtgatttgtagagactggaagtagggttgattttaatgagttgtaatagatcctgcatagtaaataccttaagaaaaaataggttactaagtagacatatttttatatcagtgtttaaatgataaattaggatatgtttctgaatatgaaattaagaaacatccttcagattaaataagattataactatgctaataaagcaaatttcaagctctttcttacactgttaaataaattactataaacatatcaaggtcaaaaggataaaatatctttatcatctaattaacttctaagtacttcacatcanagatgatatgcctaaatgttta

SEQ ID NO: 499 - DNA, 478 bp, Homo sapiens
  misc_feature (72)..(72): n is a, c, g, or t
tttttttttttttttttgcgtgaatgaagaaacaggcataaggtgggaaatattaaactacagacttttctnggtggtgttatcattacagtggtaactaatgtagaagtcctagatccttacccgctgagttaaactagcttctaagaggcaggtcagcaaccgacgtcctactgtctttgaacactcagtgctgaccagagattaacatagggcatgcaatactaaaattggtttgcatttcactttctgcttcaacgttcagtaaatccatcatagccctaccaagtgccagggcagttgctggtcagtggttgtcctagtctttctccacaaacctgaaaaaccctggagatttccaaaccccttcaggagcagataacatgaggagacaagacctcagggattcagtctagttggaagatagttgtggcttcttctcagagcctattctggaggtccaaattaattggacagg

SEQ ID NO: 500 - DNA, 415 bp, Homo sapiens
ttttttttttttttattaaagttaaggtcttgcaatgttgtacaggctgggtcaaactgactttaataaaggacaaacacacctagcttaaagaaggttaaaaaaagtctattgatagactatcataaaataaaaatggttactccttcattatactcctgttaacatcaaacaaagaaaatttcaggttagaacaagaaaacatcaacaatctcagaaagtgaggctagtggaattaaaagcttatgaaagactaaatggttggatatttaggaaaaaacttgtgacatatcatttggctgtacttaaaatccttagagaaccaattttgccacatctttacatttgaatttttcagtcacccaaaagactgggtagaaacttaacaatgctgtagagattcattctgtctcat

SEQ ID NO: 501 - DNA, 534 bp, Homo sapiens
tttttttttttttttttccagttttgggttttctctttttaattaagatacaattcgcactctaattcagagtctcggcattaacatatattttgttgatctggttgatgattttaaaattatttttcctttgtattctttacctacggctaaatttctaatcttcaaaatgcctacattcatttcatttaccttacattttatcttactcatttttaaagccttcaacattttttgagttttgaaataattctcaatttcttagtctcttaattcttaaatttaaaaaggttgtttcttaccttttaaaatttttaaaaataattatgtcaagtaatttttgaatatagtaacctgattctacatttctcatgggataaattctaaggtaaaaaaaattgcaaataaatcttaaactttatttagtaggtttattattagcagcagatgtctagccagggtagattacttttatcagaccaacctctcaccaacaactactagaagagctagagagggagaaaagtctatttg

SEQ ID NO: 502 - DNA, 557 bp, Homo sapiens
tttttttttttttttttaatgacatggctcttctggtagtggtggcaaaaatatacagatggggtgaccactgatcatttcaaattttacttttgtaagtgagaaactgcctatgtcaaagtggtatgttatttgcaatattaaaaaaacagagatgtaagatcataaagaattgtttctgtatcttatgcactccaaataaaataaaacttttgtgttagcacaataaaatatttaagaattgaccaatttagatgtcttttacaggtatcataggggatatataccatgtgactctgaggtagtaagttcaaaaacaaaacaaaccatgattattctaaaggttaaagtctgtaatttctaaatattatgagttatatgttacaagaaatactttgtttagggaaatcttactattgggatttacttctaacagtgacatgtgaagaaaaatatgtaattctccttaaaaataaactacatatggttatgtaatagccagtctatctagcaaaaggcagacattaccgtagaagttggtggtccccctttgtctc

SEQ ID NO: 503 - DNA, 492 bp, Homo sapiens
tttttttttttttttttaatgattttaccactacctttttattttgcaggatgtgtaacaccttcccttgctttgtctgcttggcaaactccactccccttttagggtcacttcttctcagaggatgtgtctaactctctgcctttcatgcataataaaggccctgtcatctattctcccagagatcttgatatctttttataacatcaccaacattatatcactgatactcttcatagcagactgcatgctccatgaaggtaggaataatcatctttacaacatcagtgccttgctcagtgaatggccataaaagttcagtgagtgaatgcttaataacttgaagtgaaaggagataaaaaaatcatagtaactcagaatgcacagcaactaactgagaggttgccttgtccaattctctaattcttctattgcttagctaaatatatgtagggtttttcctcctgattttagaatattacaatttatctc

SEQ ID NO: 504 - DNA, 454 bp, Homo sapiens
cggccgcagcttccacaccgatccctacccgcccctctttattttctgtctggtgggggcgagggttgggggtgtgattgcctctaaaagcaaagctagaaaacatttaatttagtgtatgtaattccgttcctcccgatgctcccgcctctagcaaccacaacgcggtatctggagctggtttcatgtatcataagttgatttctcccccagcctccgaaaagctttaggtactgggaagggaaagaaggtgcacttgtcttcaaaaggcagaatggcactcgacagtattggcagagattcttgccaaacactggtcatccagcaaagaaagtcgggaataaactcctgatcttctcggaggaaaggggcgctgggggccgagtgctggatcccactcaggctcactgcgcctggcaaagcgggggagtggggagtcgggtatggtcttttg

SEQ ID NO: 505 - DNA, 511 bp, Homo sapiens
gttgatttgatcttcttttttgagagtctggatcttttaatgtatgctgtggcatctgttctgcatcagatatttcatctgaagactcattctttcttttttgtttcttacccaatgtaataatgagtttgccaatttttgtcttctcttttaacttagaacatgtttttgtttttttgctgtctttgtcctttggcttggatttcatccttctacctttcttttcctcttttccttcaactgaagcagtaggaaagttttcagggctcattactcgtggaatattgcgttccccacgctcctttgcttttgctatggcctctgatattatacgattagccttttcttgcttgctttctgattccaccttttttctctgcttcttctcagacatgaccctcacctgggtattctgcaacttagtatatgtcccagaaccatcgctcttcttggaagatggaggccgtaaacatgcctctgactataccaaaggaaaaaaccatcaggaatt

SEQ ID NO: 506 - DNA, 380 bp, Homo sapiens
tatacggctgcgagaagacgacagaagggaattatggcgatgaagaatcaagagctcaaacttacattactgtattgaccaggaagtcctataaagaattatatttctatagaattaaaaatgcagttctgtcagcctggacaacaaagtgagacccccatagctacaaaaaaaaaaaaaaaagtttttttaagagttgggcatggtggcacacgcctgtagtcctagcttctcgggaggctgaggtgggaggattgcttgagattgggaggttgaggctgcagtgagccgtgatcacaccactgcactccatcctgggtaacagagtgagaccacttaaattaaaaaaaaaaaaaaaaaaaaaaaaaaagtcgtatcga

SEQ ID NO: 507 - DNA, 613 bp, Homo sapiens
ttcctgattcatatgttgaccatactactaacagtcttctggaaaaaaaatatatacttactttcagttttcctttctttttttaaaatagaatttcttggatggggtaacatactcaatgcttatctacacttggcagtttctttaggttcctatggtttttccaagccattttttcttttccacaacccttggctatgcttcatggacacaaattaggtttgacctgtgagaacatgtaacttacacaatcaggaaagggactgcagactggatcccaagtaggcactactgaaagagaaaagttagctgaaaagcatggattcttgtccaagctctgccattggttacctgtgtgctaaggagctgactatatcctacagaatactgacaaattataatacatcctaacacacacttacctgaattgatgttcagatagaagatacatcatatgttggactccatcgattctgaaggatatctaaacatatgctaccatcagcatacactgcaaagacaatactaaaattagttacacactctgccatatctaacagttaccagaaatcttaccaaacagaatgcttggcttagaagtttaaatattagg

SEQ ID NO: 508 - DNA, 454 bp, Homo sapiens
gcgtcgactttttttttttttgagacagagcctcactctgttgctcaggctggagtgcagtggcacaaactcagctcatgacaacgtatgcctcctgggttcaagcgattctcacgcttcagccaactaagtagctgggatttcaggcatgcgccactcctggctgactttttctatttttagtagagacagagttttgccatggttggccaagctagtctcgaactcttggcctcaagcgatccgcccacctcagcctcccaaagtgctgggattacagacaggcgggagccacagtgcctggccttgcattaatttttaaaatgagaaataatacagtcttgctttcatttaaaactttttccaagaaaccatgagcaaacctgtgtttaccatatatactgtactgaatatttggacatcaccatttcaatgtaaagtcagatgctaataa

SEQ ID NO: 509 - DNA, 584 bp, Homo sapiens
ttttttttttttttttgacacaattaaaggtaatgctaatgcggagggaagggtgggattgattatatttgtcattctgctcccaataagctccaggtttcttacctggacaatataaaacagtaaataccatgctgactgcccagttcaatacactgggctttaaacaaaaggaaaaaataaatcaggagctgtgagtcctcattctgtctgctgctttttagctgtgattcaggcaagtgactagacgcctctggatcagcctcctgtcctctacaaccagatcttttctacacagttctaaactactgcaccaccaggatttgcagagtggccaatgacagttcacaaaggcggaggtgccgtgtctgctaagcttctaagccacatggaagtgcttcagccaacaaatccatgaacattactgtggtccactttcaacacagaaaaatgactagagcttttatgaaacaaaaaagctgcttatctcaggttcagaaacccttgattcaaagaccaatacagaattaacaagtacaatcattatttccaaactttacattatactatacacctcaaattct

SEQ ID NO: 510 - DNA, 468 bp, Homo sapiens
taagttttaggaaatttatttcacatttaaaaaagtattattatgttctatacatcatttcataagatgaagtcacacacaccaatcataagtactaaagaaaggagattgttttcaattttgagataaaatatcattttacatttaaagttacatcaaaataatatttaaaaatcttatcaagcacacatagattttattttctgtgttccttgctccattaaataaatactcacaagatcagcatatttcttacagagagctgccagcttctcctctggagtcgaaagagtgtttagggcttgcatcaataataaaacttcttttcctaatgattaataagattttaaaaagtaccagaagaaggctgaaatcaatccaatctgtaaattttatgtaaacttctatgttaagacattcagagtaaaatgatatagctctaattaaaaacagatttacctattaaat

SEQ ID NO: 511 - DNA, 535 bp, Homo sapiens
ggcgcggggctccaggacacagctgagccggcggtcagagcgagacctgcagcagagacgacggaggcggaagcatctcgatccgggaggcggcggcgtggggagccggggccgcctggggagccggggccgcctgggatgttcagtcatgaaatgagtgcgtaccgaggagatccagatggcagtgtcctgctacctcaaacgctggcagtacgtggactcagacggtcccctgaagcaaggactgcggctgccacagactgctgaagagttggcggccaatctcacggtacacagagaatctcattgtgccgacatagtgtctgcagtcccttgccaggcagagccccagcaatatgaagtacagtttggacgactggggaattttctcatcgattctgattccccgcatagccacgaagtgatgcctctcctttatcctctctttgtctgcctccatctcagcctggtccagaacaatcccaaagtaccgtggaaagttttaccggcgtttcattgaatgtttttgcgaagc

SEQ ID NO: 512 - DNA, 472 bp, Homo sapiens
  misc_feature (455)..(455): n is a, c, g, or t
cacgagggagaaatcaaaagagaattcctccaaagttactaaaaaaagtgacgataatatttcataaacagaaattcaggattctcaaaagaatctagcaaaaaaatcaggtccaaaggagactataaaatcacaggctaaatcttccagtgaaagtaaaataaatcagccagaattggaaacacgcatgagtacaaggtcatcaaaggcagcatctaatgataaagctactaaatccattaataaaaatacggtgactgtgaggggatattcacaagaatctacaaaaaagaaattatctcagaaaaaattagtacatgaaaaccctaaagcaaatgaacagcttaaccggagatcacaaaggctacaacaattaacagaggtttcaagaaggtcgttacgcagtagagaaattcagggtcaagttcaagcagttaaacagagtttgccaccanctaaaaaagagcagtgt

SEQ ID NO: 513 - DNA, 474 bp, Homo sapiens
tagtagagacggggtttcaccgtgttagccaggatggtctcgatctcctgacctcgtgatcggcccgccttggcctcccaaagcatgattctattttatttgggaatagcattcgtgtttgggggcaactgtaactctctatagtggtgtagaacacaagatgacatggtgatgcttctctttcttggtagaacattccattcgtagggtagagaactgattttagaagctacattcagtgccaagttgactgaatgcgattgtggctgtttaataacgtttttatttgggtatgttacataaatgcccaccagagttaaatgaataaggatttctctggcccttaagtggatgggtatctaggaaaaattaacaatgccacataacatgaaaggcttaatgcaatcatctgaaagtattataaaggaattagctgcagtgtttcacccctctctagtatatgtaggtgtttgt

SEQ ID NO: 514 - DNA, 456 bp, Homo sapiens
  misc_feature (205)..(205): n is a, c, g, or t
  misc_feature (219)..(219): n is a, c, g, or t
  misc_feature (229)..(229): n is a, c, g, or t
ggtacatgtcggcgacgctcagcacatcataggctgcctcgggggacagctgcagtgaagacagggatgaaggtgccccccgaggtcaccaagggctcccagggcacaacagccaaggctagggcctgtggtggttggggggcactggcgggaaggcttccagtgggagtaggagctccctgcgcatgtatggggttgggggtcngggggctggcccanattcccacanggatctgcaggaccgctagggggcagaagactggggggttctcccatgccctgagcaggctggcagggcaggcgggaggcagggccctcgcaggagccagggtctgagctccgagttatacagacctgggtctgacacttctagctgtggggccctgggcaagtcactgcacctccctgtgcctctagttcccagtccatgaggtatagataaccatgcctacctgc

SEQ ID NO: 515 - DNA, 507 bp, Homo sapiens
aataaaagttctacttctaaaaacataaattttaagcagtacccaagcttctgtccataatactcttccaagtcacaaaagaatttgaggctggaaaaaaacccatatataaaaaactttacaatagtacaataaatttttataaatgttgttaggaacaaaaccttttaaagacccataaattataattttaaattattctctgtacatattactataatgtcagaaagcaaacaacaggtatttctcacttaactaaaattcatttccaagcacaaattaacctatgtaacaggacacattaaaatttaggtaagtgagagaatgttatcttatccctacgtaattgctattatcagtaagctatgtttactatggttgctctggctcaactctcccaatgagagctagctctttataaagacactaacctaaatgccagcaaaccattgggttaggtaaagaatctagacacaatccacagttttagctattagccctttaccg

SEQ ID NO: 516 - DNA, 372 bp, Homo sapiens
ctttcaggtttggacttcttaaccatctttttgtttttctttttcgaactgccatagtcactatcgtcatcatcttccattaggaaatcttcatcgctgccggaatctttctcctggaatggtgcctcatcttcttctttgggagaaggagtcttttcctttgatgcctttgaagctgtggggcgacccactttccctttgcctttcactggacttggcgtcactgtagcctttagtctgggtttgggcatttccttttctttttttccaggttgggacttctaaaccatctttgtgtttttcttttgcaaactgccataagcactatcgacatcatcttccattaggaaatcttcatcgctgccggaatct

SEQ ID NO: 517 - DNA, 620 bp, Homo sapiens
  misc_feature (524)..(524): n is a, c, g, or t
  misc_feature (617)..(617): n is a, c, g, or t
taacattttccttggggccactttattgcacctggaaggcatgtgagtaagggcgggtcggtgacgtctgaaagggctgagttctggcaagcatagctggcttctccaagaggttcctccacacttcctccctgtgccttgccggctcccgctcagtactgggggccctccctgttgccagatgggccccggacgctggtcacggtcagtgctgtgctatagaacaggctcagcaggaagagggtgaggaaggtgatggtggtgggccacaggttggcgccgggggtctcctcctccagggtctcctgcggcaagtccagcaccacatagggaggcggcatctgccaatctgcaacagagcaagagcccgccaagcggtcgatggtcttctgtgtgaaggccagcggcagggcctcgtggcccaccatgcaggagaaggtgtcccccttcttccagtcctcggctgccacgcgcagtatgctggtcacagcgaaggtggtggtgccctggctgggctcctggcnggatgcccaagtcatgtacttctcgcagggcagctcctgtgacccctggcagcagcgaacaagcaccgtcttggggcttgagcccgcttgccnggc

SEQ ID NO: 518 - DNA, 618 bp, Homo sapiens
  misc_feature (555)..(555): n is a, c, g, or t
tttttttttttttttttgcaaagattcactttatttattcattctcctccaacattagcataattaaagccaaggaggaggaggggggtgaggtgaaagatgagctggaggaccgcaataggggtaggtcccctgtggaaaaagggtcagaggccaaaggatgggagggggtcaggctggaactgaggagcaggtgggggcacttctccctctaacactctcccctgttgaagctctttgtgacgggcgagctcaggccctgatgggtgacttcgcaggcgtagagtttgtgtttctcgtagtctgctttgctcagcgtcagggtgctgctgaggctgtaggtgctgtccttgctgtcctgctctgtgacactctcctgggagttacccgattggagggcgttatccaccttccactgtactttggcctctctgggatagaagttattcagcaggcacacaacagaggcagttccagatttcaactgctcatcagatggcgggaagatgaagacagatggtgcagccacagttcgtttggactccagcttggtcncctggccaaaagtgtacggaggtgagctaccatactgctgacagtaatacactgcaaaatctt

SEQ ID NO: 519 - DNA, 532 bp, Homo sapiens
acgccaaggtgggtcacaccagtccttctgtcctcacgttggcagacagagatctctaccctgaagtctttgtaggggcctgggcatctttgggagcctgagctgaaactgaagctggagctgcagcctgggccttggtttgatccttggctttggcctttggcccacacaacctgagacccttggcaatgcgggcacaagcacacttcccaagcttggggtgggtaatgtaggcaaattgattgagcttgaggctgacaccctttggcatctgggcttaacctcctttggctttatgaggaccttgatagcctcagtacgtgcactcacggccttggcattgttggcctgcatcttctttaggcccttcttgttgcacttcttggcaaagcccatgttcctcaggaacttggggtccacccccttaagagattcatatctttgcaatcggggtttcttgatgccattctgtgccattttcgggactggttgtgtgtggtgtggttcttggacttggccttgccatatgcaa

SEQ ID NO: 520 - DNA, 451 bp, Homo sapiens
gtcctttttaataaaacaaatttctctaagtggttacaacaaaccaaaacaattcttgggagataagtcttctccataagccgtgtggatttgactgaaaatagtaatgtccctttggcataccaagagagcaaaaatgagagaaagatacatagaaaagagtaaaaaaaatagggaagaagagaatgaaagactaatagagcaattcattcaacaatattatttaatcattactaacatttattgaccatttacatgataggcaaagtgctaaaccctttaagttaatttaagcttctacttcacaaaccaacccaatactattatctcaatgttatagacaaagagaatttaaaatcagagaagttgagaaacttgatcagataataagaggccaaagcagaatacaaattctggtcagtcttactccagggagctcttaacctacatg

SEQ ID NO: 521 - DNA, 492 bp, Homo sapiens
tgtagagatcaagtttcactatattacccaggctgatctccaactgggctcctctgcctcccagagtgctgggacagggtctcactctgttgcccaggctggagtgcagtggcatcgtcccggctcactgcagcctagacctcccaggctcaagtgatcctcctgcctcagcctcctgagtagctggaaccacatgcgtgcaccaccacacgcagcgaactattttgtagagatggggttttgccttgttatccaggctggttttgaactcctgggttcaagggatctgccctcttcggcctccccaagtgctaggactacaggtgtgagccaccgtgccccgccagccatctgtgattttgaccaacttcccattttatgatcctaatcaaagttccactgatgatttcggcccaggcccagtgactcatgagtaaccttgaccagtgttctcattagtgaccctaatgatccaccagtgatcttttagtg

SEQ ID NO: 522 - DNA, 471 bp, Homo sapiens
tggttattggctttctctatgttgcccaggctggtctccaactcttggactcaagcgatcatcctgtctcagcctcccaaaatgtgtcatacctttttaattgtgcaatagacaagtaaaaagggttaagaagaactgatactcttggaaaaaagaaatatacctttcagtgctaattgggcatttacaaaagttagttatatattaatagaggaaggaactccaaaacgttgaaatactatagggtaaattctctaaaatagaataaaactagaaattaatataaacatggaaacaacaaagtctcttaactatctaaaaatttacatatgctaaaaaatcctggattaaagagaaatcaaactttaagacagggttgtccagtcttttggtttccctggaccacactggaagaagaatagttgtcttagaccacacataaaatacagtaacactaatgatagctgattg

SEQ ID NO: 523 - DNA, 566 bp, Homo sapiens
tttttttttttttttaacacaattactttattgatttcttacaatcaaatactgccaactagaattccttccactcacggatcactaaaaacaaagaagacttccttggtactttcaaatgatgccttatacaataaagttagaacttaaaatgcaccctcattaattatgtaaactggtaatttgtgttaaaaagcataactaataatttggtttctttcttcataacacggaaatttaaatatttctcctgatggtcttgaggttatcaccgttatgagtagtgcacagtgcggcacatatggtttcatctggaaaggtgtgtctcacaccttatacaaaacgccagtaacaaaatgcatacatacgtcaacgcctgagacaaagcatgtttcaaatacgaagcagcccctcaggctgccataatatttaggtttgcatgatcacttatgacataacagattaattatacataacatacttttatacattttaaccctgaagataagaaaaataattgttgcttgaaaaaattctttcaggcagccatttggttggtgtcaaga

SEQ ID NO: 524 - DNA, 647 bp, Homo sapiens
  misc_feature (223)..(223): n is a, c, g, or t
  misc_feature (433)..(433): n is a, c, g, or t
cgctgctgtgggccccggctgcggtccgggccggcccagatgaagaccttagccaccggaacaaagaaccgccggcgccggcccagcagctgcagccgcagcctgtggctgtgcagggccccgagccggcccgggtcgagaaaatatttacaccagcagctccagttcataccaataaagaagatcctgctacccaaactaatttgggatttatccatgcatntgtcgctgccatatcagttattattgtatctgaattgggtgataagacattttttatagcagccatcatggcaatgcgctataaccgcctgaccgtgctggctggtgcaatgcttgccttgggactaatgacatgcttgtcagttttgtttggctatgccaccacagtcatccccagggtctatacatactatgtttcaactgtattatntgccatttttggcattagaatgcttcgggaaggcttaaagatgagccctgatgagggtcaagaagaactggaagaagtgcaagctgaattaaagaagagagatgaagaatgtcgacgaaccatactgttagatggaccgggagatgttgaaacgggtacaagcatgacagtacctcagaaagagtggtggattgtatttcacccatcgatgttc

SEQ ID NO: 525 - DNA, 647 bp, Homo sapiens
ttttgtaggttacagcctcagcaatctgtgtcatttgaaagcaaatatcctgatatttttaaataaggtgagcagggcaggcaggaaaccaatatttagtacttttgtgattaaacattctagaccaggcttgttgatatgtatgccaatagcctagaatttttggcttagtgtaaaataaaaatgtcttttctattgtggtctgatatccgtttctgtaataagatcagtttgttgtcctctgtgcaccagtggttttgcccttaattttttttggctagcatcaccaagatctgtcatccagagctgctgagaaaaatacatgttgccaaacttttcttaaaattgtgctgccagtggtattttcccagatgtgaaaaataataatctaataaaggattaatatctaataacaataccattgttgaacatgctcatggaatgtccaccttcttctgattccttttttgtatttgaaaatgcaatggtgtgttccaaattattggtggtgttgttaatgtcatgactctcctttgaatagaataaaaataaccccttttgttttgggttttctactgaaattagattttcctcttagtcctatgtgaaaaaaaagctttttgaaataaaaaaaaaaaaaaacaact

SEQ ID NO: 526 - DNA, 576 bp, Homo sapiens
gtagcgacaggggcctgctatgttgcccaggctggtctcaacctcctgggctcaagcctcagcctcccaaaagtgctggattataggtgtgagccactgcacctggcctatattgttatcttaaaatgtctcagtgacccaacaatttgccaaagagcatgtagagcaaactaggctctattcagcatttccatttcttaatgtatctatttgatttcaataaaatttcatcattttgaagatctctcccattagcttgggaaactacagaaacatgcacataactactgagaaggtatcaagtgttcctacactagtttaaaaaaatcattcaacacccacataaattctgatatgcactaggctgaacagctgttaaccactgagaagctgggcactgcatcctctccctgggtcaaaactctatatgctaatcaaacagggtcatgtatttgggaaaataataatccatggtaaaagtcacctcgtgccgaattcctgcagcccgggggatccactagttctagagcggccgccaccgcggtggagcttcagcttttgttccctttagtgagg

SEQ ID NO: 527 - DNA, 750 bp, Homo sapiens
  misc_feature (713)..(713): n is a, c, g, or t
ttaggactgcaaataagtaacagttgcctcatcatgttagcacttaaagtgaacctggcatttagatctcaaaatctagaggcaaatgaataaggcagggaatctgtccttttctccccatgaaaggtaaagcccttggtaattcaggtgcacactctgataatgtacatgaaaggtcttccttgataaacgataaaccttgtgattttgccacacaagaatttagctaaaccctttcctaatgtcattgtatatgagtagtacagattccatgtgtttgtttccattgaatatacagaaatactgaatacttccttaaaacagcttttattgaaaaaaggaagctgataaaaatcactttgcttttttataaaaacgcttgataggattacctttctagagagacttctgtgtatggccacacttatccaccacagtttttgtttatatagagagcattttaaaaagaagaaggttttcctggccatgcacagtagctcacgcctgtaatcccagcactttgggaggccaaggcggaaggattgcttgaggccaggagtttgagaccagcctaggcaacattgtgagactgtttctataaaaaaaaaaaaactgaaaaatcagccagccatggtcgcccatgcctgtgttcccagctacttgggaggctgaagcaagaaggattcttgagccccggagggtggaggatgcantgagccctaatcataccactgcattccaagccacgga

SEQ ID NO: 528 - DNA, 593 bp, Homo sapiens
ttgaatttaggtgacactatagaagagctatgacgtcgcatgcacgcgtacgtaagcttggatcctctagagcggccgcctactactactaaattcgcggccgcgtcgacttttttttttttaaagactgctaagagttttatcattctcatacgaaacaaacaaacaaaaccactgtggataaactttttttagaaatgtatatttcctgggtttttattcagatcataggaattataaattttttaataatccaggataattatcatagacagcatacgtttatttttttcccttttatgcttcaaagtcaagaagtacagctatcacttacactgttatatctgtctacgaattcctctccctttcctccatcttcctgacccacactttttagtgctttctacttctagtctgcttcatcaaccaaacttattctgaactggagattaaataaaagtgataagatagagtgagaactaatcagtaagtagatgacttcagtgctagggatttaaggtgattttatcctttggcataataatgtttcaccttctaacctagggattggagtggttagcgagtatcttact

SEQ ID NO: 529 - DNA, 525 bp, Homo sapiens
ttgaatttaggtgacactatagaagagctatgacgtcgcatgcacgcgtacgtaagcttggatcctctagagcggccgcctactactactaaattcgcggccgcgtcgacgagcacaagatcacaattaaccatatacacatcttactgtgtgaggtcattgagcaatacaggagggattttatacattttagcaactatcttcaaaacctgagctatagttgtattctgcccccttcctctgggcaaaagtgtaaaagtttgctgctacaaagaatacagaaaactcagaaagaaatgctaacatacacatttagctggccctatggatatatcatattaactgcttatcgttaggggctgtatatttgtaaaataaaagaattttgggagttccatctctcggctttggagcccccctccttttgtctctgtatggaggagcttcgtctttctgcctttttctttacctgttaaattctccactccttaaaactaaaaaaaaaaaaaaaaaagttttgcccta

SEQ ID NO: 530 - DNA, 672 bp, Homo sapiens
tgaatttaggtgacactatagaagagctatgacgtcgcatgcacgcgtacgtaagcttggatcctctagagcggccgcctactactactaaattcgcggccgcgtcgacactttttgtgctttaaatcatacattatacactgctttatttgctttacatatattatcagatttctcatattagcccataataaggtagacattactatcctgattttacattgaagaaactaaaatattcagaggttaagtaaattactcaaggtcacacaggtaagattaaagtttaggtttcaaattcaggtatgtttgctacaaaaccttgtcactgtgttagactgcctctaaagtgagtaaggtaaatgaaataaatgctttgtatgtttaaaattttgttataaaggaaaggaaataatgaattaatgaaatgttcaaattacagactttaaagtaaatacagatttcgttttatactagtcataaggtaattcagtgttagtagttaataccattaaatataatgtgataatcagctagcgaaaaaaaaaaaaaaaaaagtcgacgcggccgcgaatttagtagtagtagtcgacccgggaattccggaccggtacctgcaggcgtaccagctttccctataatgggtcgagttagagcatggcgtaatcatgg

SEQ ID NO: 531 - DNA, 731 bp, Homo sapiens
aagcttgcggccgctgggcagcgcccttcgtccaggctcgcgccccagctgccgccgacgacagcggccgagagaagttggggtctgactagacgcttacggggcctcggaccccggcgccgcggcgacctcggaggaaccggctccttgcgtcccgcctccctgggagctccgcacgggatttgcagatttacagaatggctgcacattaatggaaagagaagcataaacctatcttctttcattatggagggaggtttggcagatggagaacctgatcgaacttcgcttcttggtgatagcaaagatgtccttgggccatcaactgttgtagcaaacagtgacgaatctcagcttctgacaccaggaaagatgagtcagcgccaaggaaaagaagcttatccaacgccaaccaaagatttgcatcagccatctcttagtccagcaagtcctcatagccagggttttgaaagagggaaggaagatatttctcaaaataaagatgaatcttcactttctatgtcaaagagcaagtctgaatctaaactttataatggctcagagaaggacagttcaacttcaagcaaactcacaaaaaaaaaaaaaaaaaatgagcggccctcgtgccgaattcttggcctcgagggccaaattccctatagtgagtcgtattaaaattcggaatcatgtcatagcttgtttcctgtggtgaaatgttattcgctcacaat

SEQ ID NO: 532 - DNA, 2916 bp, Homo sapiens
  misc_feature (2534)..(2534): n is a, c, g, or t
  misc_feature (2536)..(2536): n is a, c, g, or t
ggggagctcggcgtcccgctccctccgcggctcatggcgacgactctcggcacatccgggaccctccggccgtggcggccgaggcgccggctgctcgggccccagccccggccgctgtggtgactccgccgcgcctcgccgtcgcccccgtgccgcccgccgcccccgccgcccccgccgccggggacatgtctaaccccggaggccggaggaacgggcccgtcaagctgcgcctgacagtactctgtgcaaaaaacctggtgaaaaaggattttttccgacttcctgatccatttgctaaggtggtggttgatggatctgggcaatgccattctacagatactgtgaagaatacgcttgatccaaagtggaatcagcattatgacctgtatattggaaagtctgattcagttacgatcagtgtatggaatcacaagaagatccataagaaacaaggtgctggatttctcggttgtgttcgtcttctttccaatgccatcaaccgcctcaaagacactggttatcagaggttggatttatgcaaactcgggccaaatgacaatgatacagttagaggacagatagtagtaagtcttcagtccagagaccgaataggcacaggaggacaagttgtggactgcagtcgtttatttgataacgatttaccagacggctgggaagaaaggagaaccgcctctggaagaatccagtatctaaaccatataacaagaactacgcaatgggagcgcccaacacgaccggcatccgaatattctagccctggcagacctcttagctgctttgttgatgagaacactccaattagtggaacaaatggtgcaacatgtggacagtcttcagatcccaggctggcagagaggagagtcaggtcacaacgacatagaaattacatgagcagaacacatttacatactcctccagacctaccagaaggctatgaacagaggacaacgcaacaaggccaggtgtatttcttacatacacagactggtgtgagcacatggcatgatccaagagtgcccagggatcttagcaacatcaattgtgaagagcttggtccattgcctcctggatgggagatccgtaatacggcaacaggcagagtttatttcgttgaccataacaacagaacaacacaatttacagatcctcggctgtctgctaacttgcatttagttttaaatcggcagaaccaattgaaagaccaacagcaacagcaagtggtatcgttatgtcctgatgacacagaatgcctgacagtcccaaggtacaagcgagacctggttcagaaactaaaaattttgcggcaagaactttcccaacaacagcctcaggcaggtcattgccgcattgaggtttccagggaagagatttttgaggaatcatatcgacaggtcatgaaaatgagaccaaaagatctctggaagcgattaatgataaaatttcgtggagaagaaggccttgactatggaggcgttgccagggaatggttgtatctcttgtcacatgaaatgttgaatccatactatggcctcttccagtattcaagagatgatatttatacattgcagatcaatcctgattctgcagttaatccggaacatttatcctatttccactttgttggacgaataatgggaatggctgtgtttcatggacattatattgatggtggtttcacattgcctttttataagcaattgcttgggaagtcaattaccttggatgacatggagttagtagatccggatcttcacaacagtttagtgtggatacttgagaatgatattacaggtgttttggaccataccttctgtgttgaacataatgcatatggtgaaattattcagcatgaacttaaaccaaatggcaaaagtatccctgttaatgaagaaaataaaaaagaatatgtcaggctctatgtgaactggagatttttacgaggcattgaggctcaattcttggctctgcagaaaggatttaatgaagtaattccacaacatctgctgaagacatttgatgagaaggagttagagctcattatttgtggacttggaaagatagatgttaatgactggaaggtaaacacccggttaaaacactgtacaccagacagcaacattgtcaaatggttctggaaagctgtggagttttttgatgaagagcgacgagcaagattgcttcagtttgtgacaggatcctctcgagtgcctctgcagggcttcaaagcattgcaaggtgctgcaggcccgagactctttaccatacaccagattgatgcctgcactaacaacctgccgaaagcccacacttgcttcaatcgaatagacattccaccctatgaaagctatgaaaagctatatgaaaagctgctaacagccattgaagaaacatgtggatttgctgtggaatgacaagcttcaaggatttacccaggactctatttatacaaccctgactgacagcctcctttcagcagagtttcaaagaatatgctgaaatacaggaaaacncncccccccccccccttttttttttttttttacattttaggacactgtgaggggaaaggacaattttgaaattccttttcaaggaaaaaaaggtctttatgctttgccatgaggccacattcagctgctatttaaacttaatatcttgaacctaaagaatgctgacttttcctacatttccagagttaggcagtattctacacttaaagactactactatttttataaaaggtaatctattcaaatttcttcacagatttcaagtctctcaaacatcaagacaacttcagcagtcggtacaagtcacatttcattttgattgaatacatgatcttgaacagctcctgtacttgctctttgtaaaaaaaaataaaattatttt

SEQ ID NO: 533 - DNA, 952 bp, Homo sapiens
agagaagacgtgcagggaccccgcgcacaggagctgccctcgcgacatgggtcacccgccgctgctgccgctgctgctgctgctccacacctgcgtcccagcctcttggggcctgcggtgcatgcagtgtaagaccaacggggattgccgtgtggaagagtgcgccctgggacaggacctctgcaggaccacgatcgtgcgcttgtgggaagaaggagaagagctggagctggtggagaaaagctgtacccactcagagaagaccaacaggaccctgagctatcggactggcttgaagatcaccagccttaccgaggttgtgtgtgggttagacttgtgcaaccagggcaactctggccgggctgtcacctattcccgaagccgttacctcgaatgcatttcctgtggctcatcagacatgagctgtgagaggggccggcaccagagcctgcagtgccgcagccctgaagaacagtgcctggatgtggtgacccactggatccaggaaggtgaagaagggcgtccaaaggatgaccgcccactccgtggctgtggctaccttcccggctgcccgggctccaatggtttccacaacaacgacaccttccacttcctgaaatgctgcaacaccaccaaatgcaacgagggcccaatcctggagcttgaaaatctgccgcagaatggccgccagtgttacagctgcaaggggaacagcacccatggatgctcctctgaagagactttcctcattgactgccgaggccccatgaatcaatgtctggtagccaccggcactcacgaaccgaaaaaccaaagctatatggtaagaggctgtgcaaccgcctcaatgtgccaacatgcccacctgggtgacgccttcagcatgaaccacattgatgtctcctgctgtactaaaagtggctgtaaccacccagacctggatgtccagtag

SEQ ID NO: 534 - DNA, 300 bp, Homo sapiens
aagaagtccaagtcgggccaggatccccagcaggagcaggagcaggagcgggagcgggatccccagcaggagcaggagcgggagcggattgatgatgtcattgatgagatcatcagcctggagtccagttacaatgatgaaatgctcagctatctgcccggaggcaccacaggactgcagctccccagcacgctgcctgtgtcagggaatctgcttgatgtgtacagtagtcaaggcgtggccacaccagccatcactgtcagcaactcctgcccagctgagctgcccaacatcaaacgg

SEQ ID NO: 535 - DNA, 1925 bp, Homo sapiens
cccggtagccgcagctgtcttttccggcccccgtgcactctccgcccgaggcggagccccccggctcgcggggatcgcccccgagcgctgcgtcctgcgggtgggtcacctaacccatttgtggcttcctctacctgtgctcagccatggccagcgagagctcacctctgctggcctaccggctcctgggggaggagggggttgccctccctgccaatggggccgggggtcctggaggggcgtctgcccggaagctgtccaccttcctgggtgtggtggtgcccactgtcctgtccatgttcagcatagttgtttttctgaggattgatgccacagggcccagtgggctccgggtcctgccccagggctacggctggaacctgctgtatggctccctgctgctgggccttgtgggtggggtctgcaccctgggagccggcctctatgcccgggcctcattcctcacattcctgctggtctctggctccctggcctctgtgctcatcagttttgtggctgtggggccgagggacatccgcttgactcctaggcctggccccaatggctcctccctgccgccccggtttggccacttcaccggcttcaacagcagtaccctgaaggacaacttgggcgctggctatgctgaggactacaccacgggagccgtgatgaattttgccagcgtctttgctgtcctctttaacggctgtacaggcatcatggctggggccaacatgtcaggggagctgaaggaccccagccgggcgatccctctgggcacgatcgtcgccgtcgcctacaccttcttcgtctatgtcctgcttttctttctctccagcttcacttgtgacaggaccctgctgcaggaagactatgggttcttccgcgccatcagcctgtggcccccactggtgttgatcggaatctatgccacagcgctctcagcgtccatgagctcgctcattggtgcctcccgcatcctccatgccctggcccgggatgacctctttggcgtgatcttggcaccggccaaggttgtgtcccgagggggaaacccctgggcagctgtactttattcttggggcctggtgcagctggtgctcctggctgggaagctgaacacactggccgctgtggtcactgtcttctacctggtggcctatgctgccgtggacctgtcctgcctgagcctggagtgggcctcggcccccaacttccgccccaccttcagcctgttctcctggcacacctgcctgctgggggtggcctcctgcctgctcatgatgttcctcatcagtcctggcgcggctggtggctccctgctcctcatgggtctgctggctgccctgctcaccgcgcgaggaggccccagtagctggggctatgtcagccaggccttgcttttccaccaggtgcgtaagtatctgcttcggctggacgtccggaaggatcacgtgaagttctggcggccccagctgctgctcctggtggggaacccccggggcgccctgcctctgctgcggttggccaaccagcttaagaagggggggctgtatgtgctgggccacgtcaccctgggagacctcgactccctgccctcggaccctgtacagccgcagtatggggcatggctcagcctggtggaccgtgcccaggtgaaggcttttgtggatctaaccctctcaccctccgtgcgccagggggctcagcatctgctgcgaatctccggcctcgagtcaaactcgcatcccctgccgtgaaacagatgccccgctagaagccgggagtggacagcatcctcctctccatagaattggagtgctcattagtggcaagaatcctaaggcgaactttgcctgtttaagtggaggagattagtcactgagataataaaataaatgcatgtgaaaaaaaaaaaaaaa

SEQ ID NO: 536 - DNA, 2044 bp, Homo sapiens
ctggaagcgggcgagtctcgtgctgtgtcggacctgcagcccctggccttccgccaccatggagtacctcatcggtatccaaggccccgactatgttcttgtcgcctccgaccgggtggccgccagcaatattgtccagatgaaggacgatcatgacaagatgtttaagatgagtgaaaagatattactcctgtgtgttggagaggctggagacactgtacagtttgcagaatatattcagaaaaacgtgcaactttataagatgcgaaatggatatgaattgtctcccacggcagcagctaacttcacacgccgaaacctggctgactgtcttcggagtcggaccccatatcatgtgaacctcctcctggctggctatgatgagcatgaagggccagcgctgtattacatggactacctggcagccttggccaaggccccttttgcagcccacggctatggtgccttcctgactctcagtatcctcgaccgatactacacaccgactatctcacgtgagagggcagtggaactccttaggaaatgtctggaggagctccagaaacgcttcatcctgaatctgccaaccttcagtgttcgaatcattgacaaaaatggcatccatgacctggataacatttccttccccaaacagggctcctaacatcatgtcctccctcccacttgccagggaacttttttttgatgggctcctttatttttttctactcttttcaggcgcactcttgataaatggttaattcagaataaaggtgactatggatataattgagccctctggtccaggtctcagtttacctaatattacctcagaaaggatatggagggaagatgatctttttgccaggtctgacttttcttcctgctccgccctccattaacgctcagtaccctttagcagctgacggccccacgttctactccatgcttggcttcctttccaactagctctttcatatattttacttgctagtatctccattctctctaaagtagtggttctttttgcccttaaacttaaatttttaaattaattaacctgaattaataatacatgcacttaatgtaacatgcaaacagtacaaaaacatgtagtgaaaaatatttcttccagagctgggtgtggtggctcatgcctgtaatcccagcactttgggaggccgaggcgggcggatcacgaggtcaagagagcgagaccatcctgaccaacatggtgaaaccccgtctctgctaaaaatacaaaaattagctgggcgtggtggcacgcacccctagtcccagctactggggaggctgagacgggagaatcggtcgaacccgggaggcggaggttgcagtgagcctagatcgcgccactgtactccagcctggcaacagagtgagactccgtctcaaaaaaaagaaggaaaaatgtttcttccatccctataatccagtcatctgcttcctgcttcccttcctggaggaaacttcagctactaatttcttatgttttttaagagatattctgttactgtgtaaagtatacatacatacagacacatgccccctttaaattttttagatttatttatttatttagagacagggtctcactctagcccaggctggagtgctgtggcgtaatcttggctcactgcaacctccgcctcccgggcccaagtgatcctcccgtctcagcctcctgagtagctgggattacaggcgcacaccaccaatgcccagctagtttttgtgtttttcatagagacagggtctcaccatgtcattcaagaccagcctggccaacatggtgaaaccccatctctactaaaaaaatatataacaattagccaggcgtggtggcacacgcctgtaaacccaactacttgggaggctgaggcaggagaattgcttgagcccgggagagggaggttgcagtgagccgagatcatgccactgcactccagcctggctgacagagcaagactctgtctcaaaaaaaaaaaaaaaaaaaaaaaaaaaaaaaaaaaaaaaaaaaaaa

SEQ ID NO: 537 - DNA, 1049 bp, Homo sapiens
cgtggacgccgtgccgttactcgtagtcaggcggcggcgcaggcggcggcggcggcatagcgcacagcgcgccttagcagcagcagcagcagcagcagcatcggaggtacccccgccgtcgcagcccccgcgctggtgcagccaccctcgctccctctgctcttcctcccttcgctcgcaccatggctgatcagctgaccgaagaacagattgctgaattcaaggaagccttctccctatttgataaagatggcgatggcaccatcacaacaaaggaacttggaactgtcatgaggtcactgggtcagaacccaacagaagctgaattgcaggatatgatcaatgaagtggatgctgatggtaatggcaccattgacttccccgaatttttgactatgatggctagaaaaatgaaagatacagatagtgaagaagaaatccgtgaggcattccgagtctttgacaaggatggcaatggttatatcagtgcagcagaactacgtcacgtcatgacaaacttaggagaaaaactaacagatgaagaagtagatgaaatgatcagagaagcagatattgatggagacggacaagtcaactatgaagaattcgtacagatgatgactgcaaaatgaagacctactttcaactcctttttcccccctctagaagaatcaaattgaatcttttacttacctcttgcaaaaaaaagaaaaaagaaaaaagttcatttattcattctgtttctatatagcaaaactgaatgtcaaaagtaccttctgtccacacacacaaaatctgcatgtattggttggtggtcctgtcccctaaagatcaagctacacatcagttttacaatataaatacttgtactaccttaatgataaggactccttaaagttccatttgctaatgattaatacactgtttgggctggccagtttttcatgcatgcagcttgacgattgagcacagtcaggcctttgtattaaaaatgaaaaatgaaaaaacaaattcaaaacctaaaaaaaaaaaaaaaaaaaaaaaaaaaa

SEQ ID NO: 538 - DNA, 927 bp, Homo sapiens
caaaacactcctgaggagaaagaaagagagggagggagagaaaaagagagagagagaaacaaaaaaccaaagagagagaaaaaatgaattcatctaaatcatctgaaacacaatgcacagagagaggatgcttctcttcccaaatgttcttatggactgttgctgggatccccatcctatttctcagtgcctgtttcatcaccagatgtgttgtgacatttcgcatctttcaaacctgtgatgagaaaaagtttcagctacctgagaatttcacagagctctcctgctacaattatggatcaggttcagtcaagaattgttgtccattgaactgggaatattttcaatccagctgctacttcttttctactgacaccatttcctgggcgttaagtttaaagaactgctcagccatgggggctcacctggtggttatcaactcacaggaggagcaggaattcctttcctacaagaaacctaaaatgagagagttttttattggactgtcagaccaggttgtcgagggtcagtggcaatgggtggacggcacacctttgacaaagtctctgagcttctgggatgtaggggagcccaacaacatagctaccctggaggactgtgccaccatgagagactcttcaaacccaaggcaaaattggaatgatgtaacctgtttcctcaattattttcggatttgtgaaatggtaggaataaatcctttgaacaaaggaaaatctctttaagaacagaaggcacaactcaaatgtgtaaagaaggaagagcaagaacatggccacacccaccgccccacacgagaaatttgtgcgctgaacttcaaaggacttcataagtatttgttactctgatataaataaaaataagtagttttaaatgttataattcatgaaaaaaaaaaaaaaaaaaaaa

SEQ ID NO: 539 - DNA, 1437 bp, Homo sapiens
gtcgcgttccccagtgttacggagggtccttgaggcaggagtgaaaattgggtctgggggttagtcctggggtggaggtctgggcacgccgggtcggaccccctccatcttcggttttgcacaccccgctttccagcgcggagtcgcggcgggtagggcggcgtcgcgtgcgtgacgtcatccagcggcgcctcgcgaggctccagtggccttgacctcccgcggcgtgggaggctgcgcggcgatgctgcagttcgtccgggccggggcgcgggcctggcttcggcctaccggcagccagggcctgagttccctggcggaagaggcagcgcgtgcgaccgagaacccggagcaggtggcgagcgagggtctcccggagcccgtgctgcgcaaagtcgagctcccggtacccactcatcgacgcccagtgcaggcctgggtcgagtccttgcggggcttcgagcaggagcgcgtgggcctggccgacctgcaccccgatgttttcgccaccgcgcccaggctggacatactgcaccaggttgctatgtggcagaagaacttcaagagaattagctatgccaagaccaagacgagagccgaggtgcggggcggtggccggaagccttggccgcagaaaggcactgggcgggcccggcatggcagcatccgctctccgctctggcgaggaggaggtgttgcccatggcccccggggccccacaagttactactacatgctgcccatgaaggtgcgggcgctgggtctcaaagtggcactgaccgtcaagctggcccaggacgacctgcacatcatggactccctagagctgcccaccggagacccacagtacctgacagagctggcgcactaccgccgctggggggactccgtactcctcgtggacttaacacacgaggagatgccacagagcatcgtggaggccacctctaggcttaagaccttcaacttgatcccggctgttggtgagcaaagagcccaggcccctagagtgcgcatgtgcaggctccgctgttagaatcacagcggttcaaatccggcatctggtcgctgagtggcctcaggcagtgaccacgctcccggacccaaccttcagcttgcccaaagcaataatctttcctaaagaagtgcttggctggggatggtggctcacgcttgtaatcccagtactttgggaggccaaggcagtctgggcaatatagtgaggctcccatctgtactaaaaataaaaaagttaggcgtggcgatgtgcacctgtagtcccagctactcgggggctgagccaggcggatagcttgagctcagggggccaaggctgcagtgagtcatgatcgcaccactgcacccaaacctggggagagagctagactcttgtctcaaaaaaaaaaaaaaaaaaaaaaaaaaaaaaaaaaaaaaaaa

SEQ ID NO: 540 - DNA, 1562 bp, Homo sapiens
aattatcaaagattgcagcaatcgatagcctgaatcagtatacacgaggctttggccatccatcacttgtgaaagctctgtcctatctgtatgaaaagctttatcaaaagcaaattgattcaaataaagaaatccttgtgacagtaggagcatatggatctctttttaacaccattcaagcattaattgatgagggagatgaagtcatactaatagtgcctttctatgactgctatgagcccatggtgagaatggctggagcaacacctgtttttattcccctgagatctaaacctgtttatggaaaaagatggtctagttctgactggacattagatcctcaagaactggaaagtaaatttaattccaaaaccaaagctattatactaaatactccacataacccacttggcaaggtgtataacagagaggaactgcaagtaattgctgacctttgcatcaaatatgacacactctgcatcagcgatgaggtttatgaatggcttgtatattctggaaataagcacttaaaaatagctacttttccaggtatgtgggagagaacaataacaataggaagtgctggaaagactttcagtgtaactggctggaagcttggctggtccattggtccaaatcatttgataaaacatttacagacagttcaacaaaacacgatttatacttgtgcaactcctttacaggaagccttggctcaagctttctggattgacatcaagcgcatggatgacccagaatgttactttaattctttgccaaaagagttagaagtaaaaagagatcggatggtacgtttacttgaaagtgttggcctaaaacccatagttcctgatggaggatacttcatcatcgctgatgtgtctttgctagatccagacctctctgatatgaagaataatgagccttatgactataagtttgtgaaatggatgactaaacataagaaactatcagccatccccgtttcagcattctgtaactcagagactaaatcacagtttgagaagtttgtgcgtttttgcttcattaaaaaagacagcacactggatgctgctgaagaaatcatcaaggcatggagtgtacagaagtcttgatttgtgcagaatggattaatgtttctgttagatgacctagtatggaattgttacttagtgctgccacctgctggatgttaaaaggtatttcagtacaactggaatttaaatatttccattgtttttccaaagcagttaacccaactcctaacaacattttcgggggatctgaccttttttttccagttgaaatgtattaacacaccttccacaatcattttataagagtcagcataacatagtggataagaaatgtgagatgtttaacctctcagtaactcggttctctcattataaaataggaataaaatcagtacctgtttcatatgaaggtcgtttctgagaattaaatggactaatgtatgcaaaaagcctggcaaacaataaacactcatctgactttaaaaaaaaaaaaaaaaaaaaaaaaaaaaaaaaaaaaaaaaaaaa

SEQ ID NO: 541 - DNA, 981 bp, Homo sapiens
ggcaagccgacggcccgctgctggcctccgtgacgcggcctcctccgcgcctcgcggcatggcgtcggaggggccgcgggagcccgaaagcgagggcatcaagttatcagcagatgtcaaaccatttgtccccagatttgccgggctcaatgtggcatggttagagtcctcagaagcatgtgtcttccccagctctgcagccacatactatccgtttgttcaggaaccaccagtgacagaaatgtttactcagtgcctggctcccagtatctttataaccaacccagttgttaccgaggttttcaaacagtgaagcatcgaaatgagaacacatgccctctcccacaagaaatgaaagctctgtttaagaagaaaacctatgatgagaaaaaaacgtatgatcagcaaaagtttgacagtgaaagggctgatggaactatatcatctgagataaaatcagctagaggttcacatcatttgtccatttacgctgagaatagtttgaaatcagatggttaccataagcgaacagacaggaaatccagaatcattgcaaaaaatgtatctacctccaaacctgagtttgaatttaccacactggactttcctgaactgcaaggtgcagagaacaatatgtcagagatacagaagcaacccaagtggggacctgtccactctgtctctaccgacatttctcttctaagagaagtagtaaaaccagctgcagtgttatcaaagggtgaaatagtggtgaaaaataacccaaatgaatctgtaactgctaatgccgctaccaattctccttcatgtacaagagatcctaaaaatgttagtataccatcttctgaagctttatcttcggatccttcctacaacaaagaaaaacacattattcatcctacccaaaagtctaaagcatcacaaggtagtgaccttgaacaaaatgaagcctcaagaaagaataaaaaaaaaaaaaaaaaa

SEQ ID NO: 542 - DNA, 2078 bp, Homo sapiens
gcaacgcaaagcgcttggtattgagtctgtggccgacttcggttccggtctctgcagcagccgtgatcgcttagtggagtgcttagggtagttggccaggatgccgaatatcaaaatcttcagcggcagctcccaccaggacttatctcagaaaattgctgaccgcctgggcctggagctaggcaaggtggtgactaagaaattcagcaaccaggagacctgtgtggaaattggtgaaagtgtacgtggagaggatgtctacattgttcagagtggttgtggcgaaatcaatgacaatttaatggagcttttgatcatgattaatgcctgcaagattgcttcagccagccgggttactgcagtcatcccatgcttcccttatgcccggcaggataagaaagataagagccgggcgccaatctcagccaagcttgttgcaaatatgctatctgtagcaggtgcagatcatattatcaccatggacctacatgcttctcaaattcagggcttttttgatatcccagtagacaatttgtatgcagagccggctgtcctaaagtggataagggagaatatctctgagtggaggaactgcactattgtctcacctgatgctggtggagctaagagagtgacctccattgcagacaggctgaatgtggactttgccttgattcacaaagaacggaagaaggccaatgaagtggaccgcatggtgcttgtgggagatgtgaaggatcgggtggccatccttgtggatgacatggctgacacttgtggcacaatctgccatgcagctgacaaacttctctcagctggcgccaccagagtttatgccatcttgactcatggaatcttctccggtcctgctatttctcgcatcaacaacgcatgctttgaggcagtagtagtcaccaataccatacctcaggaggacaagatgaagcattgctccaaaatacaggtgattgacatctctatgatccttgcagaagccatcaggagaactcacaatggagaatccgtttcttacctattcagccatgtccctttataatagagtaacttctgaggctttttgagaataaaatccaccccacccttgtttccccttggtatttgatgacaaattcagcagaagacccggcttgctccagtgtagctttctacatcccacatcaggtatattagagcttatccgaactggggaaagacggattgagattaactgctgggacctcctacctgcattatctcattctggcttccttgataattctgtgggccttgcagctttaactatagctcagctgctgcaagatttcagacttttgaggatgttgtgtgagggtgtttgactgtgactggggaagctcagactactttgtatgtgaatgcttcagggttttctttgttgagaacaactagcaacaaaggcaacccatgtgtgaccagttctccccaaggtctatgctaaattatagcaagagccctgggcaaccccaaacctagtcctggtagctgagcaccctgtaaggcaggagcaggcagctcagcttgagcagacattgggtggggggtggggggtggttgaggggggaggcagcacagtgcagcaaatgtttcttgggaggaagaagcctgatccatcaccatctgcttgactatgtagcttggattctcctttgtacctatccctttcgatttggctttaccttcatctatcttgatcctttcctggccaaatatcctcttgggcccaaatgaacattgtaccatagtcttctggaaagcaaacatgcttcctgctatgtaattgctaacattcatattagatgatgtgctgtagcttgatcttccttagcctactgccactgaggcagtaggttttaggtggtatcgtagtgccttttgattaatttaagtatttaattttcatcttccttctttggatctatttggcctctcaaatgaactgagattcctgttaaaaaagattgatgttattgtctcttgtagaggaaactaataaagtgtgtgtacctgtgtgaaaaaaaaaaaaaaaaaaaaaaaaaaaa

SEQ ID NO: 543 - DNA, 2192 bp, Homo sapiens
ccctccccgcccggctggaggctgctccggaccgggacgcagagtctgcggacccggcgccgaggcggccacccgagacgcggcgcgcacgctccggcctgcgcccggcccggccatggcggccccccgcccgtctcccgcgatctccgtttcggtctcggctccggctttttacgccccgcagaagaagttcggccctgtggtggccccaaagcccaaagtgaatcccttccggaagactttcccctgcctccacctccccttgctggggatggcgacgatgcagagggtgctctgggaggtgccttcccgccgccccctcccccgatcgaggaatcatttccccctgcgcctctggaggaggagatcttcccttccccgccgcctcctccggaggaggagggagggcctgaggcccccataccgcccccaccacagcccagggagaaggtgagcagtattgatttggagatctctctgtcctcactgctggatgacatgaccaagaatgatcctttcaaagcccgggtgtcatctggatatgtgcccccaccagtggccactccattcagttccaagtccagtaccaagcctgcagccgggggcacagcacccctgcctccttggaagtccccttccagctcccagcctctgccccaggttccggctccggctcagagccagacacagttccatgttcagccccagccccagcccaagcctcaggtccaactccatgtccagtcccagacccagcctgtgtctttggctaacacccagccccgagggcccccagcctcatctccggctccagcccctaagttttctccagtgactcctaagtttactcctgtggcttccaagttcagtcctggagccccaggtggatctgggtcacaaccaaatcaaaaattggggcaccccgaagctctttctgctggcacaggctcccctcaacctcccagcttcacctatgcccagcagagggagaagccccgagtgcaggagaagcagcaccccgtgcccccaccggctcagaaccaaaaccaggtgcgctcccctggggccccagggcccctgactctgaaggaggtggaggagctggagcagctgacccagcagctaatgcaggacatggagcatcctcagaggcagaatgtggctgtcaacgaactctgcggccgatgccatcaacccctggcccgggcgcagccagccgtccgcgctctagggcagctgttccacatcgcctgcttcacctgccaccagtgtgcgcagcagctccagggccagcagttctacagtctggagggggcgccgtactgcgagggctgttacactgacaccctggagaagtgtaacacctgcggggagcccatcactgaccgcatgctgagggccacgggcaaggcctatcacccgcactgcttcacctgtgtggtctgcgcccgccccctggagggcacctccttcatcgtggaccaggccaaccggccccactgtgtccccgactaccacaagcagtacgccccgaggtgctccgtctgctctgagcccatcatgcctgagcctggccgagatgagactgtgcgagtggtcgccctggacaagaacttccacatgaagtgttacaagtgtgaggactgcgggaagcccctgtcgattgaggcagatgacaatggctgcttccccctggacggtcacgtgctctgtcggaagtgccacactgctagagcccagacctgagtgaggacaggccctcttcagaccgcagtccatgccccattgtggaccacccacactgagaccacctgcccccacctcagttattgttttgatgtctagcccctcccatttccaacccctccctagcatcccaggtgccctgacccaggacccaacatggtctagggatgcaggatccccgccctggggtctggtcctcgcccatcctgcagggattgcccaccgtcttccagacaccccacctgaggggggcaccaggtttagtgctgctgctttcactgctgcacccgcgccctcggctggccccccgagcagcctttgtactctgcttgcggagggctgggagaccctccaggacattcccaccctcccccatgctgccaagttgtagctatagctacaaataaaaaaaaaccttgttttccagaaaaaaaaaaaaaaaaaaa

SEQ ID NO: 544 - DNA, 2302 bp, Homo sapiens
ggagagaccacactgccatgcctccctctgggccccgaggaaccctccttctgttgccgctgctgctgctgctcctgcttcgcgccgtgctggctgtccccctggagcgaggggcgcccaacaaggaggagacccctgcgactgagagtcccgacacaggcctgtactaccaccggtacctccaggaggtcatcgatgtactggagacggatgggcatttccgagagaagctgcaggctgccaatgcggaggacatcaagagcgggaagctgagccgagagctggactttgtcagccaccacgtccgcaccaagctggatgagctcaagcgacaggaggtgtcacggctgcggatgctgctcaaggccaagatggacgccgagcaggatcccaatgtacaggtggatcatctgaatctcctgaaacagtttgaacacctggaccctcagaaccagcatacattcgaggcccgcgacctggagctgctgatccagacggccacccgggaccttgcccagtacgacgcagcccatcatgaagagttcaagcgctacgagatgcttaaggaacacgagagacggcgttatctggagtcactgggagaggagcagagaaaggaggcggagaggaagctggaagagcaacagcgccggcaccgcgagcaccctaaagtcaacgtgcctggcagccaagcccagttgaaggaggtgtgggaggagctggatggactggaccccaacaggtttaaccccaagaccttcttcatactgcatgatatcaacagtgatggtgtcctggatgagcaggagctggaggcactcttcaccaaggagctggagaaagtgtacgacccaaagaatgaggaggacgacatgcgggagatggaggaggagcgactgcgcatgcgggagcatgtgatgaagaatgtggacaccaaccaggaccgcctcgtgaccctggaggagttcctcgcatccactcagaggaaggagtttggggacaccggggagggctgggagacagtggagatgcaccctgcctacaccgaggaagagctgaggcgctttgaagaggagctggctgcccgggaggcagagctgaatgccaaggcccagcgcctcagccaggagacagaggctctagggcggtcccagggccgcctggaggcccagaagagagagctgcagcaggctgtgctgcacatggagcagcggaagcagcagcagcagcagcagcaaggccacaaggccccggctgcccaccctgaggggcagctcaagttccacccagacacagacgatgtacctgtcccagctccagccggtgaccagaaggaggtggacacttcagaaaagaaacttctcgagcggctccctgaggttgaggtgccccagcatctgtgatcctccgggaccccagccctcaggattcctgatgctccaaggcgactgatgggcgctggatgaagtggcacagtcagcttccctgggggccggtgtcatgttgggctcctggggcgggggcacggcctggcatttcacgcattgctgccaccccaggtccacctgtctccactttcacagcctccaagtctgtggctcttcccttctgtcctccgaggggcttgccttctctcgtgtccagtgaggtgctcagtgatcggcttaacttagagaagcccgccccctccccttctccgtctgtcccaagagggtctgctctgagcctgcgttcctaggtggctcggcctcagctgcctgggttgtggccgccctagcatcctgtatgcccacagctactggaatccccgctgctgctccgggccaagcttctggttgattaatgagggcatggggtggtccctcaagaccttcccctaccttttgtggaaccagtgatgcctcaaagacagtgtcccctccacagctgggtgccaggggcaggggatcctcagtatagccggtgaaccctgataccaggagcctgggcctccctgaacccctggcttccagccatctcatcgccagcctcctcctggacctcttggcccccagccccttccccacacagccccagaagggtcccagagctgaccccactccaggacctaggcccagcccctcagcctcatctggagcccctgaagaccagtcccacccacctttctggcctcatctgacactgctccgcatcctgctgtgtgtcctgttccatgttccggttccatccaaatacactttctggaacaaaaaaaaaaaaaaaaaaaaaaaaaaaaaaaaaaaaaaaaaaaaaaaaaaaaaaa

SEQ ID NO: 545 - DNA, 950 bp, Homo sapiens
ggcagccgaggagaccccgcgcagtgctgccaacgccccggtggagaagctgaggtcatcatcagatttgaaatatttaaagtggatacaaaactatttcagcaatgcagacaattaagtgtgttgttgtgggcgatggtgctgttggtaaaacatgtctcctgatatcctacacaacaaacaaatttccatcggaatatgtaccgactgtttttgacaactatgcagtcacagttatgattggtggagaaccatatactcttggactttttgatactgcagggcaagaggattatgacagattacgaccgctgagttatccacaaacagatgtatttctagtctgtttttcagtggtctctccatcttcatttgaaaacgtgaaagaaaagtgggtgcctgagataactcaccactgtccaaagactcctttcttgcttgttgggactcaaattgatctcagagatgacccctctactattgagaaacttgccaagaacaaacagaagcctatcactccagagactgctgaaaagctggcccgtgacctgaaggctgtcaagtatgtggagtgttctgcacttacacagaaaggcctaaagaatgtatttgacgaagcaatattggctgccctggagcctccagaaccgaagaagagccgcaggtgtgtgctgctatgaacatctctccagagccctttctgcacagctggtgtcggcatcatactaaaagcaatgtttaaatcaaactaaagattaaaaattaaaattcgtttttgcaataatgacaaatgccctgcacctacccacatgcactcgtgtgagacaaggcccataggtatggccccccccttccccctcccagtactagttaattttgagtaattgtattgtcagaaaagtgattagtactattttttttttgttgtttcaaaaaaaaaaaaaaaaaaa

SEQ ID NO: 546 - DNA, 918 bp, Homo sapiens
ggagccagcgcgagccgccgccgccatcactgccgctgccaagtcctccacccgctgcccccgccatgtctgctaccgctgccacggccccccctgctgccccggctggggagggtggtccccctgcaccccctccaaacctcaccagtaacaggagactgcagcagacccaggcccaggtggatgaggtggtggacatcatgagggtgaacgtggacaaggtcctggagcgagaccagaagctgtcggagctggacgaccgtgcagatgcactccaggcgggggcctcccagtttgaaacaagcgcagccaagctcaagcgcaaatactggtggaaaaacctcaagatgatgatcatcttgggagtgatttgcgccatcatcctcatcatcatcatagtttacttcagcacttaaatccccgaggagtctgccctgcctagagaagggcctctcccccaaccctcagccgttcctccacctctcagccatatctttcagccccccctcccctggatccgtgtgtgtgtgtgtccgtgtgtgtgtccccctgtaaatagccagctgttatttatacatatataatattatatatatttggtctgtttgtagttttattactagatgatttttccggttgtccttaacaccccttcctgaggttcccttcacccctctctcttgccttccttccctttccttttcttcctgactagccccaagtcccttcatttgcatctgctatgcaatagtccctctcctttccttcttcttccctcagatttagctgatccttcctcccaccctggccttcctttcctctttcctcctcactctccccgtcatgctccctctgccccgccctcaaaaaaaaaaaaaaaaaaaaaaaaaaaaaaaaaaaaaaaaaaaaaaaaaaaaa

SEQ ID NO: 547 - DNA, 1378 bp, Homo sapiens
gcgcggcccgctgcaatccgtggaggaacgcgccgccgagccaccatcatgcctgggcacttacaggaaggcttcggctgcgtggtcaccaaccgattcgaccagttatttgacgacgaatcggaccccttcgaggtgctgaaggcagcagagaacaagaaaaaagaagccggcgggggcggcgttgggggccctggggccaagagcgcagctcaggccgcggcccagaccaactccaacgcggcaggcaaacagctgcgcaaggagtcccagaaagaccgcaagaacccgctgccccccagcgttggcgtggttgacaagaaagaggagacgcagccgcccgtggcgcttaagaaagaaggaataagacgagttggaagaagacctgatcaacaacttcagggtgaagggaaaataattgatagaagaccagaaaggcgaccacctcgtgaacgaagattcgaaaagccacttgaagaaaagggtgaaggaggcgaattttcagttgatagaccgattattgaccgacctattcgaggtcgtggtggtcttggaagaggtcgagggggccgtggacgtggaatgggccgaggagatggatttgattctcgtggcaaacgtgaatttgataggcatagtggaagtgatagatcttctttttcacattacagtggcctgaagcacgaggacaaacgtggaggtagcggatctcacaactggggaactgtcaaagacgaattaacagagtcccccaaatacattcagaaacaaatatcttataattacagtgacttggatcaatcaaatgtgactgaggaaacacctgaaggtgaagaacatcatccagtggcagacactgaaaataaggagaatgaagttgaagaggtaaaagaggagggtccaaaagagatgactttggatgagtggaaggctattcaaaataaggaccgggcaaaagtagaatttaatatccgaaaaccaaatgaaggtgctgatgggcagtggaagaagggatttgttcttcataaatcaaagagtgaagaggctcatgctgaagattcggttatggaccatcatttccggaagccagcaaatgatataacgtctcagctggagatcaattttggagaccttggccgcccaggacgtggcggcaggggaggacgaggtggacgtgggcgtggtgggcgcccaaaccgtggcagcaggaccgacaagtcaagtgcttctgctcctgatgtggatgacccagaggcattcccagctctggcttaactggatgccataagacaaccctggttcctttgtgaacccttctgttcaaagcttttgcatgcttaaggattccaaacgactaagaaaaaaaaaaaaaaaaaaa

SEQ ID NO: 548 - DNA, 1036 bp, Homo sapiens
ctgggaggccgggccgggctcgggggccaccccgggggcccgggccatggatgtgcgccgtctgaaggtgaacgaacttcgcgaggagctgcagcgccgcggcctggacactcgaggcctcaaggccgagcttgctgagcggctgcaggcggcgttggaggccgaggagcctgacgacgagcgggagctcgacgccgacgacgaaccggggcgacccgggcacatcaacgaggaggccgagttacagccagccaccctacaaccagggaggttacagccagggctacacagccccaccgcctccacctccaccaccacctgcctacaactatgggagctacggcggttacaacccggccccctataccccaccgccaccccccaccgcacagacctaccctcagcccagctataaccagtatcagcagtatgcccagcagtggaaccagtactatcagaaccagggccagtggccgccatactacgggaactacgactacgggagctactccgggaacacacagggtggcacaagtacacagtagccagtgtgacccagaggctcccggaggcccctgccggcttcctccaccagcgcctgcctcggcccctcctctgcccccgccagatcccgtggtgctggggatggggtcatcccagggctgcctccctccagcccactgcctcccctctgaggggcttccttcccctccatagggccaggcatttttttctggattcaaacaggcaacaatgaccttttattttctgtttgtccccacctccccagccttccacctcctgttcttcctaccttcttcctttttgactaaataatccccacctcccttgatcatacagtgaggctacagtgactgaggggagaatcccctcctgttcactctcccaaccctgctccagcccctcagcttcccagaccctcatgcagttggttgtaaattctcccaggagctgttttactgtctacttttcaggattaaaaaaaaaatcaaaacttaaaaaaaaaaaaaaaaaa

SEQ ID NO: 549 - DNA, 1814 bp, Homo sapiens
ccaagactgagccggcggccgcggcgcagcgaacgagcagtgaccgtgctcctacccagctctgcttcacagcgcccacctgtctccgcccctcggcccctcgcccggctttgcctaaccgccacgatgatgttctcgggcttcaacgcagactacgaggcgtcatcctcccgctgcagcagcgcgtccccggccggggatagcctctcttactaccactcacccgcagactccttctccagcatgggctcgcctgtcaacgcgcaggacttctgcacggacctggccgtctccagtgccaacttcattcccacggtcactgccatctcgaccagtccggacctgcagtggctggtgcagcccgccctcgtctcctctgtggccccatcgcagaccagagcccctcaccctttcggagtccccgccccctccgctggggcttactccagggctggcgttgtgaagaccatgacaggaggccgagcgcagagcattggcaggaggggcaaggtggaacagttatctccagaagaagaagagaaaaggagaatccgaagggaaaggaataagatggctgcagccaaatgccgcaaccggaggagggagctgactgatacactccaagcggagacagaccaactagaagatgagaagtctgctttgcagaccgagattgccaacctgctgaaggagaaggaaaaactagagttcatcctggcagctcaccgacctgcctgcaagatccctgatgacctgggcttcccagaagagatgtctgtggcttcccttgatctgactgggggcctgccagaggttgccaccccggagtctgaggaggccttcaccctgcctctcctcaatgaccctgagcccaagccctcagtggaacctgtcaagagcatcagcagcatggagctgaagaccgagccctttgatgacttcctgttcccagcatcatccaggcccagtggctctgagacagcccgctccgtgccagacatggacctatctgggtccttctatgcagcagactgggagcctctgcacagtggctccctggggatggggcccatggccacagagctggagcccctgtgcactccggtggtcacctgtactcccagctgcactgcttacacgtcttccttcgtcttcacctaccccgaggctgactccttccccagctgtgcagctgcccaccgcaagggcagcagcagcaatgagccttcctctgactcgctcagctcacccacgctgctggccctgtgagggggcagggaaggggaggcagccggcacccacaagtgccactgcccgagctggtgcattacagagaggagaaacacatcttccctagagggttcctgtagacctagggaggaccttatctgtgcgtgaaacacaccaggctgtgggcctcaaggacttgaaagcatccatgtgtggactcaagtccttacctcttccggagatgtagcaaaacgcatggagtgtgtattgttcccagtgacacttcagagagctggtagttagtagcatgttgagccaggcctgggtctgtgtctcttttctctttctccttagtcttctcatagcattaactaatctattgggttcattattggaattaacctggtgctggatattttcaaattgtatctagtgcagctgattttaacaataactactgtgttcctggcaatagtgtgttctgattagaaatgaccaatattatactaagaaaagatacgactttattttctggtagatagaaataaatagctatatccatgaaaaaaaaaaaaaaaaaaaaa

SEQ ID NO: 550 - DNA, 2347 bp, Homo sapiens
gagcaatggagcttaccatctttatcctgagactggccatttacatcctgacatttcccttgtacctgctgaactttctgggcttgtggagctggatatgcaaaaaatggttcccctacttcttggtgaggttcactgtgatatacaacgaacagatggcaagcaagaagcgggagctcttcagtaacctgcaggagtttgcgggcccctccgggaaactctccctgctggaagtgggctgtggcacgggggccaacttcaagttctacccacctgggtgcagggtgacctgtattgaccccaaccccaactttgagaagtttttgatcaagagcattgcagagaaccgacacctgcagtttgagcgctttgtggtagctgccggggagaacatgcaccaggtggctgatggctctgtggatgtggtggtctgcaccctggtgctgtgctctgtgaagaaccaggagcggattctccgcgaggtgtgcagagtgctgagaccgggaggggctttctatttcatggagcatgtggcagctgagtgttcgacttggaattacttctggcaacaagtcctggatcctgcctggcaccttctgtttgatgggtgcaacctgaccagagagagctggaaggccctggagcgggccagcttctctaagctgaagctgcagcacatccaggccccactgtcctgggagttggtgcgccctcatatctatggatatgctgtgaaatagtgtgagctggcagttaagagctgaatggctcaaagaatttaaagcttcagttttacatttaaaatgctaagtgggagaagagaaaccttttttttggggggcggtttttttggtttgttgttggttttttttttttttttggcgggaagaaagagttttgctcttgttgcccaggctggagtgcaatggcgtggtctccgctcactgcaacctccacctcgcgggtttaggcgattcttctgcctcagcctccctagtagctgggattacaggtgcccaccaccatgcccagctaatttgtatttttagttgagacagggtttcactacgttggccaggctggtcttgaactcctgatctcaggcaatccacccacctcagcctcccaaagtgctgggatgacaggcgtgagcaaccgcacccagcttaaggtttttttgttttgttttgagacggagttttcgctcttgttgcccaggctggagtgcaatgctgtgatctcagcttaccacaacctccacctcccgggttcaggtgattcacctgcctcagcctcctgagtggctggtattacaggcatgcgtcaccacgccggctaattttgtacttttagtagagatggtgtttccccacgttggtcagtctggtctcaaattcctgacctcaggtgatctgcctgcctcggcctcccaaagtgctgtgattacagacgtcagccaccatgcctggcctgaaaccttttttaggtaaagttgaattccatccttaaaagtttctgttatatcctatttagccattttctattgtctcccaaagaattcacatcaaaaaaacagctttgaactcccccttcaaaggaaacagtcgactttcataattagcatctaccattatccccaaatcttattttattcattgacttgaaattttttccaattgctttttttttttttttttttaaggttaagagcagaggtttactaggccaaagaaagagaatagctctctgttgcagagaggggtcctggagaaatgggttaccccagttgtcttatttaaatggttacccatcagattttaattttatcttctctttgagagcttggtaataagaagcacttaaatcactccaaagaagactttaaaaagggagcagtgaaaaggtcttaataatttattgattgaattaagaaatactagctaattaagaatctgagtctaaacagcacagattttttctttctgcttttaaattgtgttttaaaaaaagagacagggggctgggcgtggtggctcacgcctgtaatcctagcactttgggaggccgaggcgggtggatcacgaggtaggagttaaagaccagcctggccaacatggcaaaaccctactaaagatacaaaaaaaaaaaaaaattggccaggcgtggtggtgggtgcctgtaatcccaggtacttggaaggctgaggcaggagaatctcttgaacccagaaggcgaaggttgcagtgaaccgagatcatgccattgtactctagcctgggtgacaagagcaagactccgtctcaaaaaaaaaaaaaaaaaaaaaaaaaaaaaaaaaaaaaaaaaaaaa

SEQ ID NO: 551 - DNA, 2308 bp, Homo sapiens
gtcggggacggggcggggctggcggcgggggcggggacccggagcgggaagatggcggcggcgcaggaggcggacggggcccgcagcgccgtggtggcggccgggggaggcagctccggtcaggtgaccagcaatggcagcatcgggagggacccgccagcggagacccagcctcagaacccaccggcccagccggcacccaatgcctggcaggtcatcaaaggtgtgctgtttaggatcttcatcatctgggccatcagcagttggttccgccgagggccggcccctcaggaccaggcgggccccggaggagccccacgcgtcgccagccgcaacctgttccccaaagacactttaatgaacctgcatgtgtacatctcagagcacgagcactttacagacttcaacgccacgtcggcactcttctgggaacagcacgatcttgtgtatggcgactggactagcggcgagaactcagacggctgctacgagcactttgctgagctcgatatcccacagagcgtccagcagaacggctccatctacatccacgtttacttcaccaagagtggcttccacccagacccccggcagaaggccctgtaccgccggcttgccacagtccacatgtcccggatgatcaacaaatacaagcgcagacgatttcagaaaaccaagaacctgctgacaggagagacagaagcggacccagaaatgatcaagagggctgaggactatgggcctgtggaggtgatctcccattggcaccccaacatcaccatcaacatcgtggacgaccacacgccgtgggtgaagggcagtgtgccccctcccctggatcaatatgtgaagttcgacgccgtgagcggtgactactatcccatcatctacttcaatgactactggaacctgcagaaggactactaccccatcaacgagagcctggccagcctgccgctccgcgtctccttctgcccgctctcgctttggcgctggcagctctatgctgcccagagcaccaagtcgccctggaacttcctgggtgatgagttgtacgagcagtcagatgaggagcaggactcggtgaaggtggccctgctggagaccaacccctacctgctggcgctcaccatcatcgtgtctatcgttcacagtgtcttcgagttcctggccttcaagaatgatatccagttctggaacagccggcagtccctggagggcctgtccgtgcgctccgtcttcttcggcgttttccagtcattcgtggtcctcctctacatcctggacaacgagaccaacttcgtggtccaggtcagcgtcttcattggggtcctcatcgacctctggaagatcaccaaggtcatggacgtccggctggaccgagagcacagggtggcaggaatcttcccccgcctatccttcaaggacaagtccacgtatatcgagtcctcgaccaaagtgtatgatgatatggcattccggtacctgtcctggatcctcttcccgctcctgggctgctatgccgtctacagtcttctgtacctggagcacaagggctggtactcctgggtgctcagcatgctctacggcttcctgctgaccttcggcttcatcaccatgacgccccagctcttcatcaactacaagctcaagtctgtggcccaccttccctggcgcatgctcacctacaaggccctcaacacattcatcgacgacctgttcgcctttgtcatcaagatgcccgttatgtaccggatcggctgcctgcgggacgatgtggttttcttcatctacctctaccaacggtggatctaccgcgtcgaccccacccgagtcaacgagtttggcatgagtggagaagaccccacagctgccgcccccgtggccgaggttcccacagcagcaggggccctcacgcccacacctgcacccaccacgaccaccgccaccagggaggaggcctccacgtccctgcccaccaagcccacccagggggccagctctgccagcgagccccagggtttgtttgtggaggcgctgtctgtccctctgtccctctgtgtttccagccatctcgccctgccagcccagcaccactgggaatcatggtgaagctgatgcagcgttgccgagggggtgggttgggcgggggtggggccgggcccccctacgggatgcccacggccgttcatcatcttgtccctcgtccccctaccacactccccctcctagaccgccgccctttaacacagtctggatttaataaattcatatgggtgtttaacttaaaaaaaaaaaaaaaaaaaaa

SEQ ID NO: 552 - DNA, 2671 bp, Homo sapiens
ggtggccgagaaccagggctttgtggcagcactgatggtgcaggaggcaccggccctggtacggctgagcctggggtcccatcgggtcaagggcccactcccagtgttgaagctccagccggaggcgctggagcccatctactctctggagctgcgcttccgtgtggaaggacagctgtatgcacccctggaggctgtccatgtgccctgcctgtgtcctggccgccctgcccgccctctgctcctgcctctgcagccccgatgcccggcccccgcacggctggatgtccatgccctttacaccacatccactggtctcacgtgccatgcccacttgccacccctgttcgtgaactttgccgacctctttctgcctttcccgcagcctccagagggggccgggctgggcttctttgaggagctctgggattcctgcctgccagagggtgctgagagtcgtgtgtggtgtccacttgggccacagggcctggagggcttggtgtcccgccacctggagccttttgtggtggtggcccagcctcctaccagctactgtgtagcaatccacctgcccccggactcaaagctgctgctgcggctggaggcggccctggcagatggagtgcctgtggccctgcggaccgatgactgggccgtgctgcccctggcgggggactacctccgtgggctggcggctgctgtctgagccccgggagaccaggtgggggcaggactgtggcccttgtgggggccaaggcacactcctgtagctctgtcgccaaaaccctgcattccgcagtgccctcgctggcttgttttcttttgggccccggttgggagcaggctcctgggggtgagggtctgtctgagtctgtttttgctgctctagcaagatccctgagacggggtaagttataataaacagaaatgtattggctcagagctctggaggctgggaagtccatagtggagggcccagagcccagtgaggacccttctgcatcttcccatgacagaggacagagtgacaggagtgaggggagagagcgaacccactcccaagataacggcctgagtccacgcaggagggcagagccctcgtggcctgaccacctcttagggtctaatcttatactgttacagtggcaatcgcatttcaacgtgagcgtgggaggggacaaacattcaaaccatagcagggtcataggccccaagaaggcttccagacagaacccggcactgtagagctacagagttccttctcacccagacacactagtgctctccagaatctctgcccaggaggcaggggaaaaatctcctttctgcttcccagagagggtctggccttgcccaaggccactcagtgatttaggaagaaggctgaagctagagtgtggacctgacctgttggacagtacttttctttctttttttttcggggaggggttaaagacaggatctcactctggcgctctggagtgcagtggtgtgattagggatcattgcagactctgcctctcaggctcaggtgatcctcccatctcagcctgcctccgagtagctgggactacaggtgtgagtcaccactgtattttttgcagacaggatctccctgtttcctaggctggtctcgaactcctgggcttaaatgactcttctgcctcagcctcaccaaagtgttgggattactggtgtgagcccccacacctggccgagccagcgcttctcaactcccaaggtttgcaagctccctgccccagggagctcacgccaggcaggccagtgggcctaagccagaaacagaaagacagcagtggccaggtggagagcttcccaagctgtgccgattagagccagctctaggaagggcctgctaataaggtctagggtctgagaccaagttttttctaatctcagcccctaagaaacctaatttgtgcttaggaatcttcccaggtaagaagaactagttcctctagttgttgtttttttttcccaaacatgcaaacactgaggattgagctgtgtggggtcagctgtgctgccaggcacatgtacgttgcctcatttcatccttgcaacagctctgcagggccccgcagatgaggaaatccgtaggcaggagcggttgagtgattttcctaaggtcacccagctgtttggtaatagtgttttgtcatctggtagcaggtttccattaccatgccatcagagcagacctcagccagggccacagaggtcccaaccgtctctgccctcttctgctgcccctgcctcatgggctcccagccacaggttccccatgggccagctttacgcctcctgatccttccgattggggcagactaggagaggaaagacgggcctgggctgggtgcggtggctcatgcctgtaatcccagcactttgagaggctgaggcgggtggatcacctgaggccaggtgtttgagatcagcctggccagcatggcgaaaccctgtgtctaataaaaatacaaaaattagccgggcgtggtggcgggcgcctgtaatcccagctacttgggaggctgaggcaggagaattacttgaacctgggaggcagaagttgcagtgagccgagatcacgccactgcactccagcctgggcgacagagcaaggctctgtctcaaaaaaaaaaaaaaaaaa

SEQ ID NO: 553 - DNA, 2918 bp, Homo sapiens
cgaggttagggcccgcgttgcgacgtggtgcagcgcatattttcacaagtgggtctcccttgtccgggactatggccaccgactcgtgggccctggcggtggacgagcaggaagcggctgtcaagtcgatgaccaatttgcagatcaaggaagagaaagtcaaagcagataccaatggtattatcaaaaccagtaccactgccgagaaaacagatgaagaggagaaagaggacagagctgcccagtccttactcaacaagctgatcagaagcaaccttgttgataacacaaaccaagtggaagtcctgcaacgggatccaaactcccctctgtactcggtgaagtcgtttgaagagcttcggctgaaaccacagcttctccagggagtctatgccatgggcttcaatcgaccctccaagatacaagagaacgcattacccatgatgcttgctgaacccccacagaatctgattgcccagtctcagtctggcactggtaaaacagctgcctttgtcttagccatgctcagccgagtggagccatcagacagatacccccagtgtctgtgcctctccccaacatatgagctggcgcttcaaacaggaaaagtgattgagcagatgggcaaattttacccagaactgaagcttgcctatgccgttcgaggcaataaattggaaagaggccagaagatcagtgagcagattgtcattggcacccctgggaccgtgctggactggtgctccaagctcaagttcattgatcccaagaaaatcaaggtgtttgttctggatgaggctgatgtcatgatagccactcagggccaccaagatcagagcatccgcatccagaggatgctgcccaggaactgccagatgctgcttttctccgccacctttgaagactctgtgtggaagtttgcccagaaagtggtcccagacccaaatgttatcaaactgaagcgtgaggaagagaccctggataccatcaagcagtactatgtcctgtgcagcagcagagacgagaagttccaggccttgtgtaacctctacggggccatcaccattgctcaagccatgatcttctgccatactcgcaaaacagctagttggctggcagcagagctctcaaaagaaggccaccaggtggctctgctgagtggggagatgatggtggagcagagggctgcggtgattgagcgcttccgagagggcaaagagaaggttttggtgaccaccaacgtgtgtgcccgcggcattgatgttgaacaagtgtctgtcgtcatcaactttgatcttcccgtggacaaggacgggaatcctgacaatgagacctacctgcaccggatcgggcgcacgggccgctttggcaagaggggcctggcagtgaacatggtggacagcaagcacagcatgaacatcctgaacagaatccaggagcattttaataagaagatagaaagattggacacagatgatttggacgagattgagaaaatagccaactgagaagctccaccagccactgatgccagccctggcactgcccctgcacaggagacaagtgcatttagggcacaggccccgacatcaccccaaggacaacggcagaagtagagagaaactacctacctcacttcaaattatgtttggacttgacaaaaataggtgcaaatgatggggggcaatagaagaaaaaatttgcattttggaaaattgggtcctttccccacttttttaaagccacattcccccatctttataataatctggtcacagtggtagtcgctggccccaggaccccctcctgattttggctaggcatcgtggaaccagctccagcccctgaagaaacgatagatgtgcaggttgtgcggaagaggctgagtggaaaatggtgtgagccccaccgctgtgcatcgaatgagggaagtggcagcagagaggccagagctgccccctctctgtctcttcaatggacccttcacaagtgtttctcctgcccttggggctgtcttccttctcctgaaatccagagactttcttgctcatcccttctccctttcacttctgttctctgctgcagaaagcagacttgcatatccctgatgagcagctcggctacttttgtaaacttcagatttggagagaaacacgaaagtctgaatcctgaccccttgagagagagtgatctggcgagggccgatgaaggggctgggcctggtcttgccttctcttctctcggttgctccctctgcctaggcccctggtactcagtcacggcagccaggagaccccaggtgagtttctgagcgcatacgtagttggttcttacccccaggtgtcacacggggccgagagctgagcaagaatttggaatggaagttatgaccaagggaattatgctgttcatttataatagtggacattatggagagctctgattcctacataatatgaataaggatggataggccgggcgtggtggctcatgcctataatcccagcacgttgggaggctgaggcgggcggatcggttgagctcaggcgttcgggaccagcctggccaacatgatgaaaccccgtctctaccaaaaatagaaaaaaatatagccgggcctggtggcgcacgcctgtagtcccagctactcgggaggctgaggtaggaggatcgcttgagcctgggtagaggctgctgtgagctgaaatggcgccactgcactccagcctgggtaacagagcgagaccccgactcaataaataaataaggatggataaattgtagcgtatgcaccattcattatgctaagacattttaaagtaattatgagaaacgctctactaatgatttgtttttatttgtatttttctgcttattagacaaatatatactcattttaaaaaaaaaaaaaaaaaaaa

SEQ ID NO: 554 - DNA, 1912 bp, Homo sapiens
gggcggccgacgacgttcgtcatttagtgcgggagggatcctgaaccgcgcggccgaaccctccggtgtcccgacccaggctaagcttgagcatggctgagcaggagcccacagccgagcagctggcccagattgcagcggagaacgaggaggatgagcactcggtcaactacaagcccccggcccagaagagcatccaggagatccaggagctggacaaggacgacgagagcctgcgaaagtacaaggaggccctgctgggccgcgtggccgtttccgcagaccccaacgtccccaacgtcgtggtgactggcctgaccctggtgtgcagctcggccccgggccccctggagctggacctgacgggcgacctggagagcttcaagaagcagtcgtttgtgctgaaggagggtgtggagtaccggataaaaatctctttccgggttaaccgagagatagtgtccggcatgaagtacatccagcatacgtacaggaaaggcgtcaagattgacaagactgactacatggtaggcagctatgggccccgggccgaggagtacgagttcctgacccccgtggaggaggcacccaagggtatgctggcccggggcagctacagcatcaagtcccgcttcacagacgacgacaagaccgaccacctgtcctgggagtggaatctcaccatcaagaaggactggaaggactgagcccagccagaggcgggcagggcagactgacggacggacgacggacaggcggatgtgtcccccccagcccctcccctccccataccaaagtgctgacaggccctccgtgcccctcccaccctggtccgcctccctggcctggctcaaccgagtgcctccgacccccctcctcagccctcccccacccacaggcccagcctcctcggtctcctgtctcgttgctgcttctgcctgtgctgtgggggagagaggccgcagccaggcctctgctgccctttctgtgccccccaggttctatctccccgtcacacccgaggcctggcttcaggagggagcggagcagccattctccaggccccgtggttgcccctggacgtgtgcgtctgctgctccggggtggagctggggtgtgggatgcacggcctcgtgggggccgggccgtcctccagccccgctgctccctggccagcccccttgtcgctgtcggtcccgtctaaccatgatgccttaacatgtggagtgtaccgtggggcctcactagcctctaactccctgtgtctgcatgagcatgtggcctccccgtcccttccccggtggcgaacccagtgacccagggacacgtggggtgtgctgctgctgctccccagcccaccagtgcctggccagcctgcccccttccctggacagggctgtggagatggctccggcggcttggggaaagccaaattgccaaaactcaagtcacctcagtaccatccaggaggctgggtattgtcctgcctctgccttttctgtctcagcgggcagtgcccagagcccacacccccccaagagccctcgatggacagcctcacccaccccacctgggcccagccaggagccccgcctggccatcagtatttattgcctccgtccgtgccgtccctgggccactggcctggcgcctgttcccccaggctctcagtgccaccacccccggcaggccttccctgacccagccaggaacaaacaagggaccaagtgcacacattgctgagagccgtctcctgtgcctcccccgccccatccccggtcttcgtgttgtgtctgccaggctcaggcagaggcgcctgtccctgcttcttttctgaccgggaaataaatgcccctgaaggaaaaaaaaaaaaaaaaaaaaaaaaaaaaaaaaaaaaaaaaaaaaaaaaaaa

SEQ ID NO: 555 - DNA, 633 bp, Homo sapiens
actcttctggtccccacagactcagagagaacccaccatggtgctgtctcctgccgacaagaccaacgtcaaggccgcctggggtaaggtcggcgcgcacgctggcgagtatggtgcggaggccctggagaggatgttcctgtccttccccaccaccaagacctacttcccgcacttcgacctgagccacggctctgcccaggttaagggccacggcaagaaggtggccgacgcgctgaccaacgccgtggcgcacgtggacgacatgcccaacgcgctgtccgccctgagcgacctgcacgcgcacaagcttcgggtggacccggtcaacttcaagctcctaagccactgcctgctggtgaccctggccgcccacctccccgccgagttcacccctgcggtgcacgcctccctggacaagttcctggcttctgtgagcaccgtgctgacctccaaataccgttaagctggagcctcggtggccatgcttcttgccccttgggcctccccccagcccctcctccccttcctgcacccgtacccccgtggtctttgaataaagtctgagtgggcggcaaaaaaaaaaaaaaaaaaaaaaaaaacaaaaaaaaaaaaaaaaaaaaaaaaaaaaaa

SEQ ID NO: 556 - DNA, 1229 bp, Homo sapiens
agaggaaattgcggtagtgaccctcgggcctcgccatgaagagccgctttagcaccattgacctccgcgccgtactcgcggagctgaatgctagcttgctaggaatgagagtaaacaatgtttatgatgtggataataagacataccttattcgtcttcaaaaaccggactttaaagctacacttttacttgaatctggcatacgaattcatacaacagaatttgagtggcctaagaatatgatgccgtctagttttgccatgaaggggaacattgttcttacagattatgagtacgtaattttaaatattctaaggtttcgaactgatgaggcagatgatgttaaatttgctgttcgtgaacgctatccacttgatcatgctagagctgctgaacctttgcttactttggaaaggttgactgaaatagtagccagcgcacctaagggtgaactactgaagagggtgcttaacccattacttccctatggaccagctctcattgaacactgtcttttagaaaatggattctcgggtaatgtcaaagtggatgaaaaacttgaaactaaagatattgaaaaagtacttgtttctctgcagaaagcagaagactatatgaaaacaacatccaacttcagtgggaagggatatatcattcagaaaagagaaataaaaccatgcttggaagcagataaaccagttgaagacatactgacgtatgaggaatttcatcctttcttgttttctcaacattcacaatgtccatatatagaatttgaatcatttgacaaggcggtggatgaattttattccaagatagaaggccagaaaattgacttaaaagctttacaacaggaaaagcaagcattgaagaaattagataatgttcgaaaggatcacgaaaacagattggaagctcttcagcaggctcaggaaatagacaaactgaaaggagagctcatagaaatgaacctacaaatagttgacagagccattcaggtagttcgaagtgctttagctaaccagatagattggacagaaattgggttaattgtgaaagaagcccaggctcaaggagaccctgttgcaagtgcaatcaaagaattaaaactacaaacaaaccatgttacaatgctgctaagaaatccatacttgttatcagaggaggaagatgatgatgttgatggtgacgtcaatgttgaaaaaaaaaaaaaaaaaaaaaaaaaaaaa

SEQ ID NO: 557 - DNA, 1635 bp, Homo sapiens
ggagttggttcgcgcaggtgcggcgcctgggtccccatggcgctgtggcgcggctccgcgtacgcgggcttcctggcgctggccgtgggctgcgtcttcctgctggagccagagctgccaggctcggcgctgcgctctctctggagctcgctgtgtctggggcccgcgcctgcgcccccgggacccgtctcccccgagggccggttggcggcagcctgggacgcgcttatcgtgcggccagtccggcgctggcgccgcgtggcagtgggagtcaatgcatgtgttgatgtggtgctctcaggggtgaagctcttgcaggcacttggccttagtcctgggaatgggaaagatcacagcattctgcattcaaggaatgatctggaagaagccttcattcacttcatggggaagggagcagctgctgagcgcttcttcagtgataaggaaacttttcacgacattgcccaggttgcgtcagagttcccaggagcccagcactatgtaggaggaaatgcagctttaattggacagaaatttgcagccaactcagatttaaaggttcttctttgcggtccagttggtccaaagctacatgagcttcttgatgacaatgtctttgttccaccagagtcattgcaggaagtggatgagttccacctcattttagagtatcaagcaggggaggagtggggccagttaaaagctccccatgccaaccgattcatcttctctcacgacctctccaacggggccatgaatatgctggaggtgtttgtgtctagcctggaggagtttcagccagacctggtggtcctctctggattgcacatgatggagggacaaagcaaggagctccagaggaagagactcttggaggttgtaacctccatttctgacatccccactggtattccagttcacctagagctggccagtatgactaacagggagctcatgagcagcattgtccatcagcaggtctttcccgcggtgacttcccttgggctgaatgaacaggagctgttatttctcacccagtcagcctctggacctcactcttctctctcttcctggaacggtgttcctgatgtgggcatggtcagtgacatcctcttctggatcttgaaagaacatgggaggagtaaaagcagagcctcggatctcaccaggatccatttccacacgctggtctaccacatcctggcaactgtggatggacactgggccaaccagctggcagccgtggctgcaggagctcgtgtggctgggacacaggcctgcgccacagaaaccatagacaccagccgagtgtctctgagggcaccccaagagttcatgacttcccattcggaggcaggctccaggattgtattaaacccaaacaagccagtagtagaatggcacagagagggaatatccttccacttcacaccagtattggtgtgtaaagaccccattcgaactgtaggccttggagatgccatttcagccgaaggactcttctattcggaagtacaccctcactattaggaagattcttaggggtaatttttctgaggaaggagaactagccaacttaagaattacaggaagaaagtggtttggaagacagccaaaaaaaaaaaaaaaaaaaaa

SEQ ID NO: 558 - DNA, 1100 bp, Homo sapiens
gaggtggccccggatgctgcggcgcccgctggccgggctggctgcggccgccctgggccgggccccaccggacggcttgctctgctctttacctggggttgctgtcgaggaccctgtgcaagactcggccggtttttctttctccctgatggacagacccaaacatagccgcgcagcatcgtgaagggctggggccttcactcctctgtggctctggaagagcccgatttcctcaggaggcatgtcgggccccaggcctgtggtgctgagcgggccttcgggagctgggaagagcaccctgctgaagaggctgctccaggagcacagcggcatctttggcttcagcgtgtcccataccacgaggaacccgaggcccggcgaggagaacggcaaagattactactttgtaaccagggaggtgatgcagcgtgacatagcagccggcgacttcatcgagcatgccgagttctcggggaacctgtatggcacgagcaaggtggcggtgcaggccgtgcaggccatgaaccgcatctgtgtgctggacgtggacctgcagggtgtgcggaacatcaaggccaccgatctgcggcccatctacatctctgtgcagccgccttcactgcacgtgctggagcagcggctgcggcagcgcaacactgaaaccgaggagagcctggtgaagcggctggctgctgcccaggccgacatggagagcagcaaggagcccggcctgtttgatgtggtcatcattaacgacagcctggaccaggcctacgcagagctgaaggaggcgctctctgaggaaatcaagaaagctcaaaggaccggcgcctgaggcttgctgtctgttctcggcaccccgggcccatacaggaccagggcagcagcattgagccacccccttggcaggcgatacggcagctctgtgcccttggccagcatgtggagtggaggagatgctgcccctgtggttggaacatcctggggtgacccccgacccagcctcgctgggctgtcccctgtccctatctctcactctggacccagggctgacatcctaataaaataactgttggattagaaaaaaaaaaaaaaaaaaa

SEQ ID NO: 559 - DNA, 2110 bp, Homo sapiens
ggggagcggcaatcatggcgccacctgtgagatactgcatccccggcgaacgtctgtgtaacttggaggagggcagcccgggcagcggcacctacacccgccacggctacatcttttcgtcgcttgccggctgtctgatgaagagcagcgagaatggcgcggtaaaggaagcggcatgccatctcccctctgtttttcccttaggctgcccttgagttccagtccttaggcatgggcactgcggacgcgtctttagtgcctcagtggtacaatgttggtctcttagtttcttctagccgtatcgccgctgtggtgcacttagccaccacacactagttgtgttgatctcgcttggttgtgctgctgaccctcggggagggaagttgggacaaaagcagatgcgaactcagtatcccatcccagcccagctcagcccagcagtgagttgcatactgtatgaatgttgcttacctttccgactttatctagcgccactatctccacctcactgacgcaatctagtcatactgtcttttctgtgtttaaaagttataatcacagtctctgcttgccctttaaaaattttttataacatactagcttctttcagtgtcggtaatgcgccaagctttctcctgctacagagcctttgtaacatgccatctatctggaacgcttctatcttcctaggcctatttaattcctacctcctttagatagcttctctactatcacctcagagaagtccttctggacccactaattgaggaaaggagttttgtggggtgttttgtttttgtttgttttgttaaagactcacaaaaaactctgttccttttcttccaagcactatgtcagcatatgatgagacactcaggtatatgtttcctactagacttctcccctgcttaaatctaagtccgtgaaagcaggccctaccaccataccatccgtatatagcacaaggcagctcctcaataaatgttgaatgtgtgagtaatacctacctttctagtttcagagatagatccaggattagctcaggatcatataagcaatatttgaaggagcacaatagaaagaggattcagaattagaacagttacgttctggctaacttgactttgattctgctttgagtaagtaacttaagctgtctgattcaaggggctttctattcagtcattgttgggaatgttcttaacagtcctgagtttgttcatttcatagatatcacttgagtattttcatgtgtcaggcacagcgctgacttggtttctgctatcaaaggacacagacacaaattgtaaacaaataaatgctcaaatgagcatatggttacatatgtggtggtgctttgaaagaatattacagggcaccttgagaacatgtaacaggcaaacccatcctagtcagcagaagtgacatttaagctgaatcatctaaggagtaggtaagagtcgggtgggtggagagagtgcagctctggcagaaagaataggttgaagagagatctgaaagtgggaagaatttagtaagttggggaaactgaaagaaggccaggagagctgaagcattgtgagcaacggagagattgataaaagatgaggctcaaaatatctgtcttataccaacagccaataccatgctcaaagagaaaactctgcaagtattcacttaaaatagaagaaaacaagcatagccgctattatgtaacatttttgtggaaatttcagcctgtgcaataaaataagaaacagaaggaagcagtataactttggaggaaagagtaaattgtcggcagggcgcagtggctcacacctgtaatcccagcactttgggaagccaaggcaggtggatcacctgaggtcaggagttcgagaccagcctggccaacatggtgaaaccccatctctactaaaaatacaaaaaattacccgagcatggtgacaggcttctgtaatcccagctactcgggaggctgaggcaggagaatcactagaacccaggaggtggaggttgcagtgaaccaagatggcacccttgcactccatcctgggcaacaagagtgaaactccatcgcaaaaaaaaaaaaaaaaaaaaaaaaaaa

SEQ ID NO: 560 - DNA, 1657 bp, Homo sapiens
ggcctggatagggcagggcaaaggggaactgacccgcttcgctcccgggcctcctccttttggggcatgttgatccgcggctgcgctccatgttccagtttcatgcaggctcttgggaaagctggtgctgctgctgcctgattcccgccgacagaccttgggaccggggccaacactggcagctggagatggcggacacgagatccgtgcacgagactaggtttgaggcggccgtgaaggtgatccagagtttgccgaagaatgggatgcttggagttcactgggtgatatgaccaaagaggaagccatgattgcatatgttgaagaaatgaaaaagattattgaaactatgccaatgactgagaaagttgaagaattgctgcgtgtcataggtccattttatgaaattgtcgaggacaaaaagagtggcaggagttctgatataacctcagtccgactggagaaaatctctaaatgtttagaagctctcagaagatttgtatgcacattaaagttgagaagctctgatgtatttaccctcgggatatagctttggccacttggacaatttgcttttatcttggtaatgttctcacttctactccaaacgccaaaaccgttaatggtaaagctgaaagcagtgacagtggagccgagtctgaggaagaagaggcccaagaagaagtgaaaggagcagaacaaagtgataatgataagaaaatgatgaagaagtcagcagaccataagaatttggaagtcattgtcactaatggctatgataaagatggctttgttcaggatatacagaatgacattcatgccagttcttccctgaatggcagaagcactgaagaagtaaagcccattgatgaaaacttggggcaaactggaaaatctgctgtttgcattcaccaagatataaatgatgatcatgttgaagatgttacaggaattcagcatttgacaagcgattcagacagtgaagtttactgtgattctatggaacaatttggacaagaagagtctttagacagctttacgtccaacaatggaccatttcagtattacttgggtggtcattccagtcaacccatggaaaattctggatttcgtgaagatattcaagtacctcctggaaatggcaacattgggaatatgcaggtggttgcagttgaaggaaaaggtgaagtcaagcatggaggagaagatggcaggaataacagcggagcaccacaccgggagaagcgaggcggagaaactgacgaattctctaatgttagaagaggaagaggacataggatgcaacacttgagcgaaggaaccaagggccggcaggtgggaagtggaggtgatggggagcgctggggctccgacagagggtcccgaggcagcctcaatgagcagatcgccctcgtgctgatgagactgcaggaggacatgcagaatgtccttcagagactgcagaaactggaaacgctgactgctttgcaggcaaaatcatcaacatcaacattgcagactgctcctcagcccacctcacagagaccatcttggtggcccttcgagatgtctcctggtgtgctaacgtttgccatcatatggccttttattgcacagtggttggtgtatttatactatcaaagaaaaaaaaaaaaaa

SEQ ID NO: 561 - DNA, 5011 bp, Homo sapiens
cggagccattttgtagagaaacaagcggagttaaccgaagagggggtcgaggagagccggagtcggggacccaggagtttcctgtgtccagcgctgccggagccgcctgaggtgccatgtttcagaacagagtaagacccctggtaaagaagaactgaagatattatacagataccagatatagcctaattacaaagaaagcattaacctgcctctgaggtgactaaaggggaataatggtgattttgcgccgggctcggccgcctgcttccgccccaaccagcaatgaatcttgactcgctctcgctggccttgtctcaaatcagctacctggtggacaatttaaccaagaaaaattaccgagccagccagcaggaaatacagcatattgtgaatcggcacggtcctgaggcagacaggcatttattacgctgcctattttcgcatgtggatttcagtggcgatggtaaaagcagtggcaaagatttccatcagactcagtttctgattcaggagtgtgcgttgctgattacaaagccaaattttatctcgacgctgtcctatgccattgataatccattgcactatcagaagagtttaaagcctgcaccccacttatttgcccagctgagtaaagtgctcaaattaagcaaagtacaagaggtaatttttggccttgccctgttgaattcttccagctcagatcttagaggtttcgctgcccagtttatcaaacagaagcttccagatcttctgcgttcttacattgacgcagacgtcagtggaaatcaagaaggtggcttccaagatatagcaatagaggtcctacacctcctcctctcccatctcctctttgggcagaagggagcctttggagttggacaagaacagatagacgcttttcttaagacgctgcgcagagattttccccaagaacgctgtcccgtggtgctcgcaccacttttataccctgaaaaacgggacattctaatggacaggatcctgcctgattccggaggggtagctaaaaccatgatggagagctctttggctgatttcatgcaagaagtaggctatggcttttgtgcaagtattgaagaatgtcgcaatataatcgtgcagtttggtgttcgggaggtcacagctgcccaggttgcaagggttttgggaatgatggctcgaactcattcagggttaacagatggcattccattacagagtatttctgctccgggcagtgggatctggagtgatgggaaagataaaagtgatggagcacaggcacacacatggaatgtagaagtcttgattgacgttcttaaagaactgaatccaagtttgaatttcaaggaagtaacttatgaactggaccatcctggatttcaaattcgtgacagtaaaggacttcataatgtggtttatggcattcagaggggtttgggtatggaagtgttcccagtagacctcatatatagaccttggaaacatgctgaaggccagctctccttcattcaacattcccttataaatccagagatcttctgttttgctgactatccctgtcatactgttgccactgatattctgaaagcaccaccagaggatgacaatcgagaaattgccacatggaagagcttggatttgattgaatctctgctgaggcttgcagaggttgggcagtatgagcaagtcaaacagctcttcagcttccctatcaaacactgtccagacatgctggtattggccttactacaaattaacacctcttggcataccttgcgccatgaacttatctccactctgatgccaattttccttggaaaccatcctaactcagctattattttgcactatgcatggcatgggcagggacagtctccctcaattcgccaacttatcatgcatgcaatggcagaatggtacatgagaggggagcagtatgatcaggccaaattgtctcgaatacttgatgtggcccaggacttgaaggccttgtcaatgctgctaaatggtactccatttgcctttgttattgaccttgctgcacttgcttcacgtcgtgaatacctcaaacttgataagtggctcacagctaaaattcgagagcatggggagccttttatccaggcgtgtatgacttttttaaagagacggtgtccttctattttgggcggacttgccccagaaaaagaccagcccaaaagtgctcaacttcctccagaaactttggcgacaatgttggcctgtctgcaagcttgtgcagggagtgtttctcaggagctatcagaaactatcctcaccatggtagccaattgcagtaatgttatgaataaggccagacaaccaccacctggagttatgccaaaaggacgtcctcctagtgctagcagcttagatgccatttctcctgttcagattgaccctcttgctggaatgacatctcttagtataggtggttcagctgcccctcacacccagagtatgcagggttttcctccaaatttgggttctgcattcagtacccctcagtcaccagcaaaagcatttccacccctttcaacccccaatcagaccactgcattcagtggtattggaggactttcatcacagcttccagtaggtggtcttggcacaggcagcctgactggtataggaactggtgctcttggactccctgcagtgaataacgacccttttgtacagaggaaactgggcacctctggactgaatcagcctacattccagcagagtaagatgaaaccttcggacttgtctcaggtgtggccagaggcaaaccagcactttagtaaagagatagatgatgaagcaaacagctatttccagcgaatatataatcatccaccacatccaaccatgtctgttgatgaggtattagaaatgctgcagagatttaaagactctactataaagagggaacgagaagtatttaactgtatgctaaggaacttgtttgaagaatatcgtttttttccccagtatcctgataaagagttacatataacagcctgcctatttggtggtataattgagaaaggactggtcacttacatggcactaggtctggctctacgatatgttcttgaagccttacgcaagccttttggatccaaaatgtattatttcgggattgctgcactagatagatttaaaaacagattgaaggactatccccagtattgtcagcatttggcttctatcagtcactttatgcaatttccacatcatttacaggagtatattgagtatggacagcagtctagagatcctcctgtgaaaatgcaaggctctatcacaacccctggaagtattgcactggctcaggcccaggctcaggcccaggttccagcaaaagctcctcttgctggtcaagttagcactatggtaaccacctcaacaactaccactgttgctaaaacggttacggtcaccaggccaactggagtcagctttaagaaagatgtgccaccttctattaatactacaaatatagatacgttgcttgtggccacagatcaaactgagagaattgtggagcccccagaaaatatccaggagaaaattgcttttattttcaataatctctcacagtcaaatatgacacaaaaggttgaagagctaaaggaaacggtgaaagaagaatttatgccttgggtttcacagtatctggttatgaagagagtcagtattgagccaaactttcatagcctgtattcaaacttccttgacacgctgaagaatcctgaatttaacaagatggttctgaatgagacctacagaaacattaaagtgctcctgacctctgataaagctgcagccaatttctcagatcgttctttgctgaagaacttgggacattggctaggaatgatcacattagctaaaaacaaacccatcttacacactgacttggatgtgaaatcattgctgctagaggcttatgttaaaggacaacaagaattgctctatgtagtgccctttgttgccaaagtcttagaatctagcattcgtagtgtggtttttaggccaccaaacccttggacaatggcaattatgaatgtattagctgagctacatcaggagcatgacttaaagttaaacttgaagtttgaaatcgaggttctctgcaagaaccttgcattagacatcaatgagctaaaacctggaaacctcctaaaggataaagatcgcctgaagaatttagatgagcaactctctgctccaaagaaagatgtcaagcagccagaagaactccctcccatcacaaccacaacaacttctactacaccagctaccaacaccacttgtacagccacggttccaccacagccacagtacagctaccacgacatcaatgtctattcccttgcgggcttggcaccacacattactctgaatccaacaattcccttgtttcaggcccatccacagttgaagcagtgtgtgcgtcaggcaattgaacgggctgtccaggagctggtccatcctgtggtggatcgatcaattaagattgccatgactacttgtgagcaaatagtcaggaaggattttgccctggattcggaggaatctcgaatgcgaatagcagctcatcacatgatgcgtaacttgacagctggaatggctatgattacatgcagggaacctttgctcatgagcatatctaccaacttaaaaaacagttttgcctcagcccttcgtgtaagttggctatttccttggtataggtacaaaacgtattactgcttgtctgtaataatttttttctttgtctatatatggcactgggcgttaccacttattcttaataatcaccatatttgtttgatgtcttccatcattttagattgtaattctgtgaggcaaagcatcatgtctgtgtgtttttttttttttctgttatattctcaacacgatgtttgacagatagtagatacccaaatatttgttggtttaaataaattaagatttaaaaaggaaaaaaaaaaaaaaa

SEQ ID NO: 562 - DNA, 2419 bp, Homo sapiens
gagccggcggcgggaggagctagggctggagcctctccagcctcccgcgaaggtttgagcacaaaatgaacataattagggaaaataaggatctggcatgtttctacacaacaaaacattcatggagggggaagtataagcgtgtcttttcagttggaactcatgcgattactacatataatcccaataccttagaagtaacaaatcagtggccttatggagacatttgcagcatcagccctgttggaaaaggacaaggaacggagttcaacctcacatttcgtaaaggcagtggaaaaaagtcagaaactttaaaattttctacagagcacagaacagaacttcttacagaagcattgagatttagaactgatttttcagagggaaaaatcacaggaaggagatacaactgctataagcatcactggagtgactcaagaaaacctgtaattttggaagtaactccaggaggctttgaccaaattaatcctgcaaccaacagagtactctgttcctatgactatagaaatattgaaggatttgtagatctctcagattatcaaggaggattttgtatactttatggaggatttagtagattgcatttatttgcgtcagagcaaagagaagagattattaaaagtgcaatagaccatgctggtaactacataggtatttcattgcggatcaggaaagagcctttagaattcgagcaatatttgaatcttcgctttggaaaatacagcactgatgaatccatcacatctttagcagagtttgtagtccaaaaaatatcacctagacattcggagcctgttaaaagagttctagcacttacagaaacatgtttagtagaacgtgatccggcaacctataatattgcaacattgaagcctttaggagaagtatttgcgttggtctgtgactcagaaaatccacaactttttaccattgaatttataaaagggcaagtacggaaatattcttcaacagagagagattccttattagcaagtttgctggatggagtaagagcctctggtaatagagatgtttgtgtaaaaatgacaccaacccataaaggtcagcgatgggggttactcagcatgcctgttgatgaggaagtagagagccttcacctcaggttcttagctacgcctccaaatggcaactttgcagatgctgtattcaggttcaatgctaatatttcatacagtggagtcctacatgcagtaacacaagatggtctcttctcagaaaacaaagaaaaactgatcaataatgccataacagcattactgtcccaagaaggggatgtcgttgcttcaaatgcggaacttgagagtcagttccaggctgtgaggaggcttgtggcatccaaagctggtttcctggctttcactcagcttccaaagtttcgcgagcgtctaggggtgaaggtagtaaaagcactcaaaagaagcaacaacggaataatccatgcagcagttgatatgctttgtgcccttatgtgtcccatgcatgatgactatgacttaagacaagaacagttgaacaaagcttctcttctctcgtcaaagaagtttctggaaaacttactggagaaatttaattcccatgtggatcatgggactggtgccctagttattagttcgctcttggacttccttacctttgccctctgtgctccatatagtgagacaactgaagggcagcagtttgatatgctcttggagatggtagcatccgatggaagaaccctttttaaactttttcagcatccttccatggcaataataaaaggagctgggttggttatgaaggcaataatagaggaaggtgataaagaaattgctacaaaaatgcaggagcttgccctaagtgaaggtgccttacctcgacacttgcatactgcgatgtttacaataagctcagatcaaaggatgcttacaaatagacagctaagtagacatttagtgggactctggacagctgataatgcaactgcaacaaacttgttgaaacgcattttgccgccaggcttgctggcatacttggaaagctcagatctcgtacctgagaaggatgctgatcggatgcatgttagagacaatgtgaaaatagcaatggatcagtatggaaaatttaataaagttccagagtggcaaagactagctggaaaagctgctaaagaagttgaaaaatttgccaaagaaaaagtggatcttgtattgatgcactggagggataggatgggcattgctcaaaaagaggtaaaaataaaatttgcttccaaattcctggcaaaaaaaaaaaaaaaaaaaaaaaaaaaaaaaaaaaaaaaaaaaaaaaaaaaaaaaaaaaaaaaaaaaaaaaaaaaaaaaaaaaaaaaaaaaaaaaaaaaaaaaaaaaaaaaaaa

SEQ ID NO: 563 - DNA, 658 bp, Homo sapiens
  misc_feature (467)..(467): n is a, c, g, or t
  misc_feature (474)..(474): n is a, c, g, or t
  misc_feature (498)..(498): n is a, c, g, or t
attttaaaaactaaatatattttttcaatgccatcccttgacctgctttaccttaaccatgaataacagtgtatgccactcaagcccacagtggagactgaggccatcttagtaaagcacagaggagcctgggggagctccccgtctatccctggttcagttccaggggtgcaggcaatgtttggaagcccttagcagcagcatcactgtgggagctgccactgtctccatccacagacaaaatctgctccaagggatggacaaggagcactgttaggaccctacccagccttaccctcagcccacagggccacctgcttctgtcactcttactaggattcgccaaaaaagcgggggagtggtagggttttaaccagaacacaaagtggtagttcctcctagctgtaggagggtgggctgtcctgcaccagtgtctgcatgggctcctgcccactgggggggctcangccccangagtcccggcctggcccataaggngggtgctgccctcctgagggtcaactggagtctggctggtgtggaccacgacagtcttctcatccacaatctcacaggtggggttggtgaaagcagacaagggcagagtgattcgctgcatctccctctcacatactttctgatcatgctgttctttcaa

SEQ ID NO: 564 - DNA, 547 bp, Homo sapiens
tgggtctttggtagttttgcttgaaatatacttgcaatggcattaagtaaaggaaaataaagaacaatatcaaaagcttgtgctgaaagaagaatttcatgaagaaaatgaggagaaccatccattaggccttcagataacttatgaaaacttcttcgctcatttcttgatgttaacttgtggcggacattttttgttacagcttttgtgtatgtcagagagaggaatccatgctgctgatgagtgccatctagaagttttgtagttgtcacagatttttctttgcattgtagaaatactccttcaaaatgtcctgactgccaaccttcccctggcctgcttctatagtgatcaatattgaaactctctattttacatttcactttggtatatacatcctggacatctatggaagcactgagatcttctagttcactgaccatacaaacctctgtgcctttattttcaggatctggagcaaagagctttatagtaattttgggaagcacccactgcatccataaactaacacgtccactggttcctc

SEQ ID NO: 565 - DNA, 510 bp, Homo sapiens
ttataagaaatttattttttcacagatacagaacataaatccaagaaaaattattattatttttcacaattatgactaaatcatgttatttctagttatttacaagtactacaatgttctatgcatttcttcatcctagacattaataaaacacatccctttggtcttagatacttctctttggtctgtgttttctcctttctgaattttaatcttctgtgatgtgaggaaatttacgtgaacctttcacatatctatttttttccttgtgcacagttgataatttcctcccttagattccctgagaaaagaaacacaaaatattcttagtggattatctcaggaaaggcaaccagagggaagaggaatattggaccactgaaaatctcaaccaacgctaatattaggagcacacgtaccatgaggaagagaagggatggggaaaccaagatggcagagttagagcaacaaagttagtaacatgagagtttcccagcaatttgagtaaga

SEQ ID NO: 566 - DNA, 424 bp, Homo sapiens
tttttcaggaggcagcatcagatttatttattcctactcaacatgacccgggaacacaggagcaactctgtacacttctagaaactcacagctagctccaaaacaatagaaattttaaactacaaaagatgagttgtattcagcaaatataaagggtaattttagactgtgtgaacgtttatcagactatttacagcacccgggagacgggttcagatctcgccggcctccttctcttctgacctccgtgaagccatcttcccgttggagctctcaagcctccagtccgggggccctcgctcgctccgcccgctctcccaggactcctctctggatgcccgctctctggagaacctgggaaatgggaaccagaggctcagtggaggctgctgccccccttctgctggccgctcaggcactgacg

SEQ ID NO: 567 - DNA, 328 bp, Homo sapiens
  misc_feature (294)..(294): n is a, c, g, or t
gcggcgcctactactactactatacggctgcgagaagacgacagaaggggacaaaaagaagaaagataagaagaaaaagaaaggagaaaaggaagaaaaagagaaagagaagaaaaaaggacctagcaaagccactgttaaagctatgcaagaagctctggctaagcttaaagaggaagaagaaagacagaagagagaagaggaagaacgtataaaacggcttgaagaattagaagccaagcgtaaagaagaggaacgattggaacaagaaaaaagagaaaggaaaaaacaaanaaaataaaaaaaaaaaaaaaaaaagtcgtatcga

SEQ ID NO: 568 - DNA, 487 bp, Homo sapiens
tttttagggttcaagtcagactgtttcccaaggcaccaacaaagaaatccaggaaggccctcttggcccagccaagagaacgagggctgcagctgcagaggcgttcactaaagatgtatttccctgaggccccgcacctgatgccactgttgccccaccctgacccacgttccctgctgcctctccctctggccagcccctccctccctgcggctgcagcgtcgtcagagctctctggggatgatggagaagggcagtacagggctgctggcctccagctcaagggcggtgaggaagcagtcaacggcagcctcgttctggccctgggcctgcagcacctcgcccaggccctgccacgcctcgtggcacgtactctgcctctccacggcatcacgaagcaccttctgggccaagctcttgtggcccagccgactcagcatcagacccaggctatgcatgatgcgcacgccatctgggttcaccgtga

SEQ ID NO: 569 - DNA, 490 bp, Homo sapiens
  misc_feature (408)..(408): n is a, c, g, or t
tagagatgcatttttgccatattgtccaggctggtctccaactcctgggcttaagcgatccacccacctcgacctcccaaaaagttggaattacaggtgtgagccactgcacccaacccacgcccatttttaacaaatgaagaaactgaggcttgcagaggttagatcatttgcccaaaatcacatgctggatccagaactagagcccccagtcttgttattctcaacactttttcctccacactacagggacttgatcttaacaccacagacatggcaagctcagagccaaaaatcaatatatgccctatttacttaatccagagtttctcaacctggcactaataacattttgagctggattattctttgtttgggggtgggagggcgctgccccacccatggtangaagttgagcagcatccctggcctctacccatagatgtcactagcaccccctcccgcagttctgacaaccaaaaatgtctcc

SEQ ID NO: 570 - DNA, 595 bp, Homo sapiens
ctcgagttttttttttttttttttaaaactgggtattttatctttgattctccttcagccctcaccccgggttctcatctttctggatcaacatcttttctgtgcctctgtccccttctctcatctcttagctcccctccaaccgggggggcatggggtgtggtggaggaagccacaggcctgagattcatctggctctccttctgggagcccagaggatgggcagacagaaggggggtggtgtctccaaccccccagcactgaggaagaacgggggctcttctcatttcacccctccctttctccccggcccccaggacggggccacttcggggtgtggtgcagtggggccccagatggtgctcacactggagaatgtaagaactacaaacaaaattcctataaaacttaaacttttggtgtctcaaaaaaaaaaacaaaaaaaaacaccacccagggctcctgataagtttttgacccaccgcgcaacagggggggggcgccaactacacctctgtgcgcccacgggggcacgccgcgcaaaccggagcaggaccgaggaagagagacgagctggacgcgcccgagcacggca

SEQ ID NO: 571 - DNA, 558 bp, Homo sapiens
  misc_feature (492)..(492): n is a, c, g, or t
aacacttgtgttgctaaattctatttatgtaagtctgctaaagttttttagcccacttaaaacttaagacaaccatttaaaataatggatgggttactatgagcaatttcgctttcagaacccccttgttttagtatatgaaaaagcctaatgcgcattaatgaggttgaagagactatgagaaatatgtatagtgtatattttaaaacagctttgcttgtattgtgaagatttaaaaacaaacttgagatttttaacgtaactattaacacagttttaacataagttatcccactgggtttaagagcatcttgaatgtataatcctttttgtaacccaggttggtttctacttttaccagtcacccaaacatatttatgtttttagttttatgtactcatttccctttgttttcctcaaacagcatgatttttttgcacatgtagaaattttttaaaagaaagaaattagtacatcattttctctggattntcttcacttccctcttcctttctactaactccttccttaaaggccatatcactccatttgcattat

SEQ ID NO: 572 - DNA, 473 bp, Homo sapiens
tgaaaatgtcccccatttttacatgttagcaaccatgttttttttttttaatgttttaaatacagtatcaaacaggacagaactctgaggtatactgagctcagagaccaccagttttcaacctctgctctggtgcactgatggtgatgtgggaatttacagcctgagttaaagttcagatgtgtaaccttagacatttatatcacctctctatgcctcagtttctccttctataaaatgggcattagagcaggtacttcatggagtgtgagtgagcattaaatgagataatgaaaggggccagaccaaggcctgctttcatgccttaacttccagcctgtcattcaaagtaagccataatgtgcctctaaatctccctttctaagcttgctcctatggtgctcatcttgatgtgctctacagagtcaagtcacatcacaaagcacttttaactgtgaatgtgctgttccttt

SEQ ID NO: 573 - DNA, 459 bp, Homo sapiens
  misc_feature (313)..(316): n is a, c, g, or t
taaagagctataacgaaacaaaatttatatgttatatatttttaaaaatacatcttatagattaaaggactcaagaaacaatagcaagactgtaaaacgttgccacatcaggtgacactttggccagagttatggaaaatgctgacaaaacaagaatttgccgcatgggcaaagatatactgtaccaacccaacttgttaaaatattaatattgagctaattagaagtagtttttttttttttgttttttttttttttgagacagagtctcattctgttgcccaggcaggagtgcaatggtgtgacctaaggnnnntgaaacatggggggcctgggtgtaagcgattcttgtgcctcagcctcctggaattacaggcgcctgccaccacgcccggctaatttttgaatttttggtagagactgggtttctccatggcggccaggctggtctcgaaacta

SEQ ID NO: 574 - DNA, 546 bp, Homo sapiens
tttgcttcaatacttctgccgctttggaaattgtaacagttaattactttgaatgttgctaaaaggacattttgtgtagggtcaagttatttttatatgagttaatgtgaaattgtaaatggaaatttttccttaaaatacaacacaatgatgtctgtataaatctgtctgtttagaatctgtgctgtgtaagggcattcgtactcatgctgttactgtacttatgcaccattcagacttgttagagtagatgtgggtttatgactgccaagtttgcccagtacagtagttttttatcactaaaagttggactcattgatggagtcctgtagtagtttcagtgttagatacagttttttccaccatacatctgtgcattttctctttaggtgactgtttaagaaatttgtgtgcatagttactcagtttttatgaactgttgtatcctgttaatgcatattgctctgtgactccagtatatcttacctgtactgaccaaacctaaataaagatttttattgtaactccttaaaaaacctcgtgccg

SEQ ID NO: 575 - DNA, 491 bp, Homo sapiens
tattcagggatccaagaattttagtaattattaactgagcagcagattgccactggactgttttaagatttactatcaccagtcttacatagatacataaattttaaaatctcacccatttcttcttataagactattagaagatttaacttgccacagactggtcatgctttgttattcttggacccctgctttttcccaaaccactacattcacctttttgctataccaaactggaggtggtaattcttagttgagtcattttacctaggggaccacggtacagcgataagtcactcaattactaccttatgattgacagttcacactggaatcaaaggtgaattcatgggagtagaggtgagatatcgttaggcaagtctacaaagagagatagatgggcatttattcatcacgctgaagtgaaactactgcacaatattattacatcaatagcatatatttacttttgtaagttacacgtaatgcat

SEQ ID NO: 576 - DNA, 577 bp, Homo sapiens
atctattactctttggagaaattcaagaagggccttcagtgtgtccctgtttgcatcaggtaggaggatgacaagaaggttcaaagcctgtagttgctgcttcttggttggaagattctggacagcctgaaaggctttgagatactccacactgagcagtggctggggcaactcccgaatgaagagcttcagcaggctggcggcatcatgctgtttgacactttcccaattaaaagtcccttcataaaactttgcttctagttcttggcaaagattcttgattctaatggcagctccagggatccgtaagaggccttctgtttccaaacctctctcttcaattcgagaaatcagtttttgaaagatcaagggtattcgcattcctggtactttcctctgatcttgttctaatagcgctgtcaatggaacgcaaaaaagaccagaatcttttgttttgattttcacagctttttgttgtttcagctcaatacccaatacatcatagagggcagtcagctcaattagggctaaatggcaaactttcttcatgtcctggggtgcgaggtcaccaatcctt

SEQ ID NO: 577 - DNA, 467 bp, Homo sapiens
atcagaaaaagactgtattgcagatacactggttctctcaagatctttcctggctttcctggcagctaagactctcagaattcaacttcgccaggacagcaaacaatgttgttggtcagactatctgctatttcctccatctggctttctataacagagttagtgtttagacccttctcatcataggtcctctgaacaccttgctggatacagagtatgaattactaggtacatacatacatacatagattaaatatcaaaacagatcctggttaagagtcaagataagagcggctgagaacttaactcttggtcagcttatttatttgtgctaattcctacctgtgcatttagaatgttttcagatcccttttacgctactaaatctatctatggtatttctggaaattttttctctccatgttcttttccatgcaatcaagcagattatgaacatgtcacttaat

SEQ ID NO: 578 - DNA, 535 bp, Homo sapiens
agagatggggtttcaccatgttgcccaggctggtctcgaattcctgggctcaaacgatccacccacctcagccttccaaggtgcggggattacaggtgtgagccaccgtgcccagcaccaccattattaactgtagttaccatgttgtgcagtgttatctcaaaaaatgtattcctcctaacactgtacactttgaccaacatcctaatgatttgcttaggataaactcttacatatggaattgcttgatcaaaagtgtccatgattttaaggattttgcatactgtcaagactgctttgattcaatgaccaatagtacaacagagtgtccattttactacacgggtattataattaatttctcattttttgccaattctataggtgcaaattgagcttacatttgactactaataagtttgaacatatttcctatcttcaatggcaatctgcattttgggggggtgaatttttcattgttagcccatttttctattggtatctgtggctgcttctgattaactcatatgcaaga

SEQ ID NO: 579 - DNA, 881 bp, Homo sapiens
gtcgccatgacccgcggtaaccagcgtgagctcgcccgccagaagaatatgaaaaagcagagcgactcggttaagggaaagcgccgagatgacgggctttctgctgccgcccgcaagcagagggactcggagatcatgcagcagaagcagaaaaaggcaaacgagaagaaggaggaacccaagtagctttgtggcttcgtgtccaaccctcttgcccttcgcctgtgtgcctggagccagtcccaccacgctcgcgtttcctcctgtagtgctcacaggtcccagcaccgatggcattccctttgccctgagtctgcagcgggtcccttttgtgcttccttcccctcaggtagcctctctccccctgggccactcccgggggtgagggggttaccccttcccagtgttttttattcctgtggggctcaccccaaagtattaaaagtagctttgtaaaaaaaacaaaaacaaaaaaaaaaaaaaatttaacacaacaaaaacaaaaaaaaaaaatatatgtggcgcccgccaccaaaaaaattaaaaacaaatttggcgccaggcgaccccattgagaagacacaccagcggccaacgctgagtgaacagaagcaccggcaagacaggggaggggccacacaaatacaccgcgggggcacagtcgctcgaaccaccaagaggatcgggccacggggctacaaggggaccaaaggcaaaaatcgcccacggggggaaacagacacagcaagcacaccgtccaggcgccagagccacgacagaaatgctacccacataaactgagaccgcgacgaactcaggaagcccacgaacaacgaaaacaccaacatagagcagccacatagaacagcgttgagagagcg

SEQ ID NO: 580 - DNA, 976 bp, Homo sapiens
agtacaatggagattgcacaataggttatatgcaaatactataccacttcatataaaggacgttgaggaaccacagattttggtatctgtagagatcctgaaacaaatcccccacaaataccaaaggatggctgtatatagctttatttttagaaattaattcacacaattgttggggttggcacaacttcaaatccatagggcagactagcaggctggaaactcaggcaggagtcgatggctatagtcttgaggcaaagctttcttcttttccaggaaactgcagtgtttgttcttgaggcctttcaactaatcaggtgcagctcacccaaattatttaagtaatctctttcacttaaagtcaactgattgtagatgttagtcacatctacaaaataccttcacagccacacctagattactgtttgattaaataactgtgtgctatagcccaaccaaactgacaaataaaaccgaccatcacatccaccaaatcaaaactccaggaacaaatgtttaaattacaagcattaagattcttcacctctgaagaagctatatctggggtgcatttagcctgtttccctttgcaaagactttcatgtgcagcttgtcagatactacgcaacagtctacctgcatctaggcacttgcactgcaccagaggaattctctggaacccatcccatcttttcgacccctcgaaggctctttccctctagcaccaggtgccatcagctcctgtggttggaccacggttgagtcctccaccgtctttccgcgtccgttcttccggactgcccgtgtatacccctctgagggtgcctttgcacgccccgttggtgctcttccggtttcggtctccagccaacactgctgttccctccagctatgttgttagtcccgatcaaccgctgtacccaacgctcgtcgccctccgtggcacacagaaggcgaagcccggtgtcacctgctt

SEQ ID NO: 581 - DNA, 508 bp, Homo sapiens
tttcctgaccgtactcctcaaaatccagattgtttgtgcatacatttaaaaaaaaaaaaatcaatggaaatttccacctttgttcgaacacataaagtatgccatgagcaatataacatcacaaacgtactgtgacaaaccattaataaagaaggattactaagccaggtgtggtggtgcatgcctgtagcccagctatgcaggaggctgaggcaggaggatcacttgagcccgggagtttgagtccaccctgggtaacacaccaagactccatctctaaaaaattaaattaaaggattactgaaagatctcatttctaaaaaaagaaaaagaaaaagatcactgaagtcagacatgatattttaattttgtattttgaaaagtcagtatataaataagaaaaaattattttagaaattatgtgaaaatccactcttgggtggagtaaatgcaatggtttgccagcactggctctgagccaactgtgcacatcctttctgaactctaa

SEQ ID NO: 582 - DNA, 520 bp, Homo sapiens
  misc_feature (463)..(463): n is a, c, g, or t
ttaatataacccactatataatagtgaactaaatatgtttgtttcatagaaacaacttacatttgccaatataaggcaaatggtctatgtacagatacatcaggactgcctaactgacagtgagtgttgctagccaggctccaagctaatggagctaatacggtggagctctctgctgaatggactttcccttcaggatacgtcggatctgttctcccacagggccatcgggaaccaaatgcactggctgttcgttctccaagttccgagtacttgggtctgctcccttcctcatcaacaggcggacagcatctaattgtgtcaaccgatactgcaagctggcagcaacatggagggcagtgttgccattgtaagcctttgcattcacaaaagacaggcaactgggcagctccaaaaagaggcgaatgagttccagatttgcttcttcagctgccaaatgcanggctgtgcggccacttttgcgatccttcacttgcaccgctgctcccatttgaattaa

SEQ ID NO: 583 - DNA, 567 bp, Homo sapiens
tttttttttttgcttgtgcttattaaatagcaagggtgtttactcaggatttggggatcagttgtagccatgttgaatttggcaaactgagctgtgtgccctgaaagccctctttttatttcttcatttccatattgtctgacttacttcacctaggaatacctgagttatccagtccagtgttccctgatgagagtggaagattttcctggagaggcagctgtgcatggccaggtcatctgtcaggatgttgtggtggtgtgtgatcagagcagagggcctttcttttcctgtactgtgctctacttccttatgcatgcttggtttcaaagatgaccgccactttaaaagaaagatttcctcacagctctccagagaactatcatactaaggtgataggaaaggcttctcggatacaagccaacaagtcagttttctgattacagaaactcctctcacacgttatgtttggaaaggctgcgctccattccacttataaattgaaagtgataagcctctgtcttgtgatctatcgtggccaatggttgacttatcacctcgtgccgg

SEQ ID NO: 584 - DNA, 600 bp, Homo sapiens
tttttgcacaattataaaatgtttttatttcaattacataataacacgttttcctcaaattttattgaggttttggtctttttgcattcaattctatcttgtaacagtaatatgaatccacataatttcataaaatgtcaacaacattcataaggtacattcctttgtgattttatattttacaattttaaatctaactttacaattattttaaaaaatttttttatatagaaaacagatattttcttcaggcagatcaaaacaagaattttccagtaagaatatactgggacataacaaatgaaaatatttataccaaaataccaaaagtgattcagctctttaaaatatcctactatagtctaattagtagcttgtacaagaacaagtaaccattttttactgctcttttgaatgatgattagaaattcaaacaaagtattttaaggttcaaaaactttttttttttttttttttttttttagagacagtgtctcactctgtctcccaggctagagtacagtgtgcaatcatagctcactgcagccttgaactcctggcctcaagcaatccccccaccttggcttcccaatgtgctag

SEQ ID NO: 585 - DNA, 717 bp, Homo sapiens
  misc_feature (540)..(540): n is a, c, g, or t
  misc_feature (617)..(617): n is a, c, g, or t
cgggtagggcttctcgccggtgtggatgcgccggtgcgaagtcagatagggcttattggtaaagcgcttcccgcactcggggcactggtggggccgctcgcccgtgtgcacgcggcggtgagcgatcaagttgggcttgtgccggaagcgcttgccacaacaggcacactggaaggggcggtcgacggcatctccaccgggccggggggcggtcaccgcggggcggcccctgggccggggccccagagccttggctgcggcctcctccagggcctcggctacgtgcacccgcttgtgggcaactagctggtcccactgggcaaagctccggccacagttgccgcatatgaagggccgggcctccggggcgggagggtggcaccgccgcagatgagctcgaagctgctttcgtcgccagaagcgtctctcgcatttgggacaagcgatgggccgctttgcagctgaatgggcccgcagatgcagaaccagggccacccagcctcggaagctctgcccacagaggtggcaggcaaagcccangtctggggtggcagcagcatggacctggcggtgcagtgctaagaatggggcatggcgaaagcgacggccacactcanggcatggcaagggcagcctggcctggcaccggcggttgtgaagccacagagccacccagccagggaagtgccttcgacagtgggcacagcgattggcctt

SEQ ID NO: 586 - DNA, 513 bp, Homo sapiens
tcaaatgaaatatctttccagagtgaaattttgtgcagaaatgaagcatgaaagtaattttttatttcttacctcatacctgaaggattaatgttagccaacattagctttgtaatcaatgtgctgaccttctagaataaatcataagggtacaaggaaatttaatactctaaattatagatgtgcacttgaccatatttcttccccttacaaaaccataacttctgttctagaaggttctgagtccccaatctactacactcagagggaaacagacatggagggagcccgaggaacagtgaagatgtgctgggaaccgggcagtgggctttttcccaattttctcagcagcactggctcaaaggctccctggcttggatgacagccgtatctgagccgctctgcagccagcagggcagtagtgggcagagtctcatggcacccgggcactattcttggccccatgacttggcttcttggaaaactcaacctctctgagctgagctctgtttc

SEQ ID NO: 587 - DNA, 466 bp, Homo sapiens
actcattgcccagccagtagtggaggtcatactgcagatttccgttcctcagctgcactgtcttcaggatgacgtaggcgtcgcccgtgaagaagtctccataaaggttggtgggcacgggcaccagatcgaacttctccacacgccagatctgcaggccaggctccttccctgccttgaggaactcggggtgttccaccaccatgctgttgggctaacaaggctgtgcagggtgaagagtgctgctccgtgggaaggcgctgggaccaaggccgaagcactggacaaagagagctatgagcactacctgctgctgcggcactggagacagcggctgctgggtccagctgcgctcagctggttccgggcggcggggcgggggcgttgtggtgcgcgcggccggggtgggcagggcgcgggcgggagccgccctcggggcggggcggccgggcaggcgggtggggag

SEQ ID NO: 588 - DNA, 637 bp, Homo sapiens
tttgagggtgacaacacatctcttaggcagagcagtgacaggctgtgccccaaagtccaaacaggccaggcagagaagggcagggacagggctcaggctgagaagaacagctggcgtccaggcagggtggccagaacgggtgggcacaaaggatgggcccgcaggcctaagtcatttggtgcggcgcctccagcatctccataaggaaggtgtcaatgggtgtgtccccgatgagcttgaagaagaagagatgttccaggcatttgagcccgatggagcgcaaagccggcaggcggagcaagagcttagcgaaccttcccggctgctctgggtacttgtgcttgcagtaggcctccaaggacgcatagaccttctccctcagcgcctccacctcggccgggttcgagagccccttggagtcagggttaaagaggacgatggcgcgcaggcagcccagctccgtcttgtccatctgcatgtgccgcatcttggacacaagctccgtcagcaccctgtctaagatggcgcccacccctgcgctgtgggcgctgatccggtggacgtgcagcccggtggccaggatgatcccgtccttcacggcgatggagctgtgagagaatgatgcgatgagcaactc

SEQ ID NO: 589 - DNA, 527 bp, Homo sapiens
ttttttttttttttttttgtttttaaagcctttttatttttttaaaaaaacaaaaacccccaaacaaaaacaaaacctaaattaaaatatttcccattggaggctatttctttttttgtcttttaaaaattttattacacaaatatcacccattcccacgtgtcaaaggaaaaatgtccttgctctctctaaaaccaatagtggaaaacttttggaaaacaaaacaaagtccaactagcttcctccttctttggcccaaaataacctcaatgtgtcaactgagatagcataagacttatccccttaatgcttacatttaatttaaactttttagcacaacattggagattgactctaaatcagcaacaaaaaaatatatatttacaatatttctccgaaaaacaaaaaacacaaccaaaccctttaaacataagtgactttaggagttttatttatggagcagttatttttttaatcaccaagtgattttatattatatatatataaattttcttcctttcctttgg

SEQ ID NO: 590 - DNA, 520 bp, Homo sapiens
ttttttgctgctccaacgaccagcatgtgttggagcagatctccatggtaagccaaaagtggacttgtcagcctataactactctgcagctgccactaactctacaggcacagtaactacactttatacaggagcacatgccaaagtgcctgggaggtgccaataaaatcaagaaataagaaaactacaaaaaaagatacggtattaaccttggacataattttttttagggaggcagctttcccacttttataaagggggttgtaaatctcaagaggtcatttgttccccatagcagcatatctcatttttaaattgaagcgaattaaataggattttactactcaacattcattatactgttaatctttgctgaaatatatgctaacaaatgttaagcaagggaaactgaagacttagtcatgtggattgttagcagtgatctgcattctgtaaaagaggtactttcccatgatgtaggcatgaagtggtgccagtaagcgtagagcggaaatgttga

SEQ ID NO: 591 - DNA, 569 bp, Homo sapiens
aaaaacagcagcattaaacttagtgacatgacaccgacatgattaataccatcttaacacactcagaattccgcctttcacattataatcaagcatagtggtaaactgttataaaagtgactttgctacgagagacaggttagggaacaaacaacctgacttatggtagaaacccatagctctgttcagattgcaataaaccatacacattttaaacacaacgtaacactgtaacagctggtacagggaaagaagaaatcttcactcaagtagtgtctctttgagcacaacacggtggtagacaagtaaaattggctgtagactttcattacaaacacaagcacacagagagcgacattcacaccagtgtgttcactttgtgtctctctgaagcaacaggctaaaaaaggatgatggaagtaaaaagttggtttcagaaaaagctttttgtccatttcgtacgtcatattttttcagtttcatatggtttgacttcttcctctctcttccacttattttcatttctatttggacaacaagcactgcatatatgtatttacgtgacgctg

SEQ ID NO: 592 - DNA, 548 bp, Homo sapiens
gctctcttttggaatttttttcaggtgatttaataataatttaaaactactatagaaactgcagagcaaaggaagtggcttaatgatcctgaagggatttcttctgatggtagcttttgtattatcaaacttttttcagataacatcttctgagtcataaccagcctggcagtatgatggcctagatgcagagaaaacagctccttggtgaattgataagtaaaggcagaaaagattatatgtcatacctccatgggggaataagcataaccctgagattcttactactgatgagaacattatctgcatatgccaaaaaattttaagcaaatgaaagctaccaatttaaagttacggaatctaccattttaaagttaattgcttgtcaagctataaccacaaaaataatgaattgatgagaaatacaatgaagaggcaatgtccatctcaaaatactgcttttacaaaagcagaataaaagcgaaaagaaatgaaaatgttacactacattaatcctgggataaaagaagccgaaataaatgagagat

SEQ ID NO: 593 - DNA, 908 bp, Homo sapiens
caggctcagcaggagctgctggatgagaaagggcctgaagtcttgcaggactcactggataggatgttattcaactccttcaggttgtcttgaactgtgtgactcatgccagccctacagaagtgccttttatgtatggagcaacagcatgttggcttggctgttgacatggatgaaattgaaaagtaccaagaagtggaagaagaccaagacccatcatgccccaggctcagcagggagctgctggatgagaaagagcctgaagtcttgcaggactcactggatagatgttattcgactccttcaggttatcttgaactgcctgacttaggccagcctacagcagtgctgtttactcattggaggaacagtaccttggcttggctcttgacgtggacaaaattaaaaagaaggggaaggggaaaaaaagaaggggaagaagatcaaagaaggaaagaagactgggacagacacagaaggggaagaagatcaaaaccaccatgccccaggctcaacggcgtgctgatggaagtggaagagcgtgaagtcttacaggactcactggatagatgttattcgatccgtcatgtactttgaactacctgactcattccagcactacagaagtgtgtttcactcatttgaggaacagcacaatcagcttcgccctttaacgtggacaataggttttttacttggacggtgaccaagtctccaactgggtgttccagaatgggaagtccataattcccaaaaataagaggcccttcaggaatcccgaaagatcgtcttcctggagcagaccctataggcagcgaagatctgatgcagggacgtcatttggacccagacataggcgggcgggacggctatcatattcaaccagcaggcggcgggcatcaaacaga

SEQ ID NO: 594 - DNA, 1139 bp, Homo sapiens
tcaagatgtgtgacttcaccgaagaccagaccgcagagttcaaggaggccttccagctgtttgaccgaacaggtgatggcaagatcctgtacagccagtgtggggatgtgatgagggccctgggccagaaccctaccaacgccgaggtgctcaaggtcctggggaaccccaagagtgatgagatgaatgtgaaggtgctggactttgagcactttctgcccatgctgcagacagtggccaagaacaaggaccagggcacctatgaggattatgtcgaaggacttcgggtgtttgacaaggaaggaaatggcaccgtcatgggtgctgaaatccggcatgttcttgtcacactgggtgagaagatgacagaggaagaagtagagatgctggtggcagggcatgaggacagcaatggttgtatcaactatgaagagctcgtccgcatggtgctgaatggctgaggaccttcccagtctccccagagtccgtgcctttccctgtgtgaattttgtatctagcctaaagtttccctaggctttcttgtctcagcaactttcccatcttgtctctcttggatgatgtttgccgtcagcattcaccaaataaacttgctctctgggccctcggaaaaaaaaaaaaaaaaaaattggagactagttctctcaaaaagaactacggtcttgggggtgggttcaaatctctttaatttaaatttcgtaatcctaaggtaagagatgcaagtggggagccttccagtgtacaaaggggggccaggaggccagaagggaattgcacggtgtctattccaggagcccaaggggaaactttatgccgcggcgcgcgacgaccttctgtctcacagtgcgccacaatggtgtctctagacgaagcaacggagtgttatccaccaggtttgtcgtcggaaccaacagcgctggctgaacatctgaataaaggaggggggaggcagagaacacgcccacaggggataacgaagccagctcccagcctgcaggggagagagaccatccggtagggtggacccaccgcggaggagtagtaggcagagagaggagcagaccacaacatagataagaggcaacagcccgcacgacatagatgacagataggtgcgactg

SEQ ID NO: 595 - DNA, 1054 bp, Homo sapiens
  misc_feature (31)..(31): n is a, c, g, or t
  misc_feature (1054)..(1054): n is a, c, g, or t
ctttttttctccaagggtaccgttttatccntgaggcgaggtggctcacacctgcaattccagcaactttgggaggccgaggtgggcaagatcgcttgggtctagtagttggagaccagcctgggcaatgtggcaaaatctggtctctactaaaaatacaaaaaaattagtcgggcgtaatggtgcacacctgtagtccgagctactgtagtggtggtgggggaagagggggttgaagcaggaggatcacccgagccagggaggtggaggccgcagggagcactgatcgatcgtgccactgcactccagcctgggcgacagagaccctgtctcacctgtctcaaaacaaaaacaaaacccaggtacttaaagatacgcttatatgattgggaaaggtcttcaaggtcgtctagtttaaaccgacctcttccgaagctgtaaacttaatgacttaatccctttaactttgttaaatttcatatcacctggagttttctgtcacgctaaaagatatttccaaacaggtgtctgatatcctagcaatcaagtcacatttaaagatcaggaggaaaacaatgtaacagctttttaaatggcggccaggttactcaaaagtgtggatcaattcctgacaaaacctgaattaccatattaacaagatctagaatccagtagcagaaataacagagagcaagaataaacttctctaggtggccattcattcccaaggttttactgattgctaatctttcctgcagagctgaaggtcggacttcctttaaagagtcttaaaattccggtctcgcgccactaccatcagagggggtaggtcttagcgtaagcttgattgctaacaagtggattaggggctttaactgtaatgagggcgttgaatggccacgagattagctctggttgctgcgatgtttctatcgtaagctaattgtgctgtggggagttagctacgtgtgcttgagactgaaggcaacgtaagagagaggcagaaaggagatgcaaaggagtgcaggggaatctcccaattgtcgctcagggn

SEQ ID NO: 596 - DNA, 1034 bp, Homo sapiens
gtaacagaagagtggacaaccaaatagtacttgatcattaaatcaaatttgtaaacagtggcaggagcgtggacttaaaacaaggcttgcttattggtttgtcaaagttttacgaaaatatatgatatatatttatactaaaactatataatccttagatttaggaaagcaatcagttaatgtctttagcacactaaagcagtattaaacacaggtacaagttggaaattgtagaaaactgaaagaaaacaagacaaaatgtctatggtagggaataaaagagtttaagatattatgtaaaattatgtgtattttcttctcttttacataaattgttgtgacaagtgtgctcaacttttttacaagagtgatattaacttggatttattttcaatataatttggaggacccttgggttatccaataagttaaaattgatgaggtttctgtgcctgtaaccaaacaaaaacaaaagcagaacgacacaagcaaaaacaaaaccttgtggacatggccccaaaaaagcttgtgcgggggggggaacaggttacttcaacgaagaattacatttactctagaaggcacacaatggcgcacatcgaggggaccatctggcaaaacttaacattgtgaacaaattttggcaggaactggtccgtgcacaatcttctcacaaataactcaccggctcagccattttgcaccaccatgacattgagcagataggtcttccacaacgaatgatagccacataacgcaaatgtggtcacacagcacggatcacaagagttatcacaacacaaggtcgcaccaacacacataacacactgggacacaacccgagacgacaaaccatacccgaccaaggggacaagaaaaagggaaccgtaacaacgacgacctctacgacgcgagagctgaccggctctacaaccataagagatggagcaataatgagagagaagctacactcctacacagcaccaaacctagcggcactaccgcaccagaggtccagacccctaaaccacgtg

SEQ ID NO: 597 - DNA, 1046 bp, Homo sapiens
tcccccgctgcctgcaggccccgtccccagtcaagacatcactctttcgagtgaggaggaagcagaagtggcagctcccacaaaaggccctgccccagctccccagcagtgctcagagccagagaccaagtggtcctccataccagcttcgaagccacggagggggacagctcccacgaggaccgcagcacccccctggccaggcggtgtctctgttcgcacaggtccggagaagcgcagcagcaccaggccccctgctgagatggagccggggaagggtgagcaggcctcctcgtcggagagtgaccccgagggacccattgctgcacaaatgctgtccttcgtcatggatgaccccgactttgagagcgagggatcagacacacagcgcagggcggatgactttcccgtgcgagatgacccctccgatgtgactgacgaggatgagggccctgccgagccgccccaacccccaagctccctctccccgccttcagactgaagaatgactcggacctcttcgggctggggctggaggaggccggagccaaggagagcagtgaggaaaggtaaggagggccaaatcaccctctaaggagaacgaaaacaaaaaaaaacacaagggcaggcccggccacacgactacacacagaggggacccacagcacaagcgcgacccccagcatacatgggtcacaagcgcgccacaataagaagaactagcctcaatcagcaataaggcacatgttgcccggtctcatattaaaacagcgaccggtgatcggggaaaacacgtgtcatagtacgagagagatctctttgatatgcaccagacacccattaaacatccgtgtggatgtgtaccaatcatgtatggacacgacaatacactgcagagaatcattatacgcggtcaccatggtcactctcaacaacattatcagcggagtgatcatcgcggtacaaaaccatcagatggcatatcacggtgaccagccagcaagcgatgaggccagagcaaatcgatcgttttgaagactatttta

SEQ ID NO: 598 - DNA, 1054 bp, Homo sapiens
  misc_feature (1054)..(1054): n is a, c, g, or t
agggtgttcgactgctagagccgagcgaagcgatgcctaaatcaaaggaacttgtttcttcaagctcttctggcagtgattctgacagtgaggttgacaaaaagttaaagaggaaaaagcaagttgctccagaaaaacctgtaaagaaacaaaagacaggtgagacttcgagagccctgtcatcttctaaacagagcagcagcagcagagatgataacatgtttcagattgggaaaatgaggtacgttagtgttcgcgattttaaaggcaaagtgctaattgatattagagaatattggatggatcctgaaggtgaaatgaaaccaggaagaaaaggtatttctttaaatccagaacaatggagccagctgaaggaacagatttctgacattgatgatgcagtaagaaaactgtaaaattcgagccatataaataaaacctgtactgttctagttgttttaatctgtctttttacattggcttttgttttctaaatgttctccaagctattgtatgtttggattgcagaagaatttgtaagatgaatacttttttttaatgtgcattattaaaaatattgagtgaagctaattgtcaactttattaaggattactttgtctggccaacagctagtggtaaataaaatcaagtaatacaatcttaactgttgtggcctttttgatcataagagttgctactggtttaaggccaaagtaccaggttctatagatccttttagtttcactcagattttacattaaacggttgcctggcatggagttataaacttgggtggggaactctataggacattatctccagtaaagttctgcggtgtgtgattcaaccccaggggtttcaaccttgataaatacagatccttaagaagaaacctggtaaggataataaacgaactaacgaaagagagtcgctgtgacaacgacaaggtagagcgtatcagacaatatatgaaagcacggtccacatagaagagagtcgatgcgatcacactataaacaaagatactaacatggctatcaacgtctgatccgn

SEQ ID NO: 599 - DNA, 986 bp, Homo sapiens
gatagttcgccagccaacgcctccacctggggacctagaacccccattccagccatctgctctgcctgcagaccctctggagagcccaccaacagccccagatcctgctctggagctcccatccaccccaccaccgtccagccttttacgcccccgcctcagtccctggggcttggccccgcgtcttccgattccgtccgcatccaagactggagagctattgctgacatcattccatcacagcaccaacaaaaccaccaacagaaaacacaacaagacaaaaacgccaatgaccgcagacaccacgcacccaccgacacatccaagaaaaaccacacagaccgccagcagcgcaaagaaagagacacagaaacgaaccaacagcgacacaaaccacagacacaccgccacaaaccaccaacccacaacacaacaaagaaagaaagcaacaaaagaaaacaacagacgccgcaaacacaaaaccagcaccagaaaccacgacacacacccaaacaaaaacaacgaacacaacacaaaggcaaacgaacgacgcacacacaacagaacaaagaacagaaggaacagacacagcgaaacaacaaaagcacaaggaaggacaagagacaaccagcgagcaaaacaaaaacaaaaccacagacagaacacaccgcaacggaacatacacacagcaaaccacaacagacaacggacaacagaacaacgcaccacagacaacagccaaccaaaccaaaacaacacaaaaaaccaaaaacaagaaaacacccaaagaacccgaaaacaagaagagagaagaagacgaagagacaacacagaacgaaacgacgacaccagaacagacaacaggacaaaaaaatcagaccaccaggcgcaacacaaagaacaaagagccaaaacaaaacgaaagaaaacgaacacagcacaccaaaaagacaacaaagagaaaagcgagaacccaccacacacgc

SEQ ID NO: 600 - DNA, 1002 bp, Homo sapiens
acagggacttcatccacgtcagcttccatgacaaggtttacgagcctgccgtttttagtggctctggatcacaggaaagagtctgtgtggtcgctgtgagggggaccatgtctctgcaggatgtccttacggacctgtcagcggagagtgaggtgctggacgtggagtgtgaggtgcaggaccgcctggcacacaagggtatttctcaagctgccagatacgtttaccaacgactcatcaacgacgggattttgagccaagccttcagcattgctcctgagtaccggctggtcatagtgggccacagcctcgggggcggggcggccgccctgctggccaccatgctcagagccgcctacccgcaggtcaggtgctacgccttctccccaccccgggggctgtggagcaaagctctgcaggaatattctcagagcttcatcgtgtcactcgtcctggggaaggatgtgattcccaggctcagtgtgaccaacttggaagatctgaagagaagaatcttgcgagtggtcgcgcactgcaataaacccaagtacaagatcttgctgcacggtttgtggtacgaactgtttggaggaaaccccaaatattgcccagggagctggacgggggcgaccaggaagtctgacacagcctcttctgggggagcagagctactgacgcgctggtccccggcctacagcttctccagcgactcccactgactcttctccaagtaccccctctctaccctccggaggatcatccactgcaggaggagggcgcctcgggcggtggatggggctgtgtcaaaataggccagggtcacaggaagcggattcagaaaatcaaggccgaaaagcccggaccatgcagatctgatgcggctgacaggggccaaaacgcggtcggcaccagggccagggcgccgcagcgaaggccaaggacgctaagaacggcaccaggcacaggggacccattagaaaagaacaagaaaagggagacgcc

SEQ ID NO: 601 - DNA, 560 bp, Homo sapiens
tttttttttggtttatcttccctactattgatagggacatgggcacagagaaatacctaattagaataggaaaacaacagtgcaagtgtcctgataaagggcaagtgacctcagctggtaagtggtaaatgatttgagtgtcagggaaactattatacaagcagttgtggaaactgtagcgcactggatagccatgcctcatctaacaaggcagcctactatctcagccctagttcattgatgccctgtagaaatgttggacaagtagtatcagatattccaccactcagtaatccagattctgagtaatccagaatatctgatactgcttgtacaatctcctgatttggagcccaagtttttagtcattctgtgggccaaactatatacatctgcagaccagatgtggcccatgggctgctgggctataacccctgatctaaatgctgcctggatttgactcttcaaaagctagctccagccagtgtagtcaatcttattcttcactacataccaaagcaaagccttcactctcactgagcctcctacacacaccatgt

SEQ ID NO: 602 - DNA, 548 bp, Homo sapiens
ttttttcaagggaaaaggtgtttatttagaacaatgaaaacaatgagacattaacttccagcttaaataaagttgattgtgtgcataaaaatggtgaaaatattggactttcttggcaaaagaagaaaggggaagactttatattttctgacataatattcatcatttgtctttggtttgtgtattatgtgtatgattttgaaaaaaatgcattaaaaaatataactttctggtgtttgctttgatattatccttgcaaacagaaaagttggcacatgtttctgtataaaactggtcaaagttggcctaggaatgatcttacattgtactttcactttacatcatactgtaagagtttaataatagctaaggcatcagcattgatgtggacttattatacctattcaagaggtggtgtgaggtttaggagagttatgtgccctttatcataaaacaaatctatggagcatttatataaaaacccagtatttctggtttcaaattcagtactgtgccgtctgcttgatagatttgttcgcaggttagag

SEQ ID NO: 603 - DNA, 497 bp, Homo sapiens
tttttttttttttacaagttgcttgtttccattcaacaatatattaaccatgtctctacatacagaagtaactcatttttcttttttctttttcttttctttttaatggcctgcgacacagccccaggaaatcctgagaacatgtgccccagtaactcctttttcttaactgctgtgtagtttgtttagctattccttactgttggagatttagggtgtttccagttttgtgctgttacaaacagtgttgtaatgaatagctctgtaatgtcaccctatgcataagtatggtgactgtttctctataataaatggtgagaagtggaactctgtgtcaaaaaacactaagtttataagtataacacatactattaaattggccttgctagttttgtggtatagttgttatagttaataacagtaatatatgtgaccatcagtttcacatattagtgtcctttaaaactctaggacatctcattgacttaaaactcatg

SEQ ID NO: 604 - DNA, 928 bp, Homo sapiens
tcaatagacaggttgaggacatctgcctggagcaaggatatcaatgcttacaatgtgaagagcccacagaaaagttaccttttcccatcatcgatgataggaatcgggagcttgccatcctgtgggcatgctggatccagcagagaaggatgaaaagggcatgcctgtgacagctcgtgtggtgttgttttggtcctgataagaagctgaagctgtctatcctctacccagctaccactggcaggaacttgatgagattctcagggtagtcatctctctccagctgacagcagaaaaaagggttgccaccccagttgattggaaggatggggatagtgtgatggtccttccaaccatccctgaagaagaagccaaaaaacttttcccgaaaggagtcttcaccaaagagctcccatctggcaagaaatacctccgctacacaccccagccttaagtctcttggagaagctggtgctgtgagccagaggatgtcagctgccaatgtgttttcctgcagcaattccataaacacatcctggtgtcatcacagccaaggtttttaggttgctataccaatggttattaaatgaaaatggcactaaaagtttcttgagattcttttatagtctctggcttcagcaatcaatgccattcatacattcagcactctgtggtgctgttgacatatgtctgtatttcaaactcaaatctggtggactctgcgggtgtgacatgagtctatgttgaggtgacaaaggtgttcctccatcgagatgattcattttttacggcaacgtctcccgtccattgaaagggatgagtcactcctgtaattcagtagccgattaaaacagagtatttaagtggcgaagcaaaccacgtcttctaactgccgggaggtttccgcaaaggagattaagaggagggg

SEQ ID NO: 605 - DNA, 775 bp, Homo sapiens
aaaagaattgtaccaccaaatatttttgtgaggtctgctgttttccatattcattttatgctactgcctttaagaaagaactagtgtatccttgaaatagcacaaaaatgttttaaaattcataattgcaaaacaaatctgtgactaacttaatgtcttcagatctaaagggtgtaaaaatattgatacttcaatatttcacttgctgccaggaaaaacaaaattctcaatcttttgtaaatgggaggaggacttttgcatacatttttactctttaaataacgacaacgacacttatactgtcataataacaattatgtatttctttgtggttttaattttttttgtaattttacataaaacagttattttctatttttacgcagataaatatttgtgcataaaatgtaaaaatagtaaaatgagaaaaataaaactattatacagtaaaaaaaaaaaaaaaaaaaaaaaaaaacacaacaacaaaaaaacaaaaaaaaaaacccaggcccccccccccacaaagcacaacgatcggcacaacccgcaaacccctcagagaacggaggcgccacgcgaggcgagcacaccgaaaccgtacaactaaaacacgacgacaacacagacagacgatctctaacacagcgcacaacgacaagagcaacccaaacaagcaccgcgacagacaacacgtcacatcgctccacggacaacgagcccaccaccgaagtaacaaagacacacaacgaaaacaaacaagcgcacaaacaaaacc

SEQ ID NO: 606 - DNA, 975 bp, Homo sapiens
cataggtagtacgaggctggtttgaatcggccgagggttgtgggcacaggccatgggccagggtggaaggcgtgacacactacaaggccggcgacctgttattctgtatgtcaacaaagtgggaccctaccataaccctcaggaaacttaccactactatcagcttccagtctgctgccctgagaagatacgtcacaaaagccttagcctgggtgaagtgctggatggggaccgaatggctgagtctttgtatgagatccgctttcgggaaaacgtggagaagagaattctgtgccacatgcagctcagttctgcacaggtggagcagctgcgccaggccattgaagaactgtactactttgaatttgtggtagatgacttgccaatccggggcttgtgggctacatggaggagagtggtttcctgccacacagccacaagataggactctggacccatttggacttccacctagaattccatggagaccgaattatatttgccaatgtttcagtgcgggacgtcaagccccacagcttggatgggttacgacctgacgagttcctaggccttacccacacttatagcgtgcgctggtctgagacttcagtggagcgtcggagtgacaggcgccgtggtgacgatggtggtttctttcctcgaacactggaaatcattggttgtccatcatcaactccatggtgcttgtgtttttactggtggggtctggtggctggtcatttctaaatggcgtgtgcttcggaaatgaacctgggctcggtacaacttttatgcgggaaccctctgacgggtctggaagaccttgacccggtggactggcgtggacacctcctacaagttttccgcgtcccccaagaaaaaaagccaggattttgtacgacatattcaactttctatatccaacatatacgagaaaactcttaaaacagtcttgcgagaataatactctctacg

SEQ ID NO: 607 - DNA, 1263 bp, Homo sapiens
ttttttttttttttttggaaaaagtcagggaggccagggggtgggtttgaaaccagcgttgggggggtctcgatcccttcctttttggtctaaattttatgtatacgggttcttcgaagtggtggtggtaggggtggggggcactccatatagctcacctccgaggttttagtggagggttcttcatactattaggactttccgcttcgaagcgaaggcttctcaaactcagtgaaaattattaaatatttacggggtggttagaaaaatgtgaatgtgagcctacagagtgataggagtgttcagtggtgggtgtatgcattcggggatagttccgagtataaggctcggggcatttccggataggccgaaaaaggtgttgtggtgggaaagaaaagtttaaaatttcaccgccggatgtaaattattgattagtgtgaacagtggattttgggcggataggtttggggtcatagggggtgttagcctgtgagaactgaggggaaaatcaggtgaatgtgaagtccttccttattggatgtggccacaaattaccgggcctcccatatttggataggggacaaattaggggggacggttgatgtcgtacaagggtttagattacggtgttcggtgataagataccggaggttccttaggggactgcacgttttgggcttaattaacacagtgcccaggtcagggcccacctaaacggtggaaaaagggaaagatagaaatccctaaggggggccaagaagcatctggagcaaggatacatttcaatatgggtcaccgggggaagggtggggcagaagccaggcaaaataactttggacggccgggggggggaaaacgccaaaaacaaatcggaaaggggcagcgtgaaacataatccccgggtggagtaacagggttattgcccaacgtggaaaatttggggggtgcgccacaagaataccctagagagaccaactgggtataatagtgtgaccacatctttgtgtcccacgggggtctatgccgcgaacacaagctcacaattggggagaaaaccacaacggtaagagacaaaaaataacgggggggcacaaacaaatgtgtgtaaaagaggtcccccggggacaaaggttggtcgcaccaaaaagacacgcacagggtataaaacaagcgtgccagaaaaaggtgatgataaatgaaaatatcgcgtcaacacacatgctgcttgtttccctgcgtccgcttgctcatgtcggggggggt

SEQ ID NO: 608 - DNA, 676 bp, Homo sapiens
  misc_feature (302)..(302): n is a, c, g, or t
  misc_feature (350)..(350): n is a, c, g, or t
tttttttttttttggttatttcatggaaactccgggaagccttttcatagctgaggggttaagtgaagttttaggaaaatcactctagttttagggtggaagatgaggactgggagagggttcagaccaggaactgctaaaaagctctgtgcagcttctggagggagctgtgatgtggacacgctgaaatcgggggggaggaagcggaaaattcaggggacctcaagagacagaagagtcaggactggatgactcccattcattcacaaacgtttcactgtgtcgcctactatgtgtcaggnttcctgtgctgtacgagggagaaggttcccaggctgcggatgatgtantcaggatgctgagggcttacctgtgggggtatcactttgaaggaacgggattaaagtagtgtaagtgatggtggggtgagggtgcggaggtctgatgagagggcagcagcagactgtgtttagggcctgtttgaaactagcctaggagaggaaaccttcaaagcacggtaggcgtgatgggtcggggaaagctggggcagggagagggccctaagaagcaggcagtagggggaccagccacgctgatctaggtagattaggcgagactgggcagctgcggcgacctggaggctgtcacgccggtcctggccctgggcagccgggga

SEQ ID NO: 609 - DNA, 796 bp, Homo sapiens
tttttttttttttttggtagagttgggggatcttgccttgctaaccaggctggtctcaaacttgtggcttcacgcaatccccacacctcagccttccaaagtgctgggattacaggtgtaagccaccatgcctgatctggaatgctttctaaaaatatggcattataaacataatactaaagagaaaaaagggttaaatttcacttcaagaaattatcagtctaatagcatcagtaaaaagggcacttttagtcatggcataaaatatacaataaggctattttgcaattatggtttccaagtgggaaaatgctttatgaaacactcaaaaagatgtacggggtttactcatcaagtgctttggacaccatataaatgacagagtaacaccacagttatgtgattggggactcaagaatccttaaatgtcaggactgaaaacaggtatatgacttattggtccagaatttatatttttctgtatcccaataaaataattaagccatgtgtttggtgtaaaattacagtcttcagtctgtcctatgtgctggctctccgggctagatattagctaaaatttagcaaaaacagcctatttcccctattattccccagcaaagattgtgaaaccaaaacgcctaaccttttctgcctgggggactgccctctactggactatcgcgaggtatccagcagcaggtcatgtgactaacacgggtaccctgagataactgtaccttaaaaaaggacctttatatttaactttcccatgaaaacaatcgccattttgaaactg

SEQ ID NO: 610 - DNA, 851 bp, Homo sapiens
tttttttttttttttccatcgggttgaaatacggatccattcggggctgggtttttgtcaaagtccaggtcttggccaatggtggtgagcagacgacaaaggcagctcaagggactcttcatcatgattcttaagcagttggaccacacagtcatgcattatggcctctgttaacatcttcagttggaacaactctccaataaactggatattccctaaagagcgccgccgggctatgtcccgagcctcttccagctcttccgtttcaggcgtcctcgttcctcggccgtagcagcttcatccatctcttttggcttcttctcaaaaacctcatcatcatcttggtctttctcaaactccttctgacatcgattcaacaacagctttcggaagttcacagtcactggtgggcttttccgtaggggggcactttcagcgccatgaggcagcggcacatgtgggcataggccacagagaagtggggctctgaaaggggccttctcaaaaatgaggtcaatggacccctttgaggcgtccctcggtgtcgatggccagctgcgtcacttgcttcatcagctgctggacacatctggggtggtcagtttattcaggatggagcgcacccgtgcggaataggtccctgggttgtgtgccatcagatctcttcccctcgatcttatcagcgcgccggttgctggtgggttcccaggcttctctgttgcaggtaaatctcggcataacactggggaaagacttgggggcctttccgggcccgggaaaccgcggtccaggcaacttgggccggggaggtccaccttgccccttgggcccgtcttaggttccgccagttg

SEQ ID NO: 611 - DNA, 891 bp, Homo sapiens
tagtttcagcctcatttttcccggctcctatttaagatggagtgctctggttcacacacctctgacatgatcatgcccactgcggcttccacctcccgggttcaagagatcctcctgcctcaccctcccaaggtgctgggactacaggtgtgtgccaccagctcagctaattttgtatttttgtagagatggtgtttttccatgttgcccaggctggtctcaaactcctgggctcaagcaatccttctgtctcagcctcccaaagtactgggattacaggcatgtcccaccatgcccagactaatatttacttttaaatcagactaagatagggttactacttgagttgctatggctccagctgaaacgaacagcccgtgcaagtcatatcacgcgtaaacatttgctttatgctacaaatatggtggacctggcattaacagctattacaaatctcctaagatgtctcgcgtagggtattagttactttttcatactgctatgacgacactactggaaactgggtactttatcacaacggaacaagaggttaacgtacctcaccagtgtccacaaggttggaagaggccctccagactcaaggcggaagggacaacgcaaggagcaaaaagggtatgtcttgccaggcaggcaggacgaaaggccgtgagggaacggccttataaacccatcagatagggagatgtttccactatccgagacagttgggcaacactgccccagattcgaaacaccaacggggctcacagacctgggattgcgacacacacgacagatcggggggcgagcacaactaggtaaaacgggcgcggcgacaacacgaatcgggaagcgatcaacgcaagaggaaaagcgaaagaacaaagcaca

SEQ ID NO: 612 - DNA, 525 bp, Homo sapiens
accaaccagctctcatttgaatcaatagagcgtaacctttttgattatcaaaaggatggtgccaaaccatttatgaggaatttgctcccccacgacccaaacaccacccaccaggtcccacatcaaacaggaggattatattgcagcatgaggtttagagaaaatggacatcctctaaccttaggccaaccatatcatatcaccaactaggcttaacagatatgtacaaaacttaccaggcaaaagcaagagaatacacacaatattcttacttgctcctagtgtgttctgttacgacacataccaagtcttattaaatttatgaatactggctgagtgcagaggctcatatctataatctcaacaccttgggaaaatcacatggggcaaaaagtttgggaccagcctacacaacatagtgagaccctgtcgccaccaataaatcaaaaaattaaccaggggtagtagtgcatttctgtagtcccagctcaaaaatttgaggtaaaaggatcacttgagcccagc

SEQ ID NO: 613 - DNA, 544 bp, Homo sapiens
ttttaggttttttactattttattatggcacacaggatagaggatggtacagttttcttacttcaaccaagtaattctcaaagcatccagctatttccatttggctaaagttactttttgcacatagcttgcatctgtttgagacttaccatgtacatcaacccaggtctagtaagcagaaatgtgaaaagttttgtttctgaggagacgcctcatctttacagaagccaatacactgagagccttcatagttccaatccattaccatcatggcaaggaagcactttacctatttgcatagcaacatatatttaactagaaataggtggtacaaagggattaagtaactttaaatggagaccactttggtttcaggttaaattaataacttatagagatcgtctaaaaaacaaatattgaatgaaattagctgacaaagcaattgtttcagaacaaaggcagaatagcagatagtaatatcatctatatttattccacatcaaatgcaagagcgttcttaactttacgacagaaaggatacatg

SEQ ID NO: 614 - DNA, 617 bp, Homo sapiens
  misc_feature (603)..(603): n is a, c, g, or t
tcattagaaagtcttatttatttattacaaaagcaaagcttcattcacaatatgaactgcatactagatatagttatttctgcattaaactgctttccggaatccctaaacaatatagtgtattgtacaaccataatacaagttatgttttgcatacaaaatatgttctttacatcaaagcacatgttaacaaaaacaagttctagaaagcatataccctctaagactaatgaaaacgtctttagcagggaattaaaaaaaaattaacattcatttgataaatattttgtagaacttgaaatgaggattttatctctgagtattttttgtagtattccccttgtccagtttttgcagaagaatggcaaacacttatttctaaaatgaaatagccctggaaacacccagtggaattttttcaaagtaaatgtctagccttaacttgaagttcaagaagttgtagctacatactacattagtaaaatctgaaataaaattattcccagttaatctcttcacagtttcttaaaaaaatattagtggagataaattatctaccaactttaaaaatctaaacttatgttcactgaacaaaaataaatntagtttcagaacat

SEQ ID NO: 615 - DNA, 565 bp, Homo sapiens
ccctttagatttaaggtaattagaatagattgggaaatgatttaggattacccttcccaccctggaaatgtaacatcctacttatgttacatgaaaagaacacaataattgttcaacagcaagatttagtttctctaaaaaacaggagcactttgctctaattttcacagaaggactgcagaaaattttccaacatgaaagctagaaattgaggccagtaaagaagcttctttagtaatcaggacctatcatagttagagctctttggaatgtgtctcatacatacaaaggtatcacaaattaaatcttcagcatattcataagttcttaaatgagaaagatttctaatgacagataaaggctcccatcggcaaattaaatctgataactcaatctttcccaactaacaactgaacatagcctctggaatcaaatgtaaagatcactcaatcatgacgatgtaagatgaagtatagatgaacaatacatatgaaaaaattttgtaaaccgctgcagttctaaaacagatttatattacaaagcaatgtaaataaatactgggcta

SEQ ID NO: 616 - DNA, 491 bp, Homo sapiens
acagcaacttagtttattacatgcagattcttctgcattgttgctaacagttcactggtccaaaattactaaaatacttaaaaaactatacattatgtaaacaaaacataaataagacagcatagttctttgtacatatatttagtacaggttgttagggattctggaatatgtacaattttacatcatggactgcatttttcacaatgcataaatatatatatgtatttttttttttacagaaacaaaaataagatttcactaatgacactgaataccatatcatagatatgctgcaacagtccaaattcaagaagaaacatgtcaatgtaaatgtgcaaaaggctagcttactctaaactattcaaactttgttcactttatgttctacagacaggtaaatcctgactttaaacacagaaccttgaaaccctcctcagaacagtaagtgaaatggaacagatctttccctccccaagaaaacaaagcct

SEQ ID NO: 617 - DNA, 550 bp, Homo sapiens
ggatattactttccttgaaatctaaaagtctgagaatcatgtaatgaacaggtaaaagaaaatgtaagaacattatttaagaagaccatgtttttgtagaggaaaaaagaacatccaccctttacagttatttatttgtccccaacttttggaattaaaagacctgaacttgacatttatgtatttatatttggctaaacatcttgaaacctttgcaaaaaaaacaaaagccagaaaaaataaaacaaatattaacaataacaatttttgggtgtgaaaattcatgggaaatgtattttttttctgtccactttagtatattctcaggattttctatgaaatgtatacacaacttattcaaaatgaattttaaaatgtaaaataacttttaatatcactacgttttaagtattattttaaacataataattctgaaacaaaatagagaattcctgacaaccaatctcacctctgaactgctcttttttaaggcattggtaagacaatctttgtttttgtcccaaccacttctatctatcctcctatacta

SEQ ID NO: 618 - DNA, 573 bp, Homo sapiens
tagtcgcctgaggattttttattgtgttttccacatagataaaaaaataaggctttttgatgaaaagaatccattacaaagtcaaaaatccattacaattataattgaatcagtaacaaaatttagctttaaatgagtcaagtattctgcatttgaaatttaatatcacaaacattcaagattagtgaattttggtaagaaaaaaatactagaagaaaggaaaaggacaccttttcaacagatagtaatttataaaaatttttttaaaagtgctttgggaaaacacacagtatcattacttaagaaaagtcatttaaggaagacttaagtgcttcaagtggagtgtattacagactaaaaaatgttttaaaatttgccaagaaatttaagtgttaaaaatactcttctccttattcagtttcatgtttaaggaaacatttgacagacaagtaaaccaaacgcaaaaaaaagttcacctgcattttaaactaataaattctggatctgtaaaagctcttggtttgtacacagaggccaatgctgacatttattgatctatttttatgtagttaa

SEQ ID NO: 619 - DNA, 730 bp, Homo sapiens
  misc_feature (81)..(81): n is a, c, g, or t
  misc_feature (702)..(702): n is a, c, g, or t
tttgtagttctcaaaaatttcctgcaactgtttaagggcagccttagcctctatagcctctgttgattcaataacaggtanctggagcaggatgtggaaacagtctgtgatgtacttggacgttttggagttgatgcaagagaaacatcatctaagcttgaagcatgtaatggaatggcaactcctgttgtttgtgacaataaaatacggtacatatcacgctgacgaactatggaatcaacaagctgcatttgatgctgtcgtgatttggcggagttgttctacttcagtaagggcactctcaagtttgagctgaagctcagtgattttggatgaagttgtttcttgttcttctctttctctggtttccccaagctctctaagggccactaagagacgttgattttgttgttgaagctcttcaatatttctgtaagatactagatgctgtgatattacctcagatgaactacttatatcagcagagcttacttcctcatcacgaattacgtggttaccccttgcttcttcaattccatcaaagcactctaatctgttgtgacagatcttttacttgtatttccattcttcgattatctctctcaagtacagatgattgcttgtgggcttatcagtgtcctcctgcatcggctgatcttcctcatagctagttcaagctgaaccgatatactggtacagctntctgtgcacgttcatattcctcacgctg

SEQ ID NO: 620 - DNA, 575 bp, Homo sapiens
cagaaactaccagatttttaaaaaaatatacagacagaaaacgtaaggttaacaaattgttactccattggcatctccctttgagataatcacttgtttacaataggcttgggtcaccaacttgagcctaggaagagaaacagatactgcaagcaaatagaatattcacagccaaatgaaatttctttggcaaacaacaaggatgttaaacccacttacaaaatgaaaatgctattttatgaaaataatacaattacatttcaataaatcaaaatttaaccatcttatttttcccaaactaaccacgatcataagtcatttgaatataaaacggttcaattatttaagaataagttcatatacaattttagattctaaagatcagtagttaactgtgcagaatagctctaaacaggattctaatgtttacttcagtctgttatattaaatgtgagcttggaggtttatcctaagacaatctctcctcttggagtaaagcaatcctttttggtttttttttttctgcacagacacaatacattatttctaaaagaaaataagtacaaattttaaat

SEQ ID NO: 621 - DNA, 537 bp, Homo sapiens
tttttgagatgaaacaaaaaaaattttaatagtattaaaacagattaagacaattccaggtgcagtagccccagctactccagaagctgaagtgggaagaccactagagcccaggagtttgaggctacagtgagctatatgatggtgccactgcactccagtctgggtgacagtgttctttctactccctccttcccccagttctcctgaccttaaaagtttagaacaggttggcaaatttttttctgtaaaagaccaagtattttaggctttgttccagctacttaaccctgctgttgtaatgtgaaagcagccacagacaatatataaacaagtgggcataactgtattccaataaagttttttacaaaagcaggcagtggggttgtaacctgtagtttgctgacctctgacctataacaagtaacacttcctgaaaagcctttcctgatacccatcagaatcaggagctttatcgtccttggctcacatattactagtaaatccacttagcacatttatgatcccttattatat

SEQ ID NO: 622 - DNA, 581 bp, Homo sapiens
  misc_feature (566)..(566): n is a, c, g, or t
gcggccgcacagcctcttcaggcctggcagcaggtacatgtcggcgacgctcagcacatcataggctgcctcgggggacagctgggtctgacacttctagctgtgggggccctgggcaagtcactgcacctccctgtgcctctagttcccagtccatgaggtatagataaccatgcctacctgcgggggctgtcagaatggtggcacagggagcaagctgcagacagagacaaggggagctctgcgaccacattacaagccacgtgccatgtgccatgccacctcctttacctgggtaacccatgcatctgcacaaggccttaggaagtgacgacgagagctatccccatgttctagaggcacagagcagttaagtaactggcccaagatcacaaagctcacccagtgtcacacagctcaaccagtatcaacccaggttaagagcccaagccacactctgagacaaggtgccctttgggtggcgaggctccttgaagagggagcttctccagggtgggcaaaggtaacccctgctacaggggccagagagctgggctgagctgcangagatgcccagtaga

SEQ ID NO: 623 - DNA, 583 bp, Homo sapiens
ttttaaagacaagagatacaattcttcattactactgataaatcaatgtagctaattaaaatcatcatcctagtttttgccaggacaacataaaggtcttaattcacccaagatgcttaagacagaaacctaagaagcatcctgaacttgttctctctcacccatcacttttaattaatgaccaagttgtatccattctattgctgaatatctcttgaatccacttttctctatccttccgccccagttagggcgggcctacacctgaggccaacaaacttattctgtaaagagtcaagtagtaaatcttttaggtgctgtgacaaaattgaagatgtaatatacgtacttacataatgagagaaagcaaatttccacaaaaaaattttattgaagaaatgttaaatatgctaatactaataattagatataatcttttataagtttaccactaagaatataattattttggagggagataacagttcatttaattggggttcaaagttagtgttccctatcattaaaactgagagcaactgttcatctataaatgctgatctgcaatgacattttatgtatt

SEQ ID NO: 624 - DNA, 579 bp, Homo sapiens
  misc_feature (537)..(537): n is a, c, g, or t
ttgtagactggggaggagaatcctttatggtcacaaatgcttctggctcatcgaatgggttcaaatactgtggagtctgcacctctttaaagggattatagctgttattataaaaagagtcttctgtttttctaggtgaagctgtttcagtgataggttcttctgagtcaggatctccaaatggatttaattctgcagcatcaggatcatcaaatggatttgaattcacggtggccaagtccttttctgcttcatccaaaaagttaagtttgttgataagctctgtaattttagctgccttttcttcttggttcactctgttctcatcatcatcttcattatcttcttcgaagtcatctaaattgccaatgtcagcctgcttcatactcatcaaactagccaaactttgcatgtcttcatctgtggcttttccttccctcagaaaaatgcaagataatgaaaactgaagagcggcagatacaacttttttagataatggcttgaattttaacttgacatcagtctgagttggcatanggcttgcatactgtttcatattgatgctgctagtagcaagag

SEQ ID NO: 625 - DNA, 487 bp, Homo sapiens
attatacaaattagtagtttatttcttcctttagtattacagttccaaaacgtaacttgaaggtcagcacaggagctgctgtgatataaaaggagagagtcacctggcgccccctgcagtcctccagttgcccagcagcagtgggacgttcagtggcacacagtgggtctctgtatggcctcccacctgcaaggacttccccgggcaggcccagctgcccagaagccccggaacacacaggaagacaacactataggatggcaggtggggatctgtgcaatacaaacatgtagctagaaaacccaaccgaggatctgtctagaatacttccgatatcaatataccgtagttgaaaccagaaccgtctccagctgtcagcagtcttggcggctactgtacagctgtcagcatgactacaggcagcgcccgaggctatctggggtaagaagtgggcctgcacatcacatcggtgagtcagtgagagtca

SEQ ID NO: 626 - DNA, 541 bp, Homo sapiens
aatgatatttactctcattctcttgggattggccctagtgttctttctccagcggaagcatagacagattccctgccacataaagagtcctagacagacactatccaatagccctgaagcagatggctccgtcctcccagagtccaatcttctagtggctggagaaggtcatgcttactcagagagactactatcccacagttttcctgcatgacatattctccataaaagtctgtctgagaggggtccaggctccgccactcctcctgagagaagcacagtgacacatccttgatggttaccaggccctgaaacaaaatgtagcatcttctgtcagcagctgttttttaaggaaaatgtgattcagtatgaaaggctaagttagtagaggagagagggtgagaaatgatctgagaaaagagctgcccagaagtccctgggtagggcacatagttttggtaacagggaaatgaggagaggagtaaaggtagatggtcaaggagtgagtgagtgtaatgttactggaggaatttcccaagtg

SEQ ID NO: 627 - DNA, 570 bp, Homo sapiens
ggtttaaagtctccaaatgcagtcaaagatgtttgactgtgccttttttgttcccctgctgtcccttatgtagacttctgtcagtacccatggcagcctgtcatctgttgacatctccttctggactgtgagctctgtatctggctgtttttcatccccagcttctagttcacaattaggtagaaccctattactctttgaagaaggaacaagaaaatgtgggccagttttcatttgccattcttccatgtgagttagtatggttcgtaagtattcctggtgatacgctagtatggcaattctgtgaggttgaacaaaggggtggtatggtgtgctagcgtgggaattaggagacctctgggtcttgacagtgccctggccactaagcaaaggcagttcatccttggagtctcaatgtgcttttctgttaattgagatatgcttgaagtatcagccctaaatagtctgattctgtgacctacaaacccttacttaattcagtgttactataaatgattcttcccttaaactactttttacttagcaaaagagaaaaacaaaaaaaaaaaa

SEQ ID NO: 628 - DNA, 800 bp, Homo sapiens
atagtagttttataatcctgaaattcgaaagctttcccaatggcacttgcatctaaacaaaactgtgcagtttttactctatttatttgttccccatgtttatgaaagtcctgcacagtttcaaaggcatggtaaataatatatcaatgtttatgtagtctgttacagaaacagctatagataacattatccagtgaagagcaaaattcaagctttagaaaatattcatgcatgcaatttgacatatctaaaaataggtttcgtatattatggtgggaggtggtgggaacttttaacaaaatggggtgttaattttgtacagtctgtgggcatttacacatttttaatgtattaaaattgggtaattatgtgtaccttaaattaataaaagttacttctagttatgattggtgaattccctaagaccttggatttttttaagtaactttatatcagaaatgatactgatctttatatttttaaaatgtattggtgtcaagaatggtaccctcttgtcaaaaggcatacattcataatggtacattcagcatggtaaaataatcttatgaaacctttttgtgatgggagctattcaaaataaaatttagtgataacaaagaaaaaaaaaaaaaaggtttgggggggcgggccagaaagttttaaacattttgtgggggggccagaggtagagagtgctcacggtcccaagaaccgggcgacatgggggttcaccaaaaaaggctgggcggcgtgtgcaaacaaggggggggaagggttaaaaggcagcgcatcgccgggta

SEQ ID NO: 629 - DNA, 468 bp, Homo sapiens
aacattttaaagacttttatttaaaacataaactgttactgattaatcattcaatttgaatcttaaaaatagaagaaattaaggatcctcagaagaaagaaatcccctatgcatgtatttaagattgcttatttcctacaaaacatgacttagaactagcttccaaaaatatacgaaaacagagaatataactgaaaaacagaaaaatgaagtaatacatgaaaatggtatacagagccactcaaaataaatagggaaaaatcagtcatgaggttttgtatctatccgtatatggcaaatacaaagtaggagaagcacagctgtatcctgtaccggaaagcaaaataactttctcccataaaagggacgcatgaggccctatgcgattcatctcagaactgctgattagttggtagatctcctcctcaaacacaaccacatgataaactctggtaataatattcccta

SEQ ID NO: 630 - DNA, 664 bp, Homo sapiens
ttcatacttctttttccactgttctgcagttaactccacattgacacaaactgtgttcttaattgttttggccctttggccaaataagagtgtagattttgtttcagactcattgtatgatgatggagagcagcaaattacaatagtggttctacagttgccacctaatgaatcttgaaggattcttgtcattttactatctcgatatggaacatatgtactaccctcagccaaagcagaaataacatttccaagagcagaaagtgacttgttgatgtttttagcttcatccagcacagcaccttcagctccagttttactaaccttttcacttaccgcttaaatcaaccagataaagttttccactcagctttggttccgtttgtgtgttctcttgtttgacattaataagaaatatactgtgactcctagagctatgttcattcatatttgtaactgctacatgtctgttggattttccttcatctatggtatccataacttcatctggactacatacaaaacgctctgtgcacccctttacatagggaactcggtttttgtcttcatgaactgaaaggttggtctttgaaacatctaacaggtcccttatcttatccaaatatatctcaaagtatgaaaccttaatatgaaattccaaatt

SEQ ID NO: 631 - DNA, 799 bp, Homo sapiens
aattcacagtaatgctgccgttgttcgggacttaaagacacttgacctgtttgggctgttgccacttaaaagttcatgaccacaaatgtccacagtgtcttcctctgaggaaactcgaatcctgaaatggaaattcttttgtggcagataactggcttatgacacctttgaaaagttcaagtgctcatataacacaccacactgaaccccctttcctacagcaatatgttcactatgttaccaattgtgcaactgtgtgcttcaatagtggaatctactttcattgttaacactgagctaaagaaaaaaagccgtgtgttttatgaatgaccttatctgtttcctggataatacctttaagaataatgtcctgagtcaggcgtggtggtgcgtgcatctagtcccaactatttgggaggctgaggcaggaggatcgcttgagccccaggagtttaaagctgcagtgccctgtggttgcacctgtgaataactggcactccagcctggcaaatagcgagactcatcttcaaaaaaaagaaaaaaaaaacaaaaacagtactgatgtctgcagagatggccttcacttgaggagaccagctcacgtctccaacgggcttaagtttgcaactaactctttcaccatctttgcgggacccgggccccaagatcgggcccgggctaaaaacctcgaacaaccagacgcggcccaaggaaagagggggacaaacgcgcggcaccgcaaagggacggaacaccccccaggcgccacacaaaaaacccgcgcgcgcgccacatacgc

SEQ ID NO: 632 - DNA, 785 bp, Homo sapiens
ggggagaagaatgtttttttcacaattgaatgctgcatttctcaaacttggggatctatgaaagcggggagagggaacctgaatattaattatgagcacaaatttgaaggaaagaaaacaaagaaccattatctaatcaagcttgtgaaagtcctgcatgttgccttttattttagtgttgacgccaacatagactgtctaaggtatttttttccccaaacacttgaatctgtggtcgtggtatgtaatccactctctagagtccagtgtactttagacttcatctgagtccaatatatgtaccacactactgttttattaatgtaaaaacctgtgtaaatgaatttcagatgggtgatttaagtgagtcacaagtcacaaaacttgtgctattcatagttaatcaaatagaactgggtttttttttcagagtgtggtgtaaataaggaaatataagaagttctggtctataactgtctgttaacatagtttttaaccattaaaaatgtggacgtacacacacaacaaacaccgacaaaaacaaaaaattgtgggggggccacggccagaaaaaggctttctaacaacacttgggtgtggggcggcggcccaagaagggaagggaaacggcccacggggctcaaaggcaaccgtggccaggactagggggggttcacccaaaaaaacgcggggacgggggtctgaaaacccagggcgttgggggcaacgggctcaacgcggccacgggcgtagccccggcggcgcagggacaaaaaggaaagaag

SEQ ID NO: 633 - DNA, 837 bp, Homo sapiens
  misc_feature (599)..(599): n is a, c, g, or t
gtttgtttaaacgtccgagttactgatgtcatttgttttgtattatgtaggtagcttttaagtagaaaacactaacagtgtagtgcccatcatagcaaatgcttcagaaacacctcaataaaagagaaaactggctgtgtgatggtgcagtcatttgactggaccaacccacccaccttgactataccaaggcatcatctatccacagttctagcctaacttcatgctgatttctctgcctcttgatttttctctgtgtgttccaaataatcttaagctgagttgtggcattttccatgcaacctccttctgccagcagctcacactgcttgaagtcatatgaaccactgaggcacatcatggaattgatgtgagcattaagacgttctcccacacagcccttccctgaggcagcaggagctggtgtgtactggagacactgttgaacttgatcaagacccagaccaccccaggtctccttcgtgggatgtcatgacgtttgacatacctttggaacgagcctcctccttggaagatggaagaccgtgttcgtggccgacctggcctctcctaggcctgtttcttaagaatgcggagtncacatttcaatggtacgaaaagtggcttcgtaaaatagaagagccagtcactgtgggaactaacaaaatgggggagatgctcgggtgcacatggggtgctctcggggataacacagattatgaagccaactaattcttctgggccagattcttagggcacgtttgttccccttggagggttttccacacggagtcacctctggaggttggcagcggatggttgccggggcctgggaaa

SEQ ID NO: 634 - DNA, 903 bp, Homo sapiens
ccacgcgtcgcggacgcgtgggtcgaggttatgacatacttggagcggcatgatttcaagaagccattccaaattcttatagctccttagctctggttttactctcgtattttccccaagaaaatttttggctattcaaagaaagcacaaaatatgtgatgtggaactcatgaaaatagggactttgatatctctttaaatattccctgactcacggaaaagatgtcctcttttggtgtatacattgtgaaaatctacccatttatctctctctctctcttttcttttaaataaattatctgataaggccggcaaggtggctcacgcctgtaatcccagcacttgggaggccgaggcgagcggatcacgaggtcaggagatcgagaccgcggtgaaaccccgtctctactaaaaatacgaaaaaaaaattagccgggcgcagggcaggcgcctgtagtcccagctacttgggaggctgcggcaggagaatggtgtgaacctgggaggcggagcttgcaggagccaagatcgcgccactgcaactccagcctgggcgacagagcaagactccatctcaaaaaaaaaattatctgataggttactattgtaaaattaattggccattataaataacgctgatggtatctagatgcagccaagacctctttgacgaatgtgacaaattacacatacatagaatccattagtaattatcccggattacagggcaccgaggaacactaagaaggcgcaagggaacacactgcagatgacaaccactgcgaaatccacattcagagcattgttgaacaattaacagaaagttaaaaaacggtcacacaataacagaaaaggagggggacacagactaaagaggtcggacagaaacaccatgacaacaag

SEQ ID NO: 635 - DNA, 487 bp, Homo sapiens
tttgatcttttgtagagatgggattctgccatgttgctcaggctggtatctatttcttcttgaatgaattttggtacttattatttttcaaggaatttgtttatgatgttgaagttgttaaatttattagcttataattattcataatattctattggctttttaatacccataggatgtatcatgatgtcgcttctctccttcctgatatttaaaagacttactgagttttaaatggtataaatttctggcatctggcaggtgctaaataaatgtttcctggatcgaaatctacagtctcaaggagtcaaggctacaattcttaagttgcttcagatgactggttctatctatttatcaatacatccatcgatccactcatccactcatccatgcatcctcctacccttcctcttccccgtcaaacattcatccatccaattggtggcttggggaaagggacaaaaaggggaaaaaaaaaaaaaaa

SEQ ID NO: 636 - DNA, 545 bp, Homo sapiens
ttttaaaatccaaggcctttaatttagtttttggtaatgaccataaatgccttcacaaaacctctttttcactgtaaatagaaggcactaggcattacataatacccttaaagcagtgattcctcctgatgctggtagagataaaacatttaatgtcagggtttacatagtaacaaattcttcttaaaaaaaaaaagacaaatctaaaaaaaacgcaccaaaaattatcagtcactctttcccaggttcccagtgcaaatttacatcatttttacaagtacatagtttgaaattaagagataaactaggtatgatatggttttcaacatgtgttaggtttcagttaaatacagtaaaaatgaagacaccattatcatgctaattggcatcttttgctactgtttagctgtgcaaaatagacttgaaatgatacatcctgtagtggcataatttaaaagatccttgatatgactccaacaacttacaaattctggtcacaaactgtatataaattgtacaattattaaaatatacctttttgaaaa

SEQ ID NO: 637 - DNA, 573 bp, Homo sapiens
aattgataaaaattcattttttatttgaaaagtgtgcagaaacaatcactgaatacaattctcaaccatagtattcatagccagacaccaaaaaatcattggatgctatgatttctgaagccactagaactttggtacaacaaaataatgacctaacagtgtgcgtcaggaaccacagtctattaaggggcatatagaataaaaacttcaagtttatagttttaagttacattcatagcactagacaaaacagatctatataggagacagacaaaataatcaaacgtgcttagcctaaaaataaagataatattacttgaaggtaaactgttgggatacaatgaagcacttcagtgttatattagaacatcgtctacttttaacacactaaagcaggataatttatttttttaaaaaataatttcagatacaatcagtatctcttacaaggctatggacacagaagccctatttgtacatggaatattttgaccaacttgtaatatactacctagaattcattggtttccttgaaataaatacaagatgacatattttgtcaataatgagatg

SEQ ID NO: 638 - DNA, 560 bp, Homo sapiens
  misc_feature (200)..(200): n is a, c, g, or t
ttttaaaaaaggtcccaggaatatacagcaatctcgtaaggaactctagtgaaatgtaatcggaggactgaaggagggtgctctggcaaaaatagatctattctaacgtgttctatagaataacaagttagtaccattgtcaaggtgcatgttccgcaccatacaatttttgttgttgggtttttgttttggattttaanctaattttaatcttcaaatcactgctagcgagtggtccaaaactccaacagccaccaacatcgggacccagcattttcaaacattcactttttgttttgaaatttagaaaatattaataaaacagcatcatagtaaaaatattatgcaaaagtctggaactgctcacttgatttattcctgcatgaatggggttaagttgtaacgtttgattaaccttttactaatgccttcttcctccatccccaccaggaatatgcatttttgagcacatcattccgatgctttgctaccctctttacctgctttggaaaaaaaaacaagaagaaaaacctctattttttttcaatcctgttagtatg

SEQ ID NO: 639 - DNA, 542 bp, Homo sapiens
gtgatttgctttgttttattagaaaaaatactcaagcaaggtctacaatcattggtcaattaagaatgacttacaagaacatgaggcaataaaataaaaatacaggtacaaactatgtatctgaaacacttctatttggcaattttataacaaatcaaattttaaaaagaacaaaagagattgcagattacttcgcagatacagaataaagcaattgatgaagtgcttaagcaaaagaaaacaacaaaaaaagaaaacacactgcttttctttttaaaaataaaatcacattgctatagatcaaatggataatacccttattaaacaaccattccagaatgtcttatagtagcagtgcttttatttgcacttcacttaattttataagactcattttcatgtatatagctctttacccccattgttaacgaataaagtctctcataatttttacacttttaaattttttaaagcaaatgagaaatgatttatgtatcgtggaacctttcccattttggaaccaaaggttttaattctatatt

SEQ ID NO: 640 - DNA, 561 bp, Homo sapiens
ttacataatgtcttcaccaaaaaaacagtcttgtaccaataaaatgcattcaaaaatagaaaatattacacaacaaaaatatgtatccttcctttccaaaaaagattcttcacaaaaaaatgtagaaaaaattccaacaatttttttcctctcctaaacattaaccttcagtctagggcacaattatttattgatttaaatgtctgtttttgcataaaacatggaagatgcaaaacatttactgtattaggattgtgaagttacagccactcccacccctgctctaaaacaaaacaaaaccagaaaaaaaccagcaaacattaaacaaatgatagagtcagttggctaggaaaaataccgctgttcttccctttactgtgcatttgtatgggtaaacgggccagtttggtattggggaatgttgacgaagggagatcaggtttcaagattggattcaagagcttctttagcatatgctgataccaatgagtcactgacagtccccaggttgtacaactatccattgcaaatcctcatgagaagagaaacacatgaggtagc

SEQ ID NO: 641 - DNA, 474 bp, Homo sapiens
tttttttttttttttcctttttcttgccataaacatctatctcacaggctgaaaacactgagaaaactggaaaagataaggccatgatggttggaaaaaaacccaacaagttaccaactccgctcgggcggcgctcacgaatcgcacaatagtcatggggtgggggtcgcacggcacggaggagaagcgtggtctccgggaagataggggcacagaaaaggttccattacaaaccagcggcggagggcgggggcgcgggggctggggtctgtgggcactccccggctccgcggctcgctgctctttggaagctggaggccgtgccccctgccgccctcctcacagccgggccgggcagtgcccccttcttgagcttgggggcaagggagggcccagcgctggagaagatgcgacacccacggctttaattgcacttaataccaagaaggggaagcagtggggttgctgggggta

SEQ ID NO: 642 - DNA, 709 bp, Homo sapiens
tttttttttttttttttagatttcctttgtggcaccataatagaatgttccaggttcatctcatatttctccatcccaggagccattattactctacttttgagtatgtcctcaaaactggtctaacaagtcatttcagaaaataatttcacttcaacaatacactgtttgttgattcaacacaaactgcatgggctgcttagatcaatttacacttggttcatcgccatctttggctgtttcaaacatacactgctaaaaaaaaaaagattgtcattaagaatattacaatagaaatggaagttttgaggaggaagaaaatcccccaaaatgtaagcaatggtaataatgcatttaaagtatagtctcacaaagtctcacttaagagagcagcacacccaggacacacatattgatctgctgacaccacttctttactatacttcatatagatgtcctcacatcttgatttacatggttataactgcttaaaaactggcaaagagaaaacctaaaataatgctttataccagtttgagtcagaaccagactgttccagactagttggaaaacgacccaggaactcacctgcattaaatgctgaatttaactgagctaaaaatgtctagggcatcccttcttagaattcccatgactcattctagtcaaaagctataagaacatattccttaatagttcagcaaacttt

SEQ ID NO: 643 - DNA, 523 bp, Homo sapiens
cggccgctcatttctctcttcattattccatgggtagaaaagaaaaaaaaacaaagagaatgccactctcattcccacccttacaatatgcctctttaccaaccgttgcaaataactcaagtgaatacaagtaatactccaagatcatctctctgcgagggcacaggaacacacacaaataaatggaaatatatataaccatactgtattaagtttgaaggaacatcaaaatttctaatactgaatccaatcccattaaattgaaagcaattactgcttccaattgaataagaatggattaaattagatttctgattcaatataatttgtagtgtccatgacaggaaaagtgatagtataaggatcttatccaagacatgtcaagactatgcagactggacttgacagccacccaaatagaattttactgaaaaactcaagggattcccatacacactgcatttatctaacctttgggatatactttaatttttcttctaacttaaagataaaaagaataaaa

SEQ ID NO: 644 - DNA, 519 bp, Homo sapiens
tttttttttttttttttgcatattactgaaacaattagcaaaatatgaaaaagatttgataatagtaaagtattaatgttaattttctgattttggtaattgtgctatggctatgcaggaaaacacccttgttctttggaaatacaaacttaagtaattggggtaaagaggcaccacatctagtaaggaatattcaaatggctcagaaaaaagtacttactcgaagttgatgataaagggaaacctcttccttacagtagaatgatgactaattaatacagaaataataatagagttagaacaatcacaattttggaaacatcctagtaaaaatttattcagacaagaatcgtcaaaggatgctaaacctaggaggggtagatttgatgaggaacagaattgtcaacaaggtctcaaagtttctcctcacaaattacccactaattgcaaaaggaaaaacaataacgatacactggagaaactggacatcttacccaagtgatcaaaattagcatcacc

SEQ ID NO: 645 - DNA, 544 bp, Homo sapiens
tttttttttttttttttggtggtactaatttgtgtgtggttctagttgtctgggaaacactactctaggcatttataatcattacatatacatagttgagaaaaactaaaagcttattttaaattagaaattgaagaatcaacttttaaaataaggccttaaacatacctgagaacaattatttgttatagtattatgtacaaattaataataaacacattttaatctcaatgtggtacactcttgtgtccttttaaagattttaaaatttttaaagaatttcaaagtgtacttaagtaaacttaaaaatgcatcacaaatattttgcacaggctgtaatctcaataagaatttgatcaaacactcaaatgaactatataggcctctcagatttccaaagctagagtactacaaagtttttagttaccctactgattgagtcttttacatcatgcccattttaagataatctatgtattttcttagtcacatccatgtagtagcaacctataactttaaaaaccaaaagcaattgctgacacag

SEQ ID NO: 646 - DNA, 659 bp, Homo sapiens
  misc_feature (458)..(458): n is a, c, g, or t
ggcgggatcctgggtccctcataagcactttggttttaccgcctgcaacctcactgtgcccgccccgcaccatgccctagccccaggtctagccgggcccattgcagggggcagcacttgggggcatctccggcacttgggtgggaccaaggagatgccaccatagacctttccctcgccttcttcctccctagtccgggttccattcttttcaccagcacccatcgcccaaggggtaccgaggggggcaaggggtgtccagtccaagcccacccccgcctcgccttccgcaaaactgtgagcaaaaagcaatagaagcctcgcccccgcccttccccttcgcaggattcgccgagtctgtagcctccccgatccaagttcctagacctcatggctgtcccctcccaccagtcacctccactgcacaactcgggcgggggtgtgacacctctcccccnaccccgactccgtggtttccgtatcgtcaacccttcagccgccgacccgggaggggtctggcctacactggtcttccccttcccatcaactctttctgcttgacaatgtagcaacccaggccccccaccacggtcctcccctttttcctctccctgacaataaagtctgaatttgttctgccctcctaaaataaaaaaaaa

SEQ ID NO: 647 - DNA, 855 bp, Homo sapiens
gacacaggaatttacattttcaaagtcatttttgacacatcagtgctgcatctacttttctccttttagcacatttgatattgatacttcagagaaacttttttaactacccttaaaatcttgtcaatgaccattaactgccaatcatcacctcatttgctttttttgacaacatactactagaaacctaggctgtgagtgtaaaaccataactgttagaatcattttttggcaatagctcacattctgttaagagtcatttgctttaatcaaagatcatgatttatatatattttttataagtagggatggggccaagattattcctttgcacagcagtaagtgtgctcaagatcttgtgcctgtaagcttgaatattgtggcttaaatttggtgcatatgaatactgttaaaggtatatttgactacatttgtgaaaggaaaaaggtagtcctgctaaaattgacatttagggatattttaatctatgtatttggtaaacgtaattagtgaagtatcagttataaaaattttaaggaaaacctttaaaagcaaatagtcgtatcagatactagagtagaatacactaaagattaaaacaagtctctgttacaatgaagttgtctgtacagacgactggatattttactttatttacattaaaatgctgtcatattaatgattcctgtcgtcggatctgtacttagagtataaatacgtttggttccaaaaaaaaaaaaaaaattgtgggcgcgcccgaaagtttaacctttggcggccaaaaaatcatcggcaacggggtggggtcccaaacgggcgtgacacattgtgtcccatccccgccggaggaggaga

SEQ ID NO: 648 - DNA, 781 bp, Homo sapiens
  misc_feature (142)..(142): n is a, c, g, or t
atataagtgtctgctagatcatggttgtatgaactaacaaggttgcagatctgctgacttatataaagcttttgattcctactaagctttaagatttaaaaaatgttcaatgtgaaatttctgtggggctctattttgcttnggctttctggtgagagagtgaggaagcattctttccttcactaagttgtctttctgtcttctggatagatgattttaagagactaagggaatttacaaactaaagattttagtcatctggtggaaaaggagactttaagatgtttagggctgggcggggtgactcacatctgtaatcccagcactttgggaggccaaggcaggcagaacacttgaaggagttcaagaccagcgtggccaacgtggtgaaaccctgtctctactaaaaatacaaaaatgtttagctctgtttttcataatagaaatagaacaaggtaaaattgcttttcttctgaaaaagaacaagtattgttcatccaagaagggttttgtgactgaatcagcagtgctgcctagtcatagctgtgcttcaaaaacctcagcatgattagtgtgggagcaaacaggaagcaagcaatacagttttgaattctatctgtggttgactatttgtatactaacttggtgtggaatcccaaaaaaaaaaaaaaaaattgggggcgggcctgaaattttaacctttggggggggcctggggaagggagtcaggacgggggagggggttccaaaacgggcggtgaaaaggggggcggtaggtcac

SEQ ID NO: 649 - DNA, 538 bp, Homo sapiens
cagtaacactaagaagtatagttaatgcatacacatgaagtgtgacaaaacttggcaaaaacactgcagaggaaagtttgattttttttaaccagcgaaaaatttatctcacttctaaagatcttatagatacttaaaaacaaaaatctcaaatctaaaacaataaccgataaagctttaaatgttgaattttaactctgaggatggggaaaaaatggatcttttctacataaagactcaattgttccctaatcttagagatggctattagagccaagtctgctgaaaacatcctgtttactctgcagagaaaaacaggcttggcgtaagcattttgctcagcatgcagacattttcattctgttttagagaagagtcaaatatggcagaatataaaaaatgaaattaaaaagtacacagcatctgaggtcaaaatggaatctggctgttaaccttacaaaaatcaccccctcacccaaaaaaaaaagtggtaaaaatgagtgaatagttgcaaaaagttaacagcctatgagcttct

SEQ ID NO: 650 - DNA, 561 bp, Homo sapiens
ccgggagtctggcgtgagcgtggacggggggcttgcgccggcgcttccgccaatcaccgcgccggcctcccctccccctatctctcgccgggccgaggcctccttctccgtagccaaaagtcgccctcccgggcgggtggcgccgtcgctgccggcccccaagccggcccccccacagtttaggttgtgttcgttttccgtgttttttttgtggcctttcattgtcagtctccgccggcgtctgtttgtgggtgctgggtaagaccccttccttgttccgttttcttggccttgttggctctgcttcttgtggcgtggtttgttttcttcttttggggttgggttgtgtttttgttggtttggttgctggtggtcgtttgccgtcggtcggtctcttgccctcgcgcctttcctctcgcttgtcttctcctgcgtttcgtttgttcgctgtgtgtgttctcggctcctggttcggcgcgcttttcttgtgtttttggttggcttcttcgtttggttgcggttttcgctctttccttcgttactaatagtaaaaaaaaaaaa

SEQ ID NO: 651 - DNA, 832 bp, Homo sapiens
tgatttttccatcatgaaaaaaatttctttaaagtcatctgtctgattctgtaaaaatttcacattctttatgtgaacaaaaagctgaaagaaattcagggaaagaattaagatgtgatatcaattgccaacccaatgttttgttcttgctagttgtgttccccctccttattccatccatttcatagtaataagaaaaaaaagaattttacattgagatttttaggtaaatttttgaattacagtatatgataaaaaccttaacgttcaaactccaggtataatgaaatttaattgaaaattactatagcagtttaagtcaatttggtagtttctgaaagcagttttaatattttatcttccacaaaaaggtaggaaagtttctgtgctgaacttaaatatataaaggaacacgtccaacatatttagttaaaaatccaaaagtcagaggatattttccaaatgtgtacttaacatagaaaaacaattaccccatttcatgtggaataaagtgtctgccacttacgtaaaaaaaaaaaaaacccaaattattttccccttaggaaccggtacccttcttgtcactagagacagggtctaaaggtttacgctcaatgaaacagcgctacttcgggacacgggctgtttggaatgtaccgtttcaacatgttgtttctaagaaacaaccttgatattggtcaattaagtcagaatttcatcagtgaccagtcccggcgaataaatcacaaaattattgtgaggcagcacacgggtttaccaatattgcattctgcacggatagtctattaataatgaaacgattaaacgaata

SEQ ID NO: 652 - DNA, 827 bp, Homo sapiens
gtgtgtaattatgtaaatacaatttgtacttttttcttaaggcatactagtacaagtggtaatttttgtacattacactaaattattagcatttgttttagcattacctaatttttttcctgctccatgcagactgttagcttttaccttaaatgcttattttaaaatgacagtggaagtttttttttcctctaagtgccagtattcccagagtttgggtttttgaactagcaatgcctgtgaaaaagaaactgaatacctaagatttctgtctgtggggtttttggtgcatgcagttgattacttcttatttttcttaccaatgtgtgaatgttggtgtgaaacaaattaatgaagctttgtgaatcatccctattctgtgttttatctagtcacataaatggattaattactaatttcagttgagaccttctaattggtttttactgaaacattgagggaacacaaatttatgggcttcctgatgatgattcttctaggcatcatgtcctatagtttgtcatccctgatgaatgtaagttacctgttcacaaaggtttgtctcctttcactgtattagtcatgatcactctccccaaaatattatatttctccaaaaaaaaaaaaaaaaaaaaaaatttgggggcctgcgccagagatttttaaccctctgtgggccggccaatagtatgaatggctaaggtttcacagaacccggcgacaaggttggtttccccaaaaaacggcgcggggtcggaacctcgtttgggtttgtcttaagcctcattccccccgcccccccggaaaacaaaaaaatgcatcatcgc

SEQ ID NO: 653 - DNA, 906 bp, Homo sapiens
  misc_feature (230)..(230): n is a, c, g, or t
  misc_feature (740)..(740): n is a, c, g, or t
gcacctctttatagtcttgcaccctagcacagtggagtgaaacactttaaatagcacttgtccttgagtatatatggaaaaaagtgaagtatgataagtgctcagctaatatgagcagcatctcaggagtctccaattcttgaattaccaggagtatttttaccattttcccccagtgaaaggcctatttggagagacttaccctccaaaatgaatgtataagtcatgtncctttttttttttttttttggaaaaggggcctgggccttgtgtggcccaggtggggtgcgaccttgatgtccgggaaggggtgtccccattttagaacccaaaagaagaggtgttctggcgtctctggttgcacaagaacagactcccggttgctcgccccggtgtgcacgtgaacgcaggttctattcacgacaacgttaacggaggagggacacgggtgccccactctggtgatccccagcgcttggggaagcgccgacaaagcctgctaccacgaaggtcaggagatcagcaccttcgtgtttaccccgtgtggaaagactcatcttttaaccaaaaaaaaaaacaaaaacaacaaacaaaattgttggcgggcacccgcacacggaaagatttaaacacacgtgctgggcgccgcggaccccgaaaggataggcagacatcggcgaaggtgcgcaaagagacacccgccggaacaaggtgcggttgccacccaaaaaaaccgcgcnaccgggtttggcacacaccagaggcttcgggcctcgggtccacaggtccggactaatctcccctcgtccgcggtgcgtaccgacaggcacagagaacaaagatgacaaagtccacgaagacacagagacacacgagcgacgcacaacacgaacacgagcaatagat

SEQ ID NO: 654 - DNA, 767 bp, Homo sapiens
gctttttttttttcaggcggccgggaagatggcggacattcagactgagcgtgcctaccaaaagcagccgaccatctttcaaaacaagaagagggtcctgctgggagaaactggcaaggagaagctcccgcggtactacaagaacatcggtctgggcttcaagacacccaaggaggctattgagggcacctacattgacaagaaatgccccttcactggtaatgtgtccattcgagggcggatcctctctggcgtggtgaccaagatgaagatgcagaggaccatggtcatccgccgagactatctgcactacatccgcaagtacaaccgcttcgagaagcgccacaagaacatgtctgtacacctgtccccctgcttcagggacgtccagatcggtgacatcgtcacagtgggcgagtgccggcctctgagcaagacagtgcgcttcaacgtgctcaaggtcaccaaggctgccggcaccaagaagcagttccagaagtctgaggcctggaacatcggggcccgcctccccaccaatggaactaacagttcattttcttccatcccctcagaaataataacaagccgacaaaccaaacacattgtttggcgccgctcagcccctcaaaaaatttttcaaaccccttcgtggggccggcgggccccgtggttagtgacaccggtcctaccgtttccagagaaacccgtgccgaacaggggggtttcccccaaaaaaagcgcggggaccggggtttgcacaccaaggt

SEQ ID NO: 655 - DNA, 1076 bp, Homo sapiens
gccaacatcatcaccctgcacgacatcttcgagaacaagacggacgtggtcctcatcctgtgagctggtctctggcggggagctctttgacttcctggctggagaaggagtcgctgacggaggacgaggccacccagttcctcaagcagatcctggacggcgttcactacctgcactctaagcgcatcgcacactttgacctgaatgccggaaaacatcatgctgctggacaagaacgtgcccaacccacgaatcaagctcatcgacttcggcatcgcgcacaagatcgaggcggggaacgagttcaagaacatcttcgtgcaccccggagttatgtggccccagagatttgtgaactatgagcctgctgggcctggaggctggacatgtggagcatcggtgtcatcacctatatcctcctgagcggtgcatccccgttcctgggcgagaacaagcaggagacgctcaccaacatctcagccgtgaactacgacttcgacgaggagtacttcagcaacagcagcgagctggcaaggacttcattctgccggctgctcgtcaaagatcccaagcggagactgaccattgaccagagcctggaacattcctggattacgggatccggcggcggaaccgtgcgtgggggaaggacagcgggcgcaagcccgagagggggcgccggaagacccacgcgtctgacaggagtaccaccatcaggtcgcactccagattggcggccaacaacagtacgccgacttcgagggctctccaggtgctggacggacggcagcggccagccgatgaagtgcctgtcaaagcttaacagaaccgggggatcatgcacagggcaactggaagggacggaggacacaaaaaggagaacggcggccgggcccggagggacaggacagccgtgccaggacatgggagtacgaggagacgtccaaacccagggcacagaaaggcagagacgcaagaggcgcgtggtgaccaggcaaagcgcacggtagaacacgagccggagcatcgcacgtagtgaaacgcgcgcgcaaaagcgactggagggatagaggaaa

SEQ ID NO: 656 - DNA, 882 bp, Homo sapiens
  misc_feature (689)..(689): n is a, c, g, or t
gacaagatagccacccgcaaggcctacgggcaggcactggccaagctgggccatgccagtgaccgcatcatcgccctggatggggacaccaaaaattccaccttctcggagatcttcaaaaaggagcacccggaccgcttcatcgagtgctacattgctgagcagaacatggtgagcatcgcggtgggctgtgccacccgcaacaggacggtgcccttctgcagcacttttgcagccttcttcacgcgggcctttgaccagattcgcatggccgcatctccgagagcaacatcaacctctgcggctcccactgcggcgtttccatcggggcaagacgggcctcccagatggccctagaagatctggctatgtttcggtcagtccccacatcaactgtcttttacccaagtgatggcgttgctacagagaaggcagtggaactagccgccaatacaaagggtatctgcttcatccggacagccgcccagaaaatgccatcatctataacaacaatgaggacttccaggtcggacaagccaaggtggtcctgaagagcaggttgaccaggtgaccggtatcgggctgggtgacctgcacgaggcttggcgtgcgaactggtgaagacgaaagtcacctcgggggtggccttccatcaagcctggcgaatcatctcgaggtcgtgcccaggncggtctcccgggggccttttgagtgcttgtgcgtggtccgcgagggcgccggcctgcccccgggtaccgggcccagggaccggctcagattggtcggccctcacggggcgccagcaccgaggggggggccaccgggccaggggggtgtcacacaaacccgcgtcggggcgcgcggtctctcctgctccgggga

SEQ ID NO: 657 - DNA, 666 bp, Homo sapiens
  misc_feature (649)..(649): n is a, c, g, or t
ggctttctcctttttctttggtttgttctgctggggctgagagagggctgcaagctgctcgtgcacggctttgagctgctcctggggctcagccagccgctgggctcgctcctcctcagagtcatcagtcgaactgtcactgtccgaggagctatcgctgctgctgtcgctggatgagggcggggccacaaccttggtgggagggggcactgccggggaggacacggccaccactggctcctcaggctcgtccggcatcttggcaaagcgcatttcgaacacatcctggagcttgcgggccatggccaccacctcatggtcaggagggttgtacttatagcagttggagaacatcaatcggacgtcagcaccaaactcctgagcatcacggtactcacgggcctccaggttagacttgattgtgctcatgtccatggggtgcttgatgatgtcacagtagtcgtgtaggcccagtgcctccacgtccacaggcttgtaaaagggccaggcgtaagcggcgtgctttttggcaaacatctccttgaggatgccgctgcagcacttgagctgctccgagaccttgctgttttctctggggctgggtgctgctgagagtcgggcacctcttttttggaggtttacaggccgnttgttttctgccgttgg

SEQ ID NO: 658 - DNA, 655 bp, Homo sapiens
ttaccaaaatactttctacagaattccaaaccaaaatgtactgtttaaggcatcttttttataacattttctcttcactcaaagatgatagtcatgcagcagtttaatgataaaaatatattaatattttactatacagcagcaagaagttagttgtcaattaaaagcacacaaacatctttaaaggaaaacctgtaaaagactatcgttacaaacaatttcagtttggaggacaccagcttggtaaagtgctctcctaaactttgcattttcataccctacaccttgaatatatgagttatagaacatacttttgatagaaggcttgtacacttggggaacacaaatacacttagcatataatgtagccagtaataactagcaccacagctacatggaaatcctttacatacaccaacttggctttcacttttaaaacaaaactcagaatccatggctcagtaggataactataattgtgttgctctgctttttaacaggtctacataagttaatagcactagcaaaaatcaaagaatagcttcagacctcttacaagtttaggagacagtgctagtgaccacaaatagactcactacctgatgtccaagtacaggttcactggaaattgctgcacgttagttttttaaaatct

SEQ ID NO: 659 - DNA, 958 bp, Homo sapiens
gatgaccaggaaattcacatctatgattgtccaatttaaacatcaaagtctccaggcttatgctgcaaagagaatgtacggattgatcatgacattccttaccttcttaggcttgtttaaaagaaatatagcatttattgtagcaaagacttaaattttgtagatacaatatgaatcttttcatgttttattggaaatgctgttcatactttaacataaagctttcttaatgcaaaaaaaaaaaaaaaaaaaaaaaaaaaaaaaaaaaaaaaaaaaaaaaaaaaaaaaaaaaaaaaaaaaaaaaaaaaaaaaaaaaaaaaaaaaaaaaaaaagaaaaaaaaaaaaaaaaaaaaaaaaaaaagaaaaaaaaaaaaaaagaaaaaaaaaaaaaaaaaaaaaaaacgatggatgagtgagaagagaagagcataacaagatgagagaaatacgagaggtcagacaccgcccgagaagaggataatgagaaggaaaagagaacgcagatttagtttagagagcaacagcacacacaccgactccacggacgaccggcgcgcagagtcaaaaaagagaggagtaaaaccgaatcacgagaaagtacaaaacaggaagagaacgaagagccagacccaaacgaacgggaaagagatagacgcagagcacaaagtcaaagaaagagaacaaagcagcaggacaagagggaagagcgagaacaagaggaaagacaagtaggaaatccagagagagaatgaaaccaacagaagactacacagcggcagcagagaaacaagagaaaacagaacaaggacacacaaaagcagaaacactacaagccgaagaaacaagacaaaaggcgaaggcaagagaaggaaagagaaagctagaaggcaaccagggaaggaaaacagcacacacaaacaagaagagaacagcaagcgaaaaagaacaacgaaaaaaa

SEQ ID NO: 660 - DNA, 1039 bp, Homo sapiens
gggtcagcgagcggcgctttgggggaggggtcgcgtaggcgcctcacctgaccctgcggccgtgcggttgctgctccggggcaggtctccttccaggccaggggcccggaatcatgtacataaagcaggtgattatccagggttttcgaagttacagagatcaaacaattgtagatcccttcagttcaaaacataatgtgattgtgggcagaaatggatctggaaaaagtaactttttttatgcaattcagtttgttctcagtgatgagtttagtcatcttcgtccagaacagcggttggctttattgcatgaaggtactggtcctcgtgttatttctgcttttgtggagattatttttgataattcagacaaccggttaccaatcgataaagaggaagtttcacttcgaagagttattggtgccaaaaaggatcagtatttcttagacaagaagatggtcacgaaaaatgatgtgatgaacctccttgaaagcgctggtttatctcgaagcaatccttattatatcgttaaacaaggaaagatcaaccagatggcaacagcaccagattctcagagattaaagctattaagagaagtagctggtactagagtgtatgacgaacgaaaggaagacagcatctccttaatggacagcacaccagagggcaaacgggaacaaatccatgagttgttaaaataccttggacgagagattacatactcctagaaggaagcacacggaagaaactaagctcagtatcagacagtgggactaaattgagaacgagccccgtgaatttacccatttcaccatccggggcactctaaaggagaatgcgtgcgccacctggaggagagacttggctaaaggcgagagaacatgggagaaaaacatcccaacagaagaaaggcacaccacgatgaacaagaaacaggacgggaatacacaacaacgtgaagaatgcacacaaatatgcgcagacaacacacagagcttgggacgaaagcaacaaaaagacacaagagaaccagccagaa

SEQ ID NO: 661 - DNA, 950 bp, Homo sapiens
cttatctaaaaattccattgcttttactaaatggtattatactcagtgtattaaatggtaattggggatggagattggtagcatttagggacagtacatatgactagaatgttttcttcccctcttcttagtataatgatcttaggtgacctggaaagtatcttaccttatttgatagtcttccatactgttagaaaacaggtaatggatgttatcaggtaattgctgataaatgtttgaaaattagttttttgtaaggacttagtgtatcatggtacagctagagtgtggaacctattttttatttcacccttagtagctttgcatttgtatggaaatgtttaatagtagttgctatacattttttaacatcaaagaaatagttcatgattatggtaagtactttggaagatatccttttcagtatctttttaaatgctaaaatacctctttttcaaaggcattttaaatagaagaaggaggaagaaggctctatgctcatcgtgatcccagtggagttttaggaacagtaagctttaagctgcttttaccagttgaactccaaaaataatgtacgagagagatggcttctttgtctgtctccagggtggggcaaggtagcagaaggtgggctgtcaaaagtaatgaaggatgtaccgctgcttgaaacatactctaggaagaactgggaagacagaacggagaccaacaaggtcagataacagtcaaccggtcaaactatacatattgaaaagggcacgaagacggcccaaaaccaccacctacaaaaacacacacacacatggcaaaccacactgcaaaacacccgcacaatttcgaacacagcgcacagatagcggcgccggccacatcaacagcacaggcaacccgcaacggactagggcgataatcagacaacataagggcgagaagacaatcaggaagcccgc

SEQ ID NO: 662 - DNA, 999 bp, Homo sapiens
  misc_feature (999)..(999): n is a, c, g, or t
tactaacaggtgaaatgtacaaggtgtctgtgtgttgggtgtagcttcagagttagattgaaattaccaggcacagatttagtcttgtcatttgtttacacatggggaaaacaattcagtttattaaacgtttcatgtaactgcacccaagtttgccaagctggaaacttggaccttttctgtgtagtgactttttaattatagttttcataacctggagatcagactgttgctttcgcatgatgtatgtagtgtctcatgactggagttgcttgttttatagtatctgtactccttgtatttttcaagagctatttgtaaacagatgatgtatttctccattgaaaacacaataaaaaaaaaaagcacaaaaaaaaaaaaaaaaaaaaagaaaaccaaacaaaaaagaaaaaacaaaaagaagccggcgacccagaaaataaaacaaacaacagcaagcgccatattaattaacacggacgacaccaagcattcgtgaatacaagaacggcggcccccaagtcatagttacatctataaggagaccaggaccagggtcgcaccaccaaacaacacgacctgacaagggaaacaacaccaatgatgcgtagaaatattggcgcacgcacactacaccaccgttggggaaggcacacatcacggcacacaacacaaccgcgagagggtactacccacgcgtcgggagcgcaacacaacactaccgctgcgagggcaagagtagacacccccacgcgtcaataaacggcgagccaaacaaatcacaatcgaaagagtaaagacaaacaaaaacgccgagcaagaccaaaacagcaagacatagaaaagaccgatcaacaactagaagcgacgaacaacccaccgcctccagcacaacaacagaacaacaccgaacatagatgcacgacaaccacccaaccaaaccacccccacttctgcgccacacccaacacacaacacgaaataacacataccgacacn

SEQ ID NO: 663 - DNA, 484 bp, Homo sapiens
ggccgcgggtactggtactgcgtctccatctgcacctccaccatggccaccatggcaaagccggagaggagggcggaggtcctgctggaggccttcagcttggccctgctcaggtagagcttccgccacgacagggcctgtaccgagtggtggttagaggtgaccagttccaggtagctgcggcggacccagtcccggtaatccatgcccttatggccgggctcagggcaggcaggagcagaggggtcgataggcacgttaagctcagcactcatggtgggagccaggcaggtcatttatacgaatgccaactcaggctctccatcccatctccttgcgcacatccgcagccagcagcaccgcatccaagcacttccatccctgggacgttccttcccggagctgccctcgccccgcccggctcggctcccgctcggactgcgtggccgcgtggcctgtggcccagtggcccggccggggcgcc

SEQ ID NO: 664 - DNA, 486 bp, Homo sapiens
ggggccgctgcccaagaaccctttcctggagagctgctccgagaccgcgcagcgccgccgcgtcttctccttttccactcctctctcctaatttttttgatttaccagcgttcgacatcgttatctcttcctctagattaattgcttcgctcttttgagcaagaatactctgtgtggcatctttggtactatggggaacgagaatccagcattatctttaataaaatccagaaacatttttggttgtttcctttgaggggtacgacgcagcacgctcacttttttccccttctcgttggccttggtccttcagtttcacaaaatgtggatagtgacttaaaaataccttaaaaaaaaaaaaaagaaaaaaccattagagtagggggaaagcacttcctaaagagtggaagaactaatgggtcggtaaaaatgggatatggaattcataagatgttaaatgggactgcatttcgggaagtaagggtg

SEQ ID NO: 665 - DNA, 528 bp, Homo sapiens
agcgggctcttgcccggcgtggcgactcgctagcgtcagcagcgccgcagccggacgagaaagcggaagatggcggcggcggccgggaggccgtgaggagagcggcggctgcgagggcggccgatggcggccgggaggcgccctcggacacttgcgggtcgttagggcgcgacgctgggaggcatgtcggagcacgtggagcccgcagctccggggcccgggcccaacggcggcggcggcggccggcccccgcgcgcgggcctcgcacccccaatctcaacccaaccccctcatcaacgtgcgcgaccggctattccacgcgctgttcttcaagatggctgtcacctattcgcggctcttcccgcccgccttccgccgtctcttcgagttcttcgtgctgctcaaggccctgtttgtgctcttcgtcctggcctacatccacatcgtcttctcccgtcgcccatcaactgcctggagcatgtgcgtgacaagtggccgcgtgagggcatcctgcgtgtggaagtgcgg

SEQ ID NO: 666 - DNA, 900 bp, Homo sapiens
gtctaaactggagactgtgtgtgccctctgggctctgagtacccctgctttgggcttgggcctaggctgcattgaaaagagctgaaggttgtggcctttgcgctcctggcccagcctttgttccccactggagcagaaggggagatggacgacacggtgggggcatctggcctggccagtgccctgatcccagagagcccgaggaggtgtctcaggctgcctgagtcgtgacctgctaggccagagcccactccatctggtagaagggaaagcccatatgctaccaccagctgtgtccaaaaccgccagctctgttcttcctcagccagcctcgcccatccccttgaggtctcagcccctttcccttgtagctcctcccctggagggggaatggcagcaggggttggggaaacagcatctccaagcagcttagagttggccatatttacctcagcctgggcgctggtcctttcttccggcccctcccctccaaaatgtgcctattgctagagctcctccctctcaacacccagtttccttgggagttgtcattaaaggaaaaaaaaaaaaaggccgtgcccaggttgggcttccccaggagctggggctaagtgccaggcagccttgccagccatgccttctccccctgggccgcggaacgaagccaaagcctccgctggtttgttggcgatgccgttttatgagatgtggtcctatccggcgggttaagccttttcccctcctgtatggtggggccgtgcctggtatttatttcccgcatcactttgcgggcgtgattcttccactcgacggtgcggtggggggcctcgggaaagaatgtacgtggtttccatgtgtcctcggggcggcccttgccgttgcgggttgcgtgccggcgta

SEQ ID NO: 667 - DNA, 1100 bp, Homo sapiens
  misc_feature (1100)..(1100): n is a, c, g, or t
ggcgttccctgcacaaaatgcccggcgaagccacagaaaccgtccctgctacagagcaggagttgccgcagccccaggctgagacagggtctggaacagaatctgacagtgatgaatcagtaccagagcttgaagaacaggattccacccaggcaaccacacaacaagcccagctggcggcagcagctgaaatcgatgaagaaccagtcagtaaagcaaaacagagtcggagtgaaaagaaggcacggaaggctatgtccaaactgggtcttcggcaggttacaggagttactagagtcactatccggaaatctaagaatatcctctttgtcatcacaaaaccagatgtctacaagagccctgcttcagatacttacatagtttttggggaagccaagatcgaagatttatcccagcaagcacaactagcagctgctgagaaattcaaagttcaaggtgaagctgtctcaaacattcaagaaaacacacagactccaactgtacaagaggagagtgaagaggaagaggtcgatgaaacaggtgttagaagttaaggacatagaaattggtcatgtcacaagcaaatgtgtcgagagcaaaggcagtccgagccctgaagaacaacagtaatgatatttgtaatgcgattatggaatttacaatgtaccatatgaagcaacttttcctggtgtctcaaggaagtactgcaaccttggttgaacattgtactgttctatcataaattacagttatggcttctgttcggatgaaacaacaacaacacacacaacacacaaacaccaccacaaaaacacccgttttttttgttggctgtaacaaactattaaatagaacaccagctgacaagactgtcttgaggcccactctttttgacgagagagcatatggcggcccaataagagagagtaaactaagggttagcaaacagtacagagagaagacgagacaccaagcgacatgatgcaccaaaaggagacaacacatcaacggacagaccatgaaactcatccaacacagactacacatatgaatcagcaactacacataaaagcagagaagagcaagactagatatcaagn

SEQ ID NO: 668 - DNA, 884 bp, Homo sapiens
cccacgcgtcgcggacgcgtgggtcgacccacgcgtccggaaagattctattttttcttttttgtacataatgggaatttcattccagattatattttatttacatattaatttcacagaatattaatatttcttaacttcttaaagcatgctagcgttttatgtatatgtacacatatattcagacagggtaattttatctgctgcctaacattgtactaaaatattgctttatctgtttttaattacaaaatgctaatgatttcttaaattatagtttaaagacaattggcccaggaagcaaatcccctgcctttagtatgaaccactataagtaaccttacaaatagagttaatccaagacaatattaacaaactgtgctttgtctttaataaaagggataggattaacaaacatattgatggcataacctattcagctatgtccttatttttgcaataatgtaacctcaaatatggattgttgaaccaacaatggctgtgttaaagaagattaaataaacgaaaaataaaaagcaaaaaaaaaaaaaaaaaaaataaaaaaaaaaaaaaaaaaaaaaaagaggggggaaaaaaaaaagaagaaaaaaaaaattaaagaggctgagccagcgtgagtcaacaaaaccaaagcgggccgcccgccacaaccaaccacggagcgacaccatacattaactcgaagaccaacacaccaggtgaaaaagagagaccgacaagacagccggcccgcaacacaagcttatcacaccacctacaggagcaggcgagatgacactaccacgagcgaaccagaagcaaaacaccagcccaatcgccaggcgggacagagtaaggaaagaccagcggaagcgcaaaacccc

SEQ ID NO: 669 - DNA, 908 bp, Homo sapiens
cttgctgctgttatcaatggccgaattcgtcgtatgtctcgtggggtgaatccctccttggtgagctggctgaccactatgatgggactgaggcttcaggtggtactggagcacatgcctgtaggccctgatgccattctcagatacgttcgcagggttggtgatcccccccagccacttcctgaggagccaatggaagttcagggagcagaaagagcttcccctgagcctcagcgggagaatgcttccccagcccctggaacaacagcagaagaggccatgtcccgaggtccacctcctgctcctgaggggggctcccgggatgaacaggatggagcttcagctgagacagaaccttgggcagctgcagtccccccagaatgggtccctattatccagcaggacattcagagccagcggaaggtgaaaccgcagccccctctgagtgatgcctacctcagtggtatgcctgccaagagacgcaagctccggtctgatatacaaaaacgactgcaggaagaccccaactacagtccccagcgcttccccaatgcccagcgggctttgctgatgatccttagctctttgctctatgggccttcctcatcaggggaccgtttcccccctcttccttcacagtatttaagaacataaagtcggatttttctggcaaaaaaaaaaaacaaccatgactatcatccaatgagcacgaaaccaaaaaggggggggggtaaaattcccggggggccaatttgcctcccccttttggcaaagggggcccaagggggggataaacaagagggggggggtaaacgcgtggggaaacggcgggatgtgagagaccctggggggactgggacccagaatgtgggaaaattgtgtgtgaacctttgggagcttgtacacga

SEQ ID NO: 670 - DNA, 968 bp, Homo sapiens
tgaccatccacctgacatcccctgttgtcagagaagaaatggagaaagtattagctggagaaacgctatcagtcaacgaccccccggacgttctggacaggcagaaatgccttgctgccttggcgtccctccgacacgccaagtggttccaggccagagccaacgggctgaagtcttgtgtcattgtgatccgggtcttgagggacctgtgcactcgcgtgcccacctggggtcccctccgaggctggcctctcgagctcctgtgtgagaaatccattggcacggccaacagaccgatgggtgctggcgaggccctgcggagagtgctggagtgcctggcgtcgggcatcgtgatgccagatggttctggcatttatgacccttgtgaaaaagaagccactgatgctattgggcatctagacagacagcaacgggaagatatcacacagagtgcgcagcacgcactgcggctcgctgccttcggccagctccataaagtcctaggcatggaccctctgccttccaagatgcccaagaaaccaaagaatgaaaacccagtggactacaccgttcagatcccaccaagcaccacctatgccattacgcccatgaaacgcccatggaggaggaccggggaggagaagtcgccagcaaaaagaagaagaagatcaggaaggaaagaggaggaacgccgagccccccccagggctatgaatgcctgatgcgggttaaaccagctgaaagccgggctgcagaaacaagcggtggcccgactgggccgtcaccgcccatcctacctgtcggggaggtggcggcatccttcaggccgggccccaagggggcaaacgagtggcgaagggaacgaatggcgtccgggccgagccggacggcggggagccggggcagcgagccagggccgccgggaggcaccggccaagcgagaaaagggcacgacattcaaagcgccg

SEQ ID NO: 671 - DNA, 1651 bp, Homo sapiens
caggattaggggactactgaggctctggcagatgagaccgccaggagctcttccccaccatgagccccctccactcctgcagctggaggagtttttcccagtctcagtgctgccctggggcgagagcagactgaacaagctgtttgggtgggacgagaatggaggacgttgacagggatgggcggtggcccgatggtgggaggcatgaacaggaacccagcttcactgctcagtacccaggcatccagcacacgcagaatcagataccacaacaaagaacagagtaacaaaaacaacaacaacaaaaaaacacaaacaagagcgcagagaggagacgcagagagaggcggaggaggccgagcgcgagaccccagcgagcgggggggcggaacaggggagcaggcgagggggagcagacggagcagaggggagagagggcgcgggcgggcagcgagaggcggcggggagagcgcccagcgcgacgcgagggaaccggaacgcacactcctcccccacccacgcaccacacacacaatagcccatcatccagcactcgcccctcgcccgcaccgtgaccaacggccgccgacaccctgaccaggcacacgcctccagccgcaagtagcaacacctcaccgcaccagatcccatgccgcctacgccggcataccgacaccggaaagaggcgctacacgctcactgcaatcactcactcaactaccacagtgctgaacgcagaaccccagcaggactcgccaccagcgcacgcgtacgtactctcacctcacacagcagagctcagtgactcaccgacggagacgcacacaggacagaccagctcctcccccaacccacacacctcacaaacgatcgcgagccaacacgaatgcaagaacacccccatcaactctcactcacgcacaccgtcatcatcacccacactcctaccgcaataacatcgactgcctaagcccgtaccccaacacacaacaacacaccacccacaaaacaacaacaccagcaatcaaccataaagacaacaaacgccactacacacgtctcgactccacccaggtcctctaccctgctaccgtctcctactaacgcctcagacttacacttccgaccgccgccgcctacacctaccaccacaccaacacacagcgcacagctactagtccccaacgtagacaaccccctaccacctacactaatctaccgtactacataaacacatacaccactcacacaaagccctacgcacatccccagaacacctccccacccaacaagacacccagcaggacagctaatacacccattaacactatcgcctagtactcactccatccacacgaccatccatcatagctcctaccacgcagaacgataacaggcaggcggcggacgccagtgaggaacgcgtcgagcgtcgcacgaggaagcagggaggaggaaagcgaggagcagggcgagaggaagcgggagagcgcacaccgccggggagccaggagcgggcggagcacggcgacagacagacgacaggcccacagtagaacgacagcacggacaagagagatacacgcagcgaagccgacccagagagggcgacccaacggaaggacagtcgagagcggagagaagaccgccc

SEQ ID NO: 672 - DNA, 954 bp, Homo sapiens
caattaattacatgtggaagattattttttatctggtaaaaacactttttggtttaatatatatttttaaaacatttcactaggtgatgaattctactttgccatctgaatgacttgaatgtcttaaaacaggtaaatactgtaaagtgtgtattcttgatgtttattggctcatgtggacagaaatgtacaagggagaaattacattattttaacacacaaaaaaaaaaaaaaaaaagggcaagccagacaaaaaaaaatctcccatcaaaggggccccaaagattaacagcagtaccccaagttacttggcacaaagggggcccctaacagtagacttcgaataataacccttaaggcacctggccgccggtcaacaacgccgtgacgggcaaaacccggctaccccgggaacctgcgtgaaaggcaccccttactcactgacgggcgcgaccatactctgggaaccaaaacctaacctaacaagaagaattttaaaggcctctaaggcacactataagacacccacacacagtgctcatacgcgctgtccaccaagccccgcactctgccagcactgctgaggcagatccggcctaaacggaccctactgactcatcgcaccaccaattatgcccacaggacaccgcacaaacccagccccacccatctaacacacaactaagccctccagtcagaaaccaatggtgttgaagcagaacaagctgaatgcgggtgcacctgcagacgcggatgaatcacgcaccgaaaacgtggccggaggacgacaaaccacccgaggcgtggagaccacacacccccaaccggagtcgaggagcaacgcacaccagactacaaccggggggacgggaaggacaaacagatgcacacccgacgagggagtggtggcgcgcaagaaaacaaacaagaggaagcagatacaggtcaagtaca

SEQ ID NO: 673 - DNA, 570 bp, Homo sapiens
  misc_feature (484)..(484): n is a, c, g, or t
tttgaaatattcaggtaaggactttattacgcttttaatatacttgccttatcaaaattataatgaagactgtatttctgttacccataaacgttcctccggtgcctgaaggttacaaacatttagcaaatgaaatatagggaattagctcacttttgctaagaccatcttccagattgggtactcagagcaacaatgcatgtcagggattattcacaggtaatgagcatggtaaagtaaaacaactgagaaattcttttccccctaattcttgttgacaatctatatattagactgtcttcaattaggccctaacatagatgcttcaaaaattacatttcagtcatcagttttgccatatagggccaaagtaggacatgcttctgaacacatactgatgctctgatataacagtgtttgaaaatcattttatgacaaatccatcagttgtaaatcaaaaaggtaaggaaactgctttctgcanaataatcaactgccccaaaatgaccacacaagaccttgtcattgcacttatactctcagactcctttagaagcatttgagttttat

SEQ ID NO: 674 - DNA, 555 bp, Homo sapiens
ttcttttaaaatggcttttattgaaacacttgtagggattctgcaacatttccagttgggaatctttatttccaactcttagggtggctaaacccttttctgaatgccaaaaggcacactctcaccaccttaatgaggaaacacacttatctgtgtctgttccgatatccaactgggacctggaccccaagccccgtggtgtcttgtacaagtctcattagtcctccacgtacaactcaaaagcctgttaatcagggagggtaatttccaaataaatgtgagctggcctaaatccagctggttatttctgatttggtaatctgtagtatcttaatttggggacatcctgtcctaagttttggctggtgcatgtagaacttataatctacctgtataacaacagatgcaacatagctccgttccagccccaaattccttaaaggttctagtctactcttgcacttcttcctgtactgttgttgagcagcttacattttagggagaggctggtcaaatctctactctctggtaacagcattaacaagagtctttctt

SEQ ID NO: 675 - DNA, 889 bp, Homo sapiens
gaagaagcagaaggagcaggagcaagtgagagccacgagccaaggtggggacttgatgtcggatctcttcaacaagctggtcatgaggcgcaagggcatctctgggaaaggacctggggctggtgaggggcccggaggagcctttgcccgcgtgtcagactccatccctcctctgccgccaccgcagcagccacaggcagaggaggacgaggacgactgggaatcgtagggggctccatgacaccttcccccccagacccagacttgggccattgctctgacatggacacagacaggacaagctgctcagacctgcttccctgggatgggggtgatggaaccagcactgtgcggagaccagcttcaaggcagcggaaggctggcctgaggccacacagctggggtggggacttctgtctgcctgtgctccatggggggacggctccagccagcctgcgccactgtgtacttctctaaagaggcttccagagaaaatggcacacaatcaataaagaactgagcaaacaacaaaacaacaacaaacaaagatagaaacgaaaaacacgaaaggggtggagcgaacaaacagatcacgcgcagggcaccacgacagaagtacacgggaacaaagaaaaaggggcctaacaacgcggccatatcagcacacgacaacgcgcgaaaaatacaacacggaccacggaacacgcgaaaaaggaacactgcgacgaccacaccaccgggcgagcaaccaaaggacgaaccaccgaaccgaacacaacgctaagagcaaacagcacctgacacgaggaaacggaacacacagccccaacgcacccggccacaagacagcccaacacgcaccccggacccttcacggaaggtacgaaca

SEQ ID NO: 676 - DNA, 1107 bp, Homo sapiens
  misc_feature (138)..(138): n is a, c, g, or t
ggaaggaaatgggtgatagaattactttatgtttaaattctttgtattactcactgacatgtagccaaatcttaaaacagctttgtttgctttcagcatgaagctgctataaatcacttcaccaggaggcatcttcangttgttctttagttagcagcaatacttgagtgcctttcttatttaagaattagtggcaaatcacactgaaaaacaagacctgtcagttgttttataaatgcttttgaacttgatccctagttgagctccttccccctcagagtctgatacaaattaccctttattgtcagagtatttgctcattagtcctgtgaactctacattcagactcattgcttcctccagatagaggagcttgtaccataatattctgtgtccatttatgttagtttaatgaaatcttgcgaatttaggaaaataaaagaactgctcattcttccatatctttgtagtaacttctgttgtgtgtccttttgtagtcccatatttccatatccatatgctttgtaattcttttttctttcatgtcgttttctccattcttcaccaaaacagcagcatacataggcacatggttttatgatctgtttttcccactcaatatttaaaaaaaaaaatttgccatgttaggtaggctgggtcggagttttacatctgtattctcagcacttgggaggcgaggagtggattacctgatgtcggagttggaatagccaaatggtgaaacccggtctctcaaattcacactactcgggggcgtggggcgacagctgttattccccacttggagcggcggcgagaaagcggaaccgcggcgcagtgtctgggagccccggttagtaaatgctacaaccggggtgaacaaaacttgttcctaacaaacaaaaaaaaaggggggggtcaaccacagcgggcgcacaacactctatacatgacccatgtatagaagcgagtgcagattcagagaatacctacagactctcggtcgtactatgtttcattagtttctcttcgctctccttcgtctttctgttccgtttgctcgatcatccctgctcacaccacacacaacacacgcaggaggggagg

SEQ ID NO: 677 - DNA, 488 bp, Homo sapiens
tttttttttttttaagggagggaggttggacaggaggaggctataaagcttcctgaaggtcaaagagcaggtcatgggcacagaatgaggccagagacaagtctcctaccaccagtgttaatcttgagttagtcacatttaaccagcctcaactgcaaattcttcgtctataaaggggtgtgtcactcaccttcctcagagtagtgttttgagaattgactaatatctaaagcatgaaattctttagataaaagacatcatgaacatactaaatatttttatggaaagagtcatgccctctgtgaagtgccaagtagatattatacacgattgttgccctcatgtacacattgaaatcgcctcactcatctttctagttcctcaaaattatacaaacaatataattacttaattcattaaacaactattgaatgagcatttactatgctatttacttctaattttaaacctacaagtgcaattgtgtt

SEQ ID NO: 678 - DNA, 547 bp, Homo sapiens
aagattgtattacttgattttattttacactaggtggtgggcacacaaagtaatccttaataaagttgacaattagcttcactcaatatttttaataatgcacattaaaaaaaagtattcatcttacaaattcttctgcaatccaaacatacaatagcttggagaacatttagaaaacaaaagccaatgtaaaaagacagattaaaacaactagaacagtacaggttttatttatatggctcaaattttacagttttcttactgcatcatcaatgtcagaaatctgttccttcagctggctccattgttctggatttaaagaaataccttttcttcctgggttcatttcaccttcaggatccatccaatattctctaatatcaattagcactttgcctttaaaatcgggaacactaacgtacctcattttcccaatctgaaacatgttatcatctttgctgcttgtgctctgtttacaaaaagacagggctcttgaagtctcacctgttttctgttttttacagctcttactgagcaacttcttttt

SEQ ID NO: 679 - DNA, 756 bp, Homo sapiens
cacatgacagcaggagcgatggccgggatcctggagcactcggtcatgtacccggtggactcggtgaagacacgaatgcagagtttgagtccagatcccaaagcccagtacacaagtatctacggagccctcaagaaaatcatgcagaccgaaggcttctggaggcccttgcgaggcgtcaacgtcatgatcatgggtgcagggccggcccatgccatgtattttgcctgctatgaaaacatgaaaaggactttaaatgacgttttccaccaccaaggaaacagccacctagccaacggtattttgaaagcgtttgtctggagttagaaagttctcttcttcaacacgtccctccccagggtgttcctccctgtgacccagccgcctcgacttcggcccgcttgctcacgaataaagaactcagagttgtgtgtgcaatgcacacccagacacacgcacgcacacacacgcgcgcgcacacacatgcttttttctgttcccctccgctttctgaagcctggggagaaatcagtgacagaggtgtttggttttattgttatgtgggttttcttttgtattttttgtaggttgtttttaaacattcaaaagcaattaatgatcagacataggagaaaccctgaatagaaacaaaacttttgaatgctggattcaaaaaaaaaaacaggttatctggaaggttctttgagactatttaaaaactggtacaacaggtttttaaaaggcaagaatctatta

SEQ ID NO: 680 - DNA, 1004 bp, Homo sapiens
tcaggacttgtgtgtgtgtgtgaatgcattcatcacaaagatattgaagacaataaataatctttataacaaactccttgggttggactattaaacaatagcagagccaagaaataggacttttaaaagtcctattattcggccgggcgtggtggctcaggtctgtaatcccagcactttaggaggctgaggaggggagatcacctgaggccaggagttcgagaccagcccagccaacatggtgaaaccctgtctctaccataaattaaaaattagccgggcttggtggtgggcacccgtaatcccacctatttgagaagctgaagcagaagaatcgcttgaacctgggagatggaggttacagtgagccgagattgcgccactgcactccagcctgggtgacagagcaagactctgtcttaagaaaaatttaaaaataggccgggcatggtggctcatgcctgtcatcctagcactttgggaggccaggcaggtggatcacttgaggtcaggagaccagcccggcaacatggtgaaaccccatctctactaaaaatacaaaaattagctggaaatcgcttgaacctgggaggtggaggttccagtgagccgagatcgtggcactgcagctccaaacctgagcaagcagagtgagaaaccagctcaaaaaaactgttttaagttactactaacaggtccctattattccaagtgggttattgtaccttactgggtcgcacggggacgcttcattccagggtcgacagtcccgggaatcggaattacaaagcatgtggtatttcccgtccatgggctgcgttcatacccgtcacgtcacacttgccccgctgtgacatcacgaattaccaggggcattttctccaagggactataaggtgcacacatcgtgaccatagatacaggcctcatgaccagggcgccaccttcgcgaagcggggtcccctgtacatcagaacaacagtgtacttagacccatcgtcttc

SEQ ID NO: 681 - DNA, 615 bp, Homo sapiens
ctaagttaacttggcatgtttgactttgacaataacaaaaatggtttggatttgttttatttccaaaaaatgtatacaatatcagaacttcacattttatatactagtatctggctattagtattttacaggaaccatagttcttggtgactacatatatatatatatttttgtgaccttttttgtaaactaagtgccgtttcaacgttacaatcatttttagggttattgtaatcaatgtgaatatcatgttttttcaaatctgttctgagcctatagtgtttgctttgtgaacatgtgtattgtatatattctgtatagttatattgtactgaaattagcttgtttgatataaggaaaatatgtattgagtaccttttgctagcctgattgtttaatctttttaaaaaaggtttaaactttttttaaaaaaaaaatctttaaactggcctttattacatggtcacacataaagttgcagttaggacagggatgggcagggaaaaactagtttgagtgtctttagatagaaacatgagactaaggttgatttgttacgttctcattaaaaatatcttatgcttaatggcaaacacaacggacaaaaaacaaaag

SEQ ID NO: 682 - DNA, 873 bp, Homo sapiens
ccagcactagtcagctaactaaggtgactcaaccaaggccttttttccttgttatctttgcagatacttcattttcttagcgtttctggagattacaacatcctgcggttccgtttctgggaactttactgatttatctcccccctcacacaaataagcattgattcctgcatttctgaagatctcaagatctggactactgttgaaaaaatttccagtggggctcacttatgtctgtaaagatgggaaaaaaatacaagaacattgttctactaaaaggattagaggtcatcaatgattatcattttagaatggttaagtccttactgagcaacgatttaaaacttaatttaaaaatgagagaagagtatgacaaaattcagattgctgacttgatggaagaaaagttccgaggtgatgctggtttgggcaaactaataaaaattttcgaagatataccaacgcttgaagacctggctgaaactcttacacacagaccagttcacagtaaaaggaccagccctatcaagacaagaggaagaaggaacagtggatgctacttcacctgcacctccacaagcagcactgtcaaacctgaaggagcaggaggcaactcctggagctcagaaacagaaacaatcaaccagaagaaaggctgacccaaaggaagacaggcgcccgaggaacacagactcagcttaccttatatgatgagacggtattttcacagcagggacgtttcccattttcaagacctattggaaagatcacccaaaagtcgtaaactggacccagaacttgcaaattcgagtcccaaagaattgttttaagcaccaatgagtagcagtaacaacatatattccctagagaaaa

SEQ ID NO: 683 - DNA, 876 bp, Homo sapiens
gtacaagttaaaaatgtttaatgggaaaaaattaaaactgaatttaataaaaattgtatttctgaaaaagaagctacattttattttgtaaagaataaaaatggtcacttctggggaagtttacctcattaggaactcaaagttgctaagatgctgcttccgttgtctgtagaccttctggtccatataaccatttatgtgtagtcagtcttaaatggaaggcttagggacactttataagacaagatcctctaggtgctagtcacttcttaaaaaaaaaaaaaaatgtaagggctgggcgccgtggctcgcgcctgtgatcccagcactttgggaggccgaggcgggtgaatcactaggtcaggagtttgagaaccagcctggccaacgtgatgaagctctgtctctgttaaaaatacaaaaattagctgggtgtgttgggtgtacacctgtaatcctagctgctcaggaggctggggcaggagaatggcttgaatccgggaggcacgggttgcagtgagccgagatcgcgccactgcactctagcctgggcaacagagtgagactccatcttaaaaaaaaaattcttttaacatgttggttggctctagcctaagaatggtgggccacacctgtaaatcccagcactttgggaaggctgaggaagggcggatcacctgaggtcagggggtttcgaaacccaaccctggccaacatggggaaacctcgtcctttgctaaaaataccaaaaattagcgggcatgggggagggagccgtaaatcctaacaacccgcgacctgacaaggcaacctggctgaccgcgatgggaatgcgtgaggcaaaaatcacatgaacccagcgggaaaaagaaccac

SEQ ID NO: 684 - DNA, 870 bp, Homo sapiens
agtggagggagcagggagcattgcagcagccactggctttgtcaaaaaggaccagttgggcaagaatgaagaaggagccccacaggaaggaattctggaagatatgcctgtggatcctgacaatgaggcttatgaaatgccttctgaggaagggtatcaagactacgaacctgaagcctaagaaatatctttgctcccagtttcttgagatctgctgacagatgttccatcctgtacaagtgctcagttccaatgtgcccagtcatgacatttctcaaagtttttacagtgtatctcgaagtcttccatcagcagtgattgaagtatctgtacctgcccccactcagcatttcggtgcttccctttcactgaagtgaatacatggtagcagggtctttgtgtgctgtggattttgtggcttcaatctacgatgttaaaacaaattaaaaacacctaagtgactaccacttatttctaaatcctcactatttttttgttgctgttgttcagaagttgttagtgatttgctatcatatattataagatttttaggtgtcttttaatgatactgtctaagaataatgacgtattgtgaaatttgttaatatatataatacttaaaaatatggtgagcattgaaactatgcacctataaaatactagatatgaaaaacgagacaaacaagaaaaatgaataaaaacaaggggggggggggaaaaaataacccgcggggggggccaattaagcggttacccgttttgtgtaaaaggggcccaaagagggggtataagaaagagaacgggggggtataaagggtggaggcgaaggtgtgggatttgggagaaccctccgggggggaatgggaaccc

SEQ ID NO: 685 - DNA, 973 bp, Homo sapiens
gatcaaggttcaaaagcctctgaaaacaacgaaaacaaaaagagaaacagatgaagtttccaacactaaatcatcttcccaaatacctgcccaaccatcagtagcaaaagttccctatgggaaaggaccttcatttaatcaggaacgtggaacatcttcacatctgccaccacctccaaagttgcttgcacagcagcatccacctccagatcgacaggcagtacctggaagaccaggcccctttccctccaagcagcaagtagctgatgaagatgaaatatggaagcaaagacgaagacaacaatcagaaatttctgcagcagtagaacgtgctcgtaaacggcgtgaagaggaagagcgaagaatggaagaacaaaggaaggcagcttgtgcggagaaactgaaacgattggatgagaagcttggcatcctggaaaaacaaccatctccagaggaaattagggaaagggagcgagaaaaagaacgggagcgtgagaaagaacttgaaaaagaacaagaacaggagcgagagaaggagagggaacacacgacagagagagacagcaggaaacaggagaaagagctggagaaggagcaggaaaaacaaagagcacatggcgaaagaaagaaagcaagaaaaccgaaaaagaactagaacggcagaaagaaagggaacagaactacaaagatgaagaaccgacaggatgtgactgggaaggacgggaaaattcgagggaaatggaccgaaaactatttgagccctggttaaaaatctatacaaaaaaaagggggcgccaaaaaatcccgagggccaattacgaccggtttggacaagggccaacgagggataaaaaagagaggcgcggtaaagcgagtgggacagtatgggcatgtcaaacacctcgggcggaagtgaccaccaatagcacgggaaacaagatagaaacacatggaagcgtaaaacacaaaaaga

SEQ ID NO: 686 - DNA, 946 bp, Homo sapiens
cctggaaccaatggggttgggagggcagcttcaatgttttaaaatgtttcaggccaacagaatatgcttataaatgcttttataacctcatagcttctgtttctttatagtttggcttatttgtaatgtttcctttttctcatgtggtacaaaacatggttatgtaccattacctcttcaactcagccagtggcttggcagtttcccttgtgcagtgtttaaaactgggccacagttttgaatgcagttgtggatattaaaatgaaatagattaggaaagaatagattaagatagaatacagataagaaaataagaaaatatcagccttcatctggcaaagaaaataccagccttcatctggcaaagggcatcatcaggcatcaccaggaggtgctctgtatccataggttccctatctgtgggttccaccaccactgataaaaaatattggaaaaaaatacaacaatgcaaaataatacaaatttaaaaaaatacaatatatttatgtggtgtttacatgtattcgttattataagtaatctagagatgatttaaagggacgggaagatatatgtaggttatatgtaaaatataccattttatataaggaacgtgtatatccatggatttagaatctgtagggattcctgggaaaccagtcttccattggataccgagggatgactgtatgtctgtgaaatttgtccagtactattgttgttggttgtttgggcggttatggttaattcttaacatgggtcaccactttctacgattgtggggaccgcttccctgacatatactccgtaaagtctgtgccccttgtcggcaacggtcggtcactaaacattgtgaatatttccgcaaaaaagggaacccggcaagaggccaaaggggctgtccaaaaaaggataacaacaaggagagattaaaccagagggtaca

SEQ ID NO: 687 - DNA, 648 bp, Homo sapiens
gggtgggagggaggtgggactaggggcactttgggggtctccttttagtcaaaagcgagaaaatgacaagaaagagattaaaattcaatgtttcctttatagtgttaaacactaaaattttaaaaaagatgaaaaagaaaaaaaaactttgtaaaatgcgagaacagaagcaaaagacactacgctctgtcattttatctttcttttgttgaaagactaaaaaaaaactgaaatgttttttagacaatcaaatgttaggtaagtgcaaaaacttgttttttcttactggtgtagaaattaatgcctttttttatttttcagttattttataataacgaaataaaaagaaccccccagctgccaggcgggttttggtgtttgaaatgcggggcaaagcactacatcactgcaaatagatacagagttagtctgcatgtctgtaggctgtgtgattgcggaaaatataaatgctgctaatatatttcctttttacaaaagcatatctaaatagatgattgttttgatgttaatctttgtaaattatgtattaccaattttaacattggatgtaattgcatacaaagcttgcatctcaatccttgaaagtctagtattaaatggaaaaaacttttcctaaaaaaaaaaaaa

SEQ ID NO: 688 - DNA, 836 bp, Homo sapiens
gctgggctgcaacggttccaggacacaagtcagtacgtgtgtgcagagctgcaggccctggaacaggagcagaggcagatagatgggcgggcggctgaggtggagatgcagctgaggagcctcatggagtcaggtgccaacaagctgcaggaggaggtgctgatccaggagtggttcaccctggtcaacaagaagaacgctctcatccggaggcaggaccagctgcagctgctcatggaggagcaggacttggagcgaaggttcgagctgctgagccgcgagctgcgggccatgctggccatcgaagactggcagaaaacgtccgctcagcagcaccgagagcagctcctactggaggagctggtgtcgctggtgaaccagcgcgatgagctagtccgggacctggaccacaagtagcggatcgccctggaggaggacgagcgcctggagcgcggctggaacagcggcgccgcaagctgagccggcagttgagccggcgggagcgctgcgtgctgagctgagggccgcggccgggtggcccataacttctcgcgtcccggcgtcgcgcgccgggctgcgctgcggacgaccggcgtccggagccgcgcgcgtgtccgctagggggccgcggcgcccttcccgtatgggcagggggatcccgacccaggggggcggcgcgattattggcccggggggttgcgcgctcggggggtggggtccccgaaggaggcgggccggcgctcgggggggggcggggttacgccggtggtgcccggctcaggaaatgcggccaacacacaccggtttgggggccgagaattgggcggcagtctagg

SEQ ID NO: 689 - DNA, 925 bp, Homo sapiens
ggtcaccaccatccctaccattgggttcaatgtggagacagtggagtataagaacatcagctttacagtgtgggatgtgggtggccaggacaagattcgacccctctggagacactacttccagaacacccaagggttgatattgtggtcgacagcaatgatcgggagcgagtaaatgaggcccggttaagagctgatgagaatgctggcggaggacgagctccgggatgctgtactccttgtctttgcaaacaaacaggatctgcctaatgctatgaacgctgctgagatcacagacaagctgggcctgcattcccttcgtcaccgtaactggtacattcaggccacctgtgccaccagcggggacgggctgtacgaaggcctggactggctggccaatcagctcaaaaacaagaagtgaaagccagacagcgcctaacaaaagcaccccaccgaccctgacatacctaccgtgtcaccctgcccagtcctacccgttcctctccatgcaagtgtggccagggcctgggtatcatgtgcacatgcccagcaagagctagctcccctgctcccctcttttcctgtcactatatgacaatcctaattgtgtctgatgatgagtcattccaattactggattaaagaaaaagtgctacggagtcaagggggggggcctcatcgcgttgaacctcgggcatcgggaagacaggggggaacatatagatggaaaggggggggcccttggaatgaaagcggacgaaacccaaggactgagccatggggtcctgtgcccacccggtaaggaaaggaggcgtggggggcaacgacgccgggaaacgatacagaaaggcggcgggcagagagaagaaaaaaagagaaaagggaagaacgggacaaagaggaacgcgctgacaagagaagagca

SEQ ID NO: 690 - DNA, 1024 bp, Homo sapiens
  misc_feature (1024)..(1024): n is a, c, g, or t
agagaagctgaggcggccgaccttcggcccgaggcaccggggcgccgggacggcgaagatgtcggcttccttagtccgggcaactgtccgggctgtgagcaagaggaagctgcagcccacccgggcagccctcaccctgacaccttcagcagtaaacaagataaaacaacttcttaaagataagcctgagcatgtaggtgtaaaagttggtgtccgaaccaggggctgtaatggcctttcttatactctagaatatacaaagacaaaaggagattctgatgaagaagttattcaagatggagtcagagtattcatcgaaaagaaagcacagctaacacttttaggaacagaaatggactatgttgaagacaaattatccagtgagtttgtgttcaataacccaaacatcaaagggacttgtggctgtggagaaagctttaatatttgaaatctcaggactcttctggccgtaggttccaggaaagctcgtggaagctttggggctcactgcagaaatcatgtgactgtcacgtgctggaaacataaagtgatacatcttgaaaatgaatccagtgtgttggattccagaagaaatgatatttatattctctataggggacagaaaatgagacgacatcactcttttggatcatttaggtctcttgtatcctttggtttagaaccaagttcattaagttgccttcctgggcacctgttatccattcctgaacgtggtgacacttagatggaatggatggtgatatcctagaatttacaacagaatgggatctaatatgaaaggaatgggaggggagaaaaggaggagggattcacaccaatagataggtaaaaattagagaagtaaggaaggaaaagaaagataaagaaagaaaaataaaaaaaagaataagaggaaaaggagagtgaggatagatatgaggagagaagaagggcagagagagatgtagagaaacacgtaagagagaacaaaagagacgaagaatatagttgtaattgatatgan

SEQ ID NO: 691 - DNA, 934 bp, Homo sapiens
gaagaagaaggaggttcctgctgtgccagaaacccttaaggaaaaagcgaaggaatttcgcagagctgaagatcaagcgcctgagaaagaagttgcccaaaagatgcttcgaaaggcaaggaggaagcttatctatgaaaaagcaaagcactatcacaaggaatataggcagatgtacagaactgaaattcgaatggcgaggatggcaagaaaagctggcaacttctatgtacctgcagaacccaaattggcgttgtcatcagaatcagaggtatcaatggagtgagcccaaaggttcgaaaggtgttgcagcttcttcgccttcgtcaaatcttcaatggaacctttgtgaagctcaacaaggcttcgattaacatgctgaggattgtagagccatatattgcatgggggtaccccaatctgaagtcagtaaatgaactaatctacaagcgtggttatggcaaaatcaataagaagcgaattgctttgacagataacgctttgattgctcgatctcttggtaaatacggcatcatctgcatggaggatttgattcatgagatctatactgttggaaaacgcttcaaagaggcaaataacttcctgtggcccttcaaattgtcttctccacgaggtggatgaagaaaaagaccacccatttgtagaagtggagatgctggcacggggaggaccagatcaacaggttattagaagaatgactaaggtgtctaccatgatcattttcttagctggtggttaataaacagtactgctctcaaattgaatatatgtggcttgcgattgcgctggtggtagtaggcggcctgtgttcccttaatatatggggcggggggggtgtaaaatagcaaaaagcccttcgggaaagggggcctgtgaaaacacctggctaaaggtttaaaaaagatgggcaagg

SEQ ID NO: 692 - DNA, 774 bp, Homo sapiens
gaacagtatcttgttcaattattatgcaatcaatcagtaaatgtttttaaaatgatactacaggagagcttagtaaggagagggcatggatgggccagtttggcatagttgggagaaatcagtctggtttccatcccagtcggggaagagagaggtgagagggaatcagaacgtacctagttgattccttggtgacaagtgcaatggggtatgggtagaatttattttcagagccaagaggacttgatggttataaataaagttgcctttagcaatggaatttacagatcgatcatgttgttccgaaagatgtgaataggatccacaataacaagttgattcagactaatgtagatatttagattagcaagtattgaacatttgatttcttagactgaggttttaaatgaatttcattatttctcccggtaatacacagagcatcgggattaggaaattagccatttggattctgtctgccacaaacagacctattctaaacagtgctattaaattttagactgttgttcaaatattttattttctcctaaactactttttatggtgatgaataattaagaccatttaaaacacgggagtacaagtatttttttgaattaaattaactggcaaaaccaaatttgcagtggttgggtgtttcttagacagacttttggtatcaattttaaaacccaagattaatttttatatttctttccgaatagaattcattgacaaactcctgcagttttcttaacctacaaaaaaaaaaaa

SEQ ID NO: 693 - DNA, 1028 bp, Homo sapiens
ggacaatgcacaggacagtgaagattgagccaaatatgtttgcagatggacagatggatgacttggtgtgctttgaggaattgacagattaccagttggtctcccctggccaagaatccctccagtctcttctcaaaggaagcacccaagagaaaggcacaagctgtttcagaagaagaggaggaggaggagggaacagtctagctcaccaaagacacagatcaagttgaagaacagtaacaatgtagcaactgaaggaaccagtacccagaaagactttgaagtgaacgatcctgagctggaggcccagggcagatgacatggctttgctgatgatccgcaggctggggcagatgacatcacgacacccctggtccaacactgctccaaacacacgaagacaaataacagggaacacaagggtatggagccttctcagagcacctgctgcacaaggatgcccaacacaagcgaagacactggaatacactgaagatccatgatcagaaaagcagatgtgtacagacttggcaaggaccatgtccgtccccccaggcccgagattctccgacgcactcacgacattacatcaagacttctctagcacccaacaaccaaatcccaagaaccttgaccctagagaaacctgcccatcccgtagaacaaacctgtcacactactctgaagcctgactgacgaacagcgaagtgcccaaaacatcttagcccacgaccagacccaaacgcatccacacacgagagaaagacaagaggacagaaaacacgcacactgcatgacaccaccatacaaagcttaaccacacagaaaacacatccccaccctgcaacaacgatctgaaactttcgcgcccatggtgactgataacctattgtacctccacaagcgaccagaggtgtaaagcatgaacactgaaaggtcactacgcgcgatccgagacctgagtaaacactactaatctgaacaaccaattccacacagagcatctaaacagaccaacaacacccaga

SEQ ID NO: 694 - DNA, 815 bp, Homo sapiens
  misc_feature (117)..(117): n is a, c, g, or t
gtagaagactattacagtgacctgcagaaaaaaatatgactctgggcaactagtgagatttacaactttactattaaataagcttttttattacaactcttttgaaaccaaacatantgagatcatttcctttcgtagggcttaaatatgtatttcccaccttattttcctgttccatctactcatattgttgttaactaaatgttaaccatttaaataagtttcccttctttctctcttaatcagaagagaggggaaccatgctcagatcaaataggaatgtctgtttacacttttgtaatcagtcactttattatgttaattctagttctacctatgttgtaattttaatagaattcttcaagactctccaggtagggtatcattaatactgctaatttaatcctcttaaaatatttgccaggaaaggtatttctacagtttttatcatgtgttccaaccctaagtatctaaatttttattatgaccaaattttattatgaccaataatgatctttccatatttgtgttaatgataaaatattcctgtttgtagcttatacatatatacatattttttctaacctataatgcttttagaagttatcctaaaatccaattggatattcatatgataaacagaattcagaaattaagaatctttaaaggggctgggtgtgggtgggtcacgcctgtaatcctagcaattgggaaggtgaggtaaggtggatcacttgacggcaggagttcggcgcagctggggacatggtggaaacccatcttcatggagggtacaaaaattagcggtgtggtgg

SEQ ID NO: 695 - DNA, 585 bp, Homo sapiens
agaggatttttaatcagtgttgaggtgtaacttgcataccgtaagaagcactgcttttaactgtataatgagttttgactctttaaagtatacacaggtcacttatcacctcaatcaagatacagaacatttcaacaagagttctcatgtgcccttacatgtaatcattccagaggaaaatagtcaagaattctcaccaaaatatggacaagtagtatccagcaatacatgaaaaggatgatatattctagccaaatagagtttgttcccaaaaaaccgaggatagagtgaacatagagtaagcaacctgtggagatatttaacttttttttttcttgatgcggagtcttgctctgttgcccaggctggagtgcagtggcacggtctccgctcactgcaagctctgcctcccacgttcacaccattctcctgcctcagactcctgagtagctgggactacaggcgctcgccaccacacccgactaatttttttttttttttttttggggacaggagtccccctttggcccaggttgaagccgcaggggcccagatcccggctccacggaaagttctgcccccggg

SEQ ID NO: 696 - DNA, 899 bp, Homo sapiens
cgctgacgggtgtggaccgcggacgtcgctgggacagcccctccccgctgctcggcggcggcacctggcccggccgctcctcgctgcgcttcgcctccgcctcctcggactcggactcgggtttatatcgcgcctcacttcatcccagtcccgggcgagcagcgttgggtttatgtctttatttgacgaaaacgagctgttgcgcagccatggtacctgtattggggaaacatagcatacaagcaagaagcttacagcctcagtggcgaaaattttttcatgtcagagaccgagaactcttgcagtcgtttatgtcatcccttcttctccagacagaagataccaaaaagttgcaatcaaagatctcttcatcttattgataaagccactaataagccaaaatgtctgtcaatgtcaaccgcagcgtgtcagaccagttctatcgctacaagatgccccgtctgattgccaaggttgagggcaaaggcaatggaatcaagacagttatagtcaacatggttgacgttgcaaaggcgcttaatcggcctccaacgtatcccaccaaatattttggttgtgagctgggagcacagacccagtttgatgttaagaatgaccgttacattgtcaatggatctcatgaggcgaataagctgcaagacatgttggatggattcattaaaaaattgttctctgtcctgaatgtgagaatcctgaaacagatttggcattgtcaatccaaagaaagcaacaataggtaattcttgtaaagcctgtgggctatcgaggcatgcttgacacacatcataaaatctggaccatttcattctcaaaaaaacccaccttgagtaatagtggacaggtggtacccgggacacggaaaacacataaaaaaaaaa

SEQ ID NO: 697 - DNA, 693 bp, Homo sapiens
tgcaagaacagcaaggaaaaggaagccctctccagaaccagaaggtgaagtcgggccccctaagatcaacggagaggcccagccgtggctgtccacatccacagaggggctcaagatccccatgactcctacatcctcttttgtgtctccgccaccacccactgcctcacctcattccaaccggaccacaccgcctgaagcggcccagaatggccagtcccccatggcagccctgatcttagtagcagacaatgcagggggcagtcatgcctcaaaagatgccaaccaggttcactccactaccaggaggaatagcaacagtccgccctctccgtcctctatgaaccaaagaaggctgggccccagagaggtggggggccagggagcaggcaacacaggaggactggagccagtgcaccctgccagcctcccggactcctctctggcaaccagtgccccgctgtgctgcaccctctgccacgagcggctggaggacacccattttgtgcagtgcccgtccgtcccttcgcacaagttctgcttcccttgctccagacaaagcatcaaacagcagggagctagtggagaggtctattgtcccagtggggaaaaatgccctcttgtgggctccaatgtccctgggccttttatgcaaggggaaattgcaacatccttgctggagatgtgaaagtg

SEQ ID NO: 698 - DNA, 677 bp, Homo sapiens
gaatttctcttagaaaagagaagtaatggtaatgtaaataaaaatactgtttatattcacatgattttaagaaaactgtaaaagcaaagattttgtagtaatgacacaaatgtaacaaatagatgttttcttaaaattggcagtcagtataattatgtttctgcctatgatgttgaggaagttgtatcagtctgattcttagttttttcatctgttaagtagaacgtactattacttaccttaaagagtggctttgagaattttgtaaggaacaaacatgtttttggttctggaatataggaggtgctcaataaaagttgactctgactggcaaataatattgttttgtaaatgcatgatgattatttttggccatatttgacttagtttcattaggctaatattaattggtactatatgaaagtgagtcaactaattataaaagattagaaatgtcttaggtgacgatgggggaaaaacttaaaatttttgcattaaattatggggagatgatagagttattacagtgttattaagtattcctatgttgcattttgcaaatacctaaatttaatacagatgaaaataatcttgagtcacaataaagtatgatatgttaagttccaaaaaaaaaaaaaaaaaaaatttggggctcgccctaaaatttttaaaaactc

SEQ ID NO: 699 - DNA, 842 bp, Homo sapiens
gaggcattgaggcagccagcgcaggggcttctgctgagggggcaggcggagcttgaggaaaccgcgagataagtttttattctctttgaagagatagagattaatacaacgtacttaaaaaatatagtcaataggttactaagatatgcttagcgttaagtttttaacgtaattttaatagcttaagattttaaggagaaaatatgaagacttagaagagtagcatgaggaaggaaacgataaaaggtttctaaaacatgacggaggttgagatgaagcttcttcatggagtaaaaaatgtatctaaaagaaaattgagagaaaggactacagagccccgaattaataccaatagaagggcaatgcttttagattaaaatgaaggtgacttaaacagcttaaagtttagtttaaaagttgtaggtgattaaaataatttgaaggcgatcttttaaaaagagattaaaccgaaggtgattaaaagaccttgaaatccatgacgcagggagaattgcgtcatttaaagcctagttaacgcatttactaaacgcagacgaaaatggaaagattacttggggagtggtaggatgaaacaactttggagaagcatagaacgtttgaagctggaaaactggaagacagaagtacgggaaggcgaagaacagaactgacgagctagcggcacattcacgacacgatccgaaccttacttttagacagcacaccagatcactctcacccctgaacaggtggacccccaagacacacgacacgcttagaaaccgaaacgctagggccacatggtccactcttcacgacacttcgccgcatgcccccgcatg

SEQ ID NO: 700 - DNA, 805 bp, Homo sapiens
gcacaccatgactttgccttatttcaggccaatgaacaacaaacacagtgtacttcactacgctcacaacaaaacagaaataatctcaacccagggcagaattctcttagccagtctaaaaattttatgaatgtttctggtccacatagagtcaatgttaaccacccaccacagatgactaatgcatctaattcacaacagtctatttcaatgcagcaattttctcaaacgtcaaatccttcagcacacttccacaagtgtagcagtcatcaagaaggaaattttaatggaccttccccaaatatgacttcttgttctgtcagtaattcacagcaattttcttcacattattccttttccagtaatcatatatcaccaaacagtctacttcagtcctctgcagttcttgcatctaatcatacaaatcagactttatctgattttactggcaagtaattccttttcacctcatagaggaatcaagcaagaatctactcagcatatccgtaagacccaatacatcattgaattcaaataatttccaaatattgcattcatcacatcctcagggtaattatagcaattcaaaaattatctctgtgcacatgaacttcccagatcctgttgactcaggaactcaaaatgggccatttcacatgatcatgtaagaaactaatgggcttttcatcttagcacgagaatttacttcatcaagtggaatctcaagtgagacattcacaggattgacccggaggactcttcaggaggggtctctcctactttgctgagtcaacatcggacagat

SEQ ID NO: 701 - DNA, 710 bp, Homo sapiens
agctggggattgtgggttcgggtcccatctgggtcgcctgtaggtggtaagaatattttcatttaatattttatctgtattttctcttttttgggaaagttaccgcagatgattatctgtattttctaattttctacaatgtacaaataatgcttttgaagtaaggcttatgtttttgaaaagttatggatttaagtcattacttaccagcaaaactttatatgccaagtagctaaaaatcatagttcaactgactttgtggatatttcttagaactatggtcttcaaattgtgagttgctgtagaatggaacttttctgaactattatctcccatccaaatgccatcttttgcactatgagataagaatcactgtcacaaggctgggtgtggtagctcacacctataatcccagcactttgggaggccaaagcaggtggatcaccagaggtcaggaattcaagaccaccctggccaaaatggcaaaacctcatctctattaaaaataaaaaaattagccaggtgtggtggtatgcgcctgtagtcccagctacttgggaggctgaggcacgagaatcacttgaaccttatgaagtggaggttgctgtgagccaagatcacgccgcagcactacagcctgagcaaagagtgagactctgtctcaaaaaaaaaaaaaaactttggggcgccttggcccgaaaatttttaac

SEQ ID NO: 702 - DNA, 465 bp, Homo sapiens
  misc_feature (118)..(118): n is a, c, g, or t
ttttttttttttttttttcaacatgtctttatttgcttaaattaacaaaatataggttacatgcccttttcaggtaaactgctttttcagtgaagcagaaagcaatattcacaacttngggctgctatatacttagagttttagtttttaaatagcaagccagagttctgtacaaaatcaacatttggtgtaatgttgtccaaatatgcgaaggatttcaaacgttagctctgttatattttgttccagcaaagcagacaaagatcataattcaaaacaccatgttaatattttattaaatgcgttcagggcttaataaatacagtatgcacattgagctttctcatgcaactactcatatacaaatataccagttactcttgtgggtttatgaaaggtcagccttagtctcatggccggtggggagtcaaatttttaaaaagagagacagaaagaggaattgaa

SEQ ID NO: 703 - DNA, 603 bp, Homo sapiens
ttttttttttttttatttacaaagtttttattatgaatttttattgagattttcataaacatttttaatctgcatgtttactacttttggcctctaagaagtcccataaagttataaaaaatagaaatttataaatacacattgagaattttgcatttttatacagggtcaatgtttcaagttgtctaaccctttccctgtctcccctcagaacaaaattataagagtatagcctctgaggccaggcgcggtggctcatgcctgtaatcccacccacactgggaggccgaggtgggtggatcatctgaggtcaggtgttcgagaccaccctggccaacctggtgaaaccccgtctctaccaaaaatacaaaaaaaattagccgagaattgtggtaggtgcctgtaatcccagccactcaggaggccgaggcaggagaatcccccgaacccaggaggtggaggttgcagtgagccgagatcacgccactgcactccagcctgggcgataagagcgagatgccgtctcacaaaaaaaaaagaaaagaaaagaaaaaaaaagagtatagcctctgaaatctcaacagcagaaatagcagccctttt

SEQ ID NO: 704 - DNA, 655 bp, Homo sapiens
gacccaggctaagcttgagcatggctgagcaggagcccacagccgagcagctggcccagattgcagcggagaacgaggaggatgagcactcggtcaactacaagcccccggcccagaagagcatccaggagatccaggagctggacaaggacgacgagagcctgcgaaagtacaaggaggccctgctgggccgcgtggccgtttccgcagaccccaacgtccccaacgtcgtggtgactggcctgaccctggtgtgcagctcggccccgggccccctggagctggacctgacgggcgacctggagagcttcaagaagcagtcgtttgtgctgaaggagggtgtggagtaccggataaaaatctctttccgggttaaccgagagatagtgtccggcatgaagtacatccagcatacgtacaggaaaggcgtcaagattgacaagactgactacatggtaggcagctatgggccccgggccgaggagtacgagttcctgacccccgtggaggaggcacccaagggtatgctggcccggggcagctacagcatcaagtcccgcttcacagacgacgacaagaccgaccacctgtcctgggagtggaatctcaccatcaagaaggactggaaggactgagcccagccagaggcgggcag

SEQ ID NO: 705 - DNA, 1219 bp, Homo sapiens
ggctactctcggcttcctggcaacgccgagcgaaagctatgactgcggccgcgggttcggcgggccgcgccgcggtgcccttgctgctgtgtgcgctgctggcgcccggcggcgcgtacgtgctcgacgactccgacgggctgggccgggagttcgacggcatcggcgcggtcagcggcggcggggcaacctcccgacttctagtaaattacccagagccctatcgttctcagatattggattatctctttaagccgaattttggtgcctctttgcatattttaaaagtggaaataggtggtgatgggcagacaacagacggcactgagccctcccacatgcattatgcactagatgagaattatttccgaggatacgagtggtggttgatgaaagaagctaagaagaggaatcccaatattacactcattgggttgccatggtcattccctggatggctgggaaaaggtttcgactggccttatgtcaatcttcagctgactgcctattatgtcgtgacctggattgtgggcgccaagcgttaccatgatttggacattgattatattggaatttggaatgagaggtcatataatgccaattatattaagatattaagaaaaatgctgaattatcaaggtctccagcgagtgaaaatcatagcaagtgataatctctgggagtccatctctgcatccatgctccttgatgccgaactcttcaaggtggttgatgttataggggctcattatcctggaacccattcagcaaaagatgcaaagttgactgggaagaagctttggtcttctgaagactttagcactttaaatagtgacatgggtgcaggctgctggggtcgcattttaaatcagaattatatcaatggctatatgacttccacaatcgcatggaatttagtggctagttactatgaacagttgccttatgggagatgcgggttgatgacggcccaagagccatggagtgggcactacgtggtagaatctcctgtctgggtatcagctcataccactcagtttactcaacctggctggtattacctgaagacagttggccatttagagaaaggaggaagctacgtagctctgactgatggcttagggaacctcaccatcatcattgaaaccatggtaaacttttgttgttgctattggattaactcacttctttactattggaaaaataaaatataaaactg

SEQ ID NO: 706 - DNA, 2087 bp, Homo sapiens
caccacgcttcctatgtgacccgcctgggcaacgccgaacccagtcgcgcagcgctgcagtgaattttccccccaaactgcaataagccgccttccaaggccaagatgttcataaatataaagagcatcttatggatgtgttcaaccttaatagtaacccatgcgctacataaagtcaaagtgggaaaaagcccaccggtgaggggctccctctctggaaaagtcagcctaccttgtcatttttcaacgatgcctactttgccacccagttacaacaccagtgaatttctccgcatcaaatggtctaagattgaagtggacaaaaatggaaaagatttgaaagagactactgtccttgtggcccaaaatggaaatatcaagattggtcaggactacaaagggagagtgtctgtgcccacacatcccgaggctgtgggcgatgcctccctcactgtggtcaagctgctggcaagtgatgcgggtctttaccgctgtgacgtcatgtacgggattgaagacacacaagacacggtgtcactgactgtggatggggttgtgtttcactacagggcggcaaccagcaggtacacactgaattttgaggctgctcagaaggcttgtttggacgttggggcagtcatagcaactccagagcagctctttgctgcctatgaagatggatttgagcagtgtgacgcaggctggctggctgatcagactgtcagatatcccatccgggctcccagagtaggctgttatggagataagatgggaaaggcaggagtcaggacttatggattccgttctccccaggaaacttacgatgtgtattgttatgtggatcatctggatggtgatgtgttccacctcactgtccccagtaaattcaccttcgaggaggctgcaaaagagtgtgaaaaccaggctgccaggctggcaacagtgggggaactccaggcggcatggaggaacggctttgaccagtgcgattacgggtggctgtcggatgccagcgtgcgccaccctgtgactgtggccagggcccagtgtggaggtggtctacttggggtgagaaccctgtatcgttttgagaaccagacaggcttccctccccctgatagcagatttgatgcctactgctttaaacgacctgatcgctgcaaaatgaacccgtgccttaacggaggcacctgttatcctactgaaacttcctacgtatgcacctgtgtgccaggatacagcggagaccagtgtgaacttgattttgatgaatgtcactctaatccctgtcgtaatggagccacttgtgttgatggttttaacacattcaggtgcctctgccttccaagttatgttggtgcactttgtgagcaagataccgagacatgtgactatggctggcacaaattccaagggcagtgctacaaatactttgcccatcgacgcacatgggatgcagctgaacgggaatgccgtctgcagggtgcccatctcacaagcatcctgtctcacgaagaacaaatgtttgttaatcgtgtgggccatgattatcagtggataggcctcaatgacaagatgtttgagcatgacttccgttggactgatggcagcacactgcaatacgagaattggagacccaaccagccagacagcttcttttctgctggagaagactgtgttgtaatcatttggcatgagaatggccagtggaatgatgttccctgcaattaccatctcacctatacgtgcaagaaaggaacagttgcttgcggccagccccctgttgtagaaaatgccaagacctttggaaagatgaaacctcgttatgaaatcaactccctgattagataccactgcaaagatggtttcattcaacgtcaccttccaactatccggtgcttaggaaatggaagatgggctatacctaaaattacctgcatgaacccatctgcataccaaaggacttattctatgaaatactttaaaaattcctcatcagcaaaggacaattcaataaatacatccaaacatgatcatcgttggagccggaggtggcaggagtcgaggcgctgatccctaaaatggcg

SEQ ID NO: 707 - DNA, 1741 bp, Homo sapiens
ggcacgagcccacctcgccgccatgcgcctccgccgcctagcgctgttcccgggtgtggcgctgcttcttgccgcgggccgtctcgtcgctgcctccgacgtgctagaactcacggacgacaacttcgagagtcgcatctccgacacgggctctgcgggcctcatgctcgtcgagttcttcgccccctggtgtggacactgcaagagacttgcacctgagtatgaagctgcagctaccagattaaaaggaatagtcccattagcaaaggttgattgcactgccaacactaacacctgtaataaatatggagtcagtggatatccaaccctgaagatatttagagatggtgaagaagcaggtgcttatgatggacctaggactgctgatggaattgtcagccacttgaagaagcaggcaggaccagcttcagtgcctctcaggactgaggaagaatttaagaaattcattagtgataaagatgcctctatagtaggttttttcgatgattcattcagtgaggctcactccgagttcctaaaagcagccagcaacttgagggataactaccgatttgcacatacgaatgttgagtctctggtgaacgagtatgatgataatggagagggtatcatcttatttcgtccttcacatctcactaacaagtttgaggacaagactgtggcatatacagagcaaaaaatgaccagtggcaaaattaaaaagtttatccaggaaaacatttttggtatctgccctcacatgacagaagacaataaagatttgatacagggcaaggacttacttattgcttactatgatgtggactatgaaaagaacgctaaaggttccaactactggagaaacagggtaatgatggtggcaaagaaattcctggatgctgggcacaaactcaactttgctgtagctagccgcaaaacctttagccatgaactttctgattttggcttggagagcactgctggagagattcctgttgttgctatcagaactgctaaaggagagaagtttgtcatgcaggaggagttctcgcgtgatgggaaggctctggagaggttcctgcaggattactttgatggcaatctgaagagatacctgaagtctgaacctatcccagagagcaatgatgggcctgtgaaggtagtggtagcagagaattttgatgaaatagtgaataatgaaaataaagatgtgctgattgaattttatgccccttggtgtggtcactgtaagaacctggagcccaagtataaagaacttggcgagaagctcagcaaagacccaaatatcgtcatagccaagatggatgccacagccaatgatgtgccttctccatatgaagtcagaggttttcctaccatatacttctctccagccaacaagaagctaaatccaaagaaatatgaaggtggccgtgaattaagtgattttattagctatctacaaagagaagctacaaacccccctgtaattcaagaagaaaaacccaagaagaagaagaaggcacaggaggatctctaaagcagtagccaaacaccactttgtaaaaggactcttccatcagagatgggaaaaccattggggaggactaggacccatatgggaattattacctctcagggccgagaggacagaatggatataatctgaatcctgttaaattttctctaaactgtttcttagctgcactgtttatggaaataccaggaccagtttatgttt

SEQ ID NO: 708 - DNA, 3118 bp, Homo sapiens
agttcgacacaccatgccgactgtcagcgtgaagcgtgatctgctcttccaagccctgggccgcacctacactgacgaagaatttgatgaactatgttttgaatttggtctggagcttgatgaaattacatctgagaaggaaataataagtaaagaacaaggtaatgtaaaggcagcaggagcctctgatgttgttctttacaaaattgacgtccctgccaatagatatgatctcctgtgtctggaaggattggttcgaggacttcaggtcttcaaagaaaggataaaggctccagtgtataaacgggtaatgcctgatggaaaaatccagaaattgattatcacagaagagacagctaagatacgtccttttgcggtagcagcagttctccgtaatataaagtttactaaagatcgatatgacagcttcattgaacttcaggagaaattacatcagaatatttgcaggaaaagagcactggttgccattggtacccatgatttggacactttgtcgggcccatttacttatactgcaaagcgtccttcagatatcaaattcaagcctctaaataagaccaaggagtatacagcctgtgaactgatgaacatatacaagactgacaatcacctgaaacattatttacatatcattgaaaacaaacccctgtatccagttatctatgatagcaatggtgtcgtcctttcaatgcctcccatcatcaatggggatcattccagaataacagtaaatactagaaatatttttattgaatgcacgggaactgactttactaaggcaaaaatagttcttgatattattgtcaccatgttcagtgaatattgtgagaatcaatttacggtcgaagctgctgaagtggtttttcctaatggaaaatcacatacctttccagaattagcttaccgaaaggagatggtgagagctgacctaattaacaaaaaagttggaatcagagaaactccagaaaatcttgccaaacttctgaccaggatgtatttaaaatcagaagtcataggtgatgggaatcagattgagattgaaatccctccaaccagagctgacattatccatgcatgtgatattgtagaagatgcagctattgcttatggatataacaacattcagatgactctcccgaaaacttacaccatagctaatcaatttcctcttaataagctcactgaacttctccgacatgacatggcagccgctggcttcactgaagcacttacctttgccctgtgctcccaagaagatattgctgataaactaggtgtggatatctctgcaacaaaggcagtccacataagtaatcctaaaacagctgaatttcaggtggcacgcactacccttcttcctggcctcctgaagaccatagcagcaaatcgtaagatgccccttccactgaaactgtttgaaatctctgacattgtaataaaagattctaatacagatgtaggtgcaaaaaactacagacatctctgtgctgtttattacaacaagaatcctgggtttgagatcattcatgggctgctggacagaattatgcagttgctcgatgtgcctcctggtgaagacaaggggggatatgtgatcaaagcatcagaagggcctgctttcttccccgggcgatgtgcagagatctttgccagggttcaaagcgtcgggaagcttggggtccttcatcctgacgttatcaccaaatttgagctgaccatgccctgctcctccctagaaatcaatattggaccctttttgtgaagattggtctctgtggtgtgattctcttcccaggtgtccctttctcctcccctagtgtccttaagtcctcctccacagggaacatctatttgggctttgatgtttaataaagtagaaagcactgtctggctgtgtgggtagagaccatcctttccctgcatattaggccagcttgtgccatataccagtgtggtgtctgtgtgtgaagctgcattgttgggtaaaagccccgtggagtgctggagaaatgcactagcagagtgcaggatctgttctgaaaggcagacgtgctcctcagacatcagaacatcacattggaacggattactcctgcataacaagatcccatttctttccttattgataaaacaagataatcgatgagaattcatgttgcatgagttcgagataactgaggggtttagctttgattttctacatttgacatgtattcatcattgagaaacactaaaataacaatatttttagaaaacgtttaagaatcaattatggtccaacaattatagcttctgaggtcagtttaaagtgaaagaaaaatctgtaatacaaggattcaaaatatgtgagggtgcataggtattttttactctatctgtgatactctaagatagagtacatgcaacaaagatctgttctgctgtaagagttaaaatggacaagtattgatatcaatgcagtatgaacattaggaaacaatgagaagcttatttttgccataggccatacatgttactgtaatcagtcagttataaaatcatggttttaaatacttaattgagctactagtttctctattgtcccagggagatattagacctctctttttctgaagctaagcttcagccaatcctccttgttttatatcctaatttcctttcttacttcaatctagaattctccagtaggtaccatctctggaaaaaagctgggtctcatgtttgagacaagttcccaggtactattgaagtaataagaaatatgataaaatataatactttaaagtcccagtagaaatagctaacaaaggctgggtgcgctgtggctcatgcctgtaatcctagcactttgggaggctgaggtgggcagatcacttgaggccaatagttcgagatcagcctgaccaacatgatgaaatgccatctccactaaaaatataaaaattagccaggcatggtggtgtgggcctgcagtcccagctacctgggaggctgagtcaggaaaatctcttgaaccaggaggtggacgttgcagtgatcccagattgtgccactgccctccagcctgggtgacagagtgagattctgtctacaaaaa

SEQ ID NO: 709 - DNA, 1977 bp, Homo sapiens
ccatggagcccgccggcccggcccccggccgcctcgggccgctgctctgcctgctgctcgccgcgtcctgcgcctggtcaggagtggcgggtgaggaggagctgcaggtgattcagcctgacaagtccgtatcagttgcagctggagagtcggccattctgcactgcactgtgacctccctgatccctgtggggcccatccagtggttcagaggagctggaccagcccgggaattaatctacaatcaaaaagaaggccacttcccccgggtaacaactgtttcagagtccacaaagagagaaaacatggacttttccatcagcatcagtaacatcaccccagcagatgccggcacctactactgtgtgaagttccggaaagggagccctgacacggagtttaagtctggagcaggcactgagctgtctgtgcgtgccaaaccctctgcccccgtggtatcgggccctgcggcgagggccacacctcagcacacagtgagcttcacctgcgagtcccacggcttctcacccagagacatcaccctgaaatggttcaaaaatgggaatgagctctcagacttccagaccaacgtggaccccgtaggagagagcgtgtcctacagcatccacagcacagccaaggtggtgctgacccgcgaggacgttcactctcaagtcatctgcgaggtggcccacgtcaccttgcagggggaccctcttcgtgggactgccaacttgtctgagaccatccgagttccacccaccttggaggttactcaacagcccgtgagggcagagaaccaggtgaatgtcacctgccaggtgaggaagttctacccccagagactacagctgacctggttggagaatggaaacgtgtcccggacagaaacggcctcaaccgttacagagaacaaggatggtacctacaactggatgagctggctcctggtgaatgtatctgcccacagggatgatgtgaagctcacctgccaggtggagcatgacgggcagccagcggtcagcaaaagccatgacctgaaggtctcagcccacccgaaggagcagggctcaaataccgccgctgagaacactggatctaatgaacggaacatctatattgtggtgggtgtggtgtgcaccttgctggtggccctactgatggcggccctctacctcgtccgaatcagacagaagaaagcccagggctccacttcttctacaaggttgcatgagcccgagaagaatgccagagaaataacacaggacacaaatgatatcacatatgcagacctgaacctgcccaaggggaagaagcctgctccccaggctgcggagcccaacaaccacacggagtatgccagcattcagaccagcccgcagcccgcgtcggaggacaccctcacctatgctgacctggacatggtccacctcaaccggacccccaagcagccggcccccaagcctgagccgtccttctcagagtacgccagcgtccaggtcccgaggaagtgaatgggaccgtggtttgctctagcacccatctctacgcgctttcttgtcccacagggagccgccgtgatgagcacagccaacccagttcccggagggctggggcggtgcaggctctgggacccaggggccagggtggctcttctctccccacccctccttggctctccagcacttcctgggcagccacggccccctccccccacattgccacatacctggaggctgacgttgccaaaccagccagggaaccaacctgggaagtggccagaactgcctggggtccaagaactcttgtgcctccgtccatcaccatgtgggttttgaagaccctcgactgcctccccgatgctccgaagcctgatcttccagggtggggaggagaaaatcccacctcccctgacctccaccacctccaccaccaccaccaccaccaccaccaccactaccaccaccacccaactgg

SEQ ID NO: 710 - DNA, 1776 bp, Homo sapiens
atggacgacctcgacgccctgctggcggacttggagtctaccacctcccacatctccaaacggcctgtgttcttgtcggaggagaccccctactcatacccaactggaaaccacacataccaggagattgccgtgccaccccccgtccccccacccccgtccagcgaggccctcaatggcacaatccttgaccccttagaccagtggcagcccagcggctcccgattcatccaccagcagcctcagtcctcatcacctgtgtacggctccagtgccaaaacttccagtgtctccaaccctcaggacagtgttggctctccgtgctcccgagtgggtgaggaggagcacgtctacagcttccccaacaagcagaaatcagctgagccttcacccaccgtaatgagcacgtccctgggcagcaacctttctgaactcgaccgcctgctgctggaactgaacgctgtacagcataacccgccaggcttccctgcagatgaggccaactcaagccccccgcttcctggggccctgagccccctctatggtgtcccagagactaacagccccttgggaggcaaagctgggcccctgacgaaagagaagcctaagcggaatgggggccggggcctggaggacgtgcggcccagtgtggagagtctcttggatgaactggagagctccgtgcccagccccgtccctgccatcactgtgaaccagggcgagatgagcagcccgcagcgcgtcacctccacccaacagcagacacgcatctcggcctcctctgccaccagggagctggacgagctgatggcttcgctgtcggatttcaagatccaggacctggagcaaagagcggatggggagcggtgctgggcggccggctggcctcgggacggcgggcggagcagccccggagggcaggacgagggagggttcatggcccaggggaagacagggagcagctcaccccctggggggcccccgaagcccgggagccagctggacagcatgctggggagcctgcagtctgacctgaacaagctgggggtcgccacagtcgccaaaggagtctgcggggcctgcaagaagcccatcgccgggcaggttgtgaccgccatggggaagacgtggcaccccgagcacttcgtctgcacccactgccaggaggagatcggatcccggaacttcttcgagcgggatggacagccctactgtgaaaaggactaccacaacctcttctccccgcgctgctactactgcaacggccccatcctggataaagtggtgacagcccttgaccggacgtggcaccctgaacacttcttctgtgcacagtgtggagccttctttggtcccgaagggttccacgagaaggacggcaaggcctactgtcgcaaggactacttcgacatgttcgcacccaagtgtggcggctgcgcccgggccatcctggagaactatatctcagccctcaacacgctgtggcatcctgagtgctttgtgtgccgggaatgcttcacgccattcgtgaacggcagcttcttcgagcacgacgggcagccctactgtgaggtgcactaccacgagcggcgcggctcgctgtgttctggctgccagaagcccatcaccggccgctgcatcaccgccatggccaagaagttccaccccgagcacttcgtctgtgccttctgcctcaagcagctcaacaagggcaccttcaaggagcagaacgacaagccttactgtcagaactgcttcctcaagctcttctgctag

SEQ ID NO: 711 - DNA, 36471 bp, Homo sapiens
gatcagaaatcctgccagggccccgagggggcaggcatggaagggaggtgtctaaggtcacaggagacactatttgctgcctgtggggctgggacaggctccttgagaggaaattcgggcactgtacgggaggaaaacacaggacagggaggcctctccccaaaggattgtgatgatagagaccaaagcatctgcaaagagcccagccctacaggggattctctgaacacagcattcctcggggcgtctgtgttattttgccagggttaccataataaagtagcacagactggatgctcagagaaaagaaatgtcttctccactaatctgtaggtgatgttagaatctgagatcaaggtgttggcagggttggtttcttctgaggctgagcgagggcctgttctgtgcatctccctggcttcaggtgcttctggaaggatgtgctgttccctgaattacagacaaacaccccaatctctgcctccatgttcatatggcattttccctatgtgtgtctctgaccatgtttcctcggttttttgtttgtttgttttttgctgttgttgttttgttttgagatcgaatctcgctctgtcgcccaggctggagtgcagtggcatgaccttggctcactgcaacctctgcctcccaggttcaagtgattctcctgcctcagcctcccaagtagctgggattacagatgcctgccaccaccttcagctaattttcatatttttagtaaagatggggtttcatcaggttggccaggttggtctcgaattcctgacctcaggtgatccacctgcctcagcctcccaaagtgctgggattacaagcctgagccactgcattcagccatttcccccttttataacaacaccgctcctgttggattgggagcccactctacttcagtatgatgtcatgttaacccattacatctgtaaccaccccattcccatataagatcccattttgaggttctggggctgaggacttcaatatcaattcggcgggggggagcctacaatgtaaatttgtaacattgtctctgtcatgggccagctgtcaatattccctgaatatccaggatccacccatgctctctggccatcaccagagtgagcaaatccctgacacatggataagagttgcttccatgggctcccagccaggctggaaattcttgattcatggaatcaagaatctttctccagtgggtggggctaaatgcagctgcctccctgacagtctccctgggacactaggcttatcagcttttctcctaaagctgcaggtcctgactgtcctgagccccagctctgctgtggtctttgcatcttaagatcttattcaactcgcttttgtgcctcagtggactgacttacaggaaaacagtgggagatgcccctgctctctctccccagggtctcctcccctcagtggcacaagacctgccctattgactggcagtccccccatgcccatctcaacctccacactgcccactgtgcacggtcacaggtcacaaactgattgttcactttgggcagatcaccttgacagtttctgcagaactgggtgcttcttcccagaatcaggaatttacaaacaaggccagttctagagatgcaactgggagagtaatgtgcatcacagcgaatctggacaagacaaagtggttttgctgtagttctcctggaacacattctggtgatgtgtccatctcccaggatagtcttagcaagttacatccaatgctgcatcaggacccacaagaaaaggaactggcctgcatgagtggccggcagggtcctgggaggagaccctgagatgcccagtgacaggaggagtggattcttaggttggtaagcgtgtggaggaactgcgagtgatgtgctcagccaggtacaggagcaggcgtattggtgacctgtggcctcatcttatctcagttgtctctttagaccaaactccaggaaatcagcacatagagacttctgtctgtctccgagatcatcgcaggacttcacacgtcttttctatttataatacaacatcatgttgtgattgaattactttcatcacagcctcaacagtcctaggtctgaaaactaatacatatacttagaatattaattaaggaatactttcttgtcaattatgtttattaaattaaaagacttcagtatctagtgttacagctgtcctaattcaacagccttgaccttcttagaaataaaatcctgatcccaaatttttctggggatatgactggcacaaggagccaagcagacatctggatgtcccagtgtcactgctgacatgtgcttttttgttatctgtcatggggtgaacagaggaagtgtccctacctctgtccacagaacccatcaaagacagtgcacctgattaaagaagagagggttgtgatcagaggggtccggggtcctgggatgaggtgggaggaggagactcatgggaagaaaggaagcagggcaggaagaagctgaagttcaggctctgaggtgcatctcctgcatggaatcttgactccactcacttctgtcattgtgtaatctttcaatgttggttctgtcatcagtaaacttgaggagaggttatgccataagcatagggctgaggaagggttattataaatatccagtcatggttgtgcctataaaacactcaccaaagactctgaatatattaaggtctcataagtagttgttttgcataatctagtgatacatggaggatggcattcctcctgtggacagcaggaggcactgtgggtgtatcgtttggggatgctaatagctccaagtcccccagtagagctcacgtgcaaagggtgtgactgatgtttcctttcaggtccagtctttttgagtacaatccactctccactcctgacacccacttggcccttctcctgcctttgagaaatgactaccctgaggccatcagctccagggctcagctatgagctcagacagacacgcttgggaatagagaacagatttggattcaatgctccttccttcttgagcttcaagaagaggataagataggagctggttgtgtccaggctccactgggcagcctcgatcagagctctcggaagtgcctcccaccacggcctgtgtctccttctacctcctgcccttcatattctccacaggttggagcatccagagaattcagggaaaccctttcactgctatttccccccagcactggtcctcagtggcattctttccagttctcctgtgcattcagcatcattcatgaaattatatgtttccaggtctctgtgctctgtctgtgctgacccagcccccgtctgcatctgcctggctgtgagcctcagccaaggtcacctacaccagtgaatagtatcaacagagaccaaggaggtccccctagtgtataatggaggttaagagtaatggcagcgacagcaaggggaacaggatccccagtcacttattgggctccagccctggggctgaatgctacttaattatcttcaacctccaatctgaggatgaggccgagtatcactgtggagagagccacatgtttgatggtgaggatgggtgagccacagtgacacagaccaagaagtgaggccaaaacataccccctccccttcctcttcaaggactgagagtgagaagccctatgtcatctccattgaccctgagaatgttgactctccccctttcaaatttcatcatcccagatgtcctccctcaagacacccttaggcagaggcagatgcaggccatgattgaggccattttgataagtcatcaatctgtttccaccacaccagcctgtggggactacactgggagagaccagaacagcccaggcaggaaaacggccctgagagaggggtcgggctgagatgactgcatccagtgagtgccattgcaccctgcacccctgcctcaggggactgtcatggggctctgcctgaggaggcaacatggatcttgacatgtccccagccatttatgagaactgtagttgtgtgcatcctcattaacactcaatattattgtcagtttttgtttaaagccactctaatagatctgtagcgattcttattaattttttaacttgtattttcttagcaacatcaggctgagcatcttttcaggtgcttgttatctgtatatcttctttggtgaaaagcttaatcaaatcttggtctatttttaaaattcacttttccccatattccccttcatgcagtatttttcaaaaatggtgaataaatgaaagttttgctgacatttaaaaactcacagaattgttcaccaccagactgttgctattagaagggtaaaggatatccctagacagaaggaaagtgatgtcacattgaaatgtgaatttacacaaaaaagtgaaaacatcaggctgggcccagtggctcatgtctgtaatttcagcactttgggagactgaggcaggagtattgcttgagcacaggagtttgaggctgatgtgaggtatgatcataccactgcagtccagcctgggcaacatattaagaatctgtctctattaaaaaaaaaaaaggaaataaaaaaattaaatatcaggtacagtaactacatagatacttgtgaaaacctctgtattatgttaatgccaataaaatacagttcactgatcaaagataaattaataaaatacattgtgatttataatgaaaataaaggcaaattatatgacaaagacagcacaaaatctgtggtgggtgaagaacatgttatcaaggtctcatatgggaatgtgtaacaactgcaggtagattttcataagatctctatatacataaaccttaaagtagtcattaaatcaaaccttttgatcaaaaaagaattagagcgaataagctacattagggttatccacagaaacaaaattggtaagatatatatgtgtgtataacatacatatgtgtatatacacatgcatgtatgtgagcatatcgagagagagagagaaacttaaaagaagaaattggttcataggattgtcctgtctgacaaggataaaaatctcttgggcaggctgaaggctggaaatgcaggtaagagttgatgttgcgtcctgagcctgaattcagcaatacaggacttaagaaatcctcactctttgctctaaacacctaaacactttcttttttttttttttttttttttgtgagacagagtctcactctgtcacccaggctgggttacagtggtgtgatctcagctcactgcaatcgccacctcccagcttcaagtgattcttgtgcctcatcctcccaggtagctgggattacaggtgtgcaccatcacatccacctaatttttgtatttttagtagagaccggctttctccatgatgaccaggctggtctcgaactcctggcctcaagtgatcctcctgcctccttggcctcccaaagtgctgggattacaggtgtgagccaccaggcctggcctgctctatacactttctactcatgaatgaggcccaccgcattgtgatgagtaatctgcttatacaaagtctactgagttaaatgtgagtcacatctggaaaatatcttcacataaacttctatgtttgtactggacaaaatcaacctggaaccacatcctagtcaatgtgccacttaaaattaaccatcacttaagccggcatgaagatagaaaggaaccattttttaaagcaatcaaaaacagagacagagaaagggaaagaaaaacaaggaacatatccatagattgtattttttaagtcactttttgaggttttctgttgttttcctgttttctatttcattgatatttggctcttaactatattaataccttttctctatttaaattgaatttcaatgctctccttttccttagatttatgaggtagaaccttagtttattttagatcttgcttctttccactgccaaacattcaatccaatagatttatttaaaactacttacttatatctattttttaaattttaatacatttgtttttgtgttttaaaagttcagtattttctaattttgttgtgatttttttctttgacttatgaaatatgtagttttatcttctttcatttccaaaaaattgaagatttaccacagttcatcatgtatcaattccatttaattagttaattctgcattaaatcataccttgcatgagcttcatattttcaaatttgttaacatttgttttgtggcctagaataggaagtatcatgaaaaatgttccctgtgtatttgaaatagcaatgtttattctgctgctgtgggtatagttttctacgaattcaattagcctaagttggctaatagttcaaatatatattcttactgtttttttgtgtatttattttgtaggtctgtgagagagagagctattgaaatgaacaacactaattgtagaatttcccattgcttcttttgagagaggaaaatttccagtcatggttcttaatactttattctcctgacaaaaggtcacctatgattttccaacactaatcaaggaaaaaaaaaaggcagagttaaagccacactcatggatgccacgggagcagtgggtgaccacatgatgtccctccactggttcagtagatttagcgagacattatattttggcttttaaaaatcataaatctggctaagacatccatgaacaaatttgaagacatacacattgaataaaatatgaaaattaaaagaaaggtaactgcatacgtaaaacattgctatcacagcacctgactcatgggaaatggataaaaagtattataaattcaattacatttacttacacattaaacaaatatgaatttaaaccagttcactaaactgtctcatatactgtttaggtgatggagatttattggtgcacaaaaaagacaagaatacctgctctcagagtggcatcatggaagatggtggagtacgaagctccagcaaatggtccctcctgtgaaattacttgaagtggcaagagtcatgacattaactctcataaaacaacagaatcttgtcccacatttgcagtattcagggatgtgccgatgaagagagagacataaaataatctctgtcaggtcaatttctggccatggaaataattgaacagaaactgcatggatcactctgacaaggaagctggtccttaccaaaatattttggaaatgtcaccacgcaattgaataacagcacctttcagcaagcaacatcagccaaggcagagaagagagacaatctgatttcgagagtgacaatatcataacatccaaaatacccagatctcaagaaaagtttacaaagcagacaaacataaaagaaagcaagacccactaaaaggaaagaaataaatcaactgaatgcattcctcaggaagcacaggcattgcacgtgctacacaaacacttcaaatgaactgcccgtatatgctcaaaaagcaaaaggactccatggaaacagaactaaaggaaagcagggaaatgatgtttgaacaagcatgaaatatcaataatgacaagttttataaaggaaccaagcagaaatactgaaactgcaaagttcaatagctgaaatcaaaatctcaccagaggagttaagtagtggtgtgagcagacagaagaataatcggtgaacttgaagatacatcattgaaattccacaggatgagcataaatttttttagaaaagaataaatgaacaaagcctaagagacatatgagacaacatcaagcatatcaatattgctttatgggagtttcagaaagagaagaaaaacaggaaaggaaaaataaaatacataaagaaaaatagctcaaaacttctaagtttgatgaaagattagaatctatactttcgaggagctcaataaactccaagcaagttaaactgaagtctgcagtgagacacattctgatcaaagcatcaaaagccaaatacaaaaggaaaagtgtaaatagtaacaaaaggagagttggggtagctaaagcaatttcagacaatataggcttcaagttaaaaatgcttacaagagacaaagaaaggcgttataattgatgaaataaccaactagtcaagaagacagaataattatgcaccaagggatagcacttcaaagtacataaaggaagaccaatttgaaaaaaaaaatatgtagatctataatataacttggagacttcacttctccacttttactgaccacctaggccgggcatggtggctcacgcctgtaatcccagcactttgggaggctgaggcgggtggatcatgaggttaagagatcgagaccatcctggctaacacagtgaaaccccgtctctactaaaaatacaaaaaaaaaaaaattagctgggcatggtggtgggtgcctgtagtcccagctactcgggaggctgaggcaggagaatggcatggacccaggaggtggagcctgcagtgagcagagatcacaccactgcactccagcctgggcaacagagcaagactccatctccaaaaaaaaaaaaaaaaaaaaaaaaaaaaaaagataataagagaagagacacaaataagtaaaatcagaaatttgggacaatagtacaaagcttatggaaatttaaattataatagaagaacacacaagcaattgtatgccaaatcttagaagatatggacaaattcatagtaaacacagattgccaatctgactcaagaaaaaagagaaaaaaatcaacagaaatatagaaaataagggatgtaaatcagcaatggaaacttccgaaaaaagaaaaactcaaaaccagatggcctcactggtaattctgctaaatgtaaaaaggagttgatatcaaccataatcaatctcttcccaaaacagattaagaggaagtacttcccagcacattcgaagaccctagcattagcctgacaccaaaggcaaacaaggatagtattttaaaaaaactaaactaaaggctaatattccttaagaatgagcatgcaaaaatcctcaacaaaataaaagcaaaccaaatccaacgttaagttaaggggaataaaggatttcaaagatggttctacataagaacatgaatcaacgtaatatatattaacagagtgacagaaaaagtgtatgatcatctgagtagatgcagaaaaagtgtttcacaaaattcacattttcctgattaaaaaaaaaacacacactcagcaaactcggaatagaaggaaacttctacaaactaataaaggacctttatctaaagccacagtgtacatcacattaaatggtggaagagtaaaagcttccctactaagatcagggacaaaacaaggactcctgcctccacaactactatttgacattgtacagaagttttagtcaaagctcttaggcaaagaaagaaataataggtatctagaatggaaatgaaggagtaaaatcatccctatttgcacagaacccgattctaaacgtacaatatcccaaagaatacacgcacagaaaaactaacaaagtgaataaacacattgaaccaagtttcaaggtacaggaacaactggacttgccacaacttttctttgttatcctgggcattagttctcttggcctcaattttatctttaaaactgggaggcttatactgcagttgagaaaaagacacaaaaagaacctgttagttaaagatggaataagtgaatctcagagggtggacataggttggtgaggtcctgtccatctctgggggcatttttctggagtgtgggaaagcatgttcccagatgtgttagcaagatactcgcaattttctcaaaacaacagacaaggatagtgtagaaatcctcccaccacaaattgtgaacagtgtgtgatgaaataaaaataacagtcatagaaaaagatggcgatgatgatgataatgacttaagtacacaactaaggtttagtgatagaaacatcaggtgttcccaaattcaatgcagcttttcttataaaatgggggcaccagtcttagttcccatatatttaggaattgagggtccccatgaggtgtcgctgcatttctctgggcttttatgtttatcacagaagagctacagcttaccctgcactctccagcccgcaatcaaaaatcatggaccaaagaacaacatttcagcacaagactccattatgggaattgaatctgcccaccctcccgaaaccatatacacctttctgtgctgacatgagaaaaccacagtggatcacactggctcaaagtgaggctggactcctttgtccccaacctcccagatgacaggtgctgtggggtcacccggaggagaaaagctctcctaggctcagtcttgtccaccagcaaggggcagcagagctgcagccaggagcagccagaggctggggctgcccaggtggagcctaaggggtaggcagccctgggaggtctacaggtgtccaaggttcagtcctaggattggaagtcaggacagtccatcctattgcttctggttacagcgaccatgttctgagggtcagactcaaacagcatcacccaggacaccgacaggagccggggcacaatgagagcctcacctgggaaatgcagccggaggcacctgggcccagatgtcagcctgggcagctcccacagtgctggaattccctggaagatgccccaaggttgaggtgctctaggagggggcccagtgggagaggatggggctcccagggctcaagtccttcacccaggatggccatctgagcatcctgccactctcggggcctcgcccctccctctccagcagtgtcctggggagctgaaccctgtcccaggcacttccagggacgcctgacccctcctccctctgcctctccttccagctcgagactgactctgactcatggggcagctcctgtgcgcaggggagtctcaggtgggtggggcggcacattcagggccccggttcctgggtggggcttcccgggcctcctagaggagatgctctccagagggaagggggttctcacctgattcaggccagagctctgaccacaaggctgtccttggctcagtgacaagagtctgctgcattgcagagaccagggaccacccaccatccagagctcacactctgtgcaaaggctgtgtccctgggatatttgcagagaccaccgggcctaaagttgaatttcccatcaatatttcatgtaaacttgtaaaaagcaccagaaaaacacactggactgagaaccccgatgcttttctggggccttttacaagtttacacaaaatactcataggaaaaaataaataaataatggaagagctgaggatggcaatggctgatctatgtggggatgggggatggcctaaaaggagcggcaccatggctgaaatgagagcagacgtccagatgatgccacaagggtgtgtggttgcgtaaatgaaccacctactcctactgaaataattaacaagtatcctgacgacacagtacgttatttagatgaaatgaccaggatgggactaagtaatgctgggggacccagagaggagggggaatatggtgggttcttggtccacctgctgctgagtcaggtttcatcaatgatctctcagcagggccaaactcagccccaagccaggtttctagaaggcccgcagccctgctgagcctggcccaggacagaccacaggtcagagaggtttgggacagtggtcatatggccagtccccaggaaggtgactgtgatcacaggcctcagaggtcgaggctaattttctgaccaaagacccaactccttcttcagtcacctgtgctgcccccacagctagtttgagtgacatctttcaatgaggagtcccagaggatagaaatttgcatgaacaccaagcacttactgccccatagggcctgggaaggaataagagaggcctggggagcccagctgtgctgtgggctcaggaggcagagctctgggaatctcaccatggcctggacccctctcctgctccccctcctcactttctgcacaggtgcttctcccaggccctgccccaggctcagtgcccatagaccccaagttggccctgccctgaaccctgtgcaaagcccagacacagtcttagggtaggacccctgggaatgggctcttgatcttcaagccccctctcctgttttccttgcagtctctgaggcctcctatgagctgacacagccaccctcggtgtcagtgtccccaggacaaacggccaggatcacctgctctggagatgcattgccaaaaaaatatgcttattggtaccagcagaagtcaggccaggcccctgtgctggtcatctatgaggacagcaaacgaccctccgggatccctgagagattctctggctccagctcagggacaatggccaccttgactatcagtggggcccaggtggaggatgaagctgactactactgttactcaacagacagcagtggtaatcatagcacagtgacactggcagatggggaagtgagacacaaaccccttcttcatctattttaccctctccctccagccccaggaccgctgtggaccaacccataagcaggtctggcagaattcacctggttaggagatccttaagctgcttttccctccactcctctaggcagactttgcaggaatgagtcaggagtggatttgggcctggcagggccagactgccctgtgtttccttgcccacggtttgagttgtgaatggagagtatgagtggaaagacagacacagcgggacatccatgcaggcatgaacagcccagagcgacaggggaaactttcagctctcagttcaatgcagtcattgttttatctcttggaagaagcatttctccagtgcaactaagactctagactcacagagcccgaggttgtgggggaggacattaaattttgctcatggatcactaaggacgtttttgagtggagccactacaatttattcattgattcctggactcatggatcctgactgtgggagaaatagtactgcatattgggcactgctgtacagcgcatgccccatcctcaaagtcattgcccaaccttacatgtttttgccatcctgctgccacagtaactgagtcttcaagcagacactgagccattcatataagccagatgccacattggtgaagatggtaagacacttgaatgccatgaggatgggcccatggttgctgtttatttgctgtgatatgagttccttggtcaaagccccctgtggaataccatcatggtgggtgaagcattctgtagtccagagataaaaggtttggcagaagcactgcagtcaaagaaagcaaatccctgtctatactaagtgtgtattctggcaagagcaaagagctatccctgccatgaaggaacagctttaatgaaattaatatcaaccaggcatcctatagggatcttcctgttggtcttcactgttggcagatggtcactcagcagtagctacagccaggtcagctctagtgagtggtagtccactttgatgagtccatggacagcctccttttctgcaaccatagggcatttgttattgagccaattgggcaatgatggcagtggttggggcagactgccaggtgtccagagagccacccatcctaccaacctgtttagcaaaatcaattccttctcatgtcagacttcacaaaatattcacataggagataaatattctcatgctttctgcttgctcacacatctctccctcagacacagttgtgatcaatattctgattgtatttcctgtgtccctgaacatccttgatcatcttccaagtccctgagtcacagcccatgaactaggaacctctgcccgtctctctttgcagatgacatgaaccaggtacactgctctaagttctgccttaaggagagtgttcctccaccactgctgttcagggaagcccagaggccaggtgggatactagcactgtccacagcagggatggctgcatgtcctgcagaaacctctgtaaccccagtctaagtgcctcctcctaggcagctggtcccagggagcccctcaggaggcccaggctgtaaggtgagaggatggccatggggcaggagttggcccgtgtctatctggccacctcttcatgcaacttatttgtccttgtgacctgatccatcaggtctcaggtacagcccagccatgtgatggggaggccactataaatggccacctcggactgggggtcagataacatccagctcattggcagcttgtgtcccatggtgagctctgtggccacagtcacaaagagcccctgttgaggcccaggagcccccccagtcttcctctaatggagctttctgctcatttagaaaaataacaatggggaggttgctcgcctacctcaggtctagggtcactgggaccacctagaccacatccatgatcttgtctgattattctgattccttgttggcttagctatgcattagtgtaaccaagccacagtgtcttaggcactaaaatgccactacttggcccctgcctaccctggggtcctgtcaaccacatcttggtatccaattcagttttagcaccactaagagaaatctatttttatattgagaacaggaaacattagttatttctattgtggaaattttataagacaatagtgtggaaatgttttaagagacattttacttagagtgaaagaccttccattaaaccactcaataaattgctccataaatggccagcccaaaccctgagttcagaccaggcacagcctcggtgttgggaccttctgggaatgggtctctgtcatcaacccttctctaccctcctgtctgcacagccctgggcctcctacatgcagggacagctcccctcagtgtcggtagccctgggacagatgaccatgatcatatgctctggagataacctcggaataaacacgcattttggaacaagcagaagccaagccagacctcaatgtcggtcctctagtataacatcgaccagccctcagagacctctgcttaatttttaggccacaaactagcgaacatggccaccctgaccatcagcagtgcccaggccagggacaaagctgactattactgtgcctcagattgtgacagtgggggcagctggcagggactcacagtgacaaagacagatggggacttgcaacaaactgtcccacttcagcctgcctctcattcttacctgccctctgagcagctgtaggtcaggcctcagaatcaggtgtcctctctggtcctcacctggtccctgcagggccggagattcgtaacagcttttccatactctcagggcctacatgtgttcaataaaacctgtacgggggaagctcgttgaagctgcaaggaccttttacaggtttgtagaacacatgagaacttcaggaatccatatagtgtcacatggctccatgtgtaattacacgtcacacagggaaggagagagctgtttcacagggtgcaatcctactggaattcgtcttttccttgcgtagaaacagcttagtggaagccgtgtctcctctggtttcctagatgagttgaccccacattgtaatggggcacctgaggcctaaggaggacaggagacccaacccctgtgggccccaggagccttcctgtcctgacatttcacagaaactgcagaggaagtgcaggcccaacctttggttccacctggggactgtcttcagggaacactgacctttcccagtccccaaattcccaggacctgtctgacctgactaggtgtgcctccagctccctgatagcttggattttatctctgggctctgggctgctttctgaggagctcactaagaagtccttggtgccaagtgcaggacttgcccctctgctccatatcccgggtctgcaggcacaggggacaggtcctgctaggtgaggctggcaccctcttccaggagggatctctcatcccaggccctagggacaggttcactgggctttcttttctcacttagaatctcttagtctttttgtttccttctttaagagtacaactgctttttggtgaaatcatgtgtatacatcaaagttaacagactactgtcacaagcgcatatatatacacatcctcttcctagatggggtaaccgtggacactctgccatagtcgtctttttgtttctctctctctaccacaagtgagactattaatagcactcttctatgcagaccataatcatattctccagttgcacaagaacgattcttatagttgctcaatttccttgcctttcaggaccctgaagtttcccatgcccacatttggttgccatgtctctctgatccaacagtattccttggaagccgaggcttatgaaacattttgcaaaaagttccacaagaaaactcaagttccttgtgcacagttggaccatgttcattgtgtgcagtagaacctcgttccagtgttgagtccattttatgttttgaccatcaaagggaagggcattatgacttttggggactgagtcgatggaggaaagatagcagtcgatgatgaccttatgcactgacgtgtatgtggccaatgtctatagatggatttggaacttgaaggagctgttcgttctgcagatggaatttccagtgccgcatctccaccacccagccactagcactcggcaggtgctctgtaagaggaagcccttcactgccaatcagccattacacaggtgaaggtgagtgagacttaatagctattaaccctcaaaacaaactgaggaataaactcaggttcacaaagtgactttgcgggaacagcctgaggaagcaagttaattagtagcagaaggttttgcccagagcaggaggaatcacaggatcactgaggacctagtgataccatggtgtggaggtgctgtgaggcatggtgacattcaagaaaacctgttctctacaaacacctacctacccacaggcacagcagacaccccagctatgccaagggctctgtcttcctctagagtaagagcctggtagcaaacaggtatcctctgaaaggcaggtgccccatcagtcagctctgcacgactgaaacaaaaggaaaattgccagagaactttccagaaaacagtcaacctgcttgtgctggtgcattgatggtgacccaggatcagtggaagtaacagtagcttaatttccccatggctgcatgatggacaccgggagagaagtgtggaggcggattaaccaccactctaagtggcttcagccctaggtaagcaggaacaagtgagggggctgagcccacttgtgtctaatcagtcccagcctcagcgactgcatcctggagaccaacagggagtgtatgcgctcagcccctcccagattgctgagcataagcaagaaatttccctccgcacacctgacgcaccacacacctgcccccagctcctcacttacaagacaatatcaaatcagacagggactggtctgggtcccagatcccctcaggttgccgctgtcctctcagatccccacacacagcagactcttcccctcacactcctgttccaggttactcttctccaatatgatgggggtttgctttcattgtttctgtattttttgtatttttatgggtaagctgagccccttttacctggtcttgagtcaggcaggggccacacagagaagaggaattcctccccaggggccagcagtccacggatcaaggcatcagggacctgagcagtaggttctgttcctatgcctggacccaggaggcccatgagcctccagcagtcagtatggagcagccaccaggggggcagcaaagagtcacctgggaaagccacctcgggatggggtggacctgggcatcagggagatgctgacatgcagggagggtcagtgaccacgacctgacacctggagggaaaataggtccttctttttctagagtgttgtccttgacactgatgtaaaaattctagcatcaaattttatcttcagcttttgtagatgctcctatttccctgacaaaggtccaggcacttgacttccccacacatcctctcctcacacacccagttgtgctaaaatgctgtccctgtcatgcacagtgtccttcctgaggtgacacgtgtccccctccctgccctttgctctgggagcccctgtcctgtagacacagcagcttcttcttccctggctgctccccatctccactgtccctgggctttcccatctgtctcctgggaaagctgccaaatcacaggtctcaatttccttgtgaggcacaaaatagttgctcattaaccttctgttgacttaattaagtttttaattccttgatttgttttccccagcaactgaagacaacttagtcataataaacattcacttccaggggtcttgcagtttgctgacccctctcattctctcatggagcaaacattttcttgacctccttatctgtcattggtcctcacagcaccctggggacactgaggcacagcatgtacgacctgccctggagctcacagccaacgaggaaacttaccgcatcccatggatcttccaacactccatgtgcacttggcaaccaagaaattttattcttctctagcactgaggagctgtgccctggggtggggtctgtacctatccaaggcacatgctgtcacctgtagagtgtggatagagggtccttgcattaggttctggaaagtgtcttcaaaaacggatttaggcctacacccaaaatctcctctctggcacaaattattcatgatcaggatacatctagaggcctagaccaaaattcaccacctccctcctgagccagaatggaatggaggaggggactggggaccccagataatttccccatcaccactgtgactctatggccacctcctgcaacagttagggataatcacataggaagggcttcatgtatcctaggaaaaacacccaaagtcatttatgagctctaccatgaccaagtgagcccaggagtcgggttgagcacagcgtggtgtggagatatctgcagagaccgtggaaccagtttgtaaaggagatcctgtaggctgagggtgagagtgcaaggccactcctccccctctctgcatcctttggggctaagcccttctctggaaaccacaaagctcctccagtagcagcccttgactctgctgatttgcatcacaggctgctctcttcagcaaggggataagagagggctggaaggaacctgcccagcctgggcctcaggaagcagcatcgggggtgccgcagccatggcctggaccgctctccttctgagcctccttgctcactttacaggtgctgcccccagtgtcccagccacctacccagctccaaggctctgggtccagcctggcctgacagtgatctcagcagggccctgcctgtggtgtgcaggatgctcatgatcctgctgcagggggaggggctgctggaggtgaaatccccccacactgttcttctgtgctcatggtcccctgaggacacttctattcctgaaactcaggccaggcaggtgggaaggcattgttgggttgagcctctcagtttcaagtctattctattctctccccttttcttgcaggttctgtggcctcctatgagctgactcagccactctcagtgtcagtggccctgggacagacggccaggattacctgtgggggaaacaacattggaagtaaaaatgtgcactggtaccagcagaagccaggccaggcccctgtgctggtcatctatagggatagcaaccggccctctgggatccctgagcgattctctggctccaactcggggaacacggccaccctgaccatcagcagagcccaagccggggatgaggctgactattactgtcaggtgtgggacagcagcactgcacacagtaacacaggcagatgaagaagtgagacacaaaccctttcgccatctatgtcaccctctttctctaattcaaggaggactatgaacaaagccttacgcagatctggttaaattctctttaatctctgcccccagcctgtccctccctccagtccttcaggcggggtctgcagaaagtgcatcagtagttcatttagggtgatgtgatcaggatggactggtgttttggtgactcagctgtgacttgggaaaatagggcctgcatggaagatcagactgaggtagacatccacagttgtctctggatttccataggtggtgacaggccagtccttgccccaaatgtcctagatcagtccccagaactgcccagctcaggctcctgtggtagcctgtcattctttagagaaacaccaatggagtagacactgtgggatctgcccagatcccctgttctgagcttacccactaagcactactgggagcttctggcaggtcagagctgtgtcctcactggaaagtgctgttcggtgcagaaaacagactcctccaggtctatgccctttctcagtgaggttagatttcatgactgcctgaggccgagttctcgactctgcctcaatataggaagacctgaaaatcctcccagctccacagctctctgtaggaaagacttgagacctcaatgagggtcagggtctcctgcccagggttgcctccctcacctcctttcacatcctctgtgcatgcaattcctcatctcagagtctgcttccagggaacccaattaagatcaccagccatccccaacatgggccatgtgggacttcaggaggccactgtatgctggaaagcacctgtttattcctaaattagcactgtgagtatccacacgcccaatgagatctgagtgtttcttgcatttgcatggaatgagaagggagcctgactcgccaggtgctctggggtctaagggagagttggagtcagatctccctgcagggaaacctggggcaggaggagcagccttaccccatgcagggaccacagatgcacccacagggtgagcttaagtatggacactgcctacctccaccctccacatcctgtgtaaaaaatcattctttccacccctcctccagcctatcaaagttgacacttaaaaagccaccacaacccacccttgtcaacaggaaacccattcacatctccatcagccacacaatctccacataaagattcttcaaaaaataataacaatagccatgcaaagtatatgatatatatcataaataattgtacttagattatatatgaaaatgatactctttttgatatgctaggtaaataaaatacattatttaaactcattgacttcttctctttgtatttataacatgatgactagacagtgggattcccatgaggctcacatcacattgtgattgaacaaggctggtctgcagggcttcaggttacaggggctgtggagtgacctggtgcaggaagccccgtctccatccataggacatcagtgtgaacccagggagaggcgctggtataagagagatgagaacacaggtgtgaaccacctgcttgtgcaggggactgagccttcactttgagccaaataagttttctttcccaagttcgatcctgaacaagagggctttctggacttctttttgttttcaggtttgtgccccttcaggtttggggctgtctggagtcccagccaggggacagtgaggaaatccagcagtctcacactgactctgttgtatttcatctgctggggccatcccaaactgctgcgtaccatttcctttcctggtgctcaaatagctgctccatgcacttgtcatggttttatagctcaatctagatgggaagacaggatagtgtatgttacaatatttaaatagaacctgaatcccttaatagttattttaatatggaacattaaaagagttgcatcataggcaatggggaaagatgaagaaagattaaacgcatttggaggaaaaactaaaaatgtctttattgaatgtctgtgtgtcttcagtgacgaagggttgagagaggtcagctttaggttgtcctgaggatgtgctcagatgggggaaagtaagaaagcaggaaacgtgcatctctgtgacctgacacataaatcacagtaaaatggaagtaaatctttcaataaacctttcaagataacatcactctggtgcacatagaaaggcctgttagcaaactttcccttttccctgctggctcatatccccatggatcacctgtatgcagaacggactctgtggtctccatttatcaggctgagaaccagaggctgggaaggacaagtcacctgctcatgagtgggaggggcaggattgggagcagcggactcaggctcaggactgtggccctggttggtgctccttgttcccttcacagggtcccacccacatgtgcccgtgtggatgtgggtgcactgcctggggtggctgatgtgctccagggatttgatggtgcagatgcttcaggacaaagcatgggagtggggatgggacgagctgccgctgggcagaccaaggaccaacgccacccagcagaggcttccagtggggttgggcagccccatttcctgagaatagagagaacctggcaatgagtgccagaaagaagttacttcgaggtgtgcccaggcctggagggtcacagagacacaggcaccacacagcagagacactgaaggccaagagctcactcaggtgaagggcttcaacagatttttctctcctgagcaaatcacgtgcaaagaaatcaacttcctgtcatcagaatagacaatcaggactttagtctccttggctgagccccgctgtcaagggaagcagaagtctctaagcccaggcccaagtgagggtggggtgagaagaggagctcaggatgcagatttgcatggaggtcccgcccttctctgaggcagagggataagacagggctgggggcaggcccagtgctggggtctcaggaggcagcgctctcaggacgtcaccaccatggcctgggctctgctcctcctcaccctcctcactcagggcacaggtgatgcctccagggaaggggccacagggacctctgggctgatccttggtctcctgctcctcaggctcacctgggcccagcactgactcactagactgtgtttctccctttccagggtcctgggcccagtctgccctgactcagcctccctccgcgtccgggtctcctggacagtcagtcaccatctcctgcactggaaccagcagtgacgttggtggttataactatgtctcctggtaccaacagcacccaggcaaagcccccaaactcatgatttatgaggtcagtaagcggccctcaggggtccctgatcgcttctctggctccaagtctggcaacacggcctccctgaccgtctctgggctccaggctgaggatgaggctgattattactgcagctcatatgcaggcagcaacaatttccacagtgttttaagtcaatgaggaagtaagatcaaaacctgccctgggctctcaggccccttcttgctctgcagatgcttcctcacgctgtataagggtttcctgcaggatggccttgacaattctcctctctcagctcctctcctttcccaccatgaggtctaaaaggaaacctgctcgtgatttctcgttcaggactgtggcaacttccttttgcttgtgtgctctggtcccttaacgtgcaactattcctagctcttcaatgcagggacgtagggacaaggagtttactgcttggtgcagtccctcctgttttcaggaacatcctcattctaaatgcatcccccatctgccacactatgcagatcaatctggacagaagccatcagggggatggcttccagtttccaggaattgcatcttgttccactctgtgtccaccacgctctaatgaagatggccctcctagctggtctattcctctgcacctgggtcctgaagcagtgaccactttaagaagacttgaagatgtttttgagggattaagaacaaagaggatgctgctgtttttctttttattgctcctgctctttgccgaaattcctcaggttgctgagctggggagattttgagtgacaggctcagtgctctcgcagaattctcctcccctcacatcgctgaggccctgtcctggaaactcctcacaagtggacggtcttcccataggatgggggattccaaaatggctccacaggaaagagttaacctgagtccacctcccttcctcatggacatcgagcatttctaattttcatggctgtcaatacttttgtacctggaatccctaataatctaatggtgagaattgatttagaacacattcggacattagctgggtccaatatttaaattttctgagccagttgttaaatacagctattatcatatatagtttaggctccttaaacttcgattatacagattatatttaaaacaaagtaactagtttactatatatatttacaaagtaactactatataacatcatgttgtgtacctgaaatataaacactaaaatttatttcaaaaaccaaagtgtattgtctattgatgcataaaaaaacactcacaaaacttagcacactaagagaacacatgtctgtgaccttgtgacttggatgcacctagaattgggagtagcttagtttggtcattctcgctcctggttaatcacgaggttgcagccaagctgtcaggccaggctgcattcaggctacatctgccaaagaggttaggaactgtggaagcctccctctggctgtggaagcctccctctggctgtggaagcctccctctggctgggagacttccgcagttcctaacctctttggcagacgtagatcatctcaaggataaaggagagagtggagtgaaggcccctgtccttgtcctccatgtaaaaggccatcccatgcatgcactattttttattctttgctgagacatcctaggcatagagcactgccccattcattcaaaggttgtagagtattctatggtagaattttagccaactcacttttaatggttattatcactattttgatcttataaataacactgcagcgaacatccttatgtagactcctttgattttatatgtagacatgaccatagaataaatttctagaagtcaaattgctgagtcaaaaggatgtgtgcttgtaattttcactcactgtcctcagattctcctctagaggggttatctacaaattcgcaatgtcagccataaatattcgaacagagtacactggggaaagtttaaatgtttttcaacctagcagatttaaaaatgttatctttttttagttttgatttctcctgttctgcttgaagttgagcattttctctaatacttcagtgctatttatttttataatttggtaaacattttcttaaatgtccagataagaaggattttggtctgtggttcccaagagtcaactttgaggatattctgtaggtatttttagcaccatttatagtgtaaccatttaaacctataaaaaccactctcagctctggggccatggaaaaacaggtggcaggacagggatggcccacaggatgtggtttaacggtccctgatttgtagggtaatttgaagtttgagaattccaccgcatatgttctaggtggagatctctatttgaaggatactgtattttacctcctatagtggcctgaggcttttggataagaacatacttgtatcatctatttaattggatcttgggtcttcccaggacagccctgtgtcacagtctcatgtttttcatctcatccatttgctctgagttttcagaaagctttagtatatcagaaatagactgaccctaggtggaaaatcagaggtaccgggagcagcaaatggtcagggaagcttgcaccaactctggaataaaccagtacaggctcagagaaaaacatcataaaatcagcattgtagctgaaaccaaaaacatgcatgatctttgaagttctggggattataaataaataaatgaagtttaaggtttaaatgtgttgcaaatttacataaagcatgtagattttaaaactcagaatgcagcaatgaaatatggaagcttgagattttaagctgttaaggccctacaacaaattgccaggaacagaacaggaacttgatagtcataatgtcttatgctggaaattatcattttctctaaatgaaatttttttcccttttttcttagacataaggaaacatctcattgaacacccttcttttccactgtcaaacacccttacccagaaaggaactgtaacattaagtaggaaacaactgctttttttcataactattgagagatttctttatttgcacatcaaaatgttgattgtcaatgctaaaattggaattagtagtttaatatgcacacaagagattaattttgtttggattatcccatttctgtctattatttgtcttagttaactcagacatattctgcttttggtattttttgttttattttctttgccaactacatgtaaaccaaaaataaaattctaatgctcccccaacaaccccaccatctgagtggactctcttctcttggtgggggcactccaaagttaatctgaaagactggttcaggccatggcagaaaaggggtgtcagacatgtctcattaagcccttttcctttttggaattcaggaaaagccaacctgcacttaacatcaatacaaatcttaagtctgataagaaacatttacaatctattctctctgaagcctgctacctggaggcttcctctgcatgataaaactttggtctccacaacttattataacccagacattcttttctattaatactttcaaccaactgctatcagaaaaatttaaaatctatctataatccagaaggccccacaaccctgcctcccatcaccctcttgttttgacttatcctgcctttctggactgaaccaatgtatatcttgaatgtatataattgatatatcttgtctccctaaaatatataaaaccaagctgtgccccaacctccttgagcacaagctctcagggtctcctgagggttgtgttcaccagtcatggtcactgatacttggctcaggataaatatcttaaaatattttacacagtttgactctttgtcaacatatggctcttttcaaaacaccatttgacacccagacataacccgctgctaatgattacaaaattcaattttattagcatttaaattattactttaaattatttcaagaatgcatggatgtgatttcccccacatctaactcacaaatgttgctgatgctgacttgctcttttctttcagtcttagcaaataaagagggagtttacttttcttgataccagaagataacaggagaaagtaggtgaaactcccgaaagctgttatcgtttccaccctcaggatgaatcacacaaggagtcacctgcacttcatttggatgataaataaatgagatggatcttagagttggtgctgatctagtcaatgatttgggatgttgggctgaggtgaatgtgtttcacaggtgagaaagacatgagttttagagtccacagtgtggagggttattggctgaagtgtgcccgagaattcatacaatgaagctctaatcacagtgcatgaatgaattggaacataggtctttaatggggtgattaagtgaaaatgaagccagtaggatgggttcttttccatctgacaggtgtcctctgaagatgaagaaatttgagcacacagaaatgagacaccatagatgagcatgcagaggaaagatcacgtgaggacacagaagaagggagtgatttgcaagccaaggagatgttacagtagataactaggcagacgtgacagggcaggagaccccctgccccaggaatgtcacgcaagcatcagatgatggtcaggtagttgttaaactgtctctgtgaattaataattagtcacagccggcaccaaggaaaggcggtctcccaatagatagaaaatacctgaagctggtgatcagcagctttctgataagatctcaggccttgggtgagtgggctcaagcaggcaaactaaaaggcaaaacagaggccaggcatggtggctcacccctgtaatcccagcactttgggaggccgaggtgggccaatcacttgaggtcaggagctctagaccagcctgaccaacatggtgaaaccctgtctctactaaaaatgcaaaaattagccaggtgtggtggtgcatgcctataatcccagctactcagaaggctgagccaggagaatcacttgaacctgggagatggaggctgcagtgagccgagattgcatcactgcaccccagcccaggtgacagagcaagggtccttcaaaaaaaaaaatgcaaaatagcagagtttaacctggatctgagactcccatgctgcccttccctccagccctacaggcaggctctgcagagagtgaatcaccagtaaatacacaaacaaatatgattacgttccttttgtttaagaagtagaggaatgattgaatatattaagtgaaaataaggaataccaacacaaagaaaaatttaactgtaagtatggttaaaaatacactgggtgagatagacaagttagatgtcgcaaaacaagagattagcaaactgtatagtgtaacactagaaactattcaaaatgaaacacatagcaaaaaataacgataaaaataaacagcatcaatgagatgtaggagaacttcagacaggctaatatacgtgtaattgaagtcctcagaatagaagatggggtaagaatgaaaagaaaaaatatttgaatgaataatgacaaaatatgttccacatttggtgaaaaccataaactgatataacccagaagctcgataaaacttaagcataggaaacacaaagacaacaactccaaaacacatcataatcaaattaataaaatctagtgatgaaaagtagtcatttaggacaaaactacaaagagcagatttctcattaggagcaatgcaagcaagaagatagtgaagcaatgtcttgaaaataataacatgcaaaatccaacaaccttgaattctttatccaccagaaacatctttcaaaactggaggcaaaataagactttttcagacatgtgaaatcctacagaattgatcaccattagactctcgctattagaaatgataaaggacacccctaaacagaaagaaaataatcctacattgaaatgtggtttgacacaaagaaatgaaaaatcagatatggtagctacctggatcaattagaaacctctgtattatgtaatgtctataaaaagaacagtaatgtctataaagagaactgttcagagaaaaattaataagaatacactatgatttgtaataaaaataaaagcaaactatatgacaaagcagaaaagcgaaggtgggtgaagaacatgtaataatggttttgtactatatgtgaatatataatagcacctgaaggtagattttggtaagttatgtatttactgtataccctaaaacaaccattaaaataaaaccctcaacaaaaaagaaatatggctagtacgctatattagacttgtccaccaaaaattaataggatatgtatggatatgaatatatatgtataatgtatctatatggtgagagagacagacagaaacttattttaagaagctggttcatacaatagtggtggctgatggacaaaatctgttgggcaggctataggctggaaatttaggtaagagttgatattgccgtcctgagttcaaattctgcaagaagctaatgtttccccaagacagcatcagctgttattatgcacactggctccaaatcgaggaaagtgtcccccctgaccattagcagagctcatgccaagaacaaggctgatcattaacatcaatcactgggaaacttcagtatttattctaaaaaccttgaactcattaatgagactcacacacattgtggaaagtagtattgatacaggagacagaaattatttaggcagatagtgagggtgacagggtcctcagcagagcttctcatctaacaaaaagcagccctaaaaatcatttcttttataacaaagagcagcctgaaaaaatcgtgctgcaaacatagataagcaagctggaagcttgcatggggcaatgccagcagctatgccaatagaaaagtactacctgggggtcagccatgtccaacatggaggctccatcttccctttttttgtcaccatgtgtatagcaatagagaaatgggcaacatggagcagctcaggcagataacccacctgcgtaataacagattagggcagggttggccagaaatgtgcaccctatgcaaatggtacacctagtcctaatcagtttttcatgccctgtgcaagtagcacacctggtctaaccagtctttgacacccaccttatgtagatcagatactgcctcctcaccagctcatctataaaattccctacatttcactgcagatccggcaacccatttttctgggtcccctctctgcagcagagagctattatctttctttcacctattaaacttctgctgtcaacctcatttgttgtcagatcatgtcctagttttccatggccctgagacaatgaactttgagtattcaccccagacaatgaggctatttcaatatgcttatacaaagtctactggtttgaatatttatcacatttgaaaaatatcttcatgacaatgtctacactggtgcttaacaaaatcaacctggtaccatgtcttagccaatctgacacttaaaattcaccaccacttaagccaggagctaaagaaaaccaatttttaaaaataaatttcaaaagagagaaaaaggaaagaggaacaatgaacatataagacaaatagaaaaaaagagcaagatggtatattttaacaaagtatattcctaatcacattaactataaatggtctaaataccacaattaaaaggcaggtattatcatctatattctaaaggagttcaggtagggttggtatgctttcttccataaaaatgtgataccagtgaagctatttgggtataggtgggcttttcttagcacggagattttaaattgctactttaatatctttaagtgtcatagacttattcagattttctatgtattcatgagtcaattttcataatttatgtctttccagaaattttacttcatttatctataattttggcatttactgttcataatattccctataaccattctcacccttttagtgtctatagtgatgtcattattttagccatggttttggcaacttgtgtttctttttcttttttttatcatggtcactttacctaaagataaaaatctattgattttattaatctttttgaagagccaagtgttttttttttttttttttgaggttttctattgttttcctattttctatttcatgaatgtttggctgtgatccctattattaccctctattcacttagaatttgaatgttcaccttttttaggtttatgaggtagaagcttagattattttctttaattctttcttctttccaatactaagcatttaatgccatagtttttcttcaaagcagacttagctgcattccttaaattttaatatgttgtgtttttatgtttaaaaaggttcagtatcttctaatttatgttgtgatttttctttgattcatggattacttaacagtctgttctttcactttcaaataattgaagatttcctatggttcttccggtattaattcaagttaattagttaattctgcattaaattatatcttctatgattttcatcctttcaaatttatcaatatttgatttatagcctaaactatgaactatcatgaaaaatgttccatatgtatttgaaaagataacatgtattctgctgttgtgggtgcagttttctacaaatttattataattaagataacttggcaaatggttcaaatctatattcttactagatttctgtgtagttattttgtagatctctgagacagagctattgaaatgaacaacacaaactgtagaatttcccaatgattattttgagagagatcatttttaaaatcatggatctaaataatttattctcctcacaaaatgtcttctatgatttccaaatactaatcaagggaagaaggcagagttaaactcacacttgtagataccacgggaacagtgagtgatcatgtgatgtgcctccagaggttaggctaatgtagttagagtggtttatatttatttatttatttatttatttatttatttatttatttagacagagtctcgctctgtcacccaggctggagtgcagtggcgctatctcggctcactgcaagctccgcctcccaggttcatgccattctcctgcctcagcctcctgagtagctgggactacaggcacccgccaccacgcccagctaattttttgtattttttagtagagacggggtttcactgttagccaggatggtctcgatctcctgatctcgtgatccgcccacctgggcctcccaaagtgctgggattacaggcgtgagccaccgcacccggctggttttttttttttttttaaacacacagttgggctaaaatatccatgaaaaaatttgaagcatgtaccttgaataaaatatgaaaatcaaaaaagttaattgcacacgtacaacattgttaccacggtgcctgccgcatgggaaatgaacaacaagtgttattaattcaattctattttcttacacattcaatgaatatgtattgaaacaaattcactgaatggtcccagatactgaataggtccttgagatgtactggcaaacaagacaaaaaaaaaaatacatgttctccgggtggcctcatggaagatggtggagtaagaagctccaagaaatggtccctcctgtgatataactattgaagtggcaagaaccatcagcattcactctaataaaactatggtatctcatcccatatttgcagcatccagggaagagctgaagaagaaagagacaggcttaaggaagtctctgtcaggtagatctctgaccacagagataactgaacagaaatttcgtggatcactctgacaagaaaggtagtccttgcgaaaatattcaggaaaagtcacaacacaaataaacaactgcacccctcagatgaacaactgcacaatatcagccaaggggcataatctgataatctgatcctgggagttaacaacatcacaatattcaaaatactcagatctcaacaaaaatttgcacagcatacaaagtcacaagagagcacgactcattcccaggaaaataatcgactgaaaatcttccttaagaagcattcatttgctcccatcttctcccttggttatataacacgtccttccacatatacttgattagagcttgtgccccacaaacatgcctggcatgtacattagtgacttctgagagggaggtgggggcaggaaacagtccctctggatacatttcgcatcacatgaaccagtgaacacatctctgcaaggtcctgcattctaataaacaagatttttctgtttaaaagaaaacttaagtctttcagaaaactgcatttcaaaagggaaccttgtctctgctgcttgggctgcagtgaggacagatttactaagtgctggttgctgtgttttgtcttctagtgtgggtacacacatctagaaaagttttaaagaagattggggaacccccacccagcactggtgggactttgagtttgctacggttgtgaacagaacatggaacagaggacaaggtggcccctcctgaagatgagagttttgcttcttgctggaagtccctggactcctggagtgttctcaggggacctcttaacaggatctcaagggaaagaatccagggtactggatccacacaatcaacctcacggatttctgagtaggtcattaacctatcatgcctttagcgttatctcaaattatacatggtatcatctcaactaatgtctaaaacaatatacggcatagatatctaaagaactagtggtacatggaggatggctttctacctctgagccctagaagggactgtgggccttggtttggggactctaatgactctaagtcccctggtagtgctcaagtgcaaagggaatgactgacgctttttttgaggccccttctattgtgtaaaatttattctgtacttgtgacacccacctggtccttcttctgaacatgggaaattgccaagatgaagtctccaggctaacggctcagacaggagctcagataaacatgctgggaagtggagagcaaattgacattcaaagctcctcccaacaagcttcaagaagagggtaacacaagaagtccttgtaaccaggttccacggggcagcctcaagcagagctcttggaagtccctcccaccacggtctgggtctccttctacctcctgcccttcattttctccacaggtcagaacatccagggaattcagggaaaccctttcactgctatttctccacaagctccaatcctcaggggcattctttccagttctcccgagcattcggcatcattcatgaaattctatgtttccaggtctctgtgctctggctgtgctaactcagcccccgtctgcatctgcctcactgggagcctcagtcaagctcacctgcaccctgagcagtgagcacagtacctacatcatcaaatggtatcaacagagaccagagaggtccccctagtatataatgaagtttcacagcgatggcagacacagaaaggaggacaggatccccaattgcttctcgggctccagctctggggctgactgctccctcaccatgtccaacctccagtctgaggacgaggctgagtatcactatggagagagccacaagattgatggccaggatgggtgagccacacacagtgacacaaagggaaagtgaggccaaaaccccccacctcccctttctcctcagggactcagagtcagcagtcacatgtccccttccaagtccctgagacttctgactctcctcctgcagagacacccctaggcagaggcagatgcaggccatgatttaggccattttgacaactcatcattctgtctcctcaacaccagtctgtggggaccatactaggagagaccagagcagcccaggcagaaggaccctgagagagtggccaggctgagatgaccgtgtcccagtgtctcactgtgccctgtgctcccttaccgggctctgccccaggaaaggacatggatcttgacctgtcaccccccatttatgagagttcaatgtgtgtgcatcctcgttagcacttgatattgtcagtttttccttaaagtctttcagatagagctgtagcgatatctaattatgtttttaacttttatttctttaatgacttattatgctaagtatcttttcaggtacttatctgtcctttgtatgtcttctttggtgaaatatttaatcaaatctttgcatttttaaaattcaggtttctcaggttcacatttcctcatgtatttgtatgagtttatatgcatgcatgtgtgtctatgcattccattctgtgtgatttcccaacatgtatcagcacaggtatccaccactacaatcaagacacaaaccaggtccatcacaacatttcctggtgtttccctttgataatatctacctcctcccacccagttccctcccttgcccaaccctggcaaccactgatttggttccctattcctaaaattttgtcttgcaaaaacgtgatacaaatacaaccctattgtagtagacagactttggggttggaattttttacttagcatcattccctataaagtcattggaaaggtgtgtgtatcaatagtcagttcctttcaattgctgagcagtatctcttggtattagtttaacaaaacctgatgaattactcacccaccgaagggtatctggattgttttcagtttggagctactacacctgagggtgctacgaacatcagtttgtatgtttcttgtgaacataagtattcagttctttgaaatgaaggtccaatattataattgctgtgtcatacactaattaggtctttagttttctgagaagctgacaaactgttccctgaagtgaatgtaacatttttttctggccagtaatgaaggaatgatcaaatttctctgcttctttgggaattgtgtgtttttactctttttttaggtaactattgtgataggtgtgtagtgatattccattttttaaaatttcatgtctctgatc

SEQ ID NO: 712 - DNA, 654 bp, Homo sapiens
atggaccccaaacagaccaccctcctgtgtcttgtgctctgtctgggccagaggattcaggcacaggaagggaggtatattagcgagcatttttggtgtagaagtttgggctgcaatccggtaaatgatgcttcagcacaacggccaggggactttcccatgcctttcatatctgccaaatcgagtcctgtgattcccttggatggatctgtgaaaatccagtgccaggccattcgtgaagcttacctgacccagctgatgatcataaaaaactccacgtaccgagagataggcagaagactgaagttttggaatgagactgatcctgagttcgtcattgaccacatggacgcaaacaaggcagggcgctatcagtgccaatataggatagggcactacagattccggtacagtgacaccctggagctggtagtgacagactccatccaccaagattacacgacgcagaacttgatccgcatggccgtggcaggactggtcctcgtggctctcttggccatactggttgaaaattggcacagccatacggcactgaacaaggaagcctcggcagatgtggctgaaccgagctggagccaacagatgtgtcagccaggattgacctttgcacgaacaccaagtgtctgcaagtaa

SEQ ID NO: 713 - DNA, 510 bp, Homo sapiens
  misc_feature (20)..(20): n is a, c, g, or t
  misc_feature (25)..(25): n is a, c, g, or t
  misc_feature (27)..(27): n is a, c, g, or t
  misc_feature (31)..(31): n is a, c, g, or t
  misc_feature (38)..(38): n is a, c, g, or t
  misc_feature (52)..(52): n is a, c, g, or t
  misc_feature (55)..(55): n is a, c, g, or t
  misc_feature (65)..(65): n is a, c, g, or t
  misc_feature (67)..(67): n is a, c, g, or t
  misc_feature (78)..(78): n is a, c, g, or t
  misc_feature (96)..(96): n is a, c, g, or t
  misc_feature (117)..(117): n is a, c, g, or t
  misc_feature (139)..(139): n is a, c, g, or t
  misc_feature (145)..(145): n is a, c, g, or t
  misc_feature (492)..(492): n is a, c, g, or t
  misc_feature (506)..(506): n is a, c, g, or t
tttttttttttttttgaaantggangnattnatttttnattgcaggtaaaantgncctggcaagnanactaaaattgnataacttatggttttagncatgtagataagtacatgagnagtaaatcacatttctatatgnaatagnaaatatccactttattcatgttatagattataaaactatactaaacaaaaagtaatcatttactattacaaaaattattaagaaaccattacaaaaattctctggcctactaattttcaatcaccatagaaaatacagtatttaataatgctgctgctgtacttacataaaacatattaaggaatagatgttatatttctgtgtttgaatattgagcttaaacataaaacatgtttgaaatgtgtttgtgtgtgtctctcacacacacacataacatgtacatacctgaaactcatactgcaattgcaacacatcttagtttttccttttaacatccaaggtacatntaaatgagggtatntcta

SEQ ID NO: 714 - DNA, 402 bp, Homo sapiens
  misc_feature (1)..(2): n is a, c, g, or t
  misc_feature (5)..(6): n is a, c, g, or t
  misc_feature (10)..(10): n is a, c, g, or t
  misc_feature (382)..(382): n is a, c, g, or t
  misc_feature (395)..(395): n is a, c, g, or t
nnatnnaaantccccgcaccaagcgcttaacctcattggggtggaggagaaggcggcggctctctggtccgcagcggcaacagtaacgaaaaacagggctaatggactgctgaattatgaagtatttcagacccagtagtagaacatcactctgccactcactcctttatctcctactagttatttaaattggacttttaatatcctaccagctgctcttcagacacacatggtgcattgttgccattccccagattgcatctttgaaacacagggctcttaggtaaccttcagcgaacaaagagggcaacctcccaggatacggtcttgctgggggaggggagtcatcgtgactgcccctctaggcttttgctgggatctnggattttgaattnccacttt

SEQ ID NO: 715 - DNA, 352 bp, Homo sapiens
  misc_feature (241)..(241): n is a, c, g, or t
  misc_feature (273)..(273): n is a, c, g, or t
ttatttccaaacaaaatagtttaaaaagacaggagctagcttgaagtggattctactgggcaaattttggacaatttcaacaccaaaatgaatcatgactggaatggactataatacattgacttcagaataagaaacaatcagtccagctgatgcttaaaaaaaaaatcagtttctaagagaagaaaagctcttctttccaaaagccaaataacaattacagaaagtgaaagaaataganaatcaccatttatatccaatataataactaangtaagactcagccctgtgtactaaaaccactgagtgaaaggtaagggaatgaggttattcacatagtattaggtttctc

SEQ ID NO: 716 - DNA, 2514 bp, Homo sapiens
ctctcgtcgcccccgctgtcccggcggcgccaaccgaagcgccccgcctgatccgtgtccgacatgctgcgccgcgctctgctgtgcctggccgtggccgccctggtgcgcgccgacgcccccgaggaggaggaccacgtcctggtgctgcggaaaagcaacttcgcggaggcgctggcggcccacaagtacctgctggtggagttctatgccccttggtgtggccactgcaaggctctggcccctgagtatgccaaagccgctgggaagctgaaggcagaaggttccgagatcaggttggccaaggtggacgccacggaggagtctgacctggcccagcagtacggcgtgcgcggctatcccaccatcaagttcttcaggaatggagacacggcttcccccaaggaatatacagctggcagagaggctgatgacatcgtgaactggctgaagaagcgcacgggcccggctgccaccaccctccgtgacggcgcagctgcagagtccttggtggagtccagcgaggtggctgtcatcggcttcttcaaggacgtggagtcggactctgccaagcagtttttgcaggcagcagaggccatcgatgacataccatttgggatcacttccaacagtgacgtgttctccaaataccagctcgacaaagatggggttgtcctctttaagaagtttgatgaaggccggaacaactttgaaggggaggtcaccaaggagaacctgctggactttatcaaacacaaccagctgccccttgtcatcgagttcaccgagcagacagccccgaagatttttggaggtgaaatcaagactcacatcctgctgttcttgcccaagagtgtgtctgactatgacggcaaactgagcaacttcaaaacagcagccgagagcttcaagggcaagatcctgttcatcttcatcgacagcgaccacaccgacaaccagcgcatcctcgagttctttggcctgaagaaggaagagtgcccggccgtgcgcctcatcaccctggaggaggagatgaccaagtacaagcccgaatcggaggagctgacggcagagaggatcacagagttctgccaccgcttcctggagggcaaaatcaagccccacctgatgagccaggagcgtgccggagactgggacaagcagcctgtcaaggtgcctgttgggaagaactttgaagacgtggcttttgatgagaaaaaaaacgtctttgtggagttctatgccccatggtgtggtcactgcaaacagttggctcccatttgggataaactgggagagacgtacaaggaccatgagaacatcgtcatcgccaagatggactcgactgccaacgaggtggaggccgtcaaagtgcacagcttccccacactcaagttctttcctgccagtgccgacaggacggtcattgattacaacggggaacgcacgctggatggttttaagaaattcctggagagcggtggccaggatggggcaggggatgatgacgatctcgaggacctggaagaagcagaggagccagacatggaggaagacgatgatcagaaagctgtgaaagatgaactgtaatacgcaaagccagacccgggcgctgccgagacccctcggggctgcacacccagcagcagcgcacgcctccgaagcctgcggcctcgcttgaaggaggcgtcgccggaaacccagggaacctctctgaagtgacacctcacccctacacaccgtccgttcacccccgtctcttccttctgcttttcggtttttggaaagggatccatctccaggcagcccaccctggtggcttgtttcctgaaaccatgatgtactttttcatacatgagtctgtccagagtgcttgctaccgtgttcggagtctcgctgcctccctcccgcgggaggtttctcctctttttgaaaattccgtctgtgggatttttagacatttttcgacatcagggtatttgttccaccttggccaggcctcctcggagaagcttgtcccccgtgtgggagggacggagccggactggacatggtcactcagtaccgcctgcagtgtcgccatgactgatcatggctcttgcatttttgggtaaatggagacttccggatcctgtcagggtgtcccccatgcctggaagaggagctggtggctgccagccctggcggcggcacagcctgggcctccccttccctcaagccagggctcctcctcctgtcgtgggctcatttgccaggctcaggccaggtctggacagctgtgactctcctcaagccaggactaccgaccagccggctatgggcacattacgtgaccactggcctctctacagcacggcctgtggcctgttcaaggcagaaccacgacccttgactcccgggtggggaggtggccaaggatgctggagctgaatcagacgctgacagttcttcaggcatttctatttcacaatcgaattgaacacattggccaaataaagttgaaattttaccacc

SEQ ID NO: 717 - DNA, 1268 bp, Homo sapiens
cgccggcgctgccggggggccgccatggcgcgaggcggccgggtacggtgcataatggccaacttctctgctgccttctcagtgaactacgacaccaagagtggccccaagaacatgacctttgacctgccatcagatgccacagtggtgctcaaccgcagctcctgtggaaaagagaacacttctgaccccagtctcgtgattgcttttggaagaggacatacactcactctcaatttcacgagaaatgcaacacgttacagcgttcagctcatgagttttgtttataacttgtcagacacacaccttttccccaatgcgagctccaaagaaatcaagactgtggaatctataactgacatcagggcagatatagataaaaaatacagatgtgttagtggcacccaggtccacatgaacaacgtgaccgtaacgctccatgatgccaccatccaggcgtacctttccaacagcagcttcagcaggggagagacacgctgtgaacaagacaggccttccccaaccacagcgccccctgcgccacccagcccctcgccctcacccgtgcccaagagcccctctgtggacaagtacaacgtgagcggcaccaacgggacctgcctgctggccagcatggggctgcagctgaacctcacctatgagaggaaggacaacacgacggtgacaaggcttctcaacatcaaccccaacaagacctcggccagcgggagctgcggcgcccacctggtgactctggagctgcacagcgagggcaccaccgtcctgctcttccagttcgggatgaatgcaagttctagccggtttttcctacaaggaatccagttgaatacaattcttcctgacgccagagaccctgcctttaaagctgccaacggctccctgcgagcgctgcaggccacagtcggcaattcctacaagtgcaacgcggaggagcacgtccgtgtcacgaaggcgttttcagtcaatatattcaaagtgtgggtccaggctttcaaggtggaaggtggccagtttggctctgtggaggagtgtctgctggacgagaacagcacgctgatccccatcgctgtgggtggtgccctggcggggctggtcctcatcgtcctcatcgcctacctcgtcggcaggaagaggagtcacgcaggctaccagactatctagcctggtgcacgcaggcacagcagctgcaggggcctctgttcctttctctgggcttagggtcctgtcgaaggggaggcacagaattc

SEQ ID NO: 718 - DNA, 1760 bp, Homo sapiens [sequence omitted]

SEQ ID NO: 719 - DNA, 1225 bp, Homo sapiens
cgcatctggagaaccagcggttaccatggaggggatcagtatatacacttcagataactacaccgaggaaatgggctcaggggactatgactccatgaaggaaccctgtttccgtgaagaaaatgctaatttcaataaaatcttcctgcccaccatctactccatcatcttcttaactggcattgtgggcaatggattggtcatcctggtcatgggttaccagaagaaactgagaagcatgacggacaagtacaggctgcacctgtcagtggccgacctcctctttgtcatcacgcttcccttctgggcagttgatgccgtggcaaactggtactttgggaacttcctatgcaaggcagtccatgtcatctacacagtcaacctctacagcagtgtcctcatcctggccttcatcagtctggaccgctacctggccatcgtccacgccaccaacagtcagaggccaaggaagctgttggctgaaaaggtggtctatgttggcgtctggatccctgccctcctgctgactattcccgacttcatctttgccaacgtcagtgaggcagatgacagatatatctgtgaccgcttctaccccaatgacttgtgggtggttgtgttccagtttcagcacatcatggttggccttatcctgcctggtattgtcatcctgtcctgctattgcattatcatctccaagctgtcacactccaagggccaccagaagcgcaaggccctcaagaccacagtcatcctcatcctggctttcttcgcctgttggctgccttactacattgggatcagcatcgactccttcatcctcctggaaatcatcaagcaagggtgtgagtttgagaacactgtgcacaagtggatttccatcaccgaggccctagctttcttccactgttgtctgaaccccatcctctatgctttccttggagccaaatttaaaacctctgcccagcacgcactcacctctgtgagcagagggtccagcctcaagatcctctccaaaggaaagcgaggtggacattcatctgtttccactgagtctgagtcttcaagttttcactccagctaacacagatgtaaaagactttttttttatacgataaataacttttttttaagttacacatttttcagatataaaagactgaccaatattgtacagtttttattgcttgttggatttttgtcttgtgtttctttagtttttgtg

SEQ ID NO: 720 - DNA, 2069 bp, Homo sapiens
taacacgttgcgcccggcctcggcagccgcctgtcgccgcgggagcagccgctatctctgtgtgtccgcgtgtgcgcccggtccccgcctgccgcaccatggagagctaccacaagcctgaccagcagaagctgcaggccttgaaggacacggccaaccgcctacgtatcagctccatccaggccaccacggcggcgggctctggccaccccacgtcatgctgcagcgccgcagagatcatggctgtcctctttttccacaccatgcgctacaagtcccaggacccccggaatccgcacaatgaccgctttgtgctctccaagggccatgcagctcccatcctctacgcggtctgggctgaagctggtttcctggccgaggcggagctgctgaacctgaggaagatcagctccgacttggacgggcacccggtcccgaaacaagctttcaccgacgtggccactggctccctgggccagggcctcggggccgcttgtgggatggcctacaccggcaaatacttcgacaaggccagctaccgagtctattgcttgctgggagacggggagctgtcagagggctctgtatgggaggccatggccttcgccagcatctataagctggacaaccttgtggccattctagacatcaatcgcctgggccagagtgacccggccccactgcagcaccagatggacatctaccagaagcggtgcgaggccttcggttggcatgccatcatcgtggatggacacagcgtggaggagctgtgcaaggcctttggccaggccaagcaccagccaacagccatcattgccaagaccttcaagggccgagggatcacgggggtagaagataaggagtcttggcatgggaagcccctccccaaaaacatggctgagcagatcatccaggagatctacagccagatccagagcaaaaagaagatcctggcaacccctccacaggaggacgcaccctcagtggacattgccaacatccgcatgcccagcctgcccagctacaaagttggggacaagatagccacccgcaaggcctacgggcaggcactggccaagctgggccatgccagtgaccgcatcatcgccctggatggggacaccaaaaattccaccttctcggagatcttcaaaaaggagcacccggaccgcttcatcgagtgctacattgctgagcagaacatggtgagcatcgcggtgggctgtgccacccgcaacaggacggtgcccttctgcagcacttttgcagccttcttcacgcgggcctttgaccagattcgcatggccgccatctccgagagcaacatcaacctctgcggctcccactgcggcgtttccatcggggaagacgggccctcccagatggccctagaagatctggctatgtttcggtcagtccccacatcaactgtcttttacccaagtgatggcgttgctacagagaaggcagtggaactagccgccaatacaaagggtatctgcttcatccggaccagccgcccagaaaatgccatcatctataacaacaatgaggacttccaggtcggacaagccaaggtggtcctgaagagcaaggatgaccaggtgaccgttatcggggctggggtgaccctgcacgaggccttggccgctgccgaactgctgaagaaagaaaagatcaacatccgcgtgctggaccccttcaccatcaagcccctggacagaaaactcattctcgacagcgctcgtgccaccaagggcaggatcctcaccgtggaggaccattattatgaaggtggcattggtgaggctgtgtccagtgcagtagtgggcgagcctggcatcactgtcaaaacaatggcagttaaccgggtaccaagaagtgggaagccggctgagctgctgaagatgtttggtatcgacagggatgccattgcacaagctgtgaggggcctcatcaccaaggcctagggcgggtatgaagtgtggggcgggggtctatacattcctgagattctgggaaaggtgctcaaagatgtactgagaggaggggtaaatatatgttttgag

SEQ ID NO: 721 - DNA, 1618 bp, Homo sapiens
gctcttttctcgggacgggagaggccgtgtagcgtcgccgttactccgaggagataccagtcggtagaggagaagtcgaggttagagggaactgggaggcactttgctgtctgcaatcgaagttgagggtgcaaaaatgcagagtaataaaacttttaacttggagaagcaaaaccatactccaagaaagcatcatcaacatcaccaccagcagcagcaccaccagcagcaacagcagcagccgccaccaccgccaatacctgcaaatgggcaacaggccagcagccaaaatgaaggcttgactattgacctgaagaattttagaaaaccaggagagaagaccttcacccaacgaagccgtctttttgtgggaaatcttcctcccgacatcactgaggaagaaatgaggaaactatttgagaaatatggaaaggcaggcgaagtcttcattcataaggataaaggatttggctttatccgcttggaaacccgaaccctagcggagattgccaaagtggagctggacaatatgccactccgtggaaagcagctgcgtgtgcgctttgcctgccatagtgcatcccttcacgttcgaaaccttcctcagtatgtgtccaacgaactgctggaagaagccttttctgtgtttggccaggtagagagggctgtagtcattgtggatgatcgaggaaggccctcaggaaaaggcattgttgagttctcagggaagccagctgctcggaaagctctggacagatgcagtgaaggctccttcctgctaaccacatttcctcgtcctgtcactgtggagcccatggaccagttagatgatgaagagggacttccagagaagctggttataaaaaaccagcaatttcacaaggaacgagagcagccacccagatttgcacagcctggctcctttgagtatgaatatgccatgcgctggaaggcactcattgagatggagaagcagcagcaggaccaagtggaccgcaacatcaaggaggctcgtgagaagctggagatggagatggaagctgcacgccatgagcaccaggtcatgctaatgagacaggatttgatgaggcgccaagaagaacttcggaggatggaagagctgcacaaccaagaggtgcaaaaacgaaagcaactggagctcaggcaggaggaagagcgcaggcgccgtgaagaagagatgcggcggcagcaagaagaaatgatgcggcgacagcaggaaggattcaagggaaccttccctgatgcgagagagcaggagattcggatgggtcagatggctatgggaggtgctatgggcataaacaacagaggtgccatgccccctgctcctgtgccagctggtaccccagctcctccaggacctgccactatgatgccggatggaactttgggattgaccccaccaacaactgaacgctttggtcaggctgctacaatggaaggaattggggcaattggtggaactcctcctgcattcaaccgtgcagctcctggagctgaatttgccccaaacaaacgtcgccgatactaataagttgcagtgtctagtttctcaaaacccttaaaagaaggaccctttttggactagccagaattc

SEQ ID NO: 722 - DNA, 1473 bp, Homo sapiens
cgctctccgcaccgcgcttaaatgatgtattttgtgatcgcagagatgaaagctcaaattgagattattccatgcaagatctgtggagacaaatcatcaggaatccattatggtgtcattacatgtgaaggctgcaagggctttttcaggagaagtcagcaaagcaatgccacctactcctgtcctcgtcagaagaactgtttgattgatcgaaccagtagaaaccgctgccaacactgtcgattacagaaatgccttgccgtagggatgtctcgagatgctgtaaaatttggccgaatgtcaaaaaagcagagagacagcttgtatgcagaagtacagaaacaccggatgcagcagcagcagcgcgaccaccagcagcagcctggagaggctgagccgctgacgcccacctacaacatctcggccaacgggctgacggaacttcacgacgacctcagtaactacattgacgggcacacccctgaggggagtaaggcagactccgccgtcagcagcttctacctggacatacagccttccccagaccagtcaggtcttgatatcaatggaatcaaaccagaaccaatatgtgactacacaccagcatcaggcttctttccctactgttcgttcaccaacggcgagacttccccaactgtgtccatggcagaattagaacaccttgcacagaatatatctaaatcgcatctggaaacctgccaatacttgagagaagagctccagcagataacgtggcagacctttttacaggaagaaattgagaactatcaaaacaagcagcgggaggtgatgtggcaattgtgtgccatcaaaattacagaagctatacagtatgtggtggagtttgccaaacgcatcgatggatttatggaactgtgtcaaaatgatcaaattgtgcttctaaaagcaggttctctagaggtggtgtttatcagagtgtgccgtgcctttgactctcagaacaacaccgtgtactttgatgggaagtatgccagccccgacgtcttcaaatccttaggttgtgaagactttattagctttgtgtttgaatttggaaagagtttatgttctatgcacctgactgaagatgaaattgcattattttctgcatttgtactgatgtcagcagatcgctcatggctgcaagaaaaggtaaaaattgaaaaactgcaacagaaaattcagctagctcttcaacacgtcctacagaagaatcaccgagaagatggaatgctaacaaagttaatatgcaaggtgtctacattaagagccttatgtggacgacatacagaaaagctaatggcatttaaagcaatatacccagacattgtgcgacttcattttcctccattatacaaggagttgttcacttcagaatttgagccagcaatgcaaattgatgggtaaatgttatcacctaagcacttctagaatgtctgaagtacaaacatg

SEQ ID NO: 723 - DNA, 377 bp, Homo sapiens
gaggtgcagctgttggagtctgggggaggcttggtacagcctggggggtccctgagactctcctgtgcagcctctggattcacctttagcagctatgccatgagctgggtccgccaggctccagggaaggggctggagtgggtctcagctattagtggtagtggtggtagcacatactacgcagactccgtgaagggccggttcaccatctccagagacaattccaagaacacgctgtatctgcaaatgaacagcctgagagccgaggacacggccgtatattactgtgcgaaagatcccctaccttcacgtagcggggacctcacggagggtacttcgatctctggggccgtggcaccctggtcactgtctcctca

SEQ ID NO: 724 - DNA, 369 bp, Homo sapiens
taaaggaattcattagccatggatgtattcatgaaaggactttcaaaggccaaggagggagttgtggctgctgctgagaaaaccaaacagggtgtggcagaagcagcaggaaagacaaaagagggtgttctctatgtaggctccaaaaccaaggagggagtggtgcatggtgtggcaacagtggctgagaagaccaaagagcaagtgacaaatgttggaggagcagtggtgacgggtgtgacagcagtagcccagaagacagtggagggagcagggagcattgcagcagccactggctttgtcaaaaaggaccagttgggcaaggaagggtatcaagactacgaacctgaagcctaagaaatatctttg

SEQ ID NO: 725 - DNA, 4212 bp, Homo sapiens
  misc_feature (3879)..(3880): n is a, c, g, or t
ctccctcgctccctccctgcgcgccgcctctcactcacagcctcccttccttctttctccctccgcctcccgagcaccagcgcgctctgagctgcccccagggtcccctcccccgccgccagcagcccatttggagggaggaagtaagggaagaggagaggaaggggagccggaccgactacccagacagagccggtgaatgggtttgtggtgacccccgccccccaccccaccctcccttcccacccgacccccaacccccatccccagttcgagccgccgcccgaaaggccgggccgtcgtcttaggaggagtcgccgccgccgccacctccgccatggagctgatcaccattctcgagaagaccgtgtctcccgatcggctggagctggaagcggcgcagaagttcctggagcgtgcggccgtggagaacctgcccactttccttgtggaactgtccagagtgctggcaaatccaggaaacagtcaggttgccagagttgcagctggtctacaaatcaagaactctttgacatctaaagatccagatatcaaggcacaatatcagcagaggtggcttgctattgatgctaatgctcgacgagaagtcaagaactatgttttgcagacattgggtacagaaacttaccggcctagttctgcctcacagtgtgtggctggtattgcttgtgcagagatcccagtaaaccagtggccagaactcattcctcagctggtggccaatgtcacaaaccccaacagcacagagcacatgaaggagtcgacattggaagccatcggttatatttgccaagatatagacccagagcagctacaagataaatccaatgagattctgactgccataatccaggggatgaggaaagaagagcctagtaataatgtgaagctagctgctacaaatgcactcctgaactcattggagttcaccaaagcaaactttgataaagagtctgaaaggcactttattatgcaggtggtctgtgaagccacacagtgtccagatacgagggtacgagtggctgctttacagaatctggtgaagataatgtccttatattatcagtacatggagacatatatgggtcctgctctttttgcaatcacaatcgaagcaatgaaaagtgacattgatgaggtggctttacaagggatagaattctggtccaatgtctgtgatgaggaaatggatttggccattgaagcttcagaggcagcagaacaaggacggccccctgagcacaccagcaagttttatgcgaagggagcactacagtatctggttccaatcctcacacagacactaactaaacaggacgaaaatgatgatgacgatgactggaacccctgcaaagcagcaggggtgtgcctcatgcttctggccacctgctgtgaagatgacattgtcccacatgtcctccccttcattaaagaacacatcaagaacccagattggcggtaccgggatgcagcagtgatggcttttggttgtatcttggaaggaccagagcccagtcagctcaaaccactagttatacaggctatgcccaccctaatagaattaatgaaagaccccagtgtagttgttcgagatacagctgcatggactgtaggcagaatttgtgagctgcttcctgaagctgccatcaatgatgtctacttggctcccctgctacagtgtctgattgagggtctcagtgctgaacccagagtggcttcaaatgtgtgctgggctttctccagtctggctgaagctgcttatgaagctgcagacgttgctgatgatcaggaagaaccagctacttactgcttatcttcttcatttgaactcatagttcagaagctcctagagactacagacagacctgatggacaccagaacaacctgaggagttctgcatatgaatctctgatggaaattgtgaaaaacagtgccaaggattgttaccctgctgtccagaaaacgactttggtcatcatggaacgactgcaacaggttcttcagatggagtcacatatccagagcacatccgatagaatccagttcaatgaccttcagtctttactctgtgcaactcttcagaatgttcttcggaaagtgcaacatcaagatgctttgcagatctctgatgtggttatggcctccctgttaaggatgttccaaagcacagctgggtctgggggagtacaagaggatgccctgatggcagttagcacactggtggaagtgttgggtggtgaattcctcaagtacatggaggcctttaaacccttcctgggcattggattaaaaaattatgctgaataccaggtttgtttggcagctgtgggcttagtgggagacttgtgccgtgccctgcaatccaacatcatacctttctgtgacgaggtgatgcagctgcttctggaaaatttggggaatgagaacgtccacaggtctgtgaagccgcagattctgtcagtgtttggtgatattgcccttgctattggaggagagtttaaaaaatacttagaggttgtattgaatactcttcagcaggcctcccaagcccaggtggacaagtcagactatgacatggtggattatctgaatgagctaagggaaagctgcttggaagcctatactggaatcgtccagggattaaagggggatcaggagaacgtacacccggatgtgatgctggtacaacccagagtagaatttattctgtctttcattgaccacattgctggagatgaggatcacacagatggagtagtagcttgtgctgctggactaataggggacttatgtacagcatttgggaaggatgtactgaaattagtagaagctaggccaatgatccatgaattgttaactgaagggcggagatcgaagactaacaaagcaaaaacccttgctacatgggcaacaaaagaactgaggaaactgaagaaccaagcttgatctgttaccattgggatgataacctgaggacccccactggaaatctcccatcttttgaaaaacctggaagtgaggagtgtgcacggatgctgaatgtttgggaatgagaggatgagtgagtgaggcttgaaaacacaccacattgaaaatcctgccacagcagcagccgcagccgccaacagcagcgctgttagtgagctaagtaagcactgacttcgtagaaaaccataacatcggccatcttggaaaagagaaaaacaatggagttacttatttaaaaaaaaagaaagaaagttatctcttcccaggagaggctagaagtagcttttctgtcttttggccagtgccgagtggaatgcctggtttcggggaggaggagggactgggttcagctgtggtgctttgttgtaaaaggcagcctggcctttgctactgaggagaaagatggagcctgggtctcaagcccaccttcgctgtacctttgccacatggtactgtatgcttgccagctagaaggagggtcagggttttttacagtctgagaatgagtgtgtgtgagtgaggcggtatccacattctcaacttcaagtcattgctgtttctttttcccagaaaacaaggggttagatgttgcatttcataaaactaaccgaagttctgtctactgatgcagcacaagagatgtaaaaaaaaaaaaaaaaaaaaaaaaaaaaaaacacacaaaaaaacacacacacagaggaaagacgctctttaggttttgttttgtttttttttttttggttttgttttttgtttttttttttactctagggaaaacactgacgaatggtcagagctcctatcctgatcttttcatcaaggcgcctttcctaataatatggttcaactgtgaatgtagaagtgggggnnaggggggagaaaaagaaaactctggcgttagaggatataaaaaaatataagtacaattgttacaaataacgcagacttcaaaaacaaaaaaatcacaacccaaacaaaccaaaatttaaatgatcagaattggcagcacaaagaaaacgccctctcctgacttgtattgtggcagtctgaacgcccccagaaaattgtgccaaagagtttagaaaaataaatatacaataaaagtaaacacatacacacaaaacagcaaacttcaggtaactattttggattgcaaacaggataattaaatgttcaaacaatctgataaaataaccatttgg

SEQ ID NO: 726 - DNA, 220 bp, Homo sapiens
gaatcagagatcattgatttcttcctgggggcctctctcaaggatgaggttttgaagattatgccagtgcagaagcagacccgtgccggccagcgcaccaggttcaaggtacccggctgtcctgggagggggctgcgctgggcttgccgggactctctcggctctgcatagttgcacttggcttcacccgtgtgactttcgtaacggggagagagagaaa

SEQ ID NO: 727 - DNA, 3850 bp, Homo sapiens
cggcacgagcggcacgagagaagagactccaatcgacaagaagctggaaaagaatgatgttgtccttaaacaacctacagaatatcatctataacccggtaatcccgtttgttggcaccattcctgatcagctggatcctggaactttgattgtgatacgtgggcatgttcctagtgacgcagacagattccaggtggatctgcagaatggcagcagcgtgaaacctcgagccgatgtggcctttcatttcaatcctcgtttcaaaagggccggctgcattgtttgcaatactttgataaatgaaaaatggggacgggaagagatcacctatgacacgcctttcaaaagagaaaagtcttttgagatcgtgattatggtgctgaaggacaaattccaggtggctgtaaatggaaaacatactctgctctatggccacaggatcggcccagagaaaatagacactctgggcatttatggcaaagtgaatattcactcaattggttttagcttcagctcggacttacaaagtacccaagcatctagtctggaactgacagagatagttagagaaaatgttccaaagtctggcacgccccagcttagcctgccattcgctgcaaggttgaacacccccatgggccctggacgaactgtcgtcgttcaaggagaagtgaatgcaaatgccaaaagctttaatgttgacctactagcaggaaaatcaaaggatattgctctacacttgaacccacgcctgaatattaaagcatttgtaagaaattcttttcttcaggagtcctggggagaagaagagagaaatattacctctttcccatttagtcctgggatgtactttgagatgataatttattgtgatgttagagaattcaaggttgcagtaaatggcgtacacagcctggagtacaaacacagatttaaagagctcagcagtattgacacgctggaaattaatggagacatccacttactggaagtaaggagctggtagcctacctacacagctgctacaaaaaccaaaatacagaatggcttctgtgatactggccttgctgaaacgcatctcactggtcattctattgtttatattgttaaaatgagcttgtgcaccattaggtcctgctgggtgttctcagtccttgccatgacgtatggtggtgtctagcactgaatggggaaactgggggcagcaacacttatagccagttaaagccactctgccctctctcctactttggctgactcttcaagaatgccattcaacaagtatttatggagtacctactataatacagtagctaacatgtattgagcacagattttttttggtaaatctgtgaggagctaggatatatacttggtgaaacaaaccagtatgttccctgttctcttgagcttcgactcttctgtgcgctactgctgcgcactgctttttctacaggcattacatcaactcctaaggggtcctctgggattagttatgcagatattaaatcacccgaagacactaacttacagaagacacaactccttccccagtgatcactgtcataaccagtgctctgccgtatcccatcactgaggactgatgttgactgacatcattttctttatcgtaataaacatgtggctctattagctgcaagctttaccaagtaattggcatgacatctgagcacagaaattaagccaaaaaaccaaagcaaaacaaatacatggtgctgaaattaacttgatgccaagcccaaggcagctgatttctgtgtatttgaacttacccgaaatcagagtctacacagacgcctacagaagtttcaggaagagccaagatgcattcaatttgtaagatatttatggccaacaaagtaaggtcaggattagacttcaggcattcataaggcaggcactatcagaaagtgtacgccaactaagggacccacaaagcaggcagaggtaatgcagaaatctgttttgttcccatgaaatcaccaatcaaggcctccgttcttctaaagattagtccatcatcattagcaactgagatcaaagcactcttccactttacgtgattaaaatcaaacctgtatcagcaagttaaatggttccatttctgtgatttttctattatttgaggggagttggcagaagttccatgtatatgggatctttacaggtcagatcttgttacaggaaatttcaaaggtttgggagtggggagggaaaaaagctcagtcagtgaggatcattccacattagactggggcagaactctgccaggatttaggaatattttcagaacagattttagatattatttctatccatatattgaaaaggaataccattgtcaatcttatttttttaaaagtactcagtgtagaaatcgctagcccttaattcttttccagcttttcatattaatgtatgcagagtctcaccaagctcaaagacactggttgggggtggagggtgccacagggaaagctgtagaaggcaagaagactcgagaatcccccagagttatctttctccataaagaccatcagagtgcttaactgagctgttggagactgtgaggcatttaggaaaaaaatagcccactcacatcattccttgtaagtcttaagttcattttcattttacgtggaggaaaaaaatttaaaaagctattagtatttattaatgaattttactgagacatttcttagaaatatgcacttctatactagcaagctctgtctctaaaatgcaagttggccttttgcttgccacatttctgcattaaacttctatattagcttcaaaggcttttaatctcaatgcgaacattctacgggatgttcttagatgcctttaaaaagggggcaagatctaattttatttgaaccctcactttccaactttcaccatgacccagtactagagattagggcacttcaaagcattgaaaaaaatctactgatacttactttcttagacaagtagttcttagttaaccaccaatggaactgggttcattctgaatcctggaggagcttcctcgtgccacccagtgtttctgggccctctgtgtgagcagccaggtgtgagctgttttagaagcagcgtgttgccttcatctctcccgtttcccaaaagaacaaaggataaaggtgacagtcacactcctgggttaaaaaaagcattccagaaccacttctctttatgggcacaacaacaaagaagctaagttcgcctacccaaatgaaagtaggctttacagtcaagtacttctgttgattgctaaataacttcattttcttgaaatagagcaactttgagtgaaatctgcaacatggataccatgtatgtaagatactgctgtacagaagagttaaggcttacagtgcaaatgaggcgtcagctttgggtgctaaaattaacaagtctaatattattaccatcaatcaggaagagataataaatgtttaaacaaacacagcagtctgtataaaaatacgtgtatatttactctttctgtgcacgctctatagcataggcaggagaggcttatgtggcagcacaagccaggtggggattttgtaaagaagtgataaaacatttgtaagtaatccaagtaggagatattaaggcaccaaaagtaacatggcacccaacacccaaaaataaaaatatgaaatatgagtgtgaactctgagtagagtatgaaacaccacagaaagtcttagaaatagctctggagtggctctcccaggacagtttccagttggctgaatagtcttttggcactgatgttctacttcttcacattcatctaaaaaaaaaaaaaaaaaa

SEQ ID NO: 728 - DNA, 2200 bp, Homo sapiens
gcccccacgcccagccaggagcaccgccgaggactccagcacaccgagggacatgctgggcctgcgccccccactgctcgccctggtggggctgctctccctcgggtgcgtcctctctcaggagtgcacgaagttcaaggtcagcagctgccgggaatgcatcgagtcggggcccggctgcacctggtgccagaagctgaacttcacagggccgggggatcctgactccattcgctgcgacacccggccacagctgctcatgaggggctgtgcggctgacgacatcatggaccccacaagcctcgctgaaacccaggaagaccacaatgggggccagaagcagctgtccccacaaaaagtgacgctttacctgcgaccaggcttcgggtccttcgtggacaagaccgtgctgccgttcgtgaacacgcaccctgataagctgcgaaacccatgccccaacaaggagaaagagtgccagcccccgtttgccttcaggcacgtgctgaagctgaccaacaactccaaccagtttcagaccgaggtcgggaagcagctgatttccggaaacctggatgcacccgagggtgggctggacgccatgatgcaggtcgccgcctgcccggaggaaatcggctggcgcaacgtcacgcggctgctggtgtttgccactgatgacggcttccatttcgcgggcgacgggaagctgggcgccatcctgacccccaacgacggccgctgtcacctggaggacaacttgtacaagaggagcaacgaattcgactacccatcggtgggccagctggcgcacaagctggctgaaaacaacatccagcccatcttcgcggtgaccagtaggatggtgaagacctacgagaaactcaccgagatcatccccaagtcagccgtgggggagctgtctgaggactccagcaatgtggtccatctcattaagaatgcttacaataaactctcctccagggtattcctggatcacaacgccctccccgacaccctgaaagtcacctacgactccttctgcagcaatggagtgacgcacaggaaccagcccagagtggactgtgatggcgtgcagatcaatgtcccgatcaccttccaggtgaaggtcacggccacagagtgcatccaggagcagtcgtttgtcatcgggcgctgggcttcacggacatagtgaccgtgcaggtccttccccagtgtgagtgccggtgccgggaccagagcagagaccgcagcctctgccatggaaagggcttcttggagtgcggcatctgcaggtgtgacactggctacattgggaaaaactgtgagtgccagacacagggccggagcagccaggagctggaaggaagctgccggaaggacaacaactccatcatctgctcagggctgggggactgtgtctgcgggcagtgcctgtgccacaccagcgacgtccccggcaagctgatatacgggcagtactgcgagtgtgacaccatcaactgtgagcgctacaacggccaggtctgcggcggcccggggagggggctctgcttctgcgggaagtgccgctgccacccgggctttgagggctcagcgtgccagtgcgagaggaccactgagggctgcctgaacccgcggcgtgttgagtgtagtggtcgtggccggtgcggctgcaacgtatgcgagtgccattcaggctaccagctgcctctgtgccaggagtgccccggctgcccctcaccctgtggcaagtacatctcctgcgccgagtgcctgaagttcgaaaagggcccctttgggaagaactgcagcgcggcgtgtccgggcctgcagctgtcgaacaaccccgtgaagggcaggacctgcaaggagagggactcagagggctgctgggtggcctacacgctggagcagcaggacgggatggaccgctacctcatctatgtggatgagagccgagagtgtgtggcaggccccaacatcgccgccatcgtcgggggcaccgtggcaggcatcgtgctgatcggcattctcctgctggtcatctggaaggctctgatccacctgagcgacctccgggagtacaggcgctttgagaaggagaagctcaagtcccagtggaacaatgataatccccttttcaagagcgccaccacgacggtcatgaaccccaagtttgctgagagttaggagcacttgg

SEQ ID NO: 729 - DNA, 1969 bp, Homo sapiens
  misc_feature (57)..(61): n is a, c, g, or t
ccgtccgtccgtcgtcctcctcgcttgcggggcgccgggcccgtcctcgagcccccnnnnnccgtccggccgcgtcggggcctcgccgcgctctacctacctacctggttgatcctgccagtagcatatgcttgtctcaaagattaagccatgcatgtctaagtacgcacggccggtacagtgaaactgcgaatggctcattaaatcagttatggttcctttggtcgctcgctcctctcctacttggataactgtggtaattctagagctaatacatgccgacgggcgctgacccccttcgcgggggggatgcgtgcatttatcagatcaaaaccaacccggtcagcccctctccggccccggccggggggcgggccgcggcggctttggtgactctagataacctcgggccgatcgcacgccccccgtggcggcgacgacccattcgaacgtctgccctatcaactttcgatggtagtcgccgtgcctaccatggtgaccacgggtgacggggaatcagggttcgattccggagagggagcctgagaaacggctaccacatccaaggaaggcagcaggcgcgcaaattacccactcccgacccggggaggtagtgacgaaaaataacaatacaggactctttcgaggccctgtaattggaatgagtccactttaaatcctttaacgaggatccattggagggcaagtctggtgccagcagccgcggtaattccagctccaatagcgtatattaaagttgctgcagttaaaaagctcgtagttggatcttgggagcgggcgggcggtccgccgcgaggcgagccaccgcccgtccccgccccttgcctctcggcgccccctcgatgctcttagctgagtgtcccgcggggcccgaagcgtttactttgaaaaaattagagtgttcaaagcaggcccgagccgcctggataccgcagctaggaataatggaataggaccgcggttctattttgttggttttcggaactgaggccatgattaagagggacggccgggggcattcgtattgcgccgctagaggtgaaattcttggaccggcgcaagacggaccagagcgaaagcatttgccaagaatgttttcattaatcaagaacgaaagtcggaggttcgaagacgatcagataccgtcgtagttccgaccataaacgatgccgaccggcgatgcggcggcgttattcccatgacccgccgggcagcttccgggaaaccaaagtctttgggttccggggggagtatggttgcaaagctgaaacttaaaggaattgacggaagggcaccaccaggagtggagcctgcggcttaatttgactcaacacgggaaacctcacccggcccggacacggacaggattgacagattgatagctctttctcgattccgtgggtggtggtgcatggccgttcttagttggtggagcgatttgtctggttaattccgataacgaacgagactctggcatgctaactagttacgcgacccccgagcggtcggcgtcccccaacttcttagagggacaagtggcgttcagccacccgagattgagcaataacaggtctgtgatgcccttagatgtccggggctgcacgcgcgctacactgactggctcagcgtgtgcctaccctacgccggcaggcgcgggtaacccgttgaaccccattcgtgatggggatcggggattgcaattattccccatgaacgaggaattcccagtaagtgcgggtcataagcttgcgttgattaagtccctgccctttgtacacaccgcccgtcgctactaccgattggatggtttagtgaggccctcggatcggccccgccggggtcggcccacggcctggcggagcgctgagaagacggtcgaacttgactatctagaggaagtaaaagtcgtaacaaggtttccgtaggtgaacctgcggaaggatcatta

SEQ ID NO: 730 - DNA, 5025 bp, Homo sapiens
cgcgacctcagatcagacgtggcgacccgctgaatttaagcatattagtcagcggaggaaaagaaactaaccaggattccctcagtaacggcgagtgaacagggaagagcccagcgccgaatccccgccccgcggggcgcgggacatgtggcgtacggaagacccgctccccggcgccgctcgtggggggcccaagtccttctgatcgaggcccagcccgtggacggtgtgaggccggtagcggccggcgcgcgcccgggtcttcccggagtcgggttgcttgggaatgcagcccaaagcgggtggtaaactccatctaaggctaaataccggcacgagaccgatagtcaacaagtaccgtaagggaaagttgaaaagaactttgaagagagagttcaagagggcgtgaaaccgttaagaggtaaacgggtggggtccgcgcagtccgcccggaggattcaacccggcggcgggtccggccgtgtcggcggcccggcggatctttcccgccccccgttcctcccgacccctccacccgccctcccttcccccgccgcccctcctcctcctccccggagggggcgggctccggcgggtgcgggggtgggcgggcggggccgggggtggggtcggcgggggaccgtcccccggaccggcgaccggccgccgccgggcgcatttccaggcggtgcgccgcgaccggctccgggacggctgggaaggcccggcggggaaggtggctcggggggccccgtccgtccgtccgtcctcctcctcccccgtctccgccccccggccccgcgtcctccctcgggagggcgcgcgggtcggggcggcggcggcggcggcggtggcggcggcggcgggggcggcgggaccgaaaccccccccgagtgttacagcccccccggcagcagcactcgccgaatcccggggccgagggagcgagacccgtcgccgcgctctcccccctcccggcgcccacccccgcgggaatccccgcgaggggggtctcccccggcgcggcgccggcgtctcctcgtgggggggccgggccacccctcccacggcgcgaccgctctcccacccctcctccccgcgcccccgccccggcgacggggggggtgccgcgcgcgggtcggggggcggggcggactgtccccagtgcgccccgggcgggtcgcgccgtcgggcccgggggaggttctctcggggccacgcgcgcgtcccccgaagagggggacggcggagcgagcgcacggggtcggcggcgacgtcggctacccacccgacccgtcttgaaacacggaccaaggagtctaacacgtgcgcgagtcgggggctcgcacgaaagccgccgtggcgcaatgaaggtgaaggccggcgcgctcgccggccgaggtgggatcccgaggcctctccagtccgccgaggggcaccaccggcccgtctcgcccgccgcgccggggaggtggagcacgagcgcacgtgttaggacccgaaagatggtgaactatgcctgggcagggcgaagccagaggaaactctggtggaggtccgtagcggtcctgacgtgcaaatcggtcgtccgacctgggtataggggcgaaagactaatcgaaccatctagtagctggttccctccgaagtttccctcaggatagctggcgctctcgcagacccgacgcacccccgccacgcagttttatccggtaaagcgaatgattagaggtcttggggccgaaacgatctcaacctattctcaaactttaaatgggtaagaagcccggctcgctggcgtggagccggggtggaatgcgagtgcctagtgggccacttttggtaagcagaactggcgctgcgggatgaaccgaacgccgggttaaggcgcccgatgccgacgctcatcagaccccagaaaaggtgttggttgatatagacagcaggacggtggccatggaagtcggaatccgctaaggagtgtgtaacaactcacctgccgaatcaactagccctgaaaatggatggcgctggagcgtcgggcccatacccggccgtcgccggcagtcgagagtggacgggagcggcgggggcggcggcgcgcgcgcgcgtgtggtgtgcgtcggagggcggcggcggcggcggcggcgggggtgtggggtccttcccccgcccccccccccacgcctcctcccctcctcccgcccacgccccgctccccgcccccggagccccgcggagctacgccgcgacgagtaggagggccgctgcggtgagccttgaagcctagggcgcgggcccgggtggaggccgccgcaggtgcagatcttggtggtagtagcaaatattcaaacgagaactttgaaggccgaagtggagaagggttccatgtgaacagcagttgaacatgggtcagtcggtcctgagagatgggcgagcgccgttccgaagggacgggcgatggcctccgttgccctcggccgatcgaaagggagtcgggttcagatccccgaatccggagtggcggagatgggcgccgcgaggcgtccagtgcggtaacgcgaccgatcccggagaagccggcgggagccccggggagagttctcttttctttgtgaagggcagggcgccctggaatgggttcgccccgagagaggggcccgtgccttggaaagcgtcgcggttccggcggcgtccggtgagctctcgctggcccttgaaaatccgggggagagggtgtaaatctcgcgccgggccgtacccatatccgcagcaggtctccaaggtgaacagcctctggcatgttggaacaatgtaggtaagggaagtcggcaagccggatccgtaacttcgggataaggattggctctaagggctgggtcggtcgggctggggcgcgaagcggggctgggcgcgcgccgcggctggacgaggcgcgcgccccccccacgcccggggcacccccctcgcggccctcccccgccccacccgcgcgcgccgctcgctccctccccaccccgcgccctctctctctctctctcccccgctccccgtcctcccccctccccgggggagcgccgcgtgggggcgcggcggggggagaagggtcggggcggcaggggccgcgcggcggccgccggggcggccggcgggggcaggtccccgcgaggggggccccggggacccggggggccggcggcggcgcggactctggacgcgagccgggcccttcccgtggatcgccccagctgcggcgggcgtcgcggccgcccccggggagcccggcggcggcgcggcgcgccccccacccccaccccacgtctcggtcgcgcgcgcgtccgctgggggcgggagcggtcgggcggcggcggtcggcgggcggcggggcggggcggttcgtccccccgccctacccccccggccccgtccgccccccgttcccccctcctcctcggcgcgcggcggcggcggcggcaggcggcggaggggccgcgggccggtcccccccgccgggtccgcccccggggccgcggttccgcgcgcgcctcgcctcggccggcgcctagcagccgacttagaactggtgcggaccaggggaatccgactgtttaattaaaacaaagcatcgcgaaggcccgcggcgggtgttgacgcgatgtgatttctgcccagtgctctgaatgtcaaagtgaagaaattcaatgaagcgcgggtaaacggcgggagtaactatgactctcttaaggtagccaaatgcctcgtcatctaattagtgacgcgcatgaatggatgaacgagattcccactgtccctacctactatccagcgaaaccacagccaagggaacgggcttggcggaatcagcggggaaagaagaccctgttgagcttgactctagtctggcacggtgaagagacatgagaggtgtagaataagtgggaggcccccggcgcccccccggtgtccccgcgaggggcccggggcggggtccgcggccctgcgggccgccggtgaaataccactactctgatcgttttttcactgacccggtgaggcgggggggcgagcccgaggggctctcgcttctggcgccaagcgcccgcccggccgggcgcgacccgctccggggacagtgccaggtggggagtttgactggggcggtacacctgtcaaacggtaacgcaggtgtcctaaggcgagctcagggaggacagaaacctcccgtggagcagaagggcaaaagctcgcttgatcttgattttcagtacgaatacagaccgtgaaagcggggcctcacgatccttctgaccttttgggttttaagcaggaggtgtcagaaaagttaccacagggataactggcttgtggcggccaagcgttcatagcgacgtcgctttttgatccttcgatgtcggctcttcctatcattgtgaagcagaattcgccaagcgttggattgttcacccactaatagggaacgtgagctgggtttagaccgtcgtgagacaggttagttttaccctactgatgatgtgttgttgccatggtaatcctgctcagtacgagaggaaccgcaggttcagacatttggtgtatgtgcttggctgaggagccaatggggcgaagctaccatctgtgggattatgactgaacgcctctaagtcagaatcccgcccaggcgaacgatacggcagcgccgcggagcctcggttggcctcggatagccggtcccccgcctgtccccgccggcgggccgcccccccctccacgcgccccgccgcgggagggcgcgtgccccgccgcgcgccgggaccggggtccggtgcggagtgcccttcgtcctgggaaacggggcgcggccggaaaggcggccgccccctcgcccgtcacgcaccgcacgttcgtggggaacctggcgctaaaccattcgtagacgacctgcttctgggtcggggtttcgtacgtagcagagcagctccctcgctgcgatctattgaaagtcagccctcgacacaagggtttgtc

SEQ ID NO: 731 - DNA, 436 bp, Homo sapiens
gttcctcaccatggactggacctggaggatcctcttcttggtggcagcagccacaggagcccactcccaggtgcagctggtgcaatctggggctgaggtgaagaagcctggggcctcagtgaaggtctcctgcgaggcttctggatacaccttcaccggccactatatgcactgggtgcgacaggcccctggacaagggcttgagtggatgggatggatcaaccctaacagtggtggcacaaactatgcagagaagtttcagggcagggtcaccatcaccagggacacgtccatcaacacagcctacatggagctgagcaggctgagatctgacgacacggccgtgtattactgtgcgagagcctcatattgtggttatgactgctattacttctttgactactggggccagggaaccctggtcaccgtctcctca

SEQ ID NO: 732 - DNA, 1651 bp, Homo sapiens
ctgcgaaccctctctactctccgaagggaattgtccttcctggcttccactacttccacccctgaatgcacaggcagcccggcccaagtctcccactagggatgcagatggattcggtgtgaagggctggctgctgttgcctccggctcttgaaagtcaagttcagaggcgtgcaaagactccagaattggaggcatgatgaagactctgctgctgtttgtggggctgctgctgacctgggagagtgggcaggtcctgggggaccagacggtctcagacaatgagctccaggaaatgtccaatcagggaagtaagtacgtcaataaggaaattcaaaatgctgtcaacggggtgaaacagataaagactctcatagaaaaaacaaacgaagagcgcaagacactgctcagcaacctagaagaagccaagaagaagaaagaggatgccctaaatgagaccagggaatcagagacaaagctgaaggagctcccaggagtgtgcaatgagaccatgatggccctctgggaagagtgtaagccctgcctgaaacagacctgcatgaagttctacgcacgcgtctgcagaagtggctcaggcctggttggccgccagcttgaggagttcctgaaccagagctcgcccttctacttctggatgaatggtgaccgcatcgactccctgctggagaacgaccggcagcagacgcacatgctggatgtcatgcaggaccacttcagccgcgcgtccagcatcatagacgagctcttccaggacaggttcttcacccgggagccccaggatacctaccactacctgcccttcagcctgccccaccggaggcctcacttcttctttcccaagtcccgcatcgtccgcagcttgatgcccttctctccgtacgagcccctgaacttccacgccatgttccagcccttccttgagatgatacacgaggctcagcaggccatggacatccacttccacagcccggccttccagcacccgccaacagaattcatacgagaaggcgacgatgaccggactgtgtgccgggagatccgccacaactccacgggctgcctgcggatgaaggaccagtgtgacaagtgccgggagatcttgtctgtggactgttccaccaacaacccctcccaggctaagctgcggcgggagctcgacgaatccctccaggtcgctgagaggttgaccaggaaatataacgagctgctaaagtcctaccagtggaagatgctcaacacctcctccttgctggagcagctgaacgagcagtttaactgggtgtcccggctggcaaacctcacgcaaggcgaagaccagtactatctgcgggtcaccacggtggcttcccacacttctgactcggacgttccttccggtgtcactgaggtggtcgtgaagctctttgactctgatcccatcactgtgacggtccctgtagaagtctccaggaagaaccctaaatttatggagaccgtggcggagaaagcgctgcaggaataccgcaaaaagcaccgggaggagtgagatgtggatgttgcttttgcacctacgggggcatctgagtccagctccccccaagatgagctgcagccccccagagagagctctgcacgtcaccaagtaaccaggc

SEQ ID NO: 733 - DNA, 213 bp, Homo sapiens
ccaccgaaagtactgaccaagtgccaggaagaggtcagccacatccctgctgtccacccgggttcattcaggcccaagtgcgacgagaacggcaactatctgccactccagtgctatgggagcatcggctactgctggtgtgtcttccccaacggcacggaggtccccaacaccagaagccgcgggcaccataactgcagtgagtcactggaa

SEQ ID NO: 734 - DNA, 2171 bp, Homo sapiens
cgcgctatgtacgccctcttcctcctggccagcctcctgggcgcggctctagccggcccggtccttggactgaaagaatgcaccaggggctcggcagtgtggtgccagaatgtgaagacggcgtccgactgcggggcagtgaagcactgcctgcagaccgtttggaacaagccaacagtgaaatcccttccctgcgacatatgcaaagacgttgtcaccgcagctggtgatatgctgaaggacaatgccactgaggaggagatccttgtttacttggagaagacctgtgactggcttccgaaaccgaacatgtctgcttcatgcaaggagatagtggactcctacctccctgtcatcctggacatcattaaaggagaaatgagccgtcctggggaggtgtgctctgctctcaacctctgcgagtctctccagaagcacctagcagagctgaatcaccagaagcagctggagtccaataagatcccagagctggacatgactgaggtggtggcccccttcatggccaacatccctctcctcctctaccctcaggacggcccccgcagcaagccccagccaaaggataatggggacgtttgccaggactgcattcagatggtgactgacatccagactgctgtacggaccaactccacctttgtccaggccttggtggaacatgtcaaggaggagtgtgaccgcctgggccctggcatggccgacatatgcaagaactatatcagccagtattctgaaattgctatccagatgatgatgcacatgcaacccaaggagatctgtgcgctggttgggttctgtgatgaggtgaaagagatgcccatgcagactctggtccccgccaaagtggcctccaagaatgtcatccctgccctggaactggtggagcccattaagaagcacgaggtcccagcaaagtctgatgtttactgtgaggtgtgtgaattcctggtgaaggaggtgaccaagctgattgacaacaacaagactgagaaagaaatactcgacgcttttgacaaaatgtgctcgaagctgccgaagtccctgtcggaagagtgccaggaggtggtggacacgtacggcagctccatcctgtccatcctgctggaggaggtcagccctgagctggtgtgcagcatgctgcacctctgctctggcacgcggctgcctgcactgaccgttcacgtgactcagccaaaggacggtggcttctgcgaagtgtgcaagaagctggtgggttatttggatcgcaacctggagaaaaacagcaccaagcaggagatcctggctgctcttgagaaaggctgcagcttcctgccagacccttaccagaagcagtgtgatcagtttgtggcagagtacgagcccgtgctgatcgagatcctggtggaggtgatggatccttccttcgtgtgcttgaaaattggagcctgcccctcggcccataagcccttgttgggaactgagaagtgtatatggggcccaagctactggtgccagaacacagagacagcagcccagtgcaatgctgtcgagcattgcaaacgccatgtgtggaactaggaggaggaatattccatcttggcagaaaccacagcattggtttttttctacttgtgtgtctgggggaatgaacgcacagatctgtttgactttgttataaaaatagggctcccccacctcccccatttctgtgtcctttattgtagcattgctgtctgcaagggagcccctagcccctggcagacatagctgcttcagtgccccttttctctctgctagatggatgttgatgcactggaggtcttttagcctgcccttgcatggcgcctgctggaggaggagagagctctgctggcatgagccacagtttcttgactggaggccatcaaccctcttggttgaggccttgttctgagccctgacatgtgcttgggcactggtgggcctgggcttctgaggtggcctcctgccctgatcagggaccctccccgctttcctgggcctctcagttgaaccaaagcagcaaaacaaaggcagttttatatgaaagattagaagcctggaataatcaggctttttaaatgatgtaattcccactgtaatagcatagggattttggaagcagctgctggtggcttgggacatcagtg

SEQ ID NO: 735 - DNA, 1194 bp, Homo sapiens
ggccggagggagcccgcgctcggggcggcggctggaggcagcgcaccgagttcccgcgaggatccatgacctgacggggccccggagccgcgctgcctctcgggtgtcctgggtcggtggggagcccagtgctcgcaggccggcgggcgggccggagggctgcagtctccctcgcggtgagaggaaggcggaggagcgggaaccgcggcggcgctcgcgcggcgcctgcggggggaagggcagttccgggccgggccgcgcctcagcagggcggcggctcccagcgcagtctcagggcccgggtggcggcggcgactggagaaatcaagttgtgcggtcggtgatgcccgagtgagcggggggcctgggcctctgcccttaggaggcaactcccacgcaggccgcaaagggctctcgcggccgagaggcttcgtttcggtttcgcggcggcggcggcgttgttggctgaggggacccgggacacctgaatgcccccggccccggctcctccgacgcgatggggaaggtgctatccaaaatcttcgggaacaaggaaatgcggatcctcatgttgggcctggacgcggccggcaagacaacaatcctgtacaagttgaagctgggccagtcggtgaccaccattcccactgtgggtttcaacgtggagacggtgacttacaaaaatgtcaagttcaacgtatgggatgtgggcggccaggacaagatccggccgctctggcggcattactacactgggacccaaggtctcatcttcgtagtggactgcgccgaccgcgaccgcatcgatgaggctcgccaggagctgcaccgcattatcaatgaccgggagatgagggacgccataatcctcatcttcgccaacaagcaggacctgcccgatgccatgaaaccccacgagatccaggagaaactgggcctgacccggattcgggacaggaactggtatgtgcagccctcctgtgccacctcaggggacggactctatgaggggctcacatggttaacctctaactacaaatcttaatgagcattctccacccatcccctggaaggagagaaatcaaaaacccattcataggattatcgccaccatcacctctttcaattgccactttctcttcttttgaatttgaactctggagttactgttctacagtttggcggggacggggc

SEQ ID NO: 736 - DNA, 2213 bp, Homo sapiens
ggaggcggcaacattgtttcaagttggccaaattgacaagagcgagaggtatactgcgttccatcccgacccgggccacggtactgggccctgtttccccctcctcggcccccgagagccagggtccgccttctgcagggttcccaggcccccgctccagggccgggctgacccgactcgctggcgcttcatggagaacttccaaaaggtggaaaagatcggagagggcacgtacggagttgtgtacaaagccagaaacaagttgacgggagaggtggtggcgcttaagaaaatccgcctggacactgagactgagggtgtgcccagtactgccatccgagagatctctctgcttaaggagcttaaccatcctaatattgtcaagctgctggatgtcattcacacagaaaataaactctacctggtttttgaatttctgcaccaagatctcaagaaattcatggatgcctctgctctcactggcattcctcttcccctcatcaagagctatctgttccagctgctccagggcctagctttctgccattctcatcgggtcctccaccgagaccttaaacctcagaatctgcttattaacacagagggggccatcaagctagcagactttggactagccagagcttttggagtccctgttcgtacttacacccatgaggtggtgaccctgtggtaccgagctcctgaaatcctcctgggctgcaaatattattccacagctgtggacatctggagcctgggctgcatctttgctgagatggtgactcgccgggccctattccctggagattctgagattgaccagctcttccggatctttcggactctggggaccccagatgaggtggtgtggccaggagttacttctatgcctgattacaagccaagtttccccaagtgggcccggcaagattttagtaaagttgtacctcccctggatgaagatggacggagcttgttatcgcaaatgctgcactacgaccctaacaagcggatttcggccaaggcagccctggctcaccctttcttccaggatgtgaccaagccagtaccccatcttcgactctgatagccttcttgaagcccccagccctaatctcaccctctcctccagtgtgggcttgaccaggcttgcgcttgggctatttggactcaggtgggccctctgaacttgccttaaacactcaccttctagtcttggccagccaactctgggaatacaggggtgaaaggggggaaccagtgaaaatgaaaggaagtttcagtattagatgcacttaagttagcctccaccaccctttcccccttctcttagttattgctgaagagggttggtataaaaataattttaaaaaagccttcctacacgttagatttgccgtaccaatctctgaatgccccataattattatttccagtgtttgggatgaccaggatcccaagcctcctgctgccacaatgtttataaaggccaaatgatagcgggggctaagttggtgcttttgagaaccaagtaaaacaaaaccactgggaggagtctattttaaagaattcggttgaaaaaaatagatccaatcagtttataccctagttagtgttttgcctcacctaataggctgggagactgaagactcagcccgggtggctgcagaaaaatgattggccccagtccccttgtttgtcccttctacaggcatgaggaatctgggaggccctgagacagggattgtgcttcattccaatctattgcttcaccatggccttatgaggcaggtgagagatgtttgaatttttctcttccttttagtattcttagttgttcagttgccaaggatccctgatcccattttcctctgacgtccacctcctaccccataggagttagaagttagggtttaggcatcattttgagaatgctgacactttttcagggctgtgattgagtgagggcatgggtaaaaatatttctttaaaagaaggatgaacaattatatttatatttcaggttatatccaatagtagagttggctttttttttttttttttggtcatagtgggtggatttgttgccatgtgcaccttggggttttgtaatgacagtgctaaaaaaaaagcattttttttttatgatttgtctctgtcacccttgtccttgagtgctcttgctattaacgttatttgtaatttagtttgta

SEQ ID NO: 737 - DNA, 953 bp, Homo sapiens
tttctttgcgtaaccaatactggaaggcatttaaaggacctctgccgcctcagaccttgcagttaactccgccctgacccacccttcccgatgcagtccctgatgcaggctcccctcctgatcgccctgggcttgcttctcgcggcccctgcgcaagcccacctgaaaaagccatcccagctcagtagcttttcctgggataactgtgatgaagggaaggaccctgcggtgatcagaagcctgactctggagcctgaccccatcgtcgttcctggaaatgtgaccctcagtgtcgtgggcagcaccagtgtccccctgagttctcctctgaaggtggatttagttttggagaaggaggtggctggcctctggatcaagatcccatgcacagactacattggcagctgtacctttgaacacttctgtgatgtgcttgacatgttaattcctactggggagccctgcccagagcccctgcgtacctatgggcttccttgccactgtcccttcaaagaaggaacctactcactgcccaagagcgaattcgttgtgcctgacctggagctgcccagttggctcaccaccgggaactaccgcatagagagcgtcctgagcagcagtgggaagcgtctgggctgcatcaagatcgctgcctctctaaagggcatataacatggcatctgccacagcagaatggagcggtgtgaggaaggtcccttttcctctgttttgtgtttgccaaggccaaactcccactctctgcccccctttaatcccctttctacagtgagtccactaccctcactgaaaatcattttgtaccacttacattttaggctggggcaagcagccctgacctaagggagaatgagttggacagttcttgatagcccagggcatctgctgggctgaccacgttactcatccccgttaacattctctctaaagagcct

SEQ ID NO: 738 - DNA, 2100 bp, Homo sapiens
gccgccgccgccaagatggcggacctggaggcggtgctggccgacgtgagctacctgatggccatggagaagagcaaggccacgccggccgcgcgcgccagcaagaagatactgctgcccgagcccagcatccgcagtgtcatgcagaagtacctggaggaccggggcgaggtgacctttgagaagatcttttcccagaagctggggtacctgctcttccgagacttctgcctgaaccacctggaggaggccaggcccttggtggaattctatgaggagatcaagaagtacgagaagctggagacggaggaggagcgtgtggcccgcagccgggagatcttcgactcatacatcatgaaggagctgctggcctgctcgcatcccttctcgaagagtgccactgagcatgtccaaggccacctggggaagaagcaggtgcctccggatctcttccagccatacatcgaagagatttgtcaaaacctccgaggggacgtgttccagaaattcattgagagcgataagttcacacggttttgccagtggaagaatgtggagctcaacatccacctgaccatgaatgacttcagcgtgcatcgcatcattgggcgcgggggctttggcgaggtctatgggtgccggaaggctgacacaggcaagatgtacgccatgaagtgcctggacaaaaagcgcatcaagatgaagcagggggagaccctggccctgaacgagcgcatcatgctctcgctcgtcagcactggggactgcccattcattgtctgcatgtcatacgcgttccacacgccagacaagctcagcttcatcctggacctcatgaacggtggggacctgcactaccacctctcccagcacggggtcttctcagaggctgacatgcgcttctatgcggccgagatcatcctgggcctggagcacatgcacaaccgcttcgtggtctaccgggacctgaagccagccaacatccttctggacgagcatggccacgtgcggatctcggacctgggcctggcctgtgacttctccaagaagaagccccatgccagcgtgggcacccacgggtacatggctccggaggtcctgcagaagggcgtggcctacgacagcagtgccgactggttctctctggggtgcatgctcttcaagttgctgcgggggcacagccccttccggcagcacaagaccaaagacaagcatgagatcgaccgcatgacgctgacgatggccgtggagctgcccgactccttctcccctgaactacgctccctgctggaggggttgctgcagagggatgtcaaccggagattgggctgcctgggccgaggggctcaggaggtgaaagagagcccctttttccgctccctggactggcagatggtcttcttgcagaagtaccctcccccgctgatccccccacgaggggaggtgaacgcggccgacgccttcgacattggctccttcgatgaggaggacacaaaaggaatcaagttactggacagtgatcaggagctctaccgcaacttccccctcaccatctcggagcggtggcagcaggaggtggcagagactgtcttcgacaccatcaacgctgagacagaccggctggaggctcgcaagaaagccaagaacaagcagctgggccatgaggaagactacgccctgggcaaggactgcatcatgcatggctacatgtccaagatgggcaaccccttcctgacccagtggcagcggcggtacttctacctgttccccaaccgcctcgagtggcggggcgagggcgaggccccgcagagcctgctgaccatggaggagatccagtcggtggaggagacgcagatcaaggagcgcaagtgcctgctcctcaagatccgcggtgggaaacagttcattttgcagtgcgatagcgaccctgagctggtgcagtggaagaaggagctgcgcgacgcctaccgcgaggcccagcagctggtgcagcgggtgcccaagatgaagaacaagccgcgctcgcccgtggtggagctgagcaaggtgccgctggtccagcgcggcagtgccaacggcctctgacccgcccacccgcct

SEQ ID NO: 739 - DNA, 1599 bp, Homo sapiens
tctaaagaagcccctgggagcacagctcatcaccatggactggacctggaggttcctctttgtggtggcagcagctacaggtgtccagtcccagatgcaggtggtgcagtctggggctgaagtaaagaagcctgggtcctcggtgacggtctcctgcaaggcatctggaggcaccttcagcaactatgctatcagctgggtgcgacaggcccctggacaagggcttgagtggatgggagggatcatccctctttttggtacaccaacctactcacagaacttccagggcagagtcacgattaccgcggacaaatccaccagcacagcccacatggagctgatcagcctgagatctgaggacacggccgtgtattactgtgcgacagatcgctacaggcaggcaaattttgaccgggcccgggttggctggttcgacccctggggccagggcaccctggtcaccgtctcctcagcctccaccaagggcccatcggtcttccccctggcaccctcctccaagagcacctctgggggcacagcggccctgggctgcctggtcaaggactacttccccgaaccggtgacggtgtcgtggaactcaggcgccctgaccagcggcgtgcacaccttcccggctgtcctacagtcctcaggactctactccctcagcagcgtggtgaccgtgccctccagcagcttgggcacccagacctacatctgcaacgtgaatcacaagcccagcaacaccaaggtggacaagaaagttgagcccaaatcttgtgacaaaactcacacatgcccaccgtgcccagcacctgaactcctggggggaccgtcagtcttcctcttccccccaaaacccaaggacaccctcatgatctcccggacccctgaggtcacatgcgtggtggtggacgtgagccacgaagaccctgaggtcaagttcaactggtacgtggacggcgtggaggtgcataatgccaagacaaagccgcgggaggagcagtacaacagcacgtaccgtgtggtcagcgtcctcaccgtcctgcaccaggactggctgaatggcaaggagtacaagtgcaaggtctccaacaaagccctcccagcccccatcgagaaaaccatctccaaagccaaagggcagccccgagaaccacaggtgtacaccctgcccccatcccgggatgagctgaccaagaaccaggtcagcctgacctgcctggtcaaaggcttctatcccagcgacatcgccgtggagtgggagagcaatgggcagccggagaacaactacaagaccacgcctcccgtgctggactccgacggctccttcttcctctacagcaagctcaccgtggacaagagcaggtggcagcaggggaacgtcttctcatgctccgtgatgcatgaggctctgcacaaccactacacgcagaagagcctctccctgtctccgggtaaatgagtgcgacggccggcaagcccccgctccccgggctctcgcggtcgcacgaggatgcttggcacgtaccccgtgtacatacttcccgggcgcccagcatggaaataaagcacccagcgctgccctgggcccctgcg

SEQ ID NO: 740 - DNA, 580 bp, Homo sapiens
atggtggtcatggcgccccgaaccctcttcctgctgctctcgggggccctgaccctgaccgagacctgggcgggctcccactccatgaggtatttcagcgccgccgtgtcccggcccggccgcggggagccccgcttcatcgccatgggctacgtggacgacacgcagttcgtgcggttcgacagcgactcggcgtgtccgaggatggagccgcgggcgccgtgggtggagcaggaggggccggagtattgggaagaggagacacggaacaccaaggcccacgcacagactgacagaatgaacctgcagaccctgcgcggctactacaaccagagcgaggccaagcagtcttccctgcccaccatccccatcatgggtatcgttgctggcctggttgtccttgcagctgtagtcactggagctgcggtcgctgctgtgctgtggagaaagaagagctcagattgaaaaggagggagctactctcaggctgcaatgtgaaacagctgccctgtgtgggactgagtggcaagtccctttgtgacttcaagaaccctgacttctctttgtgcagagaccagcc

SEQ ID NO: 741 - DNA, 1932 bp, Homo sapiens
ggcaacaacaaacgtgcacaggggagtgagggcagggcgctcgcagggggcacgcagggagggcccagggcgccagggaggccgcgccgggctaatccgaaggggctgcgaggtcaggctgtaaccgggtcaatgtgtggaatattggggggctcggctgcagacttggccaaatggacgggactattaaggaggctctgtcggtggtgagcgacgaccaatccctctttgactcagcgtacggagcggcagcccatctccccaaggccgacatgactgcctcggggagtcctgactacgggcagccccacaagatcaaccccctcccaccacagcaggagtggatcaatcagccagtgagggtcaacgtcaagcgggtgtatgaccacatgaatggatccaggcgccacgtgcctcattaaagagcagccttttatgctgggcttcacctgtacccaccctgagcggcagccgtggagccccatggccgcacgcagggcttgcgctggctggaggaggcacggtgcttgggagctgcaagaatggagggaggactggcaggcgagcgggcgagggagtctccggtggactgcagcgttagcaaatgcagcaagctggtgggcggaggcgagtccaaccccatgaactacaacagctatatggacgagaagaatggcccccctcctcccaacatgaccaccaacgagaggagagtcatcgtccccgcagacgccacactggtgacacaggagcatgtgaggcaatggctggagtgggccataaaggagtacagcttgatggagatcgacacatcctttttccagaacatggatggcaaggaactgtgtaaaatgaacaaggaggacttcctccgcgccaccaccctctacaacacggaagtgctgttgtcacacctcagttacctcagggaaagttcactgctggcctataatacaacctcccacaccgaccaatcctcacgattgagtgtcaaagaagacccttcttatgactcagtcagaagaggagcttggggcaataacatgaattctggcctcaacaaaagtcctccccttggaggggcacaaacgatcagtaagaatacagagcaacggccccagccagatccgtatcagatcctgggcccgaccagcagtcgcctagccaaccctggaagcgggcagatccagctgtggcaattcctcctggagctgctctccgacagcgccaacgccagctgtatcacctgggaggggaccaacggggagttcaaaatgacggaccccgatgaggtggccaggcgctgggggcagcggaaaagcaagcccaacatgaattacgacaagctgagccgggccctccgttattactatgataaaaacattatgaccaaagtgcacggcaaaagatatgcttacaaatttgacttccacggcattgcccaggctctgcagccacatccgaccgagtcgtccatgtacaagtacccttctgacatctcctacatgccttcctaccatgcccaccagcagaaggtgaactttgtccctccccatccatcctccatgcctgtcacttcctccagcttctttggagccgcatcacaatactggacctccacggggggaatctaccccaaccccaacgtcccccgccatcctaacacccacgtgccttcacacttaggcagctactactagaagcttactcatcagtggccttctagctgaagcccatcctgcacacttactggatgctttggactcaacaggacatatgtggccttgaagggaagacaaaactggatgttctttcttgttggatagaacctttgtatttgtttctttaaaaacattttttttaatgttggtaacttttgcttcctctacctgaacaaagagatgaataatccatgggccagtatgccagttt

SEQ ID NO: 742 - DNA, 1154 bp, Homo sapiens
gaattcgaggatccgggtaccatggcggcgggcgagcaggagggagccatggtggcggcgacacagggggcagcggcggcggcgggaagcggaccgggaccgggggcggaaccgcgtctggaggcaccgaagggcagcgccgagtcggagggggcgaagattgacgccagtaagaacgaggaggatgaaggccattcaaactcctccccacgacactctgaagcagcgacggcacagcgggaagaatggaaaatgtttataggaggccttagctgggacactacaaagaaagatctgaaggactacttttccaaatttggtgaagttgtagactgcactctgaagttagatcctatcacagggcgatcaaggggttttggctttgtgctatttaaagaatcggagagtgtagataaggtcatggatcaaaaagaacataaattgaatgggaaggtgattgatcctaaaagggccaaagccatgaaaacaaaagagccggttaaaaaaatttttgttggtggcctttctccagatacacctgaagagaaaataagggagtactttggtggttttggtgaggtggaatccatagagctccccatggacaacaagaccaataagaggcgtgggttatgctttattacctttaaggaagaagaaccagtgaagaagataatggaaaagaaataccacaatgttggtcttagtaaatgtgaaataaaagtagccatgtcgaaggaacaatatcagcaacagcaacagtggggatctagaggaggatttgcaggaagagctcgtggaagaggtggtgaccagcagagtggttatgggaaggtatccagggcaggtggtcatcaaaatagctacaaaccatatctaaattattccatttgcaacttatccccaacaggtggtgaagcagtattttccaatttgaagattcatttgaatggctcctgccacctgctaatagcagttcaaactaaattttttgtatcaagtccctgaatggaagtatgacgttgggtccctctgaagtttaattctgagttctcattaaaagaaatttgctttcattgttttatttcttaaaaaaaaaaaaaaaaaaaaaaaaaaaaaaaaaaaaaaaccatggtacccggatcctcgaattc

SEQ ID NO: 743 - DNA, 2622 bp, Homo sapiens
ggcgacggcggtggcggcgtcggaggcgcctccgggggacggtggcggctcccggcggtgaggccgcgcctgtccggggatcgtcgagggacggcgggagcttgggccagcggcggcggcggcctgggacgcaggcggagccccgcgcaggcccaaggtcccggaggctatggcagcggctaccatcgtgcacgacacgtctgaggccgtggagctctgccctgcttacggcttgtacctgaagcccatcaccaagatgaccatcagcgtggcactcccgcagctgaagcagccggggaagtccatctccaactgggaggtgatggagaggctgaagggcatggtgcagaaccaccagttctccacgctgcgtatttccaagagcaccatggacttcatccgcttcgagggggaggtggagaacaagagcctggtcaagtcttttctggcctgcctggacggcaagaccatcaagctcagcggcttctccgacatcctgaaggtgcgcgcggccgagttcaagatcgacttccccacccgccacgactgggactccttcttccgcgacgccaaggacatgaacgagaccctgccgggggagcggccggacaccatccacctggaggggctgccctgcaagtggttcgccctgaaggagtcgggctccgagaagcccagcgaggacgtcctggtcaaggtgtttgagaagttcggggagatccggaatgtggacatccccatgctggacccctaccgggaggagatgacgggccgcaacttccacaccttcagtttcggggggcacttgaacttcgaggcctatgtgcagtaccgtgagtacatgggcttcatccaggccatgagcgccctgcgcgggatgaaactcatgtacaagggcgaggacggcaaggccgtggcctgcaacatcaaggtttcttttgattcgaccaaacacctgagtgatgcctcaattaagaagcggcagctggagaggcagaagcttcaggaactggagcagcaaagagaagaacaaaagcgcagagagaaggaagcggaggagaggcagcgagcggaggaaaggaaacaaaaggagctggaagagctggagcgagagaggaaaagagaagagaagcttcgcaagagggagcagaagcagagggaccgtgagctgcgccggaatcagaagaagctggagaagctgcaggcggaggagcagaagcagctgcaggagaagatcaagctggaggagcgcaagctgctgctggcccagaggaacctgcagtccatccggctcatcgccgagctgctcagcagagccaaggctgtgaagctacgggaacaggagcagaaggaggagaagctgaggctccagcagcaggaggagcggcggcggctgcaggaggccgagctgcggcgcgtggaggaggagaaggagcgcgcgctgggcctgcagcggaaagagcgggagctgcgcgagcggctgctgagcatcctgcagagcaagaagccggacgacagccacacacacgacgagctgggcgtggcacacggacctgctgcagcccgtcctggacatcctgcagaccgtgtcgtccggctgtgtgagcgccaccacgctgcaccccctcgggggccagcccccggccggtgcccccaaggagagcccggcccccccagaggccgacggcgctcccaaaagcgtgaacgggagcgtggccgaggaggccccatgcaaggaggttcagagctcctgtcgtgtggtccccgaggatggctctccagagaagaggtgcccgggcggcgtcctctcctgcattcctgacaacaaccaacagcccaagggcatccctgcctgcgagcagaatgtctccagaaaggacacccggtcagaacaggacaagtgcaaccgggagcccagcaagggccggggccgggccaccggagacgggcttgctgaccggcacaagcgggagaggagccgggccaggcgggccagcagcagggaggacgggaggccacgcaaggagcggcggccccacaagaagcacgcctacaaggatgacagcccccgccggcgcagcacgagcccggaccacacccggtcccggaggtcccacagcaaagacaggcaccggagggagcggagccgggagcggaggggcagcgccagcaggaagcacagccgccaccgccgccgaagcgagcggtcgcgctcccggtccccgagcaggcaccgcagtacctggaacaggtaatgacgggcacggcctccccacggcctgtccgggaaagaccaggacctgctcgagcctcctggccgctccttggccgctctccgtccacccctgcaaagccaagacccttctgcagccacgaatgtccacggagcccgccggcaggaaggaagacaccatgctttagagatccatctttctccactcaccgcagcgtacttggcacttcagtttcaaacacgtagtcctttaaaacttgatccgatagctttaatgcggccggtcctctctcagtcaggaaaattgcacagaccgacagtcgtgaggatggcagagctgctgcattcccccacacggggatttctgtgtctgcttggcgacctcctac

SEQ ID NO: 744 - DNA, 630 bp, Homo sapiens
  misc_feature (544)..(544): n is a, c, g, or t
  misc_feature (580)..(580): n is a, c, g, or t
attctgccactccagtttattgaaatgagtaaatttatagctttatttgcatacagaaaagtgcatgagaaaataagtatgtacaaaacagttgtgtggctgatcatgactttcaaaaattcaactacctagaaatagttacctccagtttagcacatttaggtatttggacatttaaagtactatttcaagtctgtgtttatagtgactgagtaggaagctgatagaaaattatgccatatatgatcaactattaccattaaacataaaaccacaggactttctacttggggctaatcaatagagggtcatgtggcccctgtcttgtttagcttctgagcatcaccctcttcttccccctcaaggtaacgttggatgtggctgattaactcccacaagaacctgagcattaagggtcaagagacaacattaaaaacccaacataaacaaaacaaaacaaaacttattttgaccataataaacccttcagaactgtgctcacaacaggactggaaatgaactgggaacgtttccaagttgtgangagaaaatattgcagacattagatttccatgggtanccccaacattggtctacagccttttctccccctcgtgccgaatcctggcc

SEQ ID NO: 745 - DNA, 585 bp, Homo sapiens
  misc_feature (415)..(415): n is a, c, g, or t
  misc_feature (433)..(433): n is a, c, g, or t
  misc_feature (449)..(449): n is a, c, g, or t
  misc_feature (485)..(485): n is a, c, g, or t
  misc_feature (495)..(495): n is a, c, g, or t
  misc_feature (502)..(502): n is a, c, g, or t
  misc_feature (533)..(533): n is a, c, g, or t
  misc_feature (543)..(543): n is a, c, g, or t
  misc_feature (548)..(548): n is a, c, g, or t
  misc_feature (558)..(558): n is a, c, g, or t
  misc_feature (574)..(574): n is a, c, g, or t
acagatcacagcacactgaacaaatctaaatctgtactcttcaactaggtcttacaagtgagccattgtctttcagtactaaagtcctcaagaagcttaaacttaacctggctaacagtaaaacaatcctgcgtaaggatagggaacaggaaaagcagaaagaaaaaagcaatggggtggggacaaagggaagaagatgagagagatggtggtggagggggagatagaaggagagaaagagaagaggtgagagagagagaaaatctctctgttgtccacagtggccgttctcatgctcaaaattctagctttaaatagagcactcaaacttgcttgggagaagaaggggtggagtagattacttctaagacagattcccaacttttgtttccatttccaaaattctcacttcctnaagcatttggcccaaaanttgttactattttccngcttaaaaaaatgttcccctatttgtgagtttaccnggggtttccnaatattnaaatccaggtagaaaggaaacccttaaaacngtttcagccnttagntcagcctgcntatttaattgatagcnaatatagccta

SEQ ID NO: 746 - DNA, 474 bp, Homo sapiens
  misc_feature (364)..(364): n is a, c, g, or t
  misc_feature (384)..(384): n is a, c, g, or t
  misc_feature (459)..(459): n is a, c, g, or t
ctggttcagattttttttttttaagatgtatccaataacactcacgaagtaattaaaagccactttaaccctgctagtcaaatagctattttatcaaagatgtgtgcatacagatgtatatatatatacacacacacacacagtactgtacagaaacaaacatatgcatacctactatgaacggccaaggcaagggggatgatggcaacttgactagattctgagaactgctatttgtccacagatagcatgtcaatgttgggatgggttggggagtgagcgtaggctaagaaaaaaagagatgaagtgactatgtgcttttctttaaacttagtagttacagacatagtacaggactctactnaataattagtagagatcatngaaagtctggttggatattgaccatgagaccaacagagtgaccactattacttaatgcaacattttggaaagtcnacaactgatgggaaa

SEQ ID NO: 747 - DNA, 491 bp, Homo sapiens
  misc_feature (490)..(490): n is a, c, g, or t
accgtctcctatattcagaatcaatccctaaactgagccaaggtcactgtcaaaggaaagctttatttgcattaaaataaaacagcaaatatagaagacttacttaaaagatttagagtacagaaaaatcaaaacaagtttatttcatcacagacttctttctcgtgaatcaaaggcattcagaactatgttttagagatcaaataatgtattctacaactatatacatacaaatctggtataccactaacacaacataggagttaattctattgatgaatatcatggctaagatatcctgatatactttggctacagaataaaacatgtaaagaactatgctcaaatacagttctttctttgctcagggtttagacaggtttccctctgaatcagaatcacagactaaacaatcacaaattcttctaaaactaagtgctaaacccatggaaaaaaagatataatggtttcctgccagaaattttgctang

SEQ ID NO: 748 - DNA, 680 bp, Homo sapiens
  misc_feature (468)..(468): n is a, c, g, or t
  misc_feature (590)..(590): n is a, c, g, or t
  misc_feature (638)..(638): n is a, c, g, or t
  misc_feature (647)..(647): n is a, c, g, or t
  misc_feature (654)..(654): n is a, c, g, or t
  misc_feature (671)..(671): n is a, c, g, or t
  misc_feature (680)..(680): n is a, c, g, or t
tttcataggatggagttttattgggaggacattctggacgggctcccagcaagagtctggcaatggagcatgaaaatgaatgagcctggaatgagggagggtgcggcctcggctacacaaagttcacccgcccccaactgcctcccagcgtgttagctcctgtggcaactccccacttctctctctgtttttcaacccaaatcctagagcagagggctcttcgctcctcacaccatctccaccaggctgcagggggagtcactaagcccactcaagagctctctcctgttggtccctgattcgcaggggcacgtcattccttctttggtaactcattctctttaacagcccgacacagggtctccaggaaaaggacaggagctcacacagtcatgaacagagatgcatctggagcaggaataaggatgctgacaacatctgtgtctggccctccactcttgtaagggncagtaaggtagtacccagtccctgggggtaaggggggggtggtggtgggaatgagggcatctcttctttcaggggccaaatctggcacaaggatgtctgcttaaggaactccactggctggnaggtctctccctaggaaacaccaaaccttttttaattcctaagcttangtgtgaaantgatcanctcttccaggaagccanaacagaatn

SEQ ID NO: 749 - DNA, 480 bp, Homo sapiens
  misc_feature (442)..(442): n is a, c, g, or t
  misc_feature (453)..(453): n is a, c, g, or t
aaaagttctctcccagacatgagtatattttaaagtacatattaaaagccagcagtttttttttaacagcaaaagccataaaacaagcagttctcaatttacagttaacatagcagcccatcaagtgctcctctcccttagcatatatggtactttgatgcatattgttgatattgacagtcattttgcaaataaatgttctgaaagctttcatcttatttaaaggagtaaacatggaaataaaggcaccattttaatcaggttattgtgataagaccaaaaacattccacaaagtgcatacctcattttcgacttctctattaaatttaaacttgagttaaaatgttaataatttggctttaattgaagagagagttcattcagagaattacagagttcgaattgggatgaatccccagagtttatttaatctggtacccncattaattggnagaatgtgaggctcaaaatggaatgac

SEQ ID NO: 750 - DNA, 473 bp, Homo sapiens
  misc_feature (249)..(249): n is a, c, g, or t
  misc_feature (349)..(349): n is a, c, g, or t
  misc_feature (362)..(362): n is a, c, g, or t
  misc_feature (397)..(397): n is a, c, g, or t
  misc_feature (421)..(421): n is a, c, g, or t
  misc_feature (431)..(431): n is a, c, g, or t
  misc_feature (445)..(445): n is a, c, g, or t
taaaattgaattactttgtagtttaatgattactattgagcaaacaaatctttacagtaatataagtcagcaaaagttttttaaaaggtttaaatccctccttccttacatctatttcattgcttttttaggtttgggaagtaaagcaccagaggaagcatgtgtaaatccttgtataatcgcaggctgtaagtctttagcatctcaggaagttactaacttcaaactaagtatataggtagagtttcntactaaatccagtgcttcttgaaccacaagtagaaagcatttaaaaacatgaatgttggtttggtggtttttggaaggttggtaaaataggaagacctgnttggatggatccngatggccaggggaatttttcccccctggggaaggnaattttaggttaattccccccggngaatgccctnaggtggaaaaggangtgggaaggttttccccaggaatggggc

SEQ ID NO: 751 - DNA, 441 bp, Homo sapiens
tgtagagacagggtctcactatgtcacccagtctggagtgcaatggcacaatatcagttcactgcaattttcacctcctaggctcaagtgatcctccccagcagctgggactacaggtgcacttggctttagttttacaactgaattgtcatggtttacaaacctgtgtccctgatgcatcccacacccaatactaacattcactgttacctattttaaaagcacaaaagctagtatttgaaagtattctcatgcaggtttatgactgtaaatattagacgattacaaaaatataatcccacttcagtgttttagtaatgagacccttatcggccattaataaatagtataaattttacaccagggtaactgggatgttttctgtttcttctcacattggctaagtgggttttaggtttgatatcatctggcacacagcat

SEQ ID NO: 752 - DNA, 636 bp, Homo sapiens
  misc_feature (374)..(374): n is a, c, g, or t
  misc_feature (416)..(416): n is a, c, g, or t
  misc_feature (421)..(421): n is a, c, g, or t
  misc_feature (485)..(485): n is a, c, g, or t
  misc_feature (490)..(490): n is a, c, g, or t
  misc_feature (530)..(530): n is a, c, g, or t
  misc_feature (551)..(551): n is a, c, g, or t
  misc_feature (558)..(558): n is a, c, g, or t
  misc_feature (576)..(576): n is a, c, g, or t
  misc_feature (607)..(607): n is a, c, g, or t
  misc_feature (614)..(614): n is a, c, g, or t
  misc_feature (636)..(636): n is a, c, g, or t
ttgtagagacagggccttgctatgttgcccaggctggtctcgactgaggtctccattcttataaggagaaacaaaaagtattaatagggaaaggaggttatgacttcaccatcagcatacccaaatgagaggctgattcctccatagtttcaagtgactattaaaaaggaataacacaagccatggaagactgaattagcatcaagaaatctacatcatactgtgaaataaaacaaacaaaaaagtaaaacacacaaaaacttatgaaagatcttcactatctgaaaaaaaaaaagggaagaaaaaggtaggcggatggtaggggcagagtatatttgacagactaatttgtcacacagtgacacaatttttcntttaattagaggctagacctgttttactctgccagtgctgcntctgnaaaggccagaggtttgccatagagagacaaagaatgctctcttcccctagatgcccagtgaggnttccngagtgttcccagcccctgtcagcctaggattgaagacccngaaagaatccactgggtgccncaagctngccgatgggtccggatantttacccccaatgtccagtccatccaatggnactgccnattcttaagagcttattcccgn

SEQ ID NO: 753 - DNA, 400 bp, Homo sapiens
  misc_feature (346)..(346): n is a, c, g, or t
aaattatgttattcatgaggaagctagcataaatgagagaaatcgaacttgataagttcttgcattgagtgactgctaatttgaaagtaacagaaagtaacacatgatgagacagatttcctttctggaacacttgttgtttcttagtattgaaaaaaaggactttcattaaaattataatttatccttaaggattagcaatccttttaaaaagagaagagaagaaaaacgtacttgattggtttccctgagttgtgtttttggcaagcccagagctcaaggaaacctgcttggtgacttccccagctggcaattcatttaggactgcaaataagtaacagttggnctcatcatggtagcacccttaaagtggaacccggcatttagaacccccaaatct

SEQ ID NO: 754 - DNA, 13147 bp, Homo sapiens
ccggagcccgagccgaagggcgagccgcaaacgctaagtcgctggccattggtggacatggcgcaggcgcgtttgctccgacgggccgaatgttttggggcagtgttttgagcgcggagaccgcgtgatactggatgcgcatgggcataccgtgctctgcggctgcttggcgttgcttcttcctccagaagtgggcgctgggcagtcacgcagggtttgaaccggaagcgggagtaggtagctgcgtggctaacggagaaaagaagccgtggccgcgggaggaggcgagaggagtcgggatctgcgctgcagccaccgccgcggttgatactactttgaccttccgagtgcagtgacagtgatgtgtgttctgaaattgtgaaccatgagtctagtacttaatgatctgcttatctgctgccgtcaactagaacatgatagagctacagaacgaaagaaagaagttgagaaatttaagcgcctgattcgagatcctgaaacaattaaacatctagatcggcattcagattccaaacaaggaaaatatttgaattgggatgctgtttttagatttttacagaaatatattcagaaagaaacagaatgtctgagaatagcaaaaccaaatgtatcagcctcaacacaagcctccaggcagaaaaagatgcaggaaatcagtagtttggtcaaatacttcatcaaatgtgcaaacagaagagcacctaggctaaaatgtcaagaactcttaaattatatcatggatacagtgaaagattcatctaatggtgctatttacggagctgattgtagcaacatactactcaaagacattctttctgtgagaaaatactggtgtgaaatatctcagcaacagtggttagaattgttctctgtgtacttcaggctctatctgaaaccttcacaagatgttcatagagttttagtggctagaataattcatgctgttaccaaaggatgctgttctcagactgacggattaaattccaaatttttggactttttttccaaggctattcagtgtgcgagacaagaaaagagctcttcaggtctaaatcatatcttagcagctcttactatcttcctcaagactttggctgtcaactttcgaattcgagtgtgtgaattaggagatgaaattcttcccactttgctttatatttggactcaacataggcttaatgattctttaaaagaagtcattattgaattatttcaactgcaaatttatatccatcatccgaaaggagccaaaacccaagaaaaaggtgcttatgaatcaacaaaatggagaagtattttatacaacttatatgatctgctagtgaatgagataagtcatataggaagtagaggaaagtattcttcaggatttcgtaatattgccgtcaaagaaaatttgattgaattgatggcagatatctgtcaccaggtttttaatgaagataccagatccttggagatttctcaatcttacactactacacaaagagaatctagtgattacagtgtcccttgcaaaaggaagaaaatagaactaggctgggaagtaataaaagatcaccttcagaagtcacagaatgattttgatcttgtgccttggctacagattgcaacccaattaatatcaaagtatcctgcaagtttacctaactgtgagctgtctccattactgatgatactatctcagcttctaccccaacagcgacatggggaacgtacaccatatgtgttacgatgccttacggaagttgcattgtgtcaagacaagaggtcaaacctagaaagctcacaaaagtcagatttattaaaactctggaataaaatttggtgtattacctttcgtggtataagttctgagcaaatacaagctgaaaactttggcttacttggagccataattcagggtagtttagttgaggttgacagagaattctggaagttatttactgggtcagcctgcagaccttcatgtcctgcagtatgctgtttgactttggcactgaccaccagtatagttccaggaacggtaaaaatgggaatagagcaaaatatgtgtgaagtaaatagaagcttttctttaaaggaatcaataatgaaatggctcttattctatcagttagagggtgacttagaaaatagcacagaagtgcctccaattcttcacagtaattttcctcatcttgtactggagaaaattcttgtgagtctcactatgaaaaactgtaaagctgcaatgaattttttccaaagcgtgccagaatgtgaacaccaccaaaaagataaagaagaactttcattctcagaagtagaagaactatttcttcagacaacttttgacaagatggactttttaaccattgtgagagaatgtggtatagaaaagcaccagtccagtattggcttctctgtccaccagaatctcaaggaatcactggatcgctgtcttctgggattatcagaacagcttctgaataattactcatctgagattacaaattcagaaactcttgtccggtgttcacgtcttttggtgggtgtccttggctgctactgttacatgggtgtaatagctgaagaggaagcatataagtcagaattattccagaaagccaagtctctaatgcaatgtgcaggagaaagtatcactctgtttaaaaataagacaaatgaggaattcagaattggttccttgagaaatatgatgcagctatgtacacgttgcttgagcaactgtaccaagaagagtccaaataagattgcatctggctttttcctgcgattgttaacatcaaagctaatgaatgacattgcagatatttgtaaaagtttagcatccttcatcaaaaagccatttgaccgtggagaagtagaatcaatggaagatgatactaatggaaatctaatggaggtggaggatcagtcatccatgaatctatttaacgattaccctgatagtagtgttagtgatgcaaacgaacctggagagagccaaagtaccataggtgccattaatcctttagctgaagaatatctgtcaaagcaagatctacttttcttagacatgctcaagttcttgtgtttgtgtgtaactactgctcagaccaatactgtgtcctttagggcagctgatattcggaggaaattgttaatgttaattgattctagcacgctagaacctaccaaatccctccacctgcatatgtatctaatgcttttaaaggagcttcctggagaagagtaccccttgccaatggaagatgttcttgaacttctgaaaccactatccaatgtgtgttctttgtatcgtcgtgaccaagatgtttgtaaaactattttaaaccatgtccttcatgtagtgaaaaacctaggtcaaagcaatatggactctgagaacacaagggatgctcaaggacagtttcttacagtaattggagcattttggcatctaacaaaggagaggaaatatatattctctgtaagaatggccctagtaaattgccttaaaactttgcttgaggctgatccttattcaaaatgggccattcttaatgtaatgggaaaagactttcctgtaaatgaagtatttacacaatttcttgctgacaatcatcaccaagttcgcatgttggctgcagagtcaatcaatagattgttccaggacacgaagggagattcttccaggttactgaaagcacttcctttgaagcttcagcaaacagcttttgaaaatgcatacttgaaagctcaggaaggaatgagagaaatgtcccatagtgctgagaaccctgaaactttggatgaaatttataatagaaaatctgttttactgacgttgatagctgtggttttatcctgtagccctatctgcgaaaaacaggctttgtttgccctgtgtaaatctgtgaaagagaatggattagaacctcaccttgtgaaaaaggttttagagaaagtttctgaaacttttggatatagacgtttagaagactttatggcatctcatttagattatctggttttggaatggctaaatcttcaagatactgaatacaacttatcttcttttccttttattttattaaactacacaaatattgaggatttctatagatcttgttataaggttttgattccacatctggtgattagaagtcattttgatgaggtgaagtccattgctaatcagattcaagaggactggaaaagtcttctaacagactgctttccaaagattcttgtaaatattcttccttattttgcctatgagggtaccagagacagtgggatggcacagcaaagagagactgctaccaaggtctatgatatgcttaaaagtgaaaacttattgggaaaacagattgatcacttattcattagtaatttaccagagattgtggtggagttattgatgacgttacatgagccagcaaattctagtgccagtcagagcactgacctctgtgacttttcaggggatttggatcctgctcctaatccacctcattttccatcgcatgtgattaaagcaacatttgcctatatcagcaattgtcataaaaccaagttaaaaagcattttagaaattctttccaaaagccctgattcctatcagaaaattcttcttgccatatgtgagcaagcagctgaaacaaataatgtttataagaagcacagaattcttaaaatatatcacctgtttgttagtttattactgaaagatataaaaagtggcttaggaggagcttgggcctttgttcttcgagacgttatttatactttgattcactatatcaaccaaaggccttcttgtatcatggatgtgtcattacgtagcttctccctttgttgtgacttattaagtcaggtttgccagacagccgtgacttactgtaaggatgctctagaaaaccatcttcatgttattgttggtacacttataccccttgtgtatgagcaggtggaggttcagaaacaggtattggacttgttgaaatacttagtgatagataacaaggataatgaaaacctctatatcacgattaagcttttagatccttttcctgaccatgttgtttttaaggatttgcgtattactcagcaaaaaatcaaatacagtagaggacccttttcactcttggaggaaattaaccattttctctcagtaagtgtttatgatgcacttccattgacaagacttgaaggactaaaggatcttcgaagacaactggaactacataaagatcagatggtggacattatgagagcttctcaggataatccgcaagatgggattatggtgaaactagttgtcaatttgttgcagttatccaagatggcaataaaccacactggtgaaaaagaagttctagaggctgttggaagctgcttgggagaagtgggtcctatagatttctctaccatagctatacaacatagtaaagatgcatcttataccaaggcccttaagttatttgaagataaagaacttcagtggaccttcataatgctgacctacctgaataacacactggtagaagattgtgtcaaagttcgatcagcagctgttacctgtttgaaaaacattttagccacaaagactggacatagtttctgggagatttataagatgacaacagatccaatgctggcctatctacagccttttagaacatcaagaaaaaagtttttagaagtacccagatttgacaaagaaaacccttttgaaggcctggatgatataaatctgtggattcctctaagtgaaaatcatgacatttggataaagacactgacttgtgcttttttggacagtggaggcacaaaatgtgaaattcttcaattattaaagccaatgtgtgaagtgaaaactgacttttgtcagactgtacttccatacttgattcatgatattttactccaagatacaaatgaatcatggagaaatctgctttctacacatgttcagggatttttcaccagctgtcttcgacacttctcgcaaacgagccgatccacaacccctgcaaacttggattcagagtcagagcactttttccgatgctgtttggataaaaaatcacaaagaacaatgcttgctgttgtggactacatgagaagacaaaagagaccttcttcaggaacaatttttaatgatgctttctggctggatttaaattatctagaagttgccaaggtagctcagtcttgtgctgctcactttacagctttactctatgcagaaatctatgcagataagaaaagtatggatgatcaagagaaaagaagtcttgcatttgaagaaggaagccagagtacaactatttctagcttgagtgaaaaaagtaaagaagaaactggaataagtttacaggatcttctcttagaaatctacagaagtataggggagccagatagtttgtatggctgtggtggagggaagatgttacaacccattactagactacgaacatatgaacacgaagcaatgtggggcaaagccctagtaacatatgacctcgaaacagcaatcccctcatcaacacgccaggcaggaatcattcaggccttgcagaatttgggactctgccatattctttccgtctatttaaaaggattggattatgaaaataaagactggtgtcctgaactagaagaacttcattaccaagcagcatggaggaatatgcagtgggaccattgcacttccgtcagcaaagaagtagaaggaaccagttaccatgaatcattgtacaatgctctacaatctctaagagacagagaattctctacattttatgaaagtctcaaatatgccagagtaaaagaagtggaagagatgtgtaagcgcagccttgagtctgtgtattcgctctatcccacacttagcaggttgcaggccattggagagctggaaagcattggggagcttttctcaagatcagtcacacatagacaactctctgaagtatatattaagtggcagaaacactcccagcttctcaaggacagtgattttagttttcaggagcctatcatggctctacgcacagtcattttggagatcctgatggaaaaggaaatggacaactcacaaagagaatgtattaaggacattctcaccaaacaccttgtagaactctctatactggccagaactttcaagaacactcagctccctgaaagggcaatatttcaaattaaacagtacaattcagttagctgtggagtctctgagtggcagctggaagaagcacaagtattctgggcaaaaaaggagcagagtcttgccctgagtattctcaagcaaatgatcaagaagttggatgccagctgtgcagcgaacaatcccagcctaaaacttacatacacagaatgtctgagggtttgtggcaactggttagcagaaacgtgcttagaaaatcctgcggtcatcatgcagacctatctagaaaaggcagtagaagttgctggaaattatgatggagaaagtagtgatgagctaagaaatggaaaaatgaaggcatttctctcattagcccggttttcagatactcaataccaaagaattgaaaactacatgaaatcatcggaatttgaaaacaagcaagctctcctgaaaagagccaaagaggaagtaggtctccttagggaacataaaattcagacaaacagatacacagtaaaggttcagcgagagctggagttggatgaattagccctgcgtgcactgaaagaggatcgtaaacgcttcttatgtaaagcagttgaaaattatatcaactgcttattaagtggagaagaacatgatatgtgggtattccgactttgttccctctggcttgaaaattctggagtttctgaagtcaatggcatgatgaagagagacggaatgaagattccaacatataaatttttgcctcttatgtaccaattggctgctagaatggggaccaagatgatgggaggcctaggatttcatgaagtcctcaataatctaatctctagaatttcaatggatcacccccatcacactttgtttattatactggccttagcaaatgcaaacagagatgaatttctgactaaaccagaggtagccagaagaagcagaataactaaaaatgtgcctaaacaaagctctcagcttgatgaggatcgaacagaggctgcaaatagaataatatgtactatcagaagtaggagacctcagatggtcagaagtgttgaggcactttgtgatgcttatattatattagcaaacttagatgccactcagtggaagactcagagaaaaggcataaatattccagcagaccagccaattactaaacttaagaatttagaagatgttgttgtccctactatggaaattaaggtggaccacacaggagaatatggaaatctggtgactatacagtcatttaaagcagaatttcgcttagcaggaggtgtaaatttaccaaaaataatagattgtgtaggttccgatggcaaggagaggagacagcttgttaagggccgtgatgacctgagacaagatgctgtcatgcaacaggtcttccagatgtgtaatacattactgcagagaaacacggaaactaggaagaggaaattaactatctgtacttataaggtggttcccctctctcagcgaagtggtgttcttgaatggtgcacaggaactgtccccattggtgaatttcttgttaacaatgaagatggtgctcataaaagatacaggccaaatgatttcagtgcctttcagtgccaaaagaaaatgatggaggtgcaaaaaaagtcttttgaagagaaatatgaagtcttcatggatgtttgccaaaattttcaaccagttttccgttacttctgcatggaaaaattcttggatccagctatttggtttgagaagcgattggcttatacgcgcagtgtagctacttcttctattgttggttacatacttggacttggtgatagacatgtacagaatatcttgataaatgagcagtcagcagaacttgtacatatagatctaggtgttgcttttgaacagggcaaaatccttcctactcctgagacagttccttttagactcaccagagatattgtggatggcatgggcattacgggtgttgaaggtgtcttcagaagatgctgtgagaaaaccatggaagtgatgagaaactctcaggaaactctgttaaccattgtagaggtccttctatatgatccactctttgactggaccatgaatcctttgaaagctttgtatttacagcagaggccggaagatgaaactgagcttcaccctactctgaatgcagatgaccaagaatgcaaacgaaatctcagtgatattgaccagagtttcaacaaagtagctgaacgtgtcttaatgagactacaagagaaactgaaaggagtggaagaaggcactgtgctcagtgttggtggacaagtgaatttgctcatacagcaggccatagaccccaaaaatctcagccgacttttcccaggatggaaagcttgggtgtgatcttcagtatatgaattaccctttcattcagcctttagaaattatattttagcctttatttttaacctgccaacatactttaagtagggattaatatttaagtgaactattgtgggtttttttgaatgttggttttaatacttgatttaatcaccactcaaaaatgttttgatggtcttaaggaacatctctgctttcactctttagaaataatggtcattcgggctgggcgcagcggctcacgcctgtaatcccagcactttgggaggccgaggtgagcggatcacaaggtcaggagttcgagaccagcctggccaagagaccagcctggccagtatggtgaaaccctgtctctactaaaaatacaaaaattagccgagcatggtggcgggcacctgtaatcccagctactcgagaggctgaggcaggagaatctcttgaacctgggaggtgaaggttgctgtgggccaaaatcatgccattgcactccagcctgggtgacaagagcgaaactccatctcaaaaaaaaaaaaaaaaaaacagaaacgtatttggatttttcctagtaagatcactcagtgttactaaataatgaagttgttatggagaacaaatttcaaagacacagttagtgtagttactatttttttaagtgtgtattaaaacttctcattctattctctttatcttttaagcccttctgtactgtccatgtatgttatctttctgtgataacttcatagattgccttctagttcatgaattctcttgtcagatgtatataatctcttttaccctatccattgggcttcttctttcagaaattgtttttcatttctaattatgcatcatttttcagatctctgtttcttgatgtcatttttaatgtttttttaatgttttttatgtcactaattattttaaatgtctgtacttgatagacactgtaatagttctattaaatttagttcctgctgtttatatctgttgatttttgtatttgataggctgttcatccagttttgtctttttgaaaagtgagtttattttcagcaaggctttatctatgggaatcttgagtgtctgtttatgtcatattcccagggctgttgctgcacacaagcccattcttattttaatttcttggctttagggtttccatacctgaagtgtagcataaatactgataggagatttcccaggccaaggcaaacacacttcctcctcatctccttgtgctagtgggcagaatatttgattgatgcctttttcactgagagtataagcttccatgtgtcccacctttatggcaggggtggaaggaggtacatttaattcccactgcctgcctttggcaagccctgggttctttgctccccatatagatgtctaagctaaaagccgtgggttaatgagactggcaaattgttccaggacagctacagcatcagctcacatattcacctctctggtttttcattcccctcatttttttctgagacagagtcttgctctgtcacccaggctggagtgcagtggcatgatctcagctcactgaaacctctgcctcctgggttcaagcaattctcctgcctcagcctcccgagtagctgggactacaggcgtgtgccaacacgcccggctaattttttgtatttttattagagacggagtttcaccgtgttagccaggatggtctcgatcgcttgacctcgtgatccaccctcctcggcctcccaaagtgctgggattacaggtgtgagccaccgcgcccggcctcattcccctcatttttgaccgtaaggatttcccctttcttgtaagttctgctatgtatttaaaagaatgttttctacattttatccagcatttctctgtgttctgttggaagggaagggcttaggtatctagtttgatacataggtagaagtggaacatttctctgtcccccagctgtcatcatataagataaacatcagataaaaagccacctgaaagtaaaactactgactcgtgtattagtgagtataatctcttctccatccttaggaaaatgttcatcccagctgcggagattaacaaatgggtgattgagctttctcctcgtatttggaccttgaaggttatataaatttttttcttatgaagagttggcatttctttttattgccaatggcaggcactcattcatatttgatctcctcaccttcccctcccctaaaaccaatctccagaactttttggactataaatttcttggtttgacttctggagaactgttcagaatattactttgcatttcaaattacaaacttaccttggtgtatctttttcttacaagctgcctaaatgaatatttggtatatattggtagttttattactatagtaaatcaaggaaatgcagtaaacttaaaatgtctttaagaaagccctgaaatcttcatgggtgaaattagaaattatcaactagataatagtatagataaatgaatttgtagctaattcttgctagttgttgcatccagagagctttgaataacatcattaatctactctttagccttgcatggtatgctatgaggctcctgttctgttcaagtattctaatcaatggctttgaaaagtttatcaaatttacatacagatcacaagcctaggagaaataactaattcacagatgacagaattaagattataaaagattttttttttgtaattttagtagagacagggttgccattgtattccagccttggcgacagagcaagactctgcctcaaaaaaaaaaaaaaaaaggttttggcaagctggaactctttctgcaaatgactaagatagaaaactgccaaggacaaatgaggagtagttagattttgaaaatattaatcatagaatagttgttgtatgctaagtcactgacccatattatgtacagcatttctgatctttactttgcaagattagtgatactatcccaatacactgctggagaaatcagaatttggagaaataagttgtccaaggcaagaagatagtaaattataagtacaagtgtaatatggacagtatctaacttgaaaagatttcaggcgaaaagaatctggggtttgccagtcagttgctcaaaaggtcaatgaaaaccaaatagtgaagctatcagagaagctaataaattatagactgcttgaacagttgtgtccagattaagggagataatagctttcccaccctactttgtgcaggtcatacctccccaaagtgtttacctaatcagtaggttcacaaactcttggtcattatagtatatgcctaaaatgtatgcacttaggaatgctaaaaatttaaatatggtctaaagcaaataaaagcaaagaggaaaaactttggacagcgtaaagactagaatagtcttttaaaaagaaagccagtatattggtttgaaatatagagatgtgtcccaatttcaagtattttaattgcaccttaatgaaattatctattttctatagattttagtactattgaatgtattactttactgttacctgaatttattataaagtgtttttgaataaataattctaaaagc

SEQ ID NO: 755 - DNA, 818 bp, Homo sapiens
cgcagcgggtcctctctatctagctccagcctctcgcctgcgccccactccccgcgtcccgcgtcctagccgaccatggccgggcccctgcgcgccccgctgctcctgctggccatcctggccgtggccctggccgtgagccccgcggccggctccagtcccggcaagccgccgcgcctggtgggaggccccatggacgccagcgtggaggaggagggtgtgcggcgtgcactggactttgccgtcggcgagtacaacaaagccagcaacgacatgtaccacagccgcgcgctgcaggtggtgcgcgcccgcaagcagatcgtagctggggtgaactacttcttggacgtggagctgggccgaaccacgtgtaccaagacccagcccaacttggacaactgccccttccatgaccagccacatctgaaaaggaaagcattctgctctttccagatctacgctgtgccttggcagggcacaatgaccttgtcgaaatccacctgtcaggacgcctaggggtctgtaccgggctggcctgtgcctatcacctcttatgcacacctcccaccccctgtattcccacccctggactggtggcccctgccttggggaaggtctccccatgtgcctgcaccaggagacagacagagaaggcagcaggcggcctttgttgctcagcaaggggctctgccctccctccttccttcttgcttctcatagccccggtgtgcggtgcatacacccccacctcctgcaataaaatagtagcatcggcaaaaaaaaaaaaaaaaaaaaaaaaaaaaaaaaaaaaaaaaaaa

SEQ ID NO: 756 - DNA, 2887 bp, Homo sapiens
ggagctgagaggaacaggaagtgtcaggactttacgacccgcgcctccagctgaggtttctagacgtgacccagggcagactggtagcaaagcccccacgcccagccaggagcaccgccgaggactccagcacaccgagggacatgctgggcctgcgccccccactgctcgccctggtggggctgctctccctcgggtgcgtcctctctcaggagtgcacgaagttcaaggtcagcagctgccgggaatgcatcgagtcggggcccggctgcacctggtgccagaagctgaacttcacagggccgggggatcctgactccattcgctgcgacacccggccacagctgctcatgaggggctgtgcggctgacgacatcatggaccccacaagcctcgctgaaacccaggaagaccacaatgggggccagaagcagctgtccccacaaaaagtgacgctttacctgcgaccaggccaggcagcagcgttcaacgtgaccttccggcgggccaagggctaccccatcgacctgtactatctgatggacctctcctactccatgcttgatgacctcaggaatgtcaagaagctaggtggcgacctgctccgggccctcaacgagatcaccgagtccggccgcattggcttcgggtccttcgtggacaagaccgtgctgccgttcgtgaacacgcaccctgataagctgcgaaacccatgccccaacaaggagaaagagtgccagcccccgtttgccttcaggcacgtgctgaagctgaccaacaactccaaccagtttcagaccgaggtcgggaagcagctgatttccggaaacctggatgcacccgagggtgggctggacgccatgatgcaggtcgccgcctgcccggaggaaatcggctggcgcaacgtcacgcggctgctggtgtttgccactgatgacggcttccatttcgcgggcgacgggaagctgggcgccatcctgacccccaacgacggccgctgtcacctggaggacaacttgtacaagaggagcaacgaattcgactacccatcggtgggccagctggcgcacaagctggctgaaaacaacatccagcccatcttcgcggtgaccagtaggatggtgaagacctacgagaaactcaccgagatcatccccaagtcagccgtgggggagctgtctgaggactccagcaatgtggtccaactcattaagaatgcttacaataaactctcctccagggtcttcctggatcacaacgccctccccgacaccctgaaagtcacctacgactccttctgcagcaatggagtgacgcacaggaaccagcccagaggtgactgtgatggcgtgcagatcaatgtcccgatcaccttccaggtgaaggtcacggccacagagtgcatccaggagcagtcgtttgtcatccgggcgctgggcttcacggacatagtgaccgtgcaggttcttccccagtgtgagtgccggtgccgggaccagagcagagaccgcagcctctgccatggcaagggcttcttggagtgcggcatctgcaggtgtgacactggctacattgggaaaaactgtgagtgccagacacagggccggagcagccaggagctggaaggaagctgccggaaggacaacaactccatcatctgctcagggctgggggactgtgtctgcgggcagtgcctgtgccacaccagcgacgtccccggcaagctgatatacgggcagtactgcgagtgtgacaccatcaactgtgagcgctacaacggccaggtctgcggcggcccggggagggggctctgcttctgcgggaagtgccgctgccacccgggctttgagggctcagcgtgccagtgcgagaggaccactgagggctgcctgaacccgcggcgtgttgagtgtagtggtcgtggccggtgccgctgcaacgtatgcgagtgccattcaggctaccagctgcctctgtgccaggagtgccccggctgcccctcaccctgtggcaagtacatctcctgcgccgagtgcctgaagttcgaaaagggcccctttgggaagaactgcagcgcggcgtgtccgggcctgcagctgtcgaacaaccccgtgaagggcaggacctgcaaggagagggactcagagggctgctgggtggcctacacgctggagcagcaggacgggatggaccgctacctcatctatgtggatgagagccgagagtgtgtggcaggccccaacatcgccgccatcgtcgggggcaccgtggcaggcatcgtgctgatcggcattctcctgctggtcatctggaaggctctgatccacctgagcgacctccgggagtacaggcgctttgagaaggagaagctcaagtcccagtggaacaatgataatccccttttcaagagcgccaccacgacggtcatgaaccccaagtttgctgagagttaggagcacttggtgaagacaaggccgtcaggacccaccatgtctgccccatcacgcggccgagacatggcttgccacagctcttgaggatgtcaccaattaaccagaaatccagttattttccgccctcaaaatgacagccatggccggccgggtgcttctgggggctcgtcggggggacagctccactctgactggcacagtctttgcatggagacttgaggagggagggcttgaggttggtgaggttaggtgcgtgtttcctgtgcaagtcaggacatcagtctgattaaaggtggtgccaatttatttacatttaaacttgtcagggtataaaatgacatcccattaattatattgttaatcaatcacgtgtatagaaaaaaaataaaacttcaatacaggctgtccatggaaaaaaaaaaaaaaaaaaaaaa

SEQ ID NO: 757 - DNA, 1844 bp, Homo sapiens
tcctcttcttaccctgcacccagagcctcgccagagaagacaagggcagaaagcaccatgagtgggggcccaatgggaggaaggcccgggggccgaggagcaccagcggttcagcagaacataccctccaccctcctccaggaccacgagaaccagcgactctttgagatgcttggacgaaaatgcttgacgctggccactgcagttgttcagctgtacctggcgctgccccctggagctgagcactggaccaaggagcattgtggggctgtgtgcttcgtgaaggataacccccagaagtcctacttcatccgcctttacggccttcaggctggtcggctgctctgggaacaggagctgtactcacagcttgtctactccacccccacccccttcttccacaccttcgctggagatgactgccaagcggggctgaactttgcagacgaggacgaggcccaggccttccgggccctcgtgcaggagaagatacaaaaaaggaatcagaggcaaagtggagacagacgccagctacccccaccaccaacaccagccaatgaagagagaagaggagggctcccacccctgcccctgcatccaggtggagaccaaggaggccctccagtgggtccgctctccctggggctggcgacagtggacatccagaaccctgacatcacgagttcacgataccgtgggctcccagcacctggacctagcccagctgataagaaacgctcagggaagaagaagatcagcaaagctgatattggtgcacccagtggattcaagcatgtcagccacgtggggtgggacccccagaatggatttgacgtgaacaacctcgacccagatctgcggagtctgttctccagggcaggaatcagcgaggcccagctcaccgacgccgagacctctaaacttatctacgacttcattgaggaccagggtgggctggaggctgtgcggcaggagatgaggcgccaggagccacttccgccgcccccaccgccatctcgaggagggaaccagctcccccggccccctattgtggggggtaacaagggtcgttctggtccactgccccctgtacctttggggattgccccacccccaccaacaccccggggacccccacccccaggccgagggggccctccaccaccaccccctccagctactggacgttctggaccactgccccctccaccccctggagctggtgggccacccatgccaccaccaccgccaccaccgccaccgccgcccagctccgggaatggaccagcccctcccccactccctcctgctctggtgcctgccgggggcctggcccctggtgggggtcggggagcgcttttggatcaaatccggcagggaattcagctgaacaagacccctggggccccagagagctcagcgctgcagccaccacctcagagctcagagggactggtgggggccctgatgcacgtgatgcagaagagaagcagagccatccactcctccgacgaaggggaggaccaggctggcgatgaagatgaagatgatgaatgggatgactgagtggctgagttacttgctgccctgtgctcctccccgcaggacatggctccccctccacctgctctgtgcccaccctccactctcctcttccaggcccccaaccccccatttcttccccaccaacccctccaatgctgttatccctgcctggtcctcacactcacccaacaatcccaaggccctttttatacaaaaattctcagttctcttcactcaaggatttttaaagaaaaataaaagaattgtctttctgtctctctataaaaaaaaaaaaaaaa

SEQ ID NO: 758 - DNA, 2588 bp, Homo sapiens
aggcgcgagggctggctgctgggccgacgaggggcggtgccaggccgtgggtccttagtcaagtgacgcgaagcggccggcctgggcgccgactgcagagccgggaggctggtggtcatgccggggttcctggttcgcatcctccctctgttgctggttctgctgcttctgggccctacgcgcggcttgcgcaatgccacccagaggatgtttgaaattgactatagccgggactccttcctcaaggatggccagccatttcgctacatctcaggaagcattcactactcccgtgtgccccgcttctactggaaggaccggctgctgaagatgaagatggctgggctgaacgccatccagacgtatgtgccctggaactttcatgagccctggccaggacagtaccagttttctgaggaccatgatgtggaatattttcttcggctggctcatgagctgggactgctggttatcctgaggcccgggccctacatctgtgcagagtgggaaatgggaggattacctgcttggctgctagagaaagagtctattcttctccgctcctccgacccagattacctggcagctgtggacaagtggttgggagtccttctgcccaagatgaagcctctcctctatcagaatggagggccagttataacagtgcaggttgaaaatgaatatggcagctactttgcctgtgattttgactacctgcgcttcctgcagaagcgctttcgccaccatctgggggatgatgtggttctgtttaccactgatggagcacataaaacattcctgaaatgtggggccctgcagggcctctacaccacggtggactttggaacaggcagcaacatcacagatgctttcctaagccagaggaagtgtgagcccaaaggacccttgatcaattctgaattctatactggctggctagatcactggggccaacctcactccacaatcaagaccgaagcagtggcttcctccctctatgatatacttgcccgtggggcgagtgtgaacttgtacatgtttataggtgggaccaattttgcctattggaatggggccaactcaccctatgcagcacagcccaccagctacgactatgatgccccactgagtgaggctggggacctcactgagaagtattttgctctgcgaaacatcatccagaagtttgaaaaagtaccagaaggtcctatccctccatctacaccaaagtttgcatatggaaaggtcactttggaaaagttaaagacagtgggagcagctctggacattctgtgtccctctgggcccatcaaaagcctttatcccttgacatttatccaggtgaaacagcattatgggtttgtgctgtaccggacaacacttcctcaagattgcagcaacccagcacctctctcttcacccctcaatggagtccacgatcgagcatatgttgctgtggatgggatcccccagggagtccttgagcgaaacaatgtgatcactctgaacataacagggaaagctggagccactctggaccttctggtagagaacatgggacgtgtgaactatggtgcatatatcaacgattttaagggtttggtttctaacctgactctcagttccaatatcctcacggactggacgatctttccactggacactgaggatgcagtgcgcagccacctggggggctggggacaccgtgacagtggccaccatgatgaagcctgggcccacaactcatccaactacacgctcccggccttttatatggggaacttctccattcccagtgggatcccagacttgccccaggacacctttatccagtttcctggatggaccaagggccaggtctggattaatggctttaaccttggccgctattggccagcccggggccctcagttgaccttgtttgtgccccagcacatcctgatgacctcggccccaaacaccatcaccgtgctggaactggagtgggcaccctgcagcagtgatgatccagaactatgtgctgtgacgttcgtggacaggccagttattggctcatctgtgacctacgatcatccctccaaacctgttgaaaaaagactcatgcccccacccccgcaaaaaaacaaagattcatggctggaccatgtatgatgatgaaagcctgtgtctttgagggattctaccctgaacatacctcacagatcctccctgtcatgccacatttcactgattggaatgtggaaatggaaaaggaatttaggatgtgcattttcacctgaggtttccctgcatccctgcagtgccaaagccccaccttcagggaccacctggaatgtgtgaggggctgacagcacagtaacgtgcatacatatctgcagggctggaatggaagctttaaaggtggtagtgatttttattttggaagaatcatgttacctttttgttaaataaaatttgtactcaaatgatgatgtcactgtttttaatgtgcaggtattgaattatatggtctgacttaaatcataactagacttgagtgggctgaataaaccacttcactaacttgaagttcaaaaggatggaaaata

SEQ ID NO: 759 - DNA, 2116 bp, Homo sapiens
atcagaaccaaattgctgagccagtcacctgtgttccaggagccgaatcagaaatgtcatcctcaggcacgccagacttacctgtcctactcaccgatttgaagattcaatatactaagatcttcataaacaatgaatggcatgattcagtgagtggcaagaaatttcctgtctttaatcctgcaactgaggaggagctctgccaggtagaagaaggagataaggaggatgttgacaaggcagtgaaggccgcaagacaggcttttcagattggatccccgtggcgtactatggatgcttccgagagggggcgactattatacaagttggctgatttaatcgaaagagatcgtctgctgctggcgacaatggagtcaatgaatggtggaaaactctattccaatgcatatctgaatgatttagcaggctgcatcaaaacattgcgctactgtgcaggttgggctgacaagatccagggccgtacaataccaattgatggaaatttttttacatatacaagacatgaacctattggtgtatgtggccaaatcattccttggaatttcccgttggttatgctcatttggaagatagggcctgcactgagctgtggaaacacagtggttgtcaaaccagcagagcaaactcctctcactgctctccacgtggcatctttaataaaagaggcagggtttcctcctggagtagtgaatattgttcctggttatgggcctacagcaggggcagccatttcttctcacatggatatagacaaagtagccttcacaggatcaacagaggttggcaagttgatcaaagaagctgccgggaaaagcaatctgaagagggtgaccctggagcttggaggaaagagcccttgcattgtgttagctgatgccgacttggacaatgctgttgaatttgcacaccatggggtattctaccaccagggccagtgttgtatagccgcatccaggatttttgtggaagaatcaatttatgatgagtttgttcgaaggagtgttgagcgggctaagaagtatatccttggaaatcctctgaccccaggagtcactcaaggccctcagattgacaaggaacaatatgataaaatacttgacctcattgagagtgggaagaaagaaggggccaaactggaatgtggaggaggcccgtgggggaataaaggctactttgtccagcccacagtgttctctaatgttacagatgagatgcgcattgccaaagaggagatttttggaccagtgcagcaaatcatgaagtttaaatctttagatgacgtgatcaaaagagcaaacaatactttctatggcttatcagcaggagtgtttaccaaagacattgataaagccataacaatctcctctgctctgcaggcaggaacagtgtgggtgaattgctatggcgtggtaagtgcccagtgcccctttggtggattcaagatgtctggaaatggaagagaactgggagagtacggtttccatgaatatacagaggtcaaaacagtcacagtgaaaatctctcagaagaactcataaagaaaatacaagagtggagagaagctcttcaatagctaagcatctccttacagtcactaatatagtagattttaaagacaaaatttttcttttcttgatttttttaaacataagctaaatcatattagtattaatactacccatagaaaacttgacatgtagcttcttctgaaagaattatttgccttctgaaatgtgacccccaagtcctatcctaaataaaaaaagacaaattcggatgtatgatctctctagctttgtcatagttatgtgattttcctttgtagctacttttgcaggataataattttatagaaaaggaacagttgcatttagcttctttcccttagtgactcttgaagtacttaacatacacgttaactgcagagtaaattgctctgttcccagtagttataaagtccttggactgttttgaaaagtttcctaggatgtcatgtctgcttgtcaaaagaaataatccctgtaatatttagctgtaaactgaatataaagcttaataaaaacaaccttgcatgaaaaaaaaaaaaaaaaaaaaa

SEQ ID NO: 760 - DNA, 2358 bp, Homo sapiens
cccgggaatcgcacaggacccggctcccctcgcctaagctgctggggggcgccatgggccgctaccgcatccgcgtggccaccggggcctggctcttctccgggtcgtacaaccgcgtgcagctttggctggtcgggacgcgcggggaggcggagctggagctgcagctgcggcccgcgcggggcgaggaggaggagtttgatcatgacgttgcagaggacttggggctcctgcagttcgtgaggctgcgcaagcaccactggctggtggacgacgcgtggttctgcgaccgcatcacggtgcagggccctggagcctgcgcggaggtggccttcccgtgctaccgctgggtgcagggcgaggacatcctgagcctgcccgagggcaccgcccgcctgccaggagacaatgctttggacatgttccagaagcatcgagagaaggaactgaaagacagacagcagatctactgctgggccacctggaaggaagggttacccctgaccatcgctgcagaccgtaaggatgatctacctccaaatatgagattccatgaggagaagaggctggactttgaatggacactgaaggcaggggctctggagatggccctcaaacgtgtttacaccctcctgagctcctggaactgcctagaagactttgatcagatcttctggggccagaagagtgccctggctgagaaggttcgccagtgctggcaggatgatgagttgttcagctaccagttcctcaatggtgccaaccccatgctgttgagacgctcgacctctctgccctccaggctagtgctgccctcggggatggaagagcttcaggctcaactggagaaagaacttcagaatggttccctgtttgaagctgacttcatccttctggatggaattccagccaacgtgatccgaggagagaagcaatacctggctgcccccctcgttatgctgaagatggagcccaatgggaagctgcagcccatggtcatccagattcagcctcccaaccccagctctccaaccccaacactgttcctgccctcagaccccccacttgcctggctcctggcaaagtcctgggtccgaaattcagatttccaactgcacgagatccagtatcacttgctgaacactcacctggtggctgaggtcatcgctgtcgccaccatgcggtgcctcccaggactgcaccccatcttcaagttcctgatcccccatatccgctacaccatggaaatcaacacccgggcccggacccaactcatctcagatggaggaatttttgataaggcagtgagcacaggtggagggggccatgtacagttgctccgtcgggcggcagctcagctgacctactgctccctctgtcctcctgacgacctggctgaccggggcctgctgggactcccaggtgctctctatgcccatgatgctttacggctctgggagatcattgccaggtatgtggaggggatcgtccacctcttctaccaaagggatgacatagtgaagggggaccctgagctgcaggcctggtgtcgggagatcacggaggtggggctgtgccaggcccaggaccgaggtttccctgtctccttccagtcccagagtcaactctgccatttcctcaccatgtgcgtcttcacgtgcactgcccagcatgccgccatcaaccagggccagctggactggtatgcctgggtccctaatgctccatgcacaatgcggatgcccccacccaccaccaaggaagatgtgacgatggccacagtgatggggtcactacctgatgtccggcaggcctgtcttcaaatggccatctcatggcatctgagtcgccgccagccagacatggtgcctctggggcaccacaaagaaaaatatttctcaggccccaagcccaaagctgtgctaaaccaattccgaacagatttggaaaagctggaaaaggagattacagcccggaatgagcaacttgactggccctatgaatatctgaagcccagctgcatagagaacagtgtcaccatctgagccctagagtgactctacctgcaagatttcacatcagctttaggactgacatttctatcttgaatttcatgctttcctaaagtctctgctgctaaggctctatttcctcccccagttaaaccccctacattagtatcccactagcccaggggagcagtaaactttctctgcaaagactagatccttttttacgctttgcagaccgcatagtcactgtctcaactactcagctctcctgctgcagcatgaaggcagccacagacaacatggaaatgagtgtgactatgttccaataaaactttatggacactga

SEQ ID NO: 761 - DNA, 3003 bp, Homo sapiens
tcggggagagaagctggactgcagctggtttcaggaacttctcttgacgagaagagagaccaaggaggccaagcaggggctgggccagaggtgccaacatggggaaactgaggctcggctcggaaaggtgaagtaacttgtccaagatcacaaagctggtgaacatcaagttggtgctatggcaaggctgggaaactgcagcctgacttgggctgccctgatcatcctgctgctccccggaagtctggaggagtgcgggcacatcagtgtctcagcccccatcgtccacctgggggatcccatcacagcctcctgcatcatcaagcagaactgcagccatctggacccggagccacagattctgtggagactgggagcagagcttcagcccgggggcaggcagcagcgtctgtctgatgggacccaggaatctatcatcaccctgccccacctcaaccacactcaggcctttctctcctgctgcctgaactggggcaacagcctgcagatcctggaccaggttgagctgcgcgcaggctaccctccagccataccccacaacctctcctgcctcatgaacctcacaaccagcagcctcatctgccagtgggagccaggacctgagacccacctacccaccagcttcactctgaagagtttcaagagccggggcaactgtcagacccaaggggactccatcctggactgcgtgcccaaggacgggcagagccactgctgcatcccacgcaaacacctgctgttgtaccagaatatgggcatctgggtgcaggcagagaatgcgctggggaccagcatgtccccacaactgtgtcttgatcccatggatgttgtgaaactggagccccccatgctgcggaccatggaccccagccctgaagcggcccctccccaggcaggctgcctacagctgtgctgggagccatggcagccaggcctgcacataaatcagaagtgtgagctgcgccacaagccgcagcgtggagaagccagctgggcactggtgggccccctccccttggaggcccttcagtatgagctctgcgggctcctcccagccacggcctacaccctgcagatacgctgcatccgctggcccctgcctggccactggagcgactggagccccagcctggagctgagaactaccgaacgggcccccactgtcagactggacacatggtggcggcagaggcagctggaccccaggacagtgcagctgttctggaagccagtgcccctggaggaagacagcggacggatccaaggttatgtggtttcttggagaccctcaggccaggctggggccatcctgcccctctgcaacaccacagagctcagctgcaccttccacctgccttcagaagcccaggaggtggcccttgtggcctataactcagccgggacctctcgtcccactccggtggtcttctcagaaagcagaggcccagctctgaccagactccatgccatggcccgagaccctcacagcctctgggtaggctgggagccccccaatccatggcctcagggctatgtgattgagtggggcctgggcccccccagcgcgagcaatagcaacaagacctggaggatggaacagaatgggagagccacggggtttctgctgaaggagaacatcaggccctttcagctctatgagatcatcgtgactcccttgtaccaggacaccatgggaccctcccagcatgtctatgcctactctcaagaaatggctccctcccatgccccagagctgcatctaaagcacattggcaagacctgggcacagctggagtgggtgcctgagccccctgagctggggaagagcccccttacccactacaccatcttctggaccaacgctcagaaccagtccttctccgccatcctgaatgcctcctcccgtggctttgtcctccatggcctggagcccgccagtctgtatcacatccacctcatggctgccagccaggctggggccaccaacagtacagtcctcaccctgatgaccttgaccccagaggggtcggagctacacatcatcctgggcctgttcggcctcctgctgttgctcacctgcctctgtggaactgcctggctctgttgcagccccaacaggaagaatcccctctggccaagtgtcccagacccagctcacagcagcctgggctcctgggtgcccacaatcatggaggaggatgccttccagctgcccggccttggcacgccacccatcaccaagctcacagtgctggaggaggatgaaaagaagccggtgccctgggagtcccataacagctcagagacctgtggcctccccactctggtccagacctatgtgctccagggggacccaagagcagtttccacccagccccaatcccagtctggcaccagcgatcaggtcctttatgggcagctgctgggcagccccacaagcccagggccagggcactatctccgctgtgactccactcagcccctcttggcgggcctcacccccagccccaagtcctatgagaacctctggttccaggccagccccttggggaccctggtaaccccagccccaagccaggaggacgactgtgtctttgggccactgctcaacttccccctcctgcaggggatccgggtccatgggatggaggcgctggggagcttctagggcttcctggggttcccttcttgggcctgcctcttaaaggcctgagctagctggagaagaggggagggtccataagcccatgactaaaaactaccccagcccaggctctcaccatctccagtcaccagcatctccctctcctcccaatctccataggctgggcctcccaggcgatctgcatactttaaggaccagatcatgctccatccagccccacccaatggccttttgtgcttgtttcctataacttcagtattgtaaactagtttttggtttgcagtttttgttgttgtttatagacactcttgggtgta

SEQ ID NO: 762 - DNA, 2596 bp, Homo sapiens
gagcctcgaagtccgccggccaatcgaaggcgggccccagcggcgcgtgcgcgccgcggccagcgcgcgcgggcgggggggcaggcgcgccccggacccaggatttataaaggcgaggccgggaccggcgcgcgctctcgtcgcccccgctgtcccggcggcgccaaccgaagcgccccgcctgatccgtgtccgacatgctgcgccgcgctctgctgtgcctggccgtggccgccctggtgcgcgccgacgcccccgaggaggaggaccacgtcctggtgctgcggaaaagcaacttcgcggaggcgctggcggcccacaagtacctgctggtggagttctatgccccttggtgtggccactgcaaggctctggcccctgagtatgccaaagccgctgggaagctgaaggcagaaggttccgagatcaggttggccaaggtggacgccacggaggagtctgacctggcccagcagtacggcgtgcgcggctatcccaccatcaagttcttcaggaatggagacacggcttcccccaaggaatatacagctggcagagaggctgatgacatcgtgaactggctgaagaagcgcacgggcccggctgccaccaccctgcctgacggcgcagctgcagagtccttggtggagtccagcgaggtggctgtcatcggcttcttcaaggacgtggagtcggactctgccaagcagtttttgcaggcagcagaggccatcgatgacataccatttgggatcacttccaacagtgacgtgttctccaaataccagctcgacaaagatggggttgtcctctttaagaagtttgatgaaggccggaacaactttgaaggggaggtcaccaaggagaacctgctggactttatcaaacacaaccagctgccccttgtcatcgagttcaccgagcagacagccccgaagatttttggaggtgaaatcaagactcacatcctgctgttcttgcccaagagtgtgtctgactatgacggcaaactgagcaacttcaaaacagcagccgagagcttcaagggcaagatcctgttcatcttcatcgacagcgaccacaccgacaaccagcgcatcctcgagttctttggcctgaagaaggaagagtgcccggccgtgcgcctcatcaccctggaggaggagatgaccaagtacaagcccgaatcggaggagctgacggcagagaggatcacagagttctgccaccgcttcctggagggcaaaatcaagccccacctgatgagccaggagctgccggaggactgggacaagcagcctgtcaaggtgcttgttgggaagaactttgaagacgtggcttttgatgagaaaaaaaacgtctttgtggagttctatgccccatggtgtggtcactgcaaacagttggctcccatttgggataaactgggagagacgtacaaggaccatgagaacatcgtcatcgccaagatggactcgactgccaacgaggtggaggccgtcaaagtgcacagcttccccacactcaagttctttcctgccagtgccgacaggacggtcattgattacaacggggaacgcacgctggatggttttaagaaattcctggagagcggtggccaggatggggcaggggatgatgacgatctcgaggacctggaagaagcagaggagccagacatggaggaagacgatgatcagaaagctgtgaaagatgaactgtaatacgcaaagccagacccgggcgctgccgagacccctcgggggctgcacacccagcagcagcgcacgcctccgaagcctgcggcctcgcttgaaggagggcgtcgccggaaacccagggaacctctctgaagtgacacctcacccctacacaccgtccgttcacccccgtctcttccttctgcttttcggtttttggaaagggatccatctccaggcagcccaccctggtggggcttgtttcctgaaaccatgatgtactttttcatacatgagtctgtccagagtgcttgctaccgtgttcggagtctcgctgcctccctcccgcgggaggtttctcctctttttgaaaattccgtctgtgggatttttagacatttttcgacatcagggtatttgttccaccttggccaggcctcctcggagaagcttgtcccccgtgtgggagggacggagccggactggacatggtcactcagtaccgcctgcagtgtcgccatgactgatcatggctcttgcatttttgggtaaatggagacttccggatcctgtcagggtgtcccccatgcctggaagaggagctggtggctgccagccctggggcccggcacaggcctgggccttccccttccctcaagccagggctcctcctcctgtcgtgggctcattgtgaccactggcctctctacagcacggcctgtggcctgttcaaggcagaaccacgacccttgactcccgggtggggaggtggccaaggatgctggagctgaatcagacgctgacagttcttcaggcatttctatttcacaatcgaattgaacacattggccaaataaagttgaaattttaccacctgtaaaaaaaaaaaaaaaaaa

SEQ ID NO: 763 - DNA, 5346 bp, Homo sapiens
atgggacccaggcaggactccgcagtggtgcaccatctgggcatcgacagctcctcggtgtcggccccaccttgagccccagttccaccttctaccgcttcagcacctccggcgcggacagctcctcgctgtcgcctccactcccggccctgggccggacccgggagcagacgctcctcggcgcccgctcacggggacgagtcctgctccctgctatcccagacccctttctctggcgcatggagaacctgggggtcggcgaaggggcagaggcttgcagcaggttgagtcgctctcgcggccgccacagcatgaccagagccccgaagcacctgtggcggcaaccccggcgccccatccgcatccaacagcgcttctattcggatccggacaagtccgcgggctgccgcgagagggacctgagcccgcggccggagctcaggaagtcgcggctctcctggcccgtttcctcctgcaggcgctttgacctggaaaatgggctctcgtgtgggaggagggccctggaccctcagtccagccctggcctgggccggattatgcaggctccagtcccgcacagccagcggcgcgagtccttcctgtaccgctcagatagcgactatgaactctcgcccaaggccatgtctcggaactcctctgtggccagcgacctacatggagaggacatgattgtgacgccctttgcccaggtcctggccagtctgcggaccgttcggagcaacgtggcggcccttgcccgccagcaatgcctaggagcagccaagcagggacccgtcggaaacccttcatccagcaatcagctccctcctgcagaggacacggggcagaagctggcattggagacgctagacgagctggactggtgcctggatcagttggagacgctgcagacccggcactcggtgggggagatggcctccaacaagttcaagcggatcctgaaccgggagttgacccacctgtccgaaaccagccgctccgggaaccaggtgtccgagtacatctcccggaccttcctggaccagcagaccgaggtggagctgcccaaggtgaccgctgaggaggccccacagcccatgtcccggatcagtggcctacatgggctctgccacagtgccagcctctcctcagccactgtcccacgctttggggtccagactgaccaggaggagcaactggccaaggagctagaagacaccaacaagtggggacttgatgtgttcaaggtggcggagctaagtgggaaccggcccctcacagctatcatattcagcatttttcaggagcgggacctgctgaagacattccagatcccagcagacacactggccacctacctgctgatgctggaaggtcactaccacgccaatgtggcctaccacaacagcctacatgccgccgacgtggcccagtccacgcatgtgctgctggctacgcccgccctcgaggctgtgttcacagacttggaaatcctggctgccctctttgcaagcgccatccacgacgtggaccatcctggggtctccaaccagtttctgattaacaccaactcagagctggcgcttatgtacaacgacgcctcggtgctggagaaccatcacctggctgtgggcttcaagctgctgcaggcagagaactgcgatatcttccagaacctcagcgccaagcagcgactgagtctgcgcaggatggtcattgacatggtgctggccacagacatgtccaaacacatgaacctcctggccgacctcaagaccatggtggagaccaagaaggtgacaagcctcggtgtcctcctcctggacaactattccgaccgaatccaggtcttgcagaacctggtgcactgtgctgatctgagcaaccccaccaagccgctgcccctgtaccgccagtggacggaccgcatcatggccgagttcttccagcagggagaccgcgagcgtgagtcgggcctggacatcagtcccatgtgtgacaagcatacggcctcagtggagaagtcccaggtgggtttcattgactacattgctcacccactgtgggagacttgggctgacctggtccacccagatgcacaggacctgctggacacgctggaggacaatcgagagtggtaccagagcaagatcccccgaagtccctcagacctcaccaaccccgagcgggacgggcctgacagattccagtttgaactgactctggaggaggcagaggaagaggatgaggaggaagaagaggagggggaagagacagctttagccaaagaggccttggagttgcctgacactgaactcctgtcccctgaagccggcccagaccctggggacttacccctcgacaaccagaggacttagggccagccctgcgtgaactgcaggggcaatggatggtaaagccctttggctcttggcaggcagactttccaggaagaggctccatgtggctcctgcttcactttcccacccatttagggagacaatcaagctcttagttataggtggctcccagggtctaattggaggcacctggctggggtccactctgaccctagacttgcctaaaagagctctctaaggggcagcctcttacgatgccctggtgtctttctcctgggcttctatccctgtgaggagaggtgctgtctgctggagcctctagtccaccctctccagtggtcactcttgagtcacatctgtcacttaattatttccttctttatcaaatatttattgctcatctacttcgtgccagctttctgcctctgtagtagccctgcacaaagggtggggagtcaggagaccatcccaaaggcatctccctgtcttcctctaccaagcggctctctgcaagagcatggaaatgtgagtggggaaaattttcagcaccaaagcttcactcatacccagttttgtttctgaaactacggtagggggcaggaagaggagcagaaaagaagggctgggcaaggcatagtggcttatgcctgtaatcccggtactttgggaggctgaggtgggaggactgcttaagctcaggagtttgagaccagcctgggcaacatagcaagacccccaccatctctgaaaaaaaaaattagccaggcatggtggtgtgcacctgagaatcccagctactcagaaggttgagacaaaggggatcgcttgagcccaggagttggaggctgaagagagctatgactgcatcactgcactccagcctgggcaacacagcaagatcctgtctaaaaataaaaagaaaagagaaggaaaggaaagagacggggctctgaggccgagcacagtggcccatgcctataatcccagcactttgggaggctgaggcaggtggatcacctgaggttaggagttcgagaccagcctggccaacatggtgaaaccccatctctactaaaaatacaaaaattggctgggcatggtggcgggtgcctgtaatcccagctactggggaggctgaggcaggagaatcacttgaattcaggaggtggaggttgcagtgagccgacatcatgccactgcactccagcctgggcgacagagcaagacactgtctcaaaaaagaaaagaaaaaaaaaaaagccgggccaggtggctcacgcctgtaatcctagcactttgggaggctgagtgggggtggatcgcctgagatcaggagttcaaaatcagcctggccaacatagtgaaaccctgtctctactaaaaatacaaaaaattagaggctgggtgcggcggctcacacctgtaatcccagaactttgggaggccgaggcgggtggatcacgaggtcaggagttcaagaccagcctggccaacacggtgaaaccccatctctactaaaaatacacaaattagctgggcatggtgttgggtgcctgaatcccagctactcgggaggctgaggcaggagaatcgcttgaatccgggaggcggggcttgcagtgagccgagatcgtgccattgcactccagcctgggtgacagagcaagactccgtctcaaaaagaaaaaaaaaaaattagccaggcatggtggcaggtgcctgtaatcccagctacttgagaggctgaggcaggagaatcgcttgaacccgggaggtggaggttgtggtgagccgaggtcgcgccactgcactccagcctgggcaacgacaacaacaataaaaagagggggctctgtgcccggcatgtctctgaagactgattgaacctatgcaccagttgttgctttaagtcgctttattttctgtctttggtgtctctggatgtaggagccccctgctttctctgtccgcagaactccatactgggtcccctacgtgttcctccttccctaggacagcaacaaaaacacacaattttccctctctagcaggtctctaagtctcctgattcctgaaactgcctcagactccccctagagggagggaggcccctgaggctttcttgccatcatagcctcttctgggcctcagtttcccctctgtaacctgatcctagtacttggataaactccgacgaggtgtggggggttgttgtctgtgacctccctgaaatatcttagacatttggggtactgagcatttatctggggttaaataaaatctttacatcttaagacattcgattgaccaaattgagtgtcctggccatttcactgatgaggaaactgaggcgcagagaggtcctcttgccagctcaaagtcaagcatctgggcgcccaatgttagccagcggcaccccctggtggcgggcgtgggagacacggcggggcgcgcttgtcgggggttggggggtgggtcggaggggtggcatcctccagccctgatggtcccacttaccgcacctcgccgggaagagctcgtcctgctggtcgggcctccgagcggactgggcagcaccatgctcaagcctagggttcgatccccgcctccggaagcctcagtatccatccctcccctctgcctccctcttcgcgtgcctgaatatttatacaagatacaggcgtcatcacagccgccctcggcttccagagcagctggcttcgttcataaatattataaccactcagaattcatcatcatcacagttaatgataaaattccacagtgccagaactaaaagtcatccgggttcacgaacttggtgcatttccttccagacttttaaaaagaagatatttagggaatttttttttcaagatttttccccccagtccgcttacaaagtaataccatgttcgctgtaaaaaatttggaaataatggaaatgtataaagaaggaaataaaattctgctgtatctccaccca

SEQ ID NO: 764 - DNA, 5093 bp, Homo sapiens
aggtgacagctggagggaggagcgggggtggagccgggggaagggtggggaggggatgggctggagctccgggcagtgtgcgaggcgcacgcacaggagcctgcactctgcgtcccgcaccccagcagccgcgccatgagccggagtctcttgctctggttcttgctgttcctgctcctgctcccgccgctccccgtcctgctcgcggacccaggggcgcccacgccagtgaatccctgttgttactatccatgccagcaccagggcatctgtgtccgcttcggccttgaccgctaccagtgtgactgcacccgcacgggctattccggccccaactgcaccatccctggcctgtggacctggctccggaattcactgcggcccagcccctctttcacccacttcctgctcactcacgggcgctggttctgggagtttgtcaatgccaccttcatccgagagatgctcatgcgcctggtactcacagtgcgctccaaccttatccccagtccccccacctacaactcagcacatgactacatcagctgggagtctttctccaacgtgagctattacactcgtattctgccctctgtgcctaaagattgccccacacccatgggaaccaaagggaagaagcagttgccagatgcccagctcctggcccgccgcttcctgctcaggaggaagttcatacctgacccccaaggcaccaacctcatgtttgccttctttgcacaacacttcacccaccagttcttcaaaacttctggcaagatgggtcctggcttcaccaaggccttgggccatggggtagacctcggccacatttatggagacaatctggagcgtcagtatcaactgcggctctttaaggatgggaaactcaagtaccaggtgctggatggagaaatgtacccgccctcggtagaagaggcgcctgtgttgatgcactacccccgaggcatcccgccccagagccagatggctgtgggccaggaggtgtttgggctgcttcctgggctcatgctgtatgccacgctctggctacgtgagcacaaccgtgtgtgtgacctgctgaaggctgagcaccccacctggggcgatgagcagcttttccagacgacccgcctcatcctcataggggagaccatcaagattgtcatcgaggagtacgtgcagcagctgagtggctatttcctgcagctgaaatttgacccagagctgctgttcggtgtccagttccaataccgcaaccgcattgccatggagttcaaccatctctaccactggcaccccctcatgcctgactccttcaaggtgggctcccaggagtacagctacgagcagttcttgttcaacacctccatgttggtggactatggggttgaggccctggtggatgccttctctcgccagattgctggccggatcggtgggggcaggaacatggaccaccacatcctgcatgtggctgtggatgtcatcagggagtctcgggagatgcggctgcagcccttcaatgagtaccgcaagaggtttggcatgaaaccctacacctccttccaggagctcgtaggagagaaggagatggcagcagagttggaggaattgtatggagacattgatgcgttggagttctaccctggactgcttcttgaaaagtgccatccaaactctatctttggggagagtatgatagagattggggctcccttttccctcaagggtctcctagggaatcccatctgttctccggagtactggaagccgagcacatttggcggcgaggtgggctttaacattgtcaagacggccacactgaagaagctggtctgcctcaacaccaagacctgtccctacgtttccttccgtgtgccggatgccagtcaggatgatgggcctgctgtggagcgaccatccacagagctctgaggggcaggaaagcagcattctggaggggagagctttgtgcttgtcattccagagtgctgaggccagggctgatggtcttaaatgctcattttctggtttggcatggtgagtgttggggttgacatttagaactttaagtctcacccattatctggaatattgtgattctgtttattcttccagaatgctgaactccttgttagcccttcagattgttaggagtggttctcatttggtctgccagaatactgggttcttagttgacaacctagaatgtcagatttctggttgatttgtaacacagtcattctaggatgtggagctactgatgaaatctgctagaaagttagggggttcttattttgcattccagaatcttgactttctgattggtgattcaaagtgttgtgttcctggctgatgatccagaacagtggctcgtatcccaaatctgtcagcatctggctgtctagaatgtggatttgattcattttcctgttcagtgagatatcatagagacggagatcctaaggtccaacaagaatgcattccctgaatctgtgcctgcactgagagggcaaggaagtggggtgttcttcttgggacccccactaagaccctggtctgaggatgtagagagaacaggtgggctgtattcacgccattggttggaagctaccagagctctatccccatccaggtcttgactcatggcagctgtttctcatgaagctaataaaattcgctttctaaagttacctgttatatatctcttttggtcccatcctctaaagcagaggcaacactggaacatggctagcctttcttgtagccatggctgggcgtgctagaggttgcagcatgagactttctgctgggatccttgggcccatcactgtatagacatgctaccactggtacttcctttctccctgcgggccaggcactgcccttttcaggaagctctcttaaaatacccattgccccagacctggaagatataacattcagttcccaccatctgattaaaacaacttcctcccttacagagcatacaacagagggggcacccggggaggagagcacatactgtgttccaatttcacgcttttaattctcatttgttctcacaccaacagtgtgaagtgcgtggtataatctccatttcaaaaccaaggaagcagcctcagagtggtcgagtgacacacctcacgcaggctgagtccagagcttgtgctcctcttgattcctggtttgactcagttccaggcctgatcttgcctgtctggctcagggtcaaagacagaatggtggagtgtagcctccacctgatattcaggctactcattcagtcccaaatatgtattttcctaagtgtttactatgtgccagttcctgtaacaggtgtggggacacagcagtgagtaatcaatacagacaaggttctgcccttatggagctcacactccagtggcagacaaacagaccataaataaggaaacgatgaaataagatatatacaaggtgagtgtgacttcccttctaaccccctctgctctgtcctcccctattgcgctctcaagaccagagacccaacagcagtgatctcagggcagacagccctccactccagctctgagacccttttctcaggacctctgtaggcagcagagagagaggacagaggggtaagatgaggggttgagggaaggttcttcatgatccacactttgggcttagtatttctcaggaagagctatggcccagaaacaacaggggaaactagagttcggtctgacagtccttggggttaagtctcctgtcttatggtccagaaactcctgtttctccttagttggctggaaactgctcccatcattccttctggcctctgctgaatgcagggaatgcaatccttccctgctcttgcagttgctctgacgtagaaagatccttcgggtgctggaagtctccatgaagagcttgtgtcctgtcctttcttgcagattctatttcccctcttctgctaatacctcttactttgcttgagaatcctctcctttcttattaatttcagtcttggtggttctatcaggggtgcattctggccaaggggtgggcctgtgaatcaatcctgggcaatcagacaccctctccttaaaaactggcccgtggagactgagatcactgactctgactcatccccacagctggctctgacaagatggtccatttgttcctgcttccgagatccccagggcagcctggatccctgcccttctcaagactttagcttttccttccatccggtggcctattccaggaattcctcttttgcttaaatcagttggagtttgtgtctgttgcttgtaatcaagcctttatggctgctgggctgagtgacacaagcactttaatggcctggagggacttttaatcagtgaagatgcaatcagacaagtgttttggaaagagcaccctcgagaagggtggatgacagggcagagcaggaaggacaggaagctggcagaacggaggaggctgcagccgtggtccaaccaggagctgatggcagctggggctaggggaagggctttgagggtggaaggatgggatgggttccagaggtattcctctcttaaatgcaagtgcctagattaggtagactttgcttagtattgacaactgcacatgaaagttttgcaaagggaaacaggctaaatgcaccaagaaagcttcttcagagtgaagaatcttaatgcttgtaatttaaacatttgttcctggagttttgatttggtggatgtgatggttggttttatttgtcagtttggttgggctatagcacacagttatttaatcaaacagtaatctaggtgtggctgtgaaggtattttgtagatgtgattaacatctacaatcagttgactttaagtgaaagagattacttaaataatttgggtgagctgcacctgattagttgaaaggcctcaagaacaaacactgcagtttcctggaaaagaagaaactttgcctcaagactatagccatcgactcctgcctgagtttccagcctgctagtctgccctatggatttgaagtttgccaaccccaacaattgtgtgaattaatttctaaaaataaagctatatacagcc

SEQ ID NO: 765 - DNA, 4465 bp, Homo sapiens
caattgtcatacgacttgcagtgagcgtcaggagcacgtccaggaactcctcagcagcgcctccttcagctccacagccagacgccctcagacagcaaagcctacccccgcgccgcgccctgcccgccgctcggatgctcgcccgcgccctgctgctgtgcgcggtcctggcgctcagccatacagcaaatccttgctgttcccacccatgtcaaaaccgaggtgtatgtatgagtgtgggatttgaccagtataagtgcgattgtacccggacaggattctatggagaaaactgctcaacaccggaatttttgacaagaataaaattatttctgaaacccactccaaacacagtgcactacatacttacccacttcaagggattttggaacgttgtgaataacattcccttccttcgaaatgcaattatgagttatgtcttgacatccagatcacatttgattgacagtccaccaacttacaatgctgactatggctacaaaagctgggaagccttctctaacctctcctattatactagagcccttcctcctgtgcctgatgattgcccgactcccttgggtgtcaaaggtaaaaagcagcttcctgattcaaatgagattgtggaaaaattgcttctaagaagaaagttcatccctgatccccagggctcaaacatgatgtttgcattctttgcccagcacttcacgcatcagtttttcaagacagatcataagcgagggccagctttcaccaacgggctgggccatggggtggacttaaatcatatttacggtgaaactctggctagacagcgtaaactgcgccttttcaaggatggaaaaatgaaatatcagataattgatggagagatgtatcctcccacagtcaaagatactcaggcagagatgatctaccctcctcaagtccctgagcatctacggtttgctgtggggcaggaggtctttggtctggtgcctggtctgatgatgtatgccacaatctggctgcgggaacacaacagagtatgcgatgtgcttaaacaggagcatcctgaatggggtgatgagcagttgttccagacaagcaggctaatactgataggagagactattaagattgtgattgaagattatgtgcaacacttgagtggctatcacttcaaactgaaatttgacccagaactacttttcaacaaacaattccagtaccaaaatcgtattgctgctgaatttaacaccctctatcactggcatccccttctgcctgacacctttcaaattcatgaccagaaatacaactatcaacagtttatctacaacaactctatattgctggaacatggaattacccagtttgttgaatcattcaccaggcaaattgctggcagggttgctggtggtaggaatgttccacccgcagtacagaaagtatcacaggcttccattgaccagagcaggcagatgaaataccagtcttttaatgagtaccgcaaacgctttatgctgaagccctatgaatcatttgaagaacttacaggagaaaaggaaatgtctgcagagttggaagcactctatggtgacatcgatgctgtggagctgtatcctgcccttctggtagaaaagcctcggccagatgccatctttggtgaaaccatggtagaagttggagcaccattctccttgaaaggacttatgggtaatgttatatgttctcctgcctactggaagccaagcacttttggtggagaagtgggttttcaaatcatcaacactgcctcaattcagtctctcatctgcaataacgtgaagggctgtccctttacttcattcagtgttccagatccagagctcattaaaacagtcaccatcaatgcaagttcttcccgctccggactagatgatatcaatcccacagtactactaaaagaacgttcgactgaactgtagaagtctaatgatcatatttatttatttatatgaaccatgtctattaatttaattatttaataatatttatattaaactccttatgttacttaacatcttctgtaacagaagtcagtactcctgttgcggagaaaggagtcatacttgtgaagacttttatgtcactactctaaagattttgctgttgctgttaagtttggaaaacagtttttattctgttttataaaccagagagaaatgagttttgacgtctttttacttgaatttcaacttatattataagaacgaaagtaaagatgtttgaatacttaaacactatcacaagatggcaaaatgctgaaagtttttacactgtcgatgtttccaatgcatcttccatgatgcattagaagtaactaatgtttgaaattttaaagtacttttggttatttttctgtcatcaaacaaaaacaggtatcagtgcattattaaatgaatatttaaattagacattaccagtaatttcatgtctactttttaaaatcagcaatgaaacaataatttgaaatttctaaattcatagggtagaatcacctgtaaaagcttgtttgatttcttaaagttattaaacttgtacatataccaaaaagaagctgtcttggatttaaatctgtaaaatcagatgaaattttactacaattgcttgttaaaatattttataagtgatgttcctttttcaccaagagtataaacctttttagtgtgactgttaaaacttccttttaaatcaaaatgccaaatttattaaggtggtggagccactgcagtgttatctcaaaataagaatattttgttgagatattccagaatttgtttatatggctggtaacatgtaaaatctatatcagcaaaagggtctacctttaaaataagcaataacaaagaagaaaaccaaattattgttcaaatttaggtttaaacttttgaagcaaacttttttttatccttgtgcactgcaggcctggtactcagattttgctatgaggttaatgaagtaccaagctgtgcttgaataacgatatgttttctcagattttctgttgtacagtttaatttagcagtccatatcacattgcaaaagtagcaatgacctcataaaatacctcttcaaaatgcttaaattcatttcacacattaattttatctcagtcttgaagccaattcagtaggtgcattggaatcaagcctggctacctgcatgctgttccttttcttttcttcttttagccattttgctaagagacacagtcttctcatcacttcgtttctcctattttgttttactagttttaagatcagagttcactttctttggactctgcctatattttcttacctgaacttttgcaagttttcaggtaaacctcagctcaggactgctatttagctcctcttaagaagattaaaagagaaaaaaaaaggcccttttaaaaatagtatacacttattttaagtgaaaagcagagaattttatttatagctaattttagctatctgtaaccaagatggatgcaaagaggctagtgcctcagagagaactgtacggggtttgtgactggaaaaagttacgttcccattctaattaatgccctttcttatttaaaaacaaaaccaaatgatatctaagtagttctcagcaataataataatgacgataatacttcttttccacatctcattgtcactgacatttaatggtactgtatattacttaatttattgaagattattatttatgtcttattaggacactatggttataaactgtgtttaagcctacaatcattgatttttttttgttatgtcacaatcagtatattttctttggggttacctctctgaatattatgtaaacaatccaaagaaatgattgtattaagatttgtgaataaatttttagaaatctgattggcatattgagatatttaaggttgaatgtttgtccttaggataggcctatgtgctagcccacaaagaatattgtctcattagcctgaatgtgccataagactgaccttttaaaatgttttgagggatctgtggatgcttcgttaatttgttcagccacaatttattgagaaaatattctgtgtcaagcactgtgggttttaatatttttaaatcaaacgctgattacagataatagtatttatataaataattgaaaaaaattttcttttgggaagagggagaaaatgaaataaatatcattaaagataactcaggagaatcttctttacaattttacgtttagaatgtttaaggttaagaaagaaatagtcaatatgcttgtataaaacactgttcactgttttttttaaaaaaaaaacttgatttgttattaacattgatctgctgacaaaacctgggaatttgggttgtgtatgcgaatgtttcagtgcctcagacaaatgtgtatttaacttatgtaaaagataagtctggaaataaatgtctgtttatttttgtactattta

SEQ ID NO: 766 - DNA, 866 bp, Homo sapiens
tcctctttttccggctggaaccatggagggtgtagaagagaagaagaaggaggttcctgctgtgccagaaacccttaagaaaaagcgaaggaatttcgcagagctgaagatcaagcgcctgagaaagaagtttgcccaaaagatgcttcgaaaggcaaggaggaagcttatctatgaaaaagcaaagcactatcacaaggaatataggcagatgtacagaactgaaattcgaatggcgaggatggcaagaaaagctggcaacttctatgtacctgcagaacccaaattggcgtttgtcatcagaatcagaggtatcaatggagtgagcccaaaggttcgaaaggtgttgcagcttcttcgccttcgtcaaatcttcaatggaacctttgtgaagctcaacaaggcttcgattaacatgctgaggattgtagagccatatattgcatgggggtaccccaatctgaagtcagtaaatgaactaatctacaagcgtggttatggcaaaatcaataagaagcgaattgctttgacagataacgctttgattgctcgatctcttggtaaatacggcatcatctgcatggaggatttgattcatgagatctatactgttggaaaacgcttcaaagaggcaaataacttcctgtggcccttcaaattgtcttctccacgaggtggaatgaagaaaaagaccacccattttgtagaaggtggagatgctggcaacagggaggaccagatcaacaggcttattagaagaatgaactaaggtgtctaccatgattatttttctaagctggttggttaataaacagtacctgctctcaaattgaaataaaaaaaaaaaaaaaaaaaaaaaaaaaaaa

SEQ ID NO: 767 - DNA, 594 bp, Homo sapiens
ggccacgtgaggagggtgggcggggcgttaaagttcatatcccagtgtcctttgaatcgacttccttttttcttttttccggcgttcaagatgtcgaagcgaggacgtggtgggtcctctggtgcgaaattccggatttccttgggtcttccggtaggagctgtaatcaattgtgctgacaacacaggagccaaaaacctgtatatcatctccgtgaaggggatcaagggacggctgaacagacttcccgctgctggtgtgggtgacatggtgatggccacagtcaagaaaggcaaaccagagctcagaaaaaaggtacatccagcagtggtcattcgacaacgaaagtcataccgtagaaaagatggcgtgtttctttattttgaagataatgcaggagtcatagtgaacaataaaggcgagatgaaaggttctgccattacaggaccagtagcaaaggagtgtgcagacttgtggccccggattgcatccaatgctggcagcattgcatgattctccagtatatttgtaaaaaataaaaaaaaaaactaaacccattaaaaagtatttgtttgcaaaaaaaaaaaaaaaaaa

SEQ ID NO: 768 - DNA, 1621 bp, Homo sapiens
gcggcaggtctctgcgcagcccagcccgccggtccacgccgcgcaccgctccgagggccagcgccacccgctccgcagccggcaccatgcgcgagatcgtgcacatccaggcgggccagtgcggcaaccagatcggcgccaagttttgggaggtcatcagcgatgagcatgggatcgaccccacaggcagttaccatggagacagtgacttgcagctggagagaatcaacgtgtactacaatgaggctgctggtaacaaatatgtacctcgggccatcctggtggatctggagcctggcaccatggactctgtcaggtctggacccttcggccagatcttcagaccagacaacttcgtgttcggccagagtggagccgggaataactgggccaagggccactacacagagggagccgagctggtcgactcggtcctggatgtggtgaggaaggagtcagagagctgtgactgtctccagggcttccagctgacccactctctggggggcggcacggggtccgggatgggcaccctgctcatcagcaagatccgggaagagtacccagaccgcatcatgaacaccttcagcgtcatgccctcacccaaggtgtcagacacggtggtggagccctacaacgccaccctctctgtccaccagctggtggaaaacacagatgaaacctactccattgataacgaggccctgtatgacatctgcttccgcaccctgaagctgaccacccccacctacggggacctcaaccacctggtgtcggccaccatgagcggggtcaccacctgcctgcgcttcccgggccagctgaacgcagacctgcgcaagctggcggtgaacatggtgcccttccctcgcctgcacttcttcatgcccggcttcgcgcccctgaccagccggggcagccagcagtaccgggcgctcacggtgcccgagctcacccagcagatgttcgactccaagaacatgatggccgcctgcgacccgcgccacggccgctacctgacggtggctgccatcttccggggccgcatgtccatgaaggaggtggacgagcagatgctcaacgtgcagaacaagaacagcagctacttcgtggagtggatccccaacaacgtgaagacggccgtgtgcgacatcccgccccgcggcctgaagatgtcggccaccttcatcggcaacagcacggccatccaggagctgttcaagcgcatctccgagcagttcacggccatgttccggcgcaaggccttcctgcactggtacacgggcgagggcatggacgagatggagttcaccgaggccgagagcaacatgaacgacctggtgtccgagtaccagcagtaccaggacgccacggccgacgaacaaggggagttcgaggaggaggagggcgaggacgaggcttaaaaacttctcagatcaatcgtgcatccttagtgaacttctgttgtcctcaagcatggtctttctacttgtaaactatggtgctcagttttgcctctgttagaaattcacactgttgatgtaatgatgtggaactcctctaaaaattacagtattgtctgtgaaggtatctatactaataaaaaagcatgtgtagaaaa

SEQ ID NO: 769 - DNA, 2915 bp, Homo sapiens
ggctgtcctcccggtccgccccgcgctgcggttgctgctgggctaacgggctccgatccagcgagcgctgcgtcctcgagtccctgcgcccgtgcgtccgtctgcgacccgaggcctccgctgcgcgtggattctgctgcgaaccggagaccatggccaaaccagcacagggtgccaagtaccggggctccatccatgacttcccaggctttgaccccaaccaggatgccgaggctctgtacactgccatgaagggctttggcagtgacaaggaggccatactggacataatcacctcacggagcaacaggcagaggcaggaggtctgccagagctacaagtccctctacggcaaggacctcattgctgatttaaagtatgaattgacgggcaagtttgaacggttgattgtgggcctgatgaggccacctgcctattgtgatgccaaagaaattaaagatgccatctcgggcattggcactgatgagaagtgcctcattgagatcttggcttcccggaccaatgagcagatgcaccagctggtggcagcatacaaagatgcctacgagcgggacctggaggctgacatcatcggcgacacctctggccacttccagaagatgcttgtggtcctgctccagggaaccagggaggaggatgacgtagtgagcgaggacctggtacaacaggatgtccaggacctatacgaggcaggggaactgaaatggggaacagatgaagcccagttcatttacatcttgggaaatcgcagcaagcagcatcttcggttggtgttcgatgagtatctgaagaccacagggaagccgattgaagccagcatccgaggggagctgtctggggactttgagaagctaatgctggccgtagtgaagtgtatccggagcaccccggaatattttgctgaaaggctcttcaaggctatgaagggcctggggactcgggacaacaccctgatccgcatcatggtctcccgtagtgagttggacatgctcgacattcgggagatcttccggaccaagtatgagaagtccctctacagcatgatcaagaatgacacctctggcgagtacaagaagactctgctgaagctgtctgggggagatgatgatgctgctggccagttcttcccggaggcagcgcaggtggcctatcagatgtgggaacttagtgcagtggcccgagtagagctgaagggaactgtgcgcccagccaatgacttcaaccctgacgcagatgccaaagcgctgcggaaagccatgaagggactcgggactgacgaagacacaatcatcgatatcatcacgcaccgcagcaatgtccagcggcagcagatccggcagaccttcaagtctcactttggccgggacttaatgactgacctgaagtctgagatctctggagacctggcaaggctgattctggggctcatgatgccaccggcccattacgatgccaagcagttgaagaaggccatggagggagccggcacagatgaaaaggctcttattgaaatcctggccactcggaccaatgctgaaatccgggccatcaatgaggcctataaggaggactatcacaagtccctggaggatgctctgagctcagacacatctggccacttcaggaggatcctcatttctctggccacggggcatcgtgaggagggaggagaaaacctggaccaggcacgggaagatgcccaggtggctgctgagatcttggaaatagcagacacacctagtggagacaaaacttccttggagacacgtttcatgacgatcctgtgtacccggagctatccgcacctccggagagtcttccaggagttcatcaagatgaccaactatgacgtggagcacaccatcaagaaggagatgtctggggatgtcagggatgcatttgtggccattgttcaaagtgtcaagaacaagcctctcttctttgccgacaaactttacaaatccatgaagggtgctggcacagatgagaagactctgaccaggatcatggtatcccgcagtgagattgacctgctcaacatccggagggaattcattgagaaatatgacaagtctctccaccaagccattgagggtgacacctccggagacttcctgaaggccttgctggctctctgtggtggtgaggactagggccacagctttggcgggcacttctgccaagaaatggttatcagcaccagccgccatggccaagcctgattgttccagctccagagactaaggaaggggcaggggtggggggaggggttgggttgggctcttatcttcagtggagcttaggaaacgctcccactcccacgggccatcgagggcccagcacggctgagcggctgaaaaaccgtagccatagatcctgtccacctccactcccctctgaccctcaggctttcccagcttcctccccttgctacagcctctgccctggtttgggctatgtcagatccaaaaacatcctgaacctctgtctgtaaaatgagtagtgtctgtactttgaatgagggggttggtggcaggggccagttgaatgtgctgggcggggtggtgggaaggatagtaaatgtgctggggcaaactgacaaatcttcccatccatttcaccacccatctccatccaggccgcgctagagtactggaccaggaatttggatgcctgggttcaaatctgcatctgccatgcacttgtttctgaccttaggccagcccctttccctccctgagtctctattttcttatctacaatgagacagttggacaaaaaaatcttggcttcccttctaacattaacttcctaaagtatgcctccgattcattcccttgacactttttatttctaaggaagaaataaaaagagatacacaaacacataaacac

SEQ ID NO: 770 - DNA, 2914 bp, Homo sapiens
gtgctctgagtttttggtttctgtttcaccttgtgtctgagctggtctgaaggctggttgttcagactgagcttcctgcctgcctgtaccccgccaacagcttcagaagaaggtgactggtggctgcctgaggaataccagtgggcaagagaattagcatttctggagcatctgctgtctgagcagcccctgggtgcgtccactttctgggcacgtgaggttgggccttggccgcctgagcccttgagttggtcacttgaaccttgggaatattgagattatattctcctgccttttaaaaagatggacttcagcagaaatctttatgatattggggaacaactggacagtgaagatctggcctccctcaagttcctgagcctggactacattccgcaaaggaagcaagaacccatcaaggatgccttgatgttattccagagactccaggaaaagagaatgttggaggaaagcaatctgtccttcctgaaggagctgctcttccgaattaatagactggatttgctgattacctacctaaacactagaaaggaggagatggaaagggaacttcagacaccaggcagggctcaaatttctgcctacaggttccacttctgccgcatgagctgggctgaagcaaacagccagtgccagacacagtctgtacctttctggcggagggtcgatcatctattaataagggtcatgctctatcagatttcagaagaagtgagcagatcagaattgaggtcttttaagtttcttttgcaagaggaaatctccaaatgcaaactggatgatgacatgaacctgctggatattttcatagagatggagaagagggtcatcctgggagaaggaaagttggacatcctgaaaagagtctgtgcccaaatcaacaagagcctgctgaagataatcaacgactatgaagaattcagcaaaggggaggagttgtgtggggtaatgacaatctcggactctccaagagaacaggatagtgaatcacagactttggacaaagtttaccaaatgaaaagcaaacctcggggatactgtctgatcatcaacaatcacaattttgcaaaagcacgggagaaagtgcccaaacttcacagcattagggacaggaatggaacacacttggatgcaggggctttgaccacgacctttgaagagcttcattttgagatcaagccccacgatgactgcacagtagagcaaatctatgagattttgaaaatctaccaactcatggaccacagtaacatggactgcttcatctgctgtatcctctcccatggagacaagggcatcatctatggcactgatggacaggaggcccccatctatgagctgacatctcagttcactggtttgaagtgcccttcccttgctggaaaacccaaagtgttttttattcaggcttgtcagggggataactaccagaaaggtatacctgttgagactgattcagaggagcaaccctatttagaaatggatttatcatcacctcaaacgagatatatcccggatgaggctgactttctgctggggatggccactgtgaataactgtgtttcctaccgaaaccctgcagagggaacctggtacatccagtcactttgccagagcctgagagagcgatgtcctcgaggcgatgatattctcaccatcctgactgaagtgaactatgaagtaagcaacaaggatgacaagaaaaacatggggaaacagatgcctcagcctactttcacactaagaaaaaaacttgtcttcccttctgattgatggtgctattttgtttgttttgttttgttttgtttttttgagacagaatctcgctctgtcgcccaggctggagtgcagtggcgtgatctcggctcaccgcaagctccgcctcccgggttcaggccattctcctgcctcagcctcccgagtagctgggactacaggggcccgccaccacacctggctaattttttaaaaatatttttagtagagacagggtttcactgtgttagccagggtggtcttgatctcctgacctcgtgatccacccacctcggcctcccaaagtgctgggattacaggcgtgagccaccgcgcctggccgatggtactatttagatataacactatgtttatttactaattttctagattttctactttattaattgttttgcacttttttataagagctaaagttaaataggatattaacaacaataacactgtctcctttctcttatgcttaaggctttgggaatgtttttagctggtggcaataaataccagacacgtacaaaatccagctatgaatatagagggcttatgattcagattgttatctatcaactataagcccactgttaatattctattaactttaattctctttcaaagctaaattccacactaccacattaaaaaaattagaaagtagccacgtatggtggctcatgtctataatcccagcactttgggaggttgaggtgggaggattgcttgaacccaagaggtcaaggctgcagtgagccatgttcacaccgctgcactcaagcttgggtgacagaacaagaccccgtctcaaaaaaaattttttttttaataaaacaaaatttgtttgaaatcttttaaaaattcaaatgatttttacaagttttaaataagctctccccaaacttgctttatgccttcttattgcttttatgatatatatatgcttggctaactatatttgctttttgctaacaatgctctggggtctttttatgcatttgcatttgctctttcatctctgcttggattattttaaatcattaggaattaagttatctttaaaatttaagtatcttttttcaaaaacattttttaatagaataaaatataatttgatcttattaaa

SEQ ID NO: 771 - DNA, 4308 bp, Homo sapiens
gctggccccgccccctagcgccgcggtcggagccatttcgccgattcctccatgcgagttgctgtgcgtttctctgttgtctcggtagaaggccagagtcacacacggtcctaagagctgggcaccaggaagcgaaggctgatctgaagaagacacttgaatcatgggtgacgttaaaaattttctgtatgcctggtgtggcaaaaggaagatgaccccatcctatgaaattagagcagtggggaacaaaaacaggcagaaattcatgtgtgaggttcaggtggaaggttataattacactggcatgggaaattccaccaataaaaaagatgcacaaagcaatgctgccagagactttgttaactatttggttcgaataaatgaaataaagagtgaagaagttccagcttttggggtagcatctccgcccccacttactgatactcctgacactacagcaaatgctgaaggagatttaccaacaaccatgggaggacctcttcctccacatctggctctcaaagcagaaaataattctgaggtaggggcctctggctatggtgttcctgggcccacctgggaccgaggagccaacttgaaggattactactcaagaaaggaagaacaagaagtgcaagcgactctagaatcagaagaagtggatttaaatgctgggcttcatggaaactggaccttggaaaatgctaaagctcgtctaaaccaatattttcagaaagaaaagatccaaggagaatataagtacacccaagtgggtcctgatcacaacaggagctttattgcagaaatgaccatttatatcaagcagctgggcagaaggatttttgcacgagaacatggatcaaataagaaattggcagcacagtcctgtgccctgtcacttgtcagacaactgtaccatcttggagtggttgaagcttactccggacttacaaagaagaaggaaggagagacagtggagccttacaaagtaaacctctctcaagatttagagcatcagctgcaaaacatcattcaagagctaaatcttgagattttgcccccgcctgaagatccttctgtgccagttgcactcaacattggcaaattggctcagttcgaaccatctcagcgacaaaaccaagtgggtgtggttccttggtcacctccacaatccaactggaatccttggactagtagcaacattgatgaggggcctctggcttttgctactccagagcaaataagcatggacctcaagaatgaattgatgtaccagttggaacaggatcatgatttgcaagcaatcttgcaggagagagagttactgcctgtgaagaaatttgaaagtgagattctggaagcaatcagccaaaattcagttgtcattattagaggggctactggatgtgggaaaaccacacaggttccccagttcattctagatgactttatccagaatgaccgagcagcagagtgtaacatcgtagtaactcagcccagaagaatcagtgcggtttctgtggcagagcgagttgcatttgaaagaggagaagagcctggaaaaagctgtggctacagcgttcgatttgagtctatacttcctcgtcctcatgccagtataatgttttgtactgtaggtgtgctcctgagaaaattagaagcaggcattcgaggaatcagtcatgtaattgtagatgaaatacatgaaagagatattaatactgacttccttttggtagtactgcgtgatgttgttcaggcttatcctgaagttcgcattgttcttatgtctgctactattgataccagcatgttttgtgaatatttcttcaattgccccatcattgaagtttatgggaggacttacccagttcaagaatattttctggaagactgcattcagatgacccactttgttcctccaccaaaagacaaaaagaagaaggataaggatgatgatggtggtgaggatgatgatgcaaattgcaacttgatctgtggtgatgaatatggtccagaaacaaggttgagcatgtctcaattgaacgaaaaggaaactccttttgaactcatcgaggctctacttaagtacattgaaacccttaatgttcctggagctgtgttggtttttttgcctggctggaatctgatttatactatgcagaagcatttggaaatgaatccacattttggaagccatcggtatcagattctacccctgcattctcagattcctcgagaggaacagcgcaaagtgtttgatccagtaccagttggagtaaccaaggttattttgtccacaaatattgctgaaacaagcattaccataaacgatgttgtttatgtcattgactcctgcaagcagaaagtgaaactcttcactgctcacaacaatatgaccaactatgctaccgtatgggcatcaaaaacaaaccttgagcaacggaaagggcgagctggccgagtacggcctggattctgctttcacctgtgcagccgagctcgttttgagagacttgaaacccacatgacaccagagatgttccgaacaccattgcatgaaattgctcttagcataaaacttctgcgtctaggaggaattggccaatttctggccaaagcaattgaacctccccctttggatgctgtgattgaagcagaacacactcttagagagcttgatgcattagatgccaatgatgagttgactcctttgggacgaatcctggctaaactccccattgagcctcgttttggcaaaatgatgataatggggtgtattttctacgtgggagatgctatctgtaccattgctgctgctacctgctttccagagcctttcatcaatgaaggaaagcggctgggctatatccatcgaaattttgctggaaacagattttctgatcacgtagcccttttatcagtattccaagcctgggatgatgctagaatgggtggagaagaagcagagatacgtttttgtgagcacaaaagacttaatatggctacactaagaatgacctgggaagccaaagttcagctcaaagagattttgattaattctgggtttccagaagattgtttgttgacacaagtgtttactaacactggaccagataataatttggatgttgttatctccctcctggcctttggtgtgtaccccaatgtatgctatcataaggaaaagaggaagattctcaccactgaagggcgtaatgcacttatccacaaatcatctgttaattgtccttttagtagccaagacatgaagtacccatctcccttctttgtatttggtgaaaagattcgaactcgagccatctctgctaaaggcatgactttagtcacccccctgcagttgcttctctttgcctccaagaaagtccaatctgatgggcagattgtgcttgtagatgactggattaaactgcaaatatctcatgaagctgctgcctgtatcactggtctccgggcagccatggaggctttggttgttgaagtaaccaaacaacctgctatcatcagccagttggaccccgtaaatgaacgtatgctgaacatgatccgtcagatctctagaccctcagctgctggtatcaaccttatgattggcagtacacggtatggagatggtccacgtcctcccaagatggcccgatacgacaatggaagcggatatagaaggggaggttctagttacagtggtggaggctatggcggtggctatagcagtggaggctatggtagcggaggctatggtggcagcgccaactcctttcgggcaggatatggtgcaggtgttggtggaggctatagaggagtttcccgaggtggctttagaggcaactctggaggagactacagagggcctagtggaggctacagaggatctgggggattccagcgaggaggtggtaggggggcctatggaactggctactttggacagggaagaggaggtggcggctattaaaacttggttatgtcagttcctgtgtgtagacagtaaggaaaaaaaggcatgctatgtgttacgtgttttttccagtatgtttatttgccaccaaaaagtaaatgcattttcacccattctgtggttcattgtagtttaaggaaaccaagcatatagatgcattagtgattttgtttatattatgtaaaatataacgatctcttaaaaataccacagtttgtattttttctttaaggagtaaagatttgcctttaaataacttggtattttcctggctttcgtttaatacaatagaaaataaagtattacaccgaaaaaaaaaaaaaaaaaaa

SEQ ID NO: 772 - DNA, 1975 bp, Homo sapiens
ggcagacaggaagacttctgaagaacaaatcagcctggtcaccagcttttcggaacagcagagacacagagggcagtcatgagtgaggtcaccaagaattccctggagaaaatccttccacagctgaaatgccatttcacctggaacttattcaaggaagacagtgtctcaagggatctagaagatagagtgtgtaaccagattgaatttttaaacactgagttcaaagctacaatgtacaacttgttggcctacataaaacacctagatggtaacaacgaggcagccctggaatgcttacggcaagctgaagagttaatccagcaagaacatgctgaccaagcagaaatcagaagtctagtcacttggggaaactacgcctgggtctactatcacttgggcagactctcagatgctcagatttatgtagataaggtgaaacaaacctgcaagaaattttcaaatccatacagtattgagtattctgaacttgactgtgaggaagggtggacacaactgaagtgtggaagaaatgaaagggcgaaggtgtgttttgagaaggctctggaagaaaagcccaacaacccagaattctcctctggactggcaattgcgatgtaccatctggataatcacccagagaaacagttctctactgatgttttgaagcaggccattgagctgagtcctgataaccaatacgtcaaggttctcttgggcctgaaactgcagaagatgaataaagaagctgaaggagagcagtttgttgaagaagccttggaaaagtctccttgccaaacagatgtcctccgcagtgcagccaaattttacagaagaaaaggtgacctagacaaagctattgaactgtttcaacgggtgttggaatccacaccaaacaatggctacctctatcaccagattgggtgctgctacaaggcaaaagtaagacaaatgcagaatacaggagaatctgaagctagtggaaataaagagatgattgaagcactaaagcaatatgctatggactattcgaataaagctcttgagaagggactgaatcctctgaatgcatactccgatctcgctgagttcctggagacggaatgttatcagacaccattcaataaggaagtccctgatgctgaaaagcaacaatcccatcagcgctactgcaaccttcagaaatataatgggaagtctgaagacactgctgtgcaacatggtttagagggtttgtccataagcaaaaaatcaactgacaaggaagagatcaaagaccaaccacagaatgtatccgaaaatctgcttccacaaaatgcaccaaattattggtatcttcaaggattaattcataagcagaatggagatctgctgcaagcagccaaatgttatgagaaggaactgggccgcctgctaagggatgccccttcaggcataggcagtattttcctgtcagcatctgagcttgaggatggtagtgaggaaatgggccagggcgcagtcagctccagtcccagagagctcctctctaactcagagcaactgaactgagacagaggaggaaaacagagcatcagaagcctgcagtggtggttgtgacgggtaggaggataggaagacagggggccccaacctgggattgctgagcagggaagctttgcatgttgctctaaggtacatttttaaagagttgttttttggccgggcgcagtggctcatgcctgtaatcccagcactttgggaggccgaggtgggcggatcacgaggtctggagtttgagaccatcctggctaacacagtgaaatcccgtctctactaaaaatacaaaaaattagccaggcgtggtggctggcacctgtagtcccagctacttgggaggctgaggcaggagaatggcgtgaacctggaaggaagaggttgcagtgagccaagattgcgccccctgcactccagcctgggcttcagagcaagactc

SEQ ID NO: 773 - DNA, 4006 bp, Homo sapiens
tgccaaggctccagcccggccgggctccgaggcgagaggctgcatggagtggccggcgcggctctgcgggctgtgggcgctgctgctctgcgccggcggcgggggcgggggcgggggcgccgcgcctacggaaactcagccacctgtgacaaatttgagtgtctctgttgaaaacctctgcacagtaatatggacatggaatccacccgagggagccagctcaaattgtagtctatggtattttagtcattttggcgacaaacaagataagaaaatagctccggaaactcgtcgttcaatagaagtacccctgaatgagaggatttgtctgcaagtggggtcccagtgtagcaccaatgagagtgagaagcctagcattttggttgaaaaatgcatctcacccccagaaggtgatcctgagtctgctgtgactgagcttcaatgcatttggcacaacctgagctacatgaagtgttcttggctccctggaaggaataccagtcccgacactaactatactctctactattggcacagaagcctggaaaaaattcatcaatgtgaaaacatctttagagaaggccaatactttggttgttcctttgatctgaccaaagtgaaggattccagttttgaacaacacagtgtccaaataatggtcaaggataatgcaggaaaaattaaaccatccttcaatatagtgcctttaacttcccgtgtgaaacctgatcctccacatattaaaaacctctccttccacaatgatgacctatatgtgcaatgggagaatccacagaattttattagcagatgcctattttatgaagtagaagtcaataacagccaaactgagacacataatgttttctacgtccaagaggctaaatgtgagaatccagaatttgagagaaatgtggagaatacatcttgtttcatggtccctggtgttcttcctgatactttgaacacagtcagaataagagtcaaaacaaataagttatgctatgaggatgacaaactctggagtaattggagccaagaaatgagtataggtaagaagcgcaattccacactctacataaccatgttactcattgttccagtcatcgtcgcaggtgcaatcatagtactcctgctttacctaaaaaggctcaagattattatattccctccaattcctgatcctggcaagatttttaaagaaatgtttggagaccagaatgatgatactctgcactggaagaagtacgacatctatgagaagcaaaccaaggaggaaaccgactctgtagtgctgatagaaaacctgaagaaagcctctcagtgatggagataatttatttttaccttcactgtgaccttgagaagattcttcccattctccatttgttatctgggaacttattaaatggaaactgaaactactgcaccatttaaaaacaggcagctcataagagccacaggtctttatgttgagtcgcgcaccgaaaaactaaaaataatgggcgctttggagaagagtgtggagtcattctcattgaattataaaagccagcaggcttcaaactaggggacaaagcaaaaagtgatgatagtggtggagttaatcttatcaagagttgtgacaacttcctgagggatctatacttgctttgtgttctttgtgtcaacatgaacaaattttatttgtaggggaactcatttggggtgcaaatgctaatgtcaaacttgagtcacaaagaacatgtagaaaacaaaatggataaaatctgatatgtattgtttgggatcctattgaaccatgtttgtggctattaaaactcttttaacagtctgggctgggtccggtggctcacgcctgtaatcccagcaatttgggagtccgaggcgggcggatcactcgaggtcaggagttccagaccagcctgaccaaaatggtgaaacctcctctctactaaaactacaaaaattaactgggtgtggtggcgcgtgcctgtaatcccagctactcgggaagctgaggcaggtgaattgtttgaacctgggaggtggaggttgcagtgagcagagatcacaccactgcactctagcctgggtgacagagcaagactctgtctaaaaaacaaaacaaaacaaaacaaaacaaaaaaacctcttaatattctggagtcatcattcccttcgacagcattttcctctgctttgaaagccccagaaatcagtgttggccatgatgacaactacagaaaaaccagaggcagcttctttgccaagacctttcaaagccattttaggctgttaggggcagtggaggtagaatgactccttgggtattagagtttcaaccatgaagtctctaacaatgtattttcttcacctctgctactcaagtagcatttactgtgtctttggtttgtgctaggcccccgggtgtgaagcacagaccccttccaggggtttacagtctatttgagactcctcagttcttgccacttttttttttaatctccaccagtcatttttcagaccttttaactcctcaattccaacactgatttccccttttgcattctccctccttcccttccttgtagccttttgactttcattggaaattaggatgtaaatctgctcaggagacctggaggagcagaggataattagcatctcaggttaagtgtgagtaatctgagaaacaatgactaattcttgcatattttgtaacttccatgtgagggttttcagcattgatatttgtgcattttctaaacagagatgaggtggtatcttcacgtagaacattggtattcgcttgagaaaaaaagaatagttgaacctatttctctttctttacaagatgggtccaggattcctcttttctctgccataaatgattaattaaatagcttttgtgtcttacattggtagccagccagccaaggctctgtttatgcttttggggggcatatattgggttccattctcacctatccacacaacatatccgtatatatcccctctactcttacttcccccaaatttaaagaagtatgggaaatgagaggcatttcccccaccccatttctctcctcacacacagactcatattactggtaggaacttgagaactttatttccaagttgttcaaacatttaccaatcatattaatacaatgatgctatttgcaattcctgctcctaggggaggggagataagaaaccctcactctctacaggtttgggtacaagtggcaacctgcttccatggccgtgtagaagcatggtgccctggcttctctgaggaagctggggttcatgacaatggcagatgtaaagttattcttgaagtcagattgaggctgggagacagccgtagtagatgttctactttgttctgctgttctctagaaagaatatttggttttcctgtataggaatgagattaattcctttccaggtattttataattctgggaagcaaaacccatgcctccccctagccatttttactgttatcctatttagatggccatgaagaggatgctgtgaaattcccaacaaacattgatgctgacagtcatgcagtctgggagtggggaagtgatcttttgttcccatcctcttcttttagcagtaaaatagctgagggaaaagggagggaaaaggaagttatgggaatacctgtggtggttgtgatccctaggtcttgggagctcttggaggtgtctgtatcagtggatttcccatcccctgtgggaaattagtaggctcatttactgttttaggtctagcctatgtggattttttcctaacatacctaagcaaacccagtgtcaggatggtaattcttattctttcgttcagttaagtttttcccttcatctgggcactgaagggatatgtgaaacaatgttaacatttttggtagtcttcaaccagggattgtttctgtttaacttcttataggaaagcttgagtaaaataaatattgtctttttgtatgtca

SEQ ID NO: 774 - DNA, 1184 bp, Homo sapiens
gggggagacattcctcaattgcttagacatattctgagcctacagcagaggaacctccagtctcagcaccatgaatcaaactgccattctgatttgctgccttatctttctgactctaagtggcattcaaggagtacctctctctagaactgtacgctgtacctgcatcagcattagtaatcaacctgttaatccaaggtctttagaaaaacttgaaattattcctgcaagccaattttgtccacgtgttgagatcattgctacaatgaaaaagaagggtgagaagagatgtctgaatccagaatcgaaggccatcaagaatttactgaaagcagttagcaaggaaaggtctaaaagatctccttaaaaccagaggggagcaaaatcgatgcagtgcttccaaggatggaccacacagaggctgcctctcccatcacttccctacatggagtatatgtcaagccataattgttcttagtttgcagttacactaaaaggtgaccaatgatggtcaccaaatcagctgctactactcctgtaggaaggttaatgttcatcatcctaagctattcagtaataactctaccctggcactataatgtaagctctactgaggtgctatgttcttagtggatgttctgaccctgcttcaaatatttccctcacctttcccatcttccaagggtactaaggaatctttctgctttggggtttatcagaattctcagaatctcaaataactaaaaggtatgcaatcaaatctgctttttaaagaatgctctttacttcatggacttccactgccatcctcccaaggggcccaaattctttcagtggctacctacatacaattccaaacacatacaggaaggtagaaatatctgaaaatgtatgtgtaagtattcttatttaatgaaagactgtacaaagtagaagtcttagatgtatatatttcctatattgttttcagtgtacatggaataacatgtaattaagtactatgtatcaatgagtaacaggaaaattttaaaaatacagatagatatatgctctgcatgttacataagataaatgtgctgaatggttttcaaaataaaaatgaggtactctcctggaaatattaagaaagactatctaaatgttgaaagatcaaaaggttaataaagtaattataactaaaaaaa

SEQ ID NO: 775 - DNA, 3556 bp, Homo sapiens
tcgcggcttccggtgctaggtggagggaaggaaggagggagccggggagtgggccagggcagcagccgggctgaagtcggcttggggagccagagggagcggagcggaacctgcggggcagaggcggcggccgcagcggcgcagctgatagcaggaacaggatcaagtcttccataccagggaccaggccaaaaccagactgccactgcccctacttgggccccactgtccccagaaagcagctgctgtgatcatgggcaatatctttggaaaccttctcaagagcctgattgggaagaaggagatgcgcatcctgatggtgggcctggatgccgcaggaaagaccaccatcctatacaagctgaaactgggggagatcgtcaccaccatccctaccattgggttcaatgtggagacagtggagtataagaacatcagctttacagtgtgggatgtgggtggccaggacaagattcgacccctctggagacactacttccagaacacccaagggttgatatttgtggtcgacagcaatgatcgggagcgagtaaatgaggcccgggaagagctgatgagaatgctggcggaggacgagctccgggatgctgtactccttgtctttgcaaacaaacaggatctgcctaatgctatgaacgctgctgagatcacagacaagctgggcctgcattcccttcgtcaccgtaactggtacattcaggccacctgtgccaccagcggggacgggctgtacgaaggcctggactggctggccaatcagctcaaaaacaagaagtgaaagccagacagccctaacaaagcaccccacccacccctgacatacctactgtcaccctgccccagtcctaccccttcctctccatgcaagtgtggccagggccctgggtatcatgtccacatgcccagcaagagccttgcctcccctgcctcccctcctttttcctgtccacctatatgaccaatccctaattgctgtcctgatgatgagtcattccaatttactggatttaaaacaaaaagttgttacggtttcatggggtggcccctctctctctcaccctctgggtttcgggaggtcgagtggggtattctctttgtttggcagtggttgctgtcctcttggcatctgagtcctttccctgtccccacaagcccttctactccctgtttgcctttcctttgccaccctctccctgttttacatggaaattgcacgggcctctctgtgtttgcgtgcatgtgtgcgcctgtatatacatgtatagagagatatatttgtgggggccggggggagcggggagggggtggagtgaagctcagggcttgcagccaggacactgcccactggagcctgtcatctgccccttccgtgttggtgagattaagggaagaaggtgggagggcattagtcaagccggactgccccagtctttgactggttaccctcctctctgcaggtaggtttttctggatgataggacagatgatggattcttcaccaccattttccttgtactcttctctccacccttcttagggctggaggatggcatttatctctagatgactgttcccaaggagatgccactctgctctgccttactgttgggaaggagagaggaacccactcactcttatcagcttagagtgttcaactgatccttccccaccatcttcagatctgttcctctggagcttgactggggggtggggatggcaagtccatggtgtgtgttagggacccagggcattgggggaagggaggcgaaggcctgaggttttccatcttcattctcttttgttattaggagaaggtgaggcatgggccaatcccattcctgccttccagtgccccaccacccttctgatcttaggggttggatgggtcatctgtccttggtcagaattttctcaccctagtactcctactggcctgaccagggctgactgggtattctaatgaggagctgggaagtggggtgacatagctgaccttagtatcaacccccctcttctccaactcttgttttctagtccaggatatgctaaaggacgaagattttctattgtttccaggccctcagaccatccttgctgtcccttcaccctccatgcccctgccatcctcactcacttctcataaatggatctgggggttagagtggaggaaataaaatcctgaagtggttgtcagtgcttgtgggatgcagtggtcttcaggattctccccgcattattatgtagttgttcagaagctgttgctactgcgtctctctgtctgcagggggcacttgttcctgaggtcctcgcctgggtcctgacttctgtagtttctgtgaagacgtggctgtcctgtgggctcctgtgtgtgctggctgcgccctgagctccgagacagctgcccataacctgctaaggtcagggcccagggccccccacagcatggctgagggaccccttcccagtagggctgtcccaagccccactccatggggccaggtttcctggccacttttgttgatagcagatggatcaatattagtaaccccatccaagattgaactgtgaaagagaggttccaggggtatctccctcagtgccagttacttagtgatgtgttacccaggatgcagcaggtgtgtgcaggtatcttgctctctaggcctgtgtgtgtgtgtgagtgtgtgtgtatatgggtgtgggtgtgtttgtgtgtggtggttgtggggggggtgttggaggttctatttcatttaaaaatgtattcatttccctggccccacagatgcttccctccatactttttatttgctctgtttcctcagatttattttgtcttgccccattgcctctccttccttgaactctttccttttcaatctcaactcattcactgctgttgctcatttgcccttttccatgtattttttcctacttaggattttccactctatctttgtggttcatgaggactttgcctcttctcctgcctcattccctgactttctctagttagatgtcagtcctaaataggttttcctcacttcaggcctcacccctcaccttgtttttttgggggctccagggaccaatctggggctggaaatgttaggaggttgccttggtgctgccccagatctgtccagcagggggcagtaagtgatcttggtagtatccctggctgctaagcccttggcaggggtggtcctttctacattcccattcacttaacagctcttttgggattgggtgtttcattccatttctgcccactccctctcctctcctctctggtaggtttaattttatgctttccctgattccagctttctgcttcctgaggactcccgctccccccaccccaaagtttgtctgtggtgttatagtggtaactgcagttcctcctctggaatgtagactgtatatgtttaataactcaccttctctatccttgctcaaaatgtgggataacgcgatgactgtgaccctggttggaaattaaacttgttttatgcaaaaaaaaaaaaaaaaaaaa

SEQ ID NO: 776 - DNA, 978 bp, Homo sapiens
ccgcgtcggtgcccgcgcccctccccgggccccgccatgggcctcaccgtgtccgcgctcttttcgcggatcttcgggaagaagcagatgcggattctcatggttggcttggatgcggctggcaagaccacaatcctgtacaaactgaagttgggggagattgtcaccaccatcccaaccataggcttcaatgtagaaacagtggaatataagaacatctgtttcacagtctgggacgtgggaggccaggacaagattcggcctctgtggcggcactacttccagaacactcagggcctcatctttgtggtggacagtaatgaccgggagcgggtccaagaatctgctgatgaactccagaagatgctgcaggaggacgagctgcgggatgcagtgctgctggtatttgccaacaagcaggacatgcccaacgccatgcccgtgagcgagctgactgacaagctggggctacagcacttacgcagccgcacgtggtatgtccaggccacctgtgccacccaaggcacaggtctgtacgatggtctggactggctgtcccacgagctgtcaaagcgctaaccagccaggggcaggcccctgatgcccggaagctcctgcgtgcatccccgggatgaccagactcccggactcctcaggcagtgccctttcctcccacttttcctcccccatagccacaggcctctgctcctgctcctgcctgcatgttctctctgttgttggagcctggagccttgctctctgggcacagaggggtccactctcctgcctgctgggacctatggaaggggcttcctggccaaggccccctcttccagaggaggagcagggatctgggtttccttttttttttctgttttgggtgtactctaggggccaggttgggagggggaaggtgagggcttcgggtggtgctataatgtggcactggatcttgagtaataaatttgctgtggtttg

SEQ ID NO: 777 - DNA, 3235 bp, Homo sapiens
cgtgggagcagtggggttcgacggcgcggccgcgaggccgccatggccgctcacgggaagctgcggcgggagcgggggctgcaggctgagtatgagacgcaagtcaaagagatgcgctggcagctgagcgagcagctgcgctgcctggagctgcagggcgagctgcggcgggagttgctgcaggagctggcagagttcatgcggcgccgcgctgaggtggagctggaatactcccggggcctggaaaagctggccgagcgcttctccagccgtggaggccgcctggggagcagccgggagcaccaaagcttccggaaggagccgtccctcctgtcgcccttgcactgctgggcggtgctgctgcagcacacgcggcagcagagccgggagagcgcggccctgagtgaggtgctggccgggcccctggcccagcgcctgagtcacattgcagaggacgtggggcgcctggtcaagaagagcagggatctggagcagcagctgcaggatgagctcctggaggtggtctcagagctccagacggccaagaagacgtaccaggcatatcacatggagagcgtgaatgccgaggccaagctccgggaggccgagcggcaggaggagaagcgggcaggccggagtgtccccaccaccaccgctggtgccactgaggcagggcccctccgcaagagctccctcaagaagggagggaggctggtggagaagcggcaggccaagttcatggagcacaaactcaagtgcacaaaggcgcgcaacgagtacctgcttagcctggctagtgtcaacgctgctgtcagtaactactacctgcatgacgtcttggacctcatggactgctgtgacacagggttccacctggccctggggcaggtgctccggagctacacggccgctgagagccgcacccaagcctcccaagtgcagggcctgggcagcctggaagaagctgtggaggccctggatcctccaggggacaaagccaaggttctcgaggtgcatgctaccgtcttctgtcccccgctgcgctttgactaccacccccatgatggggatgaggtggctgagatctgcgttgaaatggagctgcgggacgagattctgcccagagcccagaacatccagagccgcctggaccgacagaccattgagacagaggaggtgaacaagactctgaaggcgacactgcaggccctgctggaggtggtggcctcggatgacggggatgtgcttgattccttccagaccagcccctccaccgagtccctcaagtccaccagctcagacccaggcagccggcaggcgggccggaggcgcggccagcagcaggagaccgaaaccttctacctcacgaagctccaggagtatctgagtggacggagcatcctcgccaagctgcaggccaagcacgagaagctgcaggaggcccttcagcgaggtgacaaggaggagcaggaggtgtcttggacccagtacacacagagaaaattccagaagagccgccagccccgccccagctcccagtataaccagagactctttgggggagacatggagaagtttatccagagctcaggccagcctgtgcccctggtggtggagagctgcattcgcttcatcaacctcaatggcctgcagcatgaaggcatcttccgggtatcgggtgcccagctccgggtctcagagatccgtgatgccttcgagagaggggaggacccactggtggagggctgcactgcccatgacctggactcggtggccggggtgctgaagctctacttccggagcctggagcccccactcttccccccagacctgttcggcgagctgctggcttcttcggagctggaggccacagcggagagggtggagcacgtgagccgcctgctgtggcggctgcccgcgccggtgctggtggttctgcgctacctcttcaccttcctcaaccacctggcccagtacagcgatgagaacatgatggacccctacaacctggccgtgtgcttcgggcccacgctgctaccggtgcccgctgggcaggacccggtggcgctgcagggccgggtgaaccagctggtgcagacgctcatagtgcagcccgatcgggtcttcccgcccctgacctcgctgcctggccccgtctacgagaagtgcatggcaccgccttccgccagctgcctgggggacgcccagctggagagcctgggggcggacaatgagccggagctggaagccgagatgcccgcacaggaggatgacctggagggggtcgtggaggctgtggcctgctttgcctacacgggccgcacagcccaggagctgagcttccggcggggggacgtactgcggctgcacgagagggcctcgagcgactggtggcggggggagcacaacggcatgcggggcctcatcccccacaagtatatcacgctgcccgccgggacggagaagcaggtggtgggcgcagggctgcagactgcaggggagtctgggagcagtcccgagggcctcctggcatcggagctggtccaccggccagagccatgcacctcacctgaggccatgggaccctctggacacagacgacgctgcttggtcccagcctccccagagcaacacgtggaggtggataaggctgtggcacagaacatggactctgtgtttaaggagctcttgggaaagacctctgtccgccagggccttgggccagcatctaccacctctcccagtcctgggccccgaagcccaaaggccccgcccagcagccgcctgggcaggaacaaaggcttctcccggggccctggggccccagcctcaccctcagcttcccacccccagggcctagacacgacccccaagccacactgaggtgccgctgctggagatgcgtgcccccggcggctacccgctggaccggccactctccccagcccccttgcttctctccagccctgtccagcaagtgcagggtgcctgcacttcaccctgtgcagagaggtgggatggggccgtgcacacagggatgcccgctccacatcctgcctgcccctcagccctggcccaggccccttttggaggcagctgaggaaggatgctggggaaagccctcttctgcagctttgtggaaggctgatcagtggctgctgggtggcgggtacccttgctcagatgcctggcagggctgggtggcgattcataaagacctcgtgttgattccccg

SEQ ID NO: 778 - DNA, 2095 bp, Homo sapiens
gcgcctgtcagggaagcggcgcgcgcgcgcgggcggcgggcgggctggggatccgccgcgcagtgccagcgccagcgccagacccgcgccccgcgctctccggcccgtcgcctgccttgggactcgcgagcccgcactcccgccctgcctgttcgctgcccgagtatggagctgctgtgttgcgaaggcacccggcacgcgccccgggccgggccggacccgcggctgctgggggaccagcgtgtcctgcagagcctgctccgcctggaggagcgctacgtaccccgcgcctcctacttccagtgcgtgcagcgggagatcaagccgcacatgcggaagatgctggcttactggatgctggaggtatgtgaggagcagcgctgtgaggaggaagtcttccccctggccatgaactacctggatcgctacctgtcttgcgtccccacccgaaaggcgcagttgcagctcctgggtgcggtctgcatgctgctggcctccaagctgcgcgagaccacgcccctgaccatcgaaaaactgtgcatctacaccgaccacgctgtctctccccgccagttgcgggactgggaggtgctggtcctagggaagctcaagtgggacctggctgctgtgattgcacatgatttcctggccttcattctgcaccggctctctctgccccgtgaccgacaggccttggtcaaaaagcatgcccagacctttttggccctctgtgctacagattatacctttgccatgtacccgccatccatgatcgccacgggcagcattggggctgcagtgcaaggcctgggtgcctgctccatgtccggggatgagctcacagagctgctggcagggatcactggcactgaagtggactgcctgcgggcctgtcaggagcagatcgaagctgcactcagggagagcctcagggaagcctctcagaccagctccagcccagcgcccaaagccccccggggctccagcagccaagggcccagccagaccagcactcctacagatgtcacagccatacacctgtagccctggagaggccctctggagtggccactaagcagaggaggggccgctgccacccacctccctgcctccaggaaccacaccacatctaagcctgaaggggcgtctgttcccccttcacaaagcccaagggatctggtcctacccatccccgcagtgtgcactaaggggcccggccagccatgtctgcatttcggtggctagtcaagctcctcctccctgcatctgaccagcagcgcctttcccaactctagctgggggtgggccaggctgatgggacagaattggatacatacaccagcattccttttgaacgcccccccccacccctgggggctctcatgttttcaactgccaaaatgctctagtgccttctaaaggtgttgtcccttctagggttattgcatttggattggggtccctctaaaatttaatgcatgatagacacatatgagggggaatagtctagatggctcctctcagtactttggaggcccctatgtagtccgtgctgacagctgctcctagagggaggggcctaggcctcagccagagaagctataaattcctctttgctttgctttctgctcagcttctcctgtgtgattgacagctttgctgctgaaggctcattttaatttattaattgctttgagcacaactttaagaggacataatgggggcctggccatcccacaagtggtggtaaccctggtggttgctgttttcctcccttctgctactggcaaaaggatctttgtggccaaggagctgctatagcctggggtggggtcatgccctcctctcccattgtccctctgccccatcctccagcagggaaaatgcagcagggatgccctggaggtggctgagcccctgtctagagagggaggcaagccctgttgacacaggtctttcctaaggctgcaaggtttaggctggtggcccaggaccatcatcctactgtaataaagatgattgtgaaataaaactggctttggcttcttggaaaaaaaaaaaaaaaaaaaaaaaaaaaaaaaaaaaaaaaaaaaaa

SEQ ID NO: 779 - DNA, 2525 bp, Homo sapiens
atacaggaagtgacgatacttttggcgcgcgcggttgctgtttcttctctggctccgggaccggcggcggcggcggcggcacgggcggcggcgtagggtgttttaactcaaatgggtgatgaaaaggactcttggaaagtgaaaactttagatgaaattcttcaggaaaagaaacgaaggaaggaacaagaggagaaagcagagataaaacgcttaaaaaattctgatgaccgggattccaagcgggattcccttgaggagggggagctgagagatcaccgcatggagatcacaataaggaactccccgtatagaagagaagactctatggaagacagaggagaagaagatgattctttggccatcaaaccaccccagcaaatgtctcggaaagaaaaagttcatcacagaaaagatgaaaagagaaaagagaaacgtaggcatcgtagccattcagcagaaggggggaagcatgctagagtgaaagaaaaagaaagagagcacgaacgtcggaaacgacatcgagaagaacaggataaagctcgccgggaatgggaaagacagaagagaagggaaatggcaagggagcattccaggagagaaagggaccgcttggagcagttagaaaggaagcgggagcgggagcgcaagatgcgggagcagcagaaggagcagcgggagcagaaggagcgcgagcggcgggcggaggagcggcgcaaggagcgggaggcccgcagggaagtgtctgcacatcaccgaacgatgagagaggactacagcgacaaagtgaaagccagccactggagtcgcagcccgcctcggccgccgcgggagcggttcgagttgggagacggccggaagccaggtgaggccaggccggcgcgtgcgcagaagccagcacagttaaaagaagagaaaatggaagaaagggacctgctgtccgacttacaggacatcagcgacagcgagaggaagaccagctcggccgagtcctcgtcagcagaatcaggctcaggttctgaggaagaagaggaggaggaggaagaggaggaggaggaagggagcaccagtgaagaatcagaggaggaggaggaggaagaggaagaggaggaggaggagaccggcagcaactctgaggaggcatcagagcagtctgccgaagaagtaagtgaggaagaaatgagtgaagatgaagaacgagaaaatgaaaaccacctcttggttgttccagagtcacggttcgaccgagattccggggagagtgaagaagcagaggaagaagtgggtgagggaacgccgcagagcagcgccctgacagagggcgactatgtgcccgactcccctgccctgtcgcccatcgagctcaagcaggagctgcccaagtacctgccggccctgcagggctgccggagcgtcgaggagttccagtgcctgaacaggatcgaggagggcacctatggagtggtctacagagcaaaagacaagaaaacagatgaaattgtggctctaaagcggctgaagatggagaaggagaaggagggcttcccgatcacgtcgctgagggagatcaacaccatcctcaaggcccagcatcccaacatcgtcaccgttagagagattgtggtgggcagcaacatggacaagatctacatcgtgatgaactatgtggagcacgacctcaagagcctgatggagaccatgaaacagcccttcctgccaggggaggtgaagaccctgatgatccagctgctgcgtggggtgaaacacctgcacgacaactggatcctgcaccgtgacctcaagacgtccaacctgctgctgagccacgccggcatcctcaaggtgggtgacttcgggctggcgcgggagtacggatcccctctgaaggcctacaccccggtcgtggtgaccctgtggtaccgcgccccagagctgctgcttggtgccaaggaatactccacggccgtggacatgtggtcagtgggttgcatcttcggggagctgctgactcagaagcctctgttccccgggaagtcagaaatcgatcagatcaacaaggtgttcaaggatctggggacccctagtgagaaaatctggcccggctacagcgagctcccagcagtcaagaagatgaccttcagcgagcacccctacaacaacctccgcaagcgcttcggggctctgctctcagaccagggcttcgacctcatgaacaagttcctgacctacttccccgggaggaggatcagcgctgaggacggcctcaagcatgagtatttccgcgagacccccctccccatcgacccctccatgttccccacgtggcccgccaagagcgagcagcagcgtgtgaagcggggcaccagcccgaggccccctgagggaggcctgggctacagccagctgggtgacgacgacctgaaggagacgggcttccaccttaccaccacgaaccagggggcctctgccgcgggccccggcttcagcctcaagttctgaaggtcagagtggaccccgtcatgggg

SEQ ID NO: 780 - DNA, 1671 bp, Homo sapiens
tccacccaagagcaacctggaactaagttattcggcaacgaactgttccactttgttgtgaggcaatagatgtggaaattccctgacgaggggctctgtcctcatacttcctgcggagcttattgtcgtaagaatatctgtcatcctgctaatgtgcattgaaaggagagcaacggggctgaggccgtgtcagcacgatggaccccaaacagaccaccctcctgtgtcttgtgctctgtctgggccagaggattcaggcacaggaaggggactttcccatgcctttcatatctgccaaatcgagtcctgtgattcccttggatggatctgtgaaaatccagtgccaggccattcgtgaagcttacctgacccagctgatgatcataaaaaactccacgtaccgagagataggcagaagactgaagttttggaatgagactgatcctgagttcgtcattgaccacatggacgcaaacaaggcagggcgctatcagtgccaatataggatagggcactacagattccggtacagtgacaccctggagctggtagtgacaggcttgtatggcaaacccttcctctctgcagatcggggtctggtgttgatgccaggagagaatatttccctcacgtgcagctcagcacacatcccatttgatagattttcactggccaaggagggagaactttctctgccacagcaccaaagtggggaacacccggccaacttctctttgggtcctgtggacctcaatgtctcagggatctacaggtgctacggttggtacaacaggagcccctacctgtggtccttccccagtaatgccttggagcttgtggtcacagactccatccaccaagattacacgacgcagaacttgatccgcatggccgtggcaggactggtcctcgtggctctcttggccatactggttgaaaattggcacagccatacggcactgaacaaggaagcctcggcagatgtggctgaaccgagctggagccaacagatgtgtcagccaggattgacctttgcacgaacaccaagtgtctgcaagtaaacacctggaggtgaaggcagagaggagccaggactgtggagtccgacaaagctacttgaaggacacaagagagaaaagctcactaagaagcttgaatctacttttttttttttttgagacagagtctggctctgtcacccaggctggagtgcagtggagcaatctcggctcattgaacctcttgggttcaagtgattcttgtgcctcagcctcccaagtagctggaattacaggcacataccactgcacccagctaatttttgtatttttagtagagatggggtttcactgtgttggccaggctggtctcgaactcctgacctcaggtgatccacccaccttggcctcccaaagtgctgagattataggcatgagccaccacgcctggccagatgcatgttcaaaccaatcaaatggtgttttcttatgcaggactgatcgatttgcacccacctttctgcacataagttatggttttccatcttatctgtcttctgattttttatatcctgtttaatttcttccttcattgttcttctctttttttatttattttatttatttttatttttatttttatttgagacagagtctcactctgttgcccagg

SEQ ID NO: 781 - DNA, 3225 bp, Homo sapiens
gagggcgccgcggccccgtgctcgccgccccgccccgccccgccctgcccggagcagctcggcagatgctctgtgctgcggcccggaggtgaagggctggatgcacagtgggagccggaggcggggggctgcagggagcacaccagcgaccggccctccaaccctccagccactcagcaacatcgccacagcaaccagcaaccagacggcagcagccgaggcaaacacaagcggacggcttcccaccgtcgccgaggacagggaatgactacggcaaatcaggccactttgccaactagggaggtggagtgtcactagtggggaggggcggccaccgcccgctgcacagagcgccatgccggctggagaagaggcgctggggcaggggctgcagtgtggctcggcctcacccccctgctggcactgagtgcctccagggcagctgggctcttgtctgcctggtctcagtgtcccctgtggcaagagggagaggtgccccatcccgtgctccttgtctgggcccgctgctgccagaccatgggatgtcggcaaagctcagaggaaaaagaagcagcccggcggtcccggagaattgaccgccacctgcgctcagagagccagcggcaacgccgcgaaatcaagctgctcctgctgggcaccagcaactcaggcaagagcaccatcgtcaaacagatgaagatcatccacagcggcggcttcaacctggaggcctgcaaggagtacaagcccctcatcatctacaatgccatcgactcgctgacccgcatcatccgggccctggccgccctcaggatcgacttccacaaccccgaccgcgcctacgacgctgtgcagctctttgcgctgacgggccccgctgagagcaagggcgagatcacacccgagctgctgggtgtcatgcgacggctctgggccgacccaggggcacaggcctgcttcagccgctccagcgagtaccacctggaggacaacgcggcctactacctgaacgacctggagcgcatcgccgcagctgactatatccccactgtcgaggacatcctgcgctcccgggacatgaccacgggcattgtggagaacaagttcaccttcaaggagctcaccttcaagatggtggacgtgggggggcagaggtcagagcgcaaaaagtggatccactgcttcgagggcgtcacagccatcatcttctgtgtggagctcagcggctacgacctgaaactctacgaggataaccagacaagtcggatggcagagagcttgcgcctctttgactccatctgcaacaacaactggttcatcaacacctcactcatcctcttcctgaacaagaaggacctgctggcagagaagatccgccgcatcccgctcaccatctgctttcccgagtacaagggccagaacacgtacgaggaggccgctgtctacatccagcggcagtttgaagacctgaaccgcaacaaggagaccaaggagatctactcccacttcacctgcgccaccgacaccagtaacatccagtttgtcttcgacgcggtgacagacgtcatcatacagaacaatctcaagtacattggcctttgctgaggagctgggcccggggcccgcctgcctatggtgaaacccacggggtgtcatgccccaacgcgtgctagagaggcccaatccaggggcagaaaacagggggcctaaagaatgtcccccaccccttggcctctgcctccttggccccacatttctgcaaacataaatatttacggatagattgctaggtagatagacacacacacatgcacacacacacatctggagatggcaaaatcctctaaaatgtcgaggtctcttgaagacttgagaagctgtcacaaggtcactacaagcccaacctgccccttcactttgccttcctgagttggccccactccacttgggggtctgcattggattgttagggataggcagcagggctgaggcaaggtaggccaactgcacccctgtcgcctggaggagggccagctcgctgcccgagctctggcctagggaccttgccgctgaccaagagggaggaccagtgcagggtctgtgcaccttccctgctggcctgcacacagctgctcagcaccactttcattctggacctgggaccttaggagccgggtgacagcactaaccagacctccagccactcacagctctttttaaaaaacagcttcaaaatatgcagcaaaaaccaatacaacaaaacgagtggcacgatttatttcaaactaggccagctgggattccagcttttcttctactagtctgatgttttataaatcaaaacctggttttccttctctgacattttttttttgttttgttttttggtttttttttttttttggccaaatctcgtggtgtttcgcagaaaaaaatccagaaaatttcaaatgcagttgagtattcttttttaaatgcagattttcaaaacatattttttttcaggtggtcttttttgtgtctggcttgctgagtgtaaaagttgttatctggacgatctgtctctctgctccaaagaaattttggagtgagtggcagtcctgcgccagcctcgcgggacacgtgttgtacataagcctctgcagtgtcctcttgttaatggtggggttttctgctttgtttttatttaagaaaataaacacgacatatttaaagaaggttctttcacctgggagcaaatgaacaatagctaagtgtcttggtatttaaagagtaaattatttgtggctttgctgagtgaaggaaggggagcaaggggtggtgcccctggtcccagcatgccccgcgcctgagactggctggaaatgctctgactcctgtgaaggcacagccagcgttgtggcctgagggaggccctgctgggaccctgatctgggccttcctgtcccagggcctatgggcaactgcgttgaaaggacgttcgccaagggccgtgtgtaaatacgaactgcgccatggagaggagaggcactgccggagcccttgccagatctccctccctctctccgtgcagtagctgtgtgtccgaggtcagtgtgcggaatcacagccaaggacgtgaagagatgtacgggggaaagagaagctggggattggatgaaagtcaaaggttgtctactttaagaaaataaaataccctgaatggagcacaaaaaaaaaaaaaaa

SEQ ID NO: 782 - DNA, 5130 bp, Homo sapiens
cacgtgatcgcgcctagggagaaaacgtctgactccagccaccggccttcaaggcacggctttttattccttcggctggtcggcctctcgcccttcagctacctgtgcgtccctccgtcccgtcccgtcccggggtcaccccggagcctgtccgctatgcggctcctgcctctagccccaggtcggctccggcggggcagcccccgccacctgccctcctgcagcccagcgctgctactgctggtgctgggcggctgcctgggggtcttcggggtggctgcgggaacccggaggcccaacgtggtgctgctcctcacggacgaccaggacgaagtgctcggcggcatgacaccgctaaagaaaaccaaagctctcatcggagagatggggatgactttttccagtgcttatgtgccaagtgctctctgctgccccagcagagccagtatcctgacaggaaagtacccacataatcatcacgttgtgaacaacactctggaggggaactgcagtagtaagtcctggcagaagatccaagaaccaaatactttcccagcaattctcagatcaatgtgtggttatcagaccttttttgcagggaaatatttaaatgagtacggagccccagatgcaggtggactagaacacgttcctctgggttggagttactggtatgccttggaaaagaattctaagtattataattacaccctgtctatcaatgggaaggcacggaagcatggtgaaaactatagtgtggactacctgacagatgttttggctaatgtctccttggactttctggactacaagtccaactttgagcccttcttcatgatgatcgccactccagcgcctcattcgccttggacagctgcacctcagtaccagaaggctttccagaatgtctttgcaccaagaaacaagaacttcaacatccatggaacgaacaagcactggttaattaggcaagccaagactccaatgactaattcttcaatacagtttttagataatgcatttaggaaaaggtggcaaactctcctctcagttgatgaccttgtggagaaactggtcaagaggctggagttcactggggagctcaacaacacttacatcttctatacctcagacaatggctatcacacaggacagttttccttgccaatagacaagagacagctgtatgagtttgatatcaaagttccactgttggttcgaggacctgggatcaaaccaaatcagacaagcaagatgctggttgccaacattgacttgggtcctactattttggacattgctggctacgacctaaataagacacagatggatgggatgtccttattgcccattttgagaggtgccagtaacttgacctggcgatcagatgtcctggtggaataccaaggagaaggccgtaacgtcactgacccaacatgcccttccctgagtcctggcgtatctcaatgcttcccagactgtgtatgtgaagatgcttataacaatacctatgcctgtgtgaggacaatgtcagcattgtggaatttgcagtattgcgagtttgatgaccaggaggtgtttgtagaagtctataatctgactgcagacccagaccagatcactaacattgctaaaaccatagacccagagcttttaggaaagatgaactatcggttaatgatgttacagtcctgttctgggccaacctgtcgcactccaggggtttttgaccccggatacaggtttgacccccgtctcatgttcagcaatcgcggcagtgtcaggactcgaagattttccaaacatcttctgtagcgacctcacacagcctctgcagatggatccctgcacgcctctttctgatgaagtgattgtagtaggtgtctgtagctagtcttcaagaccacacctggaagagtttctgggctggctttaagtcctgtttgaaaaagcaacccagtcagctgacttcctcgtgcaatgtgttaaactgtgaactctgcccatgtgtcaggagtggctgtctctggtctcttcctttagctgacaaggacactcctgaggtctttgttctcactgtattctttttatcctggggccacagttcttgattattcctcttgtggttaaagactgaatttgtaaacccattcagataaatggcagtactttaggacacacacaaacacacagacacaccttttgatatgtaagcttgacctaaagtcaaaggacctgtgtagcatttcagattgagcacttcactatcaaaaatactaacatcacatggcttgaagagtaaccatcagagctgaatcatccaagtaagaacaagtaccattgttgattgataagtagagatacattttttatgatgttcatcacagtgtggtaaggttgcaaattcaaaacatgtcacccaagctctgttcatgtttttgtgaattctaggctggtgctgcactgaaatagagcagtaagcttgtgataaaggccaattccaggtagctcttgaaggtgatagccatctactttccagtggctgccaaccacagggagtgccagttaacactggaaggattaaggcaaggtcccttctcttgagactcccctctgagatctgaaaaatgaagtggcttaggaacatcagcagtgaagaactgccaagagttggtgaaggttgtctcttccgagggccttctgaagacagggctcttgaacagacaagtggaagggctgtaccagggataaaggaaagaagtgcctgtccagcagggagcttgaatttaagttccatgtatgaagtcattggctctatctgcatttttctgtcattctcttcatttgttttaaggtggaaaattttcttacagttgatgcaaagtatcaactactttaccctaccttctccccttttagatgggttcttcctgagttttggagtcttgtatgattatcagtattcccctgtcaaaatcaaatctattcaggtttcttcactgttgagaacacctaaatgtttttatttttgagaagtggggacagagtctcactatgtcacccaggctggagtgcaatggcatgatctcagctcactgcaaccttcgcctcctgggttcaagcgattctcctgcctccgcctcctgagtagctgggattataggcacgcaccaccacgcccagctaattttttgtatttttagtagagacagagtttcaccatgttggccaggctggtcttgaactcctgaccttgtgatccacccacctcggcctcccagagtgctgggattacaggcatgagccaccacgcttggctaagaacacctaaatttttatgtttcttggctcaaaaaccagttccatttctaatgttgtcctcacaagaaggctaattggtggtgagacagcaggggaggaggaagagctgtggtttgtaacttgttcaactcaggcaataagcgattttagctttatttaaagtcttctgtccagctttaagcactttgtaagacatggctgaaagtagcttttctatcagaattgcagatagtcatgttgggctaacagtcaattggatatattcctttacctcacatgaccccagcaactgtggtggtatctagaggtgaaacaggcaagtgaaatggacacctctgctgtgaatgttttagagaaggaaattcaaaaaatgttgtaactgaaagcactgttgaatatgggtatcggctttctttttcactttgactcttaacattatcagtcaacttccacattaatgaaagttgaccatagttatttccaaataaaaagaaaccaactcttaccaggtcttggactgtgatgtcatattattcagttttatgcttgttcctgagcagaactcataagagtgacatagtcagctgctgacggcacctcagccacgccactcttactcagttcagtgggtgtgcttgcgtggtaggatgtggtgcagccctctctacgctcttctatttttggtatatttcctatctaaccttcaaatagcttccaattctttttttcttggactggcttcattctgaatttgtgctaaaataatctttcataaagagacctcagtttatagcgtaacagactacacaatgcactgatgttttcataatgtttaagggacccactgcaagaagcttgctgcctccttttaattgtattcatttagattttgattttccatgttaagaaggtgaggtccatgttggtgcccttcagagtagagaaccatgtaaacattaggaatgaacagaggccttaggaatgaatagagagtttgccttatacaatttcctgttacaaagctctccctctcatgcaaagtagggaacaccttttgagcatctttgaatttgacaaatggtgctgttgcaaacactttttttttgagatgaagtctcgcggttgtcacccgggctggagtgcagtggcgtgatctcggctcactgcaacttccacctcctgggttccagcagttctcctgcctcagcctcccaagtagctgagattacaggcgcctgccaccccacctggctgatttttgtaattttagtagagacggggtttcaccatgttggccaggctgattaactcctgacctcaggtgatccacctttctcggcctcccaaagtgctgggattacgggtgtgagccaccgtgcccggcctgcaaacacattttaattgacaacactagggctgttgtacaaaatagtaatgatagccatggaagttttaccttattctgtgagaagtgttcttaaacttattaagtgtctaaactaaggtttagtgcttttttaaaggaaagttgtcccaggattcatcctaaagaaagcaaaagttaattcaactgatccaccaatggaattagatgggtagagttgggttcttgagttttaccaccacttagttcccactgaattttgtaacttcctgtgtttgcatcctctgttcctattctgcccttgctctgtgtcatctcagtcatttgacttagaaagtgcccttcaaaaggaccctgttcactgctgcacttttcaatgaattaaaatttatttctgttctagtgggaaaaaaaaaaaaaaaaaa

SEQ ID NO: 783 - DNA, 1832 bp, Homo sapiens
gagcggccaggccagcctcggagccagcagggagctgggagctgggggaaacgacgccaggaaagctatcgcgccagagagggcgacgggggctcgggaagcctgacagggcttttgcgcacagctgccggctggctgctacccgcccgcgccagcccccgagaacgcgcgaccaggcacccagtccggtcaccgcagcggagagctcgccgctcgctgcagcgaggcccggagcggccccgcagggaccctccccagaccgcctgggccgcccggatgtgcactaaaatggaacagcccttctaccacgacgactcatacacagctacgggatacggccgggcccctggtggcctctctctacacgactacaaactcctgaaaccgagcctggcggtcaacctggccgacccctaccggagtctcaaagcgcctggggctcgcggacccggcccagagggcggcggtggcggcagctacttttctggtcagggctcggacaccggcgcgtctctcaagctcgcctcttcggagctggaacgcctgattgtccccaacagcaacggcgtgatcacgacgacgcctacacccccgggacagtacttttacccccgcgggggtggcagcggtggaggtgcagggggcgcagggggcggcgtcaccgaggagcaggagggcttcgccgacggctttgtcaaagccctggacgatctgcacaagatgaaccacgtgacaccccccaacgtgtccctgggcgctaccggggggcccccggctgggcccgggggcgtctacgccggcccggagccacctcccgtttacaccaacctcagcagctactccccagcctctgcgtcctcgggaggcgccggggctgccgtcgggaccgggagctcgtacccgacgaccaccatcagctacctcccacacgcgccgcccttcgccggtggccacccggcgcagctgggcttgggccgcggcgcctccaccttcaaggaggaaccgcagaccgtgccggaggcgcgcagccgggacgccacgccgccggtgtcccccatcaacatggaagaccaagagcgcatcaaagtggagcgcaagcggctgcggaaccggctggcggccaccaagtgccggaagcggaagctggagcgcatcgcgcgcctggaggacaaggtgaagacgctcaaggccgagaacgcggggctgtcgagtaccgccggcctcctccgggagcaggtggcccagctcaaacagaaggtcatgacccacgtcagcaacggctgtcagctgctgcttggggtcaagggacacgccttctgaacgtcccctgcccctttacggacaccccctcgcttggacggctgggcacacgcctcccactggggtccagggagcaggcggtgggcacccaccctgggacctaggggcgccgcaaaccacactggactccggccctcctaccctgcgcccagtccttccacctcgacgtttacaagcccccccttccacttttttttgtatgttttttttctgctggaaacagactcgattcatattgaatataatatatttgtgtatttaacagggaggggaagagggggcgatcgcggcggagctggccccgccgcctggtactcaagcccgcggggacattgggaaggggacccccgccccctgccctcccctctctgcaccgtactgtggaaaagaaacacgcacttagtctctaaagagtttattttaagacgtgtttgtgtttgtgtgtgtttgttctttttattgaatctatttaagtaaaaaaaaaattggttctttaaaaaaaaaaaaaaaaa

SEQ ID NO: 784 - DNA, 1756 bp, Homo sapiens
acaccctgacccaagccgagacaggttccaaacctcaacctgcagccggaagggggaagtgaaactcggctgggggtgggggctcagaagccgccccagaaagcactgaaagccacagcacgtacacccactccagggatctgccagcaccctgtggggcccagactacaggctgatggcggaggcttcgagtgacccgggtgccgaggagcgggaagagttgctggggcccactgctcagtggagcgtggaggacgaggaggaggccgtccacgagcaatgccagcatgagagagacaggcagcttcaggcccaggacgaggagggaggcggccatgtccccgagcggccgaagcaggagatgctcctcagcctgaagccctcggaggcccctgaactggatgaggacgagggctttggcgactggtcccagaggccagagcagcggcagcagcacgagggggcgcagggcgccttggacagcggagagcccccccagtgcaggagtcctgagggggagcaagaggacaggcccggcctgcatgcctacgaaaaggaggacagtgatgaagtccacctggaggagttgagtctgagcaaggaggggccaggcccagaggacactgtccaggacaacctgggggccgcaggggctgaggaggaacaggaggagcaccagaaatgtcagcagcccaggacacccagccccttggtcttggaggggaccatcgaacagagctcgcctcccctgagccctaccaccaaactcatcgacaggaccgagtccctaaaccgctccatagagaagagtaacagtgtgaagaaatcccagccagacttgcccatctccaagattgatcagtggctggaacaatacacccaggccatcgagaccgctggccggacccccaagctagcccgccaggcctccatagagctgcccagcatggctgtggccagtaccaagagtcggtgggagacgggtgaggtacaggctcagtctgcggccaagactccgtcctgcaaggatattgtggctggagacatgagcaagaaaagcctctgggagcagaagggaggctccaagacctcatcaacaattaagagcaccccatctgggaagaggtataagtttgtggccaccgggcatgggaagtatgagaaggtgcttgtggaagggggcccggctccctaggcgtcccatctcgcttcctgggtctgcaggtccagccggctggcaccctccatgtacccaggggagattccagccagacacccgccccccggccctggctaagaagttgcttcctgttgccagcatgacctaccctcgcctctttgatgccatccgctgccacctccttttgctcctggaccctttagcctctctgcccttccactctctgaccaccgcccccgccctccccacccagctccgcttcttgttacttgggggaggaaagaaactcctgatcattggccaaagggacttacccctggagaggccaagtgccttctaggaagttaggaggttgaggcacagcctgtgcagagagggtgggtcacccccccagatccaaggagaaactgcaggtcaagggctgataacggccatgcaggatgcttgatgctgcgtcccccgctgcttgccgccccccaccccgccattttgtataataaagctccctgtgtattctcaaaaaaaaaaaaaaaaaaaaaaaaaaaaaaaaaaaaaaaaaaaaaaaaaaaaaaaaaa

SEQ ID NO: 785 - DNA, 1194 bp, Homo sapiens
ggggccgcgcggctgcctgggaggctccgggccagccgcggtccagagcgcgcgaggttcggggagctcggccaggctgctggtacctgcgtccgcccggcgagcaggacaggctgctttggtttgtgacctccaggcaggacggccatcctctccagaatgaagatcttcttgccagtgctgctggctgcccttctgggtgtggagcgagccagctcgctgatgtgcttctcctgcttgaaccagaagagcaatctgtactgcctgaagccgaccatctgctccgaccaggacaactactgcgtgactgtgtctgctagtgccggcattgggaatctcgtgacatttggccacagcctgagcaagacctgttccccggcctgccccatcccagaaggcgtcaatgttggtgtggcttccatgggcatcagctgctgccagagctttctgtgcaatttcagtgcggccgatggcgggctgcgggcaagcgtcaccctgctgggtgccgggctgctgctgagcctgctgccggccctgctgcggtttggcccctgaccgcccagaccctgtcccccgatcccccagctcaggaaggaaagcccagccctttctggatcccacagtgtatgggagcccctgactcctcacgtgcctgatctgtgcccttggtcccaggtcaggcccaccccctgcacctccacctgccccagcccctgcctctgccccaagtggggccagctgccctcacttctggggtggatgatgtgaccttccttgggggactgcggaagggacgagggttccctggagtcttacggtccaacatcaggaccaagtcccatggacatgctgacagggtccccagggagaccgtgtcagtagggatgtgtgcctggctgtgtacgtgggtgtgcagtgcacgtgagagcacgtggcggcttctgggggccatgtttggggagggaggtgtgccagcagcctggagagcctcagtccctgtagccccctgccctggcacagctgcatgcacttcaagggcagcctttgggggttggggtttctgccacttccgggtctaggccctgccccaaatccagccagtcctgccccagcccacccccacattggagccctcctgctgctttggtgcctcaaataaatacagatgtcccccagaaaaaaaaaaaaaaaaaa

SEQ ID NO: 786 - DNA, 2787 bp, Homo sapiens
agagcggaggccgcactccagcactgcgcagggaccgccttggaccgcagttgccggccaggaatcccagtgtcacggtggacacgcctccctcgcgcccttgccgcccacctgctcacccagctcaggggctttggaattctgtggccacactgcgaggagatcggttctgggtcggaggctacaggaagactcccactccctgaaatctggagtgaagaacgccgccatccagccaccattccaaggaggtgcaggagaacagctctgtgataccatttaacttgttgacattacttttatttgaaggaacgtatattagagcttactttgcaaagaaggaagatggttgtttccgaagtggacatcgcaaaagctgatccagctgctgcatcccaccctctattactgaatggagatgctactgtggcccagaaaaatccaggctcggtggctgagaacaacctgtgcagccagtatgaggagaaggtgcgcccctgcatcgacctcattgactccctgcgggctctaggtgtggagcaggacctggccctgccagccatcgccgtcatcggggaccagagctcgggcaagagctccgtgttggaggcactgtcaggagttgcccttcccagaggcagcgggatcgtgaccagatgcccgctggtgctgaaactgaagaaacttgtgaacgaagataagtggagaggcaaggtcagttaccaggactacgagattgagatttcggatgcttcagaggtagaaaaggaaattaataaagcccagaatgccatcgccggggaaggaatgggaatcagtcatgagctaatcaccctggagatcagctcccgagatgtcccggatctgactctaatagaccttcctggcataaccagagtggctgtgggcaatcagcctgctgacattgggtataagatcaagacactcatcaagaagtacatccagaggcaggagacaatcagcctggtggtggtccccagtaatgtggacatcgccaccacagaggctctcagcatggcccaggaggtggaccccgagggagacaggaccatcggaatcttgacgaagcctgatctggtggacaaaggaactgaagacaaggttgtggacgtggtgcggaacctcgtgttccacctgaagaagggttacatgattgtcaagtgccggggccagcaggagatccaggaccagctgagcctgtccgaagccctgcagagagagaagatcttctttgagaaccacccatatttcagggatctgctggaggaaggaaaggccacggttccctgcctggcagaaaaacttaccagcgagctcatcacacatatctgtaaatctctgcccctgttagaaaatcaaatcaaggagactcaccagagaataacagaggagctacaaaagtatggtgtcgacataccggaagacgaaaatgaaaaaatgttcttcctgatagataaaattaatgcctttaatcaggacatcactgctctcatgcaaggagaggaaactgtaggggaggaagacattcggctgtttaccagactccgacacgagttccacaaatggagtacaataattgaaaacaattttcaagaaggccataaaattttgagtagaaaaatccagaaatttgaaaatcagtatcgtggtagagagctgccaggctttgtgaattacaggacatttgagacaatcgtgaaacagcaaatcaaggcactggaagagccggctgtggatatgctacacaccgtgacggatatggtccggcttgctttcacagatgtttcgataaaaaattttgaagagttttttaacctccacagaaccgccaagtccaaaattgaagacattagagcagaacaagagagagaaggtgagaagctgatccgcctccacttccagatggaacagattgtctactgccaggaccaggtatacaggggtgcattgcagaaggtcagagagaaggagctggaagaagaaaagaagaagaaatcctgggattttggggctttccagtccagctcggcaacagactcttccatggaggagatctttcagcacctgatggcctatcaccaggaggccagcaagcgcatctccagccacatccctttgatcatccagttcttcatgctccagacgtacggccagcagcttcagaaggccatgctgcagctcctgcaggacaaggacacctacagctggctcctgaaggagcggagcgacaccagcgacaagcggaagttcctgaaggagcggcttgcacggctgacgcaggctcggcgccggcttgcccagttccccggttaaccacactctgtccagccccgtagacgtgcacgcacactgtctgcccccgttcccgggtagccactggactgacgacttgagtgctcagtagtcagactggatagtccgtctctgcttatccgttagccgtggtgatttagcaggaagctgtgagagcagtttggtttctagcatgaagacagagccccaccctcagatgcacatgagctggcgggattgaaggatgctgtcttcgtactgggaaagggattttcagccctcagaatcgctccaccttgcagctctccccttctctgtattcctagaaactgacacatgctgaacatcacagcttatttcctcatttttataatgtcccttcacaaacccagtgttttaggagcatgagtgccgtgtgtgtgcgtcctgtcggagccctgtctcctctctctgtaataaactcatttctagcag

SEQ ID NO: 787 - DNA, 1470 bp, Homo sapiens
tcccttctgaggaaacgaaaccaacagcagtccaagctcagtcagcagaagagataaaagcaaacaggtctgggaggcagttctgttgccactctctctcctgtcaatgatggatctcagaaataccccagccaaatctctggacaagttcattgaagactatctcttgccagacacgtgtttccgcatgcaaatcaaccatgccattgacatcatctgtgggttcctgaaggaaaggtgcttccgaggtagctcctaccctgtgtgtgtgtccaaggtggtaaagggtggctcctcaggcaagggcaccaccctcagaggccgatctgacgctgacctggttgtcttcctcagtcctctcaccacttttcaggatcagttaaatcgccggggagagttcatccaggaaattaggagacagctggaagcctgtcaaagagagagagcattttccgtgaagtttgaggtccaggctccacgctggggcaacccccgtgcgctcagcttcgtactgagttcgctccagctcggggagggggtggagttcgatgtgctgcctgcctttgatgccctgggtcagttgactggcggctataaacctaacccccaaatctatgtcaagctcatcgaggagtgcaccgacctgcagaaagagggcgagttctccacctgcttcacagaactacagagagacttcctgaagcagcgccccaccaagctcaagagcctcatccgcctagtcaagcactggtaccaaaattgtaagaagaagcttgggaagctgccacctcagtatgccctggagctcctgacggtctatgcttgggagcgagggagcatgaaaacacatttcaacacagcccagggatttcggacggtcttggaattagtcataaactaccagcaactctgcatctactggacaaagtattatgactttaaaaaccccattattgaaaagtacctgagaaggcagctcacgaaacccaggcctgtgatcctggacccggcggaccctacaggaaacttgggtggtggagacccaaagggttggaggcagctggcacaagaggctgaggcctggctgaattacccatgctttaagaattgggatgggtccccagtgagctcctggattctgctggtgagacctcctgcttcctccctgccattcatccctgcccctctccatgaagcttgagacatatagctggagaccattctttccaaagaacttacctcttgccaaaggccatttatattcatatagtgacaggctgtgctccatattttacagtcattttggtcacaatcgagggtttctggaattttcacatcccttgtccagaattcattcccctaagagtaataataaataatctctaacaccatttattgactgtctgcttcgggctcaggttctgtcctaagccctttaatatgcactctctcattaaatagtcacaacaa

SEQ ID NO: 788 - DNA, 4257 bp, Homo sapiens
atacgccggggcggggccgagagtttggagccccggagtggggtgtcggcgcctcattcgggtggagctgagccggagacaggcagttgtgaaaaacttcaggacaaaaatgtttcatttaaggacttgtgctgctaagttgaggccattgacggcttcccagactgttaagacattttcacaaaacagaccagcagcagctaggacatttcaacagattcggtgctattctgcacctgttgctgctgagccctttctcagtgggactagttcgaactatgtggaggagatgtactgtgcttggctggaaaaccccaaaagtgtacataagtcatgggacattttttttcgcaacacgaatgccggagccccaccgggcactgcctaccagagtccccttcccctgagccgaggctccctggctgctgtggcccatgcacagtccctggtagaagcacagcccaacgtggacaagctcgtggaggaccacctggcagtgcagtcgctcatcagggcatatcagatacgagggcaccatgtagcacagctggaccccctggggattttggatgctgatctggactcctccgtgcccgctgacattatctcatccacagacaaacttgggttctatggcctggatgagtctgacctcgacaaggtcttccacttgcccaccaccactttcatcgggggacaggaatcagcacttcctctgcgggagatcatccgtcggctggagatggcctactgccagcatattggggtggagttcatgttcatcaatgacctggagcagtgccagtggatccggcagaagtttgagacccctgggatcatgcagttcacaaatgaggagaaacggaccctgctggccaggcttgtgcggtccaccaggtttgaggagttcctacagcggaagtggtcctctgagaagcgctttggtctagaaggctgcgaggtactgatccctgccctcaagaccatcattgacaagtctagtgagaatggcgtggactacgtgatcatgggcatgccacacagagggcggctgaacgtgcttgcaaatgtcatcaggaaggagctggaacagatcttctgtcaattcgattcaaagctggaggcagctgatgagggctccggagatgtgaagtaccacctgggcatgtatcaccgcaggatcaatcgtgtcaccgacaggaacattaccttgtccttggtggccaacccttcccaccttgaggccgctgaccccgtggtgatgggcaagaccaaagccgaacagttttactgtggcgacactgaagggaaaaaggtcatgtccatcctgttgcatggggatgctgcatttgctggccagggcattgtgtacgagaccttccacctcagcgacctgccatcctacacaactcatggcaccgtgcacgtggtcgtcaacaaccagatcggcttcaccaccgaccctcggatggcccgctcctccccctaccccactgacgtggcccgagtggtgaatgcccccattttccacgtgaactcagatgaccccgaggctgtcatgtacgtgtgcaaagtggcggccgagtggaggagcaccttccacaaggacgtggttgtcgatttggtgtgttaccggcgcaacggccacaacgagatggatgagcccatgttcacgcagccgctcatgtacaagcagatccgcaagcagaagcctgtgttacagaagtacgctgagctgctggtgtcgcagggtgtggtcaaccagcctgagtatgaggaggaaatttccaagtatgataagatctgtgaggaagcttttgccagatctaaagatgagaagatcttgcacattaagcactggctggactctccctggcctggcttcttcaccctggacgggcagcccaggagcatgtcctgcccctccacgggtctgacggaggatattctgacacacatcgggaatgtggctagttctgtgcctgtggaaaactttactattcatggagggctgagccggatcttgaagactcgtggggaaatggtgaagaaccggactgtggactgggctctagcggagtacatggcgtttggctcgctcctgaaggagggcatccacattcggctgagcggccaggacgtggagcggggcacattcagccaccgccaccatgtgctccatgaccagaatgtggacaagagaacctgcatccccatgaaccatctctggcccaatcaggccccctatactgtgtgcaacagctcactgtctgagtacggcgtgctgggctttgagctgggcttcgccatggccagtcctaatgccctggtcctctgggaagcccaatttggtgacttccacaacacggcccagtgtatcatcgaccagttcatctgcccgggacaagccaagtgggtgcggcagaatggcatcgtgttgctgctgccccatggcatggagggcatgggtccagaacattcctccgcccgcccagagcggttcttgcagatgtgcaacgatgacccagatgtcctgccagaccttaaagaagccaacttcgacatcaatcagctatatgactgcaattgggttgttgtcaactgctccactcctggcaacttcttccacgtgctacgacgccagatcctgctgccattccggaagccgttaattatcttcacccccaaatccctgttgcgccaccccgaggccagatccagctttgatgagatgcttccaggaacccacttccagcgggtgatcccagaagatggccctgcagctcagaacccagaaaatgtcaaaaggcttctcttctgcaccggcaaagtgtattatgacctcacccgggagcgcaaagcacgcgacatggtggggcaggtggccatcacaaggattgagcagctgtcgccattcccctttgacctcctgctgaaggaggtgcagaagtaccccaatgctgagctggcctggtgccaggaggagcacaagaaccaaggctactatgactacgtgaagccaagacttcggaccaccatcagccgcgccaagcccgtctggtatgccggccgggacccagcggctgctccagccaccggcaacaagaagacccacctgacggagctgcagcgcctcctggacacggccttcgacctggacgtcttcaagaacttctcgtagatgctgcctagggttgcttgggccactgccctctccacacccatgactgccccttgcttctcaactaaagaatagtgcctcagcgctgcccacaccaccgccctcctcgctgtgccaccacccctccctctgctctcataggagttaggctgtcgtccccctccagtgcttggctgccccacaggccacacgctgcccaggctctgctgacttctgagcagttttccaggaggccggggggagcaggaggaggaaaggtagcccccgagggatgtccttggggaggggtcagctctggccacaatcctccccaccagtctcacccactaggataggaactgggccttgtgtgctggcttccgctgtcacccagcaaggcacaggctcctgtatttgagactaggatagcttcatcttgagcctgagccttagaatctgtagaggagcctggagtcggatctagccatggctggcagaggtttctagggtgggccccagccgtggcgtgaactgaggatgacccggggcagctggcaggagagagccttggcctgacctggcacagaaagggcagcttcagtctctgcagtgtccattatctgctgttccttcgagggttccaggctgtgtgtggggcccaagcatgccccacccacccctcctgggcccaggcagcacctggagcccacagagtctgtgtgtagccaggaagccccgctcaggtagccaccaccggggcactggctgctctgtcttggtcctgttaaccctccacctcctctcttggactccctccccaccccaaccactctttctttctcctttaacccaatggagactttctgatgcatcgttttctttgctgtgccaaagcaggtcagaagagggagaggaggggctgggggtgaggggccaggccatggccaaggggccagctgcccctcatttatcactctgaccttcacagggacagatctgatttatttattttggttaaaaaaaaaaaaaaggaacagaaacaactttgcattgcattggcttgacccataaactaagttatatccgtgggcaaaaaa

SEQ ID NO: 789 - DNA, 3231 bp, Homo sapiens
ctctctcacacacacccccgcttgggcctcctctctctctccggctccattttctccgccgccgggggccggggtctcctgtggggggcccagccggtatcccaggtctcccttcagtgccggggtgaacccccgggggagccgggagccgggggcagacgggcgggggttggggcggagggagcagcggccccagcgagtttggggggagaagtaaccaggcggggggaggggcggagcagggagggggcctcagggcccccccccagctatggacgaacggctactggggccgccccctccaggcgggggccgggggggcctgggattggtgagtggggagcctgggggccctggcgagcctcccggtggcggagaccccggtgggggtagcgggggggtcccgggaggccgagggaagcaagacatcggggacattctgcagcagataatgaccatcaccgaccagagcctggacgaggcccaggccaagaaacacgccctaaactgccaccgaatgaagcctgctctctttagcgtcctgtgtgaaatcaaggagaaaactggcctcagcattcggagctcccaggaggaggagccggtggacccacagctgatgcgcttggacaacatgcttctggcagagggtgtggctgggcccgagaaagggggcggctcagcagcagcagctgcagccgctgcagcctctggtggtggtgtgtcccctgacaactccatcgaacactcggactatcgcagcaaacttgcccagatccgtcacatataccactcggagctggagaagtatgagcaggcatgtaatgagttcacgacccatgtcatgaacctgctgagggagcagagccgcaccaggcccgtggcccccaaagagatggaacgcatggtgagcatcatccatcgaaagttcagcgccatccagatgcagctgaagcagagcacctgcgaggctgtgatgatcctgcgctcccgtttcctggatgccagacgaaagcgccgtaacttcagcaaacaggccactgaggtcctaaatgagtatttctactcccacctgagtaacccatatcctagtgaggaggccaaggaggagcttgccaagaagtgtggcatcaccgtgtctcaggtctccaactggtttggcaacaagaggattcgctataagaaaaacatcggaaagttccaagaggaggcaaacatctatgctgtcaagaccgccgtgtcagtcacccaggggggccacagccgcaccagctccccgacacccccttcctctgcaggctctggcggctctttcaatctctcaggatctggagacatgtttctggggatgcctgggctcaacggagattcctattctgcttcccaggtggaatcactccgacactcgatggggccagggggctatggggataacctcgggggaggccagatgtacagcccacgggaaatgagggcaaatggcagctggcaagaggctgtgaccccctcttcagtgacatccccaacggagggaccagggagtgttcactctgatacctccaactgatcttgcccctcagggtcacaggggtgggggctctcacaaggcgacttgaagaggacgcaggcttccagaggacaaaccccaatacaggagaagcacaagacagagaagggccaatggggtcatcccctccctaacgagactctctgtgctgggggtgctaattacatggcaggaagaatggggcctctaaggggagtgtggggtctgtctctcccttttttccatctttttcctctctcgctttctttcttacacagaaacatacacataccgagaaacctatttctcagacccctttttctcctctgtctttctctctccctctcccacacctcacacacacatactcccacttgcaactattctgtttctctcctgggctcccccactttcccttccccaccccacttgtatgctctggaatctgtggagacgccagccctgcccaatcagagatgccaaaaatggggacatgacttctggacagaggacatgggccacgcccccatgcatccccacccccgcccctccggacggcttacttacctcatacgcagctcatcttaaaccaatagaatcgctcggtggacgagagtgtctgactcagatatctacctcggagggagtttctgctactttagggaattattgactgggctttggggttgaacttttttttttttaaagaaagaaaaagaaaccctgggatccatctgttttttttgttgttgttgttgtttttgttgttgttggtggtggtggtggtggtggttcttaatttttaatttagtttggggaagtagcttgtttttttttttataaatatgttgatttcttgtctttttttttttttatttcttactttcccatattaggggtgatagccaaaggggttctggtaagagaaagggggacaaacagaactggtaaagaggcccccctggctccaggcctgtccatcaggaagtaaattttacagggcaccaagctttgccccctaaaatcccttaggtgttctttgttcatgcaggcaggtttctgccgcatttgatgtggaggcagtgaagggcttgccctgctggcctctcatcccccttcttcccacaacccttgggcagggctggactcagtaattttgaggaaattgaagatgccatcttcccctgtgagtgacatgtctttaattttttaaaaaactactatttgaaaattggagggggaagaatgggaagggagttattgccaaatatgttaaatatgggttggggtgcttgtatatgtatcttcctcaatttccccataaatgaggtatctttttgtcacaccaaaatcaaggggtagggagagggaggaggttgcaaaaagccagatgtgggggaaaagtaacatcaacactgtcccatcctcagccctgaactagctaccatctgatcccctcagacattctcaggattttacaagactgtcagagtggggaacccctcccattaaagatccgggcaggactggggacaggttggaagtgtgatgggtgggggggtgggaggcatgggccgggggcagttctctcctcacttgtaaacttgtgtagtttcacagaaaaaaaacaaaatgcagttttaaataaagaaatttcttttttccctgggaaaaaaaaaaaaaaaaaa

SEQ ID NO: 790 - DNA, 4656 bp, Homo sapiens; identical to SEQ ID NO: 108

SEQ ID NO: 791 - DNA, 439 bp, Homo sapiens
ccgcagcatgagctccgcagccgggttctgcgcctcacgccccgggctgctgttcctggggttgctgctcctgccacttgtggtcgccttcgccagcgctgaagctgaagaagatggggacctgcagtgcctgtgtgtgaagaccacctcccaggtccgtcccaggcacatcaccagcctggaggtgatcaaggccggaccccactgccccactgcccaactgatagccacgctgaagaatggaaggaaaatttgcttggacctgcaagccccgctgtacaagaaaataattaagaaacttttggagagttagctactagctgcctacgtgtgtgcatttgctatatagcatacttcttttttccagtttcaatctaactgtgaaagaaacttctgatatttgtgttatccttatgattttaaataaacaaaataaatc

SEQ ID NO: 792 - DNA, 741 bp, Homo sapiens
actgcctgcagaaccccagcccgactttccctgcgcactgggatcctgctggaacctcagctgcaacatgagctccgcagccaggtcccgcctcacccgcgccacccgccaggagatgctgttcttggcgttgctgctcctgccagttgtggtcgccttcgccagagctgaagctgaagaagatggggacctgcagtgcctgtgtgtgaagaccacctcccaggtccgtcccaggcacatcaccagcctggaggtgatcaaggccggaccccactgccccactgcccaactcatagccacgctgaagaatgggaggaaaatttgcttggatctgcaagccctgctgtacaagaaaatcattaaggaacatttggagagttagctactagctgcctaagtgtgcactttcaatctaactgtgaaagaatcttctgatgtttgtattatccttcttatattatattaacaaaataaatcaagttgtggtatagtcaatctatttcttaataatactgcaaaaataatgctgacacatcacaatttcatattttaaaatttccagaattttaagcaaaaagcattatgaaggaaggcttggtttaataaagactgattttgttcagtgttatatgttagctgatacatatttgttcatttatgtgattgcagtactttatagctacatatttaccttgaatgttacaattagcttgccaataaatattagtagctcttaagcat

SEQ ID NO: 793 - DNA, 743 bp, Homo sapiens
gaggatcatagagctgtctggcgcagcgaggcctcccggcgccaccgagacgcgcagaggacggctagagcgttgctcgccgagagacttcctcttcgttaagtcggccttcccaacatggcgcagtctattaacatcacggagctgaatctgccgcagctagaaatgctcaagaaccagctggaccaggaagtggagttcttgtccacgtccattgctcagctcaaagtggtacagaccaagtatgtggaagccaaggactgtctgaacgtgctgaacaagagcaacgaggggaaagaattactcgtcccactgacgagttctatgtatgtccctgggaagctgcatgatgtggaacacgtgctcatcgatgtgggaactgggtactatgtagagaagacagctgaggatgccaaggacttcttcaagaggaagatagattttctaaccaagcagatggagaaaatccaaccagctcttcaggagaagcacgccatgaaacaggccgtcatggaaatgatgagtcagaagattcagcagctcacagccctgggggcagctcaggctactgctaaggcctgagagtttttgcagaaatggggcagagggacaccctttgggcgtggcttcctggtgatgggaagggtcttgtgttttaatgccaataaatgtgccagctgggcagaaaaaaaaaaaaaaaaaaaaaaaaaaaaaaaaaaaaaaaaaaaaaaaaaaaaaaaaaa

SEQ ID NO: 794 - DNA, 4991 bp, Homo sapiens
ggcggcgcgcaagggacgtgcggagtgagtggcgctgcgggtggggccgtcggcggcgctggtgagctttgcggagctgggcggtgccgaggaggaggaggtggcggcctgggtctgacgcggccctgttcgagggggcctctcttgtttatttatttattttccgtgggtgcctccgagtgtgcgcgcgctctcgctacccggcggggagggggtggggggagggcccgggaaaagggggagttggagccggggtcgaaacgccgcgtgacttgtaggtgagagaacgccgagccgtcgccgcagcctccgccgccgagaagcccttgttcccgctgctgggaaggagagtctgtgccgacaagatggcggacggggagctgaacgtggacagcctcatcacccggctgctggaggtacgaggatgtcgtccaggaaagattgtgcagatgactgaagcagaagttcgaggcttatgtatcaagtctcgggagatctttctcagccagcctattcttttggaattggaagcaccgctgaaaatttgtggagatattcatggacaatatacagatttactgagattatttgaatatggaggtttcccaccagaagccaactatcttttcttaggagattatgtggacagaggaaagcagtctttggaaaccatttgtttgctattggcttataaaatcaaatatccagagaacttctttctcttaagaggaaaccatgagtgtgctagcatcaatcgcatttatggattctatgatgaatgcaaacgaagatttaatattaaattgtggaagaccttcactgattgttttaactgtctgcctatagcagccattgtggatgagaagatcttctgttgtcatggaggattgtcaccagacctgcaatctatggagcagattcggagaattatgagacctactgatgtccctgatacaggtttgctctgtgatttgctatggtctgatccagataaggatgtgcaaggctggggagaaaatgatcgtggtgtttcctttacttttggagctgatgtagtcagtaaatttctgaatcgtcatgatttagatttgatttgtcgagctcatcaggtggtggaagatggatatgaattttttgctaaacgacagttggtaaccttattttcagccccaaattactgtggcgagtttgataatgctggtggaatgatgagtgtggatgaaactttgatgtgttcatttcagatattgaaaccatctgaaaagaaagctaaataccagtatggtggactgaattctggacgtcctgtcactccacctcgaacagctaatccgccgaagaaaaggtgaagaaaggaattctgtaaagaaaccatcagatttgttaaggacatacttcataatatataagtgtgcactgtaaaaccatccagccatttgacaccctttatgatgtcacacctttaacttaaggagacgggtaaaggatcttaaatttttttctaatagaaagatgtgctacactgtattgtaataagtatactctgttatagtcaacaaagttaaatccaaattcaaaattatccattaaagttacatcttcatgtatcacaatttttaaagttgaaaagcatcccagttaaactagatgtgatagttaaaccagatgaaagcatgatgatccatctgtgtaatgtggttttagtgttgcttggttgtttaattattttgagcttgttttgtttttgtttgttttcactagaataatggcaaatacttctaatttttttccctaaacatttttaaaagtgaaatatgggaagagctttacagacattcaccaactattattttcccttgtttatctacttagatatctgtttaatcttactaagaaaactttcgcctcattacattaaaaaggaattttagagattgattgttttaaaaaaaaatacgcacattgtccaatccagtgattttaatcatacagtttgactgggcaaactttacagctgatagtgaatattttgctttatacaggaattgacactgatttggatttgtgcactctaatttttaacttattgatgctctattgtgcagtagcatttcatttaagataaggctcatatagtattacccaactagttggtaatgtgattatgtggtaccttggctttaggttttcattcgcacggaacaccttttggcatgcttaacttcctggtaacaccttcacctgcattggttttctttttcttttttctttctttttttttttttttttttttttgagttgttgtttgtttttagatccacagtacatgagaatccttttttgacaagccttggaaagctgacactgtctctttttcctccctctatacgaaggatgtatttaaatgaatgctggtcagtgggacattttgtcaactatgggtattgggtgcttaactgtctaatattgccatgtgaatgttgtatacgattgtaaggcttatgtcactaaagatttttattctgattttttcataatcaaaggtcatatgatactgtatagacaagctttgtagtgaagtatagtagcaataatttctgtacctgatcaagtttattgcagcctttcttttcctatttcttttttttaagggttagtattaacaaatggcaatgagtagaaaagttaacatgaagattttagaaggagagaacttacaggacacagatttgtgattctttgactgtgacactattggatgtgattctaaaagcttttattgagcattgtcaaatttgtaagcttcatagggatggacatcatatctataatgcccttctatatgtgctaccatagatgtgacatttttgaccttaatatcgtctttgaaaatgttaaattgagaaacctgttaacttacattttatgaattggcacattgtattacttactgcaagagatatttcattttcagcacagtgcaaaagttctttaaaatgcatatgtctttttttctaattccgttttgttttaaagcacattttaaatgtagttttctcatttagtaaaagttgtctaattgatatgaagcctgactgattttttttttccttacagtgagacatttaagcacacattttattcacatagatactatgtccttgacatattgaaatgattcttttctgaaagtattcatgatctgcatatgatgtattaggttaggtcacaaaggttttatctgaggtgatttaaataacttcctgattggagtgtgtaagctgagcgatttctaataaaattttagttgtacacttttagtagtcatagtgaagcaggtctagaaaataagcctttggcagggaaaaagggcaatgttgattaatctcagtattaaaccacattaatctgtatcccattgtctggcttttgtaaattcatccaggtcaagactaagtatgttggttaataggaatccttttttttttttttaaagactaaatgtgaaaaaataatcactacttaagctaattaatattggtcattaaatttaaaggatggaaatttatcatgtttaaaaattattcaagcactcttaaaaccacttaaacagcctccagtcataaaaatgtgttctttacaaatatttgcttggcaacacgacttgaaataaataaaactttgtttcttaggagaaaatgattctgtaattccagtgtcactaatttatattgttctttcctctgatttttttcaggttagtgatttttttgtatacaatttaatccaaatgttatgacattcagaaatcatgaaacacagtagatatctgttataatgtggtgtatcacatggattataaagcaaagttatggtcgatttctattcttgaaagaatcaactacagtgaatcctttgcatttgaagccttaacatgcattgctttaattttgcccagggacaaattttaataatcagcaagactggtttgtgcaaagcgttgagtcatcaggtatttagagcctagccagctacccagtatccatgctgccatatcccttcattgtaaaaagtacctaaacattcgtgaaatgattttttttagctgaaaaatgctggcaagaagaattttaaagcttaaaataggtggtaaatttgaagtatgagtgtgttcacgagaaacataggcttttcaaaaaaatttttattcaaggcaaagcaaggaacatcttgagatatgtctcaagaatataaagatgtattattttaagccaaggagctgaaatatatctcagtttataaattcaggtatattctttttgtctccatggcaaccataacttttgaaccaaaaaaaattgtttttacatctttatgctgaaaatgtgtttagattaggaatatggtcgggctgaatttgctgttgctccctaaccaaatccacctcttgttttccttgtgagtccatggctaaatcaaagctgcccctgagaagagacttaatccaagcctgattgtactagtggcatcacttagaagtaggctttccctcttcctagtagatctcaatgttttataattccttaaaacagctgaaaattgggacaacatactttacgcaatgaacagtagttaaataggaaataaactagttccatataagtatacacctagagttttaattacctttataatgtttcttaaaagtgaaacttagatacaattgtgattggatacttagatactaagtgaaacttagtgtaacaattttgatctgttaaattggattttacatgtacatttgaatgccagaatttctaaataaatcccctggttaggaaattttaaaagtcaaagcttgttttcttcaaccactaccttctacattggttgacttagaccgtaagctttttaagtttctcattgtaatttaccttctcatgcagattgctgatgttttattaaaccttatttttacaaaaatgaaaaaa

SEQ ID NO: 795 - DNA, 2156 bp, Homo sapiens
agctaatcgttgccagcggggtgtggacttcgccgctgaccccacctccgccgctttgggtaatttagagccgcgcgccgggcgggaatgtaagatggcggagtagcaacgcaaagcgcttggtattgagtctgtggccgacttcggttccggtctctgcagcagccgtgatcgcttagtggagtgcttagggtagttggccaggatgccgaatatcaaaatcttcagcggcagctcccaccaggacttatctcagaaaattgctgaccgcctgggcctggagctaggcaaggtggtgactaagaaattcagcaaccaggagacctgtgtggaaattggtgaaagtgtacgtggagaggatgtctacattgttcagagtggttgtggcgaaatcaatgacaatttaatggagcttttgatcatgattaatgcctgcaagattgcttcagccagccgggttactgcagtcatcccatgcttcccttatgcccggcaggataagaaagataagagccgggcgccaatctcagccaagcttgttgcaaatatgctatctgtagcaggtgcagatcatattatcaccatggacctacatgcttctcaaattcagggcttttttgatatcccagtagacaatttgtatgcagagccggctgtcctaaagtggataagggagaatatctctgagtggaggaactgcactattgtctcacctgatgctggtggagctaagagagtgacctccattgcagacaggctgaatgtggactttgccttgattcacaaagaacggaagaaggccaatgaagtggaccgcatggtgcttgtgggagatgtgaaggatcgggtggccatccttgtggatgacatggctgacacttgtggcacaatctgccatgcagctgacaaacttctctcagctggcgccaccagagtttatgccatcttgactcatggaatcttctccggtcctgctatttctcgcatcaacaacgcatgctttgaggcagtagtagtcaccaataccatacctcaggaggacaagatgaagcattgctccaaaatacaggtgattgacatctctatgatccttgcagaagccatcaggagaactcacaatggagaatccgtttcttacctattcagccatgtccctttataatagagtaacttctgaggctttttgagaataaaatccaccccacccttgtttccccttggtatttgatgacaaattcagcagaagacccggcttgctccagtgtagctttctacatcccacatcaggtatattagagcttatccgaactggggaaagacggattgagattaactgctgggacctcctacctgcattatctcattctggcttccttgataattctgtgggccttgcagctttaactatagctcagctgctgcaagatttcagacttttgaggatgttgtgtgagggtgtttgactgtgactggggaagctcagactactttgtatgtgaatgcttcagggttttctttgttgagaacaactagcaacaaaggcaacccatgtgtgaccagttctccccaaggtctatgctaaattatagcaagagccctgggcaaccccaaacctagtcctggtagctgagcaccctgtaaggcaggagcaggcagctcagcttgagcagacattgggtggggggtggggggtggttgaggggggaggcagcacagtgcagcaaatgtttcttgggaggaagaagcctgatccatcaccatctgcttgactatgtagcttggattctcctttgtacctatccctttcgatttggctttaccttcatctatcttgatcctttcctggccaaatatcctcttgggcccaaatgaacattgtaccatagtcttctggaaagcaaacatgcttcctgctatgtaattgctaacattcatattagatgatgtgctgtagcttgatcttccttagcctactgccactgaggcagtaggttttaggtggtatcgtagtgccttttgattaatttaagtatttaattttcatcttccttctttggatctatttggcctctcaaatgaactgagattcctgttaaaaaagattgatgttattgtctcttgtagaggaaactaataaagtgtgtgtacctgtgtga

SEQ ID NO: 796 - DNA, 3616 bp, Homo sapiens
ctctgctctcctcccagtctcccccgcgctgcgtgcagtaaggtagccgccgccgccgccgccgccgcgtcccctcgccggctcgctggtaccggcagtgccatggcggccttcagcaagtacttgacggcgcgaaactcctcgctggctggtgccgcgttcctgctgctctgcctgctccacaagcggcgccgcgccctcggcctgcacggtaagaaaagtggaaaaccaccattacagaacaatgagaaagaggggaaaaaggagcgagctgtggtggacaaggtgtttttctcaaggctcatacagattctgaaaatcatggtccctagaacattttgtaaagagacaggttacttggtacttattgctgttatgctggtgtctcgaacatattgtgatgtttggatgattcaaaatgggacactaattgaaagtggtatcattggtcgtagcaggaaagatttcaagagatacttactcaacttcatcgctgccatgcctcttatctctctggttaataacttcttgaagtatgggttaaatgagcttaaactgtgcttccgagtaaggctcactaaatacctctatgaggagtatcttcaagctttcacatattataaaatggggaatctggacaacagaatagctaatccagaccagctgcttacacaagatgtagaaaaattttgtaacagtgtagtcgatctgtattcaaatcttagtaagccatttttagacatagttttgtatatctttaagttaacgagtgcaattggagctcagggcccagcgagcatgatggcctacttggttgtttctgggctattcctaactcgacttcgaagacccattggtaagatgacaataactgagcaaaagtatgaaggagaatatagatatgttaattctcggctcatcacaaacagtgaagaaattgccttttacaatgggaataaaagagaaaagcagacagtccactcagtcttccgaaaactggtggaacacctacataatttcattttgtttcggttttcaatgggcttcattgatagtattattgccaaataccttgccactgttgttggttacctagttgtcagtcgccctttcttagatttgtctcatcctcgacatctcaagagtacacattcggaacttctagaggattactaccaaagtggaagaatgcttttgcgaatgtctcaagctctgggtcgaatagttttggctgggcgtgaaatgactagattggccggttttactgctcggattacagaattaatgcaagtactgaaggatttaaatcatggcaaatatgagcgcacaatggtctcacaacaggaaaagggtattgaaggagtacaagtcattcccttgatacctggtgctggagaaatcattattgcagataacattataaagtttgatcatgttcctttagcaacgccaaatggagatgttttgatccgagaccttaattttgaagttcgatctggggctaatgttctaatttgtggtccaaatggctgcggaaagagttcacttttccgtgttcttggtgaattatggcctctttttggaggacgtctaactaaacctgaaagaggaaaattattttatgttcctcagagaccttacatgacccttggaacacttcgagatcaagtgatatatccagatggacgagaagatcagaaaaggaagggaatttctgacctagtactgaaggaatacttagacaatgtccagttgggtcatatccttgaacgtgaaggaggctgggacagtgttcaggattggatggacgtactcagtggtggagaaaagcaaagaatggcgatggcaagattattttatcataaaccccagtttgccattttggatgaatgcacaagtgcagttagtgtcgacgtggaaggctacatttatagtcattgtcgaaaggttggcatcactctcttcactgtgtctcataggaaatctctttggaaacatcatgagtactacctgcatatggatggcagaggcaactatgaattcaaacagataacagaagatacagttgagtttggctcttagagaaatctggagaactatacctgcttcagtgaaataattacagaatatacttagaaaggcaaagtacattgtaaaataaagttgagcttagttttttttaaaaaaaaaaacaaagcaacaaattaactagatacagaataatggagaacaagttgttaaaacatttaatattatataggatattgctaattgtgtatatgttggtttaattaataatatgtactaagaatgtccttattcttgtggttaaaaacctgcctaaattaaattgggcttcaatcactgtaacctgattcatcctgggatgtaaaccattcgaagtcagctaattggacttttatggctctatcttttccttcagtgaagaaccctatttaaaactgggtcatcatttgtcctgttctagcaagatagtcttcagtttcattttcctgtgccctgtggtagttggaaacaaatcataatgtattatttaaatgtttaacatcattgcataacagcgtttattatacagtggcagatttctttagctgccacagtaatactcattccttgtgtgtgtcttggagtgcatttgactccaggaaaagccattttggttttccttaactaaatgataaatgtacccctctcagtctgcagtattgagttgtttaaagtatatgtgcagtcttgcttacaaggaggggttaccatgtatcacacctaatcttcccaatgtttgggatattaaaacacaaagtccttaacatgccaggctcaaggtcttataagagttctagatttttaagagaattagacaaatttgtgtgtgttagaagcccattcattagaagtgtggtggttatttggtattaaactccaaatgagccataggaaggcactacatgaaataatgcactgagtatgcaatgctatcactgtctttgactgtgattttatgtttaaaaagtatgttctaaaattattatatatacatgggtgaattatgtttccgaggcactgttttatctctgtgaatcttgaataacttttttatatttgggttatgatgtcaaacgatcctaagcgaagatgatttcagttcatcaaatcatcattaatgactttatgtattatttgcacagggagaattgaaactgagtataatcaataagctagatacgaaatcagtttctcaaactgagcttcagaaaggggcattttgtactcttgtttttgcataactggttttgtttttttgcagaattaactataacaatcactggctaccgaagtaaactgatgtactgaattccataatacataacattcaatttttaccacttctgtttagcgaacttgtatacttattttctgttcagattaaaaaaaaaaaaaaaaaactcagatatcctatacaacctttgcttgttctttttattctggtatctaaatactgagaagttcatttataattcagccttgacttgaaaacatagatagtttaatcttgacttgaaaaacacaaaaataaattcagaaaatgctttta

SEQ ID NO: 797 - DNA, 6516 bp, Homo sapiens
gagagctgcctgctcagacaacagacacgcgaggtcaggaagaagccgcttataaattaccgcttccttcgcgccgccgccaacgccgagccccgaggaccgcaagcccagaggacaagctgcgccaagagggagtgcggagcgttcacccagcgggtcagagagcgagcgggcaggcagcccccggccggcggaacccggcacagccgagcagagcgcgggcggcgccgcagccaccccagatccagaaccagaaccacagcccttctgaggagctcccaaacaaagcaaggagatggccaccaaggagaagctgcagtgtctgaaagatttccacaaggacatcctgaagccctcaccagggaagagcccaggcacgcggcctgaggacgaggctgagggaaaacctccgcagagggagaagtggtctagcaagatcgactttgtgctctctgtggctggcggcttcgtgggcttgggcaacgtctggcgcttcccgtacctctgctacaagaatggtggaggtgcgtttctcataccgtattttattttcctgtttgggagcggcctgcctgtgtttttcttggagatcatcataggccagtacacctctgaagggggcatcacctgctgggaaaagatctgccccttgttctctggtatcggctatgcctccgttgtaattgtgtccctcctgaatgtctactacatcgtcatcctggcctgggccacatactacctgttccagtccttccagaaggagctgccctgggcacactgcaaccacagctggaacacacctcactgcatggaggacaccatgcgcaagaacaagagtgtctggatcaccatcagctccaccaacttcacctcccctgtcatcgagttctgggagcgcaacgtgctgagcttgtcccctggaatcgaccacccaggctctctgaaatgggacctcgctctctgccttcttttagtctggctagtgtgtttcttctgcatctggaagggcgtcaggtccactgggaaggtcgtctacttcacagccacttttccattcgccatgctcctggtgctgctggtccgagggctgacgctgccgggcgcgggcgcaggcatcaagttctatctgtatcctgacatcacccgccttgaggacccacaggtgtggattgacgctgggactcagatattcttctcttatgccatctgcctgggggctatgacctcgctggggagctacaacaagtacaagtataactcgtacagggactgtatgctgctgggatgcctgaacagtggtaccagttttgtgtctggcttcgcaattttttccatcctgggcttcatggcacaagagcaaggggtggacattgctgatgtggctgagtcaggtcctggcctggccttcattgcctacccaaaagctgtgacaatgatgccgctgcccacattttggtccattcttttttttattatgcttctcttgcttggactggatagccagtttgttgaagttgaaggacagatcacatccttggttgatctttacccatccttcctaaggaagggttatcgtcgggaaatcttcatcgccttcgtgtgtagcatcagctacctgctggggctgacgatggtgacggagggtggcatgtatgtgtttcagctctttgactactatgcagctagcggtgtatgccttttgtgggttgcattctttgaatgttttgttattgcctggatatatggaggtgataacctttatgatggtattgaggacatgattggctatcggcccgggccctggatgaagtacagctgggctgtgatcactccagttctctgtgttggatgtttcatcttctcgctcgtcaagtacgtacccctgacctacaacaaaacatacgtgtaccccaactgggccattgggctgggctggagcctggccctttcctccatgctctgcgttcccttggtcatcgtcatccgcctctgccagactgaggggccgttccttgtgagagtcaagtacctgctgaccccaagggaacccaaccgctgggctgtggagcgcgagggagccacaccttacaactctcgcaccgtcatgaacggcgctctcgtgaaaccgacccacatcattgtggagaccatgatgtgagctctctcgggtcgacggggccggcggctttcctgctgtttactaacattagattctcataggaccaggtttacagagctttatatttgcactaggatttttttttttttgtaattgtcacagaaaatgtaattgtgggtatgtgtgcgtgcgtgtgtgtgtgtgtgtgtatcgtgtgtgtgtgttttgttttgatttgggggatattttgtacaaaaagaaaacccacgggaagatgtccgtggagaggcagagctttcatactgaattagatgtattttatgggaatttggtaaatttttctttgtatttttttttttacatataagtatatatacacttagagattgtcatatacttttaccacttgaattgatcttcttgccagcaatagatctcattttcaaaagcaattcttcggtgctgtgtagctggcagaaagttctgtccagtaaacgcaggatggaattttcctgggactctacacccatcttaaggtggtataccttccaaatcctggttcagatggaagaaatagcaggagagaggacccattagctggcagacccagggggaagaaaggagggctgtgaggagatacctcattaaacttggcttagtgaagaagagagatgccaaaggaatgaaccaacccttcacataaaggagactggctgaagctgaatgaggaggccctatagcagaagtctgattctaagagcagtagaaacttgtaccagaagcaaaatcccacttttaattttgagatggtgagtggatagtcagtagaccgtcagaaccactggccagagagggagctgctagagatccaagaaggctggcaggagtgaggctcacaactcagcctcgcaagaggtggcagaggcacaggaggccacagtccttcctggggcattccaggcagagaaggagcagaggctctcccggcaggagctggggtctcagggctcagatgagtctgttgcatttgaatggggtcatagcaggttctggtcattccccaagcaacatctcagcatctcttaaagttgcctgcaggaatgaagcatgacatacctgttgagggactaggggagtggtggggaggtgagtggaccaaaggatataggccccaggcatgcagatgggcccggtgtcggggaggggtgctttctttcctcatctccccactccccactctcagcctgggagactcctgccaagccctcattaaagatgccaccctgggctgccctggcacctagcaaggcacaccaagaacagcttttgagtctgtatcctccactgggggaagtgctcccagttcagaacaagggcagcccgtggtgctgacctaggatataacaaagctcttcacttcaaaacccctgcaatagctgggtttacagacatttaccacctgcggacccaaaagagaaggcctaggagagttttctagaaggttgggattgtcagggtcctggcccctcagaactggcttgatcaagggccttatgtggagcagaggttgtctctgaaccaggagagaaggtactatacctttcaaatccccagggcagacacacccccacccagcccctatttggacctaaactgtgccatttgaacagtcacttccaagctcagtctaaatgaaaccgaaacgtgaccacgcacaaaggcagtcactgcctcgaggggtgcagaccgcagaattttcacagcaggggctcttggaaccctggaaacccccttcttaaatttgggaggaggagtatgcctttggtgtccccctcccaaggggcaattctgaaccccatctttggcaggcatacatatttcactgtttccaaagctatctactctgccaaacaacacccagtcctattccaaactctcaacgattctatcttgttcctgtttttctatgtatttatggttgccgtttgtgtctgatttgattttactgttttttccctgattttatggagtagcattgtgacctgttttcctttgtcttatataactttagtaaactaaccactgtcaatgattgagggcaggtggcacgtggggaagaggggacttggcacgcagtggctacctgggcatttgtggtcatttcagtttccatctccccagcgggggctccctgggtgaaaggccacagtattttgggttggtaggcaaattgcaacattctggacatggcctgaggaaggcctcttcttataagattctcagaccaaattctagaccaaagacacaggcagaccaagtccccaggccccgcctggaaggaagtcgttcctcaactctccccaaggcacctgtctccaatcagagccctctcgcccagccagccctggctctgtgtgcagagcatagctctgcgagtacctgtgtaataatgctcaaccttcatgtctccgtataaacgaaactttccatgagagctcatgactctggtccacctgtctatagagaatgggcaaagtccttcacctgctttctgcttgggatgggtcagaaatgctgatgcccgcacatagcccagccagccagatctggaaaggaagcgagggggttgtttaaatcaattttttaagatgaagaagtgggagacactgcgttgagatgggccatgctagggccacagagatttcctgacggtcagggagagaagggcctccagggtcccctaacccaacgcccttgttgtaaatgaggtaactgaggctcagggaggcactgtgagccaggaatggattttcttgaaacagctctagctgcaggttctccgaggtaggtgcagggaatggtgagtgtctaaccagggctacatccagcaacatcctcaaggtcttcctgacaaccaaagacaagcctttatggaaaaggaaatgcgctcccctccatgttcagggatgaggggagcagcagcagccacactcccaccatcctcacagaattcctggacccatgcggtggctccgtgagctgggtgactccagcctcacctgcacaccccagccctgcacggggccctccttcctcccagcagcccttggtgagctaggaattgagatccctgtttgtgaaagagggaactgaggtgcagagaagccagaggtgtgccagatccttaggcaggatttagatgaagtcgccctggctccagactgaccccgaggctctgcggggagtttccaggcagcaggaagtggccttggatgctctccttccaggacagcataacccctgggccatgtgcagctccttcactgccccctggatccccagcatacccccaaagacagtggggaaacacaaggggagagcacagcatggcccctccagcccacttcagggcactcttgtatcacccgggtaccgccacactggtcccccacccagccagcatctcccagcacagcccctctccctggggaaatgctctgggtagccagtctaaaggcagaggcacctaactgctccccgcagcccaccccacccaagattcagacacaagccaggaaaggacccaagagaaaatccttcaaggtggcctgaggtcccatccctccctcagacccatgtggtcccaggccaggctgcctgggacacggtaaataccactgtgtgcaaaaatcgaagtacaaaaccacaagactaaacaaaacaaacccagagagccaaacttgtagaggtgggcagtccagaaagcagggggcagccctccccctttccttctctccctgatcctcagaatatatattgttgtaataggaagcatttttgcattgttctcttgtgggtgtcactacagacatgttctggcgtgttctccgagggatggagcatcctgttatatatttgacttcaaattgagatgttggcttcattttttttttttacccaattaatctcccaatccctagcaactgtgactctgtatttagcacaagagaaagctgagaatgtgggtcttgcctccttccagaaatatgtctggctcatcaggacatttttttaaaacttcaaaatatttttaagatattttaaacttttataaaaaaaaaatcaaccaacaagagacttttctgaggaggaacatttgtatttgaacaagatccttggtgtgtagttcagtcttgcagtatacaagcttttgtgtataaatgttttatgatatgattccctgtattttgcaggggtttttttctcttttgctttttagataaatatgtatatcaatattttaaattcatctttgctttttttagaggagtttgtaatcaccttataacatgaaaataaacatttcctttttaacatccaaaaaaaaaaaaaaaaaa

SEQ ID NO: 798 - DNA, 1423 bp, Homo sapiens
gactatctcccagcggcaggcccttcgataaaatcaggaacttgtgctggccctgcaatgtcaagggagggggctcacccagggctcctgtagctcagggggcaggcctgagccctgcacccgccccacgaccgtccagcccctgacggggcaccccatcctgaggggctctgcattggcccccaccgaggcaggggatctgaccgactcggagcccggctggatgttacaggcgtgcaaaatggaagggtttcccctcgtcccccctccatcagaagacctggtgccctatgacacggatctataccaacgccaaacgcacgagtattacccctatctcagcagtgatggggagagccatagcgaccattactgggacttccacccccaccacgtgcacagcgagttcgagagcttcgccgagaacaacttcacggagctccagagcgtgcagcccccgcagctgcagcagctctaccgccacatggagctggagcagatgcacgtcctcgatacccccatggtgccaccccatcccagtcttggccaccaggtctcctacctgccccggatgtgcctccagtacccatccctgtccccagcccagcccagctcagatgaggaggagggcgagcggcagagccccccactggaggtgtctgacggcgaggcggatggcctggagcccgggcctgggctcctgcctggggagacaggcagcaagaagaagatccgcctgtaccagttcctgttggacctgctccgcagcggcgacatgaaggacagcatctggtgggtggacaaggacaagggcaccttccagttctcgtccaagcacaaggaggcgctggcgcaccgctggggcatccagaagggcaaccgcaagaagatgacctaccagaagatggcgcgcgcgctgcgcaactacggcaagacgggcgaggtcaagaaggtgaagaagaagctcacctaccagttcagcggcgaagtgctgggccgcgggggcctggccgagcggcgccacccgccccactgagcccgcagcccccgccgggccccgccaggcctccccgctggccatagcattaagccctcgcccggcccggacacagggaggacgctcccggggcccagaggcaggactgtggcgggccgggcctcgcctcacccgccccctccccccactccaggccccctccacatcccgcttcgcctccctccaggactccaccccggctcccggacgccagctgggcgtcagaccccaccggggcaaccttgcagaggacgacccggggtactgccttgggagtctcaagtccgtatgtaaatcagatctcccctctcacccctcccacccattaacctcctcccaaaaaacaagtaaagttattctcaatccatcaaaaaaaaaaaaaaaaaa

SEQ ID NO: 799 - DNA, 3993 bp, Homo sapiens
ccggaaacagcgggctggggcagccactgcttacactgaagagggaggacgggagaggagtgtgtgtgtgtgtgtgtgtgtgtgtgtgtatgtatgtgtgtgctttatcttatttttctttttggtggtggtggtggaaggggggaggtgctagcagggccagccttgaactcgctggacagagctacagacctatggggcctggaagtgcccgctgagaaagggagaagacagcagaggggttgccgaggcaacctccaagtcccagatcatgtctctgtggggtctggtctccaagatgcccccagaaaaagtgcagcggctctatgtcgactttccccaacacctgcggcatcttctgggtgactggctggagagccagccctgggagttcctggtcggctccgacgccttctgctgcaacttggctagtgccctactttcagacactgtccagcaccttcaggcctcggtgggagagcagggggaggggagcaccatcttgcaacacatcagcacccttgagagcatatatcagagggaccccctgaagctggtggccactttcagacaaatacttcaaggagagaaaaaagctgttatggaacagttccgccacttgccaatgcctttccactggaagcaggaagaactcaagtttaagacaggcttgcggaggctgcagcaccgagtaggggagatccaccttctccgagaagccctgcagaagggggctgaggctggccaagtgtctctgcacagcttgatagaaactcctgctaatgggactgggccaagtgaggccctggccatgctactgcaggagaccactggagagctagaggcagccaaagccctagtgctgaagaggatccagatttggaaacggcagcagcagctggcagggaatggcgcaccgtttgaggagagcctggccccactccaggagaggtgtgaaagcctggtggacatttattcccagctacagcaggaggtaggggcggctggtggggagcttgagcccaagacccgggcatcgctgactggccggctggatgaagtcctgagaaccctcgtcaccagttgcttcctggtggagaagcagcccccccaggtactgaagactcagaccaagttccaggctggagttcgattcctgttgggcttgaggttcctgggggccccagccaagcctccgctggtcagggccgacatggtgacagagaagcaggcgcgggagctgagtgtgcctcagggtcctggggctggagcagaaagcactggagaaatcatcaacaacactgtgcccttggagaacagcattcctgggaactgctgctctgccctgttcaagaacctgcttctcaagaagatcaagcggtgtgagcggaagggcactgagtctgtcacagaggagaagtgcgctgtgctcttctctgccagcttcacacttggccccggcaaactccccatccagctccaggccctgtctctgcccctggtggtcatcgtccatggcaaccaagacaacaatgccaaagccactatcctgtgggacaatgccttctctgagatggaccgcgtgccctttgtggtggctgagcgggtgccctgggagaagatgtgtgaaactctgaacctgaagttcatggctgaggtggggaccaaccgggggctgctcccagagcacttcctcttcctggcccagaagatcttcaatgacaacagcctcagtatggaggccttccagcaccgttctgtgtcctggtcgcagttcaacaaggagatcctgctgggccgtggcttcaccttttggcagtggtttgatggtgtcctggacctcaccaaacgctgtctccggagctactggtctgaccggctgatcattggcttcatcagcaaacagtacgttactagccttcttctcaatgagcccgacggaacctttctcctccgcttcagcgactcagagattgggggcatcaccattgcccatgtcatccggggccaggatggctctccacagatagagaacatccagccattctctgccaaagacctgtccattcgctcactgggggaccgaatccgggatcttgctcagctcaaaaatctctatcccaagaagcccaaggatgaggctttccggagccactacaagcctgaacagatgggtaaggatggcaggggttatgtcccagctaccatcaagatgaccgtggaaagggaccaaccacttcctaccccagagctccagatgcctaccatggtgccttcttatgaccttggaatggcccctgattcctccatgagcatgcagcttggcccagatatggtgccccaggtgtacccaccacactctcactccatccccccgtatcaaggcctctccccagaagaatcagtcaacgtgttgtcagccttccaggagcctcacctgcagatgccccccagcctgggccagatgagcctgccctttgaccagcctcacccccagggcctgctgccgtgccagcctcaggagcatgctgtgtccagccctgaccccctgctctgctcagatgtgaccatggtggaagacagctgcctgagccagccagtgacagcgtttcctcagggcacttggattggtgaagacatattccctcctctgctgcctcccactgaacaggacctcactaagcttctcctggaggggcaaggggagtcggggggagggtccttgggggcacagcccctcctgcagccctcccactatgggcaatctgggatctcaatgtcccacatggacctaagggccaaccccagttggtgatcccagctggagggagaacccaaagagacagctcttctactacccccacagacctgctctggacacttgctcatgccctgccaagcagcagatggggagggtgccctcctatccccacctactcctgggtcaggaggaaaagactaacaggagaatgcacagtgggtggagccaatccactccttcctttctatcattcccctgcccacctccttccagcactgactggaagggaagttcaggctctgagacacgccccaacatgcctgcacctgcagcgcgcacacgcacgcacacacacatacagagctctctgagggtgatggggctgagcaggaggggggctgggtaagagcacaggttagggcatggaaggcttctccgcccattctgacccagggcctaggacggataggcaggaacatacagacacatttacactagaggccagggatagaggatattgggtctcagccctaggggaatgggaagcagctcaagggaccctgggtgggagcataggaggggtctggacatgtggttactagtacaggttttgccctgattaaaaaatctcccaaagccccaaattcctgttagccaggtggaggcttctgatacgtgtatgagactatgcaaaagtacaagggctgagattcttcgtgtatagctgtgtgaacgtgtatgtacctaggatatgttaaatgtatagctggcaccttagttgcatgaccacatagaacatgtgtctatctgcttttgcctacgtgacaacacaaatttgggagggtgagacactgcacagaagacagcagcaagtgtgctggcctctctgacatatgctaacccccaaatactctgaatttggagtctgactgtgcccaagtgggtccaagtggctgtgacatctacgtatggctccacacctccaatgctgcctgggagccagggtgagagtctgggtccaggcctggccatgtggccctccagtgtatgagagggccctgcctgctgcatcttttctgttgccccatccaccgccagcttcccttcactcccctatcccattctccctctcaaggcaggggtcatagatcctaagccataaaataaattttattccaaaataacaaaataaataatctactgtacacaatctgaaaaaaaaaaaaaaaaaa

SEQ ID NO: 800 - DNA, 5000 bp, Homo sapiens
gcccgggactatcccttcgcggtgtagcggcagccggagacctggctgaggaggcaaccgcgtagacacctccctgcttagaaaacaaacactgaaccagaccgatcccagttggagggttcgaaaatgttccagacagcctgtcgggaggggttgttgttgctgttggactaaatagctattcctgattggtcatgtatagggttttttaaggcgggtggggggaggagggggtagaggaaaggctccaaacacctgcaggttgggggcggaaagctgtttgcgattccctggactggttggtcggggacaggaggtaattcccagccattgacccccatttctctctctccctccctcttgccctgcctctttctctccacccctatctttcctggaaactcgctttgggcgcggcagatcgcccaggaccacaccgcagcgtaactgcaggcctctcagcgaaaaagggggaaagcaaagacccgggtgtgcatcctcttcctcggcttccgcccctttccggcggagtggagatcctattcagaggggccggtctctctaaatatgccccaggatgaccgagcggccgccgagcgaggcggctcgcagtgacccccagctagagggacgggacgcggccgaggccagcatggcccccccgcacctggtcctgctgaacggcgtcgccaaggagacgagccgcgcggccgcagcggagcccccagtcatcgaactgggcgcgcgcggaggcccggggggcggccctgccggtgggggcggcgccgcgagagacttaaagggccgcgacgcggcgacggccgaagcgcgccatcgggtgcccaccaccgagctgtgcagacctcccgggcccgccccggcccccgcgcccgcctcggttacagcggagctgcccggcgacggccgcatggtgcagctgagtcctcccgcgctggctgcccccgccgcccccggccgcgcgctgctctacagcctcagccagccgctggcctctctcggcagcgggttctttggggagccggatgccttccctatgttcaccaccaacaatcgagtgaagaggagaccttccccctatgagatggagattactgatggtccccacaccaaagttgtgcggcgtatcttcaccaacagccgggagcgatggcggcagcagaatgtgaacggggcctttgccgagctccgcaagctgatccccacacatcccccggacaagaagctcagcaagaatgagatcctccgcctggccatgaagtatatcaacttcttggccaagctgctcaatgaccaggaggaggagggcacccagcgggccaagactggcaaggaccctgtggtgggggctggtgggggtggaggtgggggagggggcggcgcgcccccagatgacctcctgcaagacgtgctttcccccaactccagctgcggcagctccctggatggggcagccagcccggacagctacacggaggagcccgcgcccaagcacacggcccgcagcctccatcctgccatgctgcctgccgccgatggagccggccctcggtgatgggtctgggccaccaggatcagccaggagggcgttcttaggctgctgggatggtgggcttcagggcaggtggggtgagaattgggcggctctgaagcaaggcggtggacttgaactttcctggatgtctgaactttgggaagcctttactgaccctggggctggcttttctgtttcctgtaccagtaggagatcagaaaaatggagcaaagtggtaggtactttttgtgaagacggcacggtcttccctcttccctcagtcccaaatccttcccaagtaagaggctggagttgtcactgcttttggcctggagtttgggatccctgtctttcctaagacctggggttgtcagctctcatctgaggcatccagcagtctctgccttgcctttagcccctcccaagctggctggggtggcctgtgtggccacttctgtccatatttataggtacccaatagctgcccatttcgtgagccccatcttcacccaggcctatgttgatccatccagcttgccagatgctgcagagtcacaagcctcgaggtgccttcttcagggcctggttgaagaagatgatcagtggacagtctgctctagatgagctgggccggagggtcaggaaacccagtcgcccttacttcttgccctggggatcaaagttctgctttctccccaatgagacttgccttcctaagcctgtggctgtggagaccatgtctgcagccctgagaaagccctgtcgggctttgtgtgaaggcagagaaagggacaatgatagtagagtgatatggagcaagagatattttgggcatgtgggcttcaactcctcgacatcactgttcatgctggcgagtgaatgccagtgtgctgatgggcgtacgctggtgctgagtagatgcgcagccccatctgtgcattctcctggatgcttagagggatttctttgctgtaagatgtctgtttgctgatggtctggtctatgttccgaattgagcacaaaacctgtcctatgaatgctttgcatttggaatttttgcttgacttcagttattggtggaatctttagcgctcaataggaccaggatccagcctcacttctagggtatgggaaatccaatcagagaccaggccctggctagacccaaacatatgcacattcacttagcagaaccttaaacacccctcagttgtgcagcttttggtcatcaagggtgcgtctgggaggttggtttaatgcaatagaagtgctcccctctgaaagttgtacatgaaatttttgtaaatcacatccttatccttcatcttttaaagaaataaccactgcaagtccttttgtaaagtgaagaatccttttgtagaatgaaccactgccccttcattgatttcctgtgtcaatccagatggtgggatgtggttttcttaaggtgaggcctgtctgtgacctgcatctaagcccatgggacaaattgcacagaagtcctgtatgtctgtcattgtacccttaagtcaccctagccctctccctctaggctctgccttcgaggtcagaggagagatagcctgtggccctgtcctgccatgcaagaactcatcactgtggctgtctggaaagcccccccttatagtttgggcttcagcctagtggcttgtcctcaccatgatggggccctaattcagccatgtacagacagagaatatgtctgctcctttccccttccttttaagtaaggtccaattctcgagcttggggcaacattgttcacctttgtagcactcaggctctccattcaatttcaggctccccagatcatgttttggtgaaaattagggttggttcctttccaacgtttggaagatcctgtgaggagccccatctgtctaaagatagagtcattgctgtaggatctaaggctgtttgcttcaccgtggattcgcttgagttaggaatgagaagtagccacagtatggatgggtggatgggttttatgagatggatcacatattttattaagaactcaaacttctggctccctcttctttcagacttgccatgtgactctggcttggcctatctcctagggctatggtgtggactgaatgggatcatgaaagtagacagttttgagaacgtaaagaactttttcttttccctcaatctcaatcctgcagtggggtttcgcagcctgagtccacgacctaggcagtaggccggtgtgcctgactgcccagcatttgggtaatttagattgtaaaccgctttggcctgagttattgagattgtcctcatttctccagattatctatttgtgtgtgtgtgtgtgtgtgtgtgagagacggtgtcttgttctgtcactcaggctggagtacagtggtgccatcattgctgtctgcagccttgaactctgggctcaagcaatcctctcacctcagcctcccgagtagggaggaccacaggtgtgagccaccacacctggctaatttttacttttttttttttttggtagagatggagtcttgctatattgcccaggctggtcttgaagtcctggcttcaggcaattctcctgcctttgcctccagaagcactgggatcacaggtgtcagccattgcacccagcccagattgtcttaatttctatcttgttccaaggccagggacagtaataagaatggaaaagagatatgggaacactggcagactgtgtaaaatgtaatgcaactacccaaaacaagcctggtaggaaagggcaagtctttaggtctttgtaagaactaaagaagatctgtaatttttattttcaccctctgtaccccatgaccttatccttcctctccttccttgttacccatgaaaaactggcaacattccaagaatagcatctgtacaaaggggaaagaacataaaggtaaaacaaaacaaaacaacattttgagaacaaagatgaccataaccactgaagggaatcacatcttttaagacaaattcatattcttttatttgttatggcagatgacaagatggtacaacctttattcttttccaaaataaaacaaagggcacagcatctgtagtcagccgacaactctttcggccttttgggggtgggtctggccgtacttgtgatttcgatggtacgtgaccctctgctgaagacttgccccctgcccgtgtacatagtgcattgtttctgtgggcgggcccagcactttccgtcaacgttgtactgtatgtgatgaattgcgttggtctctgcatttttctgcagaagaggagtaaccgctccaggtaccttgacctttgtacagcccagaggccaacactgtgggtgtgtgactctttagcaaaaaaaacccatgtggtgatgatgtgtctatatatgtgaggatgtatcgggaagatttctaaataaaagttttacaaaggg

SEQ ID NO: 801 - DNA, 3417 bp, Homo sapiens
cggaggcagcgagaaagcgcagccaggcggctgctcggcgttctctcaggtgactgctcggagttctcccagtgtttggtgttgcaagcaggatccaaaggagacctatagtgactcccaggagctcttagtgaccaagtgaaggtacctgtggggctcattgtgcccattgctctttcactgctttcaactggtagttgtgggttgaagcactggacaatgccacatactttgtggatggtgtgggtcttgggggtcatcatcagcctctccaaggaagaatcctccaatcaggcttctctgtcttgtgaccgcaatggtatctgcaagggcagctcaggatctttaaactccattccctcagggctcacagaagctgtaaaaagccttgacctgtccaacaacaggatcacctacattagcaacagtgacctacagaggtgtgtgaacctccaggctctggtgctgacatccaatggaattaacacaatagaggaagattctttttcttccctgggcagtcttgaacatttagacttatcctataattacttatctaatttatcgtcttcctggttcaagcccctttcttctttaacattcttaaacttactgggaaatccttacaaaaccctaggggaaacatctcttttttctcatctcacaaaattgcaaatcctgagagtgggaaatatggacaccttcactaagattcaaagaaaagattttgctggacttaccttccttgaggaacttgagattgatgcttcagatctacagagctatgagccaaaaagtttgaagtcaattcagaatgtaagtcatctgatccttcatatgaagcagcatattttactgctggagatttttgtagatgttacaagttccgtggaatgtttggaactgcgagatactgatttggacactttccatttttcagaactatccactggtgaaacaaattcattgattaaaaagtttacatttagaaatgtgaaaatcaccgatgaaagtttgtttcaggttatgaaacttttgaatcagatttctggattgttagaattagagtttgatgactgtacccttaatggagttggtaattttagagcatctgataatgacagagttatagatccaggtaaagtggaaacgttaacaatccggaggctgcatattccaaggttttacttattttatgatctgagcactttatattcacttacagaaagagttaaaagaatcacagtagaaaacagtaaagtttttctggttccttgtttactttcacaacatttaaaatcattagaatacttggatctcagtgaaaatttgatggttgaagaatacttgaaaaattcagcctgtgaggatgcctggccctctctacaaactttaattttaaggcaaaatcatttggcatcattggaaaaaaccggagagactttgctcactctgaaaaacttgactaacattgatatcagtaagaatagttttcattctatgcctgaaacttgtcagtggccagaaaagatgaaatatttgaacttatccagcacacgaatacacagtgtaacaggctgcattcccaagacactggaaattttagatgttagcaacaacaatctcaatttattttctttgaatttgccgcaactcaaagaactttatatttccagaaataagttgatgactctaccagatgcctccctcttacccatgttactagtattgaaaatcagtaggaatgcaataactacgttttctaaggagcaacttgactcatttcacacactgaagactttggaagctggtggcaataacttcatttgctcctgtgaattcctctccttcactcaggagcagcaagcactggccaaagtcttgattgattggccagcaaattacctgtgtgactctccatcccatgtgcgtggccagcaggttcaggatgtccgcctctcggtgtcggaatgtcacaggacagcactggtgtctggcatgtgctgtgctctgttcctgctgatcctgctcacgggggtcctgtgccaccgtttccatggcctgtggtatatgaaaatgatgtgggcctggctccaggccaaaaggaagcccaggaaagctcccagcaggaacatctgctatgatgcatttgtttcttacagtgagcgggatgcctactgggtggagaaccttatggtccaggagctggagaacttcaatccccccttcaagttgtgtcttcataagcgggacttcattcctggcaagtggatcattgacaatatcattgactccattgaaaagagccacaaaactgtctttgtgctttctgaaaactttgtgaagagtgagtggtgcaagtatgaactggacttctcccatttccgtctttttgatgagaacaatgatgctgccattctcattcttctggagcccattgagaaaaaagccattccccagcgcttctgcaagctgcggaagataatgaacaccaagacctacctggagtggcccatggacgaggctcagcgggaaggattttgggtaaatctgagagctgcgataaagtcctaggttcccatatttaagaccagtctttgtctagttgggatctttatgtcactagttatagttaagttcattcagacataattatataaaaactacgtggatgtaccgtcatttgaggacttgcttactaaaactacaaaacttcaaattttgtctggggtgctgttttataaacatatgccagatttaaaaattggtttttggtttttcttttttctatgagataaccatgatcataagtctattactgatatctgaatatagtcccttggtatccaagggaattggttgcaggatcctcgtggatatcaaaattcatagatgatcaagtcccttataagagtggcatagtatttgcatataacctgtgtacattctcctgtatactttaaatcatctctagattacttatgatacccaatacaatgtaaatactatgtaaatagttgtactgtctttttatttatattattattgttattttttattttcaaaatttttaaaacatacttttgatccacagttggttgacttcatggatgcagaacccatggatatagagggccaactgtaatctgtagcaactggcttagttcattaggaaacagcacaaatgaacttaagattctcaatgactgtgtcattctttcttcctgctaagagactcctctgtggccacaaaaggcattctctgtcctacctagctgtcacttctctgtgcagctgatctcaagagcaacaaggcaaagtatttggggcactccccaaaacttgttgctattcctagaaaaaagtgctgtgtatttcctattaaactttacaggatgagaaaaaaaaaaaaaaaaa

SEQ ID NO: 802 - DNA, 2592 bp, Homo sapiens
agggcgaacgggcgagtggcagcgaggcggggcgggctgaggccagcgcggaagtctcgcgaggccgggcccgagcagagtgtggcggcggcggcgagatctgggctcgggttgaggagttggtatttgtgtggaaggaggcggaggcgcaggaggaagggggaagcggagcgccggcccggagggcgggaggaggcgcggccagggcgggcggttgcggcgaggcgaggcgaggcggggagccgagacgagcagcggccgagcgagcgcgggcgcgggcgcaccgaggcgagggaggcggggaagccccgccgccgccgcggcgcccgccccttcccccgccgcccgccccctctccccccgcccgctcgccgccttcctccctctgccttccttccccacggccggccgcctcctcgcccgcccgcccgcagccgaggagccgaggccgccgcggccgtggcggcggagccctcagccatggcctcgggcgacaccctctacatcgccacggacggctcggagatgccggccgagatcgtggagctgcacgagatcgaggtggagaccatcccggtggagaccatcgagaccacagtggtgggcgaggaggaggaggaggacgacgacgacgaggacggcggcggtggcgaccacggcggcgggggcggccacgggcacgccggccaccaccaccaccaccatcaccaccaccaccacccgcccatgatcgctctgcagccgctggtcaccgacgacccgacccaggtgcaccaccaccaggaggtgatcctggtgcagacgcgcgaggaggtggtgggcggcgacgactcggacgggctgcgcgccgaggacggcttcgaggatcagattctcatcccggtgcccgcgccggccggcggcgacgacgactacattgaacaaacgctggtcaccgtggcggcggccggcaagagcggcggcggcggctcgtcgtcgtcgggaggcggccgcgtcaagaagggcggcggcaagaagagcggcaagaagagttacctcagcggcggggccggcgcggcgggcggcggcggcgccgacccgggcaacaagaagtgggagcagaagcaggtgcagatcaagaccctggagggcgagttctcggtcaccatgtggtcctcagatgaaaaaaaagatattgaccatgagacagtggttgaagaacagatcattggagagaactcacctcctgattattcagaatatatgacaggaaagaaacttcctcctggaggaatacctggcattgacctctcagatcccaaacaactggcagaatttgctagaatgaagccaagaaaaattaaagaagatgatgctccaagaacaatagcttgccctcataaaggctgcacaaagatgttcagggataactcggccatgagaaaacatctgcacacccacggtcccagagtccacgtctgtgcagaatgtggcaaagcttttgttgagagttcaaaactaaaacgacaccaactggttcatactggagagaagccctttcagtgcacgttcgaaggctgtgggaaacgcttttcactggacttcaatttgcgcacacatgtgcgaatccataccggagacaggccctatgtgtgccccttcgatggttgtaataagaagtttgctcagtcaactaacctgaaatctcacatcttaacacatgctaaggccaaaaacaaccagtgaaaagaagagagaagacccttctcgaccacgggaagcatcttccagaagtgtgattgggaataaatatgcctctcctttgtatattatttctaggaagaattttaaaaatgaatcctacacacctaagggacatgttttgataaagtagtaaaaattaaaaaaaaaaaactttactaagatgacattgctaagatgctctatcttgctctgtaatctcgtttcaaaaacacagtgtttttgtaaagtgtggtcccaacaggaggacaattcatgaacttcgcatcaaaagacaattctttatacaacagtgctaaaaatgggacttcttttcacattcttataaatatgaagctcacctgttgcttacaatttttttaattttgtattttccaagtgtgcatattgtacacttttttggggatatgcttagtaatgctacgtgtgatttttctggaggttgataactttgcttgcagtagattttctttaaaagaatgggcagttacatgcatacttcaaaagtattttcctgtaaaaaaaaaaaagttatataggttttgtttgctatcttaattttggttgtattctttgatgttaacacattttgtataattgtatcgtatagctgtattgaatcatgtagtatcaaatattagatgtgatttaatagtgttaatcaatttaaacccattttagtcactttttttttccaaaaaaatactgccagatgctgatgttcagtgtaatttctttgcctgttcagttacagaaagtggtgctcagttgtagaatgtattgtaccttttaacacctgatgtgtacatcccatgtaacagaaagggcaacaataaaatagcaatcctaaag

SEQ ID NO: 803 - DNA, 2834 bp, Homo sapiens
gcccactcccaccgccagctggaaccctggggactacgacgtccctcaaaccttgcttctaggagataaaaagaacatccagtcatggataaaaatgagctggttcagaaggccaaactggccgagcaggctgagcgatatgatgacatggcagcctgcatgaagtctgtaactgagcaaggagctgaattatccaatgaggagaggaatcttctctcagttgcttataaaaatgttgtaggagcccgtaggtcatcttggagggtcgtctcaagtattgaacaaaagacggaaggtgctgagaaaaaacagcagatggctcgagaatacagagagaaaattgagacggagctaagagatatctgcaatgatgtactgtctcttttggaaaagttcttgatccccaatgcttcacaagcagagagcaaagtcttctatttgaaaatgaaaggagattactaccgttacttggctgaggttgccgctggtgatgacaagaaagggattgtcgatcagtcacaacaagcataccaagaagcttttgaaatcagcaaaaaggaaatgcaaccaacacatcctatcagactgggtctggcccttaacttctctgtgttctattatgagattctgaactccccagagaaagcctgctctcttgcaaagacagcttttgatgaagccattgctgaacttgatacattaagtgaagagtcatacaaagacagcacgctaataatgcaattactgagagacaacttgacattgtggacatcggatacccaaggagacgaagctgaagcaggagaaggaggggaaaattaaccggccttccaacttttgtctgcctcattctaaaatttacacagtagaccatttgtcatccatgctgtcccacaaatagttttttgtttacgatttatgacaggtttatgttacttctatttgaatttctatatttcccatgtggtttttatgtttaatattaggggagtagagccagttaacatttagggagttatctgttttcatcttgaggtggccaatatggggatgtggaatttttatacaagttataagtgtttggcatagtacttttggtacattgtggcttcaaaagggccagtgtaaaactgcttccatgtctaagcaaagaaaactgcctacatactggtttgtcctggcggggaataaaagggatcattggttccagtcacaggtgtagtaattgtgggtactttaaggtttggagcacttacaaggctgtggtagaatcataccccatggataccacatattaaaccatgtatatctgtggaatactcaatgtgtacacctttgactacagctgcagaagtgttcctttagacaaagttgtgacccattttactctggataagggcagaaacggttcacattccattatttgtaaagttacctgctgttagctttcattatttttgctacactcattttatttgtatttaaatgttttaggcaacctaagaacaaatgtaaaagtaaagatgcaggaaaaatgaattgcttggtattcattacttcatgtatatcaagcacagcagtaaaacaaaaacccatgtatttaacttttttttaggatttttgcttttgtgattttttttttttttttttgatacttgcctaacatgcatgtgctgtaaaaatagttaacagggaaataacttgagatgatggctagctttgtttaatgtcttatgaaattttcatgaacaatccaagcataattgttaagaacacgtgtattaaattcatgtaagtggaataaaagttttatgaatggacttttcaactactttctctacagcttttcatgtaaattagtcttggttctgaaacttctctaaaggaaattgtacattttttgaaatttattccttattccctcttggcagctaatgggctcttaccaagtttaaacacaaaatttatcataacaaaaatactactaatataactactgtttccatgtcccatgatcccctctcttcctccccaccctgaaaaaaatgagttcctattttttctgggagagggggggattgattagaaaaaaatgtagtgtgttccatttaaaattttggcatatggcattttctaacttaggaagccacaatgttcttggcccatcatgacattgggtagcattaactgtaagttttgtgcttccaaatcactttttggtttttaagaatttcttgatactcttatagcctgccttcaattttgatcctttattctttctatttgtcaggtgcacaagattaccttcctgttttagccttctgtcttgtcaccaaccattcttacttggtggccatgtacttggaaaaaggccgcatgatctttctggctccactcagtgtctaaggcaccctgcttcctttgcttgcatcccacagactatttccctcatcctatttactgcagcaaatctctccttagttgatgagactgtgtttatctccctttaaaaccctacctatcctgaatggtctgtcattgtctgcctttaaaatccttcctctttcttcctcctctattctctaaataatgatggggctaagttatacccaaagctcactttacaaaatatttcctcagtactttgcagaaaacaccaaacaaaaatgccattttaaaaaaggtgtattttttcttttagaatgtaagctcctcaagagcagggacaatgttttctgtatgttctattgtgcctagtacactgtaaatgctcaataaatattgatgatgggaggcagtgagtcttgatgataagggtgagaaactgaaatccc

SEQ ID NO: 804 - DNA, 2325 bp, Homo sapiens
cccgccccctctcttctccctccctcctccttccgtgtgtccctccccgcccggctggaggctgctccggaccgggacgcagagtctgcggacccggcgccgaggcggccacccgagacgcggcgcgcacgctccggcctgcgcagcccggcccggccatggcggccccccgcccgtctcccgcgatctccgtttcggtctcggctccggctttttacgccccgcagaagaagttcggccctgtggtggccccaaagcccaaagtgaatcccttccggcccggggacagcgagcctcccccggcacccggggcccagcgcgcacagatgggccgggtgggcgagattcccccgccgcccccggaagactttcccctgcctccacctccccttgctggggatggcgacgatgcagagggtgctctgggaggtgccttcccgccgccccctcccccgatcgaggaatcatttccccctgcgcctctggaggaggagatcttcccttccccgccgcctcctccggaggaggagggagggcctgaggcccccataccgcccccaccacagcccagggagaaggtgagcagtattgatttggagatcgactctctgtcctcactgctggatgacatgaccaagaatgatcctttcaaagcccgggtgtcatctggatatgtgcccccaccagtggccactccattcagttccaagtccagtaccaagcctgcagccgggggcacagcacccctgcctccttggaagtccccttccagctcccagcctctgccccaggttccggctccggctcagagccagacacagttccatgttcagccccagccccagcccaagcctcaggtccaactccatgtccagtcccagacccagcctgtgtctttggctaacacccagccccgagggcccccagcctcatctccggctccagcccctaagttttctccagtgactcctaagtttactcctgtggcttccaagttcagtcctggagccccaggtggatctgggtcacaaccaaatcaaaaattggggcaccccgaagctctttctgctggcacaggctcccctcaacctcccagcttcacctatgcccagcagagggagaagccccgagtgcaggagaagcagcaccccgtgcccccaccggctcagaaccaaaaccaggtgcgctcccctggggccccagggcccctgactctgaaggaggtggaggagctggagcagctgacccagcagctaatgcaggacatggagcatcctcagaggcagaatgtggctgtcaacgaactctgcggccgatgccatcaacccctggcccgggcgcagccagccgtccgcgctctagggcagctgttccacatcgcctgcttcacctgccaccagtgtgcgcagcagctccagggccagcagttctacagtctggagggggcgccgtactgcgagggctgttacactgacaccctggagaagtgtaacacctgcggggagcccatcactgaccgcatgctgagggccacgggcaaggcctatcacccgcactgcttcacctgtgtggtctgcgcccgccccctggagggcacctccttcatcgtggaccaggccaaccggccccactgtgtccccgactaccacaagcagtacgccccgaggtgctccgtctgctctgagcccatcatgcctgagcctggccgagatgagactgtgcgagtggtcgccctggacaagaacttccacatgaagtgttacaagtgtgaggactgcgggaagcccctgtcgattgaggcagatgacaatggctgcttccccctggacggtcacgtgctctgtcggaagtgccacactgctagagcccagacctgagtgaggacaggccctcttcagaccgcagtccatgccccattgtggaccacccacactgagaccacctgcccccacctcagttattgttttgatgtctagcccctcccatttccaacccctccctagcatcccaggtgccctgacccaggacccaacatggtctagggatgcaggatccccgccctggggtctggtcctcgcccatcctgcagggattgcccaccgtcttccagacaccccacctgaggggggcaccaggtttagtgctgctgctttcactgctgcacccgcgccctcggccggccccccgagcagcctttgtactctgcttgcggagggctgggagaccctccaggacattcccaccctcccccatgctgccaagttgtagctatagctacaaataaaaaaaaaccttgttttccagaaaaaaaaaaaaaaaaaaaaa

SEQ ID NO: 805 - DNA, 3053 bp, Homo sapiens
ggggaggaggccgcgcggggtggggtctggcggtacgcgctggctgcgtcgacgtgctgacgccatgacgccccggctggtgtgtgtcggtgtgtatgtgtgtgtgtgagtgtgcgcgctccgagtgtgtgtgtatttgtgtatcggcggtcccgcaggtcccggatgttgcggacagtatgaggcaagcgcagggggacggggaccagcagctgtcgccgccgctctcagatcgagtcttgctctgtcacccaggctggagtgcagtggcgcgatctcagctcactgccacctttgcctcctgggttcaagcgattcttctgcctcagcctcccgagtagctgggattacagggtgaagagggaacagaaatctttgccccctgactttggaaatctcgtttaaccttcaaactggcgatgtcaagggttccaagtcctccacctccggcagaaatgtcgagtggccccgtagctgagagttggtgctacacacagatcaaggtagtgaaattctcctacatgtggaccatcaataactttagcttttgccgggaggaaatgggtgaagtcattaaaagttctacattttcatcaggagcaaatgataaactgaaatggtgtttgcgagtaaaccccaaagggttagatgaagaaagcaaagattacctgtcactttacctgttactggtcagctgtccaaagagtgaagttcgggcaaaattcaaattctccatcctgaatgccaagggagaagaaaccaaagctatggagagtcaacgggcatataggtttgtgcaaggcaaagactggggattcaagaaattcatccgtagagattttcttttggatgaggccaacgggcttctccctgatgacaagcttaccctcttctgcgaggtgagtgttgtgcaagattctgtcaacatttctggccagaataccatgaacatggtaaaggttcctgagtgccggctggcagatgagttaggaggactgtgggagaattcccggttcacagactgctgcttgtgtgttgccggccaggaattccaggctcacaaggctatcttagcagctcgttctccggtttttagtgccatgtttgaacatgaaatggaggagagcaaaaagaatcgagttgaaatcaatgatgtggagcctgaagtttttaaggaaatgatgtgcttcatttacacggggaaggctccaaacctcgacaaaatggctgatgatttgctggcagctgctgacaagtatgccctggagcgcttaaaggtcatgtgtgaggatgccctctgcagtaacctgtccgtggagaacgctgcagaaattctcatcctggccgacctccacagtgcagatcagttgaaaactcaggcagtggatttcatcaactatcatgcttcggatgtcttggagacctctgggtggaagtcaatggtggtgtcacatccccacttggtggctgaggcataccgctctctggcttcagcacagtgcccttttctgggacccccacgcaaacgcctgaagcaatcctaagatcctgcttgttgtaagactccgtttaatttccagaagcagcagccactgttgctgccactgaccaccaggtagacagcgcaatctgtggagcttttactctgttgtgaggggaagagactgcattgtggccccagacttttaaaacagcactaaataacttgggggaaacggggggagggaaaatgaaatgaaaaccctgttgctgcgtcactgtgttccctttggcctggctgagtttgatactgtggggattcagtttaggcgctggcccgaggatatcccagcggtggtacttcggagacacctgtctgcatctgactgagcagaacaaatcgtcaggtgcctggagcaaaaaggaaaaaaaaaaaagaaaggacattgagttttaacagaagggaaaaggaaagaagaaaagatttttgcagaatttctcaaaaatcagtttgtggattccagtagtatttatattgagagaaacaaattttagtccttctaactgtgctaaaacttggatatttgtgaaaactccttaccaccatacaagcatcagaagagctctcttgttgttagcacttattgtttgcaagaacagaatacatccttttatccttttatgaaaaatgacaagtgaaggcaaaaggggaaggttatttgatctggaagatgagtgttctgatgtggtggcttttgcaaaaatctttattggtgttgaaaactggaaaaaataactcatccagaattcatattgtcttgacaagaactatggttctctgtttttagatattgtggaaaatgtttttgggcatttttctctgattttatttcttctcccccacccctttttctaaaaaacaaacaaaaaaaaaaacacacaaaacaaaaacagaacaaaagaagagagaaggaaattttatcaattaaaaatgctgtgtgataaaatcccagcccagattgctcagctgtttgtacctgacttgccgcctgcataggagccagttctgttccttctgactagcccctcttcctccaggggagaacttccaaatgttaatttttttttttttgaaaatataaataattactattttgtactgtgtggtatctctggtcttttgtttcactcacctgccttgtctcttgggtctgagtcccttgcttaagggattttgaagtcctagttttcagcttgcagagattatgtctgaaatgcctaatgagtcgcagggatttgttgagactccgtaatctcaagttctctttgtgagctatcagcatctgccagtctcttgtcctccctgagtatctcacagtccatatcctgatgagggatcaggcccctacctctgccaaggcaagtaatggtagtgggcttttaaactgccccccgtatgttttaagacctaatccccacctcccttcttctaactaaatataaaaagatccaggggacataaatgtggagattaaataaagggaaattattgtctctaaaaaaaaaaaaaaaaa

SEQ ID NO: 806 - DNA, 3659 bp, Homo sapiens
ggcggcgggcaggcagcggcccggccagctatgcggggtcctgcggccgcggctggcggcacttcctggagcggcggcggcagcggcttcccgggcacctgggcgtggggagcgggggcgcgcggcgcggggcgggcggagcgagcgcgcgccatggaggtggcgggcggcgcggagcgggcgtgctgagccccggccgccggcccggcatgggcgtctcccgcgggccctccgccggccggggctagggccggatggagccgcgggacggtagccccgaggcccggagcagcgactccgagtcggcttccgcctcgtccagcggctccgagcgcgacgccggtcccgagccggacaaggcgccgcggcgactcaacaagcggcgcttcccggggctgcggctcttcgggcacaggaaagccatcaccaagtcgggcctccagcacctggccccccctccgcccacccctggggccccgtgcagcgagtcagagcggcagatccggagtacagtggactggagcgagtcagcgacatatggggagcacatctggttcgagaccaacgtgtccggggacttctgctacgttggggagcagtactgtgtagccaggatgctgcagaagtcagtgtctcgaagaaagtgcgcagcctgcaagattgtggtgcacacgccctgcatcgagcagctggagaagataaatttccgctgtaagccgtccttccgtgaatcaggctccaggaatgtccgcgagccaacctttgtacggcaccactgggtacacagacgacgccaggacggcaagtgtcggcactgtgggaagggattccagcagaagttcaccttccacagcaaggagattgtggccatcagctgctcgtggtgcaagcaggcataccacagcaaggtgtcctgcttcatgctgcagcagatcgaggagccgtgctcgctgggggtccacgcagccgtggtcatcccgcccacctggatcctccgcgcccggaggccccagaatactctgaaagcaagcaagaagaagaagagggcatccttcaagaggaagtccagcaagaaagggcctgaggagggccgctggagacccttcatcatcaggcccaccccctccccgctcatgaagcccctgctggtgtttgtgaaccccaagagtgggggcaaccagggtgcaaagatcatccagtctttcctctggtatctcaatccccgacaagtcttcgacctgagccagggagggcccaaggaggcgctggagatgtaccgcaaagtgcacaacctgcggatcctggcgtgcgggggcgacggcacggtgggctggatcctctccaccctggaccagctacgcctgaagccgccaccccctgttgccatcctgcccctgggtactggcaacgacttggcccgaaccctcaactggggtgggggctacacagatgagcctgtgtccaagatcctctcccacgtggaggaggggaacgtggtacagctggaccgctgggacctccacgctgagcccaaccccgaggcagggcctgaggaccgagatgaaggcgccaccgaccggttgcccctggatgtcttcaacaactacttcagcctgggctttgacgcccacgtcaccctggagttccacgagtctcgagaggccaacccagagaaattcaacagccgctttcggaataagatgttctacgccgggacagctttctctgacttcctgatgggcagctccaaggacctggccaagcacatccgagtggtgtgtgatggaatggacttgactcccaagatccaggacctgaaaccccagtgtgttgttttcctgaacatccccaggtactgtgcgggcaccatgccctggggccaccctggggagcaccacgactttgagccccagcggcatgacgacggctacctcgaggtcattggcttcaccatgacgtcgttggccgcgctgcaggtgggcggacacggcgagcggctgacgcagtgtcgcgaggtggtgctcaccacatccaaggccatcccggtgcaggtggatggcgagccctgcaagcttgcagcctcacgcatccgcatcgccctgcgcaaccaggccaccatggtgcagaaggccaagcggcggagcgccgcccccctgcacagcgaccagcagccggtgccagagcagttgcgcatccaggtgagtcgcgtcagcatgcacgactatgaggccctgcactacgacaaggagcagctcaaggaggcctctgtgccgctgggcactgtggtggtcccaggagacagtgacctagagctctgccgtgcccacattgagagactccagcaggagcccgatggtgctggagccaagtccccgacatgccagaaactgtcccccaagtggtgcttcctggacgccaccactgccagccgcttctacaggatcgaccgagcccaggagcacctcaactatgtgactgagatcgcacaggatgagatttatatcctggaccctgagctgctgggggcatcggcccggcctgacctcccaacccccacttcccctctccccacctcaccctgctcacccacgccccggtcactgcaaggggatgctgcaccccctcaaggtgaagagctgattgaggctgccaagaggaacgacttctgtaagctccaggagctgcaccgagctgggggcgacctcatgcaccgagacgagcagagtcgcacgctcctgcaccacgcagtcagcactggcagcaaggatgtggtccgctacctgctggaccacgcccccccagagatccttgatgcggtggaggaaaacggggagacctgtttgcaccaagcagcggccctgggccagcgcaccatctgccactacatcgtggaggccggggcctcgctcatgaagacagaccagcagggcgacactccccggcagcgggctgagaaggctcaggacaccgagctggccgcctacctggagaaccggcagcactaccagatgatccagcgggaggaccaggagacggctgtgtagcgggccgcccacgggcagcaggagggacaatgcggccaggggacgagcgccttccttgcccacctcactgccacattccagtgggacggccacggggggacctaggccccagggaaagagccccatgccgccccctaaggagccgcccagacctagggctggactcaggagctgggggggcctcacctgttcccctgaggaccccgccggacccggaggctcacagggaacaagacacggctgggttggatatgcctttgccggggttctggggcagggcgctccctggccgcagcagatgccctcccaggagtggaggggctggagagggggaggccttcgggaagaggcttcctgggccccctggtcttcggccgggtccccagcccccgctcctgccccaccccacctcctccgggcttcctcccggaaactcagcgcctgctgcacttgcctgccctgccttgcttggcacccgctccggcgaccctccccgctcccctgtcatttcatcgcggactgtgcggcctgggggtggggggcgggactctcacggtgacatgtttacagctgggtgtgactcagtaaagtggatttttttttctttaaaaaaaa

SEQ ID NO: 807 - DNA, 2655 bp, Homo sapiens
agccggggcgggcgcgggcagcggcgggccggccgggctgtgcggggcgagcggcggcggcggcgggggcgcttcggccggggcggcagctgggcgccggcgggagctagcagcgtctgcagccgcgccggccgccagcgccccggcgcgctccggctcggccatggagctgccagctgttggcgagcacgtcttcgcggtggagagcatcgagaagaagcggatccgcaagggcagagtggagtatctggtgaaatggagaggctggtcgcccaaatataacacgtgggaaccggaggagaacatcctggaccccaggctgctgatcgccttccagaacagggaacggcaggagcagctgatgggatatcggaagagagggccgaagcccaaaccgctagtggtgcaggtgcctacctttgcccgtcgttccaatgtcctgaccggcctccaggactcctccactgacaaccgtgccaagctggatttgggcgcgcaggggaagggccaggggcatcagtacgagctcaacagcaagaagcaccaccagtaccagccgcacagcaaggagcgggcgggcaagcccccgccgccgggcaagagcggcaagtactactaccagctcaacagcaagaagcaccacccctaccagcccgaccccaaaatgtacgacctgcagtaccagggcggccacaaggaggcgcccagccccacctgcccggacctgggggccaagagccacccgcccgacaagtgggcgcaaggtgcgggggccaaaggctacctgggggcggtgaagcccctggccggtgcggcgggtgctccaggcaaaggctccgagaagggcccccccaacggaatgatgccggcccccaaagaggctgtgacgggcaacgggattgggggcaagatgaagatagtcaagaacaagaacaagaacggacgcatcgtgatcgtgatgagcaaatacatggagaacggcatgcaggcggtgaagatcaagtccggcgaggtggcagagggggaggctcgctcccccagccacaagaagcgggcagccgacgagcgccaccctcctgccgacaggacttttaaaaaggcggcgggcgcagaggagaagaaggtggaggcgccgcccaagaggagggaggaggaggtgtccggggttagcgatccgcagccccaggatgccggctcccgcaagctgtccccgaccaaggaggcctttggagagcagcccctgcagctcaccaccaagcccgacctgcttgcctgggacccggcccggaacacgcacccgccctcacaccacccgcacccgcacccccatcaccaccaccaccaccaccaccaccaccaccacgccgtcggcctgaatctctcccacgtgcgcaagcgctgcctctccgagacccacggcgagcgcgagccctgcaagaagcggctgactgcgcgcagcatcagcacccccacctgcctggggggcagcccagccgctgagcgcccggccgacctgccaccagccgccgccctcccgcagcccgaggtcatcctgctagactcagacctggatgaacccatagacttgcgctgcgtcaagacgcgcagcgaggccggggagccgcccagctccctccaggtgaagcccgagacaccggcgtcggcggcggtggcggtggcggcggcagcggcacccaccacgacggcggagaagcctccagccgaggcccaggacgaacctgcagagtcgctgagcgagttcaagcccttctttgggaatataattatcaccgacgtcaccgcgaactgcctcaccgttactttcaaggagtacgtgacggtgtagccggagggcgtcggaaggggaagcgccattcccgcgggggggcggggagctgagcacctggggcctcggggcgggctcccctctcgccaacccgccaaccgcgagagacccaggctggcccccagggtgaggacgcccggagcggaggtaaccatgttccccctgcggcggctgtcagacctgggcggaggccccttccacgcggtgccggcggggctcgccctctcctgcccttccccgctggagatggacccccggaacggacagggcagctctgcgcccggcctcagagttctagtattatattttaaccgtgctaacttgtcaagtgctgactctactcccgtttgtacgtggtgttattattgaaatgtattgtttgagctcaaaaggcccgaccaccccccttcgggctgctatatatatatttatttgtaggtatttatatattgaaatataaaaacctagatttatggagtttcctctagatcatgttatattctatatcagacaaactattttcttttgacctttcttcccctccatccagtatttcggttgatttcattttctcccctctcttccccttccacgaactgcaataccagtaaccttggtatatattttttgatactgtacacatggatgtcttgtttctatgtgcaaaaaaaaaaaaaaaaaaaagtttgttaaaaggctacacgagctctctagaaactgctgctactagaaatgtctaaactataagcttccaactattacctgcttgaatgtaaatattaaatggagatgttgaaggtgcaaaaaaa

SEQ ID NO: 808 - DNA, 1404 bp, Homo sapiens
ggcagtgcagctgtgggaacctctccacgcgcacgaactcagccaacgatttctgatagatttttgggagtttgaccagagatgcaaggggtgaaggagcgcttcctaccgttagggaactctggggacagagcgccccggccgcctgatggccgaggcagggtgcgacccaggacccaggacggcgtcgggaaccataccatggcccggatccccaagaccctaaagttcgtcgtcgtcatcgtcgcggtcctgctgccagtcctagcttactctgccaccactgcccggcaggaggaagttccccagcagacagtggccccacagcaacagaggcacagcttcaagggggaggagtgtccagcaggatctcatagatcagaacatactggagcctgtaacccgtgcacagagggtgtggattacaccaacgcttccaacaatgaaccttcttgcttcccatgtacagtttgtaaatcagatcaaaaacataaaagttcctgcaccatgaccagagacacagtgtgtcagtgtaaagaaggcaccttccggaatgaaaactccccagagatgtgccggaagtgtagcaggtgccctagtggggaagtccaagtcagtaattgtacgtcctgggatgatatccagtgtgttgaagaatttggtgccaatgccactgtggaaaccccagctgctgaagagacaatgaacaccagcccggggactcctgccccagctgctgaagagacaatgaacaccagcccagggactcctgccccagctgctgaagagacaatgaccaccagcccggggactcctgccccagctgctgaagagacaatgaccaccagcccggggactcctgccccagctgctgaagagacaatgaccaccagcccggggactcctgcctcttctcattacctctcatgcaccatcgtagggatcatagttctaattgtgcttctgattgtgtttgtttgaaagacttcactgtggaagaaattccttccttacctgaaaggttcaggtaggcgctggctgagggcggggggcgctggacactctctgccctgcctccctctgctgtgttcccacagacagaaacgcctgcccctgccccaagtcctggtgtctccagcctggctctatcttcctccttgtgatcgtcccatccccacatcccgtgcaccccccaggaccctggtctcatcagtccctctcctggagctgggggtccacacatctcccagccaagtccaagagggcagggccagttcctcccatcttcaggcccagccaggcagggggcagtcggctcctcaactgggtgacaagggtgaggatgagaagtggtcacgggatttattcagccttggtcagagcagaaaaaaaaaaaaaaaaaaa

SEQ ID NO: 809 - DNA, 1209 bp, Homo sapiens
cgaagcgaggagcagcgatggacggtcgggtgcagctgataaaggccctcctggccttgccgatccggcctgcgacgcgtcgctggaggaacccgattccctttcccgagacgtttgacggcgataccgaccgactcccggagttcatcgtgcagacgggctcctacatgttcgtggacgagaacacgttctccagcgacgccctgaaggtgacgttcctcatcacccgcctcacagggcccgccctgcagtgggtgatcccctacatcaagaaggagagccccctcctcaatgattaccggggctttctggccgagatgaagcgagtctttggatgggaggaggacgaggacttctaggccgggagaccctcgggcctgggggcgggtgctctggggagggtccgctgtgttactggccgccgccagggtcgccaccggcgccctccctccgcgcctccctccccctcgagccgccgcgatgtcccctgcgctcctgttccctcccgcgtagtgcttgcctttgttccaggaatagcgctccaggctcctgctgccgcccctgggcctcactctggagcgagccgccgccctctccttccagccagccagcccctcccatgtacatttggacgctgtcctgcgctccagctgcaagctgggctcctgttacacactggacagaccacccactgccgccgctgccaagccctctcctccccaccagactgccagacgactacatcattctgcccacagacctgcgctgccacagccatcgccatccatcgcatcccaccgacagactgctgctcctagtgatctggactcacctcggaggtatctgggctggccacagtccctggacagtgatccagacagctggccgccccccaagggatctgtcaccttcagcgagacctatttcctccccacccccagaaacctcttgtgttcttgcctaggcccaggtgttcctggcagccaaatcgagtctctcattttctcttgtggaccagttagttttgcccataacgcagtattctgagtttgcaactgtctctctgatgtgtgccttttgttcaacacagtaacccctgcattctgctctgctctaatacactacctggagaaagtcttttccttattttcaataaatgtcagacattattgaaaagaaaaaaaaaaaaaaaaaaaaaaaaaaaaaaaa

SEQ ID NO: 810 - DNA, 1646 bp, Homo sapiens
ggctctggcacccagggtccggcctgcgccttcccgccaggcctggacactggttcaacacctgtgacttcatgtgtgcgcgccggccacacctgcagtcacacctgtagccccctctgccaagagatccataccgaggcagcgtcggtggctacaagccctcagtccacacctgtggacacctgtgacacctggccacacgacctgtggccgcggcctggcgtctgctgcgacaggagcccttacctcccctgttataacacctgaccgccacctaactgcccctgcagaaggagcaatggccttggctcctgagagggcagccccacgcgtgctgttcggagagtggctccttggagagatcagcagcggctgctatgaggggctgcagtggctggacgaggcccgcacctgtttccgcgtgccctggaagcacttcgcgcgcaaggacctgagcgaggccgacgcgcgcatcttcaaggcctgggctgtggcccgcggcaggtggccgcctagcagcaggggaggtggcccgccccccgaggctgagactgcggagcgcgccggctggaaaaccaacttccgctgcgcactgcgcagcacgcgtcgcttcgtgatgctgcgggataactcgggggacccggccgacccgcacaaggtgtacgcgctcagccgggagctgtgctggcgagaaggcccaggcacggaccagactgaggcagaggcccccgcagctgtcccaccaccacaggcccagggctccctgctggggagctgtacgggtgggcagtagagacgacccccagccccgggccccagcccgcggcactaacgacaggcgaggccgcggccccagagtccccgcaccaggcagagccgtacctgtcaccctccccaagcgcctgcaccgcggtgcaagagcccagcccaggggcgctggacgtgaccatcatgtacaagggccgcacggtgctgcagaaggtggtgggacacccgagctgcacgttcctatacggccccccagacccagctgtccgggccacagacccccagcaggtagcattccccagccctgccgagctcccggaccagaagcagctgcgctacacggaggaactgctgcggcacgtggcccctgggttgcacctggagcttcgggggccacagctgtgggcccggcgcatgggcaagtgcaaggtgtactgggaggtgggcggacccccaggctccgccagcccctccaccccagcctgcctgctgcctcggaactgtgacacccccatcttcgacttcagagtcttcttccaagagctggtggaattccgggcacggcagcgccgtggctccccacgctataccatctacctgggcttcgggcaggacctgtcagctgggaggcccaaggagaagagcctggtcctggtgaagctggaaccctggctgtgccgagtgcacctagagggcacgcagcgtgagggtgtgtcttccctggatagcagcagcctcagcctctgcctgtccagcgccaacagcctctatgacgacatcgagtgcttccttatggagctggagcagcccgcctagaacccagtctaatgagaactccagaaagctggagcagcccacctagagctggccgcggccgc

SEQ ID NO: 811 - DNA, 1986 bp, Homo sapiens
agtctgggttggactggcggccgtggagtttgtgacatacgaggtgacacccctcgagtcacttcccttcaactccagctggagcgcctgcttggctttgggttcgttctgcagccttcgccccgctcctagcctcagggccggactccagcgcagagcccagcccagcgcagcctgccagcagccacccagccgcccagccgcccagccccgcacgaaacccggccagagcttcctagcagcccgagccatgaacaccgaaatgtatcagacccccatggaggtggcggtctaccagctgcacaatttctccatctccttcttctcttctctgcttggaggggatgtggtttccgttaagctggacaacagtgcctccggagccagcgtggtggccatagacaacaagatcgaacaggccatggatctggtgaagaatcatctgatgtatgctgtgagagaggaggtggagatcctgaaggagcagatccgagagctggtggagaagaactcccagctagagcgtgagaacaccctgttgaagaccctggcaagcccagagcagctggagaagttccagtcctgtctgagccctgaagagccagctcccgaatccccacaagtgcccgaggcccctggtggttctgcggtgtaagtggctctgtcctcagggtgggcagagccactaaacttgttttacctagttctttccagtttgtttttggctccccaagcatcatctcacgaggagaactttacacctagcacagctggtgccaagagatgtcctaaggacatggccacctgggtccactccagcgacagacccctgacaagagcaggtctctggaggctgagttgcatggggcctagtaacaccaagccagtgagcctctaatgctactgcgccctgggggctcccagggcctgggcaacttagctgcaactggcaaaggagaagggtagtttgaggtgtgacaccagtttgctccagaaagtttaaggggtctgtttctcatctccatggacatcttcaacagcttcacctgacaacgactgttcctatgaagaagccacttgtgttttaagcagaggcaacctctctcttctcctctgtttcgtgaaggcaggggacacagatgggagagattgagccaagtcagccttctgttggttaatatggtataatgcatggctttgtgcacagcccagtgtgggattacagctttgggatgaccgcttacaaagttctgtttggttagtattggcatagtttttctatatagccataaatgcgtatatatacccatagggctagatctgtatcttagtgtagcgatgtatacatatacacatccacctacatgttgaagggcctaaccagccttgggagtattgactggtcccttacctcttatggctaagtctttgactgtgttcatttaccaagttgacccagtttgtcttttaggttaagtaagactcgagagtaaaggcaaggaggggggccagcctctgaatgcggccacggatgccttgctgctgcaaccctttccccagctgtccactgaaacgtgaagtcctgttttgaatgccaaacccaccattcactggtgctgactacatagaatggggttgagagaagatcagtttgggcttcacagtgtcatttgaaaacgttttttgttttgttttgtaattattgtggaaaactttcaagtgaacagaaggatggtgtcctactgtggatgagggatgaacaaggggatggctttgatccaatggagcctgggaggtgtgcccagaaagcttgtctgtagcgggttttgtgagagtgaacactttccactttttgacaccttatcctgatgtatggttccaggatttggattttgattttccaaatgtagcttgaaatttcaataaactttgctctgtttttctaaaaataaaaaaaaaaaaaaaaaaaaaaaaaaaaaaaaaaaa

SEQ ID NO: 812 - DNA, 4555 bp, Homo sapiens
gcagttcccgcctcctcaggtccgggcgggtccctggccggggtagcacggaagggtctcccaggcggcgtagtagggcttccgtgttactggaaacctacttccggctgcaaatgggaaaaggagcctctaccttaaccaatccccgggaacctcaggcccgcggatgggagaaaccagagatgccaacttcctgcttccgaagtagtggctgggtcttaaagcaccgatgtttctgcattgaatagccctggaagacagaattcttgtctctccaaagatctggcagacttattcccaattataagagatccttgcaaaggaggtgtcttgcttcaccttcaccttccactgtgattgtaagttttctgaggcctcgccagccatgcagaactgaataggactagcaacttcatagacggttgtgaagacaagctagacggcagatgaaagttcttggcacagagtgaacacttgataaactatatggcagccacagcctccggagccgttgcacacctacctgcccggccgacttacctgtacttgccgccgtcccggctcacctggcggtgcccgaggagtagtcgctggagtccgcgcctccctgggactgcaatgtgccgatcttagctgctgcctgagaggatgtctggggtgtccgagcccctgagtcgagtaaagttgggcacgttacgccggcctgaaggccctgcagagcccatggtggtggtaccagtagatgtggaaaaggaggacgtgcgtatcctcaaggtctgcttctatagcaacagcttcaatcctgggaaaaacttcaaactggtcaaatgcactgtccagacggagatccgggagatcatcacctccatcctgctgagcgggcggatcgggcccaacatccggttggctgagtgctatgggctgaggctgaagcacatgaagtccgatgagatccactggctgcacccacagatgacggtgggtgaggtgcaggacaagtatgagtgtctgcacgtggaagccgagtggaggtatgaccttcaaatccgctacttgccagaagacttcatggagagcctgaaggaggacaggaccacgctgctctatttttaccaacagctccggaacgactacatgcagcgctacgccagcaaggtcagcgagggcatggccctgcagctgggctgcctggagctcaggcggttcttcaaggatatgccccacaatgcacttgacaagaagtccaacttcgagctcctagaaaaggaagtggggctggacttgtttttcccaaagcagatgcaggagaacttaaagcccaaacagttccggaagatgatccagcagaccttccagcagtacgcctcgctcagggaggaggagtgcgtcatgaagttcttcaacactctcgccggcttcgccaacatcgaccaggagacctaccgctgtgaactcattcaaggatggaacattactgtggacctggtcattggccctaaagggatccgccagctgactagtcaggacgcaaagcccacctgcctggccgagttcaagcagatcaggtccatcaggtgcctcccgctggaggagggccaggcagtacttcagctgggcattgaaggtgccccccaggccttgtccatcaaaacctcatccctagcagaggctgagaacatggctgacctcatagacggctactgccggctgcagggtgagcaccaaggctctctcatcatccatcctaggaaagatggtgagaagcggaacagcctgccccagatccccatgctaaacctggaggcccggcggtcccacctctcagagagctgcagcatagagtcagacatctacgcagagattcccgacgaaaccctgcgaaggcccggaggtccacagtatggcattgcccgtgaagatgtggtcctgaatcgtattcttggggaaggcttttttggggaggtctatgaaggtgtctacacaaatcacaaaggggagaaaatcaatgtagctgtcaagacctgcaagaaagactgcactctggacaacaaggagaagttcatgagcgaggcagtgatcatgaagaacctcgaccacccgcacatcgtgaagctgatcggcatcattgaagaggagcccacctggatcatcatggaattgtatccctatggggagctgggccactacctggagcggaacaagaactccctgaaggtgctcaccctcgtgctgtactcactgcagatatgcaaagccatggcctacctggagagcatcaactgcgtgcacagggacattgctgtccggaacatcctggtggcctcccctgagtgtgtgaagctgggggactttggtctttcccggtacattgaggacgaggactattacaaagcctctgtgactcgtctccccatcaaatggatgtccccagagtccattaacttccgacgcttcacgacagccagtgacgtctggatgttcgccgtgtgcatgtgggagatcctgagctttgggaagcagcccttcttctggctggagaacaaggatgtcatcggggtgctggagaaaggagaccggctgcccaagcctgatctctgtccaccggtcctttataccctcatgacccgctgctgggactacgaccccagtgaccggccccgcttcaccgagctggtgtgcagcctcagtgacgtttatcagatggagaaggacattgccatggagcaagagaggaatgctcgctaccgaacccccaaaatcttggagcccacagccttccaggaacccccacccaagcccagccgacctaagtacagaccccctccgcaaaccaacctcctggctccaaagctgcagttccaggttcctgagggtctgtgtgccagctctcctacgctcaccagccctatggagtatccatctcccgttaactcactgcacaccccacctctccaccggcacaatgtcttcaaacgccacagcatgcgggaggaggacttcatccaacccagcagccgagaagaggcccagcagctgtgggaggctgaaaaggtcaaaatgcggcaaatcctggacaaacagcagaagcagatggtggaggactaccagtggctcaggcaggaggagaagtccctggaccccatggtttatatgaatgataagtccccattgacgccagagaaggaggtcggctacctggagttcacagggcccccacagaagcccccgaggctgggcgcacagtccatccagcccacagctaacctggaccggactgatgacctggtgtacctcaatgtcatggagctggtgcgggccgtgctggagctcaagaatgagctctgtcagctgccccccgagggctacgtggtggtggtgaagaatgtggggctgaccctgcggaagctcatcgggagcgtggatgatctcctgccttccttgccgtcatcttcacggacagagatcgagggcacccagaaactgctcaacaaagacctggcagagctcatcaacaagatgcggctggcacagcagaacgccgtgacctccctaagtgaggagtgcaagaggcagatgctgacggcttcacacaccctggctgtggacgccaagaacctgctcgacgctgtggaccaggccaaggttctggccaatctggcccacccacctgcagagtgacggagggtgggggccacctgcctgcgtcttccgcccctgcctgccatgtacctcccctgccttgctgttggtcatgtgggtcttccagggggaaggccaaggggagtcaccttcccttgccactttgcacgacgccctctccccacccctacccctggctgtactgctcaggctgcagctggacagaggggactctgggctatggacacagggtgacggtgacaaagatggctcagagggggactgctgctgcctggccactgctccctaagccagcctggtccatgcagggggctcctgggggtggggaggtgtcacatggtgcccctagctttatatatggacatggcaggccgatttgggaaccaagctattcctttcccttcctcttcggccctcagatgtcccttgatgcacagagaagctggggaggagctttgttttgggggtcaggcagccagtgagatgagggatgggcctggcattcttgtacagtgtatattgaaatttatttaatgtgagtttggtctggactgacagcatgtgccctcctgagggaggacctggggcacagtccaggaacaagctaattgggagtccaggcacaggatgctgtgttgtcaacaaaccaagcatcagggggaagaagcagagagatgcggccaagataggaccttgggccaaatccgctctcttcctgcccctctttctctttcttcctttactttcccttgcttttccctcttttcttactcctcctctttctctccccaacccccattctcatctgcacccttcttttctcatgtgtttgcataaacattcttttaacttctttctatttgacttgtggttgaattaaaattgtcccatttgc

SEQ ID NO: 813 - DNA, 3781 bp, Homo sapiens
gggccggctcgcgggcgctgccagtctcgggcggcggtgtccggcgcgcgggcggcctgctgggcgggctgaagggttagcggagcacgggcaaggcggagagtgacggagtcggcgagcccccgcggcgacaggttctctacttaaaagacaatgactactgatgaaggtgccaagaacaatgaagaaagccccacagccactgttgctgagcagggagaggatattacctccaaaaaagacaggggagtattaaagattgtcaaaagagtggggaatggtgaggaaacgccgatgattggagacaaagtttatgtccattacaaaggaaaattgtcaaatggaaagaagtttgattccagtcatgatagaaatgaaccatttgtctttagtcttggcaaaggccaagtcatcaaggcatgggacattggggtggctaccatgaagaaaggagagatatgccatttactgtgcaaaccagaatatgcatatggctcggctggcagtctccctaaaattccctcgaatgcaactctcttttttgagattgagctccttgatttcaaaggagaggatttatttgaagatggaggcattatccggagaaccaaacggaaaggagagggatattcaaatccaaacgaaggagcaacagtagaaatccacctggaaggccgctgtggtggaaggatgtttgactgcagagatgtggcattcactgtgggcgaaggagaagaccacgacattccaattggaattgacaaagctctggagaaaatgcagcgggaagaacaatgtattttatatcttggaccaagatatggttttggagaggcagggaagcctaaatttggcattgaacctaatgctgagcttatatatgaagttacacttaagagcttcgaaaaggccaaagaatcctgggagatggataccaaagaaaaattggagcaggctgccattgtcaaagagaagggaaccgtatacttcaagggaggcaaatacatgcaggcggtgattcagtatgggaagatagtgtcctggttagagatggaatatggtttatcagaaaaggaatcgaaagcttctgaatcatttctccttgctgcctttctgaacctggccatgtgctacctgaagcttagagaatacaccaaagctgttgaatgctgtgacaaggcccttggactggacagtgccaatgagaaaggcttgtataggaggggtgaagcccagctgctcatgaacgagtttgagtcagccaagggtgactttgagaaagtgctggaagtaaacccccagaataaggctgcaagactgcagatctccatgtgccagaaaaaggccaaggagcacaacgagcgggaccgcaggatatacgccaacatgttcaagaagtttgcagagcaggatgccaaggaagaggccaataaagcaatgggcaagaagacttcagaaggggtcactaatgaaaaaggaacagacagtcaagcaatggaagaagagaaacctgagggccacgtatgacgccacgccaaggagggaagagtcccagtgaactcggcccctcctcaatgggctttcccccaactcaggacagaacagtgtttaatgtaaagtttgttatagtctatgtgattctggaagcaaatggcaaaaccagtagcttcccaaaaacagcccccctgctgctgcccggagggttcactgaggggtggcacgggaccactccaggtggaacaaacagaaatgactgtggtgtggagggagtgagccagcagcttaagtccagctcatttcagtttctatcaaccttcaagtatccaattcagggtccctggagatcatcctaacaatgtggggctgttaggttttacctttgaactttcatagcactgcagaaaccttttaaaaaaaaatgcttcatgaatttctcctttcctacagttgggtagggtaggggaaggaggataagcttttgttttttaaatgactgaagtgctataaatgtagtctgttgcatttttaaccaacagaacccacagtagaggggtctcatgtctccccagttccacagcagtgtcacagacgtgaaagccagaacctcagaggccacttgcttgctgacttagcctcctcccaaagtccccctcctcagccagcctccttgtgagagtggctttctaccacacacagcctgtccctgggggagtaattctgtcattcctaaaacacccttcagcaatgataatgagcagatgagagtttctggattagcttttcctattttcgatgaagttctgagatactgaaatgtgaaaagagcaatcagaattgtgctttttctcccctcctctattccttttagggaataatattcaatacacagtacttcctcccagcattgctactgctcagcttcttctttcattctaatccttgctattaagaatttaagacttgtgcttacaatatttttgacctggagtggatctatttacatagtcatttaggatccatgcagctttttttgtctttttaagattattggctcataagcatatgtatactggtttatggaactttatttacactcctctatcatgcaaaaaaattttgactttttagtactaagcttaatttttaaaaacaaaatctgtagtgttgacaaataaatagttgctcttctacactaggggtttcacctgcaggtttgacacgcagttgctcgcttttcctgccctgtcaagcttctctgttctggcgtgagttgtgaaagagttgaagacagcttcccatgccggtacacagccagtagcctaaatctccagtacttgagctgaccattgaactagggcaagtcttaaatgtgtacatgtagttgaatttcagtccttacgggtaaacagattgagcatggctctctattccctcagcctaagaaacactcatgggaatgcatttggcaacccaaggaaccatttgcttaaacctggaacatctcacctttttaaatcctaaaaaacactggcagttatattttaaattagtttttatttttatgatggttttatcaaaagacttttattattagattgggacccccttcaaacctaaaaatcaagttatttccttttataatacttttcttccccatggaacaaatgggatcaatttgtgagttttttcctttaatgataactaaaatccctctaatttctcatttatgcttttgtcttttttatgaaatatttcttttaaaagccccagtctcacctacgaaatatgaagagcaaaagctgattttgcttacttgctaaactgttgggaaagctctgtagagcatggttccagtgaggccaagattgaaatttgatactaaaaaggccacctagctttttgcagataacaaacaagaaagctattccaagactcagatgatgccagctgtctcccacgtgtgtattatggttcaccagggggaactggcaaaagtgtgtgtggggaggggaagggtgtgtgagtggttctgagcaaataactacagggtgcccattaccactcaagaagacacttcacgtattcttgtatcaaattcaataatcttaaacaatttgtgtagaagtccacagacatctttcaaccaccttttaggctgcatatggattgccaagtcagcatatgaggaattaaagacattgtttttaaaaaaaaaaaatcatttagatgcacttttttgtgtgttctttaaataaatccaaaaaaaatgtgaaaaaaaaaa

SEQ ID NO: 814 - DNA, 964 bp, Homo sapiens
gagaacacaaagtaaaacttctgctgttcccagtcctgcagccccagcccagccgtcccccgcgggcgtggcaggtcctgagtcagggcctgtccgtggccagcatccctgctgggcgattgagcagcgggaagctgcttggacccagtctcaaacttaaccctcatctagcacccgggcaggcctcctgggttgcagggacttgagaaaaggcagagttctcaggtcctaggaagctggggcacgctggcgtgacaagcgtcccggagaaagccaagccctcggggagctggggaccgcagcagggctgcagtcacatcctgcgcgggtgggcggcgggccaggccttcagttgtttcgggacgcgccgagcttcgccgctcttccagcggctccgctgccagagctagcccgagcccggttctggggcgaaaatgcctgcccttcacatcgaagatttgccagagaaggaaaaactgaaaatggaagttgagcagcttcgcaaagaagtgaagttgcagagacaacaagtgtctaaatgttctgaagaaataaagaactatattgaagaacgttctggagaggatcctctagtaaagggaattccagaagacaagaacccctttaaagaaaaaggcagctgtgttatttcataaataacttgggagaaactgcatcctaagtggaagaactagtttgttttagttttcccagataaaaccaacatgctttttaaggaaggaagaatgaaattaaaaggagactttcttaagcaccatatagatagggttatgtataaaagcatatgtgctactcatctttgctcactatgcagtcttttttaagagagcagagagtatcagatgtacaattatggaaataagaacattacttgagcatgacacttctttcagtatattgcttgatgcttcaaataaagttttgtcttgggaaaaaaaaaaaa

SEQ ID NO: 815 - DNA, 7488 bp, Homo sapiens
atgagtgtgaaagaggcaggcagctcgggccgccgggagcaggcggcctaccacctgcacatctacccccagctgtccaccaccgagagccaggcctcgtgccgcgtgactgccaccaaggacagcaccacctcggacgtcatcaaggacgccattgccagcctgcggctggacggcaccaaatgttatgtgctggtggaggtcaaagagtcgggaggcgaggaatgggtgctggacgccaacgactcgcctgtgcaccgggtgctgctatggccccggcgggcacaggacgagcaccctcaggaggatggctactacttcctgctgcaggagcgcaacgcagatggaaccatcaagtacgtgcatatgcagctggtggcgcaggccacagccacccggcgcctagtggagcgtggcctcctgccacggcagcaggcggactttgatgacctgtgtaacctccccgagctaaccgagggcaacctcctgaagaacctcaagcaccgcttcctgcaacaaaagatctacacgtacgcggggagcatcctggtggccatcaacccctttaagttcctgcccatctacaaccccaagtacgtgaagatgtatgagaaccagcagctgggcaagctggagccacacgtcttcgcgctggccgacgtggcctactacaccatgctcaggaagcgcgtgaaccagtgcatcgtgatctcgggtgagagcggctccggcaagacccagagcaccaacttcctcatccactgcctcaccgccctcagccagaagggctacgccagcggcgtcgagaggaccatcctgggtgctggccctgtgctggaggcttttggaaatgccaagacagcccacaacaacaactccagccggtttgggaaattcatccaagtcagctacctagagagtggcatcgtgagaggagctgtcgtcgagaaatatctgcttgaaaagtctcgcctggtgtctcaggagaaggatgagaggaactaccatgtgttttattatttgttacttggggtcagcgaggaagagcgccaagaatttcagctcaagcagcctgaagattatttctacctcaaccagcataacttgaagattgaagatggggaggacctgaagcatgactttgagaggctcaagcaggccatggagatggtgggcttcctccccgccaccaagaagcagatttttgccgtcctctcggccatcctgtacctgggcaacgtcacttataagaagagagctacaggccgagaggaagggttggaggtcgggccacccgaggtgctggacaccctgtcgcagcttctgaaggtgaagcgagaaatcttggtggaggttctgaccaaaagaaaaacggtgaccgtcaacgacaagcttatccttccctacagcctcagcgaggccatcactgcccgcgactccatggccaagtctctgtacagcgccctgttcgactggattgtgctgcggatcaaccacgcactcctcaacaagaaggacgtggaagaggcagtctcgtgcctgtccattggggtcctggacatcttcgggtttgaagacttcgagaggaacagctttgagcagttctgcatcaactacgccaatgagcagctgcagtattacttcaaccagcacatcttcaagctggagcaggaggaatatcagggcgaggggatcacgtggcacaacatcggctacacagacaatgtcggctgcatccatctcatcagcaagaaacccacgggcctcttctacctgctggacgaggagagcaacttcccccacgccacgagccagaccctgctggccaagttcaaacagcaacatgaggacaataagtacttcctgggcaccccggtcatggagccagctttcatcatccagcacttcgcagggaaggtgaaatatcagatcaaggacttccgggagaagaacatggactacatgcggccagacatcgtggccctgctgcggggcagtgacagctcctacgtgcgggagctcatcggcatggaccccgtggccgtgttccgctgggccgtgctccgggctgctatccgggccatggcagtgcttcgggaggccggacgcctgcgggccgagagggccgaaaaggctgcaggtatgagcagccctggtgcccaaagtcacccagaagagctgccaagaggagccagcaccccttcggaaaaactttaccgcgatttgcataaccaaatgatcaagagcatcaaaggattgccctggcagggcgaggacccccgtagccttctccagtccctcagtcggctccagaaaccccgcgccttcatcctgaaaagtaaaggtatcaaacaaaagcagatcattccaaagaacctactggactccaagtccctgaaactcatcatcagcatgactctgcacgaccgcaccaccaagtccctactgcacctgcacaagaagaaaaagccaccaagcatcagcgcccagttccagacatcccttaacaagctcttggaggcactggggaaggcggagcccttctttatccgctgcatccgttccaatgctgaaaagaaagagctgtgctttgacgacgagctggtcctgcagcagctgcgctacaccggcatgctggagaccgtgcgcatccggaggtcagggtacagcgccaagtacacgttccaggatttcaccgagcagttccaggtgctcctgcccaaggatgcccagccctgcagggaggtcatctccaccctcctggagaaaatgaagatagacaagaggaactaccagatcgggaagaccaaggtcttcctgaaggagacggagcggcaagccctgcaggagacgctgcaccgggaggtggtgcggaaaatcctgctgctgcagagctggttccggatggtgctggagcgtcggcacttcctgcagatgaagcgggccgccgtcaccatccaggcctgctggcggtcctaccgggtccggagggcgctggagaggacgcaggctgccgtgtacctccaggcctcatggaggggctactggcagcggaagctctaccggcaccagaaacagagcatcatccgcctgcagagcctgtgtcgggggcacctgcagcgcaagagcttcagccagatgatctcggagaagcagaaggcagaagagaaggagagggaagccctggaagccgcaagagcaggtgctgaggagggcggacagggtcaggcggctggagggcagcaggtagctgagcaggggccggagccagcggaggatggcgggcacctggcatcggagcctgaggtgcagccaagtgacaggtcccccctagagcactcctcacctgagaaggaggccccaagcccagagaagactctcccaccccagaaaaccgtggcggctgaaagtcacgagaaagtccccagcagccgggagaagcgtgagtcgcgtcggcaaagagggctggagcacgtcaagttccagaacaaacacatccagtcctgcaaggaggagagtgccctcagagaaccttccagaagggtcacccaggagcaaggggtgagtctcctggaagacaaaaaggagagcagagaagatgaaacccttctagtcgtagagacggaggctgagaacacatctcaaaagcagcccacagagcaaccccaggccatggcagttggcaaggtctctgaagaaactgagaagacgctgcccagtgggagccccaggcctggccagttggagcggccgaccagcctggccctggacagcagggtcagcccaccggcccctggcagcgcccccgagacccccgaggacaagagcaaaccatgtggcagcccaagggttcaggaaaagcccgacagccccggaggctccacgcagatccagcggtacctggacgccgagcggctggccagcgccgtggaactgtggcggggcaagaagctggtggccgccgccagccctagtgccatgctcagccagtccctggacctcagcgacagacaccgggccacaggggccgccctcacgcccacagaggagaggcgcacctccttctccacgagcgacgtctccaagctcctcccgtccctggccaaggctcagcctgcagcagaaaccacggacggagagcgaagtgcgaaaaagccagctgtccagaagaagaagccaggcgacgcatcctccctcccagacgcagggctgtccccgggctctcaggtcgactctaaatccacgtttaagaggctttttctgcataaaaccaaggataaaaaatacagcctggagggcgcagaggagctggagaatgcagtgtccgggcacgtggtgctggaagccaccaccatgaagaagggcctggaagccccctccggacagcagcatcgccacgctgcaggtgagaagcgcaccaaggaaccaggaggcaaagggaagaagaaccgaaatgtcaagattgggaagatcacagtgtcagagaagtggcgggaatcggtgttccgccagatcaccaacgccaatgagctcaagtacctggacgagttcctgctcaacaagataaatgacctccgttcccagaagacgcccattgagagcttgtttatcgaagccaccgagaagttcaggagcaacatcaaaacgatgtactctgtcccgaacgggaagatccacgtgggctacaaggatctgatggagaactaccagatcgtcgtcagcaacctggccactgagcgtggccagaaggacaccaacctggtcctcaacctcttccagtcactgctagatgagttcacccgtggctacaccaagaacgacttcgagccagtgaagcagagcaaagctcagaagaagaagcggaagcaggagcgtgctgtccaggagcacaacgggcacgtgttcgccagctaccaggttagcatcccgcagtcgtgcgagcagtgcctctcctatatctggctcatggacaaggccctgctctgcagcgtgtgcaagatgacctgccacaagaagtgcgtgcacaagattcagagccactgctcctacacctacgggaggaagggcgagccaggcgttgagcctggccacttcggcgtgtgcgtagacagcctgaccagcgacaaggcctcggtgcccatcgtgctggagaagctcctggaacacgtggagatgcacggcctgtacaccgagggcctctaccgcaagtcgggtgctgccaaccgcactcgggagctccggcaggcgctgcagacagaccccgcagcagtcaagctggagaacttccccatccacgccatcacaggggtgctgaagcagtggctgcgggagctgcccgagcccctcatgaccttcgcacagtacggcgacttcctccgagccgtcgagctgccggagaagcaggagcagctggctgccatctatgccgtcctggagcaccttccagaagccaaccacaactccctggagagactcatcttccaccttgtcaaggtggccctgctcgaggatgtcaaccgcatgtcacctggggcgctggccattatcttcgcaccctgcctcctgcgctgccctgacaactcggacccgctgaccagcatgaaggacgtcctcaagatcaccacgtgcgtggagatgctgatcaaggagcagatgaggaaatacaaagtgaagatggaggagatcagccaactggaggctgcagagagtatcgccttccgcaggctttcgctcctgcgacaaaatgctccatggcctctcaaactggggttttcgtctccctatgagggggtcctgaacaagagccccaagacccgggacatccaggaggaggagctggaggtgctgctggaggaggaggcagccggcggcgatgaggaccgggaaaaggagattctcattgaacggatccagtccatcaaggaggagaaggaggacatcacctaccggctgccggagctggacccaaggggctcggacgaggagaacctggactcggagacgtcggccagcaccgagagcctgctggaggagcgggccgggcggggggcctcggaagggccccctgcgcctgctctcccttgccccggcgcgcccaccccgagccccctccccaccgtggccgcccctccacgacgaaggccgtcgtccttcgtaacggtcagagtgaagaccccccggcggacccccatcatgcccacggccaacatcaagctcccaccaggcctgccctcccacctgcctcgctgggcaccgggtgcccgggaggcggctgccccagtgcggcgccgggagccacctgcccgccgcccggaccagatacattccgtgtacatcacgcccggggcagacctgccagtgcagggcgccctggagcccctagaagaggatggccagccacctggggccaagcggaggtactcggatcccccaacgtactgcctgccccccgcctcgggccagaccaatggctgagagccacagctgacaaagtctgcatgtccgaggacggcccctgcactggagctgggcgccagagctgcagagctagtgttcggccctcagagaaggatccagaatcaaaagctcaagagtgacgtgaggtgggcaccggccccaagtgcagagtcaaggcagggagaggccggctggagccaggccccctcgcacgcagcccccaaatcatggacgcacctgtggggagcaccacatctccacctgcggcctcacatctccccactcccctttttgtacgtttaactgtttctttgtacgtggtttacgtaactttaaactgtaacagccttaatggaagaccaaatggttttttatatgtgtatgtacaaagttttctattaacgctgcccgtctcccttataacctggacgtgagctgtcagagcagaagccactaggccactgcgcgtctgaggctcagaccctgctgtggttggcttggggtggccaatgggctgggaccctccatgagagttttggacacttgggtcacctgacccgtgcctctctgacacatgtctccggggggcagccacctggccaatgtgcatttttgcacatgctggaaccttccatgggggtctgggctattggctggagccaggacatgagtcaggggcaccatggacctcacgtgccagggagacttgaatgtggctgtcactcttccggacgccaagggctgcaggaggctgcttttggcactacccaccccgtgtgacagaataggagccagcgactcaggactgctcacgggtcaggagggcaacgcctgaagtcagacctccctataggtcaacagggacaacctggggatctctggagcagggccctcctctctcaggcttggcccactcccccagacacctggacacgtggccacaaatctgggacaaggggcccccgcacagcatgaaataaaaagtgcctgagaagtgtgtgcaaaaaaaaaaaaaaaaaaaaaaaaaaaaaa

SEQ ID NO: 816 - DNA, 2478 bp, Homo sapiens
gacgggggcgccccggcctaagcgggactaggagggcgcgccacccgcttccgctgcccgccggggaatcccccgggctggcgcgcagggaagttcccgaacgcgcgggcataaaagggcagccggcgcccgcgcgccacagctctgcagctcgtggcagcggcgcagcgctccagccatgtcgcgcggcctccagcttctgctcctgagctgcgcctacagcctggctcccgcgacgccggaggtgaaggtggcttgctccgaagatgtggacttgccctgcaccgccccctgggatccgcaggttccctacacggtctcctgggtcaagttattggagggtggtgaagagaggatggagacaccccaggaagaccacctcaggggacagcactatcatcagaaggggcaaaatggttctttcgacgcccccaatgaaaggccctattccctgaagatccgaaacactaccagctgcaactcggggacatacaggtgcactctgcaggacccggatgggcagagaaacctaagtggcaaggtgatcttgagagtgacaggatgccctgcacagcgtaaagaagagacttttaagaaatacagagcggagattgtcctgctgctggctctggttattttctacttaacactcatcattttcacttgtaagtttgcacggctacagagtatcttcccagatttttctaaagctggcatggaacgagcttttctcccagttacctccccaaataagcatttagggctagtgactcctcacaagacagaactggtatgagcaggatttctgcaggttcttcttcctgaagctgaggctcaggggtgtgcctgtctgttacactggaggagagaagaatgagcctacgctgaagatggcatcctgtgaagtccttcacctcactgaaaacatctggaaggggatcccaccccattttctgtgggcaggcctcgaaaaccatcacatgaccacatagcatgaggccactgctgcttctccatggccaccttttcagcgatgtatgcagctatctggtcaacctcctggacattttttcagtcatataaaagctatggtgagatgcagctggaaaagggtcttgggaaatatgaatgcccccagctggcccgtgacagactcctgaggacagctgtcctcttctgcatcttggggacatctctttgaattttctgtgttttgctgtaccagcccagatgttttacgtctgggagaaattgacagatcaagctgtgagacagtgggaaatatttagcaaataatttcctggtgtgaaggtcctgctattactaaggagtaatctgtgtacaaagaaataacaagtcgatgaactattccccagcagggtcttttcatctgggaaagacatccataaagaagcaataaagaagagtgccacatttatttttatatctatatgtacttgtcaaagaaggtttgtgtttttctgcttttgaaatctgtatctgtagtgagatagcattgtgaactgacaggcagcctggacatagagagggagaagaagtcagagagggtgacaagatagagagctatttaatggccggctggaaatgctgggctgacggtgcagtctgggtgctcgcccacttgtcccactatctgggtgcatgatcttgagcaagttccttctggtgtctgctttctccattgtaaaccacaaggctgttgcatgggctaatgaagatcatatacgtgaaaattatttgaaaacatataaagcactatacagattcgaaactccattgagtcattatccttgctatgatgatggtgttttggggatgagagggtgctatccatttctcatgttttccattgtttgaaacaaagaaggttaccaagaagcctttcctgtagccttctgtaggaattcttttggggaagtgaggaagccaggtccacggtctgttcttgaagcagtagcctaacacactccaagatatggacacacgggagccgctggcagaagggacttcacgaagtgttgcatggatgttttagccattgttggctttcccttatcaaacttgggcccttcccttcttggtttccaaaggcattttattgcttgagttatatgttcactgtccccctaatattagggagtaaaacggataccaagttgatttagtgtttttacctctgtcttggctttcatgttattaaacgtatgcatgtgaagaaagggtgtttttctgttttatattcaactcataagactttgggataggaaaaatgagtaatggttactaggcttaatacctgggtgattacataatctgtacaatgaacccccatgatgtaagtttacctatgtaacaaacctgcacttatacccatgaacttaaaatgaaagttaaaaataaaaaacatatacaaataaaaaaatcccgactttgggatgagtgctaggatgttgtaaa

SEQ ID NO: 817 - DNA, 2639 bp, Homo sapiens
tcgaggcgaccgcgacagtggtgggggacgctgctgagtggaagagagcgcagcccggccaccggacctacttactcgccttgctgattgtctatttttgcgtttacaacttttctaagaacttttgtatacaaaggaactttttaaaaaagacgcttccaagttatatttaatccaaagaagaaggatctcggccaatttggggttttgggttttggcttcgtttcttctcttcgttgactttggggttcaggtgccccagctgcttcgggctgccgaggaccttctgggcccccacattaatgaggcagccacctggcgagtctgacatggctgtcagcgacgcgctgctcccatctttctccacgttcgcgtctggcccggcgggaagggagaagacactgcgtcaagcaggtgccccgaataaccgctggcgggaggagctctcccacatgaagcgacttcccccagtgcttcccggccgcccctatgacctggcggcggcgaccgtggccacagacctggagagcggcggagccggtgcggcttgcggcggtagcaacctggcgcccctacctcggagagagaccgaggagttcaacgatctcctggacctggactttattctctccaattcgctgacccatcctccggagtcagtggccgccaccgtgtcctcgtcagcgtcagcctcctcttcgtcgtcgccgtcgagcagcggccctgccagcgcgccctccacctgcagcttcacctatccgatccgggccgggaacgacccgggcgtggcgccgggcggcacgggcggaggcctcctctatggcagggagtccgctccccctccgacggctcccttcaacctggcggacatcaacgacgtgagcccctcgggcggcttcgtggccgagctcctgcggccagaattggacccggtgtacattccgccgcagcagccgcagccgccaggtggcgggctgatgggcaagttcgtgctgaaggcgtcgctgagcgcccctggcagcgagtacggcagcccgtcggtcatcagcgtcagcaaaggcagccctgacggcagccacccggtggtggtggcgccctacaacggcgggccgccgcgcacgtgccccaagatcaagcaggaggcggtctcttcgtgcacccacttgggcgctggaccccctctcagcaatggccaccggccggctgcacacgacttccccctggggcggcagctccccagcaggactaccccgaccctgggtcttgaggaagtgctgagcagcagggactgtcaccctgccctgccgcttcctcccggcttccatccccacccggggcccaattacccatccttcctgcccgatcagatgcagccgcaagtcccgccgctccattaccaagagctcatgccacccggttcctgcatgccagaggagcccaagccaaagaggggaagacgatcgtggccccggaaaaggaccgccacccacacttgtgattacgcgggctgcggcaaaacctacacaaagagttcccatctcaaggcacacctgcgaacccacacaggtgagaaaccttaccactgtgactgggacggctgtggatggaaattcgcccgctcagatgaactgaccaggcactaccgtaaacacacggggcaccgcccgttccagtgccaaaaatgcgaccgagcattttccaggtcggaccacctcgccttacacatgaagaggcatttttaaatcccagacagtggatatgacccacactgccagaagagaattcagtattttttacttttcacactgtcttcccgatgagggaaggagcccagccagaaagcactacaatcatggtcaagttcccaactgagtcatcttgtgagtggataatcaggaaaaatgaggaatccaaaagacaaaaatcaaagaacagatggggtctgtgactggatcttctatcattccaattctaaatccgacttgaatattcctggacttacaaaatgccaagggggtgactggaagttgtggatatcagggtataaattatatccgtgagttgggggagggaagaccagaattcccttgaattgtgtattgatgcaatataagcataaaagatcaccttgtattctctttaccttctaaaagccattattatgatgttagaagaagaggaagaaattcaggtacagaaaacatgtttaaatagcctaaatgatggtgcttggtgagtcttggttctaaaggtaccaaacaaggaagccaaagttttcaaactgctgcatactttgacaaggaaaatctatatttgtcttccgatcaacatttatgacctaagtcaggtaatatacctggtttacttctttagcatttttatgcagacagtctgttatgcactgtggtttcagatgtgcaataatttgtacaatggtttattcccaagtatgccttaagcagaacaaatgtgtttttctatatagttccttgccttaataaatatgtaatataaatttaagcaaacgtctattttgtatatttgtaaactacaaagtaaaatgaacattttgtggagtttgtattttgcatactcaaggtgagaattaagttttaaataaacctataatattttatctg

SEQ ID NO: 818 - DNA, 1912 bp, Homo sapiens; identical to SEQ ID NO: 554

SEQ ID NO: 819 - DNA, 1936 bp, Homo sapiens
ccccgcgtgtctgctaggagagggcgggcagcgccgcggcgcgcgcgatccggctgacgcatctggccccggttccccaagaccagagcggggccgggagggagggggaagaggcgagagcgcggagggcgcgcgtgcgcattggcgcggggaggagcagggatcttggcagcgggcgaggaggctgcgagcgagccgcgaaccgagcgggcggcgggcgcgcgcaccatgggggagaaacccgggaccagggtcttcaagaagtcgagccctaactgcaagctcaccgtgtacttgggcaagcgggacttcgtagatcacctggacaaagtggaccctgtagatggcgtggtgcttgtggaccctgactacctgaaggaccgcaaagtgtttgtgaccctcacctgcgccttccgctatggccgtgaagacctggatgtgctgggcttgtccttccgcaaagacctgttcatcgccacctaccaggccttccccccggtgcccaacccaccccggccccccacccgcctgcaggaccggctgctgaggaagctgggccagcatgcccaccccttcttcttcaccataccccagaatcttccatgctccgtcacactgcagccaggcccagaggatacaggaaaggcctgcggcgtagactttgagattcgagccttctgtgctaaatcactagaagagaaaagccacaaaaggaactctgtgcggctggtgatccgaaaggtgcagttcgccccggagaaacccggcccccagccttcagccgaaaccacacgccacttcctcatgtctgaccggtccctgcacctcgaggcttccctggacaaggagctgtactaccatggggagcccctcaatgtaaatgtccacgtcaccaacaactccaccaagaccgtcaagaagatcaaagtctctgtgagacagtacgccgacatctgcctcttcagcaccgcccagtacaagtgtcctgtggctcaactcgaacaagatgaccaggtatctcccagctccacattctgtaaggtgtacaccataaccccactgctcagcgacaaccgggagaagcggggtctcgccctggatgggaaactcaagcacgaggacaccaacctggcttccagcaccatcgtgaaggagggtgccaacaaggaggtgctgggaatcctggtgtcctacagggtcaaggtgaagctggtggtgtctcgaggcggggatgtctctgtggagctgccttttgttcttatgcaccccaagccccacgaccacatccccctccccagaccccagtcagccgctccggagacagatgtccctgtggacaccaacctcattgaatttgataccaactatgccacagatgatgacattgtgtttgaggactttgcccggcttcggctgaaggggatgaaggatgacgactatgatgatcaactctgctaggaagcggggtgggaagaagggaggggatggggttgggagaggtgagggcaggattaagatccccactgtcaatgggggattgtcccagcccctcttcccttcccctcacctggaagcttcttcaaccaatcccttcacactctctcccccatccccccaagatacacactggaccctctcttgctgaatgtgggcattaattttttgactgcagctctgcttctccagccccgccgtgggtggcaagctgtgttcatacctaaattttctggaaggggacagtgaaaagaggagtgacaggagggaaagggggagacaaaactcctactctcaacctcacaccaacacctcccattatcactctctctgcccccattccttcaagaggagaccctttggggacaaggccgtttctttgtttctgagcataaagaagaaaataaatcttttactaagcatgaaaaaaaaaaaaaaaaaa

SEQ ID NO: 820 - DNA, 3885 bp, Homo sapiens
gcaggccggggcggggctgggaagtagtcgggcggggttgtgagacgccgcgctcagcttccatcgctgggcggtcaacaagtgcgggcctggctcagcgcgggggggcgcggagaccgcgaggcgaccgggagcggctgggttcccggctgcgcgcccttcggccaggccgggagccgcgccagtcggagcccccggcccagcgtggtccgcctccctctgggcgtccacctgcccggagtactgccagcgggcatgaccgacccaccaggggcgccgccgccggcgctcgcaggccgcggatgaagaagaaaacccggcgccgctcgacccggagcgaggagttgacccggagcgaggagttgaccctgagtgaggaagcgacctggagtgaagaggcgacccagagtgaggaggcgacccagggcgaagagatgaatcggagccaggaggtgacccgggacgaggagtcgacccggagcgaggaggtgaccagggaggaaatggcggcagctgggctcaccgtgactgtcacccacagcaatgagaagcacgaccttcatgttacctcccagcagggcagcagtgaaccagttgtccaagacctggcccaggttgttgaagaggtcataggggttccacagtcttttcagaaactcatatttaagggaaaatctctgaaggaaatggaaacaccgttgtcagcacttggaatacaagatggttgccgggtcatgttaattgggaaaaagaacagtccacaggaagaggttgaactaaagaagttgaaacatttggagaagtctgtggagaagatagctgaccagctggaagagttgaataaagagcttactggaatccagcagggttttctgcccaaggatttgcaagctgaagctctctgcaaacttgataggagagtaaaagccacaatagagcagtttatgaagatcttggaggagattgacacactgatcctgccagaaaatttcaaagacagtagattgaaaaggaaaggcttggtaaaaaaggttcaggcattcctagccgagtgtgacacagtggagcagaacatctgccaggagactgagcggctgcagtctacaaactttgccctggccgagtgaggtgtagcagaaaaaggctgtgctgccctgaagaatggcgccaccagctctgccgtctctggagcggaatttacctgatttcttcagggctgctgggggcaactggccatttgccaattttcctactctcacactggttctcaatgaaaaatagtgtctttgtgattttgagtaaagctcctatctgttttctccttctgtctctgtggttgtactgtccagcaatccaccttttctggagagggccacctctgcccaaattttcccagctgtttggacctctgggtgctttctttgggctggtgagagctctaatttgccttgggccagtttcaggtttataggccccctcagtcttcagatacatgagggcttctttgctcttgtgatcgtgtagtcccatagctgtaaaaccagaatcaccaggaggttgcacctagtcaggaatattgggaatggcctagaacaaggtgtttggcacataagtagaccacttatccctcattgtgacctaattccagagcatctggctgggttgttgggttctagactttgtcctcacctcccagtgaccctgactagccacaggccatgagataccagggggccgttccttggatggagcctgtggttgatgcaaggcttccttgtccccaagcaagtcttcagaaggttagaacccagtgttgactgagtctgtgcttgaaaccaggccagagccatggattaggaagggcaaagagaaggcaccagaatgagtaaagcaggcaggtggtgaagccaaccataaacttctcaggagtgacatgtgcttccttcaaaggcatttttgttaaccatatccttctgagttctatgtttccttcacagctgttctatccattttgtggactgtcccccacccccaccccatcattgtttttaaaaaattaaggcctggcgcagcagctcatgcctataatcccagcactttgggaggctgaggcgggcggatcacttgaggccaggagtttgagaccagcccaggcaacatagcaaaaccccattctgctttaaaaaaaaaaaaaaaaaaaattagcttggcgtagtggcatgtgcctataatcccagctactggggaggctgaggcacaagaatcatttgaacctgggaggtagaggttgctgtgagccgagattacgcccctgcactccagcctgggtcacagagtgagactccatctcagaaaaaaaaaaaattgagtcaggtgcagtagctccttcctgtagtcccagctacttgggaggctgaggctagaggatcacttgagcccaggagtttgagtctagtctgggcaacatagcaagaccccatctctaaaatttaagtaagtaaaagtagataaataaaaagaaaaaaaaactgtttatgtgctcatcataaagtagaagagtggtttgcttttttttttttttttggattaatgaggaaatcattctgtggctctagtcataatttatgcttaataacattgatagtagccctttgcgctataactctacctaaagactcacatcatttggcagagagagagtcgttgaagtcccaggaattcaggactgggcaggttaagacctcagacaaggtagtagaggtagacttgtggacaaggctcgggtcccagcccaccgcaccccaactttaatcagagtggttcactattgatctatttttgtgtgatagctgtgtggcgtgggccacaacatttaatgagaagttactgtgcaccaaactgccgaacaccattctaaactattcatatatattagtcatttaattcttacataacttgagaggtagacagatatccttattttagagatgaggaaaccaagagaacttaggtcattagcgcaaggttgtagagtaagcggcaaagccaagacacaaagctgggtggtttggtttcagagccagtgcttttcccctctactgtactgcctctcaaccaacacagggttgcacaggcccattctctgatttttttcctcttgtcctctgcctctccctctagctcccacttcctctctgctctagttcattttctttagagcagcccgagtgatcatgaagtgcaaatcttgccatgtcagtcccctgcttagaaccctccaatggctcactttctctttaggcaaaagtctttaccccatgccttctcccatctcatctcaaccccctcatttgttggctgtctgctgtcagccactcttctttcaggtcctcagatgcactgcaccctctcctgcctgggggtctttgctcctgctactacctctgcttgaacagctcctcaccttccttcctccaaccctacccttgtataggtgacttttgttcatccttcagaattcaactcacatgtctcttgcatggagaaccctcacctactgtgttgagaccctgtccagcccccaggtgggatcctctctcgacttcccatacatttctttcacagcatttacatagtccatgatagtttacttgtgggattatttggttaatctttgcctttaacaccagggttccttgggtgaaggagcttctttatcttggtaacagcattatttcaagcataacttgtaatatagttatattacatatataacatatatatatataacataacatatataacatatataacaagcataacttgttatatagtcttgtatatagtaagacctcaataaatatttggagaacaaaaaaaaaaaaa

SEQ ID NO: 821 - DNA, 1899 bp, Homo sapiens
gtccgtactgcagagccgctgccggagggtcgttttaaagggccgcgttgccgccccctcggcccgccatgctgctatccgtgccgctgctgctcggcctcctcggcctggccgtcgccgagcccgccgtctacttcaaggagcagtttctggacggagacgggtggacttcccgctggatcgaatccaaacacaagtcagattttggcaaattcgttctcagttccggcaagttctacggtgacgaggagaaagataaaggtttgcagacaagccaggatgcacgcttttatgctctgtcggccagtttcgagcctttcagcaacaaaggccagacgctggtggtgcagttcacggtgaaacatgagcagaacatcgactgtgggggcggctatgtgaagctgtttcctaatagtttggaccagacagacatgcacggagactcagaatacaacatcatgtttggtcccgacatctgtggccctggcaccaagaaggttcatgtcatcttcaactacaagggcaagaacgtgctgatcaacaaggacatccgttgcaaggatgatgagtttacacacctgtacacactgattgtgcggccagacaacacctatgaggtgaagattgacaacagccaggtggagtccggctccttggaagacgattgggacttcctgccacccaagaagataaaggatcctgatgcttcaaaaccggaagactgggatgagcgggccaagatcgatgatcccacagactccaagcctgaggactgggacaagcccgagcatatccctgaccctgatgctaagaagcccgaggactgggatgaagagatggacggagagtgggaacccccagtgattcagaaccctgagtacaagggtgagtggaagccccggcagatcgacaacccagattacaagggcacttggatccacccagaaattgacaaccccgagtattctcccgatcccagtatctatgcctatgataactttggcgtgctgggcctggacctctggcaggtcaagtctggcaccatctttgacaacttcctcatcaccaacgatgaggcatacgctgaggagtttggcaacgagacgtggggcgtaacaaaggcagcagagaaacaaatgaaggacaaacaggacgaggagcagaggcttaaggaggaggaagaagacaagaaacgcaaagaggaggaggaggcagaggacaaggaggatgatgaggacaaagatgaggatgaggaggatgaggaggacaaggaggaagatgaggaggaagatgtccccggccaggccaaggacgagctgtagagaggcctgcctccagggctggactgaggcctgagcgctcctgccgcagagcttgccgcgccaaataatgtctctgtgagactcgagaactttcatttttttccaggctggttcggatttggggtggattttggttttgttcccctcctccactctcccccaccccctccccgccctttttttttttttttttaaactggtattttatcctttgattctccttcagccctcacccctggttctcatctttcttgatcaacatcttttcttgcctctgtgccccttctctcatctcttagctcccctccaacctggggggcagtggtgtggagaagccacaggcctgagatttcatctgctctccttcctggagcccagaggagggcagcagaagggggtggtgtctccaaccccccagcactgaggaagaacggggctcttctcatttcacccctccctttctcccctgcccccaggactgggccacttctgggtggggcagtgggtcccagattggctcacactgagaatgtaagaactacaaacaaaatttctattaaattaaattttgtgtctc

SEQ ID NO: 822 - DNA, 6246 bp, Homo sapiens
atcttgagtggaggaggagccgcggtcgccgccatgcggagaggcagggaaagagggaggaggcggcgggcgggcgaacgggcgagcgagggagggggcagaggagccgagttagctcagccaggcggcgacttcggcggcgccacgagagcgggcagcggaggagattgacgtgagtgaattcagatataactcaagcttgttagagggctttttaaaaataaaaagttgattccgtgcaagagagcaagttactgctgcttaccgttcagagacttacaggtgcttgcctgcattgcaataaaggactcatttattgagcaagacttatatttatctcttcattttggagagcctaataaactgttattacagtttctctactgactttcaaaagttttgaagtttgaaagacctttgcaattaaaacagcatgagcacggccagaacagagaaccctgttataatgggtctgtccagtcaaaatggtcagctgagaggccctgtgaaacccactggtggccctggaggagggggcacacagacacagcaacagatgaaccagctgaaaaacaccaacacaatcaataatggcactcagcagcaagcacagagtatgaccaccactattaaacctggtgatgactggaaaaagactttaaaactccctccaaaggatctaagaatcaaaacttcggatgtgacctccacaaaaggaaatgagtttgaagattactgtttgaaacgggagttactgatgggaatttttgaaatgggctgggaaaagccatctcctattcaggaggagagcattcccattgctttatctggtagggatatcttagctagagcaaaaaatggaacaggcaagagcggtgcctacctcattcccttacttgaacggctagacctgaagaaggacaatatacaagcaatggtgattgttcccactagagaacttgctctacaggtcagtcaaatttgcatccaggtcagcaaacacatgggaggggccaaagtgatggcaaccacaggaggaaccaatttacgagatgacataatgaggcttgatgatacagtgcacgtggtgattgctacccctgggagaatcctggatcttattaagaaaggagtagcaaaggttgatcatgtccagatgatagtattggatgaggcagataagttgctgtcacaggattttgtgcagataatggaggatattattctcacgctacctaaaaacaggcagattttactatattccgctactttccctcttagtgtacagaagttcatgaattcccatttgcagaaaccctatgagattaacctgatggaggaactaactctgaagggagtaacccagtactacgcatatgtaactgagcgccaaaaagtacactgcctcaacacacttttctccaggcttcagataaaccagtcgatcattttctgtaactcctctcagcgagttgaattgctagccaagaagatttctcaactgggttattcttgcttctatattcatgctaaaatgaggcaggaacatcgaaatcgtgtatttcatgatttccgaaatggcttatgccgcaatcttgtttgcactgatctgtttacccgaggtattgatatacaagctgtgaatgtggtaataaactttgatttcccaaagctggcagagacctatctccatcgtattggaagatcaggtcgctttggtcatcttggcttagccatcaacttgatcacatatgatgatcgcttcaacctgaaaagtattgaggagcagctgggaacagaaattaaacctattccgagcaacattgataagagcctgtatgtggcagaataccacagcgagcctgtagaagatgagaaaccttaacaagcatgctttgacaaattacaaaaggctcgtttggatctgtgacacatcgttttggggggaatgctcctctctttgtgggtttttcatcttttattttggaactatgaagacttaaaagagctcagacattttctttttttaactggtgaagagaaaaaggctgaaaagaaggaatataccttttttgttccacttgtttgcactgtgtgctgactgaacattagttgcactaactgctggtttttaaaaaatgttttctggggaaaggggacaaggaaggaaaagaaagaagagaaggggagaaaccctaaaaagagaagaatcttaatgaacacacaagcttgtcaatgatttcaaaattctccaacagctgactctcgtgcatttcaacttctccctgattcctcatccgttttttaagcctgaagagcttattacttatttgtgcgaagtgccttatgctatgagaccattcagaatatcatcttttagacacagcccgaggaatcaacaatagtaactctttctttccgtttttttttctttttcttttaaaaaatgtcttcttattttggtttcaggttgaagtctcttccctttctacccagtactcgagcccagggctagaagttgaaactcactagtaatgttaaacaccattttttttttctttttggggaggagttgatatgcaactgcagttcatccgcactgtaaatacatgtatttaaaaaaacaatcccaagtaaaaatttcttctgggctgagtagataaaaaacatcatcgctcccaaaggaaagagcagtctatcattgcaggagccatatgacaagcctttgtgctctatagcagacactaaagactgggttacatatgcctccagtagtagtatggcacttgatgtgtagacatgtcagagcttggccctctttcctctgtggcaaagcgtgtcccatagaaaattgggtgtgtatacttgtataactttgtaaataagttttttttctgggttcatatatatatatatatatacatatatatatatttttttttggatgaaggttgctgggattaaggggattagagtgattatgggagcagctaaagatgagaggggctcagttttacgcaacactaaattctagaaagtactttggcctcgtgctgtagagagcagatttctatggtaccctgtgttagtaaaggggcccagaaatctgggatgtactgtttgctgccacactgtctcatctagtacctttggagtaggtttaccagagagagcaaggaagcttcaaaacattgataattcaacatttattttgagaagctctgattttgcttcttccccctttctaaaagtttgaggaatatttcaagctctgcaacagggggcaaagattaatctaccttgcagtgtaggaattctattgagtggcagtgtcattgagcagtatatatataaagcacagatttgcatttcagaatattagccagtaccagctttggtaatgttagcagttctggagcttaattttctgtggatcatttcctgtagtgtgtaaatgtgttgccctctgcccgctttgatacataaacttttgcaggaatgggcaacctgagagctgttaactttcatgctacagaaagctgcttgccattctcttgcattgtgacaagaattgttacctgtcattttgcactgtaaattgctggcagatgctttacagtcaatagtgttgctttaaattgtgcccctcccaacatgcttgatgtttggcctgatctccaggcaaaaggagtgagatgaatcaaaaccagtgaacttttttttttaatgtttttaattcccttttaacccagtgtactaggtcaatcaggaggcatctggaaagggggggaaaaaagcaaaaaacaaaattaaaaaaaattgatttccatattttatttttcaaaaccctaaaatattacaaaataagtcccgcatatactttaatgttttaactcttttggacaaaggaatcaattacttgaagttgcttttttgactctgcctacttctgagcaaactatttgcgactcacccacaattgccttggagatcaaaatcctacagatgcctcctgatgggacatagccctaactccttaacaactgtagcaagaactgcacggtacaaacccaaaaaagaacaagctcatctatttggaacccaagcctcatattttctgtccagtcaatgttggttactaaatagaaaacctaattaaggaagtaacttttttccagggaggggtgggagagggaatttaaaaggtgtcaacttttgaccaaaaaaattgtgcccttgtaccgatgcagctctctttctcccccacctcttgcgagataagagggatcattcatgtagaagaaaagagtataaatgcaattctgtatctcgctagagaacgtgtgggtgactaaacaaaaagtgcagtctccttcaccaactttagactgcgtggtgccacatgcctgtgggtccctcttaaagcacagacttaaaatggaaagtattactgaagtatagcctctaatgaggagtggcacttaaactatctgggacaccactactggacacggtcttgtagaggcagctgtccagttttggtgcttgactcttgaataggaattgttaaatggaaagatgctctgaggactaggtcaaagcctggtctttttttttttttttttttttttctttcttttttgggccctcataataagcattgttactattggaagttgttttcacattctttccaatattaaatatgtatttttttaagtaatgataatattttccagtggctcatttggatgagaactaccctctatttttaatattaaaactacatccaactcatcatttagcctttggttgtacagttgtgtaatgggctatggactgttacacaccttaccacctctaggcctatgttttttctttccccatatattctgatggggataaatactgttttgcctctcccataggaatggaatacatttattctaaaatgatctttcacagaagtaagagagagggaaacctaaatatacctctaaattgtttgaagttggtcccagcagcataaaatgggttggccccaaagggttggagggtgggcttggttatcagtatttgttttcagaatgagatgggagcatctttcctttgccacgtgctttgtgcttgataacatcatgcttggttcaaacgacaactcagcacaaagccttgagtataaattgttggaatcaaaacatctcattctgatgacgtggtttaattttttaatttttttttttaataggggtgggagggagggtactttgccccagaagggagggtgtctgcactaaggatttagaaacactttggaagctcataacctcatcagaaactgcctttagccacactcctgaccttctagatgagtaacaaaaaaatgaaataagttcttggaaattaagccatttattttaatttgctatttttttcaatgttctaggtatctttaaatttgttattgtggaatcattttcctgccagatacctttatcaaaattattggcctcatgagagctgaagtaagtcagctttttggtgaactttagtggacttctgtgagattgtagttgtactttgtatctctaaatctaaagatagttttttaaaactcccaaagaaaatctgctctcctttctgatctaaaaactcatctttggggtaaagagttaagtgtccaaaggttgtcacagttcatgaggtcagagggagctagcctggcacctggactctgcccatccacagctgacagattccaacagaagtgtatttaaattctccagtagacaatgctgggtaagggagggggtagggctgggttattaagatacaggctgctgtattttacattggttgtgtgggaaggggagcctggagaaaacaaagtcactattcccttttttgaaacaggaaaaaaaattattttttgttcagtaaaaatggtagagaattccaatgtccctagccacaagggaccagttccactgagaagtgaacagtgggaactcaaaatttcagaaacattgggggaagggaaaattggctttctcttaattggcagatgttccagtggggggggggggggctctgtttttgttgggatgtgttatgttgtatgtacgcatatatggaccggagtctgctgagtttataaggttccaaaaatatggtaaaatcttggtttttgttaatttatctcaataaaagcccactggaactccaaaaaaaaaaaaaaaaaaaaaa

SEQ ID NO: 823 - DNA, 2015 bp, Homo sapiens
tcgctgcgaaggacatttgggctgtgtgtgcgacgcgggtcggaggggcagtcgggggaaccgcgaagaagccgaggagcccggagccccgcgtgacgctcctctctcagtccaaaagcggcttttggttcggcgcagagagacccgggggtctagcttttcctcgaaaagcgccgccctgcccttggccccgagaacagacaaagagcaccgcagggccgatcacgctgggggcgctgaggccggccatggtcatggaagtgggcaccctggacgctggaggcctgcgggcgctgctgggggagcgagcggcgcaatgcctgctgctggactgccgctccttcttcgctttcaacgccggccacatcgccggctctgtcaacgtgcgcttcagcaccatcgtgcggcgccgggccaagggcgccatgggcctggagcacatcgtgcccaacgccgagctccgcggccgcctgctggccggcgcctaccacgccgtggtgttgctggacgagcgcagcgccgccctggacggcgccaagcgcgacggcaccctggccctggcggccggcgcgctctgccgcgaggcgcgcgccgcgcaagtcttcttcctcaaaggaggatacgaagcgttttcggcttcctgcccggagctgtgcagcaaacagtcgacccccatggggctcagccttcccctgagtactagcgtccctgacagcgcggaatctgggtgcagttcctgcagtaccccactctacgatcagggtggcccggtggaaatcctgccctttctgtacctgggcagtgcgtatcacgcttcccgcaaggacatgctggatgccttgggcataactgccttgatcaacgtctcagccaattgtcccaaccattttgagggtcactaccagtacaagagcatccctgtggaggacaaccacaaggcagacatcagctcctggttcaacgaggccattgacttcatagactccatcaagaatgctggaggaagggtgtttgtccactgccaggcaggcatttcccggtcagccaccatctgccttgcttaccttatgaggactaatcgagtcaagctggacgaggcctttgagtttgtgaagcagaggcgaagcatcatctctcccaacttcagcttcatgggccagctgctgcagtttgagtcccaggtgctggctccgcactgttcggcagaggctgggagccccgccatggctgtgctcgaccgaggcacctccaccaccaccgtgttcaacttccccgtctccatccctgtccactccacgaacagtgcgctgagctaccttcagagccccattacgacctctcccagctgctgaaaggccacgggaggtgaggctcttcacatcccattgggactccatgctccttgagaggagaaatgcaataactctgggaggggctcgagagggctggtccttatttatttaacttcacccgagttcctctgggtttctaagcagttatggtgatgacttagcgtcaagacatttgctgaactcagcacattcgggaccaatatatagtgggtacatcaagtccatctgacaaaatggggcagaagagaaaggactcagtgtgtgatccggtttctttttgctcgcccctgttttttgtagaatctcttcatgcttgacatacctaccagtattattcccgacgacacatatacatatgagaatataccttatttatttttgtgtaggtgtctgccttcacaaatgtcattgtctactcctagaagaaccaaatacctcaatttttgtttttgagtactgtactatcctgtaaatatatcttaagcaggtttgttttcagcactgatggaaaataccagtgttgggtttttttttagttgccaacagttgtatgtttgctgattatttatgacctgaaataatatatttcttcttctaagaagacattttgttacataaggatgacttttttatacaatggaataaattatggcatttctattg

SEQ ID NO: 824 - DNA, 3213 bp, Homo sapiens
aggaatggggcggggactaggccttcgcctcggcggcagaggagactcgggggccattttgtgaagagacgaagactgagcggttgtggccgcgttgccgacctccagcagcagtcggcttctctacgcagaacccgggagtaggagactcagaatcgaatctcttctccctccccttcttgtgagatttttttgatcttcagctacattttcggctttgtgagaaaccttaccatcaaacacgatggccagcaacgttaccaacaagacagatcctcgctccatgaactcccgtgtattcattgggaatctcaacactcttgtggtcaagaaatctgatgtggaggcaatcttttcgaagtatggcaaaattgtgggctgctctgttcataagggctttgccttcgttcagtatgttaatgagagaaatgcccgggctgctgtagcaggagaggatggcagaatgattgctggccaggttttagatattaacctggctgcagagccaaaagtgaaccgaggaaaagcaggtgtgaaacgatctgcagcggagatgtacggctcctcttttgacttggactatgactttcaacgggactattatgataggatgtacagttacccagcacgtgtacctcctcctcctcctattgctcgggctgtagtgccctcgaaacgtcagcgtgtatcaggaaacacttcacgaaggggcaaaagtggcttcaattctaagagtggacagcggggatcttccaagtctggaaagttgaaaggagatgaccttcaggccattaagaaggagctgacccagataaaacaaaaagtggattctctcctggaaaacctggaaaaaattgaaaaggaacagagcaaacaagcagtagagatgaagaatgataagtcagaagaggagcagagcagcagctccgtgaagaaagatgagactaatgtgaagatggagtctgaggggggtgcagatgactctgctgaggagggggacctactggatgatgatgataatgaagatcggggggatgaccagctggagttgatcaaggatgatgaaaaagaggctgaggaaggagaggatgacagagacagcgccaatggcgaggatgactcttaagcacatagtggggtttagaaatcttatcccattatttctttacctaggcgcttgtctaagatcaaatttttcaccagatcctctcccctagtatcttcagcacatgctcactgttctccccatccttgtccttcccatgttcattaattcatattgccccgcgcctagtcccattttcacttcctttgacgctcctagtagttttgttaagtcttaccctgtaatttttgcttttaattttgatacctctttatgacttaacaataaaaaggatgtatggtttttatcaactgtctccaaaataatctcttgttatgcagggagtacagttcttttcattcatacataagttcagtagttgcttccctaactgcaaaggcaatctcatttagttgagtagctcttgaaagcagctttgagttagaagtatgtgtgttacaccctcacattagtgtgctgtgtggggcagttcaacacaaatgtaacaatgtatttttgtgaatgagagttggcatgtcaaatgcatcctctagaaaaataattagtgttatagtcttaagatttgttttctaaagttgatactgtgggttatttttgtgaacagcctgatgtttgggaccttttttcctcaaaataaacaagtccttattaaaccaggaatttggagaaaaaaaaaaccctggttttttatttttgtattttattattgtttacttcaaactttgttttacagcgtcctccacaaaacctctagaatgcactagatatatttttcttggagtcataatcatgatgcataccaacacaacactactcaaattatatttcattgagatgcatgttgcattgaggagtcaacttgacatagagtggagactttttcaaaatggcttttacatcctaatgaaagtttgggaagtatatcctctctgccttttcatcagtgctttgtggtccagctggcaccctttctgaggtttgtgttttgtgctaaatggttttgtccttaaataggagaggctcaaaaacatcaagatttcaggaaaatggcgacagctgcataatggaacccccctgcttctattttgttcttttaattactatttatagccccagttaccttctgaattctgaagtgtatatacctccatgttcctgaaaacaagaaaactcttacttcctgatattccatagactgccttcccaggtgattgagaacatagagaatgttacacatttattttactctaaatgatcttttacccctgttagctaatctttgtgttttcctcaactttattaattacagtgattgcatttttagcatccagttgtaagatgaatatattaaacagctaccagtgttggtgatacctcatccttgaaaggcttagttcatttgtgttttatacttcagtttttccagcatagcagaaaatgccgcttataatttttgtgcacacaaaccttggattcccctgtaaagttgctattgtttcatagcatgcggcactggccttttttcatcctactcattacaggcaaaactcatgtcttatttatgaggattttatagatcattttctgtaacaggtgacaaaagcagaaaagaatgaagaggctgaagtatgaactacccttggagcccatatacatgatataggcaatttcttttgtatgttaattcagtcaaaaatactacccacttgatgttttctaatctgatgtgagctcatgttacacagacttttagtaagtaacccgtgactagaaaataaactggatgcttaggagagagtgtcagatgtataagatgctaataaaacctgtttaatattattgttagctgtaagtttttgggaaatactgaacaaattagtccacaatcaagtgtctacttttcccttcactgtagggcctctccctgcacagagcagtctgtttagctgtgaacaccacaatctgcagatgttcaagtcccttacataaaatggcatagtatttatatgtaacctatgcatattctcctgtatattttaaatcatctctacattaaaatacctgataaaatgtaaatggtatgtaaa

SEQ ID NO: 825 - DNA, 3527 bp, Homo sapiens
agtaacaaatgaagtgcgcgctgcgacacctcccagcccaccgaactccgccgccatttcctcgcttggcctaacggttcggccaatcccagcgcgcatcaagaaggactgaggctccgccaatcggaggccgccgatttcgacccttcgcctcggcccggcccaatccaggccccggccccgccgcccccggcccgcccccgcggtgccctctctcctccctctttgtgcgtctcgcgccgccgccgcccgccgcgtgagaggacgggctccgcgcgctccggcagcgcattcgggtcccctccccccgggaggcttgcgaaggagaagccgccgcagaggaaaagcaggtgccggtgcctgtccccgggggcgccatggcgaccggagcgaacgccacgccgttggacttcccaagtaagaagcggaagaggagccgctggaaccaagacacaatggaacagaagacagtgattccaggaatgcctacagttattccccctggacttactcgagaacaagaaagagcttatatagtgcaactgcagatagaagacctgactcgtaaactgcgcacaggagacctgggcatcccccctaaccctgaggacaggtccccttcccctgagcccatctacaatagcgaggggaagcggcttaacacccgagagttccgcacccgcaaaaagctggaagaggagcggcacaacctcatcacagagatggttgcactcaatccggatttcaagccacctgcagattacaaacctccagcaacacgtgtgagtgataaagtcatgattccacaagatgagtacccagaaatcaactttgtggggctgctcatcgggcccagagggaacaccctgaagaacatagagaaggagtgcaatgccaagattatgatccgggggaaagggtctgtgaaagaagggaaggttgggcgcaaagatggccagatgttgccaggagaagatgagccacttcatgccctggttactgccaatacaatggagaacgtcaaaaaggcagtggaacagataagaaacatcctgaagcagggtatcgagactccagaggaccagaatgatctacggaagatgcagcttcgggagttggctcgcttaaatgggacccttcgggaagacgataacaggatcttaagaccctggcagagctcagagacccgcagcattaccaacaccacagtgtgtaccaagtgtggaggggctggccacattgcttcagactgtaaattccaaaggcctggtgatcctcagtcagctcaggataaagcacggatggataaagaatatttgtccctcatggctgaactgggtgaagcacctgtcccagcatctgtgggctccacctctgggcctgccaccacacccctggccagcgcacctcgtcctgctgctcccgccaacaacccacctccaccgtctctcatgtctaccacccagagccgcccaccctggatgaattctggcccttcagagagtcggccctaccacggcatgcatggaggtggtcctggtgggcccggaggtggcccccacagcttcccacacccattacccagcctgacaggtgggcatggtggacatcccatgcagcacaaccccaatggacccccacccccttggatgcagccaccaccaccaccgatgaaccagggcccccaccctcctgggcaccatggccctcctccaatggatcagtacctgggaagtacgcctgtgggctctggggtctatcgcctgcatcaaggaaaaggtatgatgccgccaccacctatgggcatgatgccgccgccgccgccgcctcccagtgggcagcccccaccccctccctctggtcctcttcccccatggcaacaacagcagcagcagcctccgccaccccctccgcccagcagcagtatggcttccagtacccccttgccatggcagcaaaatacgacgactaccaccacgagcgctggcacagggtccatcccgccatggcaacagcagcaggcggctgccgcagcttctccaggagcccctcagatgcaaggcaaccccactatggtgcccctgccccccggggtccagccgcctctgccgcctggggcccctccccctccgccgcctccaccgcctggttccgccggcatgatgtatgccccgccccctcctcctccgcctcccatggacccttctaactttgtcaccatgatgggcatgggggtggcgggcatgccgcccttcgggatgcctccagctcccccaccgcctccaccacagaactagacttgttttttaagaaaatatatattatatatagagagaattggtctcgtttaaacacgccgaacctcaccatatggagccagacattgggacgcacgcatgtgattgtgtgtgcacgcatgtgtgtgtgtgcacgcactgggctgggccaagcgactgaggattcgcttgggaacgggcaggtggtagtaggggcgccagcttgggctctcctggcgccccgtagcatcgagtgtcttctttgtcttctttctctcctcacccaactccctttgcctctccccaaaccgggccgccaggatccctccccgcggcggcgatggcccgagccatgagagtgaggactttccgcgcccattggtgacccttccaggcagacagcctcagcaacgcccctggtggacaggatggttcggcaaagcagcctgagttatttttgtggacggaatcggaacacgctggctccatatcgtgaaatttttattaatttttttctttttcctttgttacttctttatcttttcctttcttcagactccgtccaaggagatgctctccccggtcttctgctgcaatttagattcctttcccttctctccagttctccttcccttaccaaggagaggggagcaaatggttttgggcaagggctttggccattcatgtcaagctggttgtgggtttttcaaggtgccatagccacccccaaagatgtttgtttaaagcgtggggttttttaatctctgccacccttgtcaagggagtcttgtaaagttgccgagggtaggttcatctccaggtttcgggattcccatccgtcctggcgatcctgccagcagtgggtgggcagcctgagctccctcgggctcgcctgccagcctggagttcttcctgtgctccttgatcacctgagctgcctcagattccatttggtcctctccttcctggaaggcttccttttatgttttgttttaatcccaaatgtctgaatgttttgcagtgtgtaggggtttgagccccttgttcattctccttcctttttcctcccgcttccctctccatgaagtgattctgttgacaataatgtatactgcgcgttctcttcactggtttatctgcagaaatttctctgggcttttttcggtgttagattcaacactgcgctaaagcggggatgttccattgaataaaagagcagtgtggttttctgggaaaaaaaaaaaaaaaaaa

SEQ ID NO: 826 - DNA, 2133 bp, Homo sapiens
ctcagctagggcctgccggttcctagtgcgtgcccagcagtcctcaggtcaccttcactaccgggccaaggaccccgtgggaactcgcagccttcgccacactcgttcctcgcgcatccatggaggggtgcctacagagaagacctgcgtggcaaaaacctaaacgaagagatgaggggcatggagaggagtaggataagagaataaagataacagtgggggggagacgttagtttcctttatatcttttgttactggcggtagcagtgaagttagaaacggttttaaaacaaatttcagacaggcattttccaaaggcaagcctggagcgcacggatctgtataaccgcggaaggccctgtttccggtcccttgcgcctgcgctcttgcagccaagaaggcgggaggctggagtagagggaagcctgcaaccggaagtgaaggcagatttccctccttcgtcgctgttgctgccgccatacgcgctctccctgtttagctcttctgttagaaatagtatctttgttttcctttgctgttcctcaatcccctactcttcaccccttgttttcacctattttgcgagaacccatccagatcccccttcccttcttcccctgccggcccagttatggcagagaacgatgtggacaatgagctcttggactatgaagatgatgaggtggagacagcagctgggggagatggggctgaggcccctgccaagaaggatgtcaagggctcctatgtctccatccacagctctggctttcgtgacttcctgctcaagccagagttgctccgggccattgtcgactgtggctttgagcatccgtcagaagtccagcatgagtgcatccctcaggccattctgggaatggatgtcctgtgccaggccaagtcgggcatgggaaagacagcagtgtttgtcttggccacactgcaacagctggagccagttactgggcaggtgtctgtactggtgatgtgtcacactcgggagttggcttttcagatcagcaaggaatatgagcgcttctctaaatacatgcccaatgtcaaggttgctgttttttttggtggtctgtctatcaagaaggatgaagaggtgctgaagaagaactgcccgcatatcgtcgtggggactccaggccgtatcctagccctggctcgaaataagagcctcaacctcaaacacattaaacactttattttggatgaatgtgataagatgcttgaacagctcgacatgcgtcgggatgtccaggaaatttttcgcatgaccccccacgagaagcaggtcatgatgttcagtgctaccttgagcaaagagatccgtccagtctgccgcaagttcatgcaagatccaatggagatcttcgtggatgatgagacgaagttgacgctgcatgggttgcagcagtactacgtgaaactgaaggacaacgagaagaaccggaagctctttgaccttctggatgtccttgagttcaaccaggtggtgatctttgtgaagtctgtgcagcggtgcattgccttggcccagctactagtggagcagaacttcccagccattgccatccaccgtgggatgccccaggaggagaggctttctcggtatcagcagtttaaagattttcaacgacgaattcttgtggctaccaacctatttggccgaggcatggacatcgagcgggtgaacattgcttttaattatgacatgcctgaggattctgacacctacctgcatcgggtggccagagcaggccggtttggcaccaagggcttggctatcacatttgtgtccgatgagaatgatgccaagatcctcaatgatgtgcaggatcgctttgaggtcaatattagtgagctgcctgatgagatagacatctcctcctacattgaacagacacggtagaagactcgcccattttggaatgtgaccgtctgtccttcaggagaggacaccagggtgggggtgaaggagacactactgcccccacccctgacagcccccaccccatggcttccatcttttgcatcaccaccactcctgaacccccatttctgatttgtcagaatttttttttaacaaaactaaaaatgaaacacatgtgtctgtggtatctataa

SEQ ID NO: 827 - DNA, 2433 bp, Homo sapiens
cagccgcggcccatggagcccgccggcccggcccccggccgcctcgggccgctgctctgcctgctgctcgccgcgtcctgcgcctggtcaggagtggcgggtgaggaggagctgcaggtgattcagcctgacaagtccgtatcagttgcagctggagagtcggccattctgcactgcactgtgacctccctgatccctgtggggcccatccagtggttcagaggagctggaccagcccgggaattaatctacaatcaaaaagaaggccacttcccccgggtaacaactgtttcagagtccacaaagagagaaaacatggacttttccatcagcatcagtaacatcaccccagcagatgccggcacctactactgtgtgaagttccggaaagggagccctgacacggagtttaagtctggagcaggcactgagctgtctgtgcgtgccaaaccctctgcccccgtggtatcgggccctgcggcgagggccacacctcagcacacagtgagcttcacctgcgagtcccacggcttctcacccagagacatcaccctgaaatggttcaaaaatgggaatgagctctcagacttccagaccaacgtggaccccgtaggagagagcgtgtcctacagcatccacagcacagccaaggtggtgctgacccgcgaggacgttcactctcaagtcatctgcgaggtggcccacgtcaccttgcagggggaccctcttcgtgggactgccaacttgtctgagaccatccgagttccacccaccttggaggttactcaacagcccgtgagggcagagaaccaggtgaatgtcacctgccaggtgaggaagttctacccccagagactacagctgacctggttggagaatggaaacgtgtcccggacagaaacggcctcaaccgttacagagaacaaggatggtacctacaactggatgagctggctcctggtgaatgtatctgcccacagggatgatgtgaagctcacctgccaggtggagcatgacgggcagccagcggtcagcaaaagccatgacctgaaggtctcagcccacccgaaggagcagggctcaaataccgccgctgagaacactggatctaatgaacggaacatctatattgtggtgggtgtggtgtgcaccttgctggtggccctactgatggcggccctctacctcgtccgaatcagacagaagaaagcccagggctccacttcttctacaaggttgcatgagcccgagaagaatgccagagaaataacacaggacacaaatgatatcacatatgcagacctgaacctgcccaaggggaagaagcctgctccccaggctgcggagcccaacaaccacacggagtatgccagcattcagaccagcccgcagcccgcgtcggaggacaccctcacctatgctgacctggacatggtccacctcaaccggacccccaagcagccggcccccaagcctgagccgtccttctcagagtacgccagcgtccaggtcccgaggaagtgaatgggaccgtggtttgctctagcacccatctctacgcgctttcttgtcccacagggagccgccgtgatgagcacagccaacccagttcccggagggctggggcggtgcaggctctgggacccaggggccagggtggctcttctctccccacccctccttggctctccagcacttcctgggcagccacggccccctcccccaacattgccacacacctggaggctgacgttgccaaaccagccagggaaccaacctgggaagtggccagaactgcctggggtccaagaactcttgtgcctccgtccatcaccatgtgggttttgaagaccctcgactgcctccccgatgctccgaagcctgatcttccagggtggggaggagaaaatcccacctcccctgacctccaccacctccaccaccaccaccaccaccaccaccaccactaccaccaccacccaactggggctagagtggggaagatttcccctttagatcaaactgccccttccatggaaaagctggaaaaaaactctggaacccatatccaggcttggtgaggttgctgccaacagtcctggcctcccccatccctaggcaaagagccatgagtcctggaggaggagaggacccctcccaaaggactggaagcaaaaccctctgcttccttgggtccctccaagactccctggggcccaactgtgttgctccacccggacccatctctcccttctagacctgagcttgcccctccagctagcactaagcaacatctcgctgtaagcgcctgtaaattactgtgaaatgtgaaacgtgcaatcttgaaactgaggtgttagaaaacttgatctgtggtgttttgttttgttttttttcttaaaacaacagcaacgtgaaaaaaaaaaaaaaaaa

SEQ ID NO: 828 - DNA, 3575 bp, Homo sapiens
aggattctaaaaagagcaatggttcacaaggaaacttctgcctcaggtggggagaggagtccatagatcagggaaacttatgtcttggtgaaatggaagaccatgtttctaaacacctgtcgccaggttacttgaatttccactagaggagcagaaatgccaccaatgccaagtgccccacctgtgcatccacctccagatggaggatggggttggattgtggttggagcagcttttatctccattggattttcctatgcattccccaaagctgtcaccgtattcttcaaagaaattcagcaaatattccacactacctacagtgaaatagcatggatttcatccattatgctggctgttatgtacgcaggaggtcctgtaagtagtgttttggtgaataaatacggcagccggccggtggtgatagcaggaggcttattatgctgtcttggaatggtgttggcctcctttagtagcagcgtggtacagctgtacctcactatgggattcattacaggtttaggtttagccttcaacctgcaacccgccttaaccataattggcaaatacttctataggaagcgacccatggcaaatggattggccatggcaggaagtcctgttttcttaagttcattggctcctttcaatcagtacctttttaatacttttggctggaaaggaagcttcctgattttgggaagtctacttttgaatgcctgtgtggctggttccctcatgagaccccttggacccaatcaaaccacttctaagtctaaaaataagactggcaaaacagaagatgattcaagcccaaagaaaatcaaaacgaagaaatcaacttgggaaaaagttaataagtatttagatttctccctttttaagcatagaggatttctgatatatctgtctggaaatgtcattatgttcctaggtttttttgcccccattatattcttggctccatatgctaaagaccaaggaattgatgagtactcggcagcttttctgctatctgttatggctttcgttgatatgtttgctaggccttctgtaggattaattgcaaactccaaatatattcgacctcgaattcagtacttcttcagttttgcaatcatgttcaatggagtgtgtcacctcttgtgcccactggcacaggactacacaagcctggtattatatgctgtattttttggccttggatttgggagtgttagcagtgttctctttgaaactctcatggacctcgtgggtgcaccaagattttccagtgccgtcggacttgtcacaattgtggagtgtggcccagttcttcttggccctcctcttgcaggtaaattggtggatttaactggagaatataaatacatgtacatgtcctgtggggctattgtggtagcagcaagcgtgtggctgctcattggcaatgctatcaactatagattgcttgcaaaggaaaggaaggaggaaaatgcaaggcagaagaccagagaatctgaacccttgagcaaatctaaacattcggaagatgttaacgtcaaagtttcaaatgcacagagtgtaacctcagaaagagaaactaacatttaacaagaatcacatctctgatttcagtgtttatgactttatctaggagtttgtttttcattttgtttttttaaagtattagaaaaggttttagctgaaatgaggagtcacaattaaggatggaggtgatattttcctcaatggcaaattttaaattagtttttaaaaacttacttatttgggtagttaaattttgagattatgcatagaaagaatccatgctataggtttatttccatacctgactctgggtgtggtggttaaaatactaattttaaagtcttccagtgactttcggtcttggttatatggagaattctgaatcccaaacccctggtttaagtaggtagaaggaggatgcctaatcatacaaagtgaccctttatacatttcattttttatttgatattaaagtatgagatagagttgagagacaattaattatcccctcttacacacaaacacacatactcccacatacttacccacatgtacacagagtatctggagaataaaacccaaattcaaaaaaaaaaatgataatttatttttaaggtaaaaataatccatgaagataaaagaaacatatgtctgcgtgctactttacaatgttggttttaaagataagcacatgggtaaaaatgagggtgatccttattcaaaaataacatctgactactataaaaatatttgcatatataagtttgacaaagaaaagaaaatcaatgttaaaccattaaatctgagcactgttagacttgattaatccatgcacatgattttttttgagtagggagcattagtacctggtgctagagaatagaaccctcaaataatttttagaattcttacctaatatgtaaaagtctgcatgactcttaacaatgagtcacatccattgattttacagggattttagttcgtaatccagaaagtaataatcagggattttattttaatcaggcatcaatccagattcactgttatactgaaatatcaaagtaaaatcctagttggcaggattgtaagtagaccgaattctaatttttcccaacacatagtggtaattggaggttactgttatgaatactccatctgactacgactaagagagtgaggggtggttttaatgaaccctctaagctctctcagttccttcccttccacaaaatgcaagagcaaaagcaaactacaaacaggccttgtgctcaaccactggaaatgcctcctgggataagaatggcagcacttgaaaattctgccctctactgatgagacttcctgctgcctttggacataactaagccaggaaactttaaaagccttctagaaatagaggcactgtatgacttgcaatcgtaggtatagtttataacctgatagcaaaaaacttgaaatattgcagcccagtttaattcagcactttcccattttcataactatgtgaaaacatctgggaatttgaatcactcctgaatacagaggcatattctttttaaactataaataccattttgagtgagaaagtacttttaaacaagaaagaaattgtacattatgactaaagttataaatacaatatttatatctataaatctgaagtttaacatgattaatttaaaaagtatttagtgcttgacaaagtagtgtcactcttaagatgtcaaagggaattagccattttttttattgtaataaaggcaggtgctatttttttctggtgagattgcacctggataccaggcttttgtaatagttaacattaaacatttgattcataaagttaattcactgcttaagcatgtggctcatatttaggaagctatataaaattcagtttttcatttaacatttgctcttttgcatatgaagagatatttgtatttttcaaatgttaagtaaaacaagatgtgccaatatcataggtaaataaattagggaaaatgtgggaaaaaaaaaaaaaaaaaaaaaaaaaaaaaaaaaaa

SEQ ID NO: 829 - DNA, 8148 bp, Homo sapiens
gcgaattttgggaagttccgttggggaagatggcggcggcctcgagcacccttctcttcttgccgccggggacttcagattgatccttcccgggaagagtagggactgctggtgccctgcgtcccgggatcccgagccaacttgtttcctccgttagtggtggggaagggcttatccttttgtggcggatctagcttctcctcgccttcaggatgaaagctcagggggaaaccgaggagtcagaaaagctgagtaagatgagttctctcctggaacggctccatgcaaaatttaaccaaaatagaccctggagtgaaaccattaagcttgtgcgtcaagtcatggagaagagggttgtgatgagttctggagggcatcaacatttggtcagctgtttggagacattgcagaaggctctcaaagtaacatctttaccagcaatgactgatcgtttggagtccatagcaagacagaatggactgggctctcatctcagtgccagtggcactgaatgttacatcacgtcagatatgttctatgtggaagtgcagttagatcctgcaggacagctttgtgatgtaaaagtggctcaccatggggagaatcctgtgagctgtccggagcttgtacagcagctaagggaaaaaaattttgatgaattttctaagcaccttaagggccttgttaatctgtataaccttccaggggacaacaaactgaagactaaaatgtacttggctctccaatccttagaacaagatctttctaaaatggcaattatgtactggaaagcaactaatgctggtcccttggataagattcttcatggaagtgttggctatctcacaccaaggagtgggggtcatttaatgaacctgaagtactatgtctctccttctgacctactggatgacaagactgcatctcccatcattttgcatgagaataatgtttctcgatctttgggcatgaatgcatcagtgacaattgaaggaacatctgctgtgtacaaactcccaattgcaccattaattatggggtcacatccagttgacaataaatggaccccttccttctcctcaatcaccagtgccaacagtgttgatcttcctgcctgtttcttcttgaaatttccccagccaatcccagtatctagagcatttgttcagaaactgcagaactgcacaggaattccattgtttgaaactcaaccaacttatgcacccctgtatgaactgatcactcagtttgagctatcaaaggaccctgaccccatacctttgaatcacaacatgagattttatgctgctcttcctggtcagcagcactgctatttcctcaacaaggatgctcctcttccagatggccgaagtctacagggaacccttgttagcaaaatcacctttcagcaccctggccgagttcctcttatcctaaatctgatcagacaccaagtggcctataacaccctcattggaagctgtgtcaaaagaactattctgaaagaagattctcctgggcttctccaatttgaagtgtgtcctctctcagagtctcgtttcagcgtatcttttcagcaccctgtgaatgactccctggtgtgtgtggtaatggatgtgcaggactcaacacatgtgagctgtaaactctacaaagggctgtcggatgcactgatctgcacagatgacttcattgccaaagttgttcaaagatgtatgtccatccctgtgacgatgagggctattcggaggaaagctgaaaccattcaagccgacaccccagcactgtccctcattgcagagacagttgaagacatggtgaaaaagaacctgcccccggctagcagcccagggtatggcatgaccacaggcaacaacccaatgagtggtaccactacaccaaccaacacctttccggggggtcccattaccaccttgtttaatatgagcatgagcatcaaagatcggcatgagtcggtgggccatggggaggacttcagcaaggtgtctcagaacccaattcttaccagtttgttgcaaatcacagggaacggggggtctaccattggctcgagtccgacccctcctcatcacacgccgccacctgtctcttcgatggccggcaacaccaagaaccacccgatgctcatgaaccttcttaaagataatcctgcccaggatttctcaaccctttatggaagcagccctttagaaaggcagaactcctcttccggctcaccccgcatggaaatatgctcggggagcaacaagaccaagaaaaagaagtcatcaagattaccacctgagaaaccaaagcaccagactgaagatgactttcagagggagctattttcaatggatgttgactcacagaaccctatctttgatgtcaacatgacagctgacacgctggatacgccacacatcactccagctccaagccagtgtagcactcccccaacaacttacccacaaccagtacctcacccccaacccagtattcaaaggatggtccgactatccagttcagacagcattggcccagatgtaactgacatcctttcagacattgcagaagaagcttctaaacttcccagcactagtgatgattgcccagccattggcacccctcttcgagattcttcaagctctgggcattctcagagtaccctgtttgactctgatgtctttcaaactaacaataatgaaaatccatacactgatccagctgatcttattgcagatgctgctggaagccccagtagtgactctcctaccaatcatttttttcatgatggagtagatttcaatcctgatttattgaacagccagagccaaagtggttttggagaagaatattttgatgaaagcagccaaagtggggataatgatgatttcaaaggatttgcatctcaggcactaaatactttgggggtgccaatgcttggaggtgataatggggagaccaagtttaagggcaataaccaagccgacacagttgatttcagtattatttcagtagccggcaaagctttagctcctgcagatcttatggagcatcacagtggtagtcagggtcctttactgaccactggggacttagggaaagaaaagactcaaaagagggtaaaggaaggcaatggcaccagtaatagtactctctcggggcccggattagacagcaaaccagggaagcgcagtcggaccccttctaatgatgggaaaagcaaagataagcctccaaagcggaagaaggcagacactgagggaaagtctccatctcatagttcttctaacagaccttttaccccacctaccagtacaggtggatctaaatcgccaggcagtgcaggaagatctcagactcccccaggtgttgccacaccacccattcccaaaatcactattcagattcctaagggaacagtgatggtgggcaagccttcctctcacagtcagtataccagcagtggttctgtgtcttcctcaggcagcaaaagccaccatagccattcttcctcctcttcctcatctgcttccacctcagggaagatgaaaagcagtaaatcagaaggttcatcaagttccaagttaagtagcagtatgtattctagccaggggtcttctggatctagccagtccaaaaattcatcccagtctggggggaagccaggctcctctcccataaccaagcatggactgagcagtggctctagcagcaccaagatgaaacctcaaggaaagccatcatcacttatgaatccttctttaagtaaaccaaacatatccccttctcattcaaggccacctggaggctctgacaagcttgcctctccaatgaagcctgttcctggaactcctccatcctctaaagccaagtcccctatcagttcaggttctggtggttctcatatgtctggaactagttcaagctctggcatgaagtcatcttcagggttaggatcctcaggctcgttgtcccagaaaactcccccatcatctaattcctgtacggcatcttcctcctccttttcctcaagtggctcttccatgtcatcctctcagaaccagcatgggagttctaaaggaaaatctcccagcagaaacaagaagccgtccttgacagctgtcatagataaactgaagcatggggttgtcaccagtggccctgggggtgaagacccactggacggccagatgggggtgagcacaaattcttccagccatcctatgtcctccaaacataacatgtcaggaggagagtttcagggcaagcgtgagaaaagtgataaagacaaatcaaaggtttccacctccgggagttcagtggattcttctaagaagacctcagagtcaaaaaatgtggggagcacaggtgtggcaaaaattatcatcagtaagcatgatggaggctcccctagcattaaagccaaagtgactttgcagaaacctggggaaagtagtggagaagggcttaggcctcaaatggcttcttctaaaaactatggctctccactcatcagtggttccactccaaagcatgagcgtggctctcccagccatagtaagtcaccagcatataccccccagaatctggacagtgaaagtgagtcaggctcctccatagcagagaaatcttatcagaatagtcccagctcagacgatggtatccgaccacttccagaatacagcacagagaaacataagaagcacaaaaaggaaaagaagaaagtaaaagacaaagatagggaccgagaccgggacaaagaccgagacaagaaaaaatctcatagcatcaagccagagagttggtccaaatcacccatctcttcagaccagtccttgtctatgacaagtaacacaatcttatctgcagacagaccctcaaggctcagcccagactttatgattggggaggaagatgatgatcttatggatgtggccctgattgggaattaggaaccttatttcctaaaagaaacagggccagaggaaaaaaaactattgataagtttataggcaaaccaccataaggggtgagtcagacaggtctgatttggttaagaatcctaaatggcatggctttgacatcaagctgggtgaattagaaaggcatatccagaccctattaaagaaaccacagggtttgattctggttaccaggaagtcttctttgttcctgtgccagaaagaaagttaaaatacttgcttaagaaagggaggggggtgggaggggtgtagggagagggaagggagggaaacagttttgtgggaaatattcatatatattttcttctccctttttccatttttaggccatgttttaaactcattttagtgcatgtatatgaagggctgggcagaaaatgaaaaagcaatacattccttgatgcatttgcatgaaggttgttcaactttgtttgaggtagttgtccgtttgagtcatgggcaaatgaaggactttggtcattttggacacttaagtaatgtttggtgtctgtttcttaggagtgactgggggagggaagattattttagctatttatttgtaatattttaaccctttatctgtttgtttttatacagtgtttcgttctaaatctatgaggtttagggttcaaaatgatggaaggccgaagagcaaggcttatatggtggtagggagcttatagcttgtgctaatactgtagcatcaagcccaagcaaattagtcagagcccgcctttagagttaaatataatagaaaaaccaaaatgatatttttattttaggagggtttaaatagggttcagagatcataggaatattaggagttacctctctgtggaggtattgacttgtaatctcattttcctttcaaaaaaaaaaaaaaaagctaaggtggcttgttgggatgtaaacatgttttcagatgcagtaaggtttagtgtaggacagccttcctgacccagtggcatgaaaaccattacaggattaatagttctcctacttccacaatgtgccaaaagtctgcatcccagcattttgtttgcaggagaactgatgccattcctaagagctggactcactgtttctcttcatcacaaggagaaggagtccaaactttaatcactccactgtatgctccctgagataaaacagtaaaaaatccgcagccatagttcacttaaaacaatttcaagctcacttttgaagtaatgggggcctggaatgctaggtgagcatgaagataaacccttgctactatgtagcaacccaattggacctttttggagaaataggtctgagtctggattctgggggacatcaataagagcccttcacataaaaatatagaaatccaggagactgtttcgagtgcaacagaagttctcagtatttggagggtcctctcaaaaattctgcggccttactttgatattgacacctgcactgtgccattcctgattattccattcaggatctgtatcagcgggatggggcatggtccccagcacaactcttctgggttaaaaaaaaaaagccaggtgattcctttgtgtgttatgtcgtaagtggagtgacttcatcatatatggaagaagatttctatattcagctttttctgcaggttggagtcagcatagagttggaaaatcagctttggctttctttcctgtctcatttcctctagtgttctcctttttattgtcatcagctctcaacaactctgccacttttgtgtcccaaggtaataagatgtaggaaacaaaacattgtaaagtggagcaagaaaagttatcaattaaccacatcagagtcaaatgtcttgggtgacactaaggaggatatgggcaggtgataccagagtgctttatcttgtgatgttgatacagtagcagcctctcagacattcagccaggttggatttctcatgagtttgtcacctagttttgaatcctatcccgttggtttctgcaggaaaaaaaaaaaaatttatgtggtttttaaaatttgttctgagtggggagaatcttagggggaatgtactgaatagtatcatgggctcagctcccccatgcagggccaacaaataccaaaatgagtaaactgggaagcttttctctctttctgtcttcatcccagatcaaagaatcccgagttaggatctggatgaaggataagcccctgaattgtcgatgggctcacccccacactgacccagcatctgaacttgcttaacagggagccggggctaaactgcttcaccctgcctgagaaccagggagcactgcatttctccacagggtggaggagaagaggcagaataaaccaagcctgggacacctccctcctgtctaggtgtactcattcttctgtttcaaaagaaggcaaggacatgaagtcaacttctacctatcttctgctgctggtgtcttatgtattctcagtttgacctgattcctcttctgtcttttgacttaacattaggggttcttggtcataacctgctctgatgtacataaagatttcaggttcaatatcaatgtgtcttaaaacagaagtattttagcgggtggggggtggggtggtggggacaaacaacgcaggatataattgccaaaaccaggcttgaggttggtgactcttgaaagattttctttcttcaggcctagatcagaaaattaagtgcagcaatatcatgaattctcagaagccctttcagggagccagtgagtcatacagtatccacagttgagtcacttaaagatgtcagtatacgaaacattattcacaatccttgggcaatctcatttttttttccttctcccctcctcccctgccccccatacatttctatccttgagttagttttggaggggcaggaagtacttaacatctcagaagctagattgggaaacatgctcagctataagaactgagctttaaattttgagtttaaaaatgtacatcaggagcagctggggagggtctttttttaaaaaaatctttcaaatttggttttctgtgcatatggccgttttgtaaatactttggggtttttcatttttttgaaagtagatgaaatctgttgtgggatttttttcccgaaacattacaaaataacctgtttatttacatgcaaataaacttctttgataaaaagtaa

SEQ ID NO: 830 - DNA, 2791 bp, Homo sapiens
tgtgtgtgtgtatgtgtgctggtgaatgtgagtacagggaagcagcggccgccatttcagggagcttgtcgacgctgtcgcaggggtggatcctgagctgccgaagccgccgtcctgctctcccgcgtgggcttctctaattccattgttttttttagattctctcgggcctagccgtccttggaacccgatattcgggctgggcggttccgcggcctgggcctaggggcttaacagtagcaacagaagcggcggcggcggcagcagcagcagcagcagcagcaatctcttcccgaacacgagcaccacaggcgcccgaaggccggaacaggcgtttagagaaaatggcagacgatattgatattgaagcaatgcttgaggctccttacaagaaggatgagaacaagttgagcagtgccaacggccatgaagaacgtagcaaaaagaggaaaaaaagcaagagcagaagtcgtagtcatgaacgaaagagaagcaaaagtaaggaacggaagcgaagtagagacagagaaaggaaaaagagcaaaagccgtgaaagaaagcgaagtagaagcaaagagaggcgacggagccgctcaagaagtcgagatcgaagatttagaggccgctacagaagtccttactccggaccaaaatttaacagtgccatccgaggaaagattgggttgcctcatagcatcaaattaagcagacgacgttcccgaagcaaaagtccattcagaaaagacaagagccctgtgagagaacctattgataatttaactcctgaggaaagagatgcaaggacagtcttctgtatgcagctggcggcaagaattcgaccaagggatttggaagagtttttctctacagtaggaaaggttcgagatgtgaggatgatttctgacagaaattcaagacgttccaaaggaattgcttatgtggagttcgtcgatgttagctcagtgcctctagcaataggattaactggccaacgagttttaggcgtgccaatcatagtacaggcatcacaggcagaaaaaaacagagctgcagcaatggcaaacaatttacaaaagggaagtgctggacctatgaggctttatgtgggctcattacacttcaacataactgaagatatgcttcgtgggatctttgagccttttggaagaattgaaagtatccagctgatgatggacagtgaaactggtcgatccaagggatatggatttattacattttctgactcagaatgtgccaaaaaggctttggaacaacttaatggatttgaactagcaggaagaccaatgaaagttggtcatgttactgaacgtactgatgcttcgagtgctagttcatttttggacagtgatgaactggaaaggactggaattgatttgggaacaactggtcgtcttcagttaatggcaagacttgcagagggtacaggtttgcagattccgccagcagcacagcaagctctacagatgagtggctctttggcatttggtgctgtggcagatttgcaaacaagactttcccagcagactgaagcttcagctttagctgcagctgcctctgttcagccacttgcaacacaatgtttccaactctctaacatgtttaaccctcaaacagaagaagaagttggatgggataccgagattaaggatgatgtgattgaagaatgtaataaacatggaggagttattcatatttatgttgacaaaaattcagctcagggcaatgtgtatgtgaagtgcccatcaattgctgcagctattgctgctgtcaatgcattgcatggcaggtggtttgctggtaaaatgataacagcagcatatgtacctcttccaacttaccacaacctgtttcctgattctatgacagcaacacagctactggttccaagtagacgatgaaggaagatatagtcccttatgtatatagctttttttctttcttgagaattcatcttgagttatcttttatttagataaaaataaagaggcaaggatctactgtcatttgtatgcaatttcctgttaccttgaaaaaataaaaatgttaacaggaatgcagtgtgctcattctccctaaatagtaaatcccactgtatacaaaactgttctcttgttctgccttttaaaatgttcatgtagaaaattaatgaactataggaatagctctaggagaacaaatgtgctttctgtaaaaaggcagaccagggatgtaatgtttttaatgtttcagaagcctaactttttacacagtggttacatttcacatttcactaatgttgatatttggctgatggttgagcagtttctgaaatacacatttagtgtatggaaatacaagacagctaaagggctgtttggttagcatctcatcttgcattctgatcaattggcaagaaagggagatttcaaaattatatttcttgatggtatcttttcaattaatgtatctgtaaaagtttctttgtaaatactatgtgttctggtgtgtcttaaaattccaaacaaaatgatccctgcatttcctgaagatgtttaaacgtgagagtctggtaggcaaagcagtctgagaaagaaataggaaatgcagaaataggttttgtctggttgcatataatctttgctctttttaagctctgtgagctctgaaatatatttttgggttacttcagtgtgtttgacaagacagcttgatatttctatcaaacaaatgactttcatattgcaacaatctttgtaagaaccactcaaataaaagtctcttaaaaaggcca

SEQ ID NO: 831 - DNA, 1715 bp, Homo sapiens
gaaccaaccggttgcttgctgtcccagcggcgccccctcatcaccgtcgccatgcccggaggtctgcttctcggggacgtggctcccaactttgaggccaataccaccgtcggccgcatccgtttccacgactttctgggagactcatggggcattctcttctcccaccctcgggactttaccccagtgtgcaccacagagcttggcagagctgcaaagctggcaccagaatttgccaagaggaatgttaagttgattgccctttcaatagacagtgttgaggaccatcttgcctggagcaaggatatcaatgcttacaattgtgaagagcccacagaaaagttaccttttcccatcatcgatgataggaatcgggagcttgccatcctgttgggcatgctggatccagcagagaaggatgaaaagggcatgcctgtgacagctcgtgtggtgtttgtttttggtcctgataagaagctgaagctgtctatcctctacccagctaccactggcaggaactttgatgagattctcagggtagtcatctctctccagctgacagcagaaaaaagggttgccaccccagttgattggaaggatggggatagtgtgatggtccttccaaccatccctgaagaagaagccaaaaaacttttcccgaaaggagtcttcaccaaagagctcccatctggcaagaaatacctccgctacacaccccagccttaagtctcttggagaagctggtgctgtgagccagaggatgtcagctgccaattgtgttttcctgcagcaattccataaacacatcctggtgtcatcacagccaaggtttttaggttgctataccaatggcttattaaatgaaaatggcactaaaagtttcttgagattctttatactctctgccttcagcaatcaattccattcatacatcagcactctgctggttctgtttgaaatatgttctgtatttaaaactcaaatcttgttggatctctgcagggcttgtgaccaatgaagtcatatttgttgatggttgacaaagcttgcttcactccatcagagaatgactatcaatttttttttaactgtcctatcacgtcctctcctgtcacccattttgaagagtggcagaacttgaagttcaacttcctctgtaaatatccaagtataaagcccaggaacttctagaataacccagatgcgctttaattttttttaatatgttttgatcacagaacttctagaataacccagatgctctttcatattcttttaatacatcttgatcacagctgggggaaaaaaagctttttaattctataccttcctagtagataagtgaagagcagggaaagagacctttaaatattttgctataaaaaaatttgtgataagtttctatcaaaatggggagattgcagaaaaggcttcccttggctcccaaggaggtgtagcaggtgtgagcaatattagtgccatgtgcctttcacacagggtttgcatttatcagtctgttttccgatgatgtgtacatgaaagagtacaccatgtgaagagaagagagaatgattgaaaatgttttagtatagaactcttcttgcagtgggttgctattttctagattttactttttagggaacaaaataaaatcctttgttaaaactgggaaaaaaaaaaaaaaaaaaaaaaaaaaaaaaaaaaaaaaaaaaaaa

SEQ ID NO: 832 - DNA, 3621 bp, Homo sapiens
gagaaccggatgaggcggcgaccgtgaggccgagccgggagcgggcgtcttgccgaggcccgggcgggcggggagcaacggctacagacgccgcggggccaggtcgttgagggtcggcggcgggcgaggagcgcagggcgctcgggccgggggccgccggcgccatgggcaaccgcgggatggaagagctgatcccgctggtcaacaaactgcaggacgccttcagctccatcggccagagctgccacctggacctgccgcagatcgctgtagtgggcggccagagcgccggcaagagctcggtgctggagaacttcgtgggccgggacttccttccccgcggttcaggaatcgtcacccggcggcctctcattctgcagctcatcttctcaaaaacagaacatgccgagtttttgcactgcaagtccaaaaagtttacagactttgatgaagtccggcaggagattgaagcagagaccgacagggtcacggggaccaacaaaggcatctccccagtgcccatcaaccttcgagtctactcgccacacgtgttgaacttgaccctcatcgacctcccgggtatcaccaaggtgcctgtgggcgaccagcctccagacatcgagtaccagatcaaggacatgatcctgcagttcatcagccgggagagcagcctcattctggctgtcacgcccgccaacatggacctggccaactccgacgccctcaagctggccaaggaagtcgatccccaaggcctacggaccatcggtgtcatcaccaagcttgacctgatggacgagggcaccgacgccagggacgtcttggagaacaagttgctcccgttgagaagaggctacattggcgtggtgaaccgcagccagaaggatattgagggcaagaaggacatccgtgcagcactggcagctgagaggaagttcttcctctcccacccggcctaccggcacatggccgaccgcatgggcacgccacatctgcagaagacgctgaatcagcaactgaccaaccacatccgggagtcgctgccggccctacgtagcaaactacagagccagctgctgtccctggagaaggaggtggaggagtacaagaactttcggcccgacgaccccacccgcaaaaccaaagccctgctgcagatggtccagcagtttggggtggattttgagaagaggatcgagggctcaggagatcaggtggacactctggagctctccgggggcgcccgaatcaatcgcatcttccacgagcggttcccatttgagctggtgaagatggagtttgacgagaaggacttacgacgggagatcagctatgccattaagaacatccatggagtcaggaccgggcttttcaccccggacttggcattcgaggccattgtgaaaaagcaggtcgtcaagctgaaagagccctgtctgaaatgtgtcgacctggttatccaggagctaatcaatacagttaggcagtgtaccagtaagctcagttcctacccccggttgcgagaggagacagagcgaatcgtcaccacttacatccgggaacgggaggggagaacgaaggaccagattcttctgctgatcgacattgagcagtcctacatcaacacgaaccatgaggacttcatcgggtttgccaatgcccagcagaggagcacgcagctgaacaagaagagagccatccccaatcaggtgatccgcaggggctggctgaccatcaacaacatcagcctgatgaaaggcggctccaaggagtactggtttgtgctgactgccgagtcactgtcctggtacaaggatgaggaggagaaagagaagaagtacatgctgcctctggacaacctcaagatccgtgatgtggagaagggcttcatgtccaacaagcacgtcttcgccatcttcaacacggagcagagaaacgtctacaaggacctgcggcagatcgagctggcctgtgactcccaggaagacgtggacagctggaaggcctcgttcctccgagctggcgtctaccccgagaaggaccaggcagaaaacgaggatggggcccaggagaacaccttctccatggacccccaactggagcggcaggtggagaccattcgcaacctggtggactcatacgtggccatcatcaacaagtccatccgcgacctcatgccaaagaccatcatgcacctcatgatcaacaatacgaaggccttcatccaccacgagctgctggcctacctatactcctcggcagaccagagcagcctcatggaggagtcggctgaccaggcacagcggcgggacgacatgctgcgcatgtaccatgccctcaaggaggcgctcaacatcatcggtgacatcagcaccagcactgtgtccacgcctgtacccccgcctgtcgatgacacctggctccagagcgccagcagccacagccccactccacagcgccgaccggtgtccagcatacacccccctggccggcccccagcagtgaggggccccactccagggccccccctgattcctgttcccgtgggggcagcagcctccttctcggcgcccccaatcccatcccggcctggaccccagagcgtgtttgccaacagtgacctcttcccagccccgcctcagatcccatctcggccagttcggatccccccagggattcccccaggagtgcccagcagaagaccccctgctgcgcccagccggcccaccattatccgcccagccgagccatccctgctcgactaggcctcgaggggggcgtgctctcgggggggcctcacgcacccgcggcgcaggagcttcagtggtctggggccctccgccgcccctatgctgggaccaggctcccagtgggcagccctggcctcttccttaacgctggccccggtccagggccggcccctgtgcctggctggacaccgcactgcgcaaaggggccctggagctccaggcagggggcgctggggtgttgcactttgggggatggagtctcagggtggcagaggggggaccagaacccttgacaccatcctgaatgaggggtccagcctgggggggactctaccaaggtcttcttgggctgggaaagcccatgtagggcaggccttctataagtgcgggcaccaagggcgcctacatccccaggccttgctggggtgcaggggtatatcaacttcccattagcaggagctccccagcggcaagcctggcccagtgggctcggtagtgcccagctggcaggcctgaggtgtacatagtccttcccggccatattaaccacacagcctgagcctggcccagcctcggctgccagaggtgcctttgctaggcccggagccgttggcccgggccggccttgccctattcctctcctcctcctcctcctgggtcccccagggtggctgggcttgggctatgtgggtggtggtggcggggggtcttgggggcctctcagctcccgcccatgcctccctgatgggtgggcccagggcggcctctctctgaggagacctcacccactcctcgctcagtttgaccactgtaagtgcctgcactctgtattctattaataaactaaaataaagggaagacgctgctggtg

SEQ ID NO: 833 - DNA, 6564 bp, Homo sapiens
ccaggcggcgttgcggccccggccccggctccctgcgccgccgccgccgccgccgccagcgctagcgccagcagccgggcccgatcacccgccgcccggtgcccgccgccgcccgcgccagcaaccgggcccgatcacccgccgcccggtgcccgccgccgcccgcgccaccggcatggcgctccggggcttctgcagcgccgatggctccgacccgctctgggactggaatgtcacgtggaataccagcaaccccgacttcaccaagtgctttcagaacacggtcctcgtgtgggtgccttgtttttacctctgggcctgtttccccttctacttcctctatctctcccgacatgaccgaggctacattcagatgacacctctcaacaaaaccaaaactgccttgggatttttgctgtggatcgtctgctgggcagacctcttctactctttctgggaaagaagtcggggcatattcctggccccagtgtttctggtcagcccaactctcttgggcatcaccatgctgcttgctacctttttaattcagctggagaggaggaagggagttcagtcttcagggatcatgctcactttctggctggtagccctagtgtgtgccctagccatcctgagatccaaaattatgacagccttaaaagaggatgcccaggtggacctgtttcgtgacatcactttctacgtctacttttccctcttactcattcagctcgtcttgtcctgtttctcagatcgctcacccctgttctcggaaaccatccacgaccctaatccctgcccagagtccagcgcttccttcctgtcgaggatcaccttctggtggatcacagggttgattgtccggggctaccgccagcccctggagggcagtgacctctggtccttaaacaaggaggacacgtcggaacaagtcgtgcctgttttggtaaagaactggaagaaggaatgcgccaagactaggaagcagccggtgaaggttgtgtactcctccaaggatcctgcccagccgaaagagagttccaaggtggatgcgaatgaggaggtggaggctttgatcgtcaagtccccacagaaggagtggaacccctctctgtttaaggtgttatacaagacctttgggccctacttcctcatgagcttcttcttcaaggccatccacgacctgatgatgttttccgggccgcagatcttaaagttgctcatcaagttcgtgaatgacacgaaggccccagactggcagggctacttctacaccgtgctgctgtttgtcactgcctgcctgcagaccctcgtgctgcaccagtacttccacatctgcttcgtcagtggcatgaggatcaagaccgctgtcattggggctgtctatcggaaggccctggtgatcaccaattcagccagaaaatcctccacggtcggggagattgtcaacctcatgtctgtggacgctcagaggttcatggacttggccacgtacattaacatgatctggtcagcccccctgcaagtcatccttgctctctacctcctgtggctgaatctgggcccttccgtcctggctggagtggcggtgatggtcctcatggtgcccgtcaatgctgtgatggcgatgaagaccaagacgtatcaggtggcccacatgaagagcaaagacaatcggatcaagctgatgaacgaaattctcaatgggatcaaagtgctaaagctttatgcctgggagctggcattcaaggacaaggtgctggccatcaggcaggaggagctgaaggtgctgaagaagtctgcctacctgtcagccgtgggcaccttcacctgggtctgcacgccctttctggtggccttgtgcacatttgccgtctacgtgaccattgacgagaacaacatcctggatgcccagacagccttcgtgtctttggccttgttcaacatcctccggtttcccctgaacattctccccatggtcatcagcagcatcgtgcaggcgagtgtctccctcaaacgcctgaggatctttctctcccatgaggagctggaacctgacagcatcgagcgacggcctgtcaaagacggcgggggcacgaacagcatcaccgtgaggaatgccacattcacctgggccaggagcgaccctcccacactgaatggcatcaccttctccatccccgaaggtgctttggtggccgtggtgggccaggtgggctgcggaaagtcgtccctgctctcagccctcttggctgagatggacaaagtggaggggcacgtggctatcaagggctccgtggcctatgtgccacagcaggcctggattcagaatgattctctccgagaaaacatcctttttggatgtcagctggaggaaccatattacaggtccgtgatacaggcctgtgccctcctcccagacctggaaatcctgcccagtggggatcggacagagattggcgagaagggcgtgaacctgtctgggggccagaagcagcgcgtgagcctggcccgggccgtgtactccaacgctgacatttacctcttcgatgatcccctctcagcagtggatgcccatgtgggaaaacacatctttgaaaatgtgattggccccaaggggatgctgaagaacaagacgcggatcttggtcacgcacagcatgagctacttgccgcaggtggacgtcatcatcgtcatgagtggcggcaagatctctgagatgggctcctaccaggagctgctggctcgagacggcgccttcgctgagttcctgcgtacctatgccagcacagagcaggagcaggatgcagaggagaacggggtcacgggcgtcagcggtccagggaaggaagcaaagcaaatggagaatggcatgctggtgacggacagtgcagggaagcaactgcagagacagctcagcagctcctcctcctatagtggggacatcagcaggcaccacaacagcaccgcagaactgcagaaagctgaggccaagaaggaggagacctggaagctgatggaggctgacaaggcgcagacagggcaggtcaagctttccgtgtactgggactacatgaaggccatcggactcttcatctccttcctcagcatcttccttttcatgtgtaaccatgtgtccgcgctggcttccaactattggctcagcctctggactgatgaccccatcgtcaacgggactcaggagcacacgaaagtccggctgagcgtctatggagccctgggcatttcacaagggatcgccgtgtttggctactccatggccgtgtccatcggggggatcttggcttcccgctgtctgcacgtggacctgctgcacagcatcctgcggtcacccatgagcttctttgagcggacccccagtgggaacctggtgaaccgcttctccaaggagctggacacagtggactccatgatcccggaggtcatcaagatgttcatgggctccctgttcaacgtcattggtgcctgcatcgttatcctgctggccacgcccatcgccgccatcatcatcccgccccttggcctcatctacttcttcgtccagaggttctacgtggcttcctcccggcagctgaagcgcctcgagtcggtcagccgctccccggtctattcccatttcaacgagaccttgctgggggtcagcgtcattcgagccttcgaggagcaggagcgcttcatccaccagagtgacctgaaggtggacgagaaccagaaggcctattaccccagcatcgtggccaacaggtggctggccgtgcggctggagtgtgtgggcaactgcatcgttctgtttgctgccctgtttgcggtgatctccaggcacagcctcagtgctggcttggtgggcctctcagtgtcttactcattgcaggtcaccacgtacttgaactggctggttcggatgtcatctgaaatggaaaccaacatcgtggccgtggagaggctcaaggagtattcagagactgagaaggaggcgccctggcaaatccaggagacagctccgcccagcagctggccccaggtgggccgagtggaattccggaactactgcctgcgctaccgagaggacctggacttcgttctcaggcacatcaatgtcacgatcaatgggggagaaaaggtcggcatcgtggggcggacgggagctgggaagtcgtccctgaccctgggcttatttcggatcaacgagtctgccgaaggagagatcatcatcgatggcatcaacatcgccaagatcggcctgcacgacctccgcttcaagatcaccatcatcccccaggaccctgttttgttttcgggttccctccgaatgaacctggacccattcagccagtactcggatgaagaagtctggacgtccctggagctggcccacctgaaggacttcgtgtcagcccttcctgacaagctagaccatgaatgtgcagaaggcggggagaacctcagtgtcgggcagcgccagcttgtgtgcctagcccgggccctgctgaggaagacgaagatccttgtgttggatgaggccacggcagccgtggacctggaaacggacgacctcatccagtccaccatccggacacagttcgaggactgcaccgtcctcaccatcgcccaccggctcaacaccatcatggactacacaagggtgatcgtcttggacaaaggagaaatccaggagtacggcgccccatcggacctcctgcagcagagaggtcttttctacagcatggccaaagacgccggcttggtgtgagccccagagctggcatatctggtcagaactgcagggcctatatgccagcgcccagggaggagtcagtacccctggtaaaccaagcctcccacactgaaaccaaaacataaaaaccaaacccagacaaccaaaacatattcaaagcagcagccaccgccatccggtcccctgcctggaactggctgtgaagacccaggagagacagagatgcgaaccacccaaaacacgcacaccctgcccctggtgccctgagacagacacacagcctcacgcccccaggaatgcaagtggtttcctggtgcttcccacggaggagttttggcagccagacttctggaggaattggttgtatagaagatcctagtgaccaaattcagcctactgcctcggatctctccagccgaagtctgtggactgcaagtctttgagatgcttctggctcccatcacctctaacatccttgtctgggtctaccaggaacgcttcatttccttggggctgcagttttgtggttgaggggcctggagaaaatcattttctccccttggcagtgtcccagggccctggatggtcctcttaccaacatctggtcttccaggcactcaaaagctgggaaccagcatctcagcgccagctctaccagttctcgttttgggccagaggcagcctctgcactcccacgcctgtcctcctggaagggacctggttggactaacggctaacctggacctggaactgtagggccaggggattgtctcagggccgacgttccacctggggcttccctccccacccaccccgactccaggctttcccttttttcttttgttcaacattgtaagaacaatcaatgctgttattactgttcccaccatgattgatgtggggtaaatattaaggagatggcctcatgggaatttgaccttgactagaaatagagactgagagtgagcaaccagctggaaggtactatgccagtcctagcagaaaaatgtgttaggggcctggcccaaagcagtgttggttgcttacagtgttgattgattttgttcttttttcttaccacctcttttctttccctctcatggtacctgctcatggttatgaagctttcaaagtaaagaacacgaaatacctcccaagtattaccagtgggtaccaaaaaaatgtccccttgagtcttttccttgtttttagatgttaattctctcccttggcatccggttagccccccagggggggcagcattgtggagaacttgatatttagttactgatgctcttccaggacacgaaaagaacccatctttgaatatcaatgattttttttttttaagtactgttccggggagaaaaacagtctcaaaacttgaacttcttgggaatagaagtgttgggctgagaagtaacattcccaggaaatagtgagaagctcgccctgtgtttgaaaccgtgttggtctctgtgttcctggaagaaaacagggaagcagcatcttttaaagcctgttctttaaggtgtctcgttagagcccaaagtggaatccggaaggcagccagagctgaggctgccccaagactcagacttgctaagaattacgccgccgacttcaaacccagagagcatctttcttttaggcgaaaacgcatatatttattttttgtaagttataccattctttcacattagataaactaagttttgggggatccttttgtaatgacttacactggaaatgcgaacatttgcagtaaaaaaatatatatatatctatatattttatttctttctaaa

SEQ ID NO: 834 - DNA, 847 bp, Homo sapiens
acagcgagcggagccgcggtccggacggcagcgcgtgccccgagctctccgcctccccccgcccgccagccgaggcagctcgagcccagtccgcggccccagcagcagcgccgagagcagccccagtagcagcgccatggccgggtggaacgcctacatcgacaacctcatggcggacgggacctgtcaggacgcggccatcgtgggctacaaggactcgccctccgtctgggccgccgtccccgggaaaacgttcgtcaacatcacgccagctgaggtgggtgtcctggttggcaaagaccggtcaagtttttacgtgaatgggctgacacttgggggccagaaatgttcggtgatccgggactcactgctgcaggatggggaatttagcatggatcttcgtaccaagagcaccggtggggcccccaccttcaatgtcactgtcaccaagactgacaagacgctagtcctgctgatgggcaaagaaggtgtccacggtggtttgatcaacaagaaatgttatgaaatggcctcccaccttcggcgttcccagtactgacctcgtctgtcccttccccttcaccgctccccacagctttgcacccctttcctccccatacacacacaaaccattttattttttgggccattaccccataccccttattgctgccaaaaccacatgggctgggggccagggctggatggacagacacctccccctacccatatccctcccgtgtgtggttggaaaacttttgttttttggggttttttttttctgaataaaaaagattctactaacaaaaaaaaaaaaaaaaaaaaaaaaaaaaaaaaaaaaaaaaaa

SEQ ID NO: 835 - DNA, 633 bp, Homo sapiens
cggctgagaggcagcgaactcatctttgccagtacaggagcttgtgccgtggcccacagcccacagcccacagccatgggctgggacctgacggtgaagatgctggcgggcaacgaattccaggtgtccctgagcagctccatgtcggtgtcagagctgaaggcgcagatcacccagaagattggcgtgcacgccttccagcagcgtctggctgtccacccgagcggtgtggcgctgcaggacagggtcccccttgccagccagggcctgggccctggcagcacggtcctgctggtggtggacaaatgcgacgaacctctgagcatcctggtgaggaataacaagggccgcagcagcacctacgaggtccggctgacgcagaccgtggcccacctgaagcagcaagtgagcgggctggagggtgtgcaggacgacctgttctggctgaccttcgaggggaagcccctggaggaccagctcccgctgggggagtacggcctcaagcccctgagcaccgtgttcatgaatctgcgcctgcggggaggcggcacagagcctggcgggcggagctaagggcctccaccagcatccgagcaggatcaagggccggaaataaaggctgttgtaagagaa

SEQ ID NO: 836 - DNA, 2277 bp, Homo sapiens
ggcggggcgcgcgcggcggccgttgagggaccgttggggcgggaggcggcggcggcggcggcgcgcgctgcgggcagtgagtgtggaggcgcggacgcgcggcggagctggaactgctgcagctgctgccgccgccggaggaaccttgatccccgtgctccggacaccccgggcctcgccatggctgaccagctgactgaggagcagattgcagagttcaaggaggccttctccctctttgacaaggatggagatggcactatcaccaccaaggagttggggacagtgatgagatccctgggacagaaccccactgaagcagagctgcaggatatgatcaatgaggtggatgcagatgggaacgggaccattgacttcccggagttcctgaccatgatggccagaaagatgaaggacacagacagtgaggaggagatccgagaggcgttccgtgtctttgacaaggatgggaatggctacatcagcgccgcagagctgcgtcacgtaatgacgaacctgggggagaagctgaccgatgaggaggtggatgagatgatcagggaggctgacatcgatggagatggccaggtcaattatgaagagtttgtacagatgatgactgcaaagtgaaggccccccgggcagctggcgatgcccgttctcttgatctctctcttctcgcgcgcgcactctctcttcaacactcccctgcgtaccccggttctagcaaacaccaattgattgactgagaatctgataaagcaacaaaagatttgtcccaagctgcatgattgctctttctccttcttccctgagtctctctccatgcccctcatctcttccttttgccctcgcctcttccatccatgtcttccaaggcctgatgcattcataagttgaagccctccccagatccccttggggagcctctgccctcctccagcccggatggctctcctccattttggtttgtttcctcttgtttgtcatcttattttgggtgctggggtggctgccagccctgtcccgggacctgctgggagggacaagaggccctcccccaggcagaagagcatgccctttgccgttgcatgcaaccagccctgtgattccacgtgcagatcccagcagcctgttggggcaggggtgccaagagaggcattccagaaggactgagggggcgttgaggaattgtggcgttgactggatgtggcccaggagggggtcgagggggccaactcacagaaggggactgacagtgggcaacactcacatcccactggctgctgttctgaaaccatctgattggctttctgaggtttggctgggtggggactgctcatttggccactctgcaaattggacttgcccgcgttcctgaagcgctctcgagctgttctgtaaatacctggtgctaacatcccatgccgctccctcctcacgatgcacccaccgccctgagggcccgtcctaggaatggatgtggggatggtcgctttgtaatgtgctggttctctttttttttctttcccctctatggcccttaagactttcattttgttcagaaccatgctgggctagctaaagggtggggagagggaagatgggccccaccacgctctcaagagaacgcacctgcaataaaacagtcttgtcggccagctgcccaggggacggcagctacagcagcctctgcgtcctggtccgccagcacctcccgcttctccgtggtgacttggcgccgcttcctcacatctgtgctccgtgccctcttccctgcctcttccctcgcccacctgcctgcccccatactcccccagcggagagcatgatccgtgcccttgcttctgactttcgcctctgggacaagtaagtcaatgtgggcagttcagtcgtctgggttttttccccttttctgttcatttcatctggctccccccaccacctccccaccccaccccccaccccctgcttcccctcactgcccaggtcgatcaagtggcttttcctgggacctgcccagctttgagaatctcttctcatccaccctctggcacccagcctctgagggaaggagggatggggcatagtgggagacccagccaagagctgagggtaagggcaggtaggcgtgaggctgtggacattttcggaatgttttggttttgttttttttaaaccgggcaatattgtgttcagttcaagctgtgaagaaaaatatatatcaatgttttccaataaaatacagtgactacctgaaaaaaaaaaaaaaaaaaa

SEQ ID NO: 837 - DNA, 1269 bp, Homo sapiens
aggtgacagcctcgcttggacgcagagcccggcccgacgccgccatgagcgccgcgctcttcagcctggacggcccggcgcgcggcgcgccctggcctgcggagcctgcgcccttctacgaaccgggccgggcgggcaagccgggccgcggggccgagccaggggccctaggcgagccaggcgccgccgcccccgccatgtacgacgacgagagcgccatcgacttcagcgcctacatcgactccatggccgccgtgcccaccctggagctgtgccacgacgagctcttcgccgacctcttcaacagcaatcacaaggcgggcggcgcggggcccctggagcttcttcccggcggccccgcgcgccccttgggcccgggccctgccgctccccgcctgctcaagcgcgagcccgactggggcgacggcgacgcgcccggctcgctgttgcccgcgcaggtggccgcgtgcgcacagaccgtggtgagcttggcggccgcagggcagcccaccccgcccacgtcgccggagccgccgcgcagcagccccaggcagacccccgcgcccggccccgcccgggagaagagcgccggcaagaggggcccggaccgcggcagccccgagtaccggcagcggcgcgagcgcaacaacatcgccgtgcgcaagagccgcgacaaggccaagcggcgcaaccaggagatgcagcagaagttggtggagctgtcggctgagaacgagaagctgcaccagcgcgtggagcagctcacgcgggacctggccggcctccggcagttcttcaagcagctgcccagcccgcccttcctgccggccgccgggacagcagactgccggtaacgcgcggccggggcgggagagactcagcaacgacccatacctcagacccgacggcccggagcggagcgcgccctgccctggcgcagccagagccgccgggtgcccgctgcagtttcttgggacataggagcgcaaagaagctacagcctggacttaccaccactaaactgcgagagaagctaaacgtgtttattttcccttaaattatttttgtaatggtagctttttctacatcttactcctgttgatgcagctaaggtacatttgtaaaaagaaaaaaaaccagacttttcagacaaaccctttgtattgtagataagaggaaaagactgagcatgctcacttttttatattaatttttacagtatttgtaagaataaagcagcatttgaaatcgaaaaaaaaaaaaaaaaaa

SEQ ID NO: 838 - DNA, 3985 bp, Homo sapiens
gaagggcagacagagtgtccaaaagcgtgagagcacgaagtgaggagaaggtggagaagagagaagaggaagaggaagaggaagagaggaagcggagggaactgcggccaggctaaaaggggaagaagaggatcagcccaaggaggaggaagaggaaaacaagacaaacagccagtgcagaggagaggaacgtgtgtccagtgtcccgatccctgcggagctagtagctgagagctctgtgccctgggcaccttgcagccctgcacctgcctgccacttccccaccgaggccatgggcccaggagttctgctgctcctgctggtggccacagcttggcatggtcagggaatcccagtgatagagcccagtgtccctgagctggtcgtgaagccaggagcaacggtgaccttgcgatgtgtgggcaatggcagcgtggaatgggatggccccccatcacctcactggaccctgtactctgatggctccagcagcatcctcagcaccaacaacgctaccttccaaaacacggggacctatcgctgcactgagcctggagaccccctgggaggcagcgccgccatccacctctatgtcaaagaccctgcccggccctggaacgtgctagcacaggaggtggtcgtgttcgaggaccaggacgcactactgccctgtctgctcacagacccggtgctggaagcaggcgtctcgctggtgcgtgtgcgtggccggcccctcatgcgccacaccaactactccttctcgccctggcatggcttcaccatccacagggccaagttcattcagagccaggactatcaatgcagtgccctgatgggtggcaggaaggtgatgtccatcagcatccggctgaaagtgcagaaagtcatcccagggcccccagccttgacactggtgcctgcagagctggtgcggattcgaggggaggctgcccagatcgtgtgctcagccagcagcgttgatgttaactttgatgtcttcctccaacacaacaacaccaagctcgcaatccctcaacaatctgactttcataataaccgttaccaaaaagtcctgaccctcaacctcgatcaagtagatttccaacatgccggcaactactcctgcgtggccagcaacgtgcagggcaagcactccacctccatgttcttccgggtggtagagagtgcctacttgaacttgagctctgagcagaacctcatccaggaggtgaccgtgggggaggggctcaacctcaaagtcatggtggaggcctacccaggcctgcaaggttttaactggacctacctgggacccttttctgaccaccagcctgagcccaagcttgctaatgctaccaccaaggacacatacaggcacaccttcaccctctctctgccccgcctgaagccctctgaggctggccgctactccttcctggccagaaacccaggaggctggagagctctgacgtttgagctcacccttcgataccccccagaggtaagcgtcatatggacattcatcaacggctctggcacccttttgtgtgctgcctctgggtacccccagcccaacgtgacatggctgcagtgcagtggccacactgataggtgtgatgaggcccaagtgctgcaggtctgggatgacccataccctgaggtcctgagccaggagcccttccacaaggtgacggtgcagagcctgctgactgttgagaccttagagcacaaccaaacctacgagtgcagggcccacaacagcgtggggagtggctcctgggccttcatacccatctctgcaggagcccacacgcatcccccggatgagttcctcttcacaccagtggtggtcgcctgcatgtccatcatggccttgctgctgctgctgctcctgctgctattgtacaagtataagcagaagcccaagtaccaggtccgctggaagatcatcgagagctatgagggcaacagttatactttcatcgaccccacgcagctgccttacaacgagaagtgggagttcccccggaacaacctgcagtttggtaagaccctcggagctggagcctttgggaaggtggtggaggccacggcctttggtctgggcaaggaggatgctgtcctgaaggtggctgtgaagatgctgaagtccacggcccatgctgatgagaaggaggccctcatgtccgagctgaagatcatgagccacctgggccagcacgagaacatcgtcaaccttctgggagcctgtacccatggaggccctgtactggtcatcacggagtactgttgctatggcgacctgctcaactttctgcgaaggaaggctgaggccatgctgggacccagcctgagccccggccaggaccccgagggaggcgtcgactataagaacatccacctcgagaagaaatatgtccgcagggacagtggcttctccagccagggtgtggacacctatgtggagatgaggcctgtctccacttcttcaaatgactccttctctgagcaagacctggacaaggaggatggacggcccctggagctccgggacctgcttcacttctccagccaagtagcccagggcatggccttcctcgcttccaagaattgcatccaccgggacgtggcagcgcgtaacgtgctgttgaccaatggtcatgtggccaagattggggacttcgggctggctagggacatcatgaatgactccaactacattgtcaagggcaatgcccgcctgcctgtgaagtggatggccccagagagcatctttgactgtgtctacacggttcagagcgacgtctggtcctatggcatcctcctctgggagatcttctcacttgggctgaatccctaccctggcatcctggtgaacagcaagttctataaactggtgaaggatggataccaaatggcccagcctgcatttgccccaaagaatatatacagcatcatgcaggcctgctgggccttggagcccacccacagacccaccttccagcagatctgctccttccttcaggagcaggcccaagaggacaggagagagcgggactataccaatctgccgagcagcagcagaagcggtggcagcggcagcagcagcagtgagctggaggaggagagctctagtgagcacctgacctgctgcgagcaaggggatatcgcccagcccttgctgcagcccaacaactatcagttctgctgaggagttgacgacagggagtaccactctcccctcctccaaacttcaactcctccatggatggggcgacacggggagaacatacaaactctgccttcggtcatttcactcaacagctcggcccagctctgaaacttgggaaggtgagggattcaggggaggtcagaggatcccacttcctgagcatgggccatcactgccagtcaggggctgggggctgagccctcacccccccctcccctactgttctcatggtgttggcctcgtgtttgctatgccaactagtagaaccttctttcctaatccccttatcttcatggaaatggactgactttatgcctatgaagtccccaggagctacactgatactgagaaaaccaggctctttggggctagacagactggcagagagtgagatctccctctctgagaggagcagcagatgctcacagaccacactcagctcaggccccttggagcaggatggctcctctaagaatctcacaggacctcttagtctctgccctatacgccgccttcactccacagcctcacccctcccacccccatactggtactgctgtaatgagccaagtggcagctaaaagttgggggtgttctgcccagtcccgtcattctgggctagaaggcaggggaccttggcatgtggctggccacaccaagcaggaagcacaaactcccccaagctgactcatcctaactaacagtcacgccgtgggatgtctctgtccacattaaactaacagcattaatgca

SEQ ID NO: 839 - DNA, 3319 bp, Homo sapiens
gatgcggccccgcccccgccctcggaaccggaagtagagcctggtgcctgggagcggctggcgcggcggaatccagggccgacccgggccggaccgaccccaggcggcgacggaatcagtccccaatgcctggaaattcctcattggattactgtgttttaaacagaatttcgtgaacagccttttatctccaagcggaaagaaagatgtggaaagcttcagcaggccacgctgtgtccatcgcccaggatgacgcgggggccgatgactgggagaccgaccctgattttgtgaatgatgtgagtgagaaggagcaaagatggggtgccaagacggtgcagggctccgggcaccaggagcatatcaacatacacaagctgagggagaatgtctttcaagagcatcagacccttaaggagaaggaacttgaaacaggaccaaaagcttcccatggctatggagggaaatttggtgtggaacaagaccgaatggataagtcagctgtcggccacgaatatcagtcgaaactttccaagcactgctcgcaggtggactcggtccgtggcttcggaggcaagtttggtgtccagatggacagagttgatcagtctgctgtaggctttgaataccaggggaagactgagaagcatgcctcccagaaagactactccagtggttttggcggcaagtatggcgtgcaggccgaccgagtagacaagagcgcggtgggcttcgactaccagggcaagacggagaagcacgagtcacagagagattactccaaaggtttcggcggcaaatacggtatcgacaaggacaaagtggataagagcgccgttggctttgagtatcaaggcaaaacggagaagcacgagtcccagaaagactatgtgaaagggtttggaggaaaatttggtgtgcagacagacagacaagacaaatgtgcccttggctgggatcaccaggagaaattgcagctgcatgaatcccaaaaagattataagactggttttggaggcaaattcggtgttcagtcggagaggcaggactccgctgctgtggggtttgattacaaggagaagctggccaagcacgagtcccagcaagactactccaaaggattcggcgggaagtatggggtgcagaaggatcggatggataagaatgcgtcaacctttgaggatgtcacccaggtgtcctctgcctaccagaagacagtacctgtcgaagctgtgaccagcaaaacaagtaacatcagagctaactttgaaaacctcgctaaggagaaagagcaggaggacaggcggaaggcggaggcggagagagcccagcggatggccaaggagcggcaggagcaggaagaggccaggaggaagctggaggagcaagccagagccaaaacgcaaacgccccctgtgtcgcccgcacctcagccaaccgaggagaggctgccctcgagccccgtctatgaggatgcggcttccttcaaggcagagctgagctacagaggccctgtgagtgggacggagccggagcccgtgtacagcatggaggccgctgactaccgagaggccagcagccagcagggcctggcctatgccacagaggctgtctatgaaagcgcagaggccccgggccactatcccgcagaggacagcacctacgatgagtacgagaacgatctggggatcacagccgtcgccctgtacgactaccaggctgcgggcgatgatgagatctcatttgaccctgatgacatcatcaccaacatcgagatgattgacgacggctggtggcgcggggtgtgcaagggccggtacgggctcttcccagccaactatgtggagctgcggcagtagggcccccagcccccccccggagctgcgccctggatcctcacactacagatcaggccttctttggttcttgggtggttttgggttttttctgtttttttttttttttttttttttttgaaggtggggaggggaatatacacattgcttttatatttaatacttttgctgatgcttttgaaaatgtttatgccacagaatttgctaatatattgtaatcacattccttaggaggactttggtaattggttttatgcattgatggttttttttttcttttttgccaaattgactgtcacgcggcagcttcagggagctcgcattctcttgtgttcgtgttgccctcgtgcccatcaagtgcagtcgggacctcccaggacaagcacgaggcctcaggtcggccctgtggcgggtaggcaggaaggactgtcccagacgaggggcttcctctagagtctcactgctggggaggagaggactgggcctgatggaagttaacccggagctaagtcacccagagcacaggagctgccatgtcagatgggaaatctgcctatgtcataccgtgacagcccgcaggatcaggtgacttctagcagagaccctggtttttttcctgtgcccactccggcttgtcctcatctctacccatcccctgatgcccaggtcaccgggagggctgctgggagcctctcctgtccccgccgggcagtgtcactgagtccttgaaatcctcccctgccccgcgggtctctggattgggacgcacagtgcagttgaggtctgcgtcgggcttggcttttcacaaaggctgatgtcttaactgtcacccatatggtccctgggccaccgggcagcctggggcggtgtgtgtgccatgtcacagcatggcctctcggccttgggaaggaaggcagtgcctgctctgctgtgagccgccaggaaccctcctcctgtcaatgggggtgtagtatttttgccaaaatatcatgttcaatttcagtagtttgatcagttgaaggctagaagtgtgaagtgcagatgagtgtgtgttcttccccaaggtccccccacagctccaggacaccgctgtcctggcatttgtggccactcactttgtaggaaactcatctccttcctgaggagccgggaggctggaccagtcccgtcgtgcagtcaggtgggcggtgtgtctttccagaaggtcacgtggaaatgtctcgggacttgggtcccggagtgcccgtgaagcgtgtttttgctcctgaggtgcattttctcatcatccttgctttaccacaatgagcaatgaggtcgggttttatatgcaacttattgtatctgaattcctgtagcacacctcataggtatgatttttttaaattaaagaattcagaataaacattttttgatccacttgcgtgaaaaaaaaaaaaaaaaaaaaaaaaaaaaaaaaaaaaaaa

SEQ ID NO: 840 - DNA, 5228 bp, Homo sapiens
cgggcgagggccgggcaggaggagcgggcgcggcgcgggcgaggctgggacccgagcgcgctcacttcgccgcaaagtgccaacttcccctggagtgccgggcgcgcaccgtccgggcgcgggggaaagaaaggcagcgggaatttgagatttttgggaagaaagtcggatttcccccgtccccttccccctgttactaatcctcattaaaaagaaaaacaacagtaactgcaaacttgctaccatcccgtacgtcccccactcctggcaccatgaaggcggccgtcgatctcaagccgactctcaccatcatcaagacggaaaaagtcgatctggagcttttcccctccccggatatggaatgtgcagatgtcccactattaactccaagcagcaaagaaatgatgtctcaagcattaaaagctactttcagtggtttcactaaagaacagcaacgactggggatcccaaaagacccccggcagtggacagaaacccatgttcgggactgggtgatgtgggctgtgaatgaattcagcctgaaaggtgtagacttccagaagttctgtatgaatggagcagccctctgcgccctgggtaaagactgctttctcgagctggccccagactttgttggggacatcttatgggaacatctagagatcctgcagaaagaggatgtgaaaccatatcaagttaatggagtcaacccagcctatccagaatcccgctatacctcggattacttcattagctatggtattgagcatgcccagtgtgttccaccatcggagttctcagagcccagcttcatcacagagtcctatcagacgctccatcccatcagctcggaagagctcctctccctcaagtatgagaatgactacccctcggtcattctccgagaccctctccagacagacaccttgcagaatgactactttgctatcaaacaagaagtcgtcaccccagacaacatgtgcatggggaggaccagtcgtggtaaactcgggggccaggactcttttgaaagcatagagagctacgatagttgtgatcgcctcacccagtcctggagcagccagtcatctttcaacagcctgcagcgtgttccctcctatgacagcttcgactcagaggactatccggctgccctgcccaaccacaagcccaagggcaccttcaaggactatgtgcgggaccgtgctgacctcaataaggacaagcctgtcattcctgctgctgccctagctggctacacaggcagtggaccaatccagctatggcagtttcttctggaattactcactgataaatcctgtcagtcttttatcagctggacaggagatggctgggaattcaaactttctgacccagatgaggtggccaggagatggggaaagaggaaaaacaaacctaagatgaattatgagaaactgagccgtggcctacgctactattacgacaaaaacatcatccacaagacagcggggaaacgctacgtgtaccgctttgtgtgtgacctgcagagcctgctggggtacacccctgaggagctgcacgccatgctggacgtcaagccagatgccgacgagtgatggcactgaaggggctggggaaaccctgctgagaccttccaaggacagccgtgttggttggactctgaattttgaattgttattctattttttattttccagaactcattttttaccttcaggggtgggagctaagtcagttgcagctgtaatcaattgtgcgcagttgggaaaggaaagccaggacttgtggggtgggtgggaccagaaattcttgagcaaattttcaggagagggagaagggccttctcagaagcttgaaggctctggcttaacagagaaagagactaatgtgtccaatcatttttaaaaatcatccatgaaaaagtgtcttgagttgtggacccattagcaagtgacattgtcacatcagaactcatgaaactgatgtaaggcaattaatttgcttctgtttttaggtctgggagggcaaaaaagaggtgggtgggatgaaacatgttttggggggggatgcactgaaaatctgagaactatttacctatcactctagttttgaagcaaagatggacttcagtggggaggggccaaaaccgttgttgtgttaaaatttattttattaaattttgtgccagtattttttttcttaaaaatcgtcttaagctctaaggtggtctcagtattgcaatatcatgtaagtttgtttttatttgccggctgaggattctgtcacaatgaaagaaaactgtttatatagaccccattggaaaagcaaaacgctctcactgagatcagggatcccaaattcatgggacttatataagaaggacaattaatgctgatttgggtacaggggaattatgtgtgtgaatgtcatctacaattaaaaaaaattagcacatccctttacttacttgttatcagtggattctcggggtttggacttaatgttgagctaagaagcattaagtctttgaactgaatgtattttgcatccctggttttggacgacagtaaacgtaggagcactgttgaagtcctggaagggagatcgaaggaggaagattgacttggttctttcttagtcctatatctgtagcatagatgacttggaataaaagctgtatgcatgggcattacccctcaggtcctaagaaataagtcctgaatgcatgtcgttccaaactaacactctgtaatttttcttttatgtcttattttccaagagtcctccattttttgcaccccctcaccgccaactctgttattcagtagagagaagtgtacggctttctgattggtgagtgaaaaagtaacttgagacacgacctaagttgaagagtttagacttgctgagttttagaagtgatggaaattaagagagcatttcaataaaatgtgacttggctgtctttggaagagaagtgcaaggctttcctttgaagaatttaaattagtccggtaggatgtcaggtgagactgtgtatgcaaaatgaatggcacaggtgatgccagggcctcttgcttgggtctgatgtcttggcacagggtaagtgaaggttaattccagaagagaggaatgacttgaaggcaaaggaaactaaggaaggaggttcagtgaggaaaataaggttgtccatgagatttgaatagatttttagttcccccaaggtttaaatacaaacatagtcaagcaaggtagtcatctttctgctggttgtgagggggaatctgaaaatggagttttagaggaaaagtcaacatctaactagtgaggaaaagtgcctaatacaattagaatctccctcactctatagttgcccagttgaaaggataaggaggaggggtggcttttatggacttccatgagagaaggaaagaaatatttcaggtaagcttctcagggctggccctttttgggatttggatgagaaattggaagtactaactactttctagcatatctttaagaaaattgattgttatttactcccagatcctcttgcagacccagaattatcaggaacatagctctgtgattcatgagtgtccccatactgatgaattggagcatccatatggaaagcaaaggcagaattatcccagctgtattattttgatcttttggatgcaggtgccttaatgaagctctcaaaatattttaggagctgctcagggagtgttgggtggaactgtttggactacattgttttctcttagattatgtgatttttgttgggcactggcaaaaggtgtgtgtgtgaatgtgtgcatgtgtgtgaatgttgtgtgtgtgtgtgtgtgtgtgtgtgtgtgtgtgtgtgtttgcagacatgcaaaactgcagctgaaataataccttagatttctaggtaagtctttccacatttcaataatgggtaagagtagaaccagggccgggtatcaattattgcttgctgtttgcaaccaggcataaaatcactttctcaaatcatccaccgttcctattaaatttatgccggaaactctccttctgtgagtataactcctgcagttcctatagcagataagatataagaaagtgcctcctagtgctcctccgcccgcttgtttgctaaaattccctttctctctaagtccaccattttcaagatttgtagatagtgtattagttaagacagctttgtcgatctggccagatgttttttctcctttgtccaaaggccagagaccatcccaggaagagtggtgggtggtttatacactggaaatgttgcgtttatgctttttaaaaacacacgttaacttcagaggaaggatgggcaaatctggtctagctgggtgaaacccttattttcccagagatgccttaacctttgttggttttggctttagggttcagagtcacttttgttcccttctccattctggagagggacttcccctacatagagccctgatttttgtggctgtggggattggaggtagcattcaaagatcagatgtgcttttcctcactttggagatgaacactctgggttttacagcattaacctgcctaaccttcatggtgagaaatacaccatctctcttctagtcatgctgtgcatgccgcttactctgttggggtctatataaatttgttgaactcttacctacattccaaagaagtttcaaggaaccataaatatatgtatacatatacatatataaaatatatatattaaaataaaattatcaggaatactgcctcagttattgaacttttttttttaagaatactttttttttaagctgagaagtatagggatgaaaaagatgttatattgtgtttgactattttccaacttgtattttcatataatttatattttttaaaagctgaaaatttagaagcaagatgaaaaaaaggaaaagcaggtgctttttaaaaatcagaactgaggtagcttagagatgtagcgatgtaagtgtcgatgtttttttaaaaaaaaatgcaaaaaaattcttatggcggagttttttgtttgtttattttagtagctgatgctggcacatcattttgctggagagttttttatatactgtagcctgatttcatattgtattttaaactgtgtgaaattaaaaacaaagaatttcattcataaaaaaaaaaaaaaaaaaaaaaaaaaaaaaaaaaaaaaaaaa

SEQ ID NO: 841 - DNA, 5431 bp, Homo sapiens
aggaggaatcgctggtcgccagcgaggggtgcggcttcaatttcaataactttattggtggcctgatctgcagaacagccatcacatcagtggcccttggaggagggagcgcatcgcccgaggtggtccccgacgagctgcagccatgggaaacaccaccagcgaccgggtgtccggggagcgccacggcgccaaggctgcacgctccgagggcgcaggcggccatgccccggggaaggagcacaagatcatggtggggagtacggacgaccccagcgtgttcagcctccctgactccaagctccctggggacaaagagtttgtatcatggcagcaggatttggaggactccgtaaagcccacacagcaggcccggcccactgttatccgctggtctgaaggaggcaaggaggtcttcatctctgggtccttcaacaattggagcaccaagattccactgattaagagccataatgactttgttgccatcctggacctccctgagggagagcaccaatacaagttctttgtggatggacagtgggttcatgatccatcagagcctgtggttaccagtcagcttggcacaattaacaatttgatccatgtcaagaaatctgattttgaggtgttcgatgctttaaagttagattctatggaaagttctgagacatcttgtagagacctttccagctcacccccagggccttatggtcaagaaatgtatgcgtttcgatctgaggaaagattcaaatccccacccatccttcctcctcatctacttcaagttattcttaacaaagacactaatatttcttgtgacccagccttactccctgagcccaaccatgttatgctgaaccatctctatgcattgtccattaaggacagtgtgatggtccttagcgcaacccatcgctacaagaagaagtatgttactactctgctatacaagcccatttgaagggatcccttcttgcctctaaggattcaggagaagcatctcccttgcatttctggactgaaccagtcttacctgagactggaaggctgatttgctttgaggctgatatgtgtgtttcagagcctctgagtaggatgctctgcttttgcatttgattgcagatgagagctttatgagttcacggaatttattttaagaaaaaaaaatatacatatgagaagaaggtaaatggaagcctcctagccccagctagaagtattgtttctgcctgtgggttttcaccaagacctgtttgggggcgctgcaggaataactatataggaagatttttcctaaaatgaaagaacagcaaactcttaggatccttgttgggtggagattctatcactgctaccttggctctccaaggaatgggcttgtgctagaccgctgccctacttaacagctgcctcattgcaagggcagtttttcttgcatgggttctctatattcccagagtatgtggcacaatctgtgttgtttatatgataccagatgccccacaagaacccttattcctctcatttcacattcttcctttaatagcctccttcagatcccatacctgacccctctctaacacaaaacttattgggtaagtgactttgaaaagttttgtggcacctgacccaccccagacactagggctatcagaaggtctcctttttagcccagcacaggcccaggccactttgtcgtgtttgttttaacttctaaagaaaatatgtttcagcattataagaaaggcagaatgcagaacacctacatttttgttttagtttggtgccaaggctcaggctgtattggcaaattcccgaaagttttcccactttgcctggccctgcttctgtcttttctttctcagtaaacagttctgaaggcaggagtggaacccgggagtattttcatgtctttcatccttgaaagatttttatgtgcctgcattttttttttaattaaaaaatgccttttcattggtcttaagagaccgcattggagaatttcaggcttttgataaatgcttcttcaaagagattttcttctctagtctagccttccacattcttagattaatatggccaaccctgtacacatcactacactaaacactgctctagataaactgctcaagttcatttaactcatttgatgcacctaaaggggttcctcattttaaagatttgttaggccaagaagcaagagagtattcctagtattcccaaccatgaaaagtatcattctttgcaccaaatgttaacaaaatcattttgttctcctgcctcttctttttaaaggtgtttgatgattaagtggggtcactgaattccatttgtggactgaaaagtattcaatccacttttggggttcagagataaaacattttttcccaagtagctggggctcttccattttgcagataagtcaaataatcaacactaaaggaggctaaactgttgatgaatgagagactccctgactgctcagatgaccctagccacactgaaagggcacctacaggtcagtttagctacctcctgtctttcccatgcaaagctgataacacagttgtctttggacttgtagacctcttggattccaggtgtgatggagtaaagtgtgggattgttgttttgctgggatgcaaataactaaatgctttggtggttaattgctaagagtaaatactactttagccatccaaggccaccttctgcagcaaaaggcttttgtggagaaccttttatgttcccaaccactttttgaatggtgtgccatttaaaaatccaggccagatcctattataaccaactctcaggatttacagccttcagttgtactagaattttgtttttatccaatactcattaaataagtgggccacttaggaagattcaaaatcttggttattacatgaagtttgttatatttcttgtcaacagtattgaaatgtaatatgtatgtgttcatgtatgaaaatttttactccacacaggtgtttcagtagagtggggcaggaaaagagatctcttcgatttctttcaggcctgaggcttttgtgaaatgcgtcagccccctgtgacagtaggttttgatgctagtgatcttcagatctttctctctggaaatgtgcagagagtgtcagtttcccaagttctgaggtaactctcagcccagatgtgaaatgggagcctaccagctggtatagaagggaatgggtaggaggcactgggtgctgactcattcagcactgtcccttttctatactgctgatacatcccatggttctgagaagccttatctcagtctatttggaagagagggaggaagagaaggaagtaacccaaagtactactcatttatccttgtatattgattagttaaagggataattaatttaatgctgaggagagtttgacagattttgaaaatgagtaaaggcaaaaaaaatttttttagcctttattttgcttttgggaattttacagagtcaaagtaggcagaataagaaaatagttcttcaggagggccgacctttaaagaacttcaacatagtttcggaattgtggggaagagaagagtgactgagctgagaagtaataatagaataaagggttgagtaacttagaactgaaaatgatctcttttaaaaagaaattaaatcagacaccacatggtggtgtccttggatctcactgtgcagaattagcagtgtataaccatcttctcttttcatcttgttccaattctctcctctttcctttccattctgctttaagctcatgtgtcaggcagactttaccagagtgtcagacattacctaaaacacatacgttagccatgctgctggtatggagaaattccacaccatgattattagcctcctttaagctgaatgggatttaaccattctaggcaacacccctgaagggcatacctaacctcaatagtgttggcttttaaaacgtatgtttgtatggtagagaaactttgtaaaagaagaatccaagagaagtttgtgaggatcctacaaacccaggcccactcactttgctctaattctttctagtatcttgtagatctaatgggtctgggataaaaactttgaaaagtgtcaatattccatgtatgctgctgaaatgaagttaagtttggaaagaagtgatacctctagactgggtttatattaatctgggatataaatgaagaagacatactaatagaactccttgcttttaattggggaaatagggctttaataattttgacctcaactaaaaatgatatgcaatagtctctgtgtgtgtttgaaatacattgtgttctcagagatttctacattctcacgttctagtgatttggggcatgggcttaatagcagatgtacagtgtattcctgcattattgtgattccccttaaagcccagttcttgctgtcttctaccaggggctgctgactccagttacccatggaatgcaggacctgggaggggtagccattagggtctttcaaaactctttggatctaagcatttgtctctccttaagtgccaatcacaattggatatggaaggactgtgatttctgcaatgaacccaaacttttagagtaaaaagccaaatttaaattataagaaagaagggaaaaaagagaaaaactcaagtctattacttgtagagtccaattcttagcaatggaatcgctctaggattctagtttgggctttgtctggatttgcttttctcagttgtgctttgaagtgaataagctttgttacaaattaattttttattagttccaatattagttggagttaacttgaattgattgtatgtagcacagcacttttgcagtaagattggtgtgaaatactaaacactatggattttgtaggtgtcaggttaaatggtcaagggatacctacattaagtcatatattaggtattgatgatcttacttcttttctgttcccctgtacaaaacacttacctaacccagcttgtggttttaggacagccaaagctcactgttgttggttagtcctaatcactacacgggtctcataaatgagacttgtttgaattttggtacattggagcatgttggttggtattacacggcagcatttcgaatgagtgcagctctgtgtctgtcagaaaggagagataagactactttgaagggaattaaatatgtgagtcctctttttaatggtgctttttgtaacctttaatgctgaggtacagagctgcttttcaatatttcataaaggagtggcagacaagagtggattttaaagctgttcttcaaacgtaatttgtcactggactctgacacacctggaaattatatgatatgatacatacagaaatgttgtgggttttttccataaaactttaataaaagtattatacagcaataaaaaaaaaa

SEQ ID NO: 842 - DNA, 2414 bp, Homo sapiens
ttttttataaggccgagcgcgcggcctggcgcagcatacgccgagccggtctttgagcgctaacgtctttctgtctccccgcggtggtgatgacggtgaaaactgaggctgctaagggcaccctcacttactccaggatgaggggcatggtggcaattctcatcgctttcatgaagcagaggaggatgggtctgaacgactttattcagaagattgccaataactcctatgcatgcaaacaccctgaagttcagtccatcttgaagatctcccaacctcaggagcctgagcttatgaatgccaacccttctcctccaccaagtccttctcagcaaatcaaccttggcccgtcgtccaatcctcatgctaaaccatctgactttcacttcttgaaagtgatcggaaagggcagttttggaaaggttcttctagcaagacacaaggcagaagaagtgttctatgcagtcaaagttttacagaagaaagcaatcctgaaaaagaaagaggagaagcatattatgtcggagcggaatgttctgttgaagaatgtgaagcaccctttcctggtgggccttcacttctctttccagactgctgacaaattgtactttgtcctagactacattaatggtggagagttgttctaccatctccagagggaacgctgcttcctggaaccacgggctcgtttctatgctgctgaaatagccagtgccttgggctacctgcattcactgaacatcgtttatagagacttaaaaccagagaatattttgctagattcacagggacacattgtccttactgacttcggactctgcaaggagaacattgaacacaacagcacaacatccaccttctgtggcacgccggagtatctcgcacctgaggtgcttcataagcagccttatgacaggactgtggactggtggtgcctgggagctgtcttgtatgagatgctgtatggcctgccgcctttttatagccgaaacacagctgaaatgtacgacaacattctgaacaagcctctccagctgaaaccaaatattacaaattccgcaagacacctcctggagggcctcctgcagaaggacaggacaaagcggctcggggccaaggatgacttcatggagattaagagtcatgtcttcttctccttaattaactgggatgatctcattaataagaagattactcccccttttaacccaaatgtgagtgggcccaacgacctacggcactttgaccccgagtttaccgaagagcctgtccccaactccattggcaagtcccctgacagcgtcctcgtcacagccagcgtcaaggaagctgccgaggctttcctaggcttttcctatgcgcctcccacggactctttcctctgaaccctgttagggcttggttttaaaggattttatgtgtgtttccgaatgttttagttagccttttggtggagccgccagctgacaggacatcttacaagagaatttgcacatctctggaagcttagcaatcttattgcacactgttcgctggaagctttttgaagagcacattctcctcagtgagctcatgaggttttcatttttattcttccttccaacgtggtgctatctctgaaacgagcgttagagtgccgccttagacggaggcaggagtttcgttagaaagcggacgctgttctaaaaaaggtctcctgcagatctgtctgggctgtgatgacgaatattatgaaatgtgccttttctgaagagattgtgttagctccaaagcttttcctatcgcagtgtttcagttctttattttcccttgtggatatgctgtgtgaaccgtcgtgtgagtgtggtatgcctgatcacagatggattttgttataagcatcaatgtgacacttgcaggacactacaacgtgggacattgtttgtttcttccatatttggaagataaatttatgtgtagacttttttgtaagatacggttaataactaaaatttattgaaatggtcttgcaatgactcgtattcagatgcttaaagaaagcattgctgctacaaatatttctatttttagaaagggtttttatggaccaatgccccagttgtcagtcagagccgttggtgtttttcattgtttaaaatgtcacctgtaaaatgggcattatttatgtttttttttttgcattcctgataattgtatgtattgtataaagaacgtctgtacattgggttataacactagtatatttaaacttacaggcttatttgtaatgtaaaccaccattttaatgtactgtaattaacatggttataatacgtacaatccttccctcatcccatcacacaactttttttgtgtgtgataaactgattttggtttgcaataaaaccttgaaaaatatttacatataaaaaaaa

SEQ ID NO: 843 - DNA, 1313 bp, Homo sapiens
cacgaagcgccgctgggtctgggtgcccggaggcagcagcgttcgcggagttcgcccgctggcccccgatcaccatgtcggctttcgacaccaaccccttcgcggacccagtggatgtaaaccccttccaggatccctctgtgacccagctgaccaacgccccgcagggcggcctggcggaattcaaccccttctcagagacaaatgcagcgacaacagttcctgtcacccaactccctgggtcctcacagccagcggttctccagccatcagtggaaccaacccagccgaccccccaggccgtggtgtctgcagcccaggcaggcctgctccggcagcaggaagaactggacaggaaagctgccgagctggaacgcaaggagcgggagctgcagaacactgtagccaacttgcatgtgagacagaacaactggccccctctgccctcgtggtgccctgtgaagccctgcttctatcaggatttctccacagagatccctgccgactaccagcggatatgcaagatgctctactatctgtggatgttgcattcagtgactctgtttctgaacctgcttgcctgcctggcctggttctcgggcaacagctccaagggagtggactttggcctctccatcctgtggtttctgatcttcactccctgtgccttcctttgttggtaccgacccatctataaggcctttaggtccgacaactctttcagcttctttgtgttcttctttgtatttttttgtcaaatagggatctacatcatccagttggttggcatccctggcctgggggacagcggttggattgcagccctgtctacactggataatcattccctggccatatcagtcatcatgatggtggtggctggcttcttcaccctctgtgccgtgctctcagtcttcctcctgcagcgggtgcactccctctaccgacggacaggggccagcttccagcaggcccaggaggagttttcccagggcatcttcagcagcagaaccttccacagagctgcttcatctgctgcccaaggagccttccaggggaattagtcctcctctcttctctccccctcagcctttctctcgcctgccttctgagctgcactttccgtgggtgccttatgtggtggtggttgtgcccagcacagacctggcagggttcttgccgtggctcttcctcctccctcagcgaccagctctccctggaacgggagggacagggaattttttccccctctatgtacaaaaaaaaacaaagctctctttccttctctggtaaaaaaaaaaaaaaaaaaaaaa

SEQ ID NO: 844 - DNA, 3140 bp, Homo sapiens
ctccggcccagccccggcccgcagtccagatccgagacccaaactccgcccgccccgccgcgcgactctcacggtccggcctccggcgcgcgccccttcggcctccctcttcctgcgccggcgcccggcccggcccggcccgtcctgacccggtcacgagggccgcgacggcccgcgcttctccttgcccttcctcctcgagcgcccgcgccaggcagcagccgggcagggatgctcctgcgctcccgggcggcctcgggcccagccacctgctcgccggggaagaggacacgcagaggagcagctggcttgcccggagtcctcccaccttgacccaagcatgcagggcccaccccgcagcctccgcgctgggctcagcctggacgacttcatccctggccacctccagtcccacatagggtcttcctcccgggggacacgggtgcccgtgatccggaatggtggctccaacacccttaatttccagttccacgaccccgcgcccaggactgtgtgcaatgggggctacacaccaagacgagatgcttcccagcacccggaccctgcgtggtatcagacctggccaggccctgggagcaagccctctgcaagcacaaagatccctgcctcccagcacacccagaactggtcagccacgtggaccaaggacagcaagcgtcgggacaagcgctgggtcaagtacgagggaatcgggcccgtggacgagagcggcatgcccattgccccccgatccagcgttgacagacccagagactggtaccggagaatgttccagcagattcaccggaaaatgccagacttgcagctggactggaccttcgaggagccacccagagaccccaggcatctaggagcccagcaaagacctgcccacaggcccggcccggcaacatcttccagtggaagaagctgggaccactctgaagagttacctagaagcaccttcaactacagacctggagcattctccactgtgctgcagccctcaaatcaggtgctcagacgccgggaaaaagtagacaatgtctggacggaagagtcctggaaccagtttctgcaggaactagagactgggcagaggcccaagaaaccgctggtggacgaccctggtgagaagccctcccagcccattgaggtgctgctggagagagagctggccgagctgagcgccgagctggacaaggacctgcgggcaattgagacccgactgccgtcccccaagagctcgccggcgccccgacgggccccggagcagcggcccccggccggcccggcctcagcctggagctccagctacccacatgcaccttacctgggttccgcccggtccctgagtccccacaaaatggctgatggaggaagccccttcctaggtcggagggactttgtctacccttcctcaacccgagaccctagtgcctctaacggagggggcagcccagccaggagggaagagaagaagagaaaggccgccaggctcaagtttgacttccaggcgcagtcccccaaggagctgactctgcagaagggtgacattgtctacatccacaaggaggtggacaagaactggctggagggagagcaccacggccgcctgggcatcttccctgctaattatgtggaggtgctgcccgcagatgagatccctaagcccatcaagcccccgacctaccaggtgctggagtatggagaggctgtggcccagtacaccttcaagggggacctggaggtggagctgtccttccgcaagggagagcacatctgcctgatccgcaaggtgaacgagaactggtacgagggacgcatcacgggcacggggcgccaaggcatattccctgccagctacgtgcaggtgtctcgtgaaccccggctccggctctgtgacgacggcccccagctccccacgtctccccgcctgaccgctgccgcccgctcagcccgtcaccccagctccccctcagccctgcgcagcccagctgaccccatcgacttggggggacagacctccccccgtcgcactggcttctccttccccacccaggagcctagaccccagacccagaatcttggcacccctggtccagctctgtcccactctcgaggtcccagccatcccctggacctggggacctcctctcctaacacctctcagatacactggaccccgtaccgggcgatgtaccagtacaggccccagaacgaagacgagctggagctgcgcgagggggacagggtggatgtcatgcagcagtgtgacgatggctggtttgtgggtgtctcccggaggacccagaaattcggaacgttccctggaaattacgttgccccggtgtgagtggtctccatggcaacttggagccagccaggatggggtggggagcggtggcactcgtgggagggagaggacccccgcccacatcctccttccccaggacctgagctcccagcatctgcagacgacccccgcagcctttccctcggacccccctcgaagccccctggactgattcccacccacgactcacaggcattcctcccacagccctttcatttcctccccaccccactccccaaatacagaggtctgctttgaagcggagaccatttccaggccttattgagaccagaccccaagtcccccacccccatcctgctccagcgtttcctctaacagggaccagctctccgctttgcccccacggggttcctctaaccagaaccagcttcctagcctcgtagagaccaaaggccgcccccgcctgctggggttcctcccagcaccccagcttgctggctgccctctttgccttctggcctccagctgggtgtgggggggcggagcaaggcgggggacagacgcagcaccttcttagcgatctaggcctggcaagagctctggccccaaggcctcctcttcccaggggctgccaagtcctggccctggccctggcatatcaccccgcactgtggggccaggcaccactagcctggctcaaatattccccagggagactgctgtgtgctgcccgcctgcctgctggctctcccccagccccacatcccctctggaagagaatgtaaaataaacctggacacaagggaaaaaaaaaaaaaaaaaa

SEQ ID NO: 845 - DNA, 4476 bp, Homo sapiens
gggccggaaagttccggcgaactgggggagcggcagtgggagagcgtcgggcgggaggcggtggtcctgggagcggccccggcgccccgaagccgccccgagctggtggggagggcccggccggtggggccccgggggcctgcgggggaggggcgcctgggggtgcaagaggcgaattggctgcccggggtgcaggagggacaggtggtgcgggctgtccaggaaacctacctgaacgggaaggagccccaggagggagagggacccggcgaggggctcaggacccggaggcgccggcggaggaggaggtggtgactggcaggcccgggccccacggtacctccggggctgaaggggacgcaggatgtaggggcatggggagtcgggcgcagaagagtgcggggaaccgctgagctctgggagccactgcctgagggcaggccgcggccggcgggaacctcttctgccgtctcagcctgggcgtcgctgaagctgtgtctgcggggaggcagcggaaggcggcagaggctgggaggcggcagaatgcagccagaggagggcacaggctggctgctggagctgctgtccgaggtgcagctgcaacagtacttcctgcggctccgagatgacctcaacgtcacccgcctgtcccactttgagtacgtcaagaatgaggacctggagaagatcggcatgggtcggcctggccagcggcggctgtgggaggctgtgaagaggaggaaggccttgtgcaaacgcaagtcgtggatgagtaaggtgttcagtggaaagcgactggaggctgagttcccacctcatcactctcagagcaccttccggaagacctcgcccgcccctgggggcccagcaggggaggggcccctgcagagcctcacctgcctcattggggagaaggacctgcgcctcctggagaagctgggtgatggttcctttggcgtggtgcgcaggggcgagtgggacgcgccctcagggaagacggtgagtgtggctgtgaagtgcctgaagcccgatgtcctgagccagccagaagccatggacgacttcatccgggaggtcaatgccatgcactcgctcgaccaccgaaacctcatccgcctctacggggtggtgctcacgccgcccatgaagatggtgacagagctggcacctctgggatcgttgttggaccggctacgtaagcaccagggccacttcctcctggggactctgagccgctacgctgtgcaggtggctgagggcatgggctacctggagtccaagcgctttattcaccgtgacctggctgcccgcaatctgctgttggctacccgcgacctggtcaagatcggggactttgggctgatgcgagcactacctcagaatgacgaccattacgtcatgcaggaacatcgcaaggtgcccttcgcctggtgtgcccccgagagcctgaagacacgcaccttctcccatgccagcgacacctggatgttcggggtgacactgtgggaaatgttcacctacggccaggagccctggatcggcctcaacggcagtcagatcctgcataagatcgacaaggagggggagcggctgccccggcccgaggactgtccccaggacatctacaacgtcatggtccagtgctgggctcacaagccagaggacagacccacgtttgtggccctgcgggacttcctgctggaggcccagcccacagacatgcgggcccttcaggactttgaggaaccggacaagctgcacatccagatgaatgatgtcatcaccgtcatcgagggaagggccgagaactactggtggcgtggccagaacacacggacgctgtgtgtggggcccttccctcgcaacgtggtgacctccgtggccggcctgtcggcccaggacatcagccagcccctgcagaacagcttcatccacacagggcatggcgacagtgacccccgccactgctggggcttcccggacaggattgacgaactgtatctgggaaaccccatggacccccccgacctcctgagcgtggaactgagcacctcccggcccccccagcatctaggaggggtgaaaaaaccaacctatgaccctgtgagcgaggaccaagaccccttgtccagcgacttcaagaggctgggcctgcggaagccaggcctgccccgagggctgtggctggcgaagccctcggcgcgggtgccgggcaccaaggccagccgaggcagcggggctgaggtcacgctcatcgacttcggtgaggagcccgtggtcccggccctacggccctgcgcgccctccctggcgcagctggccatggacgcctgctccctgctggacgagaccccgcctcagagccccacgcgggcactgccccggcccctgcaccccacgcctgtggtggactgggacgcacgcccgctgccccccccgcccgcctatgacgacgtggcccaggatgaggatgactttgagatctgctccatcaacagcaccctcgtgggcgcgggggtccctgccgggcccagccagggccagaccaactacgcctttgtgcctgagcaggcgcggccgccccctcccctggaggacaacctgttcctcccgccccagggtgggggcaagccgcccagctccgcacagaccgcagagatcttccaggcgctacagcaggagtgcatgaggcaactgcaggctccggccggctccccggccccctctcccagcccggggggtgacgacaagccccaggtgcctcctcgggtacccatcccccctcggcccacgcgcccacacgtccagctgtctccagcccccccgggcgaggaggagaccagccagtggcctggacctgcttcccctccccgggtgcctccgcgggagcccctgtcccctcaaggctcgaggacacccagccccctggtaccacctggcagctccccgctgccaccccggctctcaagctcacctgggaagaccatgcccaccacccagagctttgcctcagaccccaagtacgccaccccccaggtgatccaggcccctggcccgcgggctggtccctgcatcctgcccatcgtccgggatggcaagaaggtcagcagcacccactattacttgctgcccgagcgaccatcctacctggagcgctaccagcgcttcctgcgtgaggcccagagccccgaggagcctacccccctgcctgtgcctctgctgctgcccccacccagcaccccagcccccgccgcccccacggccaccgtgcggccgatgccccaggctgccttggaccccaaggccaacttctccaccaacaacagcaacccaggggcccggccaccacccccgagggccactgctcggctgccacagaggggctgccctggcgatgggccagaggcgggccggccagcagacaagatccagatggccatggtgcatggggtgaccacagaggagtgccaggcggccctgcagtgccacggctggagcgtgcagagggctgcccagtatctgaaggtggagcagctcttcgggctgggtctgcggcccagaggggagtgccacaaagtgctggagatgttcgactggaacctggagcaggccggctgccaccttctgggctcctggggccctgcccaccacaagcgctgagatgcgtctggagagccagagggcctgcctgaaggaatcacctgagcctgtccgtccaccaggagtggggagatgcccccatccagtcctggaggacccgctgctcctgctgctcccggggatggagcaaggccaaggctgcgggaggctgggagccctgccctgcccatccctcctgcaccagcgctgtccctgcacactttggttcagtcccggtgcccctgccaagatgtggaaggggccgggtgaagacaggcttgagggctgccccagcaggctctgggtatgacctgcctctggccctggtcctgggcggggcctgtgggtggagtagtacccccaggccctgccctgggtgacagactgggaggaaaccaggctggacctgggcaggcgggatgtgttggccacagggagaggcggaccggcacccggtgggacctcctaggactgggccttcttccagggggcccctggcagcagctggggtgtcgggcagaatgtgacttgtggccttaccatggacttgaatgggacttggctggcctcaggatcttgtgcctggaaatagcctgaggtggctcaggaagcggagaaagggtgccagaccattctctggcggggaccagggcccaaggccccagggctggaaggagaccaaggggcagccgccctggagggacatcagtgcttcctcttccacccaattcccccacgcggttccatgttttcccaccagcctgttggcgaagttgctgctccggcattcagtacctgcttcttccagagaaataaagttagtttctattttatgtt

SEQ ID NO: 846 - DNA, 4422 bp, Homo sapiens
gcggccgccgcgccgcgcacccatggacggcccggccatcatcacccaggtgaccaaccccaaggaggacgagggccggttgccgggcgcgggcgagaaagcctcccagtgcaacgtcagcttaaagaagcagaggagccgcagcatccttagctccttcttctgctgcttccgtgattacaatgtggaggcccctccacccagcagccccagtgtgcttccgccactggtggaggagaatggtgggcttcagaagccaccagctaagtaccttcttccagaggtgacggtgcttgactatggaaagaaatgtgtggtcattgatttagatgaaacattggtgcacagttcgtttaagcctattagtaatgctgattttattgttccggttgaaatcgatggaactatacatcaggtgtatgtgctgaagcggccacatgtggacgagttcctccagaggatggggcagctttttgaatgtgtgctctttactgccagcttggccaagtatgcagaccctgtggctgacctcctagaccgctggggtgtgttccgggcccggctcttcagagaatcatgtgtttttcatcgtgggaactacgtgaaggacctgagtcgccttgggcgggagctgagcaaagtgatcattgttgacaattcccctgcctcatacatcttccatcctgagaatgcagtgcctgtgcagtcctggttcgatgacatgacggacacggagctgctggacctcatccccttctttgagggcctgagccgggaggacgacgtgtacagcatgctgcacagactctgcaataggtagccctggcctctgcctgcctcccgcctgtgcactctggaacctctggcctcaggggacctgcctgtcctcagctccctgggagctgaaagtgaggatactccgtgctccaggccacagggtgaatgtggccatgcctacctgttttgtttttttaagaacagaaacaactattttaaaagaactcttttaagaaatttcataaagggacatgcattttactgggtttgcttttcttaaaacataccaaaaaagaaaaaaatagaaaaaaaaaaaaaaaaagcttgatctctatcagacttcctttcaactgtcctcccctccaagcagaccacctgtccccttctatcccagctcagagcagctgacccaactcagaatctctttcctacaggatgaagtgccttttgaatgttattttaagccgagagttaatttttctacacaacatatttccagacatcttttagtcttttattgtcttagatactataagaagatgaacatgacaattttctagaacctggtagcgtgtgtgtgtgtggcggggggtgctgagggaggggagtgagtcacaggagcctgtcccccaacaggtgtgactgctctgacaacctgtggcatgctgcagggtcaggctcctgataggaggatttcatgactatgtcattgtctccactcatttttgacccagtttggaatgtatctgcaattgtgtggctcaacactttaggaaacaatagattattttatattattatttctgatggtgacaagtttgtcttgaggtcacattttctccttgaaaagtgacatcctgtcacttctgctctcacactactgccatacatttgtgttttttgttgttattgtttgggtagagcagttacaagaaaccctaaaacccttggatataaaagaaatctgtttattgatttttaaatctttcctttccaaaagctggatacacatggagctgtttgggaattttccttgctgctaccgcgctgccaccaaatggaattgaccagcggctgttacactgttctttgccactgtgcctatgctcagaatatgctcactgctaagctacaaactcggacagggtcagaaacagaggtgtcccatcccattgcagcctccaccacctgtaaccccttcctggcattggccactgaagggtacaaaggcaaaaggaccacagcaccacttaggtgtagcatggattttaaactgcagtcagtatcagatcctgtttgataaataagctgactgttctctcttgagaacctgtggcctcaaccagccaccaagctgatgtggcccaagtccatctcttggtcttctcctttgaagcacagcctatttctgagccaagggttggggaagcctgtctagatgtgggactcattgccccaaaccagggagaggaagagctcccacagggagagcccaggctctctttgcagcctttcccagtttggtgtttaagcagtgccatgttccttgtttgacaacaagacagtctgtaaagtattgctcttaaaaacaattaaaaagaaccctttcatattggcaccattgccttagtcctctgtgggttggtcttcagccagcattctggtgggagtgactggcattaacaagactggaaatcgggggtcaaagtaaaatatctttgttttgctttcattcacaaagtaatgaagccagctgccaattacatcctcccaacagcactttggtctgtggactgctgtgtgaatattcagaagggaagtaagtattcagggggtaaacaggtctcccagcattctgagtgttccaaaccagtaatccacatgccaattcaaatagaacagccccttgctagatattaccacagataatgacagttacatggtagaactgcccatgccacaaatatttatttggaaaagtagtcattaaatgaacccactgccttaaatgtcttgaatgttgcagtcaagtgtctgtcatgtgttgatatccacacagaattaggccctaatgagagccttagaccctcaaccatgcccccttcgttggcatcacagggccttatttggaagagcgggcaaagaggatggaaatcataaaatatttcatgggaatcgaacctagggatagtgctccacttctgacgatggagtgaagacacttggcagacttgagccagacacttcacctagtagttcctgaaactgtgagcaccactgcactaagccagtgcggagctgttagggacgggcccagctcctgcaccacggacacagaatgtctggagagggccagcaggccctctgagggttctggaatctgtgcaccttatttgaccacactccaaaattctgtttttattttaacccttgaatctgctttatgtacataatcaaaatatctatatctatatctatatctatatctatatatttttaatcatctacatgtaaatgaagcaatagaattctaacataaggccaagaaatgagacgaatgtttggggtttatgttttttaaggtaaatacgggtattgtttttaattattaccatgtattaaattgtgggctttgaaacctaatgaaacctgttagccacttctctgtgccatatacttcccatgttaccaaaatacccccaactctttagccaaaagagaaccctgacctcctgagtttccatgctcctttctgtaccaggtttaaatgtagtcttctggagaagtatttttgacattgagctctgggacaggacaccttgggtttgtggactgcagcccactatgatgttattacttctctggccaggcctccagtggaagtgcacaggcactcccaatgttgttaatgctctgtcttccatttgttctggaatcctacgtgttggtctgtggttccatgcattagctgtttgtaaataatgcatttgcatactgaaaaaggaatgccacctgccacagttgatggtgaggaagctcctttgacgtggtgcaattttgatgagatgtctctggggacacgaggatgccctaatgatgctgacttgtcatggttgcagcatttgaacttttggtgttaaaaaaaaaaacctgtaagtctgtaacctggcaacattttacaaccctgtatttttaaagatggctttctaataaaaaatccagaaccacacagccctatggtcaaacaatcctacgtttgtgcctctgcttttaaaggtgctgtgctggacagttggcatgccagggttcgagaagagtgaatggcttgacgtacttgcagttaactgtgcaaaattggctggctgcctctgttcctactgtactgtaactttgatcatgtctgttcctgttccattctcccaggagcttctctgcagactgacacaccctcccccaccccgggtagtggagatgctggtgtctgggtagtcatggatttctgctggacatttgaatgtgataaacaatccagcattacttaggaaatgctacatgcggaatgtgcacgtttccaggggcgagtattgtcaatcaaaaggtttgcaatgatttccttcctgccaaaaataaacatgtgaaactgca

SEQ ID NO: 847 - DNA, 4611 bp, Homo sapiens
gtgtcgctcgctttctgtcagcctctctccctctccctctcccctctccttcctctcgcttcctctctcgcacctgagcgtacgcacctgcccgggcccggctccctcctcctctcccctccctctttccccgcccggccgcgggagcctcgtggctgcgtcaccgccgcccccccagacaagatggacaccgcggaggaagacatatgtagagtgtgtcggtcagaaggaacacctgagaaaccgctttatcatccttgtgtatgtactggcagtattaagtttatccatcaagaatgcttagttcaatggctgaaacacagtcgaaaagaatactgtgaattatgcaagcacagatttgcttttacaccaatttattctccagatatgccttcacggcttccaattcaagacatatttgctggactggttacaagtattggcactgcaatacgatattggtttcattatacacttgtggcctttgcatggttgggagttgttcctcttacagcatgccgcatctacaagtgcttgtttactggctccgtgagctcactactgacgctgccattagatatgctgtcaacggaaaatttgttggcagattgtttgcagggttgttttgtggtgacgtgcacactgtgtgcattcatcagcctggtgtggttgagagagcagatagtccatgggggagcaccaatttggttggagcatgctgccccaccgttcaatgctgcggggcatcaccaaaatgaggctccagcaggaggaaatggtgcagaaaatgttgctgctgatcagcctgctaacccaccagctgagaacgcagtggtgggggaaaaccctgatgcccaggatgaccaggcagaagaggaggaggaggacaatgaggaggaagatgacgctggtgtggaggatgcggcagatgctaataacggagcccaggatgacatgaattggaatgctttagaatgggaccgagctgctgaagagcttacatgggaaagaatgctaggacttgatggatcactagtttttctggaacatgtcttctgggtggtatctttaaatacactgttcattcttgtttttgcattttgcccttaccatattggtcatttctcccttgttggtttgggatttgaagaacacgtccaagcatctcattttgaaggcctaatcacaaccatagttgggtatatacttttagcaataacactgataatttgtcatggcttggcaactcttgtgaaatttcatagatctcgtcgcttactgggagtctgctatattgttgttaaggtctctttgttagtggtggtagaaattggagtattccctctcatttgtggttggtggctggatatctgttccttggaaatgtttgatgctactctgaaagatcgagaactgagctttcagtcggctccaggtactaccatgtttctgcattggctagtgggaatggtatatgtcttctactttgcctccttcattctactactgagagaggtacttcgacctggtgtcctgtggtttctaaggaatttgaatgatccagatttcaatccagtacaggaaatgatccatttgccaatatataggcatctccgaagatttattttgtcagtgattgtctttggctccattgtcctcctgatgctttggcttcctatacgtataattaagagtgtgctgcctaattttcttccatacaatgtcatgctctacagtgatgctccagtgagtgaactgtccctcgagctgcttctgcttcaggttgtcttgccagcattactcgaacagggacacacgaggcagtggctgaaggggctggtgcgagcgtggactgtgaccgccggatacttgctggatcttcattcttatttattgggagaccaggaagaaaatgaaaacagtgcaaatcaacaagttaacaataatcagcatgctcgaaataacaacgctattcctgtggtgggagaaggccttcatgcagcccaccaagccatactccagcagggagggcctgttggctttcagccttaccgccgacctttaaattttccactcaggatatttctgttgattgtcttcatgtgtataacattactgattgccagcctcatctgccttactttaccagtatttgctggccgttggttaatgtcgttttggacggggactgccaaaatccatgagctctacacagctgcttgtggtctctatgtttgctggctaaccataagggctgtgacggtgatggtggcatggatgcctcagggacgcagagtgatcttccagaaggttaaagagtggtctctcatgatcatgaagactttgatagttgcggtgctgttggctggagttgtccctctccttctggggctcctgtttgagctggtcattgtggctcccctgagggttcccttggatcagactcctcttttttatccatggcaggactgggcacttggagtcctgcatgccaaaatcattgcagctataacattgatgggtcctcagtggtggttgaaaactgtaattgaacaggtttacgcaaatggcatccggaacattgaccttcactatattgttcgtaaactggcagctcccgtgatctctgtgctgttgctttccctgtgtgtaccttatgtcatagcttctggtgttgttcctttactaggtgttactgcggaaatgcaaaacttagtccatcggcggatttatccatttttactgatggtcgtggtattgatggcaattttgtccttccaagtccgccagtttaagcgcctttatgaacatattaaaaatgacaagtaccttgtgggtcaacgactcgtgaactacgaacggaaatctggcaaacaaggctcatctccaccacctccacagtcatcccaagaataaagtagttgtctcaacaacttgaccttcccctttacatgtccttttttgtggacttctctctttggagatttttcccagtgatctctcagcgttgtttttaagttaaatgtatttgacttgtgttctcagcattcagagagcagcggtgtaagattctgctgttctccctggatcttctgacattactgctgtctgagatttgtatatgtgtaaatacaagttccttgataccctaaaaccttggattaaacagaatgtgcattgtacatctttaaacaaaatgtatattaatttattaaatctagttgtcactttattttggacctgctgtgatctcgacaggaaacgtgccacagagcagtagtgcgcaggcaagacttttcagtgacgccttgtggaacgcagttcatgatgtcctagcagctctcactaagggaactgtacattctttctttcttggctattcagaccttaccaagaacgttaaaggaaacaagtagaaatcagcagtggagtgtctgtggtaagaaaacatgaactttatgcttcactgttagttgtttgtggaagttattttgtataacaccaaagctgttgtacatttcctactgcctgatttttttcatgtgtctgtgtttgtaatattgtatagtatcttgtgctaggtgaggaaattatttttaattttgataatttaatattcctagtgtgatcagcattgggagttgggtttcagtggggcatgtctatacttagagaaaaaaagtccaaatgaagattttcatgagtcagcccccccgcccgcccccaccccacacccacatcctctcttttccacacacaactatctgtttattttttgtagcagtggccgaaagtcctgcaaggtcataaatctttcagagtgacatcaccaactgtactgcatcttactggatttaggacttctgagatgcttgtgaagtatagatgtggttgtggtcttagattgacagcattagagaagactggttagaacatctggtctcgctggttagtgcctcgttggctgaggactaggtgtgcatttctcctagcttttcatcaggaaatcccaaagtttccaaagctttttgtttacagaataaaacttcaaataaaaccaattcattatttgtccagaaggaagcttggctgagctggccttttaacataggaatgtatttcgttggaaacattctgaaaaatctcagagaactgaacccttacaaactttgttttccctcataaccaaagcttcaggttagaagtttagaaaaatagaatggttgggtacatgatctaaatgtttaatgctaaaggtatatcgtaagggtagtgtttgtttttgaacgataatttagaagttctcatagaaagcgtataacataggtcttcagaaactataaaagaattttcatatagtattaaaatccatagactaaaatctgagaattttttaacatatgcaagtcagccaaacataagctaccaaaataaagagcaatgtgttctggctgttttatacttcaacaattttttccctaagtggtaagcaattactttaaaacatatttttaaaaacatcggtatcgggagctgcggtggctccggccggttgtcctggcacacaaggaggcgaggctatgcgttcgaggccaacctaggcaaaattgg

SEQ ID NO: 848 - DNA, 2835 bp, Homo sapiens
ttcgttcgctccgcgccgcccgcctgctacgagtagaacgctgtccgcagcttgcgcatttcgcagccgctgccgcctcgccgctgctccttcgtaaggccacttccgcacaccgacaccaacatgaacggacagctcaacggcttccacgaggcgttcatcgaggagggcacattccttttcacctcagagtcggtcggggaaggccacccagataagatttgtgaccaaatcagtgatgctgtccttgatgcccaccttcagcaggatcctgatgccaaagtagcttgtgaaactgttgctaaaactggaatgatccttcttgctggggaaattacatccagagctgctgttgactaccagaaagtggttcgtgaagctgttaaacacattggatatgatgattcttccaaaggttttgactacaagacttgtaacgtgctggtagccttggagcaacagtcaccagatattgctcaaggtgttcatcttgacagaaatgaagaagacattggtgctggagaccagggcttaatgtttggctatgccactgatgaaactgaggagtgtatgcctttaaccattgtcttggcacacaagctaaatgccaaactggcagaactacgccgtaatggcactttgccttggttacgccctgattctaaaactcaagttactgtgcagtatatgcaggatcgaggtgctgtgcttcccatcagagtccacacaattgttatatctgttcagcatgatgaagaggtttgtcttgatgaaatgagggatgccctaaaggagaaagtcatcaaagcagttgtgcctgcgaaataccttgatgaggatacaatctaccacctacagccaagtggcagatttgttattggtgggcctcagggtgatgctggtttgactggacgcaaaatcattgtggacacttatggcggttggggtgctcatggaggaggtgccttttcaggaaaggattataccaaggtcgaccgttcagctgcttatgctgctcgttgggtggcaaaatcccttgttaaaggaggtctgtgccggagggttcttgttcaggtctcttatgctattggagtttctcatccattatctatctccattttccattatggtacctctcagaagagtgagagagagctattagagattgtgaagaagaatttcgatctccgccctggggtcattgtcagggatctggatctgaagaagccaatttatcagaggactgcagcctatggccactttggtagggacagcttcccatgggaagtgcccaaaaagcttaaatattgaaagtgttagccttttttccccagacttgttggcgtaggctacagagaagccttcaagctctgagggaaagggccctccttcctaaattttcctgtcctctttcagctcctgaccagttgcagtcactctagtcaatgacatgaattttagcttttgtgggggactgtaagttgggcttgctattctgtccctaggtgttttgttcaccattataatgaatttagtgagcataggtgatccatgtaactgcctagaaacaacactgtagtaaataatgctttgaaattgaacctttgtgccctatcacccaacgctccaaagtcataattgcattgactttccccaccagatgctgaaaatgtccttgtgatgtgcacgtaaagtacttgtagttccacttatagcctctgtctggcaatgccacagccctgtcagcatgaatttgtaatgtcttgagctctattatgaatgtgaagccttccccttatcctccctgtaacttgatccatttctaattatgtagctctttgtcagggagtgttccctatccaatcaatcttgcatgtaacgcaagttcccagttggagctccagcctgacatcaaaaaaggcagttaccattaaaccatctccctggtgcttatgctcttaattgccacctctaacagcaccaaatcaaaatctctccactttcagctgtcttttggaggacgtacgtaataaggttttaatttagtaaaccaatcctatgcatggtttcagcactagccaaacctcaccaactcctagttctagaaaaacaggcacttggcagccttgtgatgtcatacagagaagtcacagggcagtacctgagggtctgtaggttgcacactttggtaccagataacttttttttttctttataagaaagcctgagtactccacactgcacaataactcctcccagggttttaactttgttttattttcaaaaccaggtccaatgagctttctgaacagctggtgtagctacagagaaaccagcttccttcagagagcagtgcttttggcggggaggaggaaatcccttcatacttgaacgttttctaattgcttatttattgtattctggggtatggcgtaagtacagagaagccatcacctcagatggcagcttttaaaagattttttttttttctctcaacaccatgattcctttaacaacatgtttccagcattcccaggtaggccaaggtgtcctacagaaaaaccttgggttagacctacagggggtctggctggtgttaacagaagggagggcagagctggtgcggctggccatggagaaagctgacttggctggtgtggtacagagaagccagcttgtttacatgcttattccatgactgcttgccctaagcagaaagtgcctttcaggatctatttttggaggtttattacgtatgtctggttctcaattccaacagtttaatgaagatctaaataaaatgctaggttctaccttaaaaaaaaaaaaaaaaaa

SEQ ID NO: 849 - DNA, 2417 bp, Homo sapiens
gcagcagagaggagttgagggcgatgagagcgggtactgcgaactgccgggcgatgctgtcgctgccgccgtgatacggagagcaacagttccccagcaacacccctccccgacacaggcacacaccccccgacaggcacgcacacccaccccacagtgcccggctcggctgcgcctcctctattggcccaggaagcccacccagccccgccacgcagagcccagaaggaaagaaagcctcatgcctgagccgaggggagcaccatggatctgacaaaaatgggcatgatccagctgcagaaccctagccaccccacggggctactgtgcaaggccaaccagatgcggctggccgggactttgtgcgatgtggtcatcatggtggacagccaggagttccacgcccaccggacggtgctggcctgcaccagcaagatgtttgagatcctcttccaccgcaatagtcaacactatactttggacttcctctcgccaaagaccttccagcagattctggagtatgcatatacagccacgctgcaagccaaggcggaggacctggatgacctgctgtatgcggccgagatcctggagatcgagtacctggaggaacagtgcctgaagatgctggagaccatccaggcctcagacgacaatgacacggaggccaccatggccgatggcggggccgaggaagaagaggaccgcaaggctcggtacctcaagaacatcttcatctcgaagcattccagcgaggagagtgggtatgccagtgtggctggacagagcctccctgggcccatggtggaccagagcccttcagtctccacttcatttggtctttcagccatgagtcccaccaaggctgcagtggacagtttgatgaccataggacagtctctcctgcagggaactcttcagccacctgcagggcccgaggagccaactctggctgggggtgggcggcaccctggggtggctgaggtgaagacggagatgatgcaggtggatgaggtgcccagccaggacagccctggggcagccgagtccagcatctcaggagggatgggggacaaggttgaggaaagaggcaaagaggggcctgggaccccgactcgaagcagcgtcatcaccagtgctagggagctacactatgggcgagaggagagtgccgagcaggtgccacccccagctgaggctggccaggcccccactggccgacctgagcacccagcacccccgcctgagaagcatctgggcatctactccgtgttgcccaaccacaaggctgacgctgtattgagcatgccgtcttccgtgacctctggcctccacgtgcagcctgccctggctgtctccatggacttcagcacctatggggggctgctgccccagggcttcatccagagggagctgttcagcaagctgggggagctggctgtgggcatgaagtcagagagccggaccatcggagagcagtgcagcgtgtgtggggtcgagcttcctgataacgaggctgtggagcagcacaggaagctgcacagtgggatgaagacgtacgggtgcgagctctgcgggaagcggttcctggatagtttgcggctgagaatgcacttactggctcattcagcgggtgccaaagcctttgtctgtgatcagtgcggtgcacagttttcgaaggaggatgccctggagacacacaggcagacccatactggcactgacatggccgtcttctgtctgctgtgtgggaagcgcttccaggcgcagagcgcactgcagcagcacatggaggtccacgcgggcgtgcgcagctacatctgcagtgagtgcaaccgcaccttccccagccacacggctctcaaacgccacctgcgctcacatacaggcgaccacccctacgagtgtgagttctgtggcagctgcttccgggatgagagcacactcaagagccacaaacgcatccacacgggtgagaaaccctacgagtgcaatggctgtggcaagaagttcagcctcaagcatcagctggagacgcactatagggtgcacacaggtgagaagccctttgagtgtaagctctgccaccagcgctcccgggactactcggccatgatcaagcacctgagaacgcacaacggcgcctcgccctaccagtgcaccatctgcacagagtactgccccagcctctcctccatgcagaagcacatgaagggccacaagcccgaggagatcccgcccgactggaggatagagaagacgtacctctacctgtgctatgtgtgaagggaggcccgcggcggtggagccgagcggggagccaggaaagaagagttggagtgagatgaaggaaggactatgacaaataaaaaaggaaaagaaaaaaaaaaacagaaggaaaaggaaaaaaaaaaaaa

SEQ ID NO: 850 - DNA, 3466 bp, Homo sapiens
agtgacgcaaggcctactgtcggctgggaggggaggtgtagccggtctttgggggtaggcggtagtggcggaagaggttcggcggctgatggcggatcaggatcggaagcctgcgtaactttctcccttgatccgggagtctttccactggattcacaatgacatcctttcaagaagtcccattgcagacttccaactttgcccatgtcatctttcaaaatgtggccaagagttaccttcctaatgcacacctggaatgtcattacaccttaactccatatattcatccacatccaaaagattgggttggtatattcaaggttggatggagtactgctcgtgattattacacgtttttatggtcccctatgcctgaacattatgtggaaggatcaacagtcaattgtgtactagcattccaaggatattaccttccaaatgatgatggagaattttatcagttctgttacgttacccataagggtgaaattcgtggagcaagtacacctttccagtttcgagcttcttctccagttgaagagctgcttactatggaagatgaaggaaattctgacatgttagtggtgaccacaaaagcaggccttcttgagttgaaaattgagaaaaccatgaaagaaaaagaagaactgttaaagttaattgccgttctggaaaaagaaacagcacaacttcgagaacaagttgggagaatggaaagagaacttaaccatgagaaagaaagatgtgaccaactgcaagcagaacaaaagggtcttactgaagtaacacaaagcttaaaaatggaaaatgaagagtttaagaagaggttcagtgatgctacatccaaagcccatcagcttgaggaagatattgtgtcagtaacacataaagcaattgaaaaagaaaccgaattagacagtttaaaggacaaactcaagaaggcacaacatgaaagagaacaacttgaatgtcagttgaagacagagaaggatgaaaaggaactttataaggtacatttgaagaatacagaaatagaaaataccaagcttatgtcagaggtccagactttaaaaaatttagatgggaacaaagaaagcgtgattactcatttcaaagaagagattggcaggctgcagttatgtttggctgaaaaggaaaatctgcaaagaactttcctgcttacaacctcaagtaaagaagatacttgttttttaaaggagcaacttcgtaaagcagaggaacaggttcaggcaactcggcaagaagttgtctttctggctaaagaactcagtgatgctgtcaacgtacgagacagaacgatggcagacctgcatactgcacgcttggaaaacgagaaagtgaaaaagcagttagctgatgcagtggcagaacttaaactaaatgctatgaaaaaagatcaggacaagactgatacactggaacacgaactaagaagagaagttgaagatctgaaactccgtcttcagatggctgcagaccattataaagaaaaatttaaggaatgccaaaggctccaaaaacaaataaacaaactttcagatcaatcagctaataataataatgtcttcacaaagaaaacggggaatcagcagaaagtgaatgatgcttcagtaaacacagacccagccacttctgcctctactgtagatgtaaagccatcaccttctgcagcagaggcagattttgacatagtaacaaaggggcaagtctgtgaaatgaccaaagaaattgctgacaaaacagaaaagtataataaatgtaaacaactcttgcaggatgagaaagcaaaatgcaataaatatgctgatgaacttgcaaaaatggagctgaaatggaaagaacaagtgaaaattgctgaaaatgtaaaacttgaactagctgaagtacaggacaattataaagaacttaaaaggagtctagaaaatccagcagaaaggaaaatggaaggtcagaattcccagagtcctcaatgtttcaaaacatgctcagagcaaaatggttatgttctcacattgtcaaatgcacaaccagttctgcaatatggtaatccttatgcatctcaggaaacaagagatggagcagatggtgctttttacccagatgaaatacaaaggccacctgtcagagtcccctcttggggactggaagacaatgttgtctgcagccagcctgctcgaaactttagtcggcctgatggcttagaggactctgaggatagcaaagaagatgagaatgtgcctactgctcctgatcctccaagtcaacatttacgtgggcatgggacaggcttttgctttgattccagctttgatgttcacaagaagtgtcccctctgtgagttaatgtttcctcctaactatgatcagagcaaatttgaagaacatgttgaaagtcactggaaggtgtgcccgatgtgcagcgagcagttccctcctgactatgaccagcaggtgtttgaaaggcatgtgcagacccattttgatcagaatgttctaaattttgactagttactttttattatgagttaatatagtttagcagtaaaaaaaaaaaaaaaaaccacacctaaaatagaccactgaggagaccatagagcggatgctttcatgcaccctttactgcactttctgaccaggagctactttgagtttggtgttactaggatcagggtcagtctttggcttatcaataaattttaatctctgttaatcttacctgctttaaaaaaaagttcttgtgtgttcgtatctttatttattccctagtttgcagaactgtctgaataaaggatacaaggattatttcaatgttactgcactgaaaaacgtgtatgtattagtgtgctagattatttagcagaatattcacaagtttctgttgaccttgttgattgagcatgactactaaatattatgtaataaaaagcatttgtcataacagtcttatgaagtagttcttcgaatatagaaagttctataatttagcccatgaaatgataggtttttaattttcagaaatggagctgcatgtagaatgagatcacatgcttttatatgtgaaatattggttttagcaattaacagaaggcatactttgctaattttatggcaaaattttagaataacctgaatgattatttttaaactatcttgaagttgtatgtatatatctaatgggaaaatggaacaagagatgtcagtataattgttttcctattaaatgatctcataacaggggtgtttgtggcataaaaatcatagaatatatatcagtatcttttttacattttcctgatgagaatataaatttgaaatattctcagtaagtgattaaaagtacaatacataaacccaaatcaaagtaatgtgtttcttcagttatgtctgtgctgtatagaactgtcactaacattaaagaaagaggacacatttttcaagatctgtaa

SEQ ID NO: 851 - DNA, 1503 bp, Homo sapiens
gcacgcccagcgagttccagaggcgccagtggaagctgcggcggcggtgtctcgcgttcggcgggatttctcttcgctccggctcggcctaggtctacgtccccagctccagccgccggctcggactcggtctctgacccccaactcggtcccctagtccggccccggctccgggccccccaaccctcgctccggcccggcccggcccccaccccagccctgccgcccggccccaggcccggccgcggccgctcccgcctggagccgccgcgcgcccccagcccccctgcaccccctcggcccctcgccttcctcttcccggcgcggccccccggcttccgcgcgccgcccgccaccaatcctcttgctaccatgtccgtggagctcgaggaggccctgccagtgacgaccgccgagggaatggccaagaaggtgaccaaggctggcggctcggcggcgttgtccccatctaagaagaggaagaatagcaagaagaagaaccagccgggcaagtacagccagctggtggtggagaccatccgtaggctgggcgagcgcaacggctcgtcgctggccaagatctacaccgaggccaagaaggttccgtggttcgaccagcagaatgggcgcacctacctcaagtactcgatcaaggcgctggtgcagaacgacacgcttctgcaggtgaagggcaccggcgccaacggttccttcaagctcaaccgcaagaagctggagggcggcggggagcggcgcggagccccggcggccgccaccgccccggcccccaccgcgcacaaagcgaagaaggcagccccgggcgcggccggctcccggcgcgcggacaagaagcccgccaggggccagaagccggagcagcgctcgcacaagaagggcgctggcgccaagaaggacaaaggcggcaaggccaagaagacggcggccgccgggggcaagaaggtgaagaaggcggccaagcccagcgtccccaaagtgcccaagggccgcaagtgagcgtgtcggccggtcagagcggccggcgtgggcttttcggtgtttttgtttttctaccccaagtgacgtagattttgtacggctcacgccggccggggccgcgaggcctggtctgagcctcagggaggggccccgggtcctctcagtctttcccctcccccaacgatgtagcgtttttcgttgtttgctttaggtttttgaaacagccccggcgacgcctctattggctctcggccttggcaacggccgtcgtcatggttactggcccctaggcgccgatggccgaggccgcgcctgcccaccgggcggggtcgctggttggccgggcccaggcgcgcggggacgcggaggccgcgcatcctttcccagctccccaccctccttgcctttgggtgcgcgacaaacaatcgctccgggctcagggctgcgcggctcttcccttcattccatgggcctttttttgggcacaataaagcgtttaaacctttc

SEQ ID NO: 852 - DNA, 1930 bp, Homo sapiens
acagctcattgttggcagctgccgggcggtcctgccgagctgtgagggcaacggaggggaaataaaagggaacggctccgaatctgccccagcggccgctgcgagacctcggcgccgacatcgcgacagcgaagcgctttgcacgccaggaaggtcccctctatgtgctgctgagccggtcctggacgcgacgagcccgccctcggtcttcggagcagaaatcgcaaaaacggaaggactggaaatggcagaccatatgatggccatgaaccacgggcgcttccccgacggcaccaatgggctgcaccatcaccctgcccaccgcatgggcatggggcagttcccgagcccccatcaccaccagcagcagcagccccagcacgccttcaacgccctaatgggcgagcacatacactacggcgcgggcaacatgaatgccacgagcggcatcaggcatgcgatggggccggggactgtgaacggagggcaccccccgagcgcgctggcccccgcggccaggtttaacaactcccagttcatgggtcccccggtggccagccagggaggctccctgccggccagcatgcagctgcagaagctcaacaaccagtatttcaaccatcacccctacccccacaaccactacatgccggatttgcaccctgctgcaggccaccagatgaacgggacaaaccagcacttccgagattgcaaccccaagcacagcggcggcagcagcacccccggcggctcgggcggcagcagcacccccggcggctctggcagcagctcgggcggcggcgcgggcagcagcaacagcggcggcggcagcggcagcggcaacatgcccgcctccgtggcccacgtccccgctgcaatgctgccgcccaatgtcatagacactgatttcatcgacgaggaagttcttatgtccttggtgatagaaatgggtttggaccgcatcaaggagctgcccgaactctggctggggcaaaacgagtttgattttatgacggacttcgtgtgcaaacagcagcccagcagagtgagctgttgactcgatcgaaaccccggcgaaagaaatcaaacccccaacttcttcggcgtgaattaaaagaaacattcccttagacacagtatctcacttttcagatcttgaaaggtttgagaacttggaaacaaagtaaactataaacttgtacaaattggttttaaaaaaaattgctgccacttttttttcctgtttttgtttcgtttttgtagccttgacattcacccacctcccttatgtagttgaaatatctagctaacttggtctttttcgttgtttgtttttactcctttccctcactttctccagtgctcaactgttagatattaatcttggcaaactgcttaatcttgtggattttgtagatggtttcaaatgactgaactgcattcagatttacgagtgaaaggaaaaattgcattagttggttgcatgaacttcgaagggcagatattactgcacaaactgccatctcgcttcatttttttaactatgcatttgagtacagactaatttttaaaatatgctaaactggaagattaaacagatgtgggccaaactgttctggatcaggaaagtcatactgttcactttcaagttggctgtcccccccgccgccccccccacccccatatgtacagatgataatagggtgtggaatgtcgtcagtggcaaacatttcacagatttttattttgtttctgtcttcaacatttttgacactgtgctaatagttatattcagtacatgaaaagatactactgtgttgaaagctttttaggaaattttgacagtatttttgtacaaaacatttttttgaaaaaatacttgttaatttattctattttaatttgccaatgtcaataaaaagttaagaaa

SEQ ID NO: 853 - DNA, 3074 bp, Homo sapiens
aacaaacctcgcctggctcccagctggtgctgaagctcgtcagttcaccatccgccctcggcttccgcggggcgctgggccgccagcctcggcaccgtcctttcctttctccctcgcgttaggcaggtgacagcagggacatgtctcgggagatgcaggatgtagacctcgctgaggtgaagcctttggtggagaaaggggagaccatcaccggcctcctgcaagagtttgatgtccaggagcaggacatcgagactttacatggctctgttcacgtcacgctgtgtgggactcccaagggaaaccggcctgtcatcctcacctaccatgacatcggcatgaaccacaaaacctgctacaaccccctcttcaactacgaggacatgcaggagatcacccagcactttgccgtctgccacgtggacgcccctggccagcaggacggcgcagcctccttccccgcagggtacatgtacccctccatggatcagctggctgaaatgcttcctggagtccttcaacagtttgggctgaaaagcattattggcatgggaacaggagcaggcgcctacatcctaactcgatttgctctaaacaaccctgagatggtggagggccttgtccttatcaacgtgaacccttgtgcggaaggctggatggactgggccgcctccaagatctcaggatggacccaagctctgccggacatggtggtgtcccacctttttgggaaggaagaaatgcagagtaacgtggaagtggtccacacctaccgccagcacattgtgaatgacatgaaccccggcaacctgcacctgttcatcaatgcctacaacagccggcgcgacctggagattgagcgaccaatgccgggaacccacacagtcaccctgcagtgccctgctctgttggtggttggggacagctcgcctgcagtggatgccgtggtggagtgcaactcaaaattggacccaacaaagaccactctcctcaagatggcggactgtggcggcctcccgcagatctcccagccggccaagctcgctgaggccttcaagtacttcgtgcagggcatgggatacatgccctcggctagcatgacccgcctgatgcggtcccgcacagcctctggttccagcgtcacttctctggatggcacccgcagccgctcccacaccagcgagggcacccgaagccgctcccacaccagcgagggcacccgcagccgctcgcacaccagcgagggggcccacctggacatcacccccaactcgggtgctgctgggaacagcgccgggcccaagtccatggaggtctcctgctaggcggcctgcccagctgccgcccccggactctgatctctgtagtggccccctcctccccggccccttttcgccccctgcctgccatactgcgcctaactcggtattaatccaaagcttattttgtaagagtgagctctggtggagacaaatgaggtctattacgtgggtgccctctccaaaggcggggtggcggtggaccaaaggaaggaagcaagcatctccgcatcgcatcctcttccattaaccagtggccggttgccactctcctcccctccctcagagacaccaaactgccaaaaacaagacgcgtagcagcacacacttcacaaagccaagcctaggccgccctgagcatcctggttcaaacgggtgcctggtcagaaggccagccgcccacttcccgtttcctctttaactgaggagaagctgatccagtttccggaaacaaaatccttttctcatttggggaggggggtaatagtgacatgcaggcacctcttttaaacaggcaaaacaggaagggggaaaaggtgggattcatgtcgaggctagaggcatttggaacaacaaatctacgtagttaacttgaagaaaccgatttttaaagttggtgcatctagaaagctttgaatgcagaagcaaacaagcttgatttttctagcatcctcttaatgtgcagcaaaagcaggcgacaaaatctcctggctttacagacaaaaatatttcagcaaacgttgggcatcatggtttttgaaggctttagttctgctttctgcctctcctccacagccccaacctcccacccctgatacatgagccagtgattattcttgttcagggagaagatcatttagatttgttttgcattccttagaatggagggcaacattccacagctgccctggctgtgatgagtgtccttgcaggggccggagtaggagcactggggtgggggtggaattggggttactcgatgtaagggattccttgttgttgtgttgagatccagtgcagttgtgatttctgtggatcccagcttggttccaggaattttgtgtgattggcttaaatccagttttcaatcttcgacagctgggctggaacgtgaactcagtagctgaacctgtctgacccggtcacgttcttggatcctcagaactctttgctcttgtcggggtgggggtgggaactcacgtggggagcggtggctgagaaaatgtaaggattctggaatacatattccatgggactttccttccctctcctgcttcctcttttcctgctccctaacctttcgccgaatggggcagcaccactgacgtttctgggcggccagtgcggctgccaggttcctgtactactgccttgtacttttcattttggctcaccgtggattttctcataggaagtttggtcagagtgaattgaatattgtaagtcagccactgggacccgaggatttctgggaccccgcagttgggaggaggaagtagtccagccttccaggtggcgtgagaggcaatgactcgttacctgccgcccatcaccttggaggccttccctggccttgagtagaaaagtcggggatcggggcaagagaggctgagtacggatgggaaactattgtgcacaagtctttccagaggagtttcttaatgagatatttgtatttatttccagaccaataaatttgtaactttgcagcggaaaaaaaaaaaaaaaaaaaaaaaaaaaaaaaaaaaaaaaaaa

SEQ ID NO: 854 - DNA, 6646 bp, Homo sapiens
gttcggagagccgggcgggaaaacgaaaccagaaatccgaaggccgcgccagagccctgcttccccttgcacctgcgccgggcggccatggacttgtacagcaccccggccgctgcgctggacaggttcgtggccagaaggctgcagccgcggaaggagttcgtagagaaggcgcggcgcgctctgggcgccctggccgctgccctgagggagcgcgggggccgcctcggtgctgctgccccgcgggtgctgaaaactgtcaagggaggctcctcgggccggggcacagctctcaagggtggctgtgattctgaacttgtcatcttcctcgactgcttcaagagctatgtggaccagagggcccgccgtgcagagatcctcagtgagatgcgggcatcgctggaatcctggtggcagaacccagtccctggtctgagactcacgtttcctgagcagagcgtgcctggggccctgcagttccgcctgacatccgtagatcttgaggactggatggatgttagcctggtgcctgccttcaatgtcctgggtcaggccggctccggcgtcaaacccaagccacaagtctactctaccctcctcaacagtggctgccaagggggcgagcatgcggcctgcttcacagagctgcggaggaactttgtgaacattcgcccagccaagttgaagaacctaatcttgctggtgaagcactggtaccaccaggtgtgcctacaggggttgtggaaggagacgctgcccccggtctatgccctggaattgctgaccatcttcgcctgggagcagggctgtaagaaggatgctttcagcctagccgaaggcctccgaactgtcctgggcctgatccaacagcatcagcacctgtgtgttttctggactgtcaactatggcttcgaggaccctgcagttgggcagttcttgcagcggcagcttaagagacccaggcctgtgatcctggacccagctgaccccacatgggacctggggaatggggcagcctggcactgggatttgctagcccaggaggcagcatcctgctatgaccacccatgctttctgagggggatgggggacccagtgcagtcttggaaggggccgggccttccacgtgctggatgctcaggtttgggccaccccatccagctagaccctaaccagaagacccctgaaaacagcaagagcctcaatgctgtgtacccaagagcagggagcaaacctccctcatgcccagctcctggccccactggggcagccagcatcgtcccctctgtgccgggaatggccttggacctgtctcagatccccaccaaggagctggaccgcttcatccaggaccacctgaagccgagcccccagttccaggagcaggtgaaaaaggccatcgacatcatcttgcgctgcctccatgagaactgtgttcacaaggcctcaagagtcagtaaagggggctcatttggccggggcacagacctaagggatggctgtgatgttgaactcatcatcttcctcaactgcttcacggactacaaggaccaggggccccgccgcgcagagatccttgatgagatgcgagcgcagctagaatcctggtggcaggaccaggtgcccagcctgagccttcagtttcctgagcagaatgtgcctgaggctctgcagttccagctggtgtccacagccctgaagagctggacggatgttagcctgctgcctgccttcgatgctgtggggcagctcagttctggcaccaaaccaaatccccaggtctactcgaggctcctcaccagtggctgccaggagggcgagcataaggcctgcttcgcagagctgcggaggaacttcatgaacattcgccctgtcaagctgaagaacctgattctgctggtgaagcactggtaccgccaggttgcggctcagaacaaaggaaaaggaccagcccctgcctctctgcccccagcctatgccctggagctcctcaccatctttgcctgggagcagggctgcaggcaggattgtttcaacatggcccaaggcttccggacggtgctggggctcgtgcaacagcatcagcagctctgtgtctactggacggtcaactatagcactgaggacccagccatgagaatgcaccttcttggccagcttcgaaaacccagacccctggtcctggaccccgctgatcccacctggaacgtgggccacggtagctgggagctgttggcccaggaagcagcagcgctggggatgcaggcctgctttctgagtagagacgggacatctgtgcagccctgggatgtgatgccagccctcctttaccaaaccccagctggggaccttgacaagttcatcagtgaatttctccagcccaaccgccagttcctggcccaggtgaacaaggccgttgataccatctgttcatttttgaaggaaaactgcttccggaattctcccatcaaagtgatcaaggtggtcaagggtggctcttcagccaaaggcacagctctgcgaggccgctcagatgccgacctcgtggtgttcctcagctgcttcagccagttcactgagcagggcaacaagcgggccgagatcatctccgagatccgagcccagctggaggcatgtcaacaggagcggcagttcgaggtcaagtttgaagtctccaaatgggagaatccccgcgtgctgagcttctcactgacatcccagacgatgctggaccagagtgtggactttgatgtgctgccagcctttgacgccctaggccagctggtctctggctccaggcccagctctcaagtctacgtcgacctcatccacagctacagcaatgcgggcgagtactccacctgcttcacagagctacaacgggacttcatcatctctcgccctaccaagctgaagagcctgatccggctggtgaagcactggtaccagcagtgtaccaagatctccaaggggagaggctccctacccccacagcacgggctggaactcctgactgtgtatgcctgggagcagggcgggaaggactcccagttcaacatggctgagggcttccgcacggtcctggagctggtcacccagtaccgccagctctgtatctactggaccatcaactacaacgccaaggacaagactgttggagacttcctgaaacagcagcttcagaagcccaggcctatcatcctggatccggctgacccgacaggcaacctgggccacaatgcccgctgggacctgctggccaaggaagctgcagcctgcacatctgccctgtgctgcatgggacggaatggcatccccatccagccatggccagtgaaggctgctgtgtgaagttgagaaaatcagcggtcctactggatgaagagaagatggacaccagccctcagcatgaggaaattcagggtcccctaccagatgagagagattgtgtacatgtgtgtgtgagcacatgtgtgcatgtgtgtgcacacgtgtgcatgtgtgtgttttagtgaatctgctctcccagctcacacactcccctgcctcccatggcttacacactaggatccagactccatggtttgacaccagcctgcgtttgcagcttctctgtcacttccatgactctatcctcataccaccactgctgcttcccacccagctgagaatgccccctcctccctgactcctctctgcccatgcaaattagctcacatctttcctcctgctgcaatccatcccttcctcccattggcctctccttgccaaatctaaatagtttatatagggatggcagagagttcccatctcatctgtcagccacagtcatttggtactggctacctggagccttatcttctgaagggttttaaagaatggccaattagctgagaagaattatctaatcaattagtgatgtctgccatggatgcagtagaggaaagtggtggtacaagtgccatgattgattagcaatgtctgcactggatacggaaaaaagaaggtgcttgcaggtttacagtgtatatgtgggctattgaagagccctctgagctcggttgctagcaggagagcatgcccatattggcttactttgtctgccacagacacagacagagggagttgggacatgcatgctatggggaccctcttgttggacacctaattggatgcctcttcatgagaggcctccttttcttcaccttttatgctgcactcctcccctagtttacacatcttgatgctgtggctcagtttgccttcctgaatttttattgggtccctgttttctctcctaacatgctgagattctgcatccccacagcctaaactgagccagtggccaaacaaccgtgctcagcctgtttctctctgccctctagagcaaggcccaccaggtccatccaggaggctctcctgacctcaagtccaacaacagtgtccacactagtcaaggttcagcccagaaaacagaaagcactctaggaatcttaggcagaaagggattttatctaaatcactggaaaggctggaggagcagaaggcagaggccaccactggactattggtttcaatattagaccactgtagccgaatcagaggccagagagcagccactgctactgctaatgccaccactacccctgccatcactgccccacatggacaaaactggagtcgagacctaggttagattcctgcaaccacaaacatccatcagggatggccagctgccagagctgcgggaagacggatcccacctccctttcttagcagaatctaaattacagccagacctctggctgcagaggagtctgagacatgtatgattgaatgggtgccaagtgccagggggcggagtccccagcagatgcatcctggccatctgttgcgtggatgagggagtgggtctatctcagaggaaggaacaggaaacaaagaaaggaagccactgaacatcccttctctgctccacaggagtgccttagacagcctgactctccacaaaccactgttaaaacttacctgctaggaatgctagattgaatgggatgggaagagccttccctcattattgtcattcttggagagaggtgagcaaccaagggaagctcctctgattcacctagaacctgttctctgccgtctttggctcagcctacagagactagagtaggtgaagggacagaggacagggcttctaatacctgtgccatattgacagcctccatccctgtcccccatcttggtgctgaaccaacgctaagggcaccttcttagactcacctcatcgatactgcctggtaatccaaagctagaactctcaggaccccaaactccacctcttggattggccctggctgctgccacacacatatccaagagctcagggccagttctggtgggcagcagagacctgctctgccaagttgtccagcagcagagtggccctggcctgggcatcacaagccagtgatgctcctgggaagaccaggtggcaggtcgcagttgggtaccttccattcccaccacacagactctgggcctccccgcaaaatggctccagaattagagtaattatgagatggtgggaaccagagcaactcaggtgcatgatacaaggagaggttgtcatctgggtagggcagagaggagggcttgctcatctgaacaggggtgtatttcattccaggccctcagtctttggcaatggccaccctggtgttggcatattggccccactgtaacttttgggggcttcccggtctagccacaccctcggatggaaagacttgactgcataaagatgtcagttctccctgagttgattgataggcttaatggtcaccctaaaaacacccacatatgcttttcgatggaaccaggtaagttgacgctaaagttcttatggaaaaatacacacgcaatagctaggaaaacacagggaaagaagagttctgagcagggcctagtcttagccaatattaaaacatactatgaagcctctgatacttaaacagcatggcgctggtacgtaaatagaccaatgcagttaggtggctctttccaagactctggggaaaaaagtagtaaaaagctaaatgcaatcaatcagcaattgaaagctaagtgagagagccagagggcctccttggtggtaaaagagggttgcatttcttgcagccagaaggcagagaaagtgaagaccaagtccagaactgaatcctaagaaatgcaggactgcaaagaaattggtgtgtgtgtgtgtgtgtgtgtgtgtgtgtgtgtttaatttttaaaaagtttttattgagatacaagtcaataccataaagctctcacccttctaaagtgtacaattcagtggtgtgagtatattcataagatttatacttggtgtctattcataagacttatatccagcatattcataactagagccatatcacagatgcattcatcataataattccagacattttcatcaccctaaaaggaaaccctgaaacccattagcagtcattccccattcctccaacccattctctccctaatccctagaaaccaccaatctgctgtgtatttcatctattgccaacatttcatataaatggcatcatacaaaaaaaaaaaaaaaaaaaaa

SEQ ID NO: 855 - DNA, 3647 bp, Homo sapiens
agtgaatcggaaaggaggcgccggctgtggcggcggcgggagctgctcggaagctacacctcgcaagggctcccccctttccccaccccctcccccgacccttttcccctccccgggccacccagcccgcccaactcccagcggagagcaaggttttcttctgttttcatagccagccagaacaatgttctacgcacattttgttctcagtaaaagagggcctctggccaaaatttggctagcggcccattgggataagaagctaaccaaagcccatgtgttcgagtgtaatttagagagcagcgtggagagtatcatctcaccaaaggtgaaaatggcattacggacatcaggacatctcttactgggagtagttcgaatctatcacaggaaagccaaataccttcttgcagactgtaatgaagcattcattaagataaagatggcttttcggccaggtgtggttgacctgcctgaggaaaatcgggaagcagcttataatgccattactttacctgaagaatttcatgactttgatcagccactgcctgacttagatgacatcgatgtggcccagcagttcagcttgaatcagagtagagtggaagagataaccatgagagaagaagttgggaacatcagtattttacaagaaaatgattttggtgattttggaatggatgatcgtgagataatgagagaaggcagtgcttttgaggatgacgacatgttagtaagcactactacttctaacctcctattagagtctgaacagagcaccagcaatctgaatgagaaaattaaccatttagaatatgaagatcaatataaggatgataattttggagaaggaaatgatggtggaatattagatgacaaacttattagtaataatgatggcggtatctttgatgatccccctgccctctctgaggcaggggtgatgttgccagagcagcctgcacatgacgatatggatgaggatgataatgtatcaatgggtgggcctgatagtcctgattcagtggatcccgttgaaccaatgccaaccatgactgatcaaacaacacttgttccaaatgaggaagaagcatttgcattggagcctattgatataactgttaaagaaacaaaagccaagaggaagaggaagctaattgttgacagtgtcaaagagttggatagcaagacaattagagcccaacttagtgattattcagatattgttactactttggatctggcaccgcccaccaagaaattgatgatgtggaaagagacaggaggagtagaaaaactgttttctttacctgctcagcctttgtggaataacagactactgaagctctttacacgctgtcttacaccgcttgtaccagaagaccttagaaaaaggaggaaaggaggagaggcagataatttggatgaattcctcaaagaatttgaaaatccagaggttcctagagaggaccagcaacagcagcatcagcagcgtgatgttatcgatgagcccattattgaagagccaagccgcctccaggagtcagtgatggaggccagcagaacaaacatagatgagtcagctatgcctccaccaccacctcagggagttaagcgaaaagctggacaaattgacccagagcctgtgatgcctcctcagcaggtagagcagatggaaataccacctgtagagcttcccccagaagaacctccaaatatctgtcagctaataccagagttagaacttctgccagaaaaagagaaggagaaagagaaggaaaaagaagatgatgaagaggaagaggatgaagatgcatcagggggcgatcaagatcaggaagaaagaagatggaacaaaaggactcagcagatgcttcatggtcttcagcgtgctcttgctaaaactggagctgaatctatcagtttgcttgagttatgtcgaaatacgaacagaaaacaagctgccgcaaagttctacagcttcttggttcttaaaaagcagcaagctattgagctgacacaggaagaaccgtacagtgacatcatcgcaacacctggaccaaggttccatattatataaggagctagaagcattatagctagtgtttgattcactagtgcttacaaattgcccccatgtgtaggggacacagaaccctttgagaaaacttagatttttgtctgtacaaagtctttgcctttttccttcttcatttttttccagtacattaaatttgtcaatttcatctttgagggaaactgattagatgggttgtgtttgtgttctgatggagaaaacagcaccccaaggactcagaagatgattttaacagttcagaacagatgtgtgcaatattggtgcatgtaataatgttgagtggcagtcaaaagtcatgatttttatcttagttcttcattactgcattgaaaaggaaaacctgtctgagaaaatgcctgacagtttaatttaaaactatggtgtaagtctttgacaagaaaaaaaaacaaacaaacacttctttccatcagtaacactggcaatcttcctgttaaccactctccttagggatggtatctgaaacaacaatggtcaccctcttgagattcgttttaagtgtaattccataatgagcagaggtgtacgcgaaattgtgttatgactgatagccttcagctacaaaaagataggactgacctggtttaaagtgttctattttgtaaatcattccatttgagtctttctgatgaacttggctatactgaaatctgttattttagtgaggctccaaaatgagcaaagctaggcctgattagagtagagtgactattaaaaaacataactttctaggagctataaatcaaagttttaaaaagatgtttggatatatttgagtattccgatcatgaaaacagaaattgccctgcctactacaaggacagactgatgggaaattatgcacctggtcaacttagcttttaagcagacgatgctgtaaaaactaacggcttctctgatatttattgtaagttttagtactgatctccttttccagtgctgcacactcctggtttggaactttaatagcgttgcaacgaaatcctatatccagtttcctgtaatttaattgaagaaaaatacatccaaataaagactttattattaacagaccagatagcatcagaaatcatgtgactgttatgattatcagaatatgtcttaactttttagggcaaagttaacactgaaagttctagcttaagtgttgaaacttttgtgggaaaaaaaaatcacttttgaaactcagacttcagtgtatacccaataatttaaaattatgtgaaatgttttaaatttgtgaactcgtaattactgttttaatgattcagtttcttcagagtggtaattgtataaaattgctattgcagctttatattcaatatgatgtgcctgtaaaccaaggagttttccccgtttgtaaaaagacattgtagataattgaatgtttgattttagaaaggtcattagtttcttgttacacattttgttagtctggtttttgttgcttatcgggtttaatattgttcttgaaaatagttgatgctatgttatgtataacttttctaataaaagttgtgttataagctgt

SEQ ID NO: 856 - DNA, 3738 bp, Homo sapiens
ctggcgcgcgcgcgcgccattgtgtggctggactcggccgcccctgtggtgtgaggcgcgtgttcgggctcttgccgtccccgcacccgcaccgcggttactggcttgcggtccgccgttcgacaaccagcccttgggtccccgcccgccacggacatgccgcgcgtctacataggacgcctgagctacaacgtccgggagaaggacatccagcgctttttcagtggctatggccgcctcctcgaagtagacctcaaaaatgggtacggcttcgtggagttcgaggactcccgcgacgccgacgacgccgtttacgagctgaacggcaaggagctctgcggcgagcgcgtgatcgtagagcacgcccggggcccgcgtcgcgatcgcgacggctacagctacggaagccgcagtggtggaggtggatacagcagtcggagaacatctggcagagacaaatacggaccacctgttcgtacagaatacaggcttattgtagaaaatctttctagtcggtgcagttggcaagatttaaaggattttatgcgacaagcaggtgaagtaacctatgcggatgcccacaaggaacgaacaaatgagggtgtaattgagtttcgctcctactctgacatgaagcgtgctttggacaaactggatggcacagaaataaatggcagaaatattaggcttattgaagataagccacgcacaagccataggcgatcttactctggaagcagatccaggtctcgatctagaagacggtcacgaagtaggagtcgcaggagcagccgcagtagatctcgaagtatctcaaaaagtcgctcccgttccaggtcgcggagcaaaggtcgatcacgttctcgatcaaaaggcaggaaatctagatcaaagagcaaatctaagcccaagtctgatcggggctcccattcacattctcgaagcagatctaaggatgagtatgagaaatctcgaagcaggtctcggtcccgatcccccaaagaaaatggaaagggtgatataaagtcaaaatccagatcaaggagccagtcccgttccaattcgccgctacctgttccaccctcaaaggcccgttctgtgtcccctccaccaaaaagagctacttcaagatcccgttctagatctcgctcaaagtcaagatcaaggtccaggtcgagttccagagattaactcagaactccttgtttgcacattattatggaacactttcctacttaggcagttactcttccatgtttatacttggcctcttctgcaagaggaatctcttgaaaacaggggcacacagaaatttgatttgtggccaaattggatgaaaaagatgaggctctaaggaaatggtggcatgaagaccctctcccttctttgtagaattaagataactttgattttatagcttttgagctaacgtaacttttgtaaagattaagctcatttagtgttgttttttttttttttttttttttttttttttagtatttcagcaggatctgctggcagggtttttttgttttatttgtttgcttatttttaaattaactgttttgagctttgaatacttaaggctttagagggagaacccaattttcaattatgttggctttttataaagcttgagttatgtaagatttaaataaaagtttgctaccaagatgattgccttattgaataggtcactattaaattcctttaaatgttgatatctgccatttgtggaaacaacgtaaattctacttaagtgtaaacaaggcaagcctcagaccagcaataaattactcagtttggataacattattttgtgcagttaatcaaatttgccaaagtctttatctgcccctttaacaagttgagtaaaaataaaaggtattttttagtcaatgtgttccatgattttgcttaaattaatacttttaagtaatggaacttttttcaaaggcaaatttaaactatttaagaaatagctcctaatacttgggatcttgtttagagaatccactttctggaagttctcagcataattagtgttgagagtggttcagttgtctttaatgtttgtcatgtggaaatggaagtagcctctttttgttctgaaattgagtttattcaaagtgtaaaagcacatactgcattttctgctgaaagatcattatgtttaacaggcacttaatctcagtaaagtcagttgccagttaagttccacccagtagtcagtcccctttgtagttagtgggattatttgataattggttagatcatacttgtaaattttaatgctttgtgtaattggtttgaaaaacagtgaaatgggtaaacgcaaaacttttgtactttattacgagtaaagtgtaatgagtactgtggaaaccaaatttgaatactgcaaatttgtaggagttactaggttagcaattagtccatacatccataagcctgatgagttgaaattgcagtttgagaagtgaattaaccttacatccctttgttcagataccttaaaagttactttatttaaaagcatttattaatcttagtctgaaatcaaaatatagattaattggctcagctttaatacctttctaggaggtgtcacaatgtagggtaccaagggttggattgtgatggggcatggtcgtacactgctcattgtgccacaggtgtgactggaaagcatgatattctagggttggtttgtagattcaaataatccagaaatatacctaataagattgagtgaaaaatttgagtcaaatatctagggcattcacagagtagctgtgagttcttggtaatgtgaaaaaggccttgtttttcagaaattcctgggtttcctgttaaaaaatcttaaagcccaaccttaggaatatagtgccccaaaaggcggatgcttcttccattatcttattttctttgatactttatttaattagatgtttataaagaaatgggtttatttttccagcataaacctcagaatttaaggaaagaaaatgatgtctgttgttatagttcattgttttgcctactcagcagaagtgatgactcttaaaaattggctttgaccaaagttctcttgttttcagggaaagaacataaaagctttttgaactacagcctttttaaaagagggatgggaggatattacagtaagaaattaggctttctaaaagtatgaaacatccttcaactgggctctcttgttaataggacatcatatggtaatagactggtttgactatattgttagctgccacagtaagcaggtcattgtataggtaaatgcctgcacccataattttctagtaatagccacgaccaatttattaacagtcagggcctatccttgcctgtagttctcagtcactggatgcacaaaatcactgtgtaacattggctcacttggtgagcatagggttgactgataaaatgtttaattcccttgctagcttgtgagaagaatgagttgatgacatgctccataccagtggctagatggagtattaaggtggagcagaaaagaagtgagaacatcttgattcccctttcttttacttgatggtgtttatgaacatgccgtagtgcctttatggccagtttgagtcctgcctactttgacttttacgttcccattcctgtgttaccaccttcctcccgatttgttcacctattttgtgctttaaatctcaataaaatacttactgaggaaaaaaaaaaaaaaaa

SEQ ID NO: 857 - DNA, 8187 bp, Homo sapiens
cccgagaagcggcggggcggcgggccggcgggcggggcgcagagccaggcagcgcaggtatagccaggctggagaaaagaagctgccaccatggttgcactttcactgaagatcagcattgggaatgtggtgaagacgatgcagtttgagccgtctaccatggtgtacgacgcctgccgcatcattcgtgagcggatcccagaggccccagctggtcctcccagcgactttgggctctttctgtcagatgatgaccccaaaaagggtatatggctggaggctgggaaagctttggactactacatgctccgaaatggggacactatggagtacaggaagaaacagagacccctgaagatccgtatgctggatggaactgtgaagacgatcatggtggatgactctaagactgtcactgacatgctcatgaccatctgtgcccgcattggcatcaccaatcatgatgaatattcattggttcgagagctgatggaagagaaaaaggaggaaataacagggaccttaagaaaggacaagacattgctgcgagatgaaaagaagatggagaaactaaagcagaaattgcacacagatgatgagttgaactggctggaccatggtcggacactgagggagcagggtgtagaggagcacgagacgctgctgctgcggaggaagttcttttactcagaccagaatgtggattcccgggaccctgtacagctgaacctcctgtatgtgcaggcacgagatgacatcctgaatggctcccaccctgtctcctttgacaaggcctgtgagtttgctggcttccaatgccagatccagtttgggccccacaatgagcagaagcacaaggctggcttccttgacctgaaggacttcctgcccaaggagtatgtgaagcagaagggagagcgtaagatcttccaggcacacaagaattgtgggcagatgagtgagattgaggccaaggtccgctacgtgaagctagcccgttctctcaagacttacggtgtctccttcttcctggtgaaggaaaaaatgaaagggaagaacaagctagtgcccaggcttctgggcatcaccaaggagtgtgtgatgcgagtggatgagaagaccaaggaagtgatccaggagtggaacctcaccaacatcaaacgctgggctgcgtctcccaaaagcttcaccctggattttggagattaccaagatggctattactcagtacagacaactgaaggggagcagattgcacagctcattgccggctacatcgatatcatcctgaagaagaaaaaaagcaaggatcactttgggctggaaggagatgaggagtctactatgctggaggactcagtgtcccccaaaaagtcaacagtcctgcagcagcaatacaaccgggtggggaaagtggagcatggctctgtggccctgcctgccatcatgcgctctggagcctctggtcctgagaatttccaggtgggcagcatgccccctgcccagcagcagattaccagcggccagatgcaccgaggacacatgcctcctctgacttcagcccagcaggcactcactggaaccattaactccagcatgcaggccgtgcaggctgcccaggccaccctggatgactttgacactctgccgcctcttggccaggatgctgcctctaaggcctggcgtaaaaacaagatggatgaatcaaagcatgagatccactctcaggtagatgccatcacagctggtactgcgtctgtggtgaacctgacagcaggggaccctgctgagacagactataccgcagtgggctgtgcagtcaccacaatctcctccaacctgacggagatgtcccgtggggtgaagctgctggctgccttgctggaggacgaaggcggcagtggtcggcccctgttgcaggcagcaaagggccttgcgggagcagtgtcagaactgctgcgcagtgcccaaccagccagtgctgagccccgtcagaacctgctgcaagcagctgggaacgtgggccaggccagtggggagctgttgcaacaaattggggaaagtgatactgacccccacttccaggatgcgctaatgcagctcgccaaagctgtggcaagtgctgcagctgccctggtcctcaaggccaagagtgtggcccagcggacagaggactcgggacttcagacccaagttattgctgcagcaacacagtgtgccctatccacttcccaactagtggcctgtactaaggtggtggcacctacaatcagctcacctgtctgccaagagcaactggtggaggctggacgactggtagccaaagccgtggagggctgtgtgtctgcctcccaggcagctacagaggatgggcaactgttgcgaggggtaggagcagcagccacagctgtcacccaggccctaaatgagctgctgcagcatgtgaaagcccatgccacaggggctgggcctgctggccgttatgaccaggctactgacaccatcctaaccgtcactgagaacatctttagctccatgggtgatgctggggagatggtgggacaggcccgcatcctggcccaagccacatctgacctggtcaatgccatcaaggctgatgctgagggggaaagtgatctggagaactcccgcaagctcttaagtgctgccaagatcctagctgatgccacagccaagatggtagaggctgccaagggagcagctgcccaccctgacagtgaggagcagcagcagcggctgcgggaggcagctgaggggctgcgcatggccaccaatgcagctgcgcagaatgccatcaagaaaaagctggtgcagcgcctggagcatgcagccaagcaggctgcagcctcagccacacagaccatcgctgcagctcagcacgcagcctctacccccaaagcctctgccggcccccagcccctgctggtgcagagctgcaaggcagtggcagagcagattccactgctggtgcagggcgtccgaggaagccaagcccagcctgacagccccagcgctcagcttgccctcattgctgccagccagagcttcctgcagccaggtgggaagatggtggcagctgcaaaggcctcagtgccaacgattcaggaccaggcttcagccatgcagctgagtcagtgtgccaagaacctgggcaccgcgctggctgaactccggacggctgcccagaaggctcaggaagcatgtggacctttggagatggattctgcactgagtgtggtacagaatctagagaaagatctacaggaagtgaaggcagcagctcgagatggcaagcttaaacccttacctggggagacaatggagaagtgtacccaggacctgggcaacagcaccaaagccgtgagctcagccatcgcccagctactgggagaggttgcccagggcaatgagaattatgcaggtattgcagctcgggatgtggcaggtgggctgcggtcactggcccaggccgctaggggagtcgctgcactgacgtcagatcctgcagtgcaggccattgtacttgatacggccagtgatgtgctggacaaggccagcagcctcattgaggaggcgaaaaaggcagctggccatccaggggaccctgagagccagcagcggcttgcccaggtggctaaagcagtgacccaggctctgaaccgctgtgtcagctgcctacctggccagcgcgatgtggataatgccctgagggcagttggagatgccagcaagcgactcctgagtgactcgcttcctcctagcactgggacatttcaagaagctcagagccggttgaatgaagctgctgctgggctgaatcaggcagccacagaactggtgcaggcctctcggggaacccctcaggacctggctcgagcctcaggccgatttggacaggacttcagcaccttcctggaagctggtgtggagatggcaggccaggctccgagccaggaggaccgagcccaagttgtgtccaacttgaagggcatctccatgtcttcaagcaaacttcttctggctgccaaggccctgtccacggaccctgctgcccctaacctcaagagtcagctggctgcagctgccagggcagtaactgacagcatcaatcagctcatcactatgtgcacccagcaggcacccggccagaaggagtgtgataacgccctgcgggaattggagacggtccgggaactcctggagaacccagtccagcccatcaatgacatgtcctactttggttgcctggacagtgtaatggagaactcaaaggtgctgggcgaggccatgactggcatctcccaaaatgccaagaacggaaacctgccagagtttggagatgccatttccacagcctcaaaggcactttgtggcttcaccgaggcagctgcacaggctgcatatctggttggtgtctctgaccccaatagccaagctggacagcaagggctagtggagcccacacagtttgcccgtgcaaaccaggcaattcagatggcctgccagagtttgggagagcctggctgtacccaggcccaggtgctctctgcagccaccattgtggctaaacacacctctgcactgtgtaacagctgtcgcctggcttctgcccgtaccaccaatcctactgccaagcgccagtttgtacagtcagccaaggaggtggccaacagcacagctaatcttgtcaagaccatcaaggcgctagatggggccttcacagaggagaaccgtgcccagtgccgagcagcaacagcccctctgctggaggctgtggacaatctgagtgcctttgcgtccaaccctgagttctccagcattcctgcccagatcagccctgagggtcgggctgccatggagcccattgtgatctctgccaagacaatgttagagagtgccgggggactcatccagacagcccgggccctcgcagtcaatccccgggaccccccgagctggtcggtgctggccggccactcccgtactgtctcagactccatcaagaagctaattacaagcatgagggacaaggctccagggcagctggagtgtgaaacggccattgcagctctgaacagttgtctacgggacctagaccaggcttccctcgctgcagtcagccagcagcttgctccccgtgagggaatctctcaagaggccttgcacactcagatgctcactgcagtccaagagatctcccatctcattgagccgctggccaatgctgcccgggctgaagcctcccagctgggacacaaggtgtcccagatggcgcagtactttgagccgctcaccctggctgcagtgggtgctgcctccaagaccctgagccacccgcagcagatggcactcctggaccagactaaaacattggcagagtctgccctgcagttgctatacactgccaaggaggctggtggtaacccaaagcaagcagctcacacccaggaagccctggaggaggctgtgcagatgatgaccgaggccgtagaggacctgacaacaaccctcaacgaggcagccagtgctgctggggtcgtgggtggcatggtggactccatcacccaggccatcaaccagctagatgaaggaccaatgggtgaaccagaaggttccttcgtggattaccaaacaactatggtgcggacagccaaggccattgcagtgaccgttcaggagatggttaccaagtcaaacaccagcccagaggagctgggccctcttgctaaccagctgaccagtgactatggccgtctggcctcggaggccaagcctgcagcggtggctgctgaaaatgaagagataggttcccatatcaaacaccgggtacaggagctgggccatggctgtgccgctctggtcaccaaggcaggcgccctgcagtgcagccccagtgatgcctacaccaagaaggagctcatagagtgtgcccggagagtctctgagaaggtctcccacgtcctggctgcgctccaggctgggaatcgtggcacccaggcctgcatcacagcagccagcgctgtgtctggtatcattgctgacctcgacaccaccatcatgttcgccactgctggcacgctcaatcgtgagggtactgaaactttcgctgaccaccgggagggcatcctgaagactgcgaaggtgctggtggaggacaccaaggtcctggtgcaaaacgcagctgggagccaggagaagttggcgcaggctgcccagtcctccgtggcgaccatcacccgcctcgctgatgtggtcaagctgggtgcagccagcctgggagctgaggaccctgagacccaggtggtactaatcaacgcagtgaaagatgtagccaaagccctgggagacctcatcagtgcaacgaaggctgcagctggcaaagttggagatgaccctgctgtgtggcagctaaagaactctgccaaggtgatggtgaccaatgtgacatcattgcttaagacagtaaaagccgtggaagatgaggccaccaaaggcactcgggccctggaggcaaccacagaacacatacggcaggagctggcggttttctgttccccagagccacctgccaagacctctaccccagaagacttcatccgaatgaccaagggtatcaccatggcaaccgccaaggccgttgctgctggcaattcctgtcgccaggaagatgtcattgccacagccaatctgagccgccgtgctattgcagatatgcttcgggcttgcaaggaagcagcttaccacccagaagtggcccctgatgtgcggcttcgagccctgcactatggccgggagtgtgccaatggctacctggaactgctggaccatgtactgctgaccctgcagaagccaagcccagaactgaagcagcagttgacaggacattcaaagcgtgtggctggttccgtcactgagctcatccaggctgctgaagccatgaagggaacagaatgggtagacccagaggaccccacagtcattgctgagaatgagctcctgggagctgcagccgccattgaggctgcagccaaaaagctagagcagctgaagccccgggccaaacccaaggaggcagatgagtccttgaactttgaggagcagatactagaagctgccaagtccattgcagcagccaccagtgcactggtaaaggctgcgtcggctgcccagagagaactagtggcccaagggaaggtgggtgccattccagccaatgcactggacgatgggcagtggtcccagggcctcatttctgctgcccggatggtggctgcggccaccaacaatctgtgtgaggcagccaatgcagctgtacaaggccatgccagccaggagaagctcatctcatcagccaagcaggtagctgcctccacagcccagctccttgtggcctgcaaggtcaaggctgaccaggactcggaggcaatgaaacgacttcaggctgctggcaacgcagtgaagcgagcctcagataatctggtgaaagcagcacagaaggctgcagcctttgaagagcaggagaatgagacagtggtggtgaaagagaagatggttggcggcattgcccagatcatcgcagcacaggaagaaatgcttcggaaggaacgagagctggaagaggcgcggaagaaactggcccagatccggcagcagcagtacaagtttctgccttcagagcttcgagatgagcactaaagaagcctcttctatttaatgcagacccggcccagagactgtgcgtgccactaccaaagccttctgggctgtcggggcccaacctgcccaaccccagcactccccaaagtgcctgccaaaccccagggcctggccccgcccagtcccgcagtacatcccctgtcccctccccaaccccaagtgccttcatgccctagggccccccaagtgcctgcccctccccagagtattaacgctccaagagtattattaacgctgctgtacctcgatctgaatctgccggggccccagcccactccaccctgccagcagcttccagccagtccccacagcctcatcagctctcttcaccgttttttgatactatcttcccccacccccagctacccataggggctgcagagttataagccccaaacaggtcatgctccaataaaaatgattctacctacaaaaaaaaaaaaaaaaaaa

SEQ ID NO: 858 - DNA, 1136 bp, Homo sapiens
cgggtgctgggggctcgagaaccgagcggagctggttgagccttcaaagtcctaaaacgcgcggccgtgggttcggggtttattgattgaattccgccggcgcgggagcctctgcagagagagagcgcgagagatggagatgggcagacggattcatttagagctgcggaacaggacgccctctgatgtgaaagaacttgtcctggacaacagtcggtcgaatgaaggcaaactcgaaggcctcacagatgaatttgaagaactggaattcttaagtacaatcaacgtaggcctcacctcaatcgcaaacttaccaaagttaaacaaacttaagaagcttgaactaagcgataacagagtctcagggggcctggaagtattggcagaaaagtgtccgaacctcacgcatctaaatttaagtggcaacaaaattaaagacctcagcacaatagagccactgaaaaagttagaaaacctcaagagcttagaccttttcaattgcgaggtaaccaacctgaacgactaccgagaaaatgtgttcaagctcctcccgcaactcacatatctcgacggctatgaccgggacgacaaggaggcccctgactcggatgctgagggctacgtggagggcctggatgatgaggaggaggatgaggatgaggaggagtatgatgaagatgctcaggtagtggaagacgaggaggacgaggatgaggaggaggaaggtgaagaggaggacgtgagtggagaggaggaggaggatgaagaaggttataacgatggagaggtagatgacgaggaagatgaagaagagcttggtgaagaagaaaggggtcagaagcgaaaacgagaacctgaagatgagggagaagatgatgactaagtggaataacctattttgaaaaattcctattgtgatttgactgtttttacccatatcccctctcccccccccctccaatcctgccccctgaaacttatttttttctgattgtaacgttgctgtgggaacgagaggggaagagtgtactgggggttgcggggggagggatggcgggtgggggtggaataaaatactatttttactgccactctttaaaaaaaaaaaaaaaaaaaaaaaaaaaaaaaaaaaaaaa

SEQ ID NO: 859 - DNA, 3604 bp, Homo sapiens
gcttagcccaggcgcgggctgagagtcagttcgccaggtgggcctggagccatgggctgggtgggcgggcggcgccgggattctgcgtcaccacctgggcggagccgttctgctgctgacgacatcaacccggcacctgccaacatggaaggtggcggcggcagcgtcgctgtagctggcctcggagctcgaggctctggagcggctgcagctacagtccgggaacttctgcaggacgggtgttatagtgactttttaaacgaagactttgatgtaaagacttatacttctcaatctattcatcaagctgtaattgctgaacaactagcaaaacttgcccaaggaatcagtcagttggacagagaactacacttacaggttgttgcaagacatgaagatttactggcacaagcaactgggattgagtcgttggaaggtgttcttcagatgatgcagacgagaattggggctttacagggagctgttgataggataaaagcaaaaattgttgaaccatacaataagatagttgcccggactgcacaactagcaagacttcaggttgcctgtgatttgcttcggaggattattcgtatcttgaatctcagtaagagactccaaggacaactgcaagggggaagtagagagataacaaaagctgctcagagtctcaatgaacttgattatctttctcaaggaatagatctttctggaatagaagtgatagaaaatgatctactttttattgcaagagcccgacttgaagtggaaaatcaagctaagcgcctactagagcagggtttggagactcagaatccaactcaagtcggaacagctcttcaggttttctataatcttggaactttgaaggatactattaccagtgttgtggatggatattgtgctactttagaagaaaatatcaacagtgcattagacataaaagttttgactcagccttcccagtcagctgtgagagggggacctggacgatctaccatgccaaccccaggaaatactgcagctttgcgtgcctcactctggaccaatatggagaaacttatggatcatatttatgctgtttgtggacaggtacaacatctacaaaaagtattggccaagaagagagatcctgtttctcacatttgtttcattgaagaaatagttaaggatggacaaccggaaattttctacacattttggaattcagttactcaggcactttcttctcaatttcatatggcaacaaactcttcgatgtttttgaagcaggcatttgaaggagaataccctaaattattacgtctttataatgacttatggaagcgtcttcaacaatacagtcagcatatccaagggaattttaatgcaagtggaactacagacctctatgttgacctacaacacatggaagatgatgcacaagatatattcataccaaaaaagccagattatgatccagaaaaggctttgaaagactcactacaaccctatgaggctgcttatctatcaaaatccttatctcgactcttcgatcctatcaacttggtttttcccccgggtggtcgtaatcctccttcctctgatgaacttgatggtattattaaaactatagcaagtgaactaaatgttgctgctgttgatacaaacctcacattagctgtgtcaaaaaatgtggcaaagaccatccagttatacagtgtaaaatcagagcagcttctctccacacaaggagatgcaagtcaggtgattgggcctcttactgaaggacagagaagaaatgtggcagtagtgaattcattgtataagttgcaccaatcagtaacaaaggttgtttccagtcagagctcattcccactggcagctgagcaaactataatttcagctctaaaggctattcatgctcttatggaaaatgctgtgcaacccttactcacttctgtgggagatgctatagaggccataatcatcaccatgcatcaagaagacttttctgggtcattatccagctcaggaaaacctgatgttccttgttctctgtacatgaaggagctacaaggtttcattgccagagttatgagtgactattttaaacactttgaatgcttggattttgtctttgacaacactgaggctattgcccaaagagctgttgaactttttatccgccatgccagtctcataagacctcttggtgaaggtgggaaaatgcgacttgctgctgattttgcacagatggagttggctgtgggtccattctgtagacgagtatctgatttaggaaagtcctatcggatgctgagatcattcagacctctgctcttccaggcaagtgaacatgtagccagtagtcctgcattgggggatgtgattccgttcagcatcattattcagtttttgttcacgagagcacccgctgaactgaaatctcctttccagagggcagagtggtcccacacacgcttctctcagtggctggatgaccatccatctgaaaaggacaggctcctcctcatcaggggagccctggaagcttatgttcaatcagtgagaagtagagaaggcaaagaatttgcaccagtttatcccataatggttcagctgcttcaaaaggctatgtctgctcttcagtaatgacatgaaatctttgttcatctccactttgtgctaacccattcatagttggcagttaaacacatactccaaaagactgctactatctactattttaagaatgtaattgattgttcggtatttcctatcgacgtttatttacctctttagcacttatactttagcataaaaaatgttgagttatcaccacctttcaattccatggacctgatttttccagaaagatgttttcctctttcagatttttgtacaaggctaaaatgtctttcccatccataaccaagtcctcctatgggtacataaacccaaagtccccacttcttttaaagggatatgatcaagttataacatgtaccctgcttcccccaaccctgccttcttcactaaataagcatgtagctcagtggtttccaaatttggctgcacattcataccaatcaccaggggatttttttaaaatcctgatgcccaacttgcactccacattaattaacatgtctaggagtgggagcctgacagacaccactattaaaaaaaaaaaaaatccccaaaatgattccaatagacaacaaagttgaggaaccactggcacatcccaagctaagatacaaggttaaatggcctttttaagtatgtcatactggatctttaaataaagcaaggcttttgttacactttgtcatgttattaaaagcagacctttgggctgtttaaccgtgtaacaaaaatgccacgtgaaaaataaaaatttttattgtatagcaattctctataaatagtagataatctaagtccttattttctgatggctcttgttccactattaacattgtttttaatttttaaaatcctatcagcagcctcctaattagcagtgttaggaatttgccttatgttttccatctcatctcctgaacctgttattctgagaactcataaataaaattcagccaagattaatcaatcaatc

SEQ ID NO: 860 - DNA, 1742 bp, Homo sapiens
tctttgaagcttcaaggctgctgaataatttccttctcccattttgtgcctgcctagctatccagacagagcagctaccctcagctctagctgatactacagacagtacaacagatcaagaagtatggcagtgacaactcgtttgacatggttgcacgaaaagatcctgcaaaatcattttggagggaagcggcttagccttctctataagggtagtgtccatggattccgtaatggagttttgcttgacagatgttgtaatcaagggcctactctaacagtgatttatagtgaagatcatattattggagcatatgcagaagagagttaccaggaaggaaagtatgcttccatcatcctttttgcacttcaagatactaaaatttcagaatggaaactaggactatgtacaccagaaacactgttttgttgtgatgttacaaaatataactccccaactaatttccagatagatggaagaaatagaaaagtgattatggacttaaagacaatggaaaatcttggacttgctcaaaattgtactatctctattcaggattatgaagtttttcgatgcgaagattcactggatgaaagaaagataaaaggggtcattgagctcaggaagagcttactgtctgccttgagaacttatgaaccatatggatccctggttcaacaaatacgaattctgctgctgggtccaattggagctgggaagtccagctttttcaactcagtgaggtctgttttccaagggcatgtaacgcatcaggctttggtgggcactaatacaactgggatatctgagaagtataggacatactctattagagacgggaaagatggcaaatacctgccgtttattctgtgtgactcactggggctgagtgagaaagaaggcggcctgtgcagggatgacatattctatatcttgaacggtaacattcgtgatagataccagtttaatcccatggaatcaatcaaattaaatcatcatgactacattgattccccatcgctgaaggacagaattcattgtgtggcatttgtatttgatgccagctctattcaatacttctcctctcagatgatagtaaagatcaaaagaattcgaagggagttggtaaacgctggtgtggtacatgtggctttgctcactcatgtggatagcatggatttgattacaaaaggtgaccttatagaaatagagagatgtgagcctgtgaggtccaagctagaggaagtccaaagaaaacttggatttgctctttctgacatctcggtggttagcaattattcctctgagtgggagctggaccctgtaaaggatgttctaattctttctgctctgagacgaatgctatgggctgcagatgacttcttagaggatttgccttttgagcaaatagggaatctaagggaggaaattatcaactgtgcacaaggaaaaaaatagatatgtgaaaggttcacgtaaatttcctcacatcacagaagattaaaattcagaaaggagaaaacacagaccaaagagaagtatctaagaccaaagggatgtgttttattaatgtctaggatgaagaaatgcatagaacattgtagtacttgtaaataactagaaataacatgatttagtcataattgtgaaaaataataataatttttcttggatttatgttctgtatctgtgaaaaaataaatttcttataaaactcgggtctaaaaaaaaaaaaaaaaaa

SEQ ID NO: 861 - DNA, 6101 bp, Homo sapiens
agccaggaggcggaagttcccgcgggcggtggggacggcgccctcaccgcgagtcacttgtcagcccttgtctgaggcggaggcagccccgcgccgcgccggacccgagcatatttcattttctgtcattggactttgagccattagaaccatgagcaactacagtgtgtcactggttggcccagctccttggggtttccggctgcagggcggtaaggatttcaacatgcctctgacaatctctagtctaaaagatggcggcaaggcagcccaggcaaatgtaagaataggcgatgtggttctcagcattgatggaataaatgcacaaggaatgactcatcttgaagcccagaataagattaagggttgtacaggctctttgaatatgactctgcaaagagcatctgctgcacccaagcctgagccggttcctgttcaaaagggagaacctaaagaagtagttaaacctgtgcccattacatctcctgctgtgtccaaagtcacttccacaaacaacatggcctacaataaggcaccacggccttttggttctgtgtcttcaccaaaagtcacatccatcccatcaccatcgtctgccttcaccccagcccatgcgaccacctcatcacatgcttccccttcacccgtggctgccgtcactcctcccctgttcgctgcatctggactgcatgctaatgccaatcttagtgctgaccagtctccatctgcactgagcgctggtaaaactgcagttaatgtcccacggcagcccacagtcaccagcgtgtgttccgagacttctcaggagctagcagagggacagagaagaggatcccagggtgacagtaaacagcaaaatggcccaccaagaaaacacattgtggagcgctatacagagttttatcatgtacccactcacagtgatgccagcaagaagagactgattgaggatactgaagactggcgtccaaggactggaacaactcagtctcgctctttccgaatccttgcccagatcactgggactgaacatttgaaagaatctgaagccgataatacaaagaaggcaaataactctcaggagccttctccgcagttggcttcctcggtagcttccacacggagcatgcccgagagcctggacagcccaacctctggcagaccaggggttaccagcctcacaactgcagctgccttcaagcctgtaggatccactggcgtcatcaagtcaccaagctggcaacggccaaaccaaggagtaccttccactggaagaatctcaaacagcgctacttactcaggatcagtggcaccagccaactcagctttgggacaaacccagccaagtgaccaggacactttagtgcaaagagctgagcacattccagcagggaaacgaactccgatgtgcgcccattgtaaccaggtcatcagaggaccattcttagtggcactggggaaatcttggcacccagaagaattcaactgcgctcactgcaaaaatacaatggcctacattggatttgtagaggagaaaggagccctgtattgtgagctgtgctatgagaaattctttgcccctgaatgtggtcgatgccaaaggaagatccttggagaagtcatcaatgcgttgaaacaaacttggcatgtttcctgttttgtgtgtgtagcctgtggaaagcccattcggaacaatgtttttcacttggaggatggtgaaccctactgtgagactgattattatgccctctttggtactatatgccatggatgtgaatttcccatagaagctggtgacatgttcctggaagctctgggctacacctggcatgacacttgctttgtatgctcagtgtgttgtgaaagtttggaaggtcagacctttttctccaagaaggacaagcccctgtgtaagaaacatgctcattctgtgaatttttgaaagtcaacagttcaggagaagagaaggaatttgaagagaaaaaggaaaattaaaattactaattaatttttagattcaatatttatatggagttttgaaaaataatagtggccctgaaggaataaattccagctttaaaaaccaagtctgaggaaatatttggcttcataaagtaaagagacggtttggcatttattattactttttcctgtattttatgcccataaaataagctttataaaaaccaatttcctgatggactattaaattcatcttagaataaattagtgaagaatttaattttagaataaataatccaatctgaaataattataccttctttccttgttaggtagttatgagtaaatctgcaaaaggcaatgaaaatgccttaaattttatcaataacagaattattgtatttaaaaaaaaactaatacttatctttaaaatagtaaataggattttaaacagagaattttatcagtaataggtgtcagtttttaaaaaattgcttgtaggctgagcgcggtggctcacgcctgtaatcccagcactttgggaggccaaggtgggtggaccacatgaggtcaggagtttgagatcagcctggccaacatggtgaaaccccatctctactaaaaatacaaaaattagccggacgcagtggcacgcgcctgtaatcccagctactcaagaggctgaggcacgagaatcacttgaacccgggagggagaggttgcagtgagccaagatcgtaccactgcactccagcctgggtgacagagtgagactctgtctccaaaaaaaaactttgcttgtatattatttttgccttacagtggatcattctagtaggaaaggacaataagattttttatcaaaatgtgtcatgccagtaagagatgttatattcttttctcatttcttccccacccaaaaataagctaccatatagcttataagtctcaaatttttgccttttactaaaatgtgattgtttctattcattgtgtatgcttcatcacctatattaggcaaattccatttttttcccttgtgctaaggtaaagatttaattaaataattttggcctctcatagttttctctctctttaaagagaataaatagagggccaggtgtggtggctcacgcctgtgatcccagcactttgggaggccaagacgggcggatcatgaggtcaagagatcaagatcatcctggccaacatggtgaaaccctgtctctactaaaaatacaaaaatgagctgggcatggtggggcgtgcctgtagtcccatgtacttgggaggctgaggcaggaaaattcttgaacccaggagacggaagttgcagtgagctgagatcacaccactgcactccagcctggtgacagagcaagactccggctcttaaaaaaaaaaaaaaaaaaaaaaaaagagagagagagaataaatagaaaagaatgtggctgggaattgtgaatcagaagattataccccccaattgtttttcaatccccttttctcaaataataaattagttaaatcagtttctgagttatgccactggctgatgaagagttgagaggtctctttgcagaatgatctttttgtttcgttttgtttcttcttctgcatttaaaaattaaaagattggtttgaggatgtgatgaaattgagactttttgtggttttctctcaataataagtgaaccaatttcaaatgtgatcacaaagtttggaaagcttttattcacagaggttgggtagtgttgggaggggagtttaattactcagattggcctgttatttgatttcctcctttgggaaaagaattatgtagataccacatggagacagggaaacaattgtggtaaaactgtggatcctgttgctatttgcccagtgagaaaacagattctggtatttgatttggtttttctctttgtttccagaatggatgaaagtccatgaacctcctaagttataatttaaatttgtttggggcaaggtgattttatagtcgagacagagccctaggtccttcctgccccatcactcacttacgacatcacttccattgtgtgcatgtttgttatagaggaggttttaggctacaatatttgtttaacctccctaagaactttcaaggcatctgtcctgaaagctgttaatttatggtctagcagatttatattatatgcagataataattaactggggataaaagaatggcaaggggtgacacaaagtagcaaactgaatacttctccaatagcaaccccaagctacctcctcaccctgcatcttggagggaggcaggaaatttcttttgaaataaagtgctggagctgaattctgcattatttatcgttgctgctgaaaccacctataaaagacttgctggctaatgtgcattgtcatataatgtacactgtcacatctttacagtcttgtatgttatagaatacaaaataagttgatggttttgtttggtgtgagctttttgtttgtttgtttagttttgccttcataggttatatgccaagatagtatttgataagtcaatgacatttggatgttttcttcaaagaattttatttgacccagatttcttataaagttatcttacattaaggatgtcattttcatcagaccttctttctacatattattcatgaagcataatgttgcatttctccaaattttatgcctgaaagggtagtgttgcttcctaaggtatcatgttgtctttgtgctttgtccatctcttccgtggcgaagctttatatctgttcctaaaacagttaatcctgtgaaataaatattgaacataatccagaagaatctctctgtttcccttggggaatgccatatttaattcaccagcagtaatcctttaataactggcagagcactttattcttctggtgagctccctgaatatttatttttctgattataaattttctatattagtagcattttttaattattacttcttcactatagagcatttacttttagtctctagatgtatattttggaatgctgtacttggcataacatagattaaaatcataatgcatgactaaaaactccttggatttatttcccattttaaaatttttagcggtaagttcagatttataatctttctctagacttccatggtctgaatgttgcctgctgaagtagcaacctaaaaagtatcccctgcttatgcttgtccagttggccctccatgtccataggcttcgcatctgtgattcagcccactgtgggtcaaaaatatttggggaaaaaaatggatggttgcgcctttgctgaacatgtacaaacttttttttgtcattaaacaatatagtataacaactatttacaaagcatttacattgtattagctattataggtaatctagagatgatttaaagtgtatggtaggatgtgcataggttatatgcaaatactacaccattttctataagggacttgaacatcatggactttagtatcctagggggttcttggaacccatcacccataggggcaccataggacaactatagtaccgtgtttatttcctattaattcaggttccgtttagagtctaaaactaaaacctaatcatttagtcacagtgtaaaaacaaatggaaataacagctcaaatcttcaaaatattactatagcattatgtttaaaataatctacaacaaaaatgtaccattttcaagcagtactacattaggagcccttttatagaaaataatttcttctttacccccgttccagtgtgaatctagtattctgttaacatttgtgtggcatttggagtttgtcatccccattgaagggagagccttctcagacatgaagcaagggaaacatactgaatagttttacacaaatttgatctggcttccatttgtccccctcatttcccaaatgtttaaatgtattggatttggattctcaatgtataagttgccttatctgttaatgtctatcttctgtctctttaattttgtatatctgctgttttgcttttggatacattttctaattagaagtcacatgataaatataatcagtatagtaataataccataatgtgcacatactcaataaataaatgactgcattgttgtaaatga

SEQ ID NO: 862 - DNA, 3450 bp, Homo sapiens
gatgcgtcactgatcggtgaggcgcggccgaggggtcggctttcctcgcgagcctgcggctgggcttcttctcagttagtgccttccacccgggagcgacccttgggagagggagtttcaggaagctcaccgagcaggggcggcccactggcctccgggggcggaggagttggcaaggggtcagcgggctcagccagaagggaagaatgaggggacaggggtactggactccccggctcagcctgcgagagagcgccaagtttccggagggagagggtagaaactggagggggtggacctgtcactcacgggactgagggtccttttctcccgctcccaggaggaacgagaatgaatatgactcaagcccgggttctggtggctgcagtggtggggttggtggctgtcctgctctacgcctccatccacaagattgaggagggccatctggctgtgtactacaggggaggagctttactaactagccccagtggaccaggctatcatatcatgttgcctttcattactacgttcagatctgtgcagacaacactacaaactgatgaagttaaaaatgtgccttgtggaacaagtggtggggtcatgatctatattgaccgaatagaagtggttaatatgttggctccttatgcagtgtttgatatcgtgaggaactatactgcagattatgacaagaccttaatcttcaataaaatccaccatgagctgaaccagttctgcagtgcccacacacttcaggaagtttacattgaattgtttgatcaaatagatgaaaacctgaagcaagctctgcagaaagacttaaacctcatggccccaggtctcactatacaggctgtgcgtgttacaaaacccaaaatcccagaagccataagaagaaattttgagttaatggaggctgagaagacaaaactccttatagctgcacagaaacaaaaggttgtggaaaaagaagctgagacagagaggaaaaaggcagttatagaagcagagaagattgcacaagtggcaaaaattcggtttcagcagaaagtgatggaaaaagaaactgaaaagcgcatttctgaaatcgaagatgctgcattcctggcccgagagaaagcgaaagcagatgctgaatattatgctgcacacaaatatgccacctcaaacaagcacaagttgaccccggaatatctggagctcaaaaagtaccaggccattgcttctaacagtaagatctattttggcagcaacatccctaacatgttcgtggactcctcatgtgctttgaaatattcagatattaggactggaagagaaagctcactcccctctaaggaggctcttgaaccctctggagagaacgtcatccaaaacaaagagagcacaggttgatgcaagaggtggaaatgttctccatatcaagatgtggcccaaggggttaagtgggaacaatcattatacggactcttcagatttacagagaacttacacttcatctgttccacctctcctgcgatagtcctgggtgctccactgattggaggatagagccagctgtctgacacacaaatggtcttttcagccacagtcttatcaagtatcctatatgtattcctttctaaactgctactcatgaatgaggaaagtctgatgctaagatactgcctgcactggaatgttaaacactaaatatataacaagctgtgttttcctaagctgagatctgttgaataatgtttacattcgtcccccggggaaatgtatgctcagccaccattcaagagatgactgagaaggagatggtaagttcaagaagactgattgcacctgggacccaggccctttctttgggatccagtcccagccttcatccatgtgattaagatccaggccgctgaagttccccaggaaatgatcttccacttgagcaaccttttacttgatacgatttgcacctttctgttttcctgcagtcagggtggtggcctgcagggacctgagctttgctacccaaccagattcctcatagagattcctaatcactagtttcttgtattcataaactcagagatacagagggcttggtttgaagttggggtgagatgaaacctttgctctgagccaaagctctggggccttgcattccctgcattgggttgatgactgtcagcatcactgccgcaggccatgcttgactaaggtacctggttttagccacagccacctccttgtatgttacctttcagctctggccaagagtgggacagggttttaaccacaaataggagcagcatgcaattcctagtgacttgctgcacagtattgtatcataattacaggaagtttttatttttaaaactggatctggggtatattcatttgccccatcacctctgtctaaaggcccaagtcctagggctgccatggtcacaagcacactgatgctccttaagattgtttatctggagcccacatagtgtggaacaaaaagtcacctagaaagcatccttggtcatcattgtctccttcccacctggcccagagatgcttaaatccaagttgtttctccagctgtcacctcccccaggagatcaggattccactgacgtcctgggcagccagtgaatttaattttccatgagaaacaacagagttaacctgtggcattaggagacctacttcatgtggaccctttttttccttcagtttaacttttctggagcagtgtgctgcgtagttcggcctgagtttgtgcagcttgttaagacaactcttgtgtacgctatgttgaagctcaacaaaaaagtcatgggaccacttctagaaatctttcagctgtcaggcctgtcagtctcatgacagtttgttggttgtgccaaacactttatttgggaaaggaaagcccagatttgaatgggtctttcccctgggccttatcctatagaggcatttgtaatatggagaaaataatttttcatttttgctcatttaattctataaattctctttataaatgaattttgtgttctttagttctccttaaaagaacttttgaattataaaaataaaatctttacctgtcgaattgttgctgcagatgattgttgtggaaaatctggatcattgacctctgtgctttcattcctagagatgttttatagttacatgagcaaaagctgttgccccaaagtgatggccctggaggcggggctgaggaacagggaaatgccgctgtgaagtcttaaagcacttctgcttaaactcccatgtgtgaggagtgtgcctccctgtgccctctcagctctgaggctggccgtctttcggggtgttccttttggcaaatatacactgtaatcttgagtctaaatttatatgttgaaatgctaccttttttaaaataagaaactaaataaaattattttactatcagtgaaaaaaaaaaaa

SEQ ID NO: 863 - DNA, 1243 bp, Homo sapiens
ggacgcaaccatctgcggaaaggataggggggaggaagacttaacactgcaacaacaggtacaaaaaagaaggaaactcagtaacaggacccagaggaccattatatattgctctatattctaggtcgcccactttacacttccttctcatgcacttggtcaataccacgcccgctgaccacactggcgacttccctctctgtcgcccctccgtgaagtcagacccactctgcgggccaagaaaggtgaccgggcttccttccggcttgctaagcagaggccggaagcggtggtttttagcggctctctgggtagcagggtggtgtgatagcggcagcgaggggctcggagaggtgctcggattctcgtagctgtgccgggacttaaccaccaccatgtcgagcaaaagaacaaagaccaagaccaagaagcgccctcagcgtgcaacatccaatgtgtttgctatgtttgaccagtcgcagattcaggagttcaaagaggccttcaacatgattgatcagaacagagatggtttcatcgacaaggaagatttgcatgatatgcttgcttcattggggaagaatccaactgatgagtatctagatgccatgatgaatgaggctccaggccccatcaatttcaccatgttcctcaccatgtttggtgagaagttaaatggcacagatcctgaagatgtcatcagaaatgcctttgcttgctttgatgaagaagcaactggcaccatacaggaagattacttgagagagctgctgacaaccatgggggatcggtttacagatgaggaagtggatgagctgtacagagaagcacctattgataaaaaggggaatttcaattacatcgagttcacacgcatcctgaaacatggagccaaagacaaagatgactgaaataacttcaaattccagccaaacgttccttgttgccactttgggtattctgagattttctcttgcatgcccttagctttacagcttttgcatttcctgttgtatttattctcagccattttgggcatatgtatctttataatcagactggaaacgggactttctattaatatcattttcagaataaaaaataggataatttaacctaccagcccttctcccccaataactgtggtctatacagagtcaatatattttttcggagaaagttattcgctcgattttttctgaatcataattaaactttatgataaaataaaaaaaaaaaaaaa

SEQ ID NO: 864 - DNA, 1537 bp, Homo sapiens
gaggaagaagaatctgtatatctgtatatattggctagcaaatgtgccctgctctctcccctcttaaaaatagcagcaacccatctttgcaaagaagcttgcctatagagcaggcactctgtgaatggactgtgcttttacgaccctacagggtatcaagatactgtgcagctcgccaacaaggattaattgcaaggactggtagatcgaatttactgaagacttggagcttgcttctgagaacaaacgcaaaaggacagtaaactgtggaccttgaagttagcagcgtgggcttcctctaatattacaccgtaaaaggcattgatcaccataagaaggaacatttgtgaaggtactccagtgccagaaagaggcacaaagcagacattcgtagagaaacatggatgaaacaggaaatctgacagtatcttctgccacatgccatgacactattgatgacttccgcaatcaagtgtattccaccttgtactctatgatctctgttgtaggcttctttggcaatggctttgtgctctatgtcctcataaaaacctatcacaagaagtcagccttccaagtatacatgattaatttagcagtagcagatctactttgtgtgtgcacactgcctctccgtgtggtctattatgttcacaaaggcatttggctctttggtgacttcttgtgccgcctcagcacctatgctttgtatgtcaacctctattgtagcatcttctttatgacagccatgagctttttccggtgcattgcaattgtttttccagtccagaacattaatttggttacacagaaaaaagccaggtttgtgtgtgtaggtatttggatttttgtgattttgaccagttctccatttctaatggccaaaccacaaaaagatgagaaaaataataccaagtgctttgagcccccacaagacaatcaaactaaaaatcatgttttggtcttgcattatgtgtcattgtttgttggctttatcatcccttttgttattataattgtctgttacacaatgatcattttgaccttactaaaaaaatcaatgaaaaaaaatctgtcaagtcataaaaaggctataggaatgatcatggtcgtgaccgctgcctttttagtcagtttcatgccatatcatattcaacgtaccattcaccttcattttttacacaatgaaactaaaccctgtgattctgtccttagaatgcagaagtccgtggtcataaccttgtctctggctgcatccaattgttgctttgaccctctcctatatttcttttctgggggtaactttaggaaaaggctgtctacattcagaaagcattctttgtccagcgtgacttatgtacccagaaagaaggcctctttgccagaaaaaggagaagaaatatgtaaagtatagtttaaacccatttccagtccaaaccaatgaaaatagtttcccaaataagtattttgtcaaatcatttacaaaaaaaataaaaattttacttaatattttaaaaaaaaaaaaaaaaaaaaaaaa

SEQ ID NO: 865 - DNA, 4469 bp, Homo sapiens
tgcctctgtcactgcagactaatgggacggaggggggtgacttctcagggttcctcctgggcaggtgctccggaaccttttctcagcacgctggcctggggcacggccgttcctcctgcccagccacgttggggtacagggtgaagaagggctggggccagcccaggacagaggaaggcgaggcaggcacgcaggaactgggctttttaaacccttaagcccaaggaaatcgtagcatcgcgggacagggaaaatgaaagactttggaagtcgtcaggaatttgactctgtgagttggtttccaagagtctaagttaagcatctccaagtggatattaaaaaggagcagcaagcctcggggcggcgggggctggaggaggtggagagaggaggctgccggaagccgcactcgggacctctgcagccaccgaccagaccgggcggccgggactctgggactctcgcaggcagacccggtggtctgccggactcctcggggcccacttcgggccctctctcctgcctcctatttttggatttctctcctttgctccctttttcctcccgttttgaagagacaatgctacttcagtttggagcacaaacatatgatcagcacatggaaatgtggtaattcggatgcattcgtgattgcaacagattgaagaaattagaccagacaaagagtgtttttagaggaggaggaggaggaggaggaggctgagagagggagggcgacgggggtgagaaaggggaggccgcctctgagcgggacgccgggactcccgccgctgctaaatatatccgtaggaatggagagggaccggatctcagccttgaaaagatcttttgaggtcgaggaggtcgagacacccaactccaccccaccccggagggtccagactcccctactccgagccactgtggccagctccacccagaaattccaggacctgggcgtgaagaactcagaaccctcggcccgccatgtggactccctaagccaacgctcccccaaggcgtccctgcggagggtggagctctcgggccccaaggcggccgagccggtgtcccggcgcactgagctgtccattgacatctcgtccaagcaggtggagaacgccggggccatcggcccgtcccggttcgggctcaagagggccgaggtgttgggccacaagacgccagaaccggcccctcggaggacggagatcaccatcgtcaaaccccaggagtcagcccaccggaggatggagccccctgcctccaaggtccccgaggtgcccactgcccctgccaccgacgcagcccccaagagggtggagatccagatgcccaagcctgctgaggcgcccaccgcccccagcccagcccagaccttggagaattcagagcctgcccctgtgtctcagctgcagagcaggctggagcccaagccccagccccctgtggctgaggctacaccccggagccaggaggccactgaggcggctcccagctgcgttggcgacatggccgacacccccagagatgccgggctcaagcaggcgcctgcatcacggaacgagaaggccccggtggacttcggctacgtggggattgactccatcctggagcagatgcgccggaaggccatgaagcagggcttcgagttcaacatcatggtggtcgggcagagcggcttgggtaaatccaccttaatcaacaccctcttcaaatccaaaatcagccggaagtcggtgcagcccacctcagaggagcgcatccccaagaccatcgagatcaagtccatcacgcacgatattgaggagaaaggcgtccggatgaagctgacagtgattgacacaccagggttcggggaccacatcaacaacgagaactgctggcagcccatcatgaagttcatcaatgaccagtacgagaaatacctgcaggaggaggtcaacatcaaccgcaagaagcgcatcccggacacccgcgtccactgctgcctctacttcatccccgccaccggccactccctcaggcccctggacatcgagtttatgaaacgcctgagcaaggtggtcaacatcgtccctgtcatcgccaaggcggacacactcaccctggaggagagggtccacttcaaacagcggatcaccgcagacctgctgtccaacggcatcgacgtgtacccccagaaggaatttgatgaggactcggaggaccggctggtgaacgagaagttccgggagatgatcccatttgctgtggtgggcagtgaccacgagtaccaggtcaacggcaagaggatccttgggaggaagaccaagtggggtaccatcgaagttgaaaacaccacacactgtgagtttgcctacctgcgggaccttctcatcaggacgcacatgcagaacatcaaggacatcaccagcagcatccacttcgaggcgtaccgtgtgaagcgcctcaacgagggcagcagcgccatggccaacggcatggaggagaaggagccagaagccccggagatgtagacgccaccctgcccacccccgggatcctgcccccaagtcatttccgtccccccccaggccctcccaccaccccattttattttatatgattttctccatttgtcatcgttccccaccccttcgacatgctgccaggaaacaagggaaggggcctccctccgagtgagtcagtgatgaggccgcggcctccccgaggttgtggggaggctgcactggagccacaggcaggggtgagagcacccactgaattgacatgaccctctgtccccaggcctggctccccgagggctcagaagagcagcttcggtgtgcagatcatccgtctgtgtggggttctcagtgccggaggccttggggtgggggccaggcctcgcacttgcagaggagcccagtgggctgcacgctcccctccatccccatcggccctgtcccctggagtgtgtcagagcccaggggagaatgcagcccaccaggagcacctggaccccctgcccgccacatggtgtggccatcactcagcccctacccctgccctgctcctaagggtagaaaactccagggtcccctgccaccgactgcccagccactccaagccccctggcagctgcccctcctggagcagaaagtgcctttatctcagccatccgcagactgcttggccagatgcggggacaggctggaatgagggaggcgtcttcatctccctgccatccccctctcacgccacccccgcccccaccgggctgcaggtgctgctgatgcgctgggatctgattgaggataaaaaggaaggagagatgacccctaccccctcatcccccagttttgaaaaggtctaagcaagtgagtctggtggaggagctgagggagggagccatggaaggtgccagaaggaaggttggcgggggcacgtgtgggccgtggcttgggctggtcagagtggcgtgagctgcccggcgcctgccctgcccaagtgaccagggaagtgtgtgtgtgtccatgtgtatgcgtgtccgtctgtctgtctagtgtctgggtttggcccaagactgggctgtagttacattaatgcccagccagccacccctgccactcacccctcctggcccaggccttgctgactctctgagctggggaggtgggaggccaggcgagcctgactctgttgatctacccgtgcctgggcccctcccctcagagcccatggtaacgaacccctagaaaggagagaacgggcgtcaggggtgcacagtccacagctgaagagcaaggtttcgtggcagcacggcccggcccctcaccctctgtccccacgaggggacccatgggggctgtctttgcagggcacagatgaccaaagtcccttcctgcttcctgttacctgtcttgctcctggggagaaagaggggcctgatgagactccactcaggtgcacacatcaccaggtgcatctgcaggcaccgggctggctgcttgcagccaggagaaggtcagcgagaaggagtgtatgagtgtgagtgtgtgtgcatggaagttggggcactgggcgtctgactccctccccacccaagagaggaaggacccctcaccacccccactggcgagacagtttactttgccgacttgccatgtttttgccaaaaccaagattttgaaggaaatgagtggccagcgccagggcccaggccatgtggcctgcccagcctcaatgtcacttggtggcggggtggggtgggggtgggcagcagcatcccagccttgagatgcttcactttccttctctgtaaccagactttgaaaaattgttcgtttcatcaggctctgttcctcaatggccttttgctacgtgcctcccgagaaatttgtctttttgtataaatgacaaagtgttgaaaatgtatttcctgaaataaatgtttcaaatgcagaaacccagaaaaaaaaaaaaaa

SEQ ID NO: 866 - DNA, 2351 bp, Homo sapiens
tgcgggcaggattcacgccgctgtgacccggaggtcctcagggggcgaagccccggcctaggcctcgcggagatgcccagctgcggtgcttgtacttgcggcgcggcggccgtccggctcatcacctcctcactcgcctccgcgcagagaggtatttctggtggtcgcattcatatgtcagttttaggaaggcttgggacatttgaaactcagattctgcaaagagctcctcttagatcctttacagaaacaccagcatactttgcctcaaaagatgggataagtaaagatggttctggagatggaaataagaaatcagcaagtgagggaagtagtaagaaatcaggctctgggaattctgggaaaggtggaaaccagctgcgctgtcctaaatgtggcgacttgtgcacacatgtagagacctttgtatcatccacccgttttgtcaagtgtgaaaagtgtcatcatttttttgttgtgctatctgaagcagactcaaagaaaagcataattaaagaacctgaatcagcagcagaagctgtaaaattggcattccaacagaaaccaccacctccccctaagaagatttataactacctcgacaagtatgttgttggccagtcatttgctaagaaggtgctttcagttgctgtgtacaatcattataagagaatatataataatatcccagctaatctgagacagcaagcagaggttgagaagcagacatcattaacaccaagagagttagaaataagaagacgggaggatgagtacagatttacaaaattgcttcagattgctggaattagcccacatggtaatgctttaggagcatcaatgcagcaacaggtaaatcaacaaatacctcaggaaaaacgaggaggtgaagtattggattcttctcatgatgacataaaacttgaaaaaagtaatattttgctgcttggaccaactgggtcaggtaaaactctgctggcacaaaccctagctaaatgccttgatgtcccttttgctatctgtgactgtacaactttgactcaggctggatatgtaggcgaagatattgaatctgtgattgcaaaactactccaagatgccaattataatgtggaaaaagcacaacaaggaattgtctttctggatgaagtagataagattggcagtgtgccaggcattcatcaattacgggatgtaggtggagaaggcgttcagcaaggcttattaaaactactagaaggcacaatagtcaatgttccagaaaagaattcccgaaagctccgtggagaaacagttcaagttgatacaacaaacatcctgtttgtggcatctggtgctttcaatggtttagacagaatcatcagcaggaggaaaaatgaaaagtatcttggatttggaacaccatctaatctgggaaaaggcagaagggctgcagctgctgcagaccttgctaatcgaagtggggaatcgaatactcaccaagacattgaagaaaaagatcggttattgcgtcatgtggaagccagagatctgattgagtttggcatgattcctgagtttgtgggacggttgcctgtggtggttccattgcatagcctagatgagaaaacacttgtacaaatattaactgagccacgaaatgctgttattcctcagtaccaggccttattcagcatggataagtgtgaactgaatgttactgaggatgctttgaaagctatagccagattggcactagaacgaaaaacaggtgcacgaggccttcggtccataatggaaaagctgttactagaaccaatgtttgaagtccctaattctgatatcgtatgtgtggaggttgacaaagaagtagtagaaggaaaaaaggaaccaggatacatccgggctccaacaaaagaatcctctgaagaggagtatgactctggagttgaagaagaaggatggccccgccaagcagatgctgcaaacagctaaactgtcatattgctgtcttgtatatacagcttttccttcttttgtttaggatcataattgtctctacagtctgatattaaaggcattggatctatcttggatatcatacatggtcagagaagcctttaggagaagaatcagatcatgtatataattgtaacatcacattgattttacggaagatgttatatggactttaatgacacaatgtttagagataaaatgtacattattttggttcagttttttaaaaaaaatatgctttaacaaaattcttaggaattcttttaagcaatgcaggtattgcgataactgtagattttacaataatgttactctacaaatgggaaaataaattctttaaaattgaatattga

SEQ ID NO: 867 - DNA, 3248 bp, Homo sapiens
catgcgtgtcggagaggagagagcagagagagacacaggaacaagaacagcaaagggtagagcagacctgcgccaggggcgcacaacggccgtgtccacctcccggccccaagatggtgcttcccacaggcagccacgcgtagcagccagagacagctccagacatgtggctcttcttcgggatcactggattgctgacggcagccctctcaggtcatccatctccagccccacctgaccagctcaacaccagcagtgcagagagtgagctctgggagccaggggagcggcttccggtccgtctgacaaacgggagcagcagctgcagcgggacggtggaggtgcggctcgaggcgtcctgggagcccgcgtgcggggcgctctgggacagccgcgccgccgaggccgtgtgccgagcactgggctgcggcggggcggaggccgcctctcagctcgccccgccgacccctgagctgccgcccccgcctgcagccgggaacaccagcgtagcagctaatgccactctggccggggcgcccgccctcctgtgcagcggcgccgagtggcggctctgcgaggtggtggagcacgcgtgccgcagcgacgggaggcgggcccgtgtcacctgtgcagagaaccgcgcgctgcgcctggtggacggtggcggcgcctgcgccggccgcgtggagatgctggagcatggcgagtggggatcagtgtgcgatgacacttgggacctggaggacgcccacgtggtgtgcaggcaactgggctgcggctgggcagtccaggccctgcccggcttgcacttcatgcccggccgcgggcctatccaccgggaccaggtgaactgctcgggggccgaagcttacctgtgggactgcccggggctgccaggacagcactactgcggccacaaagaggacgcgggcgtggtgtgctcagagcaccagtcctggcgcctgacagggggcgctgaccgctgcgaggggcaggtggaggtacacttccgaggggtctggaacacagtgtgtgacagtgagtggtacccatcggaggccaaggtgctctgccagtccttgggctgtggaactgcggttgagaggcccaaggggctgccccactccttgtccggcaggatgtactactcatgcaatggggaggagctcaccctctccaactgctcctggcggttcaacaactccaacctctgcagccagtcgctggcagccagggtcctctgctcagcttcccggagtttgcacaatctgtccactcccgaagtccctgcaagtgttcagacagtcactatagaatcttctgtgacagtgaaaatagagaacaaggaatctcgggagctaatgctcctcatcccctccatcgttctgggaattctcctccttggctccctcatcttcatagccttcatcctcttgagaattaaaggaaaatatgccctccccgtaatggtgaaccaccagcacctacccaccaccatcccggcagggagcaatagctatcaaccggtccccatcaccatccccaaagaagttttcatgctgcccatccaggtccaggccccgccccctgaggactcagactctggctcggactcagactatgagcactatgacttcagcgcccagcctcctgtggccctgaccaccttctacaattcccagcggcatcgggtcacagatgaggaggtccagcaaagcaggttccagatgccacccttggaggaaggacttgaagagttgcatgcctcccacatcccaactgccaaccctggacactgcattacagacccgccatccctgggccctcagtatcacccgaggagcaacagtgagtcgagcacctcttcgggggaggattactgcaatagtcccaaaagcaagctgcctccatggaacccccaggtgttttcttcagagaggagttccttcctggagcagcccccaaacttggagctggccagcacccagccagccttttcagcagggcccccggctgatgacagctccagcacctcatccggggagtggtaccagaacttccagccaccaccccagcccccttcggaggagcagtttggctgtccagggtcccccagccctcagcctgactccaccgacaacgatgactacgatgacatcagcgcagcctaggccggggccagccgaggctcctggggtggctctgaccctctggcctcctgctctacctactccctttcccctttcccaccctcccagctcacctccccatggagctgagaggcctcccttggagagatggaaggaaacgttataccttgtacccctcggtctccatccatcaagccaaacctgctgccacagccctcccccggccccagatagcagccccagggaggatgctgcctccaagaggtgtgagccctctgtctcggggatgaacaagcagagtctgggctacctcttgacagctggtggaggggagttggggagctggactggatgactctggaggccccttccaaacctcaagtgtccggcgctttgattgcctgagtttctgacacttcagggcccagaggtcctgcgaggggcagaactggacccccatgccagtgctgctgcaggagggcccatatactagggtctgctgagctgttgtcactgatcggtgggcgctgggggggtagggtagcacaccagctgtcccaggctttgctccgggcggtaactgcacttgggcagggaatatagccttcctgggcacaactagctgacaatgacaggttgactgtgtacccccaaccaaggagctggggcccaaggccagtcctgccccagagacactccaagtccgccaggggcacagaccagttctgcagtgactgtccctggacaatgggtctttattctgagtttcctatggtttacaaagagggccccagcccagccccaccacagatcccagagataggggcccagtctccatgggggcaaggagcatagagatgttttccaggaaggggctcagaagctgcactaggccccgagtccccatgtgtctccttgaattgatgaggatgctcctgggagggatgcgtgactatgtggtgttgcacccggggctgcaaacgtctccgtgcagcccccagagagaggcccatgggctcagaccaggctttgttgtcctgctctgagtatcctgagattaaactgaattgctgaatgaaaaaaaaaaaaaaaaaaaaa

SEQ ID NO: 868 - DNA, 1588 bp, Homo sapiens
gggaacgttccgggacgttctcgctacgtactctttatcaatcgtcttccggcgcagccccgtccctgttttttgtgctcctccgagctcgctgttcgtccgggttttttacgttttaatttccaggacttgaactgccatgtcctctgaagaaggaaagctcttcgtgggagggctcaactttaacaccgacgagcaggcactggaagaccacttcagcagtttcggacctatctctgaggtggtcgttgtcaaggaccgggagactcagcggtccaggggttttggtttcatcaccttcaccaacccagagcatgcttcagttgccatgagagccatgaacggagagtctctggatggtcgtcagatccgtgtggatcatgcaggcaagtctgctcggggaaccagaggaggtggctttggggcccatgggcgtggtcgcagctactctagaggtggtggggaccagggctatgggagtggcaggtattatgacagtcgacctggagggtatggatatggatatggacgttccagagactataatggcagaaaccagggtggttatgaccgctactcaggaggaaattacagagacaattatgacaactgaaatgagacatgcacataatatagatacacaaggaataatttctgatccaggatcgtccttccaaatggctgtatttataaaggtttttggagctgcaccgaagcatcttattttatagtatatcaaccttttgtttttaaattgacctgccaaggtagctgaagaccttttagacagttccatctttttttttaaattttttctgcctatttaaagacaaattatgggacgtttgtagaacctgagtatttttctttttaccagttttttagtttgagctcttaggtttattggagctagcaataattggttctggcaagtttggccagactgacttcaaaaaattaatgtgtatccagggacattttaaaaacctgtacacagtgtttattgtggttaggaagcaatttcccaatgtacctataagaaatgtgcatcaagccagcctgaccaacatggtgaaaccccatctgtactaaacataaaaaaattagcctggcatggtggtgtacgcctgtaatcccagtgacttgggaggctgaggcaggagaatcgcttgaacccgggaggcggaggttgcagtgagctaagatcgcgccactgtactccagcctgggcaacagcgagactccatctcaaaaaaaaaggaaatgtgtatcaagaacatgattatccagcggtattttctaattcagatcatcaaactgattatatagaagagttggctttaaaatgtttgcaaatgtctttttttttttaatactggaagaaaaaatattctgttgtgtctcatacagtgcttaggatgtctttcacagagcttattaaaaagatgaaacctgagaacaaactgctttattcttactcagcccattttgcaaattaaaagtgggggcagaggtgggcggatcacctgaggtcaggagttcgagaccagcctggccaacagggcaaaaccccatctctactaaaaat

SEQ ID NO: 869 - DNA, 2183 bp, Homo sapiens
gagcgcacgcgtacacgcgtgcgcaggggaagaccgagtgccaggggctgaaccgcagggaagggggcgcggcgcacgcagtatggcgcccaacatctacttggttcgccagcggatcagtcgactcggccagaggatgtccggcttccagatcaacctcaacccgctcaaggagccactcggcttcatcaaggtcctcgagtggattgcttctatctttgcttttgccacctgtggaggttttaagggccaaacagaaattcaagtgaattgtcctcctgcagttactgagaataaaactgttacagctacttttggttatccattcaggttgaatgaggcatcatttcagccacctccaggtgtaaacatatgtgatgtaaattggaaagattacgtcctcataggcgattactcttcttctgcacaattctatgttacctttgcagtctttgtgttcctgtactgcattgctgcccttctgctttatgttggctacacgagtctgtatctggatagtcgtaaacttcctatgatagactttgttgttacacttgttgccacttttttgtggttggtgagcacttcagcctgggctaaagctctgacagatattaaaatagctactggtcacaatattattgatgaacttccgccttgtaagaagaaagcagtactgtgttactttggctctgtgaccagtatgggatccctaaatgtatctgtgatatttggctttctaaatatgatactctggggaggaaatgcttggtttgtgtacaaggagaccagcctacacagtccatcaaatacatctgcccctcatagccaaggaggtattccacctcctaccggaatataattaaagggagaaatacactgtatgaagtatatgttgatactatgacatgttgccaacaccttgagaagcattatttgtttctaataaaagtaatggctttgtcaatatattggtgggtttaaaactttgctgcttttttacataaagcctgtgcctttcctagaaagttaagatgtaaatgtattctcacatgtaaatttgaaagttcaggggtctattatgaaatgatacacatttttaaatgaaccataatttttttcactaagctgtttgccttccaaagtgtttacaccttaagccttaacatgtatcttcattcagaaaacagttatattgtcataccatagtaggaagaaaaacctttatttggaatatacactactgtaagtttgtacagatcatatacctaccacctgtctttgcttaaagagccttgattacataaatatgtaggaaaaaacatattgagttcaaaatttatatctaacattgtttatgttatgatttttttttaattgcaaagactaggtgtatatttttttctgtttttctaaatgacccgtggtacttaataggtgtactaaaattgtgttgggagcagggatttggaaatttctgagagatgtgtagttaatttagtaattctgtttcatgagatatgatctgttatgctagtggtttaataggcttgctatgtaagtagaacgtggctcaactagatatctttatatgtatgggcattactcttagtgatatttgtttcctgtcctttgttgctcatgctgtttaagtgcaggctgagacccagcctctttgtaagtacagtaaaataatccaccgttttttacagaccctagtcaaagggttaaaaaaattaagattgctttccatgtttgaaatttaccattgagagtcaatgaagttgctattttgagtttagcattgatattgtgaaaataagtgcaatttggatttcatgtttcttaatattcattcttgtttcacaaatgaatgattaaggaattatgcatcataaaggaacctaagtgaggtatatgatgagtgtattgtctttgcacacacatataggtatattctgaatacaagcttattcacattttgcttcctaatctttttgttgtacagggattcaggtttcttattcttacaacatgattgtttatatgtgaagcacatcttgctgttgccttatttttgatgcttttattcatgacaagaattgtcaatataagaatgtatatcttttttgcaaccaatttaataaaggagttgaaagaaaaaaaaaaaaaaaaaaaaaaaa

SEQ ID NO: 870 - DNA, 2718 bp, Homo sapiens
cagggtaacgctgtcttgtggacccgcacttcccacccgagacctctcactgagcccgagccgcgcgcgacatgagccacgggaagggaaccgacatgctcccggagatcgccgccgccgtgggcttcctctccagcctcctgaggacccggggctgcgtgagcgagcagaggcttaaggtcttcagcggggcgctccaggaggcactcacagagcactacaaacaccactggtttcccgaaaagccgtccaagggctccggctaccgctgcattcgcatcaaccacaagatggaccccatcatcagcagggtggccagccagatcggactcagccagccccagctgcaccagctgctgcccagcgagctgaccctgtgggtggacccctatgaggtgtcctaccgcattggggaggacggctccatctgcgtcttgtacgaggaggccccactggccgcctcctgtgggctcctcacctgcaagaaccaagtgctgctgggccggagcagcccctccaagaactacgtgatggcagtctccagctaggcccttccgcccccgccctgggcgccgccgtgctcatgctgccgtgacaacaggccaccacatacctcaacctggggaactgtatttttaaatgaagagctatttatatatattatttttttttaagaaaggaggaaaagaaaccaaaagttttttttaagaaaaaaaatccttcaagggagctgcttggaagtggcctccccaggtgcctttggagagaactgttgcgtgcttgagtctgtgagccagtgtctgcctataggagggggagctgttagggggtagacctagccaaggagaagtgggagacgtttggctagcaccccaggaagatgtgagagggagcaagcaaggttagcaactgtgaacagagaggtcgggatttgccctgggggaggaagagaggccaagttcagagctctctgtctcccccagccagacacctgcatccctggctcctctattactcaggggcattcatgcctggacttaaacaatactatgttatcttttcttttatttttctaatgaggtcctgggcagagagtgaaaaggcctctcctgattcctactgtcctaagctgcttttcttgaaatcatgacttgtttctaattctaccctcaggggcctgtagatgttgctttccagccaggaatctaaagctttgggttttctgaggggggggaggagggaactggaggttattggggttaggatggaagggaactctgcacaaaacctttgctttgctagtgctgctttgtgtgtatgtgtggcaaataatttgggggtgatttgcaatgaaattttgggacccaaagagtatccactggggatgttttttggccaaaactcttccttttggaaccacatgaaagtcttgatgctgctgccatgatccctttgagaggtggctcaaaagctacagggaactccaggtcctttattactgccttcttttcaaaagcacaactctcctctaaccctcccctcccccttcccttctggtcgggtcatagagctaccgtattttctaggacaagagttctcagtcactgtgcaatatgccccctgggtcccaggagggtctggaggaaaactggctatcagaacctcctgatgccctggtgggcttagggaaccatctctcctgctctccttgggatgatggctggctagtcagccttgcatgtattccttggctgaatgggagagtgccccatgttctgcaagactacttggtattcttgtagggccgacactaaataaaagccaaaccttgggcactgttttttctccctggtgctcagagcacctgtgggaaaggttgctgtctgtctcagtacaatccaaatttgtcgtagacttgtgcaatatatactgttgtgggttggagaaaagtggaaagctacactgggaagaaactcccttccttcaatttctcagtgacattgatgaggggtcctcaaaagacctcgagtttcccaaaccgaatcaccttaagaaggacagggctagggcatttggccaggatggccaccctcctgctgttgccccttagtgaggaatcttcaccccacttcctctacccccaggttctcctccccacagccagtcccctttcctggatttctaaactgctcaattttgactcaaaggtgctatttaccaaacactctccctacccattcctgccagctctgcctccttttcaactctccacattttgtattgccttcccagacctgcttccagtctttattgctttaaagttcactttgggcccacagacccaagagctaattttctggtttgtgggttgaaacaaagctgtgaatcactgcaggctgtgttcttgcatcttgtctgcaaacaggtccctgcctttttagaagcagcctcatggtctcatgcttaatcttgtctctcttctcttctttatgatgttcactttaaaaacaacaaaacccctgagctggactgttgagcaggcctgtctctcctattaagtaaaaataaatagtagtagtatgtttgtaagctattctgacagaaaagacaaaggttactaattgtatgatagtgtttttatatggaagaatgtacagcttatggacaaatgtacacctttttgttactttaataaaaatgtagtaggataaaaaaaaa

SEQ ID NO: 871 - DNA, 5889 bp, Homo sapiens
gctgccagctgagtttttttgctgctttgagtctcagttttctttctttcctagagtctctgaagccacagatctcttaagaactttctgtctccaaaccgtggctgctcgataaatcagacagaacagttaatcctcaatttaagcctgatctaacccctagaaacagatatagaacaatggaagtgacaacaagattgacatggaatgatgaaaatcatctgcgcaagctgcttggaaatgtttctttgagtcttctctataagtctagtgttcatggaggtagcattgaagatatggttgaaagatgcagccgtcagggatgtactataacaatggcttacattgattacaatatgattgtagcctttatgcttggaaattatattaatttacatgaaagttctacagagccaaatgattccctatggttttcacttcaaaagaaaaatgacaccactgaaatagaaactttactcttaaatacagcaccaaaaattattgatgagcaactggtgtgtcgtttatcgaaaacggatattttcattatatgtcgagataataaaatttatctagataaaatgataacaagaaacttgaaactaaggttttatggccaccgtcagtatttggaatgtgaagtttttcgagttgaaggaattaaggataacctagacgacataaagaggataattaaagccagagagcacagaaataggcttctagcagacatcagagactataggccctatgcagacttggtttcagaaattcgtattcttttggtgggtccagttgggtctggaaagtccagttttttcaattcagtcaagtctatttttcatggccatgtgactggccaagccgtagtggggtctgatatcaccagcataaccgagcggtataggatatattctgttaaagatggaaaaaatggaaaatctctgccatttatgttgtgtgacactatggggctagatggggcagaaggagcaggactgtgcatggatgacattccccacatcttaaaaggttgtatgccagacagatatcagtttaattcccgtaaaccaattacacctgagcattctacttttatcacctctccatctctgaaggacaggattcactgtgtggcttatgtcttagacatcaactctattgacaatctctactctaaaatgttggcaaaagtgaagcaagttcacaaagaagtattaaactgtggtatagcatatgtggccttgcttactaaagtggatgattgcagtgaggttcttcaagacaactttttaaacatgagtagatctatgacttctcaaagccgggtcatgaatgtccataaaatgctaggcattcctatttccaatattttgatggttggaaactatgcttcagatttggaactggaccccatgaaggatattctcatcctctctgcactgaggcagatgctgcgggctgcagatgattttttagaagatttgcctcttgaggaaactggtgcaattgagagagcgttacagccctgcatttgagataagttgccttgattctgacatttggcccagcctgtactggtgtgccgcaatgagagtcaatctctattgacagcctgcttcagattttgcttttgttcgttttgccttctgtccttggaacagtcatatctcaagttcaaaggccaaaacctgagaagcggtgggctaagataggtcctactgcaaaccacccctccatatttccgtaccatttacaattcagtttctgtgacatctttttaaaccactggaggaaaaatgagatattctctaatttattcttctataacactctatatagagctatgtgagtactaatcacattgaataatagttataaaattattgtatagacatctgcttcttaaacagattgtgagttctttgagaaacagcgtggattttacttatctgtgtattcacagagcttagcacagtgcctggtaatgagcaagcatacttgccattacttttccttcccactctctccaacatcacattcactttaaatttttctgtatatagaaaggaaaactagcctgggcaacatgatgaaaccccatctccactgcaaaaaaaaaaaaaaaaaataagaaagaacaaaacaaaccccacaaaaattagctgggtatgatggcacgtgcctgtagtcccagttactcaggatgattgattgagccttggaggtggaggctacagtgagctgagattgtgccactgtactctagccagggagaaagagtgagatcctggctcaaaaaaaccaaataaaacaaaacaaacaaacgaaaaacagaaaggaagactgaaagagaatgaaaagctggggagaggaaataaaaataaagaaggaagagtgtttcatttatatctgaatgaaaatatgaatgactctaagtaattgaattaattaaaatgagccaacttttttttaacaatttacattttatttctatgggaaaaaataaatattcctcttctaacaaacccatgcttgattttcattaattgaattccaaatcatcctagccatgtgtccttccatttaggttactggggcaaatcagtaagaaagttcttatatttatgctccaaataattctgaagtcctcttactagctgtgaaagctagtactattaagaaagaaaacaaaattcccaaaagatagctttcacttttttttttccttaaagacttcctaattctcttctccaaattcttagtcttcttcaaaataatatgctttggttcaatagttatccacattctgacagtctaatttagttttaatcagaattatactcatcttttgggtagtcatagatattaagaaagcaagagtttcttatgtccagttatggaatatttcctaaagcaaggctgcaggtgaagttgtgctcaagtgaatgttcaggagacacaattcagtggaagaaattaagtctttaaaaaagacctaggaataggagaaccatggaaattgaggaggtaggcctacaagtagatattgggaacaaaattagagaggcaaccagaaaaagttattttaggctcaccagagttgttcttattgcacagtaacacaccaatataccaaaacagcaggtattgcagtagagaaagagtttaataattgaatggcagaaaaatgaggaaggttgaggaaacctcaaatctacctccctgctgagtctaagtttaggatttttaagagaaaggcaggtaaggtgctgaaggtctggagctgctgatttgttggggtatagggaatgaaatgaaacatacagagatgaaaactggaagtttttttttgtttgttttgttttttttttgttgttgtttttttttttttttgtttttttgctgagtcaattccttggagggggtcttcagactgactggtgtcagcagacccatgggattccaagatctggaaaactttttagatagaaacttgatgtttcttaacgttacatatattatcttatagaaataactaagggaagttagtgccttgtgaccacatctatgtgacttttaggcagtaagaaactataaggaaaggagctaacagtcatgctgtaagtagctacagggaattggcttaaagggcaagttggttagtacttagctgtgtttttattcaaagtctacattttatgtagtggttaatgtttgctgttcattaggatggtttcacagttaccatacaaatgtagaagcaacaggtccaaaaagtagggcatgattttctccatgtaatccagggagaaaacaagccatgaccattgttggttgggagactgaaggtgattgaaggttcaccatcatcctcaccaacttttgggccataattcacccaaccctttggtggagcctgaaaaaaatctgggcagaatgtaggacttctttattttgtttaaaggggtaacacagagtgcccttatgaaggagttggagatcctgcaaggaagagaaggagtgaaggagagatcaagagagagaaacaatgaggaacatttcatttgacccaacatcctttaggagcataaatgttgacactaagttatcccttttgtgctaaaatggacagtattggcaaaatgataccacaacttcttattctctggctctatattgctttggaaacacttaaacatcaaatggagttaaatacatatttgaaatttaggttaggaaatattggtgaggaggcctcaaaaagggggaaacatcttttgtctgggaggatattttccattttgtggatttccctgatctttttctaccaccctgaggggtggtgggaattatcattttgctacattttagaggtcatccaggatttttgaaactttacattctttacggttaagcaagatgtacagctcagtcaaagacactaaattcttcttagaaaaatagtgctaaggagtatagcagatgacctatatgtgtgttggctgggagaatatcatcttaaagtgagagtgatgttgtggagacagttgaaatgtcaatgctagagcctctgtggtgtgaatgggcacgttaggttgttgcattagaaagtgactgtttctgacagaaatttgtagctttgtgcaaactcacccaccatctacctcaataaaatatagagaaaagaaaaatagagcagtttgagttctatgaggtatgcaggcccagagagacataagtatgttcctttagtcttgcttcctgtgtgccacactgcccctccacaaccatagctgggggcaattgtttaaagtcattttgttcccgactagctgccttgcacattatcttcattttcctggaatttgatacagagagcaatttatagccaattgatagcttatgctgtttcaatgtaaattcgtggtaaataacttaggaactgcctcttctttttctttgaaaacctacttataactgttgctaataagaatgtgtattgttcaggacaacttgtctccatacagttgggttgtaaccctcatgcttggcccaaataaactctctacttatatcagtttttcctacacttcttccttttaggtcaacaataccaagaggggttactgtgctgggtaatgtgtaaacttgtgtcttgtttagaaagataaatttaaagactatcacattgctttttcataaaacaagacaggtctacaattaatttattttgacgcaaattgataggggggccaagtaagccccatatgcttaatgatcagctgatgaataatcatctcctagcaacataactcaatctaatgctaaggtacccacaagatggcaaggctgatcaaagtcgtcatggaatcctgcaaccaaaagccatgggaatttggaagccctcaaatcccattcctaatctgatgagtctatggaccaatttgtggaggacagtagattaaatagatctgatttttgccatcaatgtaaggaggataaaaacttgcataccaattgtacacccttgcaaaatctttctctgatgttggagaaaatgggccagtgagatcatggatatagaagtacagtcaatgttcagctgtaccctcccacaatcccacttccttcctcaacacaattcaaacaaatagactcagactgtttcaggctccaggacaggaagtgcagtgtaggcaaaattgcaaaaattgagggcacaggggtggaggtgggggggttgaataacaagctgtgctaaataattacgtgtaaatatattttttcatttttaaaaattgatttcttttgcacattccatgacaatatatgtcacatttttaaaataaatgcaaagaagcatacatccaaaaaaaaaaaaaaaaa

SEQ ID NO: 872 - DNA, 3357 bp, Homo sapiens
agaacagtttcatttccggagccaccggaagcagcttgcaaatggcgtctccctcgctggagcggccagaaaaaggcgctggaaaaagtgaatttcgtaaccagaagccgaagccggagaaccaagatgaatcagaactccttacggttcctgatggttggaaggaaccagctttttccaaagaggacaatcccagaggacttttggaggagagcagtttcgcaactttgttcccaaaatacagggaagcttacttgaaagagtgttggccattggtgcagaaagccttaaatgaacatcatgttaatgcaaccctggacctgatcgaaggcagcatgactgtttgtactacaaagaagacttttgatccatatatcatcattagggccagagatctgataaaactgttagcaaggagtgtttcatttgaacaggcagtacgaattcttcaggatgatgttgcatgtgacatcattaaaataggttctttagtaaggaataaagagagatttgtaaaacgaagacaacggcttattggtcccaaaggatctacattgaaggcattggaactcttaactaattgttacattatggttcagggaaacacagtttcagccattggaccttttagtggcttaaaagaggttagaaaagtagtccttgatactatgaagaatattcatccaatttataacattaaaagcttaatgattaagagagagttggcaaaagattctgaattacgatcacaaagttgggagagatttttgccacagttcaaacacaaaaatgtgaataaacgcaaggaaccaaagaaaaaaactgttaagaaagaatatacgccattcccaccaccacaaccagaaagtcagatcgataaagaattggctagtggtgaatactttttgaaggcaaatcagaagaagcggcagaaaatggaagcaataaaggctaaacaagcagaagccatcagtaagagacaagaggaaagaaacaaagcatttattccacctaaggaaaaaccaattgtgaaacctaaggaagcttctactgaaactaaaattgatgtggccagcatcaaggaaaaggttaagaaagcaaagaataagaaactgggagctcttacagctgaagaaattgcacttaagatggaggcagatgaaaagaaaaagaagaaaaaaaagtaacatacccaaaactccttgactagaactatctccttttgtaaaggattttgagatatcaggcattagttgccttatttgtgagaaattttctgagggctttttttttttttggtggtggtggttgttcatagaagagtgttctttataaattatattattattgtattttttgaaaaatttatacgagaaagtggtatataagtctttgtatacattacgaccattgtgattatccattaaatccagtgtctgatgctattggttagtaatgatgtcccagcatttgatgttccctctctaatgataacaagtaaatatttaggtttatcccttttgaaagtttggttttacttttaacagtccatgaacagaaaattaaggcctctaaaatcagatcccctagttactcctctgttctgaatctggggaagtagtaaaccaaaaagacagggaaaaccagatatttagagtcgaagcagcatgcaaaaaataataatgtttttaactaatgaaggctactggagttactaagaatcacctaaaaatgtgctactgtaccttgctcattttgcagatttagaagctgaaacatgggttaggttacttactaaaagtccacctgtggcaacctgcaaataatgcttatttatactaaagatgagtttatctgatagagttaggaaatttcttcttttgagtaagagtattgctataacatatatttttttctgaaatgttttaaaatagaagtacacctaattgttattggttaaaaaaaaagccatatgtgaatgaggttggtttttgggttttttctttcctgaattgtattagtccaaaagaactaaattagggtacttgtgctgtaccaaaatggtaattataacagacagtattagaattactgaattaacaatgagaaagagagaagtgtatctgttacgtggatatatgggccagcctggatatacaacagagtagtaacctgtgaaacaaacatagaatatcctcttagacattgttcctcataatgcactgacagaattcacatagctcttaatgaaacaatttaagattgatgtacgtacgtttgacttggtctcgctgtcggttaactgtaaagttagggggaagaaagaaaaaaaattaaaagggtagacacagttgagagttttattttaaaaagctaagtcttataattatgaccattaacttgctttggctttattgcagtgactttccaagtttaattattcaaaactttttgaactgactgaattaacttggtatttttaagttgactttttacataaactttataaaccttttataaaaaggaaactataccattactataaatggaaaatcattttacacatcatacctagcaggtaataaaatttaaaaaataaaaattaaatattagaatgtgagaaatttattaaaatatagttctaaaaataagtttcttcctgagaagaatgatactgtttatgatgaatccatagtgaaaagacagtgacctctctttcatccagtctagtatatcactaaatcatcattacgatgtttggctatcaagtcattaattactgtcctcctttcactgagctttattcaaattttgacaatcagagcactgggaagaaataaattccacaactgcctttagccttctggatactttcttttataaaatagaaaccttttccacaccagttctgcagcagtcgctattagatgctcgtggtagaacccatcaatcatctggtcctctgggtactggtgagcatccctggtcttcatacctgtgagtgggctttgtggtgaattactgtaaatatgctaccctcacttttcttggcagttatgtcgatgaaatcaagagtgtgatgttctagttatttttttttatatatatttttaaatgttcaatattcaactattgaaacaaatgtacatctgtgaactagctaaaatcatcttatgtaccactaatatgcccagcacattttgtaaaacagtcctgatttggcctccaagggtatttattgaactaccagcagtatctaggagaccacgaaggaataccacgaaggaatttatgctccagtgcttgccataatttgtctgagaaggaatctgttaaataaaagcttttatcctctaa

SEQ ID NO: 873 - DNA, 2250 bp, Homo sapiens
gcggcctttcatttccgcttccggtgcgggccgcgcgcgagcgcagcggtgggaggcggcgaccagccggttgaggccccaggcttggcctcaccacaatgtggcacgaggctcggaagcatgagcggaagcttcgaggcatgatggtcgactacaagaagagggcggagcggagacgggagtattatgaaaagatcaagaaggacccagcccagttcctgcaggtacatggccgagcttgcaaggtgcacctggattctgcagtcgccctggccgctgagagccctgttaatatgatgccctggcagggggacaccaacaacatgattgaccgattcgatgtccgtgcccacctggaccacatccccgactacaccccccctctgctcaccaccatctccccagaacaggagtcggacgaacggaagtgtaactacgagcgctacagaggcctggtgcagaacgactttgccggcatctcagaggagcagtgcctgtaccagatctacattgatgagttgtacggaggcctccagagacccagcgaagatgagaagaagaagctggcagagaagaaggcttccatcggttatacctacgaggacagcacggtggccgaggtagagaaggcggcagaaaagccagaggaggaggagtcagcggccgaggaggagagcaactcggacgaagatgaggtcatccccgacatcgacgtggaggtggacgtggatgaattgaaccaggagcaggtggcagatctcaacaaacaggccacgacttatggcatggccgacggtgacttcgtcaggatgctccggaaagacaaggaggaggcagaggccatcaagcatgccaaggctcttgaggaggagaaggccatgtactcgggacgccgctctcgacgccagcggagagagtttcgggagaagcggctgaggggtcgcaagatcagcccacccagctatgcccgccgagacagccccacctatgacccctataagcggtcaccctcggagtccagctcagagtcccgctcccgctcccgctccccgaccccgggccgcgaggagaagatcacgttcatcaccagttttgggggcagcgatgaggaggcagccgcagccgctgctgccgcagcagcatcaggagtcaccacagggaagccccccgcacctccccagcctggcggccccgccccgggacgtaatgccagcgcccgccgccgctcctcctcctcctcctcctcctcttctgcctcgaggacctccagctcccgctccagctctcgctccagctcccgctctcgccgtggtgggggctactaccgttccggccgccacgcccgctcccggtcccgctcctggtcccgctcccgctcccgctcccggcgctattcccggtcccgtagccgtggccggcggcactcaggtgggggctcccgagacggacaccggtactcccgctcgcccgcccggcgtggtggttacgggccccggcgcagaagcaggagccgctcccactcaggggaccgctacaggcggggcggccggggcctcaggcaccacagcagtagccgcagccgcagcagctggtccctcagcccgtcccgcagtcgcagcctgactcgcagccgcagccatagccccagccccagccagagccgcagccgcagccgcagccgcagccagagcccctcgccatcacccgcaagagagaagctgaccaggccggccgcgtcccctgctgtgggcgagaagctgaaaaagaccgaacctgccgctggtaaagagacaggagctgccaaacccaagctgacgcctcaggagaagctgaaactgaggatgcagaaggcgctgaacaggcagttcaaggcggataagaaggcggcacaagaaaagatgatccagcaggagcatgagcggcaggagcgggaagacgagcttcgagccatggcccgcaagatccgcatgaaggagcgggaacgccgagagaaggagagagaagagtgggaacgccagtacagccggcagagccgctcaccctccccccgatacagtcgagaatacagctcttctcgaaggcgctcaaggtcccgatcccgaagcccccattaccgacattaggcagaagagtggggggtggggaggacaagggggtgggtaaggggctcaagctgtgatgctgctggttttatctctagtgaaataaagtcaaaagttatttaattcccgtcaaaaaaaaaaaaaaaaa

SEQ ID NO: 874 - DNA, 3067 bp, Homo sapiens
cctttgcccgccttggcggccggctctacgttccctgttctcgcctgcagctccgccatggctcctaaaggcagctccaaacagcagtctgaggaggacctgctcctgcaggatttcagccgcaatctctcggccaagtcctccgcgctcttcttcggaaacgcgttcatcgtgtctgccatccccatctggttatactggcgaatatggcatatggatcttattcagtctgctgttttgtatagtgtgatgaccctagtaagcacatatttggtagcctttgcatacaagaatgtgaaatttgttctcaagcacaaagtagcacagaagagggaggatgctgtttccaaagaagtgactcgaaaactttctgaagctgataatagaaagatgtctcggaaggagaaagatgaaagaatcttgtggaagaagaatgaagttgctgattatgaagctacaacattttccatcttctataacaacactctgttcctggtcgtggtcattgttgcttccttcttcatattgaagaacttcaaccccacagtgaactacatattgtccataagtgcttcatcaggactcatcgccctcctgtctactggctccaaatagaccatgtcagcttcaccccctggctttgtgtctatgggtggcctgtggtatatggaaaagtagcagggtggtcagggtgggagacacaagatgtttttatagtctagagcctttaaaaaacccagcagaatgtaattcagtatttgtttattggctgttttttgacagattgttgaaattaaatgaattgaaagggaaactcagagtactaggacgtttattaaaaggaaaaaaatgtcttgcaatgtgctgtaatcacaagaggagaaaataacttgtttccttgatctgtcagaggtcacagtaacctgggccgagctgttattatttattatataatagtagtaggaagttaataactggttctctgtgttccaagcacaatattacaacttcttttgaaccgtaaatatcagaatgaatcctcttcccaggggattgaacagaagcttaatgtttacaagtgtttgaatttgtgatctgaaataacacaaaattaaaaacatgatttctctaattttccaactagaggaagagaaacttgtggaaaagttctttttttttcttttttttttcttaaagaagggcagccaaggtagtaacctaaaaatagtgcccaggcatatgagagttgtcctacgaggttaaagaacacactgttccactgtatggctttggccctgagtggccagggaggtcaacttgaccctgccatgttggtttgacttactaagacacaggaatcactgttttccttgaccagggtctcacaccctggaggaatgttaagtaagagaaagaacctctttcctgaatattgacatgtaaaagaccaaagtaatttttctgaacttctgcaattctgagaactctccaaggaatttacagtgattttagtgcttgtcagcatttttccatgaggactttcatacatttgactctttagttcacaggttcccattgattgtgagcaagatatttatctctttagcccttggggatccagctgagagcaatctcttgcatttttttacccgtgtatgtacagatatcatttcttgtgtatgccatgacttgaaaaagtttgggaagctctttagcaatatcagctaaaaggatatgaaatcacaggtgatagcagttgtcattcagtaatttcctacaagcagcaccccaaaggaaatatagtcctaatctttactatccacttctaaatttaatgtgaatttcatacatgttattagttgttttctttataattttataaaaattattcatcgggagtttaacttccacttccatgctatcggatgtgttgggctccatgcaagaacttggaagaaaaacaggcaggaatgcatttgcataatgacccagatcatcattttctgcaactgagaattatatttcatcattgcttctagaagtctgcaattctttacttttctttggtgcattattatctaggtgccatcactggataatgtggagtgactagagaagtcacatatcactgtaaggtacagttagggtaacactttagaggtttattatttttaaaaaacttttcttgaactcctggccaacatggtgaaaccccgtctctactaaaaataccaaaattagccaggcgtgatggtgggcgcctgtaatctcagctacttgggaggctgaagcaggagaactgcctgaacccaggaggcagaggttgcggtgagtcgagatcgtgctactactgcctgggtggcaagggtgagactccatctcaaaaaagaaacaaaaaaacccaaaaagttttctttactgttggttaaaaaaaaaagccagaccatagtttgactggtggcatggaatttgtgtatcaaataaatgcatttgcttatttgacaaaccatcagtgtccactatttgttaccagagttgggccactatcttttaaaattgctggtgaaaacttgccactagatggcagtgcctgtatagatggggaaaaaattgccaccattcttggtataatacagtgtagcttagatgaggtggtgaaataggggtatcagccgaatattcctaatatagtttctcttgaattaataaactgaagatttgtaggaaaatgagtgagcaaaatttgtttactgttgtgaatttttcctacagcactgtttttaatcttgatgttttccaactttctgtactaatagatacatttctgtgcataagattataaagcatatactcacagttcagtagttttcgttaaggatttactgtgtgagtactttactgtgaggaattgcagaaccttttcccctctactcttgtctaaaagttctgtgtggcacacagagatgcgacctactcaatctgacttagtaaaaccatgctgtagaatttttgtcttaaaaagaccacatacccagcacccatgaaataaaagattcatctgtaaaaa

SEQ ID NO: 875 - DNA, 3148 bp, Homo sapiens
ggagagcgcgccacagaacgacttttacgcaggcgcagaagcctgtttcccctcacccgcggcttccaccctgcgcaggcgcaaaaagccgcgctggcaacctccgcagcggtcgcgcgcacccttcacccctcttgctgcttttgtctggcacaaccttctcaggccctccgcgaggccggccctttttttctttcactttccccacccggagagccaggtgccgagaactaggacctcgtccccttctctatcccttcccctgatccatctcgtctctgttctccttcccttttccgttcccgaagccggaaggagccgaggtacccacggaaaaagtcgaagctgtccccggagagtgaggccttcacgaagcggtggcggaaggagccgaagttctctgatcggaggcgtgagcaagtggcatctccggaaagagccgaaacacggactcgagcttaatcccaggaggggcccgagggcgagatccggaaatctccggaaagagccgaaggccgggacggttaggattgtcggaagtggccgattgcttggacagggccggcggagaagatcggagcaagtccgtggaagaagccaaagactgggacggattgaattgttggaagaacccgaactcgcagaggggactgggcgcagtggcacacgaggacacacggaaacctccgaacgttgaggagataatctcggaaaagttacggaaacctgggaagtcggcgaaaccctacgttcgggtgttttcggaagcagccgaagcggccgcctgcttcgccttcgtccagtatccggagatagccgaggcgcttcggagccaggctcggggggaggggcaagctcgcgggcgggcgggcgggtgagggggcggagcccgggcggggcggggagggctgccggaggcttgattaggtaggaggtggcgaagcgccggcggcggccggaagtagccgaagccagcggcggaagtagccgaagcggctggagcgggcggcaaggcgaggcgaaagctgcacagggccctacgcggccgcctcagcatgtcggacttcgacgagttcgagcggcagctcaacgagaataaacaagagcgggacaaggagaaccggcatcggaagcgcagccacagccgctctcggagccgggaccgcaaacgccggagccggagccgcgaccggcgcaaccgggaccagcggagcgcctcccgggacaggcgacgacgcagcaaacctttgaccagaggcgctaaagaggagcacggtggactgattcgttccccccgccacgagaagaagaagaaggtccgtaaatactgggacgtgccacccccaggctttgagcacatcaccccaatgcagtacaaggccatgcaagctgcgggtcagattccagccactgctcttctccccaccatgacccctgacggtctggctgtgaccccaacgccggtgcccgtggtcgggagccagatgaccagacaagcccggcgcctctacgtgggcaacatcccctttggcatcactgaggaggccatgatggatttcttcaacgcccagatgcgcctgggggggctgacccaggcccctggcaacccagtgttggctgtgcagattaaccaggacaagaattttgcctttttggagttccgctcagtggacgagactacccaggctatggcctttgatggcatcatcttccagggccagtcactaaagatccgcaggcctcacgactaccagccgcttcctggcatgtcagagaacccctccgtctatgtgcctggggttgtgtccactgtggtccccgactctgcccacaagctgttcatcgggggcttacccaactacctgaacgatgaccaggtcaaagagctgctgacatcctttgggcccctcaaggccttcaacctggtcaaggacagtgccacggggctctccaagggctacgccttctgtgagtacgtggacatcaacgtcacggatcaggccattgcggggctgaacggcatgcagctgggggataagaagctgctggtccagagggcgagtgtgggagccaagaatgccacgctggtgagccccccgagcaccatcaatcagacgcctgtgaccctgcaagtgccgggcttgatgagctcccaggtgcagatgggcggccacccgactgaggtcctgtgcctcatgaacatggtgctgcctgaggagctgctggacgacgaggagtatgaggagatcgtggaggatgtgcgggacgagtgcagcaagtacgggcttgtcaagtccatcgagatcccccggcctgtggacggcgtcgaggtgcccggctgcggaaagatctttgtggagttcacctctgtgtttgactgccagaaagccatgcagggcctgacgggccgcaagttcgccaacagagtggttgtcacaaaatactgtgaccccgactcttatcaccgccgggacttctggtagaggcggctgggggagggtgggggcagggctggctgggggcttctccccactcccgccccccccttatccccctctgaagacgatgggcagaggagtgacagccgcagacacacgacagccggcagcaactggaatggcagcaattaagggtggggggcgggggttggggggttggggggttagggcagggaggggactggggaagtgcgcacacagcccacacagacaacacgcacccacacagacacagagggaaggggttgggatggggacagggtgcacagcagggcggggtaggaccccagcccctcccaaaacagcctctccttctcccatagacccctttcttctccccttccccacggtaggaacatagcgtgtttatattttatggccaaactattttgaattttgttgtccggccctcagtgccctgccctctcccttaccaggaccacagctctgttccttcggcctctggtcctctctggtcccctcctgggtttcttacgtagttgatttttcctctttagtctcccccgacctgcgcccagccccgtggcccctgcccctctcctactctctgtggcagtttcatatttgctaagacgaatttgctcattaaacattttgttgtattttactttaaaaaaaaaaaaaaaaaa

SEQ ID NO: 876 - DNA, 2058 bp, Homo sapiens
cggtgctagcgacacgggagtggcaaacgcatcctcttgccgttcccggtgtttgggccttgcctgtgacggtgggaaaagaaaatggccttgctgtgctacaaccggggctgcggtcagcgcttcgatcctgagaccaattccgacgatgcttgcacataccacccaggtgttccggtctttcacgatgcattaaagggttggtcttgctgtaagagaagaacaactgatttttctgatttcttaagcattgtaggctgtacaaaaggtagacataatagtgagaagccacctgagccagtcaaacctgaagtcaagactactgagaagaaggagctatgtgaattaaaacccaaatttcaggaacacatcattcaagcccctaagccagtagaagcaataaaaagaccaagcccagatgaaccaatgacaaatttggaattaaaaatatctgcctccctaaaacaagcacttgataaacttaaactgtcatcagggaatgaagaaaataagaaagaagaagacaatgatgaaattaagattgggacctcatgtaagaatggagggtgttcaaagacataccagggtctagagagtctagaagaagtctgtgtatatcattctggagtacctattttccatgaggggatgaaatactggagctgttgtagaagaaaaacttctgattttaatacattcttagcccaagagggctgtacaaaagggaaacacatgtggactaaaaaagatgctgggaaaaaagttgttccatgtagacatgacttgcatcagactggaggtgaagttaccatttcagtatatgctaaaaactcacttccagaacttagccgagtagaagcaaatagcacattgttaaatgtcattattgtatttgaaggagagaaggaatttgatcaaaatgtgaaattatggggtgtgattgatgtaaagcgaagttatgtaactatgactgcaacaaagattgaaatcactatgagaaaagctgaaccgatgcagtgggcaagccttgaactgcctgcagctaaaaagcaggaaaaacaaaaagatgacacaacagattgagtgggagatggaaggaaggctattacattatttccgaatttttaatactgtgtgaagtggtggcttgctgctgtaatcttttgttttgttgttgtgttactgaatgtggcatttcagggttaacattaggttcttaaaagccaaagtcagtttgtctttttgtgcctctcatctttcttttgtgttatgtaagattgattattcatttctccctactggtaggaaccatagttgtgtcctatacttgaagaggctggaaagtagcccataaccataattgcagtatttctttgtatttctctgttaagcaaagaaatattaaggaacattttttttatgtttttgtattattccataattagtaaagcaagatgaaatgtcaaattttaatcagttttttcatggatttgtgttcttacagtacttgaaaatatttaaggaagagatgaagctctgcagttttttctatgtgggatgattacttttttaaggaggattaattctgaggtagtatagtaactaaaggggaatatatgaattgtttaacaaattagaatttgtttacaactacttgaatttttaaattatgtcaaaacttacattacttgccaagcagtatgatgttataggaaacataaataagattacagaggtatcaatttggttaaaattcaccattttataagactaagcaataatcttaacaacctctttcctgaatatttaaatgtgtttgtatggtgttatgactaattgttactgatttagagactaagccctcttaaaacctttagttaaatataaaaagaaattatatatatcttgcctccctgatggaaaactatataaaattgtagacttaaaaggtttgtggaaatacattaggatatcagaaaactaaatatatggagttgctttatgactattacatgttaaataaaaatagcttaattgttaaaaaaaaaaaaaaaaaaa

SEQ ID NO: 877 - DNA, 2153 bp, Homo sapiens
cgaccccgagaggcccggttcctttaggccgcctgcccgcctccagctctcggggtcggctccaggaggcgccctcaggagaggggcgggcgctctattccagagaccgagtggcagggcggccactgtggcggggctctttccccgtttcgcctcagctacccctcagctccggtagtcgccagtccggggtcgtcgccgtttggggcgggagctgctcggccccgccgccgtccccgtcgccgcttccgggtccaggcccctcgggccgcctgccgccgtcatgaggctgcgggtgcggcttctgaagcggacctggccgctggaggtgcccgagacggagccgacgctggggcatttgcgctcgcacctgaggcagtccctgctgtgcacctgggggtacagttctaatacccgatttacaattacattgaactacaaggatcccctcactggagatgaagagaccttggcttcatatgggattgtttctggggacttgatatgtttgattcttcaagatgacattccagcgcctaatataccttcatccacagattcagagcattcttcactccagaataatgagcaaccctctttggccaccagctccaatcagactagcatgcaggatgaacaaccaagtgattcattccaaggacaggcagcccagtctggtgtttggaatgacgacagtatgttagggcctagtcaaaattttgaagctgagtcaattcaagataatgcgcatatggcagagggcacaggtttctatccctcagaacccatgctctgtagtgaatcggtggaagggcaagtgccacattcattagagaccttgtatcaatcagctgactgttctgatgccaatgatgccttgatagtgttgatacatcttctcatgttggagtcaggttacatacctcagggcaccgaagccaaagcactgtccatgccggagaagtggaagttgagcggggtgtataagctgcagtacatgcatcctctctgcgagggcagctccgctactctcacctgtgtgcctttgggaaacctgattgttgtaaatgctacactaaaaatcaacaatgagattagaagtgtgaaaagattgcagctgctaccagaatcttttatttgcaaagagaaactaggggaaaatgtagccaacatatacaaagatcttcagaaactctctcgcctctttaaagaccagctggtgtatcctcttctggcttttacccgacaagcactgaacctaccagatgtatttgggttggtcgtcctcccattggaactgaaactacggatcttccgacttctggatgttcgttccgtcttgtctttgtctgcggtttgtcgtgacctctttactgcttcaaatgacccactcctgtggaggtttttatatctgcgtgattttcgagacaatactgtcagagttcaagacacagattggaaagaactgtacaggaagaggcacatacaaagaaaagaatccccgaaagggcggtttgtgatgctcctgccatcgtcaactcacaccattccattctatcccaaccccttgcaccctaggccatttcctagctcccgccttcctccaggaattatcgggggtgaatatgaccaaagaccaacacttccctatgttggagacccaatcagttcactcattcctggtcctggggagacgcccagccagtttcctccactgagaccacgctttgatccagttggcccacttccaggacctaaccccatcttgccagggcgaggcggccccaatgacagatttccctttagacccagcaggggtcggccaactgatggccggctgtcattcatgtgattgatttgtaatttcatttctggagctccatttgtttttgtttctaaactacagatgtcaactccttggggtgctgatctcgagtgttattttctgattgtggtgttgagagttgcactcccagaaaccttttaagagatacatttatagccctaggggtggtatgacccaaaggttcctctgtgacaaggttggccttgggaatagttggctgccaatctccctgctcttggttctcctctagattgaagtttgttttctgatgctgttcttaccagattaaaaaaaagtgtaaattaca

SEQ ID NO: 878 - DNA, 2424 bp, Homo sapiens
gcatcctctcaccgccggaagctgaactgactcgtccgcggccgctctaccccaacaggccgccaccagcgagagtgcggccataaccatcacgtgaccgcccaccgacaccagcgagagtgcagtcgtaaccgtcacgtgaccgcccaccgtcggcccggcgctcccctccgcccgaagctagcaagcggcgcggccaatgagaaaggcgcatgcctggcccccgccggcctgcagtctagccgtagtgcgcctgcgcgcggctaggaggggccgtcaggcggggatacagcctggaaggtgcgtgtggggctgggtctcggagtgggagacgtggagtgcaggctggagcgaccgtgtctggggagccgagccccgcttctcgctgcggtgagcccggactggggcacgcactgcgcagactccccgctgcagtgggcggagctcccacaggccccgccccctcctcccaccctcgttcagcctgtccagacagaagctggggcccaccggaggtagctgcagacgcctgagagcgaggccgaggcccctcagggtttggagaccctgacacacccaccttctcacctgggctctgcgtatcccccagccttgagggaagatgaagcctaaactgatgtaccaggagctgaaggtgcctgcagaggagcccgccaatgagctgcccatgaatgagattgaggcgtggaaggctgcggaaaagaaagcccgctgggtcctgctggtcctcattctggcggttgtgggcttcggagccctgatgactcagctgtttctatgggaatacggcgacttgcatctctttgggcccaaccagcgcccagccccctgctatgacccttgcgaagcagtgctggtggaaagcattcctgagggcctggacttccccaatgcctccacggggaacccttccaccagccaggcctggctgggcctgctcgccggtgcgcacagcagcctggacatcgcctccttctactggaccctcaccaacaatgacacccacacgcaggagccctctgcccagcagggtgaggaggtcctccggcagctgcagaccctggcaccaaagggcgtgaacgtccgcatcgctgtgagcaagcccagcgggccccagccacaggcggacctgcaggctctgctgcagagcggtgcccaggtccgcatggtggacatgcagaagctgacccatggcgtcctgcataccaagttctgggtggtggaccagacccacttctacctgggcagtgccaacatggactggcgttcactgacccaggtcaaggagctgggcgtggtcatgtacaactgcagctgcctggctcgagacctgaccaagatctttgaggcctactggttcctgggccaggcaggcagctccatcccatcaacttggccccggttctatgacacccgctacaaccaagagacaccaatggagatctgcctcaatggaacccctgctctggcctacctggcgagtgcgcccccacccctgtgtccaagtggccgcactccagacctgaaggctctactcaacgtggtggacaatgcccggagtttcatctacgtcgctgtcatgaactacctgcccactctggagttctcccaccctcacaggttctggcctgccattgacgatgggctgcggcgggccacctacgagcgtggcgtcaaggtgcgcctgctcatcagctgctggggacactcggagccatccatgcgggccttcctgctctctctggctgccctgcgtgacaaccatacccactctgacatccaggtgaaactctttgtggtccccgcggatgaggcccaggctcgaatcccatatgcccgtgtcaaccacaacaagtacatggtgactgaacgcgccacctacatcggaacctccaactggtctggcaactacttcacggagacggcgggcacctcgctgctggtgacgcagaatgggaggggcggcctgcggagccagctggaggccattttcctgagggactgggactccccttacagccatgaccttgacacctcagctgacagcgtgggcaacgcctgccgcctgctctgaggcccgatccagtgggcaggccaaggcctgctgggcccccgcggacccaggtgctctgggtcacggtccctgtccccgcgcccccgcttctgtctgccccattgtggctcctcaggctctctcccctgctctcccacctctacctccacccccaccggcctgacgctgtggccccgggacccagcagagctgggggagggatcagcccccaaagaaatgggggtgcatgctgggcctggccccctggcccacccccactttccagggcaaaaagggcccagggttataataagtaaataacttgtctgtaaaaaaaaaaaaaaaaaaaa

SEQ ID NO: 879 - DNA, 1151 bp, Homo sapiens
gataatgccaggccctgcccccggcagaggcggaagcggagtcggcctgagaggtctctcgtcgctgcaggcgcctcagcccagccgcgtgccttggcccatggccgcctactcttaccgccccggccctggggccggccctgggcctgctgcaggcgcggcgctgccggaccagagcttcctgtggaacgttttccagagggtcgataaagacaggagtggagtgatatcagacaccgagcttcagcaagctctctccaacggcacgtggactccctttaatccagtgactgtcaggtcgatcatatccatgtttgaccgtgagaacaaggccggcgtgaacttcagcgagttcacgggtgtgtggaagtacatcacggactggcagaacgtcttccgcacgtacgaccgggacaactccgggatgatcgataagaacgagctgaagcaggccctctcaggtttcggctaccggctctctgaccagttccacgacatcctcattcgaaagtttgacaggcagggacgggggcagattgccttcgacgacttcatccagggctgcatcgtcctgcagaggttgacggatatattcagacgttacgacacggatcaggacggctggattcaggtgtcgtacgaacagtacctgtccatggtcttcagtatcgtatgaccctggcctctcgtgaagagcagcacaacatggaaagagccaaaatgtcacagttcctatctgtgagggaatggagcacaggtgcagttagatgctgttcttcctttagattttgtcacgtggggacccagctgtacatatgtggataagctgattaatggttttgcaactgtaatagtagctgtatcgttctaatgcagacattggatttggtgactgtctcattgtgccatgaggtaaatgtaatgtttcaggcattctgcttgcaaaaaaatctatcatgtgcttttctagatgtctctggttctatagtgcaaatgcttttattagccaataggaattttaaaataacatggaacttacacaaaaggcttttcatgtgccttacttttttaaaaaggagtttattgtattcattggaatatgtgacgtaagcaataaagggaatgttagacgtgtaaaaaaaaaaaaaaaa

SEQ ID NO: 880 - DNA, 765 bp, Homo sapiens
atggcctcagttccgaaaaccaacaaaatagaaccgcggtcctattccattattcctagctgcagtatcaggcggctcgggcctgctttgaacactccaatttttcaaagtaaacgcaacgggccccgcggacactcagcttacagcatcgaggggcgccagaggcaaggggcgggacgggcggtggtccctcgcgcggaccgcccgcccgctcccaagatccaactacgagctttttacctgcagcaactttactatacgctattggagctggaattaccgcggctgctggcaccagacttgccctccaatggctcctcgttaaaggatttaaagtggactcattccaattacagggcctcgaaagagtcctgtattgttattttcgtcactacctccccgggtcgggagtgggtaatttgcgcgcctgctgccttccttggatgtggtagcctccaggctccctctccggaatctgaaccctcattccccgtcacccgtggtcaccatggtcggcacggcgactaccatcgaaagttgatagggcagacgttcgaatgggtcgtcgtccgccgccacggggggcgtgcgatcggcccgaggttatctagagtcaccaaagccgccggcgcccgccccccggccggggccggagaggggctgagggttggttttgatctgataaatgcaccgatcccccccgcgaagggggtcagcgcccgtcggcatgtattagctctagaattaccacagttatccaagtag

SEQ ID NO: 881 - DNA, 8680 bp, Homo sapiens
ggagcggcggcggcggcggccggggaggttcacaataaaggtgctaagaaagagaatgtaagacaggaaaataattaaatattcttaccgagtgtcttcaataggccgtgtttaagaggcgtcttacactccctgttgccagtggctggaacacaatggatcacacaggggcgatagacaccgaggatgaagtgggacctttagcccatcttgctccaagtcctcagagtgaagctgtggctcatgaattccaggaactctccttgcagtccagtcaaaacttaccccctctgaacgaaaggaaaaatgtgctccagctgaggctgcaacaaaggaggacgagagaacaactagtggaccagggcatcatgccacctttgaagagcccagcggcattccatgaacagataaaaagcttggaacgagccagaactgaaaactttttgaaacacaagattcggagtcgaccagatcgttctgaacttgtcaggatgcacattttagaagaaacatttgcagagccatccctgcaggctactcagatgaagttgaaaagagctcgactagcagatgatctgaatgaaaagattgctcaaagacctggtcctatggagctggtagagaaaaacatccttcctgtggactccagtgttaaagaagcaattataggcgttgggaaggaggactatccccacactcagggcgatttctcatttgatgaagacagcagtgacgctttgtctccggaccagcctgcgagtcaggagtcacaggggtcagccgcgtccccaagtgagccaaaagttagtgaatcgccatctcctgtgactacaaacactccagcgcagtttgcttcagtgtccccaacagttcctgaattcttgaaaactcctccaactgcagatcagcctcccccacggcctgcagctcctgtcctccccacaaacactgtgtcctcagcaaagcctggcccagcactggtgaagcaaagccatcccaagaatccaaatgacaaacaccgtagcaaaaagtgcaaagatcccaaaccacgggtaaagaagttaaagtaccaccaatacattccaccagatcagaagggtgagaagaatgagccgcagatggactctaactacgcccgcctgctccagcagcagcagctgttcctgcaactgcagatcctgagtcagcagaagcagcactacaactaccagaccatcctgcctgcaccattcaagccactcaatgacaaaaatagtaacagtgggaattcagctttgaacaatgccacacctaacacaccaagacagaatacatctactcctgtgagaaagccaggacctctgccttctagcctggatgacttaaaggtatcagaactgaagacagaactgaagttaaggggtctgccagtgtcaggcaccaaaccggacctcattgagcgcctaaaaccctaccaggaagtgaacagcagcggccttgctgctgggggcatcgtggcagtgtcatcatcagccattgtcaccagtaacccagaagtcactgtggccttgccggttacaacactacacaacactgtgactagctcagtctctactctcaaggcagaattgccacctacaggaaccagcaacgcaacccgtgtggaaaatgttcattcccctctgcccatttcaccatctccctccgaacagtccagtctcagtactgatgacacaaacatggcagacactttcaccgagattatgaccatgatgtcgccttcacagttcttgagttcatctcctttgagaatgacaaataatgaagacagtctgagtcccaccagcagcactctgtcaaacctggaactggatgcagccgaaaaggatcgcaagcttcaggagaaagagaagcaaatcgaagagctgaagaggaaactggaacaagagcagaagctcgtggaagtgctgaaaatgcaacttgaggttgaaaaacgagggcagcagcagcggcccctggaagcccagcccagtgccccaggtcattctgtcaagtcagatcagaagcacggcagccttggctcctccatcaaagatgaggcctcactccctgactgctccagctccaggcagcccatcccagtagccagccacgctgtaggccagcccgtctctacaggtggccagacccttgttgccaaaaaggctgtagttatcaagcaagaggtccctgtgggccaggcagagcagcagagtgtcgtctcgcagttttatacttcaccacaagcaggaatgcagactcagcctcagatagcaactgctgcacaaataccaactgctgccttggcctcaggcttggccccaactgtacctcagacacaagacacgttcccgcagcatgtgctcagtcagcctcaacaagtcagaaaggttttcacaaactcagcatcatcaaatacagttcttccatatcagagacatcctgccccagctgtccagcagccctttatcaataaggcctccaacagtgttcttcaatccagaaatgctccgcttccatccctgcaaaatggacctaacacacccaacaagcctagttcacccccgccaccccagcaatttgtcgtccagcactctctatttgggagtccagtcgccaagacaaaagatcccccccgctatgaggaggccatcaagcagacacgcagcacacaggcccctctgccagagatttccaacgctcacagtcagcagatggatgacctctttgatatcctcattaagagtggagagatctccctccccataaaagaagaaccttctcctatttccaaaatgagaccagtgacagccagcatcaccacaatgccagtgaatacagtggtgtcccggccaccaccccaagtccaaatggcaccacctgtatctttagaacctatgggcagtttatctgccagcttagagaaccaactagaagctttcttggatggaactttaccctcagccaatgaaattcctccactacaaagcagcagtgaagacagagagcccttctctctgatcgaggacctccagaatgatctgctgagtcactcaggtatgctggaccattcacactcacccatggagacttccgagacccagtttgctgcaggtactccctgtctgtctctcgacctgtcagactcaaacttggacaacatggagtggttggacattaccatgcccaactcctcttcaggactcactcctctcagcaccaccgcgccgagcatgttctctgctgactttctagacccacaggacctaccgctgccatgggactaacgtcacagatttcttttctgagagttgatgaggtttaagaacatgaagattctaaaaggtcagtttttagagatagatctatagttgcattgttgcaatcaaaatatgttgtcacagaaagaataggtggaaggtcatagcctggaacccaagtttgaaaacatttcattgtgttcagtagtgaatttctacagtttaacatagcacagggccttctgaaaatcgcacttgtcaaagacgactcatctatttctccagacttcagtaaagaatgaaaagtacctttagataaaaacaaagaagagtaatatatgcagcacagtgacgttaggattctggtaattaactacatttaaatctctggtcactttaagaccctaaataaaaggcagacagctccactcaaaaactaaggctgatgtgagggaggtgagaggtcactgcacttggtacttcctagagacggccggagccaggcccaagacacagcagaggtcaaaggcagtggagagccttggccagttcagtgacagcttctggctgaagacttttggttctattcagaaacctgtgtcgtttttttggtgttgtagtttattttgtgattttttggaatcgtactttatatttccaaatttaaatttaaatgcaagatctttcaacataaacagaagatacctacaaaatactgtcagaagtccaggtatactgataacactgaaaattctattagcaaccttctgggttggttagattgattttaatgtatatattagacatttgtatgtatgctctgacattgtgatttgtacagcctacgctggggtaaggaaatgggtatccaaggtcctacttttttaatagctcgaatatttctagagtacttgagccacatgtatttctgtatttaaagaattgctgactaactttcaggtaaccagacccatctcaaagaaccaagaaaaggctttagcatgaaatatctttctgagctggcgagttagaagaatggaaggtaaggggaaggtctgtcatctacccaggacattcccatgatgagtacaggtcagattgtgccacaaggtgggcctccacgtccctgccctggccctctttcttctgtcactaaccctggttatcattttacaggcttgtaactggatattctaccagagctctcactatattgtcaagcctaagattgaaaaactggaggctttattagtgtttttatatagaaaacagttattacatatgtgttaagtcatttcttaagaattttctaaaatgccaactatcacaggattatttcaagctagtcattgaggtatatgacaaaatgtaaataacaaaaaactgaaatctaccaaaagagcatggagatttttcttaaataataatattgtgctctccacctcacccttgtgtaaaccctcaggtcaggttggttcccctgggtcacaaaatggtaaatgttccatactgacatgccggaggcagcctgacccgttatttggaaagaatttgtgaattatttctgggtttgtgttttgcctaagagctgatcttatttctgatttgtgtgtgtgtggtttataaattttactacgtgtaacaaaagtctgcttttccagcatgagcacactggagccctctgctcactggcacttcctgactcaaaggcactaacagtgctcatgtgccttccagacggttcaaggcagaggccactgtgctcagtgtagtctgtgatgaatagtttaagtgttcagaaattggtaaaccaacacacgggatacaataactctctgttaaccagaacaccgtcatttgaccaagccctacaagagtttaccacactagatgttctgtgaatcctcgagtcagttccattgagaggggcctgtctccagggccaggctatttacttgggaaagtatttttcttacagttcttggccacagtttttttgctgagggtttctgtctgggcctatcaggtccatacttagaccctgagcatcttcttcattcagatttgaatggcttattaaattagcaccaaatatcagtgggactgtagaaggtaaccgaacactagtaccattgactctcgttgaataactttatatttccataatcctgaattgtgtagatagttttctagctctcgggtccctttattgctttttaaaatagggtttgaaacatgccacaggaaggttgctctccaaaaatacacagtgcagtgcaagaaaatgctatctcattggcctactctcctatgaattgctaaagtgcccacttcacatatgtgtttaaacctttataaaccagtatttcacttttaaaaagacaaggcatctctacccattaactctgcaagccactccacttgcaccattccgcttgaccctcctctctcctggcttgggtcaccagccaggcacctgtgacacgagtgctgctctccaggatctccactacatgttccaggttggagtgaggacgcgctatgtgctcacactcatgtgacatgaccaaagatgatactctgtaaacaaggcccttctgaccggactcagtgcgtgtgatggtgagtgcaatgaggaagggtggatattgactaaagactggttgttgttgttgtttaggttagtgtcacagccattacagcacaagtcaaagtcgccagttgaattttcattatgcacgtgtgtggtttaagcagtggtactgttgtatatcatattgtaaagtatcatactgccaagaaaataactcctagaaaggcattatctcacatccccatcttactttcctacatgttctcaaaacacagtagtaccagccttacctttctgctgtatgtagatagtcagatcatcctactgggggtgggatgaatttaaaagttataccaaaatttctgtaaagtctttgaaagtctaggagtaggtggtcatcttgtacatttcagcaaagcatccactaggaaacctcataggacagtgttagtggttcacgttctagtgtttttcctgaaatgtgcaatctactgtatagtattgccacataattgtacatagatgtattctgaatttgtggaatttcttgcttagatactattgtgtttgtttcatatgaatatttttgtaattctaaaagagatcttatttaaatttcctttttaaaagccgcatggttctgtgatccatgtaactgacactttttggctttcagtgctgtttagaaacagtggcaaaggcagggtggtgctgcctgcaagctgctgcctatggaaggcaaagtcatagtaatgagatagcacctctgaactgtgcagtcagcataccctgagtgatggctcaggggcgcactacctattttgtcaccagagctgactcaggcttcctggaccctcaaccccagatcattccaggcagcatagctttcttcacagtcctttcagaattcccaggctgaaatcagccatagcagttgacaaaacagctatccccacaagtgatgagatagtccctttactgtcctcaaatggacttggccttagagacgtggtaaagcactttggcagggtttaaaatatttgtgagaagcccacatttcagtatacatcctcactggcttccatgcacccacctgacggtagcctcacagaagtcctggctgtcactcaggtggggagctcatggtgccgctggggactttttagagaaatgtaaagagaatagctattcagtgtctactagcagagcaacatgtgtcaatttaaccaaattcacaaataaccctccatttttcaatatctgctactgtaaacatgaatattgaatactgacaagagaatacccatacaaatcgtcccaccgccctagaggccacagaattagcccaaaattatcaaagaacattaactggaaggtcaggtttttcaaggaacatagcttacaaatgcatcagtgtgtatctggagagcatcctaactgcatttcaactcatcttttaagtgatttcagtcaaaactggaaaacaactaagatgtagtaatttttttttcctggttcaaaccttcaataacttgctcattcagcagtctctctgagctacatttttatttgtaaagtgactctgtctgcatggcaatgagcaggtgcgtgttttttccacattcgccctttcttgcagtatccagggaaacacatcattacaaagggtttctacctgaaatctttcatggaaggcctacaattcgaaaagctgcacatgtttacagaagagctcttaccctccatgcaaacactttgctctgtggtgtcacagctttgtgacaataagatggcaatctcggatctacaaggtgctgtcgggaatcaaataaaatatgttatcagagatatcatcacatctatagtgtttaacagagctttatgccaactactaagacaaagctttaacaaagtttatagaatactgaaactcgtaacaattacctctctacgtgatgctgtaaggaatcttgctaatttggtaggaagaggaagcatttaggaaagggtttagtatctaccaaaagtacttgacctcaagtaaccaatagtaatgcaaacttgctttaaaggaaccaaaggcattgccaagtatttgccaaaaggaggcactttttatttaaaatttgagactaatgagatctcaaaaatcagccccaaaaaggtattatccatttaaggttataattttcactaagatgtagatatttctcttattgttttcatgtaaaatagtatagagttgttttgttggtttaagagtaacattcagtagtaatacaaagttttttttctatgtagaaattagttttcttttcttgcttgcaatagaaatgcaatgtgataggtgtttctcttcttattttcattgtcacattatgtcttagcatctcactttatgaaaaaaaggagaaagataccaatctacagagccctgcttgttgaagcactagtttaatcaacaaaaaattatggcaatcgggggtccattcatctattgcctttatgttgttttttaaaagaaaaaccatgatgcctttgtatttgctgtttgcacccctgaaatcaattccatatcatgtttgaatgccatacattttgcacatgtactgtacataagtaatgcatactgtatttttatatgtgtgcacatttatcatcagatcttttgtacatagtggcagtattgtagctgatcgggaaatgtttgatatctcagcaattttgcatttttgtgtctcaaataaaagacattttgatgtaaaaaaaaaaaaaaaaaaaaaaaaaaaaaaaaaaaaaaaaaaaaaaa

SEQ ID NO: 882 - DNA, 174 bp, Homo sapiens
atgcagataatgttctcatcagtagtaagaatctcagggttatgcttattccccaatggaggtatgacatataatcttttctgcctttacttatcaattcaccaaggagctgttttctctgcatctaggccatcatactgccaggctggttatgactcagaagatgttatctga

SEQ ID NO: 883 - DNA, 3253 bp, Homo sapiens
aagcttactcagcgcatctgctacagcattttatcttcccaagagccccatgaggcgatgacccaggatgcagccaggggccacgacatgcacggaggaccgcatccagcatgccctggaacgctgcctgcatggactcagcctcagccgccgctccacctcctggtcagctgggctgtgtctgaactgctggagcctgcaggagctggtcagcagggacccgggccacttccttatcctccttgagcagatcctgcagaagacccgagaggtccaggagaagggcacctacgacctgctcaccccgctggccctgctcttctattccactgttctttgtacaccacacttcccaccagactcggatctccttctgaaggcagccagcacctaccaccggttcctgacctggcctgttccttactgcagcatctgccaggagctgctcaccttcattgatgctgaactcaaggccccagggatctcctaccagagactggtgagggctgagcagggcctgcccatcaggagtcaccgcagctccaccgtcaccgtgctgctgctgaacccagtggaagtgcaggccgagttccttgctgtagccaataagctgagtacgcccggacactcgcctcacagtgcctacaccaccctgctcctgcacgccttccaggccacctttggggcccactgtgacgtcccgggcctgcactgcaggctacaggccaagaccctggcagagcttgaggacatcttcacggagaccgcagaggcacaggagctggcatctggcatcggggatgctgcagaggcccggcggtggctcaggaccaagctgcaggcggtgggagaaaaagctggcttccctggggtgttagacactgcaaaaccagggaagctccacaccatccccatccctgtcgccaggtgctacacctacagctggagccaggacagctttgacatcctgcaggaaatcctgctcaaggaacaggagctactccagccagggatcctgggagatgatgaagaggaggaagaggaggaggaggaggtggaggaggacttggaaactgacgggcactgtgccgagagagattccctgctctccaccagctctttggcgtcccatgactccaccttgtcccttgcatcctcccaggcctcggggccggccctctcgcgccatctgctgacttcctttgtctcaggcctctctgatggcatggacagcggctacgtggaggacagcgaggagagctcctccgagtggccttggaggcgtggcagccaggaacgccgaggccaccgcaggcctgggcagaagttcatcaggatctataaactcttcaagagcaccagccagctggtactgcggagggactctcggagcctggagggcagctcggacacggccctgcccctgaggcgggcagggagcctctgcagccccctggacgaaccagtatcacccccttcccgggcccagcgctcccgctccctgccccagcccaaactcggtacccagctgcccagctggcttctggcccctgcttcacgcccccagcgccgccgccccttcctgagtggagatgaggatcccaaggcttccacgctacgtgttgtggtctttggctccgatcggatttcagggaaggtggctcgggcgtacagcaaccttcggcggctggagaacaatcgcccactcctcacacggttcttcaaacttcagttcttctacgtgcctgtgaagcgaagtcatgggaccagccctggtgcctgtccaccccctcggagccagacgccctcacccccgacagactcccctaggcacgccagccctggagagctgggcaccaccccatgggaggagagcaccaatgacatctcccactacctcggcatgctggacccctggtatgagcgcaatgtactgggcctcatgcacctgccccctgaagtcctgtgccagcagtccctgaaggctgaagcccaggccctggagggctccccaacccagctgcccatcctggctgacatgctactctactactgccgctttgccgccagaccggtgctgctgcaactctatcagaccgagctgaccttcatcactggggagaagacgacagagatcttcatccactccttggagctgggtcactccgctgccacacgtgccatcaaggcgtcaggtcctggcagcaagcggctgggcatcgatggcgaccgggaggctgttcctctaacactacagattatttacagcaagggggccatcagtggacgaagtcgctggagcaacctggagaaggtctgtacctccgtgaacctcaacaaggcctgccggaagcaggaggagctggattccagcatggaggccctgacgctaaacctgacagaagtggtgaaaaggcagaactccaaatccaagaagggctttaaccagattagcacatcgcagatcaaagtggacaaggtgcagatcatcggctccaacagctgcccctttgctgtgtgcctggaccaggatgagagaaagatcctgcagagtgtagtcagatgtgaggtctcaccgtgctacaagccagagaagagcgacctctcctcaccaccccagacgcctcctgacctgccggcccaggccgcacctgatctctgctcccttctctgcctgcccatcatgactttcagtggagctctgccctagtgtgggcccagcgccagactggacagaagccctggggcaacctcctcggccacccctccaggacagtccctctctgtggagaactgaatggccctgtgcagagccatagtcccactgtgggtcctgcaatgagcaggggctgggagtagagggtttctggggcctcagggttctgggaaagcaacagctatcagagagagaagggccagaccccatagcctcttagattcctggcagtagaaggagaaggatgggtaaattgacctctgaagtccctgaccattagcatggtctaggatcctttctagaaggaagatctgaggctctggtgctcagggggatggcttgggccttttctctcaaccttggctgagcctaccccttactttgccaaagacttgaggaccctgtatgtctggagttcagtcccctcctctgtggggctcaggtgattgaaatgtggatgaaacatttctctacttcaagaccacctctccctgcaaacaccacacacacatggcatgcatgtacgcacatgcgcac

SEQ ID NO: 884 - DNA, 2399 bp, Homo sapiens
ataaaagcctagtggccattgtgttcgttgctcttatcggttcccatcccagttgttgatcttatgcaagacgctgcacgaccccgcgcccgcttgtcgccacggcacttgaggcagccggagatactctgagttactcggagcccgacgcctgagggtgagatgaacgcgctggcctccctaaccgtccggacctgtgatcgcttctggcagaccgaaccggcgctcctgcccccggggtgacgcgcagctcccagccgcccagacacatggccccaggccaagcaccccatcaggctaccccgtggagggatgcccaccctttcttcctcctgtccccagtgatgggcctcctcagccgcgcctggagccgcctgaggggcctgggacctctagagccctggctggtggaagcagtaaaaggagcagctctggtagaagctggcctggagggagaagctaggactcctctggcaatcccccataccccttggggcagacgccctgaagaggaggctgaagacagtggaggccctggagaggacagagaaacactggggctgaaaaccagcagttcccttcctgaagcctggggacttttggatgatgatgatggcatgtatggtgagcgagaggcaaccagtgtccctagagggcagggaagtcaatttgcagatggccagcgtgctcccctgtctcccagccttctgataaggacactgcaaggttctgataagaacccaggggaggagaaagccgaggaagagggagttgctgaagaggagggagttaacaagttctcttatccaccatcacaccgggagtgttgtccagccgtggaggaggaggacgatgaagaagctgtaaagaaagaagctcacagaacctctacttctgccttgtctccaggatccaagcccagcacttgggtgtcttgcccaggggaggaagagaatcaagccacggaggataaaagaacagaaagaagtaaaggagccaggaagacctccgtgtccccccgatcttcaggctccgaccccaggtcctgggagtatcgttcaggagaggcgtccgaggagaaggaggaaaaggcacacaaagaaactgggaaaggagaagctgccccagggccgcaatcctcagccccagcccagaggccccagctcaagtcctggtggtgccaacccagtgatgaagaggagggtgaggtcaaggctttgggggcagctgagaaggatggagaagctgagtgtcctccctgcatccccccaccaagtgccttcctgaaggcctgggtgtattggccaggagaggacacagaggaagaggaagatgaggaagaagatgaggacagtgactctggatcagatgaggaagagggagaagctgaggcttcctcttccactcctgctacaggtgtcttcttgaagtcctgggtctatcagccaggagaggacacagaggaggaggaagatgaggacagtgatacaggatcagccgaggatgaaagagaagctgagacttctgcttccacaccccctgcaagtgctttcttgaaggcctgggtgtatcggccaggagaggacacggaggaggaggaagatgaggatgtggatagtgaggataaggaagatgattcagaagcagccttgggagaagctgagtcagacccacatccctcccacccggaccagagggcccacttcaggggctggggatatcgacctggaaaagagacagaggaagaggaagctgctgaggactggggagaagctgagccctgccccttccgagtggccatctatgtacctggagagaagccaccgcctccctgggctcctcctaggctgcccctccgactgcaaaggcggctcaagcgcccagaaacccctactcatgatccggaccctgagactcccctaaaggccagaaaggtgcgcttctccgagaaggtcactgtccatttcctggctgtctgggcagggccggcccaggccgcccgccagggcccctgggagcagcttgctcgggatcgcagccgcttcgcacgccgcatcacccaggcccaggaggagctgagcccctgcctcacccctgctgcccgggccagagcctgggcacgcctcaggaacccacctttagcccccatccctgccctcacccagaccttgccttcctcctctgtcccttcgtccccagtccagaccacgcccttgagccaagctgtggccacaccttcccgctcgtctgctgctgcagcggctgccctggacctcagtgggaggcgtggctgagaccaactggtttgcctataatttattaactatttattttttctaagtgtgggtttatataaggaataaagccttttgatttgtagcgaaaaaaaaaaaaaaaaa

SEQ ID NO: 885 - DNA, 2158 bp, Homo sapiens
atattctacatctatcggagctgaacttcctaaaagacaaagtgtttatctttcaagattcattctccctgaatcttaccaacaaaacactcctgaggagaaagaaagagagggagggagagaaaaagagagagagagaaacaaaaaaccaaagagagagaaaaaatgaattcatctaaatcatctgaaacacaatgcacagagagaggatgcttctcttcccaaatgttcttatggactgttgctgggatccccatcctatttctcagtgcctgtttcatcaccagatgtgttgtgacatttcgcatctttcaaacctgtgatgagaaaaagtttcagctacctgagaatttcacagagctctcctgctacaattatggatcaggttcagtcaagaattgttgtccattgaactgggaatattttcaatccagctgctacttcttttctactgacaccatttcctgggcgttaagtttaaagaactgctcagccatgggggctcacctggtggttatcaactcacaggaggagcaggaattcctttcctacaagaaacctaaaatgagagagttttttattggactgtcagaccaggttgtcgagggtcagtggcaatgggtggacggcacacctttgacaaagtctctgagcttctgggatgtaggggagcccaacaacatagctaccctggaggactgtgccaccatgagagactcttcaaacccaaggcaaaattggaatgatgtaacctgtttcctcaattattttcggatttgtgaaatggtaggaataaatcctttgaacaaaggaaaatctctttaagaacagaaggcacaactcaaatgtgtaaagaaggaagagcaagaacatggccacacccaccgccccacacgagaaatttgtgcgctgaacttcaaaggacttcataagtatttgttactctgatataaataaaaataagtagttttaaatgttataattcatgttactggctgaagtgcattttctctctacgttagtctcaggtcctcttcccagaatttacaaagcaattcactaccttttgctacatttgcctcattttttagtgttcgtatgaaagtacagggacacggagccaagacagagtctagcaaagaaggggattttggaaggtgccttccaaaaatctcctgaatccgggctctgtagcaggtcctcttctttctagcttctgacaagtctgtcttctcttcttggtttcataccgttcttatctcctgcccaagcatatatcgtctctttactcccctgtataatgagtaagaagcttcttcaagtcatgaaacttattcctgctcagaataccggtgtggcctttctggctacaggcctccactgcaccttcttagggaagggcatgccagccatcagctccaaacaggctgtaaccaagtccacccatccctggggcttcctttgctctgccttattttcaattgactgaatggatctcaccagattttgtatctattgctcagctaggacccgagtccaatagtcaatttattctaagcgaacattcatctccacactttcctgtctcaagcccatccattatttcttaacttttattttagctttcgggggtacatgttaaaggctttttatataggtaaactcatgtcgtggaggtttgttgtacagattatttcatcacccaggtattaagcccagtgcctaatattgtttttttcggctcctctccctcctcctaccttccgccctcaagtagactccagtgtctgttattcccttctttgtgtttatgaattctcatcatttagctcccacttataagtgaggacatgcagtatttggttttctgttcccatgtttgctaaggataatggtttccagttctaccgatgttcccacaaaagacataattttcttttttaaggctgcttagtattccatggtatctatgtatcacattttctctatccaatctattgttgactcacatttagattgattccatgtttttgctattgtgaatagtgctgcaatgaacattcgtgtgcatgtgtctttatggtagaaagatttatatttctctgagtatgtatccagtaatagcccattcatttattgcataaaattctaccaatac

SEQ ID NO: 886 - DNA, 891 bp, Homo sapiens
accccatcccccactcctataccggtcctccattttggtgcctgcaaagctctgggaaagaatcccgggaaacgaaaaatggtgggtttgggggaagggaggtaaggggagaaagctggagggaggggctttaattggaggccccgtagaggacgcgcggaacttctaaggtgggaaaaaacgaaattaaaaaatcctttgatatcagggctctgaatcctgctggtcagagcaccaagcattcagtctctctccttgcctttgtcttacttgtgttcaaagaaaaacaaccagaaaaaaaaaatctcatcatggcaaatattcaccaggaaaacgaagagatggagcagcctatgcagaatggagaggaagaccgccctttgggaggaggtgaaggccaccagcctgcaggaaatcgacggggacaggctcgccgacttgcccctaattttcgatgggccatacccaataggcagatcaatgatgggatgggtggagatggagatgatatggaaatattcatggaggagatgagagaaatcagaagaaaacttagggagctgcagttgaggaattgtctgcgtatccttatgggggagctctctaatcaccatgaccatcatgatgaattttgccttatgccttgactcctgccatttatcatgagattaatactgtgattcccgctgttttctttttccttgcattttcctaatatgcctttactgatccgtttgctgtgaaccctatgttatttccatgtgtcaagtgggtcttgtgttgccagcttctatttgaagattgcctttgcactcagtgtaagtttctgtcagcagtagtttcacccatttgcatggaaaaatttaaagctaataaagcaatttaaaaagc

SEQ ID NO: 887 - DNA, 3770 bp, Homo sapiens
gcacgcgcagaggccctggcccagggctgggcttggttgtcatgagagtggaggctgcggccggggctatgggcagaggcggccgggtctgcttcttccctgtcactgccgcagcagcttggggtgcaaggcggcctggggcggcggaaggggcgccccccgagttccgtctgaggaagcggcggctgccgaggaagtccacgagagccgggtcccgcacgcccctggggtccgggtgctgaggcgccgcctggccgcctccccgggccgcggcaccgctccgacccagccgccctctccaccggggccgcggcagcgccagtcggggcccttccctctaagcagcccaaacgtgcagaatgccccacaagattggatttgtagtcgtcagctcatctggacacgaagacggcttcagtgcccgggagctcatgatccacgcgccaactgtcagtgggtggcggtcacctagattttgccagtttccacaagaaattgtccttcaaatggtggagagatgtcgaataaggaaactgcagttacttgctcaccagtatatgatttcaagtaaaattgagttctacattagtgaaagcttgcctgaatattttgcaccctatcaagcagagcggtttcgaagacttggctacgtgtctctctgtgataatgaaaagacaggttgcaaagcccgggaactaaaatcagtttatgtggatgcagtaggacaatttcttaaactgatttttcaccaaaaccatgtcaacaaatacaacatatataatcaggttgctttggttgccataaatatcattggagaccctgcagatttcagtgatgaaagcaatactgcctctcgagagaagttgattgaccactaccttgggcacaacagcgaggaccctgctctagaaggaacgtacgccaggaaatctgactatatctctccgctagatgacttagcttttgatatgtaccaagatccagaagttgcacagatcatacgaaaattagatgaaagaaaacgggaagctgtccaaaaggaacgctatgattatgccaagaaactaaaacaagccattgctgatttgcaaaaggttggtgaacgccttgggaggtatgaggtagagaaacgctgtgccgtggagaaggaagactacgatctcgccaaggagaagaagcagcagatggagcagtatcgtgccgaggtgtacgagcagctggagctgcacagcctcctggatgccgagctgatgcgaagaccttttgatttgcccctccagcccctcgctcgttctggcagtccttgccaccaaaagccaatgccctcactaccacaactggaagaaagaggaacagaaaaccagtttgcagaacctttccttcaggaaaagccttcatcatattctctaactatttctcctcagcattctgcagtagacccgttactccctgccacagatcctcatccaaagatcaatgcagagtccctgccctacgatgagcggcctcttccagctattcgtaagcattatggggaggcagtggtggagccggaaatgagtaatgcagacatcagcgatgctcggaggggaggcatgttaggggagccagagcccttaaccgagaaggccttgagagaagccagctctgccatcgatgtgttgggagaaaccttggttgctgaggcctattgtaagacgtggtcctaccgagaggatgcactgcttgccttgtctaagaagttaatggaaatgcctgttggaaccccaaaagaagatttaaagaacacactgagagcatccgtctttctcgttagaagagccataaaggacattgtgacctccgtttttcaggcttctttgaaattgttgaaaatgatcattacacaatatattcctaaacataaactgagtaaacttgaaacagctcactgtgtggagaggaccattcccgttttgctcaccagaactggagattcttctgcccgcctccgcgtcacagctgcaaattttattcaggaaatggccttgtttaaagaagttaagtctctccaaattattccatcctacctggtgcagccattgaaagcaaactcttcagttcacctggcaatgagtcagatgggcctcctggcccggctgctgaaagacctgggcactggcagctcgggcttcaccattgacaacgtgatgaagttttcagtgagtgccctggagcatagagtgtatgaggtccgcgagacggcggttcgaattattttggacatgtacagacagcaccaggcttccatcctggagtaccttcctccagacgacagcaacacacgcaggaacattctctacaaaacaatttttgagggatttgctaaaatagatggcagagctacagatgctgagatgagggcacggagaaaagcggctacagaagaagcagaaaaacaaaagaaagaagaaataaaagctttacaagggcagctggcagcactgaaagaaattcaggctgaagttcaggaaaaagaaagtgatgctgtgaagccaaagaatcaggacattcaaggagggaaagcagcccctgctgaagctctgggaatcccggatgagcactatctagataatttgtgtattttttgtggggaaaggagtgaatccttcacagaggaaggtctggatctccactactggaagcactgtctcatgctgacaagatgtgaccactgcaaacaggtggtcgagatatccagtctgacggagcacttgctgacggaatgtgacaaaaaagacgggtttggaaagtgttaccgttgcagtgaggctgttttcaaggaagagctgcccagacacataaaacacaaggattgcaaccctgccaaaccggagaagctggcaaaccggtgtcccctgtgtcatgagaacttcagccctggagaagaggcatggaaagctcacctgatgggcccagccggctgcacgatgaacctgcgcaagacacacattctgcagaaggccccggcactgcagccagggaaaagctcagctgtggccgcatcaggccccttggggtcaaaggccggaagcaagatccccaccccgaagggcggactgagcaagagctccagcaggacgtacgccaagcgctgacgcggcgctcgggctccttggtctctgtgagggatggagcgggtctcctgattctacaccatctctccagaactctctggccttggtggccccatgctctggctgctgtccccagctccccgccgtgcacgcctcttacgcgtctgtgccgtcagctctcgtgcaaacgatatggatgcagctaaccaaagatcctgcgtgcagtgccaggacctggccgcactgtacattaagccttcagggctgtctcaggccttccttagaatcagagaaggaagcgtcctgtttggagagagccagagagcaccgccgggaggcgctcgcgcaaggccacggtcagcacaggcacggtcccgctttccttagtgcttggagcaatttccataaaacattcaccagaaaccttttgcacatcggtctctgccacacgcagtagaatttccgcagggctgtggctcggccagcagcggttccaggagagtggcggtgcgcacgggcctccagccgtgccttccccctgcaggccccgtctgctgggcctgctgcccagtgcactcagccccaggtagcagaactcacgttcccactatagcaagaaataaaggcaaaagagaacatctttaaaaaaaaaaa

SEQ ID NO: 888 - DNA, 11326 bp, Homo sapiens
gggggggggcggcggccgaacgatgtgcgagaactgcgcagacctggtggaggtgttaaatgaaatatcagatgtagaaggtggtgatggactgcagctcagaaaggaacatactctcaaaatatttacttatatcaattcctggacacagaggcaatgtctatgctgcttcaaggaatataagcatttggagatttttaatcaagtagtgtgtgcacttattaacttagtgattgcccaagttcaagtgctccgggaccagctttgtaaacattgtactaccattaacatagattccacgtggcaagatgagagtaatcaagcagaagaaccactgaatatagatagagagtgtaatgaaggaagtacagaaagacaaaaatcaatagaaaaaaaatcaaactctacaagaatttgtaatctgactgaggaggaatcttcaaagagttctgatccttttagtttatggagtacagatgagaaggaaaaactcttactatgtgtggcaaaaatttttcaaattcagtttcccttatatactgcttacaagcataatactcaccctactattgaggatatatcaactcaagaaagtaacatattaggggcattctgtgatatgaatgatgtagaagtaccattgcatttgcttcgttatgtatgtttgttttgtgggaaaaatggcctttctctcatgaaggattgctttgaatatggaactcctgaaactttgccatttcttatagcacatgcgtttattacagttgtgtctaatattagaatatggctacatattcccgctgtcatgcagcacattataccttttaggacctatgttattaggtatttatgcaagctctcggatcaggagttacgacagagtgcagctcgtaacatggctgacttaatgtggagcacagtcaaagaaccattggatacaacattatgctttgataaagaaagcctagatcttgcatttaagtactttatgtcacctactttgactatgaggttggctggattgagtcagataacaaatcaactccataccttcaatgatgtgtgcaataatgaatcattagtatcggacacagaaacgtccattgcaaaagaacttgcagactggcttattagcaacaatgtggtggagcatatatttggaccaaatttacatattgagattatcaaacagtgccaagtgattttgaattttttggcagcagaagggcgactgagtactcaacatattgactgtatttgggctgcagcacagttgaaacattgtagtcggtatatacatgacttatttccttcactcatcaagaatttggatcccgtaccacttagacatctacttaatctggtctcagctcttgagccaagtgttcatactgaacagacactgtacttggcatccatgttaattaaagcactgtggaataacgcactagcagctaaggctcagttatctaaacagagttcttttgcatctttattaaatactaatattcccattggaaataagaaagaggaagaagagcttagaagaacagctccatcaccttggtcacctgcagctagtcctcaaagcagtgataatagcgatacacatcaaagtggaggtagtgacattgaaatggatgagcaacttattaatagaaccaaacatgtgcaacaacgactttcagacacagaggaatccatgcagggaagttctgacgaaactgccaacagtggtgaagatggaagcagtggtcctggtagcagtagtgggcatagtgatggatctagcaatgaggttaattctagccacgcaagccagtcagctgggagccctggcagtgaggtacagtcagaagacattgcagatattgaagccctcaaagaggaagatgaagacgatgatcatggtcataatcctcccaaaagcagttgtggtacagatcttcggaatagaaagttagagagtcaagcaggcatttgcctgggggactcccaaggcatgtcagaaagaaatgggacaagcagcggaacaggaaaggacctggtttttaacactgaatcattgccatcagtagataatcgaatgcgaatgctggatgcttgttcacactctgaagacccagaacatgatatttcaggggaaatgaatgctactcatatagcacaagggtctcaggagtcttgtatcacacgaactggggacttccttggggagactattgggaatgaattatttaattgtcgacaatttattggtccacagcatcaccaccaccaccaccaccatcaccaccaccacgatgggcatatggttgatgatatgctaagtgcagatgatgtcagttgtagtagctcccaggttagtgcaaaatcagaaaaaaatatggctgattttgatggtgaagaatctggatgtgaagaggagctagttcagattaattcacatgcggaactgacatctcacctccaacaacatcttcccaatttagcttccatttaccatgaacatcttagtcaaggacctgtagttcataaacatcaattcaacagtaatgctgttacagacattaatttggataatgtttgcaagaaaggaaatactttgttgtgggatatagtccaagatgaagatgcagttaatctttctgaaggattaataaatgaagcagagaaacttctttgttcgttagtatgttggtttacagatagacaaattcgaatgagattcattgaaggttgccttgaaaacttgggaaacaacagatcagtagtaatttcacttcgtcttcttccaaaactatttggtacttttcagcagtttgggagcagttacgatacacactggataacaatgtgggcagaaaaagaactgaacatgatgaagcttttctttgataatttggtatactacattcaaactgtgagagaaggaagacaaaaacatgcactgtacagccatagtgctgaagttcaagttcgtcttcaattcttgacttgtgtattttcaactctgggatcacctgatcatttcaggttaagtttagagcaagttgacatcttatggcattgtttagtagaagattctgaatgttatgatgatgcactccattggtttttaaatcaagttcgaagtaaagatcaacatgctatgggtatggaaacctacaaacatcttttcctggagaagatgccccagctaaaacctgaaacaattagcatgactggcttaaacctgtttcagcatctctgtaacttggctcgattggctaccagtgcctatgatggttgttcaaattctgagctgtgtggtatggaccaattttggggcattgctttaagagcacaatctggtgatgtcagtcgagcagctatccagtatattaactcctattatattaatggtaaaacaggtttggagaaggagcaagaatttattagtaagtgcatggagagtcttatgatagcttctagcagtcttgaacaggaatcacactcaagtctcatggttatagaaagaggactccttatgctgaagacacatctggaagcgtttaggagaaggtttgcatatcatctgagacagtggcaaattgaaggcactggtattagtagtcatttgaaagcactgagtgacaaacagtctctgccgctaagggttgtatgccagccagctggacttcctgacaagatgactattgaaatgtatcctagtgaccaggtagcagatcttagggctgaagtaactcattggtatgaaaatttacagaaagaacaaataaatcaacaagctcagcttcaggagtttggtcaaagcaaccgaaaaggagagtttcctggaggcctcatgggacctgtcaggatgatttcatctggacacgagttaacaacagattatgatgaaaaagcacttcatgagcttggttttaaggatatgcagatggtatttgtatctttgggtgcaccaaggagagagcggaaaggggaaggtgttcagctgccagcatcttgcctcccaccccctcagaaggacaacattccaatgcttttgcttttacaagagcctcatttaactactctttttgatttattagagatgcttgcatcatttaaaccaccctcaggaaaagtggcagtggatgatagtgagagcttacgatgtgaagaacttcatcttcatgcagaaaatctgtctaggcgggtctgggagctactgatgcttcttcctacatgtcctaatatgttgatggcattccagaatatctcagatgagcagagtaatgatggatttaattggaaagaacttctcaaaattaagagcgcccacaagctattgtatgctctggaaattattgaagcactgggaaaacctaatagaagaataaggagggagtctacgggaagttacagtgatctttatccagattcagatgattcaagtgaagatcaagtggaaaatagtaaaaattcctggagttgcaagtttgttgctgctggagggcttcaacagttattagaaatttttaattctggaattctagagcctaaagagcaggaatcatggactgtgtggcagctagactgtcttgcttgcttgctgaagttaatatgccagtttgcagtagatccatccgatttggatttagcttatcatgatgtctttgcctggtctggtatagcggaaagccataggaaaagaacctggcctggcaaatcaaggaaggctgctggtgatcatgctaagggtcttcatataccacgattaacagaggtatttcttgttcttgtccaaggaaccagtttgattcagcgacttatgtctgttgcttatacgtatgataatctggctcctagagttttaaaagctcagtctgatcacaggtctagacatgaagtttcacattattcaatgtggctcttggtgagttgggctcattgctgttctttagtgaaatctagccttgctgatagcgatcatttacaagattggctaaagaaattgactctccttattcctgagactgcagttcgtcatgaatcatgcagtggtctctataagttatccctgtcagggctggatggaggagactcaatcaatcgttcttttctgctattggctgcctcaacattattgaaatttcttcctgatgctcaagcactcaaacctattaggatagatgattatgaggaagaaccaatattaaaaccaggatgtaaagagtatttttggttgttatgcaaattagttgacaacatacatataaaggacgctagtcagacaacgctcctcgacttagatgccttggcaagacatttggctgactgtattcgaagtagggagatccttgatcatcaggatggtaatgtagaagatgatgggcttacaggactcctaaggcttgcaacaagtgttgttaaacacaaaccaccctttaaattttcaagggaaggacaggaatttttgagagatatcttcaatctcctgtttttgttgccaagtctaaaggaccgacaacagccaaagtgcaaatcacattcttcaagagctgccgcttacgatttgttagtagagatggtaaaggggtctgttgagaactacaggctaatacacaactgggttatggcacaacacatgcagtcccatgcaccttataaatgggattactggcctcatgaagatgtccgtgctgaatgtagatttgttggccttactaaccttggagctacttgttacttagcttctactattcagcaactttatatgatacctgaggcaagacaggctgtcttcactgccaagtattcagaggatatgaagcacaagaccactcttctggagcttcagaaaatgtttacatatttaatggagagtgaatgcaaagcatataatcctagacctttctgtaaaacatacaccatggataagcagcctctgaatactggggaacagaaagatatgacagagttttttactgatctaattaccaaaatcgaagaaatgtctcccgaactgaaaaataccgtcaaaagtttatttggaggtgtaattacaaacaatgttgtatccttggattgtgaacatgttagtcaaactgctgaagagttttatactgtgaggtgccaagtggctgatatgaagaacatttatgaatctcttgatgaagttactataaaagacactttggaaggtgataacatgtatacttgttctcattgtgggaagaaagtacgagctgaaaaaagggcatgttttaagaaattgcctcgcattttgagtttcaatactatgagatacacatttaatatggtcacgatgatgaaagagaaagtgaatacacacttttccttcccattacgtttggacatgacgccctatacagaagattttcttatgggaaagagtgagaggaaagaaggttttaaagaagtcagtgatcattcaaaagactcagagagctatgaatatgacttgataggagtgactgttcacacaggaacggcagatggtggacactattatagctttatcagagatatagtaaatccccatgcttataaaaacaataaatggtatctttttaatgatgctgaggtaaaaccttttgattctgctcaacttgcatctgaatgttttggtggagagatgacgaccaagacctatgattctgttacagataaatttatggacttctcttttgaaaagacacacagtgcatatatgctgttttacaaacgcatggaaccagaggaagaaaatggcagagaatacaaatttgatgtttcgtcagagttactagagtggatttggcatgataacatgcagtttcttcaagacaaaaacatttttgaacatacatattttggatttatgtggcaattgtgtagttgtattcccagtacattaccagatcctaaagctgtgtccttaatgacagcaaagttaagcacttcctttgtcctagagacatttattcattctaaagaaaagcccacgatgcttcagtggattgaactgttgacgaaacagtttaataatagtcaggcagcttgtgagtggtttttagatcgtatggctgatgacgactggtggccaatgcagatactaattaagtgccctaatcaaattgtgagacagatgtttcagcgtttgtgtatccatgtgattcagaggctgagacctgtgcatgctcatctctatttgcagccaggaatggaagatgggtcagatgatatggatacctcagtagaagatattggtggtcgttcatgtgtcactcgctttgtgagaaccctgttattaattatggaacatggtgtaaaacctcacagtaaacatcttacagagtattttgccttcctttacgaatttgcaaaaatgggtgaagaagagagccaatttttgctttcattgcaagctatatctacaatggtacatttttacatgggaacaaaaggacctgaaaatcctcaagttgaagtgttatcagaggaagaaggggaagaagaagaggaggaagaagatatcctctctctggcagaagaaaaatacaggccagctgcccttgaaaagatgatagctttagttgctcttttggttgaacagtctcgatcagaaaggcatttgacattatcacagactgacatggcagcattaacaggaggaaagggatttcccttcttgtttcaacatattcgtgatggcatcaatataagacaaacttgtaatctgattttcagcctgtgtcgatacaataatcgacttgcagaacatattgtatctatgcttttcacatcaatagcaaagttgactcctgaggcagccaatcctttctttaagttgttgactatgctaatggagtttgctggtggacctccaggaatgcctccctttgcatcttatattctgcagaggatatgggaggtgattgaatacaatccttctcagtgtctagattggttggcagtgcagacaccccgaaataaactggcacacagctgggtcttacagaatatggaaaactgggtcgagcggtttcttttggctcacaattatcctagagtgaggacttctgcagcttatcttctggtgtcccttataccaagcaattcattccgtcagatgttccggtcaacaaggtctttgcacatcccaacccgtgaccttccactcagtccagacacaacagtagtcctacatcaggtctacaacgtgctccttggtttgctctcaagagccaaactttatgttgatgctgctgttcatggcactacaaagctagtgccctattttagctttatgacttactgtttaatttccaaaactgagaagctgatgttttccacatatttcatggatttgtggaaccttttccagcctaaactttctgagccagcaatagctacaaatcacaataaacaggctttgctttcattttggtacaatgtctgtgctgactgtccagagaatatccgccttattgttcagaacccagtggtaaccaagaacattgccttcaattacatccttgctgaccatgatgatcaggatgtggtgctttttaaccgtgggatgctgccagcgtactatggcattctgaggctctgctgtgagcagtctcctgcattcacacgacaactggcttctcaccagaacatccagtgggcctttaagaatcttacaccacatgccagccaataccctggagcagtagaagaactgtttaacctgatgcagctgtttatagctcagaggccagatatgagagaagaagaattagaagatattaaacagttcaagaaaacaaccataagttgttacttacgttgcttagatggccgctcctgctggactactttaataagtgccttcagaatactattagaatctgatgaagacagacttcttgttgtatttaatcgaggattgattctaatgacagagtctttcaacactttgcacatgatgtatcacgaagctacagcttgccatgtgactggagatttagtagaacttctgtcaatatttctttcggttttgaagtctacacgcccttatcttcagagaaaagatgtgaaacaagcattaatccagtggcaggagcgaattgaatttgcccataaactgttaactcttcttaattcctatagtcctccagaacttagaaatgcctgtatagatgtcctcaaggaacttgtacttttgagtccccatgattttcttcatactctggttccctttctacaacacaaccattgtacttaccatcacagtaatataccaatgtctcttggaccttatttcccttgtcgagaaaatatcaagctaataggagggaaaagcaatattcggcctccgcgccctgaactcaatatgtgcctcttgcccacaatggtggaaaccagtaagggcaaagatgacgtttatgatcgtatgctgctagactacttcttttcttatcatcagttcatccatctattatgccgagttgcaatcaactgtgaaaaatttactgaaacattagttaagctgagtgtcctagttgcctatgaaggtttgccacttcatcttgcactgttccccaaactttggactgagctatgccagactcagtctgctatgtcaaaaaactgcatcaagcttttgtgtgaagatcctgttttcgcagaatatattaaatgtatcctaatggatgaaagaacttttttaaacaacaacattgtctacacgttcatgacacatttccttctaaaggttcaaagtcaagtgttttctgaagcaaactgtgccaatttgatcagcactcttattacaaacttgataagccagtatcagaacctacagtctgatttctccaaccgagttgaaatttccaaagcaagtgcttctttaaatggggacctgagggcactcgctttgctcctgtcagtacacactcccaaacagttaaacccagctctaattccaactctgcaagagcttttaagcaaatgcaggacttgtctgcaacagagaaactcactccaagagcaagaagccaaagaaagaaaaactaaagatgatgaaggagcaactcccattaaaaggcggcgtgttagcagtgatgaggagcacactgtagacagctgcatcagtgacatgaaaacagaaaccagggaggtcctgaccccaacgagcacttctgacaatgagaccagagactcctcaattattgatccaggaactgagcaagatcttccttcccctgaaaatagttctgttaaagaataccgaatggaagttccatcttcgttttcagaagacatgtcaaatatcaggtcacagcatgcagaagaacagtccaacaatggtagatatgacgattgtaaagaatttaaagacctccactgttccaaggattctaccctagctgaggaagaatctgagttcccttctacttctatctctgcagttctgtctgacttagctgacttgagaagctgtgatggccaagctttgccctcccaggaccctgaggttgctttatctctcagttgtggccattccagaggactctttagtcatatgcagcaacatgacattttagataccctgtgtaggaccattgaatctacaatccatgtcgtcacaaggatatctggcaaaggaaaccaagctgcttcttgacattaggtgtagcatgtctacttttaagtccctcacccccaacccccatgctgtttgtataagttttgcttatttgtttttgtgcttcagtttgtccagtgctctctgcttgaatggcaagatagatttataggcttaattcttggtcaggcagaactccagatgaaaaaaacttgcatcttcagtatacttcctaaagggcaatcagataatggatatgttttatgtaattaagagttcactttagtggctttcatttaatatggctgtctgggaagaacagggttgcctagccctgtacaatgtaatttaaacttacagcatttttactgtgtatgatatggtgtcctctgtgccagttttgtaccttatagaggcagattgcctccgatcgctgtggttcttattatcaaaattaagtttacttgtatacggaacaaccacaagaaatttgattctgtaaagaatcctctttagctgtggcctggcagtatataaatggtgctttatttaacagaatacctgtggaggaaataaagcacacttgatgtaaaaataattgttttatttttattgacatgactgattgattgattgctattctgtgcacttaattaaactgattgtgatgacttttcatttgtttaaaaaaaaaaaaaaaaa

SEQ ID NO: 889 - DNA, 9540 bp, Homo sapiens
agtgcatgaagtatgctcagtgtgccagcaagggctgataatcagcagaaggacagggtgcttcgttagtcagaagagccagggcttcccggctgccaggctacagaactcgcctcgccactcctgagacatggacaacgccgttgacggactggacaaagcttctatagcaaactcagatggccccacagcaggttcccaaacacctcccttcaaaagaaaggggaaactatccaccattggtaaaatctttaagccttggaaatggaggaaaaagaagaccagcgacaaatttagagaaacctcggcagtattagaaaggaagatatccacacgacaaagtagagaggagctgataagaaggggagtgcttaaggaattgcctgatcaagatggagatgtaacagttaactttgaaaattcaaacgggcacatgatacccatcggagaggaatctacccgagaggaaaatgtagtaaagtctgaagaaggtaatggctctgtatctgaaaaaacaccacctctggaggaacaggcagaagataagaaagagaacactgaaaaccactctgaaacaccggcagctcctgctctacctccttctgctcctcctaagcctagacccaaacctaaacccaaaaaatcacctgtgcctccgaaaggggccactgctggggccagccacaaaggtgatgaagtgcctcccattaaaaaaaataccaaggctcctggtaagcaggcccccgtccctccacccaagccagcaagccgaaacacgacccgagaggctgctggctcctctcattcaaaaaaaacaactggctctaaagcatcagcttcgccatccacttcatccacctcatctcgtcccaaagcttcaaaggagacagtttctagcaaagcagggacagtggggaccaccaagggcaagagaaaaactgacaagcagccaataacttctcacctgtcctcagacacaacaacttctggcacatccgacctgaaaggagagcctgcagagaccagagtggagagtttcaaactcgaacagactgtccctggagctgaggagcagaacacaggcaaattcaagtccatggtccctccaccccctgtggctccagcaccttctcctctggccccccctctccctcttgaggatcagtgcattactgcctcagacactccagttgtcctcgtcagcgttggagctgacctgcccgtctctgccttagacccaagtcagcttctttgggctgaagagccgacgaacagaaccactctctactcaggcactggcttaagtgttaacagagaaaatgcaaaatgtttcacaaccaaagaggagctggggaagacagtgcctcagctactgactcctgggctgatgggcgaatcttcagaatcctttagtgcctcagaagatgaaggccacagggaataccaagccaatgactctgactcggacgggcctatcttgtacaccgatgatgaggacgaagacgaagatgaggatggcagtggagaaagtgctttggcaagtaaaatacgccggagggatactcttgctatcaaacttggcaacagaccatctaagaaagaactagaggacaaaaacatcttgcagcgtacatctgaagaagagaggcaggaaatccgacaacaaattggaaccaagttagtcaggaggctgagccagaggcccacaactgaagaattagagcaaagaaacatcctaaaacaaaagaatgaagaagaggaacaagaagcaaaaatggaacttaaacgcagactcagcagaaagctcagcctgagacccacagtggcagagctacaagctcgaaggatcctgcgatttaacgagtatgtagaagtcacggattctcctgactatgaccgccgagcagacaagccctgggccaggttaacacctgcagacaaggcagcaataaggaaagaactaaatgaatttaaaagcacagaaatggaagttcatgaagagagtcgacagtttacaaggtttcatcgtccataacgaagagtgagactatttggaaacagagactgatcatctttgggggaagccctgcttcctgaaaacctgatattgcactgggatttgaatgtgtgtgtttccgtttaacttgtggtgaaggaagtgtgtgactcagcttggctgggaagtgctcctcacctgtgtggcccagatggctccaacaagcaaaaggaaggatgcagtgactcttgctgcccagaatgcacagcgatggtaagagacaccgtggatattcttcatcagaagctttaatcaaagaagatgagcagaagacaatcactggctccctgttaccagaaagccaaattttataatgcgggtgaaagaaaaatatagattaaaattgctgggcactgaaaaggggtgggagttggaaatcagaaagaaagagaaatatttcattatgttaatgaagaaaagagaaaattgaagcataaatgtatttttgaagtagttattcggtagctgagaacttattaagggatttaggaatttaacctcctgatgtggattcctcaaagacttgatcggagaatactcttgtttcaccattatgttggtacagtatagtaccattattttatgttgtgccagtgaatccagttgccagaaataagtctgaatgttttcatgcatctttttcttaaatgcaagagcttctactgactcttaacaagcatgcttacccaaattttgttgcatgcttttaagtagcattagctatgcacacttgacatttttaaatatccctttcctagtgtaccagccttcacaggataagaggactgggaataaagtcagatgtaatgtgaccctagaaaactgtagcaagcttcagaaataaatcttttgatctttccctatcttgattagatccaaagtcaaagcaaccatacttcacctagagaagacagtattggcaatcatgacacctgtaataaaaacttgaatccaaagtcaaaacttaagcaagatacaaatgtgctgcctgcagttagtcctgcatgggaataaggactagttatttttttagtgctgcatttttttaaagttggattgctgctatttaaaaaaaaaaaaaggacacagatcaaaaaaacacccaaaggcttaacagaacatggaaagttcccactaagttgtgtgtgaggaaatcctcatcttgtattttaagaatctgcagatggcatccatagatacagtacagtatttactgtcaatgcaaaagaatcagtgaggttaaagtagtggaagttttccctatgagcctacagtctgtattgtttacattaagaaactctctattattgtgttgctattttccatggagtcacaggcacactatgacttctgctcccaaatacatatgaccatatgtaaataccaccttgcatttcattgttcttcacaagtgctttgtgcccctttaattaaaaacacatgaaatgaataacaaaacaagacccaaatagagtttattttattctcagagtttggactacaattttctaagatgtttctggttcaagactgtcattttctatttcaaccgaaaagtaagcatttaacccggtgaataaatgtagatcctgccattcattggtattttaaagaaccacttgaaatcggatcattttatttaaaaataaaaaatgttaatgccagttggcctactataaaaagccaggaccatgttagaattaggaaaagtaaccagcattactgcacctcttgttagactctgtgcattaataaaacacacctagagtctgttgtcatttcactaataggataagacaaattttttgctttgaaaaaatttttctgcatgcccaggtgtctgtctctggctgaggttttgtctattttacagtgtttcaatccagccataaaaattaacttgtgattttttttttcccaaagtcatgcttttccttaattatatttttattttattattttagtgtcttgagaaaaataccaagagatataatgtttcttttaattgtctatgcttaatcatctttaaacactttttaaatttctaaccacaagacctctctataatggtaaatgtaagacatcaccattttatcactcaaagtatgttattgaaagtttctatttggttgataaaaggaacaattttttcccacttttgatgcctgtgatgcaattttttattgcctacaatgagatacacttagtacaaaaaatgaaaatctggtatttcaaaattgcatttcttgtataataggtcagatttattaactactcatactttttctttacactaatcgatacatttagaaaaaattttctaagttagagacaagtttaaaagtaaaaaaaaaaaaaaattagccactgctagtctactgtttaggtaatcggaatcaccaattattttattagaatgatggcttgagtaaaaagctgtggaaagaattaaaggattatgagctaagctgtattttgcagaatatggttctattttagtagagcagagatgagacatatccccaccggccacccagccagaggtctcctacctgggggccctaaagggatgcagaggtctggcccaccctccgtgcataggcacctctgtccaccaccagcgtttcagcaatccaaccagtaagcatatgctgtataggaaaaataaaagtgtgtgggaattggatttcttttgttgtaacacaattccaggtttttggctatttaaagtttgacattaggctgacatcgaggaagtaagtgggttttcctgagttcccaagatatgattaaggaagaaaacaaacccatctccaggaagatcccaggcaggaaagaactagacagatgtagaaaccaaagtgaccattttagtttttttattggagaataaaacattaatattagggtattaagaagatgctcagcaagcttgatcagaatcttcatggtcattaccaatcagtctgacaaaatagttctctggtagtcagcattcatttaaggcagcttgcctgataatttcctgtgttatgtgaagtgtcttgcactttcacatgttagctataattccttaaattacttaactgaaatctgtaatagagaaccattttggcatttgaacagctattttacatggagaaaaagcaaacacatctgtttgctttacccagaaaaactgactttctggtttcatcttcatattgtttagtagcataatgagagtagtcctttatctttctctaatgttagtaaatatattctgttagtaggaagttctgaaattgaagggaaaatatatttaaggaaataaaggaattcaatacacccttcaaaagtcaccaaatactgaaaataagagatgagtccttaaaacctgagtcaaaaaaggtccagttttacagcctgcaattaattcagggctgcgttggcattaaaaaagaaaatatatatatatatatatatatatatatatatatatatatatatgtatattatatatacagtagcttacacttaaaagaggaaaaatttgcattaacattgcatattctgatatgtaccatattaacacataacaggcattttatttatgcttcatagaatcagacagacacaactttcaaaaatcttactgtattcacaatagaaaagggtagtcttgtctaccacagaggagtatgtccacacttaataatgaaaactttcttcctttcctgcccaaaaatttcttcagtctgttattatttttaagtgccccttgctgcaaatttcaaacagagcaagaaatcttcctcagagtaggtggtatgaaattaaactagtacaatatatatgaattcatgtcatttacccctgagtatggtagaattgttaaagcattcttaaattccaattatatgaagcctatcattactaggaaaagtatattctttgggataagaattaatttcttcacactattagagcatgttgtgagtagtaaggaactacttagatgcaatttatttacagaattgtcccttgacctcttgaaatggctagatctttcactactgtgtaggtagtctctacttactggtaggatagattacattgctttactggacaaagcagaatgaacttatataactaaaatatgtcctatattggctgggtgcggtggcttacacctgtaataccagcactttgggaggccaaggtgggtggatcagttgaggtcaggagttcgagaccagcctggccaacatggtgaaaccctgtctctactgaaaatacaaaaaaaaaaaagtatctgggcatggtggcttgtgcctgtaatcccagctacttgggaggctgaggcagggaaatcgcttaaacccgggaggtggaggttgcagtgggcccagatcgtgccactccactccagcctgggagacagagcaagactccatctcaaaataataataatagtaataatgaataaaataaaataaaatatgtcctccagggaaaagcaatgacagagtaatcaccaaattaataggaacatctttctagagaaagtacatgcccagttagttcaaacccaggtttcaaagaagtagcactgggctctactgtaaaggcaggcagtgaccaagaggtggtggggagagaggtagagtaccctcaaatcattcccattttcacttccaatttcccttttgtaatcattaagcttaagctatgtatggaaatgcaaagcaccattagcatttctagaaagcagctggaaccttacccaccaatgcttttttgaagacagtatcatcccaaatttaaaaatcctattgtatatgttgtaaaatttctggcaaagaaatggaggatcctgtggcagctattcccacctaaagccaaccctataaggatgggtcattttttagccatgctaggatttactgcacacacaaaaaatgtcatttagcttgtcacattgctagcacagctgcacatatgagcaaagcactgttggtctgtgtttctcagtgggggtactcttggcatttggagctggataggtctttgctgtacagaatcatcccatgcattgccagatgtttaatatcccaggcccctgctgactaaatgtcagtagcattctcagtcattgtaaacaccaagaataaaaagcattcccccaggttcaaatgccctccctgggaggttggtatcacctcccctgaatgccactgtctactgcattttgaggacacagggagaaaaagtgcctatcctcaaacattgtctctgctgccttgcatttctttgggccctgaatggtttttctcccttcatttttcgagcctttctctcagtgcagctgttcttcagggaggaggttactgggcagccttggccattcagtgggcatggggacttggcctagtccctatatatatatacttaaagtccctatatatacttaaaggagagatcatacatgaagaaagcttttttttttttttttttttttgccttacaacttttctttagaaccacattattggtcataatccttgttactgtcatgaggattgttgcatgggttaaacacaaacacagactagcaatgcacttgaacaaacctggtggtctttggaaataaatcaccattagatttcacctggttatgctgcatcccataagttccaaatgaatcacctgcttatcctattaacgaagcatttaattcacacacaaatgcttgaatttcccctgtataaatgtagtcatgcgattcaacttttctaataagatttgtgaatgctgcatcatgatgaaaatgtggattaactgtgggttgcatgcctgttgttcatacttcagtgatggtcacacacaaaacaagatgagttttacttaggtgaaacattattaaactgtactaacaatacagaaacatattctctttgtcgctttttatcaccaaaactgaatggcaaatatgtcttgacattacttggatgaactgtggctagcaaaatggaattaacttagccactataattttttaaaacattaaagtttctaaattgtttttggggccgagtaacgcagagtcaataaaggtggttatattgtaagcttttagatggtgcttaagaattcttatctttttaaatagcagtattttttttttaagaataaattgtaaggagcaaataaggcagaatgccactctaccctcaggtcaattttatggtatatgaaaatgccagtaatatttgtgccacttgccaactcgggggaggaggggcttttcccttactggatacttttgttatagtttgactatgtcattatgttgtttagagagcctccacaatgagaagttgccactgcagggctaactcgccttcagaaataatcagaatgattcaagggtcaaaccactttcatcccttaaaatatagggactaatatttctttttcttttttttaaaaaaaacatttcttctgtggcttagaaatgtgccagtgtgttcaaaacatttacaccaatttcaccagatttaggacctattaaaaattcaaacaagtttcttttttttttttttttttctgtgtaacagggatttttaaataacggactatatgcattcttttgttatttcacacttcagttaaagtgataacaatggtaaactgtgatcattatcagactgactgaatgctttctgatttccagtgagtgatctagttctacgtattacacaggtgtaatatctgtgagtgtaaataactggaactgtacactgattaacatgacagtttctcttttgttgttcttatctgtactgtattatagtatgtgggtataaatatctacaagtatacacacatatgtacttgtattccactattgtaacctgaaagaaagactatgtattcccttttttaattccgtactggtatttgtgttatttaaaaagcaaaattctgctctatttagttgtataatattagaggatactttgctgtgcacaattccaagtgccttagaacattgtttagctttcctaagtatatataaatgcatatatgtataaaattgggaaaagttacctcaataaaatcattgggaaatccccagttttagtttgttccagtttctcttatatttggatagtgctcagcctttttaaatgaaaaaagaaaaaagagtaagacaacttccctaattgcctgttatttcagcttcacctaagtttttaacacctctttgtatgtaaggtcttgagacatgtaaggcctggtactttttatttaaaatgtctgtctaaagaattactgctcttaaaagaaacttccagtattttttttaacttgctatctttttatgtctgaggtatttgatattgatgtttttattgccattattatatgtaaacataaaagatagtccatttagagtttataatatagaaaataaacagacttcctcattaaaaaaaaaa

SEQ ID NO: 890 - DNA, 5428 bp, Homo sapiens
gcggggagccggcggttatctgggcggcggagcgctcacaatgtggcaggagacagaaaagataagatgctcccaagtcccttgcagctctcttcagaagaaaaatcactagtgctctgctcttgccataataccaaacctttttgactcatgctttggtgctgcaacactggaagaattgcacacagtttccaggaatatctttttttcatttgagtgattctttgtggatgagaaaagatttgagtcttaataattaccttgttttaaagctatttctttatagtctgaactgtttaataaattgggccacttaccaatgagccacacagccagttcttgtcaggagctggttgaaaactgtgctgtgcatgtagcaggaatggcacaagaagatagccgtcgtggtcaagtgccatcttccttttatcatggtgccaaccaagaacttgacctgtccaccaaagtgtacaaaagggaatcaggaagtccttattctgtgttagtggacaccaagatgagcaaaccgcatctccatgaaacagaagaacagccatatttcagggagacaagagcagtgtctgacgtgcatgctgttaaggaagaccgggagaattctgatgacacagaggaggaagaggaagaagtctcttacaaaagggagcagatcatagtggaggtaaaccttaataatcaaacattaaatgtatctaaaggggaaaagggtgtctcttctcagtccaaagagactcctgttcttaagacaagcagtgaggaggaagaggaagagagtgaggaagaggccacagatgacagcaatgactatggagagaatgaaaagcagaagaaaaaggagaagatagtagagaaagtcagcgttacacaaaggagaaccaggagagctgcctctgttgccgcagctaccacttcccctactcccagaactacaagaggtcgtaggaagagtgtagagccacctaagcgtaagaagcgggccacaaaggagcccaaagcaccagtccagaaagctaagtgtgaagagaaagagactctgacctgtgagaagtgccccagggtatttaacactcgctggtacctggagaagcacatgaacgttactcataggcgcatgcagatttgtgataaatgtggcaagaagtttgtcctggaaagtgagctgtcccttcaccagcaaacagactgtgaaaaaaacattcagtgtgtttcctgtaacaaatcgttcaagaaactctggtcccttcatgaacatatcaagatcgtccatggatatgcagaaaagaaattttcctgtgaaatttgtgagaagaaattctataccatggctcatgtgcggaaacacatggttgcacacacaaaagacatgccatttacatgcgaaacctgtggaaaatcattcaaacgcagtatgtcactcaaggtgcactccttgcagcattctggagagaagccctttagatgcgagaactgtgacgaaaggtttcagtacaagtaccagctacgctcccacatgagcattcatattgggcacaaacagttcatgtgccagtggtgtggcaaggatttcaacatgaagcagtacttcgacgaacacatgaaaacacacactggagagaaaccctttatctgtgaaatctgtggcaaaagcttcaccagccgccccaacatgaagagacaccgcagaactcacacaggcgagaagccctatccatgtgatgtgtgtggccagcggttccgcttctcgaacatgcttaaggcccacaaggagaagtgctttcgggtgaccagccccgtgaatgtgccacctgctgtccagatcccacttacaacttccccagccaccccagttccttctgtggtgaacacagccacaaccccaacccctccaatcaatatgaatcctgtaagcactcttccccctcggcccatcccccaccccttctcacacctgcacatccacccacaccctcaccacccacaccaccttcccatccctccagtccctcacctcccgccacctccagctctctttaagagtgagcctttaaatcatagaggccagagtgaggacaactttctgcggcacctggcagagaagaacagttcagcacagcatcattaacatccgtctccttagtgtgttctccaggagacacgtccccatgtgtgagcgtgcacagagggagtcggtgagcatttccttagttctcagactctcctccgcctctaccaagagcttcgccagtgtcactgaatcaacagatccaagggaatgaacaagaagactaccttgagctcacagagggactgtcatctaaaccaggggaaccactgaactaaagcccaatttgcttgcattttctgatgacttttataagtttcaaatactcagacttgtggaattttataatttcatatcagctgatgaggtatgcttgcttttatatcccagacttctcctcaaagaggggataggcctggtttcctttgtactaatcgggaaggctgtgagattaatccagagcattaattgtatcactgtgtatggtaaggaattcttttcagcttttggtgccagctacagagttgagctggccatgtttcacagtatatcaagcattatagagaaagacagaaattttcttctttgtgtagctctcctaacgcactctttattttactacagaaattattttagagtttttgtatagacttctttggtagtctgtttctaaaatgaaatgtatttcaataagcagtgtaattttttcagtgtagctgaacctatgttgtaaaatagaaaaaaatttttataatcatcaaaatgtgattcttaaagatgcatataacttctataattcaaagctattcttacatccgtacaactcaaaaggtgcttcagagactagatgtatctgagagggtctccagaccaggttactgcaaaaatgaggttttgctttcaggatttggcgtaaatacttggtagttttgacatctctgcttaacactcaagagaggctccctaatgtgctcctgtcctccatgttctgcttggcttcgttagtgcattacatgaaatgatttgcaggggatggggccttttccagggaagtcacctaaagcttgcatgttttgaaaatttgaataaggctgtttgctgacaggaggaggaagtagtggagatcatttcatctcagtcacgtctgtttctcacttcccttaggaattgtgttgatgtttaacttttatgggatgacaaattgaaatcgctcattttgaggttgctttatttttctagaattgttataagaagctaaaatagtaaacttaaaatcacaaacatgacattgctgatagtggctgagaaattcagatgagaagacaaattggttatgaattttgaaatatctattatatgtaaaatgtggatatgttcacaaccttgagctattttaacacagtttaaatatagtgagggaaaactcctaagttttactgccctgtcctctgcaaattatgtaataccagcattcttaggcgataaagagagcagcacctctagtacctttaggcagattactttttcaagtttggggaacttcaaaagaccataatcaaccaggagcttattataggaaaggctgaacagaagggctagtgtattgattacacttaacagatcatatttatccagactcagtatagcttaaaattttgtatttctttatctgagagaactgagttcccaggctaaatcacttacctcccaccccctctccaattttttttttaagagacaaggtcttgctatgttgcccaggctagagtgcagtggctattcacaggtgcagttatagcacactacagcctccaactcttgggttcaagcaaccctgcctcagctaaccaagtagctgggactacaggtgcatgctaccatgcccagtccattttttaatcttgaaatttcttcatttttctttcttcggtttcttaaaatctttgcctgaatcagaacgctggcttttatttatttttttatttttaatattaaatgtgcagatatgcttcgagcacttttctaactaatgagctctgtggtaagaaaaaatgaactctttcaattgagattaagtccatatttttcaaacatcacgttctctattggctttttggtttagtgtttctaaattttctccttctgattttgcctgtcttatataatgagcataggaaaattttggaatgaggcagaaaagtatatcaagacatacttcctggttttggatgtaagttttaaagaatggtatttttaatatttgtacacattctttgagcacccaggtacccaagccaataaggaaagttaattccttgcatatgactgttatatctttagtggttgtctccctctccctccacagtctccttggcattccatgacaagtttgtcaacctacacttttatatagacatgtcattatttcatggtcaagcctgtagtattaaaatgatttttttaaaagatgtaaactgtgcttagttaattggttatattttgttctgtttttttttttttttttttttttttttgaggcagagtcttgttctgttgcctgggctggagtgcagtggcgtgatcttggctcactgcaacccccgccccccgggttcaagtgattctcctgcctcagcctcccgagtagctggaattacaggcatgcgccagcacgcccggctaagttttgtatttttggcagagatggggtttcaccatattggccaggctggtctcaaactcctgaccttgtgatccgcccacctcagcctccgaaagtgctgggattacaggcgtgagccaccacgtccaactgccttattttgttctgaataaatttacagtattgggcagcaattctggattctagacttgagaccacagaatcaaccatttcatgaggttgtactgtaattatacactggaatattcaggtagtcatctttgatttttcattcaagtaaatatagccataagaaaatatctgctatacaggaaaaccagtattaagcaaataccaccatccttaacagaaacaaaaatatatatatatattatttttaaaaattagcattgtcatacagtacaattcttagtgaagtgtattgtggaacaatttagaaacttcctttttttcccctagattaaggatactttccttgacttgagacttgtggtcttcaggaaaactactcagaatataatgactcctcatcagtatcatattgtatataaataatgaaatgcattaagaatattcacaacattgaacccaggaggcggagcttgcagtgagccgagattgcgccactgcgctccagcctgggcaacagagcgagactccatctc

SEQ ID NO: 891 - DNA, 1736 bp, Homo sapiens
cggcggcggcggcggcggtggtggctcgcgcagcttgttggctcgctatataaaggagagaagcgggcggaccggacggctggagctgcagccggtggcggcagcggcggcgcagggagcggtgaccggtggtggtttccctccttggcgcggggtggggagcgggcaacgccccccggacccctgaagggtcgtggctttttttttttttttaaggcgattctcgaggttttcagctgcgggaggagtgcccccctcctcctcctctctccgctctcccctactccttcaggattgattttgtttaaaattttttccccaatcttgcggtgatttgggtcaccctccgggtgttatagtttttttttttttggttttgtttttatcttgttttcttggggttgccccctcttgtttgtgttgtgtgtggaaatggcgaactcggcaaatacaaacaccgtgcctaaattatacagatctgtgattgaagatgtcattaatgatgtgagagacatctttctggatgatggagtggatgaacaagtactgatggaactaaaaactttatgggaaaacaaactaatgcagtccagggcagtagatggatttcattcagaagagcagcagcttctactgcaagttcaacagcagcatcaaccccagcagcagcagcatcaccaccatcaccatcatcagcaagctcagcctcagcagacagtacctcagcaagcgcagacccagcaggttcttattcctgcatcacagcaagccacagcaccacaagttattgttccagattctaagttgatacagcatatgaatgcatcaaacatgagtgctgctgctacagctgctaccttagcactccctgcaggtgtgactcctgttcagcagatattaacaaattcaggccagcttcttcaggtggtcagagcagccaatggtgcccaatatatctttcagcctcagcagtcagtggttctacaacaacaggttataccacaaatgcagcctggtggagtacaagctcctgttatacagcaggtgctggctcctcttcctggagggatttcaccacagacaggtgtcatcatccagcctcagcaaatcttatttacaggaaataagactcaagttatacctacgacagtggcagcacctacaccagcccaagcacagataactgcaactggccagcagcaaccgcaggcccagcctgctcaaacacaagctccattggtcttacaagttgatggaactggggatacatcatctgaagaagatgaagatgaagaagaagactatgatgatgatgaggaggaagacaaagagaaagatggagctgaagatgggcaggtggaagaagagcccctcaatagtgaagatgatgtgagtgatgaggaaggacaggaactctttgacacagaaaatgttgttgtatgccaatatgataagatacacagaagtaaaaacaaatggaaatttcatctcaaggatggcattatgaatcttaatggaagagattatatattttccaaagccattggagatgcagaatggtgaagagttgctttttttcttttataaataaaagaaacttaaaaaaaatgtaaagcggacagtttgaaacttggggcatatgccaaccaaaacttcgtttctgcatgtcagaaaagtgcagtagaagcaaagctactggaacaaagatagaccttgacaacatagacactacttac

SEQ ID NO: 892 - DNA, 6817 bp, Homo sapiens
gcgcggcgaagctgcggccgcgacttggcgaggtggtccctaacgttgccgctcggcatccttagaaccggccgcccctgacgccgcgcggggaccccagtcgcccgcgcgccccatgcgctcactcttcggtgcccggccgggccggcgcctcgcagacgcggagccgcgcgggtgacggcacaggcggctgcgcgcccagcccagcccagcccagcccgaggagagggcgcgccgcgcccccgccccccgcccgctctcccgaggccgtgggtgcggatgcgcggctgacgactcgcagcaagagcaccgccgccggccccagcccgcagcatggcagccgccgcctatgtggaccacttcgccgccgagtgcctcgtgtccatgtcgagccgcgcggtcgtgcacgggccgcgggaggggccggagtcccggcccgagggcgcggccgtggccgccacccccacgctgccccgcgtcgaggagcgccgcgacggtaaggacagcgcctcgctcttcgtggtggcgcggatcctagcggacctcaaccagcaagcgccggcgcccgccccggcggagcgcagggagggcgccgcggcccggaaggcgaggaccccctgccgcctgccgccgcccgcccccgagcccacctcccccggcgccgaaggcgcggcggccgcgccccccagcccggcgtggagcgagccggagcccgaggcggggctggagcccgagcgggagccggggcccgcggggagcggcgagcccggcctcagacaaagggtccggcggggccgaagtcgcgccgacctcgagtccccgcagaggaagcacaagtgccactacgcgggctgcgagaaagtttacgggaaatcttcgcacctcaaggcgcacctgagaactcacacaggtgagaggcccttcgcctgcagctggcaggactgcaacaagaagttcgcgcgctccgacgagctggcgcggcactaccgcacacacacgggcgagaagaagttcagctgccccatctgcgagaagcgcttcatgcgcagcgaccacctgaccaagcacgcgcgccgccacgccaacttccacccgggaatgctgcagcggcgcggcgggggctcgcggaccggctccctcagcgactacagccgctccgacgccagcagccccaccatcagcccggccagctcgccctgagcccgccacagccatgagcagccgctcccaccccctcgtgagtccctggcctttccttttgtaataagaaagaagagagagaacttgatgcaaagtccacgaaaaaacaatttttttcacctcaggtgtcaaagtaaatttgttaaaaaaacaaaaaaaacacaaaaatttcaaaaaacaccacccaccaaattgcacaatagatacacccacaaagttgagattcagcgttgttgaaccccctttctcagggatggacacgtttcacgaggtcagtgaggacaccccttcctgccgccttactctgtacatagatttgcactctggagttttctgttaggttcgggaacacgctggggacagagcaggccagccagtctggtggagctcagcgtctggctggctggccagcctgtgggtctgttgggagcagatgtgctcactgacgtttgtgcctccagggcagattcctaagcagctggcctgacctcttcctgcccagcccccaacccagtctctggcctctgcccaacgagcctggctgggcttgcaacgcagctgattctgagacaggcccctgcagagggatgccttaaagctgtccctggctggaggagcactccaccttggggatagtggagggggccttcagccctctgcaccctgcctgcctcacaccccgccttcaggagccctctcctacggcgctagggagcactggaagcagagatgccagccctggctgagcgtagcactgcaccgtccgacctccgaggcaggggccggggtcacacctgccaggactccgcttctccgtgtcccagcagaaggcatgcaggaccctgtcactactatacctgggcctctgatggggaattctggtcttctaaaaagatgttagaaattcctggtggcacatccagttccgagtttgcccgcatgggcacttttgttggaaacagtgggcaggtcatggggcctcctcatcagagggtctgtgtgagcggctgtgcatgtggcagcgcaccatgcttcacagagaccattctgtagcaagagaccggaacattgtgacttggaccttttcaggagtggcgcggatgttacaggaaatgctgtcggagagcgcgcattctatttcctccgcagggaatgccagatagaaagttgcgggcaacacttttctcagacccaccatgtccccaactcagacttagcaaacctccagcctctccgtttcccctggactcctcctcccttttcctcctgcttctccttgtcctgcctggaggctccaggccacacccagctggtggggctgctccagtgccccatcaccggccttctcctggcaggagaggaggagcagagagctgggtcctgggctgggattcgagccctgggcgggggtcagtcaagccgtggtccagcaaactcctctgcagatggctggagtgttgacccaggcttgtggcccaggtatcaccttcccttcctcctgagagttgaggcctgtaaatacaagggcccaggacagagtgtgtgcgtgcgtgtgggtgtgtgcgcgcgtgagcacacacgcgtgtgttggggggggtggggggattggggtggactcagggtatcttgccagagatacctgttttgatgagtacctattttgatgcaaaggaacggccctgggacctcagagggccacagatgggcttcctgggcctagcgtgccttggttgtggccatcctgcttctactcagccctgccatgctatggggtgcagcacaaacccaggacccaggcctagccactgcccacagctgatggtcactgttttggctggctccagagtggacaggtacgctctgtccacagcagctgctcaggcacagtatgccgtcaggtgcccgcttcttaccactgtgtgtcagctgggattggccgacagcgtggtggtgacttctaggtagaccgatggaccctaaattgggcagtggcattgtttctgctgtggtgggaactggcagggagagggtcacctccactctggttggatgcggagctggtccctctggctgccatgctgtgttggggctctctgacctccctgcttgcattgggtctgggagagagagtggaatatttggtagggaccttgacagaagagagccctgggtgcttgtggtgcaaagatcttcatgcccagttccaaagtgaggtccctcccaaagttgttttcgtgtgaggcagagaaagccacactctgaatacattttatgtctcaggaattcacattccaggttcaggaattttattccaaagtcctttggtgcactcaccgtccaccgttccccaaggcagggagagggagtggcccgtccctgggaggctggcaaagtgctctccagggaggggtcagacgtccttgtgatctgcccagggtgtcacggaaggagattttctagctccacatctgtctgcacataggaaggaaaagataggactctaaacctagtcatcttggaataaaaagaagagctggtttgttttagagcagggcggggggtgggggagggaagcgggtgttggctgtttccaaagagagcacttaatttaatttttcctttaaatgacccagggctgttccgtctgatagatggaagggtaacattgccttaaaacagaaatatgcaggcgttggctatttttggcataagagcgtgtcttcattcccaaagtggttctcgtttaatggcagggtgcggtccttaggccccggcctggactgggaaatgggggtagggcaccaggagagaaatcctcctgggtactcctggccagaccctcctgaatcatctgcggcttaaactcatctcgcttgaagggcagggagaaacccatgaatctcaggcacggttcacaggggtcctcaagggcaggtttccatttcatcatgaagtgagggactcctgtggaagagggtggtgggccttggaacgctgcctccactgaggcgggcacacaaggcggaccctcctgaaacagcctccattttcttcaaacatgcagaatgttttcccagactgcgtctatttcagggtcttccatttttgtggtttatggccatgcttgccagttttggtggggttgaggaacccataggactcatagaaataatagtgaaaactcaaacccttattttgggacttcagttctcgtggtccataggggcagagatgtcaaagtgaaggttgcctgagtgaagggagagttcccctataaaaggcctaaaattgatctggggctcagccatcaaggggctggtgttgctcctgtcccagacaaggaagcccctctttacatcagccatattaggggaacggttgtcagctccccaaatgcctactggatcctacagccatacaggaaaacagacggacacagccctttccttaaagagccctggggtcctgtcctgcaggatgctgcataggaatgggcagagatgtcctggatgggaacatggtcctggaggtgccctacctgcatcctgctgcacccccacccacgacactcgagtgcaagatcgcctcactcctaaccctgactttattcccaggccccacaccgaggcaggtgcaggattcgccatggtgcagcctccgggtacaaacatctgaggcactggcgatcccagtccttgcagcaccctgaacacagctcagaccagtgaggggtgattcagaggtggggatgggcagagagggctggccactctgcctcaggacttgacctcaagtgttctgtctccccacccggtgtgtccagaagaccagcctctttcttgccagaagcaggtgctaagatggactgcacagggtcccggcactccctcgggacccattcaggatctcagctgggcaggggtgccacccaacaggaagatgtgatctgagcaatagtgtggccttgtttctccgcttctggttgtggctgtgtgtacagggctacctattttgacttctgacaggtgtcactgattttctttcccccatttaaaaaaggtcatttagtcaaagacacagtgctagaggtttaaagggtgtaatgtgttggtcacatcacaaccagtaagaaacgcttggtaggttatccacatcttttgctgactgtttccatatacaattctggtcaccatattttccaaagctaaaatctgaggcgtgggctgatggtttttgaaatcaggattaccccaggaagaaccaggtcctattactaattttcctgattctgaggctctgaaggcttgtctgagacacattccggagacctttgtaccagaacttggatgcatagtccaccttactactgatacacgcctgagcaccctttagggcgaggcgccgcctcctgcctgctgtcctgtccctcagcatcagaagagttgaattcagcaggagacgggagcccggtgtccatgagggaagaggggtcgcgcttggtttctactgacccccatgaagatttcagacttgcagtgcggccacctggccctgccctgcctctctctttctcatacagctttaaaactttactacttttatttaaaaatgaactggatgggagagaagtagcgtcccctaccctacaagtcacacattccggggaggggggtggggggtggaggcaggaagtcatgggggtgggggtgggagcacgggaacagctttcttaaggcctcagggtcctgttttccctggcctcttctagagggcccgtggacaggtcgcagtgcgtgcttatttggaaaccaggtgtgtgagccgaatgcctgccaggccatgcactcagcagaggagcccttgtacctggctgccctgagaggagcaagaggccacctcccatgtggctctagacaccacgtgggctcattagccccagcgtctgtgccggctccaggtgcctgcctctgggtgtgtgagtgggagactttgctccctggcctcatcctagagaggcccctggtgcctagtgctgaggcctctggggctggaaagcctcagcagaaaggaggcactactgagcaactatgcattgtcattgtcgggtttggggctttcggtggttccttggtgactgggaattgcttgtgtgcatgtgttgggtgcatgcttccgggtctcagctgccccaggcccgcacaggcaaccccttcccatccaaagccattggtggagcttctctggaatcatttgccaaaagcccaaggcagaatccaagggtccaagaccatttccatggagctcatgtttttcttttctgtaggaacttttttttaaccagcacccaccataattccgaaggccacgtttcatctttcctggatcactacagtgaagtattacagttgtacagttcccagtctggccttggcttgctcggataaaactttgtatgtattttgtatggcatagattctatattgtaatgatgtcctatgcaaaaagaaaaattaacgaaattgtaaattttattgttttaacgtgtatgcatgtttagtgacgtttacattttgaaataaaatttatgattcattattttaaaaaaaaaaaaaaaaaa

SEQ ID NO: 893 - DNA, 2725 bp, Homo sapiens
gtgcgcgctcccgtcgtggcgacggtggcggcgagcggcgtcagagcttgagggggggttgacggcttctggcgggtggcggtgttgaaggcgagagcttgcttggcccgtgtcgcttctgtcccaagaaccggacggagagtgagggcacgagggtcgctgtcgggggctgtcgtcttccacgtacacgtcgtcgtgaggagcgcagtccggactcttcccgcaacccctccggctccctttccgcacgcctcgaggcggcggcggccaccgagacagcagcgcaccttcccccatcccttccccttatcccccagcccaaaagggcccggtctgcgccccacccccgcccgtccgcccgctacgccgccgccatgtcggcgcaggcccagatgcgcgcgatgctggaccagttgatgggcacctcccgggacggagatacaactcgtcaacgaatcaaattcagtgatgacagagtatgcaagagtcaccttctcaactgttgtcctcatgatgtcctttctggaactagaatggatcttggagaatgtctgaaagtccatgacctggctttaagagcggattatgaaattgcatccaaagaacaagattttttctttgaacttgatgccatggatcatctgcagtcattcattgcagattgtgatcgtagaacagaagtggccaagaaaagattagcagaaactcaagaagagattagtgctgaagtagcagcaaaggcagaacgtgttcatgagttaaatgaagaaattggtaaattgttagccaaggtggaacaactaggagctgaagggaatgtggaggaatcccagaaagtaatggatgaagtagagaaagcacgggcaaagaaaagagaagcagaggaagtttatcggaattctatgccagcttccagttttcagcagcagaaacttcgagtctgtgaagtctgctctgcctatttaggacttcatgataatgacagacgactggctgatcattttgggggtaaactgcacctgggatttattgaaataagagagaagcttgaagaattaaagagagtcgtagctgagaagcaggagaaaagaaaccaggaacggctgaaacgaagagaagagagagagagagaagaaagggagaagctgaggaggtcccgatcacacagcaagaatccaaaaagatccaggtccagagagcatcgcagacatcgatctcgctccatgtcacgtgaacgcaagaggagaactcgatccaaatctcgggagaaacgccatcgccacaggtcccgctccagcagccgtagccgcagccgtagccaccagagaagtcggcacagttctagagataggagcagagaacgatccaagaggagatcctcaaaagaaagattcagagaccaagacttagcatcatgtgacagagacaggagttcaagagacagatcacctcgtgacagagatcggaaagataagaagcggtcctatgagagtgctaatggcagatcagaagacaggaggagctctgaagagcgcgaagcaggggagatctaactagctgtgtacatttcttcagtccttaagcttcctacggagttacgtactattgtttagttcacagctgttcagggtgacagtgagcagatccagacaccagatccagctaggctagatgtacagtatctaacttgatctgaactgaacctgttttccttgatgatgcctaaaactacatccatagtttctggtgaacctgtaatacagttctgaaagtacagttttatataataagatgctgatctctttattctttcaagtaagagtgctagtgaacaaattgtgttacttgccttgggattttttgaacgtttgtaaaatgctgtcttcctagtccaaacagctgcagctttgggcatttttctttttaattattcttcctctgactttgtatcccttaatacctacactctccaattgtaagagaaagggggcagggaagcaatatagcttccattctaaggctgtattcccgttatgaattactagctgattacagttcagagcattgatcctggaatgtgtgctggagaaatttaaaatactggggttttttgtttaatggtgcctatttagagttggaagttgaacagctgttgcattacatacttttgcttttttattgaaattttgaaatcaaacgtcttgatttttctgttctgttgaattgctatgttcaggatgttctagggggtgggggcagggactcttttcgtaataagcacttgttttattttgtgtgtgtggagtataaaggctacacccttattgtaaaaaaataataataataaaatgaaagaaacaatcaccaccaccattattaaactgtaacttgtctagtaaattgtcactagaactatttgctgtgggcatttcctctattctgttacgtcattaacagtgccttactgtgcaaggcaccaaaggacataaatacgtacttgcaaagattccagatgagctgttcatgtgggccccttgctgactatattccagccacttcagggttgtttgtaatgaccgttatagagaagggctcgacctgcagaagaaactggggtgtttttattctcattcaacaaacccaaataaaaacagtatatgtaaccaaaaaaaaaaaaaaaaaaaaaaaaaaaaaaaaaaaaaaaaaaaaaaaaaaaaaaaaaaaa

SEQ ID NO: 894 - DNA, 2213 bp, Homo sapiens
ggcgactacaactcccagcaggtcgagcagctccgcccgcgctgattctccattggccttccgggggtggggattagatgggaggtggccgtggggctgcggccgggatttgtcccctcttcggcttccgtagaggaagtggcgcggaccttcatttggggtttcggttcccccccttccccttccccggggtctgggggtgacattgcaccgcgcccctcgtggggtcgcgttgccaccccacgcggactccccagctggcgcgcccctcccatttgcctgtcctggtcaggcccccaccccccttcccacctgaccagccatgggggctgcggtgtttttcggctgcactttcgtcgcgttcggcccggccttcgcgcttttcttgatcactgtggctggggacccgcttcgcgttatcatcctggtcgcaggggcatttttctggctggtctccctgctcctggcctctgtggtctggttcatcttggtccatgtgaccgaccggtcagatgcccggctccagtacggcctcctgatttttggtgctgctgtctctgtccttctacaggaggtgttccgctttgcctactacaagctgcttaagaaggcagatgaggggttagcatcgctgagtgaggacggaagatcacccatctccatccgccagatggcctatgtttctggtctctccttcggtatcatcagtggtgtcttctctgttatcaatattttggctgatgcacttgggccaggtgtggttgggatccatggagactcaccctattacttcctgacttcagcctttctgacagcagccattatcctgctccataccttttggggagttgtgttctttgatgcctgtgagaggagacggtactgggctttgggcctggtggttgggagtcacctactgacatcgggactgacattcctgaacccctggtatgaggccagcctgctgcccatctatgcagtcactgtttccatggggctctgggccttcatcacagctggagggtccctccgaagtattcagcgcagcctcttgtgtaaggactgactacctggactgatcgcctgacagatcccacctgcctgtccactgcccatgactgagcccagccccagcccgggtccattgcccacattctctgtctccttctcgtcggtctaccccactacctccagggttttgctttgtccttttgtgaccgttagtctctaagctttaccaggagcagcctgggttcagccagtcagtgactggtgggtttgaatctgcacttatccccaccacctggggacccccttgttgtgtccaggactccccctgtgtcagtgctctgctctcaccctgcccaagactcacctcccttcccctctgcaggccgacggcaggaggacagtcgggtgatggtgtattctgccctgcgcatcccacccgaggactgagggaacctaggggggacccctgggcctggggtgccctcctgatgtcctcgccctgtatttctccatctccagttctggacagtgcaggttgccaagaaaagggacctagtttagccattgccctggagatgaaattaatggaggctcaaggatagatgagctctgagtttctcagtactccctcaagactggacatcttggtctttttctcaggcctgagggggaaccatttttggtgtgataaataccctaaactgcctttttttcttttttgaggtggggggagggaggaggtatattggaactcttctaacctccttgggctatattttctctcctcgagttgctcctcatggctgggctcatttcggtccctttctccttggtcccagaccttgggggaaaggaaggaagtgcatgtttgggaactggcattactggaactaatggttttaacctccttaaccaccagcatccctcctctccccaaggtgaagtggagggtgctgtggtgagctggccactccagagctgcagtgccactggaggagtcagactaccatgacatcgtagggaaggaggggagatttttttgtagtttttaattggggtgtgggaggggcggggaggttttctataaactgtatcattttctgctgagggtggagtgtcccatccttttaatcaaggtgattgtgattttgactaataaaaaagaatttgtaattgtgaaaaaaaaaaaaaaaaaaaaaaaa

SEQ ID NO: 895 - DNA, 1977 bp, Homo sapiens
acgggccgcagcggcagtgacgtagggttggcgcacggatccgttgcggctgcagctctgcagtcgggccgttccttcgccgccgccaggggtagcggtgtagctgcgcagcgtcgcgcgcgctaccgcacccaggttcggcccgtaggcgtctggcagcccggcgccatcttcatcgagcgccatggccgcagcctgcgggccgggagcggccgggtactgcttgctcctcggcttgcatttgtttctgctgaccgcgggccctgccctgggctggaacgaccctgacagaatgttgctgcgggatgtaaaagctcttaccctccactatgaccgctataccacctcccgcaggctggatcccatcccacagttgaaatgtgttggaggcacagctggttgtgattcttataccccaaaagtcatacagtgtcagaacaaaggctgggatgggtatgatgtacagtgggaatgtaagacggacttagatattgcatacaaatttggaaaaactgtggtgagctgtgaaggctatgagtcctctgaagaccagtatgtactaagaggttcttgtggcttggagtataatttagattatacagaacttggcctgcagaaactgaaggagtctggaaagcagcacggctttgcctctttctctgattattattataagtggtcctcggcggattcctgtaacatgagtggattgattaccatcgtggtactccttgggatcgcctttgtagtctataagctgttcctgagtgacgggcagtattctcctccaccgtactctgagtatcctccattttcccaccgttaccagagattcaccaactcagcaggacctcctcccccaggctttaagtctgagttcacaggaccacagaatactggccatggtgcaacttctggttttggcagtgcttttacaggacaacaaggatatgaaaattcaggaccagggttctggacaggcttgggaactggtggaatactaggatatttgtttggcagcaatagagcggcaacacccttctcagactcgtggtactacccgtcctatcctccctcctaccctggcacgtggaatagggcttactcaccccttcatggaggctcgggcagctattcggtatgttcaaactcagacacgaaaaccagaactgcatcaggatatggtggtaccaggagacgataaagtagaaagttggagtcaaacactggatgcagaaattttggatttttcatcactttctctttagaaaaaaagtactacctgttaacaattgggaaaaggggatattcaaaagttctgtggtgttatgtccagtgtagctttttgtattctattatttgaggctaaaagttgatgtgtgacaaaatacttatgtgttgtatgtcagtgtaacatgcagatgtatattgcagtttttgaaagtgatcattactgtggaatgctaaaaatacattaatttctaaaacctgtgatgccctaagaagcattaagaatgaaggtgttgtactaatagaaactaagtacagaaaatttcagttttaggtggttgtagctgatgagttattacctcatagagactataatattctatttggtattatattatttgatgtttgctgttcttcaaacatttaaatcaagctttggactaattatgctaatttgtgagttctgatcacttttgagctctgaagctttgaatcattcagtggtggagatggccttctggtaactgaatattaccttctgtaggaaaaggtggaaaataagcatctagaaggttgttgtgaatgactctgtgctggcaaaaatgcttgaaacctctatatttctttcgttcataagaggtaaaggtcaaatttttcaacaaaagtcttttaataacaaaagcatgcagttctctgtgaaatctcaaatattgttgtaatagtctgtttcaatcttaaaaagaatca

SEQ ID NO: 896 - DNA, 3114 bp, Homo sapiens
ggggcccggaagtggtccctgtagaaccactgtggcaccgctactccgtgccgcgcccgtcgagcattgcgttgctgcattgcgccccaccgactccactatgttgaagaaattcgacaagaaggatgaggagtcaggtggaggctccaacccattccagcaccttgagaagagtgcggtactccaggaggcccgtgtatttaatgaaactcccatcaaccctcggaaatgtgcccacatcctcaccaagattctttatctcataaaccagggggagcacctggggaccacggaagcgaccgaggccttctttgccatgaccaagctctttcagtccaatgatcccacactccgtcggatgtgctacttgaccatcaaggagatgtcttgcattgcagaggatgtcatcattgtcaccagcagcctaacaaaagacatgactgggaaagaagacaactaccggggcccggccgtgcgagccctctgccagatcactgatagcaccatgctgcaggctattgagcgctacatgaaacaagccattgtggacaaggtgcccagtgtctccagctctgccctcgtgtcttccttgcacctgctgaagtgcagctttgacgtggtcaagcgctgggtgaatgaggctcaggaggcagcatccagtgataacatcatggtccagtaccacgcactagggctcctgtaccatgtgcgtaagaatgaccgcctagccgtcaataagatgatcagcaaggtcacacggcatggccttaagtctccctttgcctactgcatgatgatccgggtggccagcaagcagctggaagaggaggatggcagccgtgacagcccactgtttgacttcatcgagagctgcttgcgcaacaagcacgagatggtggtgtatgaagccgcctcggccatcgtcaatctgccaggctgcagtgccaaagagctggccccggctgtgtcagtgctccagcttttctgcagctcacccaaggctgctctccgctatgctgctgttcgtaccctcaataaggttgccatgaagcatccgtcagctgtgacagcttgtaatctggatctggagaacctggtcacagattcaaaccgcagcattgccacgctggccatcaccaccctccttaagacgggcagcgagagcagcatcgaccgcctcatgaagcagatctcctccttcatgtcagaaatctcggatgaattcaaggtggtggttgtccaggccatcagtgccctgtgtcagaaatatcctcgcaaacacgccgtccttatgaacttcctgttcaccatgctgcgggaagagggtggctttgagtataagcgcgctatcgtggactgcatcatcagcatcattgaagagaactcagagagcaaggagacagggctgtcacatctgtgcgagttcatcgaggactgcgagttcacagtgctggccacccgtattctacatctcctgggccaggaggggcccaagaccaccaatccctcaaagtacatccgcttcatctataaccgagtggtcttggagcatgaggaggtccgggcaggtgctgtgagtgctctggcgaagtttggagcccagaatgaagagatgttacccagtatcttggtgttgctgaagaggtgtgtgatggatgatgacaatgaagtaagggaccgagccaccttctacctaaatgtcctggagcagaagcagaaggcccttaatgcaggctatatcctaaatggtctgactgtgtccatccctggtctggagagggctctgcagcagtacactctagaaccatcagaaaaaccttttgacctcaagtctgtgcccctggccacggcgcccatggcagagcagagaacagaaagtacccccatcacagcagtcaaacagcctgagaaagtggcagctaccaggcaggagatcttccaggagcagttggcagcagtgccagagttccgcggtcttgggcccctcttcaagtcctcgcctgagcccgtggccctcaccgagtcagagacggagtatgtcatccgctgcaccaaacacaccttcaccaaccacatggtttttcagtttgactgcacaaacacactcaatgaccagaccttggagaatgtcacagtgcagatggagcccactgaggcctatgaggtgctctgttacgtgcctgcccggagcctgccctacaaccagcccgggacctgctacacactggtggcactgcccaaagaagaccccacagctgtggcctgcacattcagctgcatgatgaagttcactgtcaaggactgtgatcccaccactggggagactgatgacgaaggctatgaggatgagtatgtgctggaagatctggaagttactgtagctgatcacattcaaaaggtcatgaaactgaacttcgaagcagcctgggatgaggtaggggatgaatttgagaaggaggaaacgttcaccttgtctaccatcaagacacttgaagaggctgtgggtaatattgtgaagttcttgggaatgcacccttgtgagaggtcagacaaagtgccggataacaagaacacccacacgttgctcctggctggtgtgttccggggtggtcatgacatcctggtgcgctcccggctgctgcttttggacacagtgacaatgcaggtgacagccagaagtttggaggagctgccagtagacatcatcttggcatctgtgggataagaggccagcctgcataggacctcatacccttccccaacactacctggaagttgtgccttcctcatgaaactggcagaaaccccttcccaagcttctgtattgaaaaacaattaggaatcattgcagatttttttttattctgctcccacctcccacccgggactacttgctggtgactttttttttttttttttttaaataggggatgattttagcttgtcctaaatcttgctgtccacccttccaggaaagggacattgtaaatgaataaaacattctcaactcctcttgaatctatcccccaagaaaccatcttatccctgtaataaatcagcatgtatttattgaaaaaaaaaaaaaaaaaaaaaaaaaaaaaaaaaaaaaaaaaa

SEQ ID NO: 897 - DNA, 3555 bp, Homo sapiens
tttcccttttttttccttttggcaacccacacccttccacacacgctcaccccaaaattaaacaccaagatcctctaacttgtttggattgactgatgaagacataaagctctatgttttttgaggtggagtgagtggtttttcttcatttttaaatggccaaatgacagcttgacccagtttgctttccaatcaaagggcatttattttgaatgtctctttgtggcgcaagagccaacgcaaaaatgatggcggcttacaatggcggtacatctgcagcagcagcaggtcaccaccaccaccatcaccaccaccttccacacctccctcctcctcacctgcaccaccaccaccaccctcaacaccatcttcatccggggtcggctgccgctgtacaccctgtacagcagcacacctcttcggcagctgcggcagccgcagcagcggctgcagctgcagccatgttaaaccctgggcaacaacagccatatttcccatcaccggcaccggggcaggctcctggaccagctgcagcagccccagctcaggtacaggctgccgcagctgctacagttaaggcgcaccatcatcagcactcgcatcatccacagcagcagctggatattgagccggatagacctattggatatggagcctttggtgttgtctggtcagtaacagatccaagagatggaaagagagtagcgctcaaaaagatgcccaacgtcttccagaatctggtctcttgcaaaagggtcttccgggaattgaagatgttgtgtttttttaagcatgataatgtactctctgcccttgacatactccaacctccacacattgactattttgaagaaatatatgttgtcacagaattgatgcagagtgacctacataaaattatcgtctctcctcaaccactcagctcagatcatgtcaaagtttttctttatcagattttgcgaggtttgaaatatctccattcagctggcattttacatcgagacattaagccagggaatctccttgtgaacagcaactgtgttctaaagatttgtgattttggattggccagagtggaagaattagatgaatcccgtcatatgactcaggaagttgttactcagtattatcgggctccagaaatcctgatgggcagccgtcattacagcaatgctattgacatctggtctgtgggatgtatctttgcagaactactaggacgaagaatattgtttcaggcacagagtcccattcagcagttggatttgatcacggatctgttgggcacaccatcactggaagcaatgaggacagcttgtgaaggcgctaaggcacatatactcaggggtcctcataaacagccatctcttcctgtactctataccctgtctagccaggctacacatgaagctgttcatctcctttgcaggatgttggtctttgatccatccaaaagaatatccgctaaggatgccttagcccacccctacctagatgaagggcgactacgatatcacacatgtatgtgtaaatgttgcttttccacctccactggaagagtttataccagtgactttgagcctgtcaccaatcccaaatttgatgacactttcgagaagaacctcagttctgtccgacaggttaaagaaattattcatcagttcattttggaacagcagaaaggaaacagagtgcctctctgcatcaaccctcagtctgctgcttttaagagctttattagttccactgttgctcagccatctgagatgcccccatctcctctggtgtgggagtgatggtggaagataatgtactactgaagatgtaatgtagctttccactggagtctgggatttgcaattctggaggttaatcatgcttgtactgtaattttactaatgaagttttaaattaacaaccactacttgtatgatatgaataatatttagaaatgttactagacttttaatcttgtaaagtggttgtgcttttagaagaaaaatattttacccagagttgcacatgttttatgaatttagtgcagctgttatggctcacctcagaacaaaagagaattgaaccaaatttgggagtttggggttttatgttttgtttttcttttctaaaatgaagtgagattgttcacacacacacacacacacacacacacacacaaacacaaaggacagtcatacattttgatatttgagccattcctaaagatttggggttttctaaaactaaagaatctaggaaccttgcctgcgaccaatcatggagccacgtgagctgatcgtggctgcacctggggggagggtagggaggaggggcatgccacctaatgatcaagccctataattagcttctcattagagccgtgatggtgatgtgtgctgtctaaaatccaatgttgtgggtagagagaatgagtttgtgactaggagagactaaacttttgttttccttacccagtataaatatatatatatatatttaatctatttttattagaagtttttctgctctttcttacataaaagaaccccaagcatgcatctttcatgtgtgtaaataattcatttctgggctaatttcaaaagaatcccaatattgctgtatagaaagagaactagcttgcacattttaggtctgtgaaattttgtgagacttttcctgcactggacagtaaaaaaataataaaagacaaaaacaaatttaaaaaaaaatttaagccacaaaaaaaggcacatagggaattatgtcaaatgtgtttgtgtccttaggcaaagctgtgggagtcttgaaatgtcacagtagtaaataacttattactttttgacaagttctttttttctgttggaacactgaattcttctgtgcatatgtacatatgaatacaaatcgaaggcctctacctcctggagttatacaacttggcttgtttacctccacatgctgatgatgactattttttttttttgagttcagtgtggagacttgaaacttgaatgtcccttccaacttttatattaaaaataaaaagacaagaaaattgaagatcatttttcacctgtacaaggaatactaatggatcgtcttaaaattggtctaggaaaaaaccttggtgtgtgttatggacaattaactgttaaagttattgtaagttatctgtatttagcagagtattttcaacttgagtgatctgagctgaatttgaagactattaataagttatgtttggaagttttaacttcaatgaagtaattatttgctgtgaaagaaacaaacattgaattactaaacaaagatggtgcaatatctttgttttttttttatgaggctcctgagaatcaacccaactgaagcatttcaattcacttgaatgagaaacgtgtttagtatcaaaagagcccaagaagacactggtgtgaaaggtacaatctcagaggttggtcaattaccgtggcacactttctggtcactttgtacaatgtagatttgaagtacagtggtgaaaacattaaatgtgacatttgaaaaaaaaaaaaaaaaaaa

SEQ ID NO: 898 - DNA, 1597 bp, Homo sapiens
agccgctgagaggctctgcgtgtgcgtgtgcgcgggtgacgccgtgtgtgtgcgagtgtgtgtgtgtgtgtgcgcgcgcgcgtgtgagagagagaaagggagagagagagggggactctgtgtgagggaaagaaaacaatttctcctgctctgcagcttctgttcaggatcaatgtgactctaagaacaaatggatgaatgaatatccatatgaagagaaaaacaataaagaatatcaacacctttgagaacagaatgttaatgcttgatgggatgccggcagtcagagtcaaaacagagcttttggaatctgaacaagggtctccaaacgtccacaactatcccgatatggaagccgttcccctgttgctaaataatgtgaaaggggagcccccggaggactcgttatctgtagatcacttccaaacacaaactgagccagtggacttgtcaataaacaaagccaggacgtcccctactgccgtttcatcctccccagtttccatgacagcatctgcctcctcaccttcttcaacttcaacctcttcatcgtcttctagtcgtctagcctcatccccaactgttatcacatcagtatcttcagcgtcatcttcgtcaacagtattaactccagggccccttgtggcctctgcatctggtgttggaggccagcagtttttgcacattatccatcccgtaccgccttcaagtcccatgaatttacagtctaacaaactgagtcatgttcaccgcatccccgtggtggtacagtcggtgcctgttgtctacacagctgtaaggtcacctggaaatgtgaacaacactattgtcgtgccgcttttggaggatgggagaggccatggcaaagcacaaatggacccccgaggcctatctcccagacaaagtaaaagtgacagtgatgatgatgacctgccaaatgtgaccttagatagcgttaatgaaactggatctacggccctttccatagccagagcagtacaagagtaagtatcacattcacaggatgaattaagaattgccaaggtgttcaatggataatggaaactgcagcatctcctgtcccccagccatgtcattctagctgtgaactggcacgaatgtcagcagcttttcattcagctgaatgctctttgggagattagggcagagaatggagtgttttaatgagttggaaattcatgctttgatgagatataagacctatgtgcatcttttctaatacctcctgcacccttctcctgaactctgcaaaaaaaaaaaaattgttatttttgaatgtcactatttgattatcatcatcattattattacacaaagtcaagggaaatatggcaaagtattgttatcttgttttgataggaaattacagaatagctttttggaagatttaaatttggaaaataatatgttcatcctttgaaaagtagtactcatatgttatttttaaatgaatcttttctctgtccttttacctggaccgcagggttagatttcagccctcgtttattgaaaatagctgcttttctatcagtcaaccttgtacctagaattgaacctaaatgattgaaaaaaaaaa

SEQ ID NO: 899 - DNA, 3525 bp, Homo sapiens
tcagtagctgaggctgcggttccccgacgccacgcagctgcgcgcagctggttcccgctctgcagcgcaacgcctgaggcagtgggcgcgctcagtcccgggaccaggcgttctctcctctcgcctctgggcctgggaccccgcaaagcggcgatggagcggaggtcgcggaggaagtcgcggcgcaacgggcgctcgaccgcgggcaaggccgccgcgacccagcccgcgaagtctccgggcgcacagctctggctctttcccagcgccgcgggcctccaccgcgcgctgctccggagggtggaggtgacgcgccaactctgctgctcgccggggcgcctcgcggtcttggaacgcggcggggcgggcgtccaggttcaccagctgctcgccgggagcggcggcgcccggacgccgaaatgcattaaattaggaaaaaacatgaagatacattccgtggaccaaggagcagagcacatgctgattctctcatcagatggaaaaccatttgagtatgacaactatagcatgaaacatctaaggtttgaaagcattttacaagaaaaaaaaataattcagatcacatgtggagattaccattctcttgcactctcaaaaggtggtgagctttttgcctggggacagaacctgcatgggcagcttggagttggaaggaaatttccctcaaccaccacaccacagattgtggagcacctcgcaggagtacccttggctcagatttctgccggagaagcccacagcatggccttatccatgtctggcaacatttattcatggggaaaaaatgaatgtggacaactaggcctgggccacactgagagtaaagatgatccatcccttattgaaggactagacaatcagaaagttgaatttgtcgcttgtggtggctctcacagtgccctactcacacaggatgggctgctgtttactttcggtgctggaaaacatgggcaacttggtcataattcaacacagaatgagctaagaccctgtttggtggctgagcttgttgggtatagagtgactcagatagcatgtggaaggtggcacacacttgcctatgtttctgatttgggaaaggtcttttcctttggttctggaaaagatggacaactgggaaatggtggaacacgtgaccagctgatgccgcttccagtgaaagtatcatcaagtgaagaactcaaacttgaaagccatacctcagaaaaggagttaataatgattgctggagggaatcaaagcattttgctctggataaagaaagagaattcatatgttaatctgaagaggacaattcctactctgaatgaagggactgtaaagagatggattgctgatgtggagactaaacggtggcagagcacaaaaagggaaatccaagagatattttcatctcctgcttgtctaactggaagttttttaaggaaaagaagaactacagaaatgatgcctgtttatttggacttaaataaagcaagaaacatcttcaaggagttaacccaaaaggactggattactaacatgataaccacctgcctcaaagataatctgctcaaaagacttccatttcattctccaccccaagaagctttagaaattttcttccttctcccagaatgtcctatgatgcatatttccaacaactgggagagccttgtggttccatttgcaaaggttgtttgtaaaatgagtgaccagtcttcactggttctggaagagtattgggcaactctgcaagaatccactttcagcaaactggtccagatgtttaaaacagccgtcatatgccagttggattactgggatgaaagtgctgaggagaatggtaatgttcaagctctcctagaaatgttgaagaagctgcacagggtaaaccaggtgaaatgtcaactacctgaaagtattttccaagtagacgaactcttgcaccgtctcaatttttttgtagaagtatgcagaaggtacttgtggaaaatgactgtggacgcttcagaaaatgtacaatgctgcgtcatattcagtcactttccatttatctttaataatctgtcgaaaattaaactactacatacagacacacttttaaaaatagagagtaaaaaacataaagcttatcttaggtcggcagcaattgaggaagaaagagagtctgaattcgctttgaggcccacgtttgatctaacagtcagaaggaatcacttgattgaggatgttttgaatcagctaagtcaatttgagaatgaagacctgaggaaagagttatgggtttcatttagtggagaaattgggtatgacctcggaggagtcaagaaagagttcttctactgtctgtttgcagagatgatccagccggaatatgggatgttcatgtatcctgaaggggcttcctgcatgtggtttcctgtcaagcctaaatttgagaagaaaagatacttcttttttggggttctatgtggactttccctgttcaattgcaatgttgccaaccttcctttcccactggcactgtttaagaaacttttggaccaaatgccatcattggaagacttgaaagaactcagtcctgatttgggaaagaatttgcaaacacttctggatgatgaaggtgataactttgaggaagtattttacatccattttaatgtgcactgggacagaaacgacacaaacttaattcctaatggaagtagcataactgtcaaccagactaacaagagagactatgtttctaagtatatcaattacattttcaacgactctgtaaaggcggtttatgaagaatttcggagaggattttataaaatgtgcgacgaagacattatcaaattattccaccccgaagaactgaaggatgtgattgttggaaatacagattatgattggaaaacatttgaaaagaatgcacgttatgaaccaggatataacagttcacatcccaccatagtgatgttttggaaggctttccacaaattgactctggaagaaaagaaaaaattccttgtatttcttacaggaactgacagactacaaatgaaagatttaaataatatgaaaataacattttgctgtcctgaaagttggaatgaaagagaccctataagagcactgacatgtttcagtgtcctcttcctccctaaatattctacaatggaaacagttgaagaagcgcttcaagaagccatcaacaacaacagaggatttggctgaccagcttgcttgtccaacagccttattttgttgttgttatcgttgttgttgttgttgttgttgttgtttctctactttgttttgttttaggcttttagcagcctgaagccatggtttttcatttctgtctctagtgataagcaggaaagagggatgaagaagagggtttactggccggttagaacccgtgactgtattctctcccttggatacccctatgcctacatcatattccttacctcttttgggaaatatttttcaaaaataaaataaccgaaaaattaaaaaaaaaaaaaa

SEQ ID NO: 900 - DNA, 6389 bp, Homo sapiens
cccgcgcagacttgtctccggccagtcgcgcgtgggtagaggccttaggcgggcgttgcgaagggttgtttgctagagttcggaccttgttacggcgcgaagttccctccttggggcgggggaaaggtaccgcacccgctacctagtgtgaatgaactgtggcgtgggctgctaagggcaggctgcggagtacccgggccgtggccatgaactcacccgtggaccctggcgctaggcaggcgttgaggaagaagccacccgagcggactcccgaggacttaaatactatttattcttatcttcatggaatggaaatattatcaaatctcagggaacatcagcttagattaatgtctgcaagagcacgctatgagagatacagtggcaatcaggttctcttttgttcagaaacgattgccagatgttggtatatcctactttctggatctgtgcttgtgaaaggctccatggtcttgcctccttgcagttttggtaagcagtttggaggaaaaagaggatgtgattgtcttgtattagagccttcagaaatgattgtggtagagaatgccaaagataatgaagatagtattctacaaagagaaattcctgccagacaatcccgaagaagatttcggaaaattaactataaaggagagcgccaaaccattactgatgatgtggaggttaacagctatctttctcttccagctgatcttaccaagatgcatctcacagaaaaccctcatccacaggtgactcatgtgtcttctagtcagtctggttgtagcattgccagtgactctggaagcagcagtttatctgatatctatcaggctacggagagtgaggtaggagatgtagatttgacacgtcttccagaaggacctgttgattctgaggatgacgaagaggaagatgaagagattgatcgaacagatccattgcaggggcgagatcttgttcgagaatgtcttgaaaaagaacctgcagacaaaactgatgatgacattgaacaattgctggagtttatgcaccagctccctgcatttgcaaacatgaccatgtctgtaaggagagaactctgctcagtgatgatttttgaagtggtagagcaggctggagctattattcttgaagatgggcaagagcttgactcatggtatgttattttaaacggcactgtggaaatcagtcatccagatggaaaagttgaaaatttgtttatgggaaatagttttggaattactcccactctggataagcagtacatgcatggaattgtcaggactaaagtagatgattgtcagtttgtctgcatagcccagcaagattattggagaattttaaaccatgtggaaaaaaatacccataaagttgaggaagagggagaaattgttatggtacatgagcatcgggaactagaccggagtggaaccaggaaaggacacattgtgatcaaggcaacacctgagcgtctcataatgcatttaatagaagaacattccatcgtggatccaacttatatagaagattttctattaacttacaggacatttcttgaaagtcctttggatgttgggatcaaactattggaatggtttaagatcgacagcttaagagataaggtgacacggattgtattattatgggtaaataatcattttaatgattttgaaggtgaccctgctatgactcgatttctagaggaatttgaaaaaaatctggaagatacaaagatgaatggtcatctccggttattgaatattgcctgtgctgcaaaggctaagtggagacaggttgtgctgcaaaaggcttcccgcgagtcccctctacaattcagccttaatggagggagtgagaagggatttggtatttttgttgaaggagtagaacctggtagcaaagctgctgattcaggactgaaacgtggtgatcagattatggaagtaaatggacaaaactttgagaatattacatttatgaaagccgttgaaattttgaggaataatactcatcttgcacttactgtgaagaccaacatttttgtgttcaaagagttactttttaggactgaacaagagaaatctggtgttcctcatattcccaaaattgctgaaaaaaaaagtaatcgccattctatccagcatgtgccaggagatattgaacagacatcacaggagaaaggaagtaagaaagttaaagcaaatactgtttcaggtggaagaaacaaaatcaggaagattttggataaaacacgatttagtatcttgcctccaaagctatttagtgatggaggcctaagccaatcacaagatgacagcattgtgggaacaaggcactgtaggcatagtctggctataatgcccatccctggaacactctcatccagcagccctgatctcctgcagcctaccaccagtatgttggatttttccaatccttcagatatccctgatcaagttataagagttttcaaagtggatcagcaaagttgctacattatcatcagtaaagacaccacagctaaagaagtagtttttcatgctgttcatgaatttggtttgaccggtgcatccgacacatattctctctgtgaagtttctgttactcctgagggtgtcataaaacagagaagacttccagatcagttctccaaattagctgatagaattcaactcaatggaaggtattacttaaaaaataacatggaaacagaaaccttatgttcagatgaagatgctcaagaactagttaaggaaagccagctatccatgctgcagctcagtaccattgaggtggccacccagctgtcaatgagggactttgatttgtttcgtaatattgaaccgactgagtacatcgatgacctttttaagttaaattccaaaacaggaaatactcatttgaagaggtttgaggacattgtaaaccaagagacattctgggttgcctcagaaattttaactgaagcaaatcagctcaaacgaatgaagattattaagcattttattaaaattgcacttcattgtcgagaatgtaagaacttcaattccatgtttgcaataataagtggcttgaacctggcatctgtagcaagactcagaggaacttgggaaaagttaccaagcaaatacgagaaacatcttcaagatctacaagacatttttgatccatctagaaacatggcaaagtatagaaatattcttagtagtcaaagtatgcagcctccaattattccactcttccctgttgtcaagaaagatatgacatttctacatgaaggaaatgactccaaagtagatggtttagtaaactttgagaagttaagaatgatttccaaggaaatccgccaagttgttcgaatgacttctgctaacatggacccagctatgatgtttcgacagaggtcactgagtcaaggaagcacaaattcaaacatgctggatgttcagggaggtgctcacaaaaaaagggcacgccgcagctctctgcttaatgccaagaagctatatgaggatgcccaaatggcaaggaaggtgaagcagtatctttccagtctcgatgtagagacagatgaggagaagttccagatgatgtcattacagtgggagcctgcatatggtaccttgaccaagaatttaagtgagaaaagatcagccaaatcatctgaaatgtctccagtgcctatgaggtcagctggccaaacaactaaagcccacttgcatcaaccccacagagtaagccaggtgcttcaggtgccagctgttaatttgcaccccatcaggaagaagggacaaacaaaagaccctgcactgaatacaagtttacctcagaaagttttaggaacaactgaagaaataagtggtaagaagcatacagaagacactatttctgtggcgtcatctttacattctagtcctcctgcatctcctcaaggctcccctcacaaaggttacacacttattccatcagctaaatctgacaacttgtctgactccagccatagtgagatttcttcacggtccagcatcgtgagcaattgttctgttgactccatgtctgcagctctacaggatgaacggtgttcctctcaggccctggcagtccctgaatccactggggcattggaaaagacagagcacgcttcagggataggagatcatagtcaacatggccctgggtggacactcttgaagccatctctaatcaagtgtttagctgtctcatcgtctgtgagcaatgaagagatttctcaagagcatatcattatagaagcagctgacagtggtcgtggaagttggacttcgtgttcaagcagctcccatgacaacttccaaagccttccaaacccaaaaagctgggattttttgaactcttacagacatacccatttggatgaccccattgctgaagttgaacccactgactctgagccctattcctgttctaaaagctgctctagaacttgtgggcagtgtaaaggaagcctagagagaaagagttggacctcctccagttctctgtctgacacgtatgaaccaaactatgggacagttaaacggagagtattggagagcaccccagctgagtcatctgaaggcttggaccccaaggatgccactgacccagtttataaaactgtcacttcaagtacagaaaagggcttgattgtgtactgtgtcacctcacccaagaaggacgataggtatagggagccacctcccactcctccaggatatttggggatttctttagcggacctaaaggaaggaccccacacacacctaaaacctccagattatagtgtggcagtgcagaggtcaaagatgatgcataacagcctctctagactgccaccagcttctctcagtagcaacctcgtggcctgtgttccatcgaagattgtaactcagcctcagaggcataatttgcagccattccatcctaaactaggagatgtgactgatgcagatagcgaagcagatgaaaatgaacaagtttcagcagtctagcctttggatgacctatttgaaaaccactgaaagtcgtggaggaatgggcaagaaccacctcatgattctgcaggccattgctaacgaacagctcattgctacaaccagtccagaggttttattccctctactccgagcaatgaaatagacctgagttatgcttcctttcatttaatttctgcagataaatagtttcctgagcaatggatgctatgcctggataccagtctccactttgcacgccggaactgccttgggaccacagttacagaaaaaatgtaaactcagagtgatccttgtgtatattgctatagatttttctttaacaagctattttaaagataatggcattattatttccaagccatagcttgggctgaaggacaaattgaaattgtctgccaataccaaggatattcttgtatatttgaaaaataacttattatttgaattgttgtggttttgtttgtatttgagagctcttgttagctgatattcatgtttgaggtcataaaattgtctctggtctgaccaaacagaagtcatctttacagaggtgatatgcttgatctacacagagatgtgacttgatctgtagcaccaatacaatgtaggtctcagtttgagagaaataggaagccctttgcagttgaggtgttaggaacctgctggtcatggtgtggaaggccaaatgaagctgccacagggtttcttgtcagtcctttgggaaatgggagggagtagtttggggaggagggtgggaaccctaatttccacagaatgaaattttgatgttaaatgacatgtatacaaattcttccttaagtgaaagttatgctgcatcgaattgtaactgaaagtatagatccaacaaatagagactgggttctagagagttctggtctatagaaacccaaaactaaaatctctcataactcaagtatggaatactttttttaaagaaattcttatcatgggtgttgtaataatgaagacgaatttgactttatgcagtgttctgcagcatgcctcccccacatctcatagcaccaggttgtgtctgacctgacataccctgcagctctcagctggctgcagtaacattttgtgggagaaagaggagctggagttacagaaatgattgtctcttggttctcagtttttagcccttgagaggacatacttttccagcctcatgggtatggcactcttaattaaaatttcagtggctgtttactggatgaggcagatttttcacatttttgccaattaaatatattttatatatagtaaggttaattttttcagtttttttaatgtaaaagcaagtgaaattttaataaacttctgtaatttcccaaaaaaaaaaaaaaaaaa

SEQ ID NO: 901 - DNA, 7959 bp, Homo sapiens
gcacttctcgcgaggttgcaggcagtgccgggccagacatggcggaagaggaggtggccaagttggagaagcacttgatgcttctgcggcaggagtatgtcaagctgcagaagaagctggcggagacagagaagcgctgcgctctcttggctgcgcaggcaaacaaggagagcagcagcgagtccttcatcagccgtctgctggccatcgtggcagacctctacgagcaggagcagtacagcgatctgaagataaaggttggggacaggcacatcagtgctcacaagtttgtcctggcagcccgcagtgacagctggagtctggctaacttgtcttccactaaagagttggacctgtcagatgctaatcctgaggtgacgatgacaatgcttcgctggatctatacagatgagctggagttcagagaggatgatgtgttcctgactgaactgatgaaactagcaaatcggtttcagctacagctcctcagggagagatgtgagaagggtgttatgtctctagtgaatgtcaggaactgtattcgcttctaccagacggcagaggagctgaatgccagcacactgatgaactactgtgcagaaattattgcaagtcattgggacgacctgaggaaggaggatttcagcagcatgagcgctcagttgttatacaaaatgatcaaatccaagacagagtacccgctacataaagccatcaaagtggagagagaagacgtggtcttcctgtatctgattgaaatggattcccagctccctgggaagctgaatgaagcggatcataacggagatctggcattagatctagccctctcacgacgactggagagtattgccaccacgctggttagtcacaaagctgatgtggacatggtggacaagagtggctggagcttgttacacaaaggaatccaaagaggagatctctttgctgccactttcctcattaagaatggggcctttgtcaacgctgctacactgggtgcccaggagacaccactgcaccttgtggccttgtacagttcaaagaaacactcagcagatgtgatgtctgagatggcgcagattgcagaggcccttctgcaggctggtgccaaccccaacatgcaggacagcaaggggaggactcctttacatgtgtccatcatggccgggaatgaatatgtgttcagtcagctgctgcagtgcaaacaactagatttagaactcaaagaccacgagggcagcacggctctgtggctggcagtgcagcatatcacagtgtcttctgaccagtctgtgaaccccttcgaagatgtccccgtggtaaatgggacttcatttgatgagaacagctttgcagccagactcatccagcgcggcagccacacagacgcacctgacacggcgacaggaaactgtttactacagcgggcagctggagcaggaaacgaggcagcagctcttttcctggcaaccaacggtgcccatgtcaaccacagaaacaagtggggagaaaccccgttgcacacagcgtgtcggcatggcctggccaacctcacggcagagctcctgcagcaaggcgccaacccaaacctgcagacggaggaagctctgcctctgccaaaggaggccgcatccctgaccagcttggcggacagcgtccatctgcagacgccactgcacatggcgatcgcctataaccatccggatgtggtgtctgtcatcctggagcagaaagccaatgctcttcatgccaccaacaacttgcagatcattccggacttcagcctcaaagattcccgagaccagactgtgctgggcctggcattatggactggcatgcacacgatcgcagcccagctgctgggctctggagccgccatcaatgacaccatgtcggatgggcagacgctactgcacatggccatacagcggcaggacagcaagagcgcactcttcctgctggagcaccaggcagatataaatgtcagcaggactcaggacggggagacagccctccagctggccatcagaaaccagcttccactcgtagttgatgccatatgcacccgaggagctgacatgtctgtgccagatgagaaggggaaccccccgctgtggcttgcattggcaaacaatctggaggacatcgcatccactctggtcagacatggctgtgatgccacatgctggggtccgggacctggtgggtgccttcagacgctcctgcacagagccattgatgaaaacaacgagcccaccgcctgctttcttattcgcagtggctgtgacgtgaacagtcccagacaaccaggcgccaatggagaaggagaggaagaggctagagatgggcagacccctttgcatttggcagcctcttgggggctggaagagacagtacagtgtcttctggagtttggtgccaacgtgaacgcacaggatgcagaaggaagaacccccatccacgtggccatcagcagccaacacggtgtcatcattcagctgttggtttctcaccccgatatccatttgaatgtacgagacagacaagggctgaccccgtttgcctgtgccatgactttcaagaacaacaagtcagccgaggccattctcaaacgagagtccggggctgctgagcaggtggataacaagggccggaatttccttcatgtggcagttcagaactctgatattgaaagtgtgctgttcctgatcagtgtccacgctaatgtgaattcaagagtccaggatgcctccaagttgacccccctgcacctcgctgtccaagcaggctcagaaattattgtccgcaatttgcttcttgcgggagccaaagtgaacgaattaaccaagcatcgccagactgccctccatcttgctgcccagcaggacctgcccaccatctgctcagtcctcctagagaatggcgtggactttgctgccgtggatgagaatggaaacaatgctcttcatcttgctgtcatgcacggccggctcaacaacatccgggttctcctgacagagtgcacagtggacgccgaagcctttaatctcagaggccagtcaccactgcacattttgggacaatatggcaaggagaatgcagcggccatctttgatctcttcctagaatgcatgccggggtatcctctggacaagccggatgcagacggcagcacggtgctgctcctggcatacatgaaagggaacgccaacttgtgccgcgccatcgtccggtcgggggctcgcctcggggtgaataacaaccagggagtcaacatcttcaactaccaggtcgccaccaagcagctcctgttccgactgctggatatgctgtccaaggagcctccgtggtgtgacggctcctactgctatgagtgcactgccaggttcggagtcaccactcgcaaacaccactgtcgtcactgcggacgtcttctttgccataaatgctcgaccaaggagattcctattataaagtttgatctgaacaagcctgtgcgggtttgcaacatttgttttgatgtactgactctgggtggggtttcttagtgagccccccggagggtccaggccacgtccttggtcacctccccagcagctgctctgctcaccagcctgaccccacccagagcaggagctggcgggtgtcttcctgcggcaatagactggaacgattaaggaccatggtgtgatagatcccatttcaaatgattccatatgattgtcagtgtgtgtgtcagactgtgatcgatttcactagatgtctcactcatcagaccaggccattgggcctaagtggtaaatgtgattaggaattagacctctccccattctgctagcaacatacagggacacttggaaaaccatttccccttccagtagcttggtgtccatcccagagcattcatgaagtcttcccgcctgggctgactgatgaggcagagcctctcagcgtaggaagctggctgcttaatgagctggctttactctagggtaagtggctgtggacttttctgcacagtgttttcataaagataataggatcctcttgccctgaagtctttttttctttttacgctaagctgtatttttagtgagctaccccttttaaaaaggtgaaatctttcttaacagggttcaaagatgagagctgaaaaatcgtggccttaacaactgaaagctttacagtgttcatgctactgaggtgtcaggagtgcagctgggccgcttgacacctcgtagcagccgtctcattctctcgtcttgctgcgtcctgtctgtggagtcctcagtcactctgctgttggagagtgctggaggaaatgcacttttactgtgctgcactttttatagagctgcattgtcggtgattccaatttaaaaatccatattcaaaaataccctcacacatccctgcatcagtgattctaatgatcagctttgactggacctcagctcacacgaatctccaaggaaaaactctacagagcatcttttagagcaagagattcatacaggccaagtgatgagagggggagtcaccaaggcttcagccccaagggcatctccagcctcaggccggcaggtcctatgtccttgacacaaatgcttcttgctgaaatcctccctagtgatgctgcgagtgctgttggtcccagttctgtgtagcttgccctgccccatgaagggccaccagccaagggccctggccacgtgtgcgccaccttactttggaagtctctggcttgtgtgctggatgaggctgccagaacttgttgggcgttcatcgctgttagtacatatattaaccgtgaggtgttaaacttttcttttgaaggtttggccagtttctaaaaaatgcacatttaaagagaagcatctaccacggctttaaaacaaaacaactctgagatgaacaatatgtgttatactcagagattaacaatctcaatcatacatactgattctttcagacatttaataaccactacatttttttgcattaatgaagtttgactatatgtgtaaagggactaaatatttttgcaacagcctgttctttgttcattcttttctggatagtgtgtcctctgtattgcggtagatttatacattctgttgcctaaatatgtgtgtaaaatgagctgataaactggagtactacttaaaaaaaagtctgtgatttataagatgtatatgctttctatgtgaatataagcttgtgcacaatgtttaaaagaaaaacaatgaattagaagagatcccccgtcccccagtctgacatatttcatacagaatgtttaaaagaaaaactctgctagtcttggcaaacatttggccatgtgaggcatgtggtcagtttccattttctattacctggaaagggccataaggaagcaggcagggcttaggtagcttggttacctaagttagaaagtaagagaatcatgattcggatatgaattgaagtggttggtacatggatacctgttctttaaaaggaatgtgggagatgagtcaagggtgaggccgattgttctgcccatgccctaccataccaatttcaataacaatcttgcctgtcattgcactcagaatcttaagatcatgtttcaaatatgttgattcaaacttgcttctaagcctgagtccagggatagcaatggtactgaccagctatggactgggagaacattgagtcctgttttccattggcttcagggcgcatccatgtggatataggaaaagcctctttccacagacttaggaagccccccgaccacgcggacgctcgctgggctgcactcagcaggctgcttgagtgggagctgactccaacatgccctgccctggctgggactaggcatgcttccagcccttcccgtgctctccctgctgtcaacacttgcgtacaaacctgcctagctgttgtaagttttcatcagtagcttaagtactagtagcaaaaacttaaattcattcagaaagttgccacttctgaatgagtagagcaggaaaagtaaactttactgaaacataatttgctgcaacagtcaacattgttatgctgaatgtgctctcaactgccctttgctcatcgccagatttattatccagtgtattcctaacagtcttttgttgtcgttgtttttaaaacaaaggtacggaccatgtgctatatataaatcgaatggcttaaactaatttgctatgatcctctaacaccgaaatttcccataaacttaagtgcctacacttaggacttttgaactttcagtcatctttttcgtggtgtctcactgaacgatgtgttagaacatgtgttccatttggagttttgggcctgtgcacggtcaaccccaattaccaatttagttgaggctggattcgattgctcagttcacctgccacgttctctccaaggagtggggtctacgtgacctttagtcctctacctcagagccccgagtcatttctgaccaccccgttctgtgtcctcactcttgtccctgaatgggtccctgtgtggatctcagtgtgtgtgtggtttctccactcctccccgctcatgtcccacacctgccatattgaaccgtttctgcactaatcttctccacgggcacggagtggagggaacgtcttgggaaaggggagagcttgacctccatctaggtttcttttatctggagaaaaagaacacttttgaactatgtaatgcttcaccctgaaaggcaagctaacgctaacttcccaggtgacagtagcaggaacaaggaagggtaatgtttccatgacagacacttgcttcccttgggacaagtcccagaagaactacctgaagcaccaaagctccccaccccagcctggtggcagaggaagcaggtggcaccaactcaccaaagggacttgggagccaccttctcactctgtggaagtactttagtgagagctgactggcaagataaaaaccctgaaattcccagaagttacagatgccttaaagactttctttggaagatcattgcctgtactattccttttttgtgtggcataaataatatattaacctgttacaactgacaacattggttttctgcagctagggagtcttgagtcgagactgctcgccttgatgacttgctcttttttggcagatgtgtggagttggctgttacgacatccctgtgtgatcccagaggaggggcagtagctgggcagaaactgcaggcacacatttgggtggatcacctggcttccagccccttcggggtggtgctcagtgtggggtgatggtatcatagaggaccacggcgcttatcagcattgtttctttggagtctgtgtaatggaatgtatttttcaaatactgatatttgcattttctgtaacaattccttataataaaatgaagtaaaattgtgcatttaaagtggaaactttaataagacatttgtagttacttctaatgcagaagtaccaataagcattaaaaacaaattttagaaaactcctgacgtgaataagtttcttgaccagctgccctccagaaagtttgaattccaacatttttcaggaacatgctgttgacagcagtaaaagtagctattttatgtatgtatttttaatttttaaaagtttcagtaggtttttggggttcaggtggtgtttggttacgtgaggttctttagcggtgatttccaggattttggggcacccatcacccaagcagtgtacactggacccttttatccctcaccccaaccctttcccctgagcccccaaagtccactgtatcattcttaatgcctttacgtcctcatggcttagctcccgaaaagtagttattttaaacatactagctgcctgaacttactgtgcccttggcccagatttcagctcatagcaccgagcgtgatcactgaggcagtctcagtcaccgtcacctgacccctctgaa

SEQ ID NO: 902 - DNA, 982 bp, Homo sapiens
gtccatgtatctctgagcagctatgaagaagcttcctggaaaacaataagcaaaggaaaacaaatgtgtcccatctcacatggttctaccctactaaagacaggaagatcataaactgacagatactgaaattgtaaagttggaaactacattttgcaaagtcattgaactctgagctcagttgcagtactcgggaagccatgcaggatgaagatggatacatcaccttaaatattaaaactcggaaaccagctctcatctccgttggctctgcatcctcctcctggtggcgtgtgatggctttgattctgctgatcctgtgcgtggggatggttgtcgggctggtggctctggggatttggtctgtcatgcagcgcaattacctacaaggtgagaatgaaaatcgcacaggaactctgcaacaattagcaaagcgcttctgtcaatatgtggtaaaacaatcagaactaaagggcactttcaaaggtcataaatgcagcccctgtgacacaaactggagatattatggagatagctgctatgggttcttcaggcacaacttaacatgggaagagagtaagcagtactgcactgacatgaatgctactctcctgaagattgacaaccggaacattgtggagtacatcaaagccaggactcatttaattcgttgggtcggattatctcgccagaagtcgaatgaggtctggaagtgggaggatggctcggttatctcagaaaatatgtttgagtttttggaagatggaaaaggaaatatgaattgtgcttattttcataatgggaaaatgcaccctaccttctgtgagaacaaacattatttaatgtgtgagaggaaggctggcatgaccaaggtggaccaactaccttaatgcaaagaggtggacaggataacacagataagggctttattgtacaataaaagatatgtatgaatgcatcagtagctgaaaaaaaaaaaaaa

SEQ ID NO: 903 - DNA, 2971 bp, Homo sapiens
agctgggggcggggccggaagctctttccccgcgactgcgccacgtctgaggcggctgtggccgcgtcggtgtccgcgtcgaggagccggggcagggcacgatggcggactgggctcgggctcagagcccgggcgctgtggaagagattctagaccgggagaacaagcgaatggctgacagcctggcctccaaagtcaccaggctcaaatcgctcgccctggacatcgatagggatgcagaggatcagaaccggtacctggatggcatggtaagggcccacggtgtgcgtgtatcagtgccctgccctagcactacctgctgcagagcctgcagtgtctccttcagcactggtgcgggtgggtggtcaaatcaccacttctgtgtgatcttgctgggattcctcccttaggactcggatttcacaagcatgaccagcctgcttacagggagcgtgaagcgcttttccacaatggcaaggtccggacaagacaaccggaagcttctatgtggcatggccgtgggtctaattgtggccttcttcatcctctcctacttcttgtccagggcaaggacgtgagccagtgggagctggtgtctgtgggtgccaagggcagccagggtcttccctgcctggtgttttgggctccagaggacttacctacaaaatactcctttgcaatgataattgtgggtcaggaatcttcttcctgtgtggcaggaggctgcggctgcctgtgacctgatgagctcatgttggctggtcccatgtgtgaaagggactctctcggggaaaccaaggcccagcccctcccccctcccccaggtgctagagagccaggcagagctggggccacagcgtgtctggagaagccaggtctgagcagagcagctggtgaatcccagacgtggccacctgtggcttgcagcccttctccccgcgcttgggactctgacatcttaaggctgcacggtcgtgtccttgtctgggtgaggccatgtctgtgatccaaggttcctggaactgacacaggaaggggctgtgaaccctaagtgggtgtcatctcctccgaccgaggcttctcaccctggagatggcagttactcctggccatggttgctgagcatgggcagaccagtggaggccaccctactgtgttatctgcgccttcgatgaagtgagacccttggggagaacgggctgtggatgaaggagtggactgcagccttggcctagccactgggctgggatcttctgggtcatgtgactgtgtatccaggagcagaaacttgtattctcaggattcaggatctacccagcaccaaagatgtattttcaggagaacagacctagaaatgggcctgtctggcatttcagagtcaggcaaagcaggcagggccagggagcttctgtgggtctacacaagaaggttcctgtgagggctatcagttgttgccttctagcttgctggtaactttggcgcctccgccaagccctgccagactcccctggctgtgatggcattctgtgccatcctccttgtccccagcctctgcaggatgccctccctacccacctctccctgggccttccctgtccactgggctggattcatgttcaaaccactggactggcagggcaacgacttcttcccacctcaagatgaggtcctcgcccccttgtcttggcataaaaacacctttaaagcatgagccatgtgcttctttgcccttctctgtcctgttccaatcttctgcctcccagtcactccctggggactatgggatcactgtccccccacctgtgtggccacaccatatgtcctgtcaatccagaactgcctctgagctccaggctgaccacagatcagccacagcctgatgcctgcagccccactttgctcacccttcccctcccctcctccttccttccacacagcaagcctacctttctccatccatgctcaccatagcccccttccttgtgacctggaccctccattgtacctggctgagactgtcagcctcctggaggagtggggtccaccttcttcttgccctatgcagtgcaagctcacttctcacccagcaaggttgactcatctgcctccatgtctctggggctttgctgttgccctgaaacctagctgggctggtcttgctcccagcttgcttccccctcctcggatgtccctttgcaggcccctgtcgttcctccggcaccagtgtccttggctgccatggcaagctcatcaggggcttgtaccctggtcaccaagcatggtagcagctgcctgcattgtatctccatctggtcactgcaggtgccaacccttcatcccccatgttttcctgggccatggagggctgacctccgtttctggggaatgtggctgagctgtggtaaccagctacaccccaggtgctctttccatggtggtgcctgctcatcttgctgatgcaaactaggaagttaggctgcatctcggagtggctttcgctggagaggtgctttgctgtctctcagactcagtcactgtgttccctccccgcctctcttatctccatggctgtttgcagctctcccaggtactttggggtctgagctggaattcctttgtggtttgctcttctgcttctcactcttgtattaagaaggattccacaaagggagagtggcatccctgctgctgctgtgccagaccagagtttcctgaggggccctgaccctaaccctccagctcagccctgtacacctgaccctgtaaatgagtggggtttgctgactgtaatccctgacaccagtaaaaccaaaaggactcttgggggctcagtgtgagagccagggttacctactctgccaagtgaggacaaactgctaggctgtatcccataatttcaggatgagaaacattaacaataaaaatttgtagtaaacataacctcatgaagaactaaaaaaaaaaaaaaaaa

SEQ ID NO: 904 - DNA, 3352 bp, Homo sapiens
accgcctcccaggccaggcgagcaggcgggtggctggggcgcctccacctcctcttcctaaagcggcgaggcgcagaggagcggcatcactcgagcccaggtcccagccaccaccactcacagcgctcggcgttcaggaagaggagcagcagcggaggcggctgcttcagcggcgggcgggcgccagaaaggccccgatcgaaaagcctgggagggccgccgaactacccccggagggaggagccagtccgaacccaaggcgccaccgccgcagaagcggagcgaggcagcattcgcctccatggcccactcgccggtggctgtccaagtgcctgggatgcagaataacatagctgatccagaagaactgttcacaaaattagagcgcattgggaaaggctcatttggggaagttttcaaaggaattgataaccgtacccagcaagtcgttgctattaaaatcatagaccttgaggaagccgaagatgaaatagaagacattcagcaagaaataactgtcttgagtcaatgtgacagctcatatgtaacaaaatactatgggtcatatttaaaggggtctaaattatggataataatggaatacctgggcggtggttcagcactggatcttcttcgagctggtccatttgatgagttccagattgctaccatgctaaaggaaattttaaaaggtctggactatctgcattcagaaaagaaaattcaccgagacataaaagctgccaatgtcttgctctcagaacaaggagatgttaaacttgctgattttggagttgctggtcagctgacagatacacagattaaaagaaatacctttgtgggaactccattttggatggctcctgaagttattcaacagtcagcttatgactcaaaagctgacatttggtcattgggaattactgctattgaactagccaagggagagccacctaactccgatatgcatccaatgagagttctgtttcttattcccaaaaacaatcctccaactcttgttggagactttactaagtcttttaaggagtttattgatgcttgcctgaacaaagatccatcatttcgtcctacagcaaaagaacttctgaaacacaaattcattgtaaaaaattcaaagaagacttcttatctgactgaactgatagatcgttttaagagatggaaggcagaaggacacagtgatgatgaatctgattccgagggctctgattcggaatctaccagcagggaaaacaatactcatcctgaatggagctttaccaccgtacgaaagaagcctgatccaaagaaagtacagaatggggcagagcaagatcttgtgcaaaccctgagttgtttgtctatgataatcacacctgcatttgctgaacttaaacagcaggacgagaataacgctagcaggaatcaggcgattgaagaactcgagaaaagtattgctgtggctgaagccgcctgtcccggcatcacagataaaatggtgaagaaactaattgaaaaatttcaaaagtgttcagcagacgaatccccctaagaaacttattattggcttctgtttcatatggacccagagagccccaccaaacctacgtcaagattaacaatgcttaacccatgagctccatgtgccttttggatctttgcaacactgaagatttggaagaagctattaaactattttgtgatggcgtttatcattttatattttgaaaggattattttgtaaggaataacttttaatactatagtttcacctgtattctagtaaatgttgagacaccgttttgcttttaagtatccctatttcttaagttacgaggatgaatacctttcacattttgatctttagttgactctacagtcatgaaacatacaggtctttcaaagtcattctcaatattcagcttttgtaaattatcaagcttcaaaaagcttttttttttaaaaaaaaacatgcatattctaaaaatgactattggtggggaggtgtaaataagtcataccttcttaaaacagaaaatttaagtaaagtcttttaaatgaaacctgtaaaagtattgactcttctaccaagttggtatgatattccaggcagctcaatgattatcacatttgagaccctgtgtttgaagcatttacaggcaatgtacagcaacagaggtacctcttggtgtatagtatttacattctcttttaggtagaagaggcaattttacccttatttcacatggttagaaatttaaagcaagatcatttacccaaggataggtgtttggtaatgttgaaggagttagtctggcttcatgttttacatcttcaactaaaatcccatactatctgcttggatttggagagccaaaaaataaagctgattgtcatgtgattaaatatctgatcaacaggtatgaatataacttaaatcagcatatttttgccatggtaataaattgtcctataaactatttatatatttttgttcttcataattatcactaataagcatcagtttgttgtttttaaaaggatatttaagtgagcattttctagttcatatgaaaataaccatagtacaggatgatttctgtccacacaaaggttaaattagattgcacagttaattttcacttatatttatggtactattatgtgggtgatgcctttttcttttaagcccagtacatatattatgcctgcctaagttctgaactggggctgtatttcagtagttgtagaattattgatatttagttttgatagctaatgtttaattgtttggatctgcacagtttggtttttgcacaaaagtcatttaaaaaaatctgagtaattgtcaaatattaaaagaaagatattcttcctgtaaggaatacagtttttagtcaaagtggccattacatcctctttttaatttacataatacagatacttgagaaagttgttgtggtgttgtatgccaagaaaattctttttattggtgcctatattgtaacaattatttttaatgcattgtattttgaagtaacggttcagttaaatttttcacctgctgtgtaactgaaacacaattacagtttataatcatctgtagaagtctggagataattttgcaactcatgttatgggttaaatgaatatttttgtaaaagtaaaagcaacaaatttataaattgattatttgaaactttacaacacaattgcatcccaaatacaaattgtattgcttattcattatagctattcgtcctgtaatctgtttctaggtgaagcatactccagtgttttaggggttttgaaaataaatatttaaatttcacagtcaaaaaaaaaaaaaaaa

SEQ ID NO: 905 - DNA, 2581 bp, Homo sapiens
ctcgcctcagtctcctctgtcctctcccaggcaagaggaccggcggaggcacctctctcgagtcttaggctgcggaatctaagactcagcgagaggagcccgggaggagacagaactttccccttttttcccatcccttcttcttgctcagagaggcaagcaaggcgcggagctttagaaagttcttaagtggtcaggaaggtaggtgcttccctttttctcctcacaaggaggtgaggctgggacctccgggccagcttctcacctcatagggtgtacctttcccggctccagcagccaatgtgcttcggagccactctctgcagagccagagggcaggccggcttctcggtgtgtgcctaagaggatggatcggaggtcccgggctcagcagtggcgccgagctcgccataattacaacgacctgtgcccgcccataggccgccgggcagccaccgcgctcctctggctctcctgctccatcgcgctcctccgcgcccttgccacctccaacgcccgtgcccagcagcgcgcggctgcccaacagcgccggagcttccttaacgcccaccaccgctccggcgcccaggtattccctgagtcccccgaatcggaatctgaccacgagcacgaggaggcagaccttgagctgtccctccccgagtgcctagagtacgaggaagagttcgactacgagaccgagagcgagaccgagtccgaaatcgagtccgagaccgacttcgagaccgagcctgagaccgcccccaccactgagcccgagaccgagcctgaagacgatcgcggcccggtggtgcccaagcactccaccttcggccagtccctcacccagcgtctgcacgctctcaagttgcgaagccccgacgcctccccaagtcgcgcgccgcccagcactcaggagccccagagccccagggaaggggaggagctcaagcccgaggacaaagatccaagggaccccgaagagtcgaaggagcccaaggaggagaagcagcggcgtcgctgcaagccaaagaagcccacccgccgtgacgcgtccccggagtccccttccaaaaagggacccatccccatccggcgtcactaatggaggacgccgtccagattctccttgttttcatggattcaggtgctggagaatctggtaaaagcaccattgtgaagcagatgaggatcctgcatgttaatgggtttaatggagagggcggcgaagaggacccgcaggctgcaaggagcaacagcgatggcagtgagaaggcaaccaaagtgcaggacatcaaaaacaacctgaaagaggcgattgaaaccattgtggccgccatgagcaacctggtgccccccgtggagctggccaaccccgagaaccagttcagagtggactacatcctgagtgtgatgaacgtgcctgactttgacttccctcccgaattctatgagcatgccaaggctctgtgggaggatgaaggagtgcgtgcctgctacgaacgctccaacgagtaccagctgattgactgtgcccagtacttcctggacaagatcgacgtgatcaagcaggctgactatgtgccgagcgatcaggacctgcttcgctgccgtgtcctgacttctggaatctttgagaccaagttccaggtggacaaagtcaacttccacatgtttgacgtgggtggccagcgcgatgaacgccgcaagtggatccagtgcttcaacgatgtgactgccatcatcttcgtggtggccagcagcagctacaacatggtcatccgggaggacaaccagaccaaccgcctgcaggaggctctgaacctcttcaagagcatctggaacaacagatggctgcgcaccatctctgtgatcctgttcctcaacaagcaagatctgctcgctgagaaagtccttgctgggaaatcgaagattgaggactactttccagaatttgctcgctacactactcctgaggatgctactcccgagcccggagaggacccacgcgtgacccgggccaagtacttcattcgagatgagtttctgaggatcagcactgccagtggagatgggcgtcactactgctaccctcatttcacctgcgctgtggacactgagaacatccgccgtgtgttcaacgactgccgtgacatcattcagcgcatgcaccttcgtcagtacgagctgctctaagaagggaacccccaaatttaattaaagccttaagcacaattaattaaaagtgaaacgtaattgtacaagcagttaatcacccaccatagggcatgattaacaaagcaacctttcccttcccccgagtgattttgcgaaacccccttttcccttcagcttgcttagatgttccaaatttagaaagcttaaggcggcctacagaaaaaggaaaaaaggccacaaaagttccctctcactttcagtaaaaataaataaaacagcagcagcaaacaaataaaatgaaataaaagaaacaaatgaaataaatattgtgttgtgcagcattaaaaaaaatcaaaataaaaattaaatgtgagcaaagaatgaaaaaaaaaaaaaaaaaaaa

SEQ ID NO: 906 - DNA, 3797 bp, Homo sapiens
atgcccagcggcagctccgcggccctggccctggcggcggccccggcccccctgccgcagccgcccccgccgccgccgccgccaccgccgcctctgccgccgccctcgggcggcccggagctcgagggggacgggctcctgctgagggagcgcttggccgcgctaggcctcgacgaccccagcccggcggagcccggcgccccggcgcttcgggccccggcagcggcggcgcagggccaggcccggcgggcggcggagctgtctccagaggagcgggctccgcccggccggcccggggccccggaggcggccgagctggagctggaagaggacgaggaggagggggaggaagcggagctggacggagacctgctggaggaggaggagctggaggaagcagaggaggaggaccggtcgtcgctgctgctgctgtcgccgcccgcggccaccgcctctcagacccagcagatcccgggcgggtccctggggtctgtgctgctgccagccgccaggttcgatgcccgggaggcggcggccgcggcggcggcggcgggggtgctgtacggaggggacgatgcccagggcatgatggcggcgatgctgtcccacgcctacggccccggcggttgtggggcggcggcggccgccctgaacggggagcaggcggccctgctccggagaaagagcgtcaacaccaccgagtgcgtcccggtgcccagctccgagcacgtcgccgagatcgtcggccgccagggttgtaaaattaaagcactgagagccaagacaaacacgtatatcaagactcctgttcgtggtgaagagcccatttttgttgtcactggaaggaaagaagatgttgccatggccaaaagagagatcctctcagctgcagagcacttctccatgattcgtgcatctcgaaacaaaaatgggcctgccctgggaggattatcatgtagtcctaatctgcccggtcaaaccaccgtccaagtcagggtcccttatcgtgtggtaggattagtggttggacccaaaggagcaactattaaaagaattcagcagcagacccacacctacatagtaactccgagcagagataaggaacctgtctttgaagtgacagggatgcctgaaaatgttgaccgagcacgggaagaaatagaaatgcatattgccatgcgtacaggaaactatatagagctcaatgaagagaatgatttccattacaatggtaccgatgtaagctttgaaggtggcactcttggctctgcgtggctctcctccaatcctgttcctcctagccgcgcaagaatgatatccaattatcgaaatgatagttccagttctctaggaagtggctctacagattcctactttggaagcaataggctggctgactttagtccaacaagcccatttagcacaggaaacttctggtttggagatacactaccatctgtaggctcagaagacctagcagttgactctcctgcctttgactctttaccaacatctgctcaaactatctggactccatttgaaccagttaacccactctctggctttgggagtgatccttctggtaacatgaagactcagcgcagaggaagtcagccatctactcctcgtctgtctcctacatttcctgagagcatagaacatccacttgctcggagggttaggagcgacccacctagtacaggcaaccatgttggccttccaatatatatccctgctttttctaatggtaccaatagttactcctcttccaatggtggttccacctctagctcacctccagaatcaagacgaaagcacgactgtgtgatttgctttgagaatgaggttattgctgccctagttccatgtggccacaacctcttctgcatggaatgtgccaacaagatctgtgaaaagagaacgccatcatgtccagtttgccagacagctgttactcaggcaatccaaattcactcttaactatatatatatacataaatactatatctctatatggactcgtaaaggcatgggtataatggtaccccccagtaaacttcctaatgatttcttatgactgttatcaggctttattgggattaggctaaagttgttagtaaacttataaaaggctgctatggtaacactaaacctaagtggtctcttgtctattagtttggtttgaattattagtactatcctgtagacccagagacatagtttatataagaattgctaaagctgaagttcaacttggctgagtgaagataatcataggttgtgtgagcctatgaaaaagtgtatacgtctaagatttcaaaacaatgggtcccaaagcctaaccactttaagagtttatggagggtacttggcattacagacgattcatacacttccagtgctgccttctttacactgccagttttgacaaaacaggtttgttttttattttacaacaacatatgcctaattctgcaggattgcaagtaactttttaatgcattgtgattacttattggtaatgatagggctgatggcagtttactagatcactggttataatttgggacaaaaactgctacatcaactttcatctcgcccagagtgctcaaggctggtatgatcagtggatcaggaatgcaattgtgaattcctgcccattgcctctcttggtgaatgtggaaatggccacctgggttttcccatatcaggaagggctttgggatggcacctatattggctgataattgaggatgcaaacattccattcattagtgtgatcgagctgttaatttttagactatagatcaaaatgtgaaacattttatgttcaatccatatttgtcttgcacattataaatatatttttattttttagtaatttaggggagggaggagggagaaagggataatgatgcccttggcataattcacaaaagcagctgtgacaacctccaatcagtttacttcatttcaaaactatttccaatcacaaggaaagatttatttaaaatatactcgtacatttcacctgtggatgtctataacttcatcctcagtatgttcccaaatctgtgctggcattgaaaggacaaaacattatactagtgggtttttctactaattattttttgaagcattattttcccaacacaaaagagcttttttctcggtataatgaaaattgaaatcctatgtgtattcaatagtaaatagacaaattttattttttatttccacttgaagagttacatttcgtataaaagtttacaaataacggtttttattttgattttttcagtataaaaaaagttgccttgatggcatattatgatgtaatgctaattgcttgtaggatagtaaatggtcagtattgaaacctaatctctagctgccgtcttgtagatatgaacgaatgttcaccaagcatgtattttgtattttgttgcattgtacactgcaactaataagccaaggaatcgacatatattaggtgcgtgtactgtttctaaaaaccacaaactaagaatgataaattatcaatatagtttagtatttgctaattttactacactcttttgttatgtatatgtagggaagtcatagggattataaattcaatttgagtaaaatttaaaaccatatattttatgataaagggcctttaacttaagatggccaaagcactgatattatatatttgctgtaaagagaattataagagttttatttttctgatattaaaagttacttaataaagacttgtttccattaacttgaaaaaaaaaaaaaaaaaa

SEQ ID NO: 907 - DNA, 3539 bp, Homo sapiens
caagagttggtaagctcgctgcagtgggtggagagaggcctctagacttcagtttcagtttcctggctctgggcagcagcaagaattcctctgcctcccatcctaccattcactgtcttgccggcagccagctgagagcaatgggaaatggggagtcccagctgtcctcggtgcctgctcagaagctgggttggtttatccaggaatacctgaagccctacgaagaatgtcagacactgatcgacgagatggtgaacaccatctgtgacgtcctgcaggaacccgaacagttccccctggtgcagggagtggccataggtggctcctatggacggaaaacagtcttaagaggcaactccgatggtacccttgtcctcttcttcagtgacttaaaacaattccaggatcagaagagaagccaacgtgacatcctcgataaaactggggataagctgaagttctgtctgttcacgaagtggttgaaaaacaatttcgagatccagaagtcccttgatgggttcaccatccaggtgttcacaaaaaatcagagaatctctttcgaggtgctggccgccttcaacgctctgagcttaaatgataatcccagcccctggatctatcgagagctcaaaagatccttggataagacaaatgccagtcctggtgagtttgcagtctgcttcactgaactccagcagaagttttttgacaaccgtcctggaaaactaaaggatttgatcctcttgataaagcactggcatcaacagtgccagaaaaaaatcaaggatttaccctcgctgtctccgtatgccctggagctgcttacggtgtatgcctgggaacaggggtgcagaaaagacaactttgacattgctgaaggcgtcagaaccgtactggagctgatcaaatgccaggagaagctgtgtatctattggatggtcaactacaactttgaagatgagaccatcaggaacatcctgctgcaccagctccaatcagcgaggccagtaatcttggatccagttgacccaaccaataatgtgagtggagataaaatatgctggcaatggctgaaaaaagaagctcaaacctggttgacttctcccaacctggataatgagttacctgcaccatcttggaatgttctgcctgcaccactcttcacgaccccaggccaccttctggataagttcatcaaggagtttctccagcccaacaaatgcttcctagagcagattgacagtgctgttaacatcatccgtacattccttaaagaaaactgcttccgacaatcaacagccaagatccagattgtccggggaggatcaaccgccaaaggcacagctctgaagactggctctgatgccgatctcgtcgtgttccataactcacttaaaagctacacctcccaaaaaaacgagcggcacaaaatcgtcaaggaaatccatgaacagctgaaagccttttggagggagaaggaggaggagcttgaagtcagctttgagcctcccaagtggaaggctcccagggtgctgagcttctctctgaaatccaaagtcctcaacgaaagtgtcagctttgatgtgcttcctgcctttaatgcactgggtcagctgagttctggctccacacccagccccgaggtttatgcagggctcattgatctgtataaatcctcggacctcccgggaggagagttttctacctgtttcacagtcctgcagcgaaacttcattcgctcccggcccaccaaactaaaggatttaattcgcctggtgaagcactggtacaaagagtgtgaaaggaaactgaagccaaaggggtctttgcccccaaagtatgccttggagctgctcaccatctatgcctgggagcaggggagtggagtgccggattttgacactgcagaaggtttccggacagtcctggagctggtcacacaatatcagcagctctgcatcttctggaaggtcaattacaactttgaagatgagaccgtgaggaagtttctactgagccagttgcagaaaaccaggcctgtgatcttggacccagccgaacccacaggtgacgtgggtggaggggaccgttggtgttggcatcttctggcaaaagaagcaaaggaatggttatcctctccctgcttcaaggatgggactggaaacccaataccaccttggaaagtgccgacaatgcagacaccaggaagttgtggagctaggatccatcctattgtcaatgagatgttctcatccagaagccatagaatcctgaataataattctaaaagaaacttctagagatcatctggcaatcgcttttaaagactcggctcaccgtgagaaagagtcactcacatccattcttcccttgatggtccctattcctccttcccttgcttcttggacttcttgaaatcaatcaagactgcaaaccctttcataaagtcttgccttgctgaactccctctctgcaggcagcctgcctttaaaaatagttgctgtcatccactttatgtgcatcttatttctgtcaacttgtattttttttcttgtatttttccaattagctcctcctttttccttccagtctaaaaaaggaatcctctgtgtcttcaaagcaaagctctttactttccccttggttctcataactctgtgatcttgctctcggtgcttccaactcatccacgtcctgtctgtttcctctgtatacaaaaccctttctgcccctgctgacacagacatcctctatgccagcagccagccaaccctttcattagaacttcaagctctccaaaggctcagattataactgttgtcatatttatatgaggctgttgtcttttccttctgagcctgcctttctcccccccacccaggagtatcctcttgccaaatcaaaagactttttccttgggctttagccttaaagatacttgaaggtctaggtgctttaacctcacataccctcacttaaacttttatcactgttgcatataccagttgtgatacaataaagaatgtatctggattttgtgcctagttcctagcacacagcttcaaaaattctagagtttcctgataggagtgtcttttgtattcataacaagcccttttcacccatgcctgggtttatgctaacaaggttacccatggtgggcccttagtttcaaggaaggagttggccaagccagaaagaccaagcatgtggttaaagcattggaattttcagccccatcccacccccaatctccaaggaggtgatggggctggaaattgagttcaattttaacatggccagtgatttaagcaatgctgcctatgtaaagaaaccccaataaaaactctggacagtgaggcttggggagcttcctgattggcagacattccaatgtactaggaaggtagcgcatcttgattccacagggacaaaggctcctgagctctgggcccttccagtgcttgccaccctacatactctttgtctggctcttcatttgtattctttataataaaatggtgattgtaagtagagca

SEQ ID NO: 908 - DNA, 3638 bp, Homo sapiens
ggtagatgcggctgtgacagcagcaaagaatgacggccaagggcgacagcaggggctggccatgctgtaaaggggcttcttgggagggtccagcctcaggaatcaaggggaactcctgagccgagaattctgaagatctcctccctccctgaagctgtgggctgggccatcggaaaactttcagttttgtttccttgcctgcaagaaacgaaactcaaccgaaagcctgcagagagcagaacatggaaggagacttctcggtgtgcaggaactgtaaaagacatgtagtctctgccaacttcaccctccatgaggcttactgcctgcggttcctggtcctgtgtccggagtgtgaggagcctgtccccaaggaaaccatggaggagcactgcaagcttgagcaccagcaggttgggtgtacgatgtgtcagcagagcatgcagaagtcctcgctggagtttcataaggccaatgagtgccaggagcgccctgttgagtgtaagttctgcaaactggacatgcagctcagcaagctggagctccacgagtcctactgtggcagccggacagagctctgccaaggctgtggccagttcatcatgcaccgcatgctcgcccagcacagagatgtctgtcgcagtgaacaggcccagctcgggaaaggggaaagaatttcagctcctgaaagggaaatctactgtcattattgcaaccaaatgattccagaaaataagtatttccaccatatgggtaaatgttgtccagactcagagtttaagaaacactttcctgttggaaatccagaaattcttccttcatctcttccaagtcaagctgctgaaaatcaaacttccacgatggagaaagatgttcgtccaaagacaagaagtataaacagatttcctcttcattctgaaagttcatcaaagaaagcaccaagaagcaaaaacaaaaccttggatccacttttgatgtcagagcccaagcccaggaccagctcccctagaggagataaagcagcctatgacattctgaggagatgttctcagtgtggcatcctgcttcccctgccgatcctaaatcaacatcaggagaaatgccggtggttagcttcatcaaaaggaaaacaagtgagaaatttcagctagatttggaaaaggaaaggtactacaaattcaaaagatttcacttttaacactggcattcctgcctacttgctgtggtggtcttgtgaaaggtgatgggttttattcgttgggctttaaaagaaaaggtttggcagaactaaaaacaaaactcacgtatcatctcaatagatacagaaaaggcttttgataaaattcaacttgacttcatgttaaaaaccctcaacaaaccaggcgtcgaaggaacatacctcaaaataataagagccatctatgacaaaaccacagccaacatcatactgaatgagcaaaagctggagcattactcttgagaagtagaacaaggcacttcagtcctattcaacatagtactggaagtcctcgccacagcaatcaggcaagagaaagaaataaaaggcaaccaaaaagaaaggaagtcgaagtatctctgtttgcagacgatatgattctatatctagaaaaccccatgatcttggcccaaaagctcctagatctgataaacaacttcagctaactttcaggagacaaaatcaatatacaaaatatggtagcatttttatacaccaacgacatccaagctgagagccaaatcaagaatgcaatcctattcacaattgccacaaaaagaataaaatacctaggaatacagctaaccagggagatgaaagatctctacaacaaaaattacaaaacactgctgaaagaaatcagagatgacacaaatggaaaaacattccatacttatggataggaagaatcaatattgttaaaatggccatactacccaaagcaatttatagattcaatgctattcctatcaaactaccaataacattcttcacagaatcagaaaaaaaaagcattaaaatttatttgaaaccaaaaaagagcccaaaaagccaaagcaatcctaagcaaaaagaacaaagctggaggcatcgcattacccaacttcaaactatactacagggctacagtaaccaaaactgcatgatactggtacaaaagcatggtgctggtacaaaagcagacacatagatcaatggaacagaatagagggcccagaaataaagctacacacctacaaccatctaatctttgacaaagttgacaaaaatacgcaatggggaaagaattccccattcagtaagtggtactgggataactagctagccatatgcagaggattgaaactgaaccacttccttacaccatatgcaaaaatcaactcaagatggattaaagacttaaatgtaaaaccccaaactataaaaactctggaagataacctaggcaataccattctggacataggaacggaaaaagatttcatgacaaagatcccaaaaataattgtaacgaaagcaaaaattgacaaatgggacatgattaaacagaattaccatttgactcagcaatcccattattggttatatacccaaaggaatctaaatcattctgtcataaagacatatatacacaaatgttcacggcagcactatacacaatcgcaaagtcagggaatcaaactaaatgtccatcagtggtagaaaggataaagaaaatgtggtggcagggagtggtggctcatgtctgtaatcccagcactttgggaggctgaggcgggtggttcacctgaggtcaggagtttgagaccagcctggccaacatggcgaaactccgtctccgctaaaaatacgaaaattagccaggcgtggtggcgagcacctgtcatcccagctacttgggaggcctaggcgtgagaatcgcttgaacctggaaggtggtggttgcagtgagccgagatcctgccactgcactccagcctgggcaaccaagcgagactctgccttaaaaaaaaaaaaaagaaaatgtggcacatatacaccatggaatactatgcagccataaaaaagaatgggatcatgtcctgtgcagcaacgtggatggagctggaagccattatcctaaatgaactcactcagaaacagaaaaccaaataccacatgttctcacttataagtagaagctaaacattgagtacacatggatacaaagaagggaaccgcagacactggggcctacctgaggtcggagcatggaaggagggtgaggatcaaaaaactacctatctggtactatgctttttatctggatgatgaaataatctgtacaacaaaccctggtgacatgcaatttacctatatagcaagcctacacatgtgcccctgaacctaaaaaaaaagttaaaagaaaaacgtttggattattttccctctttcgaacaaagacattggtttgcccaaggactacaaataaaccaacgggaaaaaagaaaggttccagttttgtctgaaaattctgattaagcctctgggccctacagcctggagaacctggagaatcctacacccacagaacccggctttgtccccaaagaataaaaacacctctctaaaaaaaaaaaaaaaa

SEQ ID NO: 909 - DNA, 1940 bp, Homo sapiens
cctactggtagatcttcacagactggatgttaagcaagtggaaaggcagaacagcctccactcgcggtgcacggggaagagtgggcggcggacgtggttttgggcctgggacccaggtgttcctctaggcccagggcgggcatcgctgcccatccgtcccacaggtggttctgaggcgtctctcaacagccatatggcggacaccagaacccgggtgtaacagtgacccgtttctgtgtgggtccccactcccagggagggcaggagagcgccgggggcgtaacccccctcccccacgctggcaccagagtgtgagcagaatcggcttaaggcagctcccagtccccatcgcccccaaggtcgaaagaatcgggacaggaaatgggtcgggggaccgagtttgggccggaatgttcagagcgtgtccgtcctgctctttaaagcccctctctccatcccagaaccaaagccgggcgcccccagcgctcgctgcggtctcgcgcccgggtaacggccgatggccgcccccgccccagccgcagccggggaggaaatcccgcgcctcggaagaggcgcttcgggctcgggcgggttccggaagccgaggggccgggagtaggtgggcgcataggggctcctgggaggcgggaccaagacgcgcgttaccgggaggccaggcccggcgctgcaccctccgcggcccggggcctgaggccgggctcccgcgacttcccggcccaaagcagcgcagcgcccgggcggcccagccccgcagcggccacagcagcatagccgggcgagcggatccagaggcccgggcttccttcctgtgcgagtcggcgcggacgactgctagtccagccgttgggcgccgcctggatctcggcgcctggcccttaaagagacccggtcgcatttcatctcagcgagaggagaaatactcgaagggagaggttcgccgctggcagccagaagccttaccactgctaggacgctggcagaacgcacccataacttggcaacactcggaggatggatggcaaataataccagcgactgaagggttaattaatgattgcagattaattgaacaccttccgtaatcagacacctggcacacactcatgatgtcacttattcctcccaacaaccctgcaaatagataactgtctctcccattctccgagcttgtcctcagagaattaggtaacttgttcaaaatggtcagaagcaacagatataactccttgctctactctttccccccttctcactactgcacttgactagtctttttaaaacataatttttttggccaggcacggtggctcacgcctgtaatcccagcactttgggaggccaaggaaggcagatcacctgaggccagaagttcgagaccagccttggccaacatggcgaaaccccatcgctactaaaaatgcaaaaattagctgggtgtggtggggggcacccgtattcccagctactcagaggctgaggcaggaaaatcgcttgaacctggaggcagagattgcagtgagccgagatcattgcattgcactccagcttgagcaacagagggacacttcgttccccccgccaaaaaaaaaattttttttttaatgatcagaagcggctgggcgcggtggctcgggcctgtaatcccagcactttcggaggccgaggaaggtagatcacttgaggtcatgagttcaagaccagcctgaccaacatggccaaaaactgtctctactaaaaatacaaaaattagccgggcgtggtagcgcacgcctgtaatcccagctactcaggaggctcaggcacgagaatcgcttgagtctgggaggcggaggttgcagtgagctgagatcgtggccactgcaatccagcctgggcgatagagtgagactacgtctcaaaaaaaaaaaaaaaaaaaaaaa

SEQ ID NO: 910 - DNA, 7331 bp, Homo sapiens
gttgtgagctgcggcagagactggtggctggaggagacgccggcgctggagagtgcgctgcgccgcccgccgctgagggaccgcggggttagccactgctggctgcttccagtgttcgccgagaggtaccgggggtgacagctccgggaccggccgaaaggcgaggaaccggtgtggaaattaaaagaacacacatattttgactggggctttgatcaaccaaatgctaaaaagccacataaagaagatccctaatagtcatttctcaacaattatatagtcaactgatgtaacaatggtactaatattgggacgcagactaaacagagaggatcttggggtgcgtgattccccagcaactaagcgaaaagtttttgaaatggaccccaaatctctgacaggtcatgagttttttgacttctcttcaggatcatcccatgccgaaaacatactccagatatttaatgaatttcgtgatagccgcttattcacagatgttatcatttgtgtggaaggaaaagaatttccttgccatagagctgtgctctcagcctgtagcagctacttcagagctatgttttgtaatgaccacagggaaagccgagaaatgttggttgagatcaatggtattttagctgaagctatggaatgttttttgcagtatgtttatactggaaaggtgaagatcactacagagaatgtacagtatctctttgagacatcaagcctctttcagattagtgttctccgtgatgcatgtgccaagttcttggaggagcaacttgatccttgtaattgcttaggaatccagcgctttgctgatacccattcactcaaaacactcttcacaaaatgcaaaaattttgcgttacagacttttgaggatgtatcccagcacgaagaatttcttgagcttgacaaagatgaacttattgattatatttgtagtgatgaacttgttattggtaaagaggagatggtttttgaagccgtcatgcgttgggtctatcgtgccgttgatctgagaagaccactgttacacgagctcctgacacatgtgagactccctctgttgcatcccaactactttgttcaaacagttgaagtggaccaattgatccagaattctcctgagtgttatcagttgttgcatgaagcaagacggtaccacatacttgggaatgaaatgatgtccccaaggactaggccacgcaggtccactggctattctgaggtgatagttgtcgttggaggatgtgagcgagttggaggatttaatcttccatacactgagtgctacgatcctgtaacaggagaatggaagtctttggctaagcttccagaatttaccaaatcagagtatgcagtctgtgctctaaggaatgacattcttgtttcaggtggaagaatcaacagccgtgatgtctggatttataactcacagttaaatatttggatcagagttgcctctctcaataaaggcagatggcgtcacaaaatggctgtcctccttggtaaagtatatgttgtcggtggctatgatgggcaaaacagacttagcagcgtagaatgttatgattccttttcaaatcgatggactgaagttgctccccttaaggaagccgtgagttctcctgcagtgactagctgtgtaggcaaactgtttgtgattggtggaggacctgatgataatacttgttctgataaggttcaatcttatgatccagaaaccaattcttggctacttcgtgcagctatcccaattgccaaaaggtgtataacagctgtatccctaaacaacctgatctatgttgccggtggactgaccaaggcaatatactgttacgatccagttgaagattactggatgcacgtacagaatacattcagccgtcaggaaaactgtggtatgtctgtgtgtaatggtaaaatatatatcctgggcggaagacgggaaaatggagaagccacagacactattctctgttatgatcctgcaacaagtatcatcacaggggtagctgcaatgcccaggccagtgtcctatcatggctgtgtgactattcatagatacaatgagaaatgctttaaactctgaagacaggatacctcaccgaagaagccacactgatccaagatgggaggttttaaaaactctacagtgggaacttcacatatctcctttgtgccatatgcaaaaaatagtaaaaataataatttggtgcctttctcctcaaaatatcaatctttcaaactataataaagcctttcctataattgaaaaaaaaaacttttttgttaaaggtaatggtggttgttacttggcctttgaagagtgtacctttgtaagtatttgtaagaagtctatgtgaattaggaaatgtctgtctgcataccttttaggagcgtgtgaatggtgtcttcacttattatgtatgtttatctgtatgtatattccttattttgtcatatatgtagagaaaattgcatgacttgaggcatcatttaggttgaagaagttaatgcttaggatgcattctaggagaaaaaatcagttttaaaaacctttgttgttaacaaagtatatccagattggttaattttattgaagggtttttttctgtaattgataaaaatgtaatgacaacaattcaggcatcataaaatactgaactattgtgactttattcttagaattgctgtcttacattaaacatgtttttagggggaagttaggtaggagatagaaaaataagtgcccctacaagggggattaaaattacaagttaattcctaagagaaaaatggaatggcctttgaaggaaaaatgacccactatggctctcaaagtttttatgcatcatctcttcaatcctctaagaaagcctcttttcttaacttgataaagcagtggaaacccattttgcaatattgttttgtgaaaaacagggacagacagccaggtacagagactcacacctgtactcccaactactcagcaggctggggcaggaggattgcttgagcccaggagtctgaggctacagtgagctatgaacgcacacggcaccctagcctgggcaacaggttgcgacactgtctcaagagaaaagaaaaagaaaaatagggataggttttccttcctagcccagtagagtttgacctcattagtatggtgctttgggtgaggacctcttccttgattatcccactttctagtgaacagctaaaattcctgagagtctctactgttaaggtacctttaataggataaagcagggaccacctatctcagtgggtccatttttcttttaaaattagttatctgaaaaaacttagcagtagttcccatctttaaggtaagtctttcatttggtccccattgtgtaaaatactaatcaacattttcaagcttctgtacaacagactgcttttgtctagatttctcaactccactttataaagcttatcagttttcagagaggaatgtgaattttttttctaatgcaaataaatggatatggcaggaactacagcataagtgattattgtgattctgggtggacggatataatttacaacatttagggatgttctaggtagcctgctgtagtttgacttccagtcactgttgtctttcacattataatttgtatatttcttgtgatagaagggatgatgcaaatatgtaattaaagtgtcaccagatttctgttaaaaccaaggttgaaataaaaagcctaacattggtaagctacattgttttctcattttagaatgattcagagatttcagatagacattttttaaactttaatgcttagctagaatctacattctgaggaaaactctaaaaaacttaaaaatttttagggaatttttatttttcaaatcataattttaaaatgatagataccattttgtgataacaacaattcagaaaacaattttctatcctcttagttgaaagaatgtaggtacagtttggatacttgtactttaattttagagtaaacatctgcattatactcttatagataatagaattatttagttaagaaattctttacagtaaatgagataatgtgtgaaaaagtattttgtaaatgctgaggattctacaaatgatagttgttattttcatgtgtatttgtaagatcatgtccatttcatgaatataggacttcacataaaaaaagactttctcaagacaactttatattctagtatttttctgttgtaaaaagtattaactatttacttttattttgttatacatttattttaatatccatgtgtttattatagtaaatttgaaatgaaatcctgaaaaacagaatttttttaaacacagacctcacaccaatattaattttttctctacataatttaaaactacataaattaagtacttaaaatttatattgaaggccaccaagaacttaggttgaatcttagaaaatttaaataactatttttaaagttacccaacttaatattttaattttttaatatttatcttcctttactaattcttgataaataatagcattagacttgataaaataaaaaagaattttagagtagaattaatatatcaaaaggggtatatcaaccaaattggtgtcagattgtattcattctctcatcacataaagatttttcttttgataggtgatgctcatatgaacctttggtttagaatctatatatgtacatgtgtatgtatgtagatagtatggttgtatacacacatatataccaaacaccatgaattttagcagtctgtgatgatcagcaaaaaagcacataaagtaaaaattagttgaccatgctaaattcaattctggaatttttttttatttgggcatttctagaactttttacatttgaaagtacatgatgagtattagtaacgatgacttatgtataatcagaatctttatgacaatttagttttacaaggtcagaagagatgagtttgctaaacccagctgtgatacctcagttggaaagggaattcaaaggtatgctttgtagaacagaaaagtatagtttttttttcatgaactttaatcattttctgtttttcctctatgtgagtcagctacaaaagtggtctaatttttacaacagtagaacttcctccttttctactgtaatcttcccactgactttactgcacaggtatgaaatactagtgtattggatcttcagtaacctttttatttcctagatgattgaaatataggtatttactccatttaaaccaggtgataagatgatgtaaatactcagggagggtattaacttgttacttttgctcgtttggggtgtaaagtgccatgactgaataatcttcaattcatgattctagagtaagtttaatttggaaaaaggggcttcacacatggtggtggttgaacattgattcttttatacttaaaaagatgaaaatgttttgtggactgatacattttatcttactgaatatgaattgtttatgtatctctactgtcaaatagcctttttgaaactcaggaaagacaaaggttcaattacaccacttttgtcaataagcaaaccaggtattttttttttctcctgttgtctggatatggcaatagattttttaaattgctgtgagaacccatatatgaaaagagaggagttgaattgtgtgtgccttttatgtcttgagatttatatgtggaaaagacgacatctacttcaaactgtatttttttcgtttttttttttttttggggaaggggggagaacggggtcttgctctgtcgcccaggctggagtgcagtggcgcgatctcagctgactgcaacctccacctcccgggttcaagggattctgcctcagcctcccgagtagctgagaccacaggtgcgtgccaccacacccggctaatttttttgtatttttagtagagacggggtttagtagagacggatcactcctgaccacgtgatccgcccacctcggcctcccaaagtgctgggattacaggcgtgagccaccacccccggcctgtattttcagagaggagagcttggtgtttttgtggtgccaagtggtaagataatgtctctttgaggcttcctatggactgcctttattttagtaaactcaagacaccagttaacctcaacagagttttggccttattagaatttgttgtgcatcttattgaaagccaggtttacatcacctcaccccattattctttttagttaaataaatttaccatgccaagtaaccagaatggagcaaattggttgatctttaaggcagtaggtttgactagctagctatcattattgtcacatctaatgctaggcaccagaaaccatttgagccaggagtgtgaatgaataattccagagacactttagacattttttaatgttttatatgaacattttacatttgtgtgattgccttagatattaaattttcctagtgctgataaaaacagcaacattcataacttattttatatattgttccaaagaaaagaatttgttttaatggtttcaaaataactgcacctgaatttgtttatgtgccttaagttctctagtgctatttcaacttttttttcaatctaaatgaagcttaccttagataaggttcatatttgtttcctatagagtaaataaacttccccttcttaaattgtgtaataagcaccaacgtgtggttgcttggcagaatgagaatgttaagggagattgttggatgtttggagtttcattatattttttgtttttattttttgatacctaggtgctttttaaaatattcagacaaatatctatcttacattgattaaacccgtgtaaattcatttgcagtatctacatcgaatgtcaaaaaagtatacttatttttgttccatacttatgtacaattttttccctcttcaggctttttcatttacctttttgaaaaagcacttactctccccttccctatcacccctcccccaaggtttctttatttaaatttttattgagagttgttggagctctaagacaatacaaatttagagttgaacaaaagtataatctgctttacaactagtatagacctaaggtcatttgctttcaattagaggctccagagtcttcatagtggaaagaatgctttgtatttaattgttcttagttaagttgtagcacgtgaatacttacttacatgttttgtttaaatatacttcttgcatagtttaattttttaaaagttgtatctaataaaatgtcttttaaccattattacttgactatatggttgtattaaattttgtttacgaaaaa

SEQ ID NO: 911 - DNA, 6853 bp, Homo sapiens
atacatagacttccgttaaaaccagaatgaggaaaatacttttctctagcatcgtaggaggaagaaaacaaacacatcagatattttcagcactaaaagagatggttttccccacatatatgtaaaagaaatttgcaagactactggattttgatctcatggttgcagtgggtgaataggtggccttttgtgatctcctacatcaccctggaagtgagacttcttcggtttcttctagagtcagtttggtatcagaatggcaaagcaacttaaccttccagaaaatacagatgattggacaaaagaggatgtaaatcagtggttagaaagtcataagattgaccaaaaacacagggaaattttgactgaacaagacgtgaatggagcagtcttgaagtggttaaaaaaagaacatcttgttgatatgggcatcacacatggaccagctattcaaatagaagaactattcaaagaattgcggaaaacagccattgaagattcgattcagacatctaagatgggaaagcccagtaaaaatgctcctaaagaccaaactgtgtctcaaaaggaacgtagagaaacttcaaagcaaaaacaaaagggtaaagagaacccagatatggctaatccgtctgcaatgagtacaactgctaaaggttctaagtcactaaaagttgagctcatagaagataaaatagattatacaaaggaaaggcaaccatccatagacctgacatgtgtatcatatccatttgatgaattcagtaatccatatcgttacaagttggattttagtctacagcctgaaacaggaccaggcaatctcattgatccgatacatgaattcaaagccttcacaaatacagcaacagccacagaagaggatgtcaagatgaaatttagcaatgaggttttccgatttgcttcagcttgtatgaattcacgtaccaatggcactattcattttggagtcaaagacaaaccccatgggaaaattgttggcatcaaagtcaccaatgataccaaggaagccctcattaaccatttcaatctgatgataaacaagtattttgaagaccatcaagtccaacaagcaaagaagtgcattcgagagccaagatttgtggaagttttactgccaaatagtactctatctgacagatttgttattgaagtggacattattccacagttctctgaatgccaatatgattatttccagattaaaatgcaaaattacaacaacaaaatatgggaacaaagtaaaaaattctcactatttgtgcgagatgggaccagctctaaggacattacgaaaaataaagttgatttcagagcatttaaagcagattttaaaacactggcagagtccagaaaagcagcagaagaaaaattcagagcaaaaacaaataaaaaagaaagagagggaccaaagttggttaaattattgacaggaaatcaagatttgttagataattcatactatgaacagtacattcttgtaacaaataaatgccacccagatcaaacaaaacacttagatttcctgaaggaaattaaatggtttgctgtattggagtttgatcctgagtctaacatcaatggagtggtcaaagcttacaaagaaagccgagtagcaaaccttcactttccaagtgtatatgtagaacagaaaaccacaccaaatgagacgatttctactctaaatctttaccatcaacccagctggattttctgcaatggcaggttagaccttgacagtgaaaaatataaaccctttgatccaagttcctggcaaagagaaagagcttctgatgtcaggaaactgatttcatttcttacacatgaagacataatgccaagagggaagtttttggtggtatttctattactgtcctctgtggatgacccaagagatcccctcattgagactttctgtgctttctaccaggatctcaaaggaatggaaaatatactgtgtatttgtgtgcacccacacatatttcagggatggaaagatctacttgaagcaagattaataaaacaccaagatgaaatttcaagccaatgtatttctgctttaagccttgaagagatcaatggcactattcttaaactaaaatctgtgactcaatcttcaaaaaggcttttgccatctattggtttatcgactgtccttctgaaaaaggaagaagatatcatgactgctctggaaattatctgtgaaaatgaatgtgagggtacactgttagagaaggacaaaaataaattccttgaattcaaggcatcaaaagaggaagacttctatcgaggtggcaaagtgtcatggtggaacttctacttctcttctgaaagttattcttcaccttttgtcaaaagggataaatatgaaagacttgaagcaatgattcaaaactgtgcagattcttctaaaccaacaagtaccaaaattattcatctgtatcatcatccaggctgtgggggaactaccttggctatgcacattctctgggaactaaggaagaaattcagatgtgctgtgctgaaaaacaagacagtggatttttctgaaattggagaacaggtaaccagtttaatcacctatggggcaatgaaccgtcaggaatacgtacctgtactactccttgttgatgattttgaagaacaagataatgtctatcttctgcagtactctattcaaacagctatagctaaaaagtacattcgatatgaaaaacctctggtgattatcctaaattgtatgagatcacaaaatcctgaaaaaagtgcaaggatcccagacagtattgccgtaatacagcaactctctcccaaagaacagagagcttttgagcttaaattgaaagaaatcaaagaacagcataaaaactttgaggatttttattcctttatgatcatgaaaaccaattttaataaagaatacatagaaaatgtggtccggaatatcctgaaagggcagaatattttcaccaaggaagcaaagctcttttcttttctggctcttcttaattcatatgtgcctgataccaccatttcactatcacagtgtgaaaaattcttaggaattggaaacaagaaggctttctgggggacagaaaaatttgaagacaagatgggcacctactctacaattctgataaaaacagaggtcatcgaatgtgggaactactgtggagtacgcatcattcactctttgattgcagagttctcactggaagaattgaagaaaagctatcacctgaataaaagtcaaattatgttggatatgctaactgagaatttgttcttcgatactggtatgggaaaaagtaaatttttgcaagatatgcacacactcctactcacaagacaccgcgatgaacatgaaggtgaaacaggaaattggttttccccatttattgaagcattacataaagatgaaggaaatgaagcagttgaagctgtattgcttgaaagtatccatcggttcaacccaaatgcattcatttgccaagcgttggcaagacatttctacattaaaaagaaggactttggcaatgctctaaactgggcaaaacaagcaaaaatcatagaacctgacaattcttatatctcagatacactgggtcaagtctacaaaagtaaaataagatggtggatagaggaaaacggaggaaacgggaacatttcagttgatgatctaattgctcttttggatttagcagaacatgcctcaagtgcattcaaagaatctcaacagcaaagtgaagatagagagtatgaagtgaaggaaagattgtatccgaagtcaaaaaggcggtatgatacttacaatatagctggttatcaaggagagatagaagttgggctttacacaatccaaattctccagctcattcctttttttgataataaaaatgagctatctaaaagatatatggtcaattttgtatcaggaagtagtgatattccaggggatccaaacaatgaatataaattagccctcaaaaactatattccttatttaactaaattgaaattttctttgaaaaagtcctttgatttttttgatgaatactttgtcctgctaaaacccaggaacaatattaagcaaaatgaagaggccaaaactcggagaaaggtggctggatattttaagaaatatgtagatatattttgtctcttagaagaatcacaaaacaacacaggtcttggatcaaagttcagtgagccacttcaagtagagagatgcaggagaaacctagtagctttaaaagcagacaagttttctgggctcttggaatatcttatcaaaagtcaagaggatgctataagcactatgaaatgtatagtgaacgaatatacttttctcttagaacaatgcactgtcaaaatccagtcaaaagaaaagctaaatttcatcttggccaacattattctctcctgtatccaacctacctccagattagtaaagccagttgaaaaactaaaagatcagcttcgagaagtcttgcaaccaataggactgacttatcagttttcagaaccgtattttctagcttccctcttattctggccagaaaatcaacaactagatcaacattctgaacaaatgaaagagtatgctcaagcactaaaaaattctttcaaggggcaatataaacatatgcatcgtacaaagcaaccaattgcatatttctttcttggaaaaggtaaaagactggaaagacttgttcacaaaggaaaaattgaccagtgctttaagaagacaccagatattaattccttgtggcagagtggagatgtgtggaaggaggaaaaagtccaagaacttttgcttcgtttacaaggtcgagctgaaaacaattgtttatatatagaatatggaatcaatgaaaaaatcacaatacccatcactcccgcttttttaggtcaacttagaagtggcagaagcatagagaaggtgtctttttacctgggattttccattggaggcccacttgcttatgacattgaaattgtttaagagcctgatattcttcctccaagaatttgatctcagtacccatttaatttttttggactcaagatctatgctttaaaccggcaaggttatagatacagcctctagctcttcagatctgtacatgcagtatttaatttcctcttaaacatgttatgagttctacaaagacaatagtgaaaaaggaaggagtgagatatatgaaaagtagcaaatatgttccttggtttggttaacatcattgatgacaaaataataaggagctatgactggagtcaggagaagttagtgtaataagctggctacacagaaccccactacttaccaggcatggattgaagaagattgtctactcaaatggcatttagacattagaatgtctgggaaaatatttctcaaagacagcaaaaacctctcaaactgaggagcaacatttattcttactaagcagatcatcaatgtatcatgtgcttggcactcaaggatcttccaaaacagaggaccaaccagtcttctgaaggtcatgcccacagaagtcatcagaccttaccaaagtaggttggagaattagattgccttttcatgcagtgagattcagttaagcaaaaatgaaatttgtctctatagctaattagcttatcaactcccctccaaacaaacaattaaaaaaaaaacatacagacactcaaattccacaagctaatgaacaaaagggactcttgtgagaagactaatgagtccctcatccagaagatgccaatgtactggcagattaacatacaacctatgttttgaacaaaaacaaccagcgatacgtaatcaaaatgtaattttcccctaataaaattatggatatgggcagtcatcaatggctgccaaaaccattaagtggaaagctgattaaaaaacaaaaatttctaatggatttatcaaactgtcccaaatcctgataaatattaacatcacagaggaagaccagacattatgggcctggaagtactataggagtgcacacatcacccgtgacatggtcttgccaaataattaaacctgaatttgatcaggtctctggatcttatttgcaattcaaaagaaattttaaaaaaatcctactaacaccaccacaaatatgcaatcagcaatatccagaaaggggaaattcacaggacaaaaacctggttttcttttttggtttcttcaaccaaaaaagaaagaaattgcaaaggaccaaaaaaatgttggggaatctatacattataagggacttaacaactaaagggcaacatatagactttagatcctaatttgagcaaaatctaaaatcaattattaggcaatcagaaaaatttgaacacagactagatatttgaggatattaaggtactatattattgaagattccatggttatgttttttaaagagttcatgccttttagagatacatactaaagtatttgtaaataaatgacatgatctagaatcagtaattttgtgtttggggtgtgggggtggtgaaagggaagtagaaccgaaacaagattagtcctgagttaacaatggctgcaagctggatacatggaattcagcacacttttctccctcttactgattatgcttttgaaattttctcttgtaaaacatttagaaaacaaaaacaaaaaaaatgtgatttgtttctgtcttcaaaatctcattagaattttttcactggaggaagattttcccttgcttctgcataaaattttaactccataacttataagctcactctttattgttactttctaattgacaaataaaaattgtatattaaaaaaaaaaaaaaaaaa

SEQ ID NO: 912 - DNA, 3995 bp, Homo sapiens
gggggctttgtgcgcggcggcggcgggagaggcggcggcggcggccagcacggaggcggaggccgagggggctgtgcacaggtcgccgcggagaggcgtgcgaattccgagccgagcgccgaggaccgtgctacccaggccgggctgccagccgcaggctcctctctggcagcagcggcggcgcggcgacccccgtccctcggcctccccttcccatcccacctcccgagccttcctcttcccgcagcacgcccggcccggcccggccgtggccctcctcagtgccggccgccatggcagaggcgtccggcgcggggaaaatctagcccggggatttcatgcggcctagctcggttccgcctcctcctcgcgcggccccagcggctgcccgcaccccagccccactccgggcctccgtgtctctcctgtgatcgcactgacacggccggggggttagaatggaacaaactgaaggcccgatgagagaaagggaaagttaaggatgctggagcagaacaatggatttctctttctctttcatgcaagggatcatgggaaacacaattcagcaaccacctcaactcattgactccgccaacatccgtcaggaggatgcctttgataacaacagtgacattgctgaagatggtggccagacaccatatgaagctactttgcagcaaggctttcagtacccagctacaacagaagatcttcctccactcacaaatgggtatccatcatcaatcagtgtgtatgaaactcaaaccaaataccagtcatataatcagtatcctaatgggtcagccaatggctttggtgcagttagaaactttagccccactgactattatcattcagaaattccaaacacaagaccacatgaaattctggaaaaaccttcccctccacagccaccacctcctccttcggtaccacaaactgtgattccaaagaagactggctcacctgaaattaaactaaaaataaccaaaactatccagaatggcagggaattgtttgagtcttccctttgtggagaccttttaaatgaagtacaggcaagtgagcacacgaaatcaaagcatgaaagcagaaaagaaaagaggaaaaaaagcaacaagcatgactcatcaagatctgaagagcgcaagtcacacaaaatccccaaattagaaccagaggaacaaaatagaccaaatgagagggttgacactgtatcagaaaaaccaagggaagaaccagtactaaaagaggaagccccagttcagccaatactatcttctgttccaacaacggaagtgtccactggtgttaagtttcaggttggcgatcttgtgtggtccaaggtgggaacctatccttggtggccttgtatggtttcaagtgatccccagcttgaggttcatactaaaattaacacaagaggtgcccgagaatatcatgtccagttttttagcaaccagccagagagggcgtgggttcatgaaaaacgggtacgagagtataaaggtcataaacagtatgaagaattactggctgaggcaaccaaacaagccagcaatcactctgagaaacaaaagattcggaaaccccgacctcagagagaacgtgctcagtgggatattggcattgcccatgcagagaaagcattgaaaatgactcgagaagaaagaatagaacagtatacttttatttacattgataaacagcctgaagaggctttatcccaagcaaaaaagagtgttgcctccaaaaccgaagttaaaaaaacccgacgaccaagatctgtgctgaatactcagccagaacagaccaatgcaggggaggtggcctcctcactctcaagtactgaaattcggagacatagccagaggcggcacacaagtgcggaagaggaagagccaccgcctgttaaaatagcctggaaaactgcggcagcaaggaaatccttaccagcttccattacgatgcacaaagggagcctggatttgcagaagtgtaacatgtctccagttgtgaaaattgaacaagtgtttgctcttcagaatgctacaggggatgggaaatttatcgatcaatttgtttattcaacaaagggaattggtaacaaaacagaaataagtgtcagggggcaagacaggcttataatttctacaccaaaccagagaaatgaaaagccaacgcagagtgtatcatctcctgaagcaacatctggttctacaggctcagtagaaaagaagcaacagagaagatcaattagaactcgttctgaatcagagaaatccactgaggttgtgccaaagaagaagatcaaaaaggagcaggttgaaacagttcctcaggctacagtgaagactggattacagaaagggtcggcggaccggggagtgcagggctctgtcagattcagtgacagctccgtctccgcagcgattgaggaaactgtggactgagattcctgtacaatttcatcccagaaactccagacttgtagtctccatgcaagatttctttgtcggcggcttgataaacagtttctttgttttcgattttgatttcgccaatcatcattattggcattttcctgcctggtttcttcttcaagactctgaacaattgctttaacagtcaaatgatttttttttttcggtttgagctggatgggtacagcttaaatcatgggtccagcctaaaaaccaccatttaacttacactgatcaatttcaacatggactgtttttggttttttgtttttaaataaagcatcattaatgcacatctgcaggggtttgccaaacagcccaaactgtatacattacaatcattaaaagttcttattttttttaatattagtgccgttatcatggagaacagcatgacagctgtctttggcagtctgtcatttttctagcattttcagaaactcatcggaaatggcggtacctgtgtttcccttcgaaagcctctcagtacagcactcctgttcctctgttaaaactccttgttaatccagtgatcttttaggccaaggaaatattttgtgatggtgttctgggtccatacaccagcaatgaaggagatagatttgtgtacttgtgttttttaatcagcattaacatgggcaggcaccctcatttatagatgtcaggaaacattcagtgaaaaacttgtagaatgggatgtgataacgaggttccagtaatctgagcagtctaacgaggcccacctcctccaccacagaacgtggctatgttccaagtgctactctcactcagcctgttgcggatcttcatggcctcaggagacttgtttctccatgggctcttctggactgcacacttccaccatagcttgctgggttgatctagatgtctgtttgttgtatggaaattttgggggaaaaaatccaaaacacaaactgtgggttgaaatattaaccgtctccttggttccttggtattcaccgtgcctgatctgcacatttcatcgtggctgtttctgtatagcctatactgcattagcccaagagattgttgctttgtaactttttgcactattgttttggctggatttgtattacacacagttttaaaaaaaacaattccacactattctctgccttttttttcctatttatttcttcccgcacaaattccacatagaggccttcccatccagctctacgtgatttggctgcacttgaacactgattgtccatttacagccctcagcaatgtgccttctaaatggcatgacatatgtagatgtgctgcagcgcttgttaatggtcacaataaatgccacttcaccaaggaagtctcagatgaacaattatgaacatccaaattttattggggggcaataatcaactgaattgcaaaatttgggggaaaatggcactatccgtgtacgaatcgaatacaaatcaaagatttgtcacatccctaataaaaacaagatggagatgtctctgcaaccatatttgtaagcta

SEQ ID NO: 913 - DNA, 5888 bp, Homo sapiens
acttctgacagtggggaaagcagctgtgtgtgatagcttggaaggtttactgctgcctcaagtcctcttctctgcagttgaggtttcaggtttcaatcctcccaataccacaagacagagcacggggcggctgccgcctccgcctccgcgccttaacctaggcggcttgccgaagatctcagccccgcggccgcgcgctcgccctgccctagaccagggttgggcgcagcggcggaggtggcttctgggctgcgcgagctgggagagctgggaggcggcgatcgcagctgggccgggacttccttcctccaccgcacggcaacaaaacaaccctgcggcaggcactgagtgcttcgcagctgtctgggcgagaggcacagcgatgggctccgtgctgagcaccgacagcggcaaatcggcgcccgcctctgccaccgcgcgggccctggagcgcaggagggacccggagttgcccgtcacgtccttcgactgcgccgtgtgccttgaggtgttacaccagcctgtccggacccgctgtggccacgtattctgccgttcctgtattgctaccagtctaaagaacaacaagtggacctgtccttattgccgggcatatcttccttcagaaggagttccagcaactgatgtagccaaaagaatgaaatcagagtataagaactgcgctgagtgtgacaccctggtttgcctcagtgaaatgagggcacatattcggacttgtcagaagtacatagataagtatggaccactacaagaacttgaggagacagcagcaaggtgtgtatgtcccttttgtcagagggaactgtatgaagacagcttgctggatcattgtattactcatcacagatcggaacggaggcctgtgttctgtccactttgccgtttaatacccgatgagaatccaagcagcttcagtggcagtttaataagacatctgcaagttagtcacactttgttttatgatgatttcatagattttaatataattgaggaagctcttatccgaagagtcttagaccggtcacttcttgaatatgtgaatcactcgaacaccacataattttattaaaacgaagggaaaagggaccactgaattgcaccatttaagatgctgcttgaacaaatgggagggaagttgtcaatgattgatgggcaaaaatgtacaacacagttatgtgtttgtccatgtttattgttatagtgcatttaaaaactgctttaattttaatggtttaaatctgttttacatccttgagattcttacacatctaacaacaaaaaaaattatctacatcagtcattgttacatggaaaagacaggtggtaggcaagtaggtggaggatctcggtttgcaaattagataatactctgtgtataatgctacatatcaataactaccatcatggttaggcacgataactaatctttgttctgtgtaaaaaaatatggagagtgaaacaaagtgcagacattcaaagaaataagaaatctgctccaatgctcttgttctaatctctaataggttaacgttaataatcttgtatgggagttggaaaggaaaattttggaagtcaagaaagtccatttaggccggacgcggtggcttacgcttgtaatcccagcactttgggaggctgaagcaggcggatcacaaggtcaggagttcgagaccagcctggccaacactggtctctgtgaaactccgtctctactaaaaatacaaaaattagctggacgtgttggcgggcatctgtaataccagctacttgggaggctgaggcagaagaatcacttgaacccgggaggcagaggttacagtgagctgagatcgcaccagtacactccagcctgggtaacagagctagactccatctcaaaaaaaaaaaaaaaaaaaatccatttaaccaaattgtcttacataatactgtaacaaaacaaattttgtgttagaaaagtatacttaattctttgactttttataactgcatacataagaattcaatatttttcaaatatttatagcttatttagaaatatttctataatataagcaatttcttaaaaaccatcagatgatacttacagtataagtattcacatccagactttttagtagaaaaccctaagggctttgatatcttttttgattgtaacattttaaaaattatgaaataaaagtactgaaaaccagacacaaaatttatagctgaatgccttattataaggaaatactcttttaggactcagccagtcaccccacgtgtcctttttgtgtcctgtcacaattacaaccccacaaaagtaactgctagactgatttaaatggtaatcactttgttgcatttgattactgctgccacacctaaatgcatatatctatattttaatattatcaatttaaagttgttattaaatgtatattttattttacatctcttttttaatctagaagttcctccttctttccagttccttaaaatttacctggtgaagaacctgatcctaggacctatagagtttcccatactttgtattttgctgattgcacactcatggcacggttcagcacattgccctgtcctctcgatattagcacacagtgcaggttcaggcacattgaatttgagaagacttaggttcagtcctttggcaagactgtaaatcacggtgtctttctttccttcctccttcttctctctctctctctctctctctttccttttctttctctttttttcagagttgcactctgttgcccaggctggagtacagtggcacgatctcgactcactgcaacctccatctcccgggttcaagcagttctcctgtttcagcctcccaagtagctgggactacaggtgcacgccaccatgcccggctaatttttgtatttttagtagaggggtttcaccataatggtcaggctggtcttgaactcctgaactcaagtgatccaccagccttggcctcccaaaatgctgggattacaggcatgagccaccatgcccagctaatttttgtatttttagtagagacagggtttcaccataatagccaggctggtctcaaactccttaccttgtgatccgcccacctcagccttccaaagtgctgggattataggcgtgagccactgtgcccggcctacagggtttttatctaacctttctgttacaactgtacctctccttctgtactgaaagtcctggttttcaagaacacagggcacgatagaattagaacatcccacaattactcatttcttttatttatcttacacttacagctgtctcagaataacaatagaaatacaaccacaaataatatggcaattgaaacaattaaaaagttttcatttgcttttctcattctttcccaatttttttttttttttgagatggagtctcgcgctcttgttgcccaggctggagtgcaatggcacgatctcggctcactgcaacctctgcctcctggattcaagcaattctcctgcctcagcttcccgagtagctgggattataggcatgcgccaccacgccctgctaattttgtatttttagtagagtcaggatttctccacattggtcaggctggcctcaaactctcgacctcaggtgatccgcctgcctcggcctcccaaagtgctgggattacaggtgtgagccactgcgcccgacatcccaatttttaaaatagttatactatgtcaacattttcagaacatactggtatagcatactgtactttcttccttttatcccccatttattcttagttcttcaactatatatttaacacttgcccccagttttgttttgttttgttttgaggaggaatcttgctctgttgcccaggctggagtgcagtggtgtgatcttggctcactgcaacctccgcctcccgggttcaagtgattctcctgcctcagcctctcgagtagctgggattacaagtgggcaccaccacacccggctaattgttgtatttttagtagagatgggttttgccatgttggccaggctggttttgaactcctgacctcaagtgatccacctgtgttggcctcctaaagtactgggattacaggtgtgtgccaccgcgccaggcaattgcccccagtttttatttgatggctctgactgtttctcatatctgactctttaattatgaatccagggcatagattagtatctccatcttgtaaggatgcaaagaagccatgaaaataagtaatatcaactcctgaggataaaacgttacttgactagagttagctttttaattgtaatcatttataaacttctttgttccttacatataagcatagtcataaccatggtacccaaaattttctataagttattgtaactccttaaaggtcttgctacagttcttttatccagtacaaataattgggaaaatgtaaagctgaatgaaatctagtgagcctcatatcctcccttttagatattgattttaagtttgcttttcacagctgctaaaaagtaacaactgatttttagttccacaacctctctttcttcaatttagatggatcatacaataaagcaaaatctggctggttacagtggctcacacctataatcccagcactttgggaggctgaggtggagggtctcatgagcccaggagttcaagaccaacctgggcaatatagtgagactctttctatttaaacaaaaacaaaaacaaacaaacaaacaaacaaaaagctgggcatgatgcacacctttagtttcagctactaaggaggctgaggttggaggatcacttgagcctaggaggtcaacactgcagtgagctatgatcatgctactgccctccagcctgggcaacagagcaagaccctgtctccaaaaacataaataattaaatataaataaaaataaagcaaaatctgttgggaaacgagaaaaaggagaggaatttttcaggaataatcataaaaagaaatgatcatcagactgaaagtccagagcctgagaaatgaaaacatatttttaagcattggtgttgaccatgcagacaaacttttgttaattcagagcgatacaaaaggcactttgaatctataaaacttgaaaaagttaaaaattgtatgtcggataaagctttaagtcatctgtcactattaacctcagtgcagcaattctgactcctgtgcctggattccttttatgataattttgccacctacaggacagattaggtgctggtcgcctgaattattttgtgttctgaattattttgagctctaaaatggtaaagtacaaatactcattgttttactgtgcctttggccttttataaaaaggtatttataattcgttgataaaaaccaatatttgaagctgttgattaccaacaaaaaagtttcactctctttatagtgcttcaggatacaactttttcagggccttattagagaaaaactgattcacatgttattcttctaaagctaaattattaaaatgtaggttgaaagattggattgattgtgaatctacactaaagatatggttccaggcagacctccttagagacctccaggcagacctccttactgtcttcagtgatgtttaatttcattactgttactgggtgccaagtgtctttcatttggaagtgaacttactccagttattgaatgtttatcatatcataatttgcatttttccaacattgaaggtattttaaaaagtcactaagagattcattcttttattattcaactacaaaaaaatagtgtaatgatcagaatttaaaatgtgtgattctttttcttctgtaagtatgtattgctatgataaataaaaaatggcaggaccattgtttttattaaaat

SEQ ID NO: 914 - DNA, 3102 bp, Homo sapiens
ttaaagggggcagtgactgcggctgggcgggagtccgggtcggcttggctgagcgggggcggtgctgggcagggcggcggccgctccctcccggactcccggcctcccggcctccctggtcccgcctgggaagggatgcaaggaagccctccggcgctgcgctccgaggcgggagacagcgtccccctccgcccctcgggtcctggcgcctcagagcccggcccaggccgcggaacggtgatgctcgggccggacgggcgggcgcggatccctgcgtcccgctgaaaatgtgtgtctgacatgcaagctcagtggggcagagacccgtggattgctgtgccctgccctccggacctggatcatgaaggtgttgggaagaagcttcttctgggtgctgtttcccgtccttccctgggcggtgcaggctgtggagcacgaggaggtggcgcagcgtgtgatcaaactgcaccgcgggcgaggggtggctgccatgcagagccggcagtgggtccgggacagctgcaggaagctctcagggcttctccgccagaagaatgcagttctgaacaaactgaaaactgcaattggagcagtggagaaagacgtgggcctgtcggatgaagagaaactgtttcaggtgcacacgtttgaaattttccagaaagagctgaatgaaagtgaaaattccgttttccaagctgtctacggactgcagagagccctgcagggggattacaaagatgtcgtgaacatgaaggagagcagccggcagcgcctggaggccctgagagaggctgcaataaaggaagaaacagaatatatggaacttctggcagcagaaaaacatcaagttgaagcccttaaaaatatgcaacatcaaaaccaaagtttatccatgcttgacgagattcttgaagatgtaagaaaggcagcggatcgtctggaggaagagatagaggaacatgcttttgacgacaataaatcagtcaagggggtcaattttgaggcagttctgagggtggaggaagaagaggccaattctaagcaaaatataacaaaacgagaagtggaggatgacttgggtcttagcatgctgattgactcccagaacaaccagtatattttgaccaagcccagagattcaaccatcccacgtgcagatcaccactttataaaggacattgttaccataggaatgctgtccttgccttgtggctggctatgtacagccataggattgcctacaatgtttggttatattatttgtggtgtacttctgggaccttcaggactaaatagtattaagtctattgtgcaagtggagacattaggagaatttggggtgttttttactctttttcttgttggcttagaattttctccagaaaagctaagaaaggtgtggaagatttccttacaagggccgtgttacatgacactgttaatgattgcatttggcttgctgtgggggcatctcttgcggatcaaacccacgcagagcgtcttcatttccacgtgtctgtccttgtcaagcacacccctcgtgtccaggttcctcatgggcagtgctcggggtgacaaagaaggcgacattgactacagcaccgtgctcctcggcatgctggtgacgcaggacgtgcagctcgggctcttcatggccgtcatgccgactctcatacaggcgggcgccagtgcatcttctagcattgtcgtggaagttctccgaatcctggttttgattggtcagattcttttttcactagcggcggtttttcttttatgtcttgttataaagaagtatctcattggaccctattatcggaagctgcacatggaaagcaaggggaacaaagaaatcctgatcttgggaatatctgcctttatcttcttaatgttaacggtcacggagctgctggacgtctccatggagctgggctgtttcctggctggagcgctcgtctcctctcagggccccgtggtcaccgaggagatcgccacctccatcgaacccatccgcgacttcctggccatcgttttcttcgcctccatagggctccacgtgttccccacgtttgtggcgtacgagctcacggtgctggtgttcctcaccttgtcagtggtggtgatgaagtttctcctggcggcgctggtcctgtctctcattctgccgaggagcagccagtacatcaagtggatcgtctctgcggggcttgcccaggtcagcgagttttcctttgtcctggggagccgggcgcgaagagcgggcgtcatctctcgggaggtgtacctccttatactgagtgtgaccacgctcagcctcttgctcgccccggtgctgtggagagctgcaatcacgaggtgtgtgcccagaccggagagacggtccagcctctgatggctcggagatgatggaccgtggaagggaagcgtctgtggggagtgagcgcttagatggccagcagctgctccttctgggaagctcgcaccttggcaacagaacagccctctagcagagcgtcagtgcagtcgtgttatcccggcttttacagaatattcttgtcctattttagaattttccggagtagtttatttgcagtctgttgattatgtgcagtagacccgggacactgcgttttaccgatcaccttgaatgtggtgcctggatgtgccttttttttttttccctgaaattattattaattttctattgtgagttcatcagttcatagtttttttagtaaagaagcaaaattaaaaggcttttaaaaatgtacaacttcagaattataatctgttagtcaaatatttgttattaaacatttctgtaatatgaagttgtaatcctggccgtgagcttggaagcttacttttgattcttaaagcctatgttttctaaaatgagacaaatacggatgtctatttgccttttattgtaacttttaaatgaaataatttcatgtcaatttctattagatatatcacttaaaatatttggttttaaatcacaagaatatgtattctttaataaagataatttatgatcatggtataattaattgaaatttattaaaatctgtttttattaaaaaaaaaaaaaaaaaa

SEQ ID NO: 915 - DNA, 3903 bp, Homo sapiens
agcacttgaagttcaggcagcgagagttgacatggggccagggctgcgcccctggggcgggttgaagacagggtgagtctcttgatattcaggaaatcatcgcgcacccagtcaccagcgttcgggagcctgtcgcagcgggaccgacggaatccggagcaggcgacagggcgcagaagcgggatgtacttctgttggggcgccgactccagggagctgcagcgccggaggacggcgggcagccccggggctgagctactgcaggcggccagcggggagcgccactctctgctgctgctgaccaaccacagggtcctctcgtgcggagacaacagcaggggtcagctgggccgcaggggcgcgcagcgcggggagctgccagaaccaattcaggcattggaaaccctaattgttgatctcgtgagctgcgggaaggagcactccctggctgtgtgccacaaaggaagggtcttcgcatggggagctggttctgaagggcagctggggattggagaattcaaggaaataagtttcacacctaagaaaataatgactctgaatgatataaaaataatacaagtttcctgtggacactaccactccctggcattatcaaaagatagccaagtgttttcgtggggaaagaacagccatgggcagctgggcttggggaaggagttcccctcccaagccagcccgcagagggtgaggtccctggaggggatcccactggctcaggtggctgccggaggggctcacagctttgccctgtctctctgtgggacttcgtttggctggggaagtaacagtgccgggcagctggccctcagtgggcgtaatgtcccagtgcaaagcaacaagcctctctcagtcggtgcactgaagaatctaggtgtggtttatatcagctgtggtgatgcacacactgcggtgcttacccaggacgggaaagtgttcacatttggagacaatcgctctggacagctgggatacagccccactcctgagaagagaggtccacaacttgtggaaagaattgatggcctagtttcgcagatagattgtggaagttatcacaccctggcatatgtgcacaccactggtcaggtggtatcttttggtcatggaccaagtgacacaagcaagccaactcatccggaggccctgacagagaactttgacattagctgcctgatttctgctgaagacttcgtggatgttcaagtcaaacacatttttgctggaacatatgccaactttgtgacaactcatcaggatactagttccacacgtgctcccgggaaaaccctgccagaaataagccgaattagccagtccatggcagaaaaatggatagcagtgaaaagaagaagtactgaacatgaaatggctaaaagtgaaattagaatgatattttcatctcctgcttgtctgactgcaagttttttaaagaaaagaggaactggagaaacgacttccattgatgtggacttagaaatggcaagagataccttcaagaagttaacaaaaaaggaatggatttcttccatgataactacgtgtctcgaggatgatctgctcagagctcttccatgccattctccacaccaagaagctttatcagttttcctcctgctcccagaatgtcctgtgatgcatgattctaagaactggaagaacctggtggttccatttgcaaaggctgtgtgtgaaatgagtaaacaatctttgcaagtcctaaagaagtgttgggcatttttgcaagaatcttctctgaatccgctgatccagatgcttaaagcagccatcatctctcagctgcttcatcagactaaaaccgaacaggatcactgtaatgttaaagctcttttaggaatgatgaaagaactgcataaggtaaacaaagctaactgtcgactaccagaaaatactttcaacataaatgaactctccaacttattaaacttttatatagatagaggaagacagctctttcgggataaccacctgatacctgcagaaacccccagtcctgttattttcagtgattttccatttatctttaattcgctatccaaaattaaattattgcaagctgattcacatataaagatgcagatgtcagaaaagaaagcatacatgcttatgcatgaaacaattctgcaaaaaaaggatgaatttcctccatcacccagatttatacttagagtcagacgaagtcgcctggttaaagatgctctgcgtcaattaagtcaagctgaagctactgacttctgcaaagtattagtggttgaatttattaatgaaatttgtcctgagtctggaggggttagttcagagttcttccactgtatgtttgaagagatgaccaagccagaatatggaatgttcatgtatcctgaaatgggttcctgcatgtggtttcctgccaagcctaaacctgagaagaaaagatatttcctctttggaatgctgtgtggactctccttattcaatttaaatgttgctaaccttcctttcccactggctctgtataaaaaacttctggaccaaaagccatcattggaagatttaaaagaactcagtcctcggttggggaagagtttgcaagaagttctagatgatgctgctgatgacattggagatgcgctctgcatacgcttttctatacactgggaccaaaatgatgttgacttaattccaaatgggatctccatacctgtggaccaaaccaacaagagagactatgtttctaagtatattgattacattttcaacgtctctgtaaaagcagtttatgaggaatttcagagaggattttatagagtctgtgagaaggagatacttagacatttctaccctgaagaactaatgacagcaatcattggaaatactgattatgactggaaacagtttgaacagaattcaaagtatgagcaaggataccaaaaatcacatcctactatacagttgttttggaaggctttccacaaactaaccttggatgaaaagaaaaaattcctctttttccttacaggacgtgataggctgcatgcaagaggcatacagaaaatggaaatagtatttcgctgtcctgaaactttcagtgaaagagatcacccaacatcaataacttgtcataatattctctccctccctaagtattctacaatggaaagaatggaggaagcacttcaagtagccatcaacaacaacagaggatttgtctcacccatgctcacacagtcataatcacctctgagagactcagggtgggctttctcacacttggatccttctgttcttccttacacctaaataatacaagagattaatgaatagtggttagaagtagttgagggagagattgggggaatggggagatgatgatgatggtcaaagggtgcaaaatctcacacaagactgaggcaggagaatagggtacagagatagggatctaaggatgacttggacacactccctggcactgaagagtctgaacactggcctgtgattggtccattccaggaccttcatttgcataaggtatcaaaccacatcagcctctgattggccatgggccagacctgcactctggccaatgattggttcattccaggacattcatttgcataaggagtcaaaccacaccagtcttggattggctgtgagccaattcacctcagtctctaattggctgtgagtcagtctttcatttacatagggtgtaaccatcaagaaacctctacagggtacttaagccccagaagattttgctaccagggctcttgagccacttgctctagcccactcccaccctgtggaatgtactttcacttttgctgcttcactgccttgtgctccaataaatccactccttcaccacccaaaaaaaaaaaaaaa

SEQ ID NO: 916 - DNA, 1865 bp, Homo sapiens
actggttttgcgagtggaggatgcagtctctttgtggttcctggtcctgtttgagaacctggggtcttgaggtggcctgtctgtgcctctcctttgtttcggcctgggctgggtggtgcttgtgagcatttgctccaggatccgcagacgtttcggtggtgacacctgccacgcacacgtgccgcactggggaccaggaacagggatgagtcaggcacagtccttgccttctgggagctcatggtccagaattgaggattcactcaacagatgtcccttgagcgcagaggatctggcagccccttctcagggggccggggcccaccgatgttgcatgctgagggtattttactttaacacccatggtgtgtctaggagactgaggtttccctggtttcatacttgctatctttcctcacgctgtgcctgtccccagcctggaaggataggtcagaaatccttcaaggtagctgtttcaggagatctttttctggccccaggtcaagttctctttggttccgtcctgagctcattacctcctggtgaatcatcacaccatatttattggacacctacagcttgctaagcattatatagaggcctgtctttgaggaaaggaaattaaacaagccctgtacagatcccccaagatgagaagtagctttagttgaggccactgctgctcttagcttctctggcccatctatgcttctagatggaacgtgtgtttaagatgcagattacaggtgtgagccaccacacccagcccaggctcattcttttaacagccttagcgcaactactaatgccaccaagagcggacaggaaggcctgggtcccatccccttgcgaagccagtaggtgaaacatggcagcttggcctggttccacttgcatcgccttttggtcctcacagtaatcctcagagtggcccaggtgggtagttggttggttggtttttttttttcagacggtgtctcgctctctcgcccaggctggagtgcagtggtgcgacctcggctcactgcaacctctgtctcctgggtttaagtgattcttcttctgcctcagcctcccaagtagctgggactacagtcatgtgccaccacgcccggctaattttttgtatttttagtagagacgggtttcaccatattgaccaggctggtctcgaactcctgacctcatgatctgcccgcctcagcctcccaaagtgctgggattacaggcgtgagccaccgcggcccaacagcgggaagtattttttccattgagtagatgagcagaatgagactcaaggggttgctcagatgggccgggcatggtggctcacgcctgtaacctcagcactgtgggaggccaagggggcagatcacttcaggtcgggagttccagaccagcctgttcaacatggcgaaaccccattctaccaaaactacaaaaattagccgggctcacgcctgaaatcccagcactttgggagactgaggaggggtcacctgaggtcaggatgtcaagatcagactggccaacagaatgaaaccctgtctctacaaaaatacaaaaattaggccgggtgccgtggctcatgcctgtaatcccagcactttgggaggccgaggcgggcagatcacaaggtcaggtgatcgagaccatcctggctaacttggtgaaaccctgtctctactaaaaaaaaaatacagaaagttagccgggcgtggcacctgtagtcccagctactctggaggctgaagcaggagaatggcatgaacccgggtggcggcgcttgcagtgagctgagctcccaccactgcactccagcctgggcgacacagcgagatttcccatctaaaaaaaaaaaaaaa

SEQ ID NO: 917 - DNA, 3923 bp, Homo sapiens
ctcctccgctccctgcgctcccgccacctcggcaactccgcgcccgcctcccgcctctgtcggaagcctccgccgcagtaaggctcccggtctcgctgctgtctctttaaatggtggggctacgagccgcccctgcagctgctcccgggcggcacgatgaccgacacccggcggcgggtgaaggtgtacacgctcaacgaggaccggcagtgggacgaccggggcaccgggcatgtgtcgtctggctacgtggagcggctgaagggcatgtccctgcttgtcagggctgagagcgacggttctctacttttagagtcgaaaataaatcctaacactgcataccagaaacaacaggacactctgattgtgtggtctgaagcagaaaattatgacttggcccttagctttcaagaaaaagctggatgtgatgaaatttgggagaaaatatgtcaggttcaaggaaaggacccttccgtggacatcactcaggaccttgtggatgaatctgaagaggagcgttttgatgatatgtcatcgccaggcttagaattgccatcttgtgaattaagtcgccttgaagaaattgcagaacttgtggcatcatctttaccttcacctcttcgtcgtgaaaaacttgcactggcactagaaaatgagggttatattaaaaagctcctggagctttttcatgtgtgtgaagatttggaaaatattgaaggactgcaccacttgtatgaaattatcaaaggcatctttctcttgaatcgaactgctctttttgaagttatgttctctgaagaatgtataatggacgtcattggatgtttagaatatgatcctgctttatcacaaccacgaaaacacagggaatttctaacaaaaacagccaagtttaaagaagtgattcccatatcagatcctgagctgaaacaaaaaattcatcagacatacagagttcagtatatacaagatatggttctaccaactccttcggtctttgaagaaaacatgttatcaacacttcactcttttatctttttcaataaggtagagattgttggcatgttgcaggaagatgaaaaatttctgacagatttgtttgcacaactaacagatgaagcaacagatgaggaaaaaagacaggaattggttaactttttaaaagaattttgtgcgttttcccaaacgctacagcctcaaaacagagatgcttttttcaagactttgtcaaacatgggcatattaccagctttagaagtcatccttggcatggatgatacacaggtgcgaagtgctgctactgatatattctcatacttggttgaatataatccatccatggtacgagagtttgtcatgcaggaggcacaacagaatgatgatgatattttgctcatcaacctcattatagaacatatgatttgtgatacagatcctgaacttggaggagcagtccagcttatgggcctgcttcgaactttagttgacccagagaacatgctagccactgccaataaaacagaaaagactgaatttctgggtttcttctacaagcactgtatgcatgttctcactgctcctttactagcaaatacaacagaagacaaacctagtaaagatgattttcagactgcccaactattggcacttgtattggaattgttaacattttgtgtggagcaccatacctaccacataaagaactacattattaataaggatatcctccggagagtgctagttcttatggcctcgaagcatgctttcttggcattataaaccgtgtcagcatggttgcctggctacctgctcatgagggacttgattaatagcaaattggcaatttaacgagccacttccatgatctccaaagaaaccaaaatacaaacacaatatttaatcttgccaaccgaagacgatgtgactgcatgaagtgcccttcgttttaaaagaaagattattggattaaaagatgagttttacaaccgctacataatgaaaagttttttgtttgaaccagtagtgaaagcatttctcaacaatggatcccgctacaatctgatgaactctgccataatagagatgtttgaatttattagagtggaagatataaaatcattaactgctcatgtaattgaaaattactggaaagcactggaagatgtagattatgtacagacatttaaaggattaaaactgagatttgaacaacaaagagaaaggcaagataatcccaaacttgacagtatgcgttccattttgaggaatcacagatatcgaagagatgccagaacactagaagatgaagaagagatgtggtttaacacagatgaagatgacatggaagatggagaagctgtagtgtctccatctgacaaaactaaaaatgatgatgatattatggatccaataagtaaattcatggaaaggaagaaattaaaagaaagtgaggaaaaggaagtgcttctgaaaacaaacctttctggacggcagagcccaagtttcaagctttccctgtccagtggaacgaagactaacctcaccagccagtcatctacaacaaatctgcctggttctccgggatcacctggatccccaggatctccaggctctcctggatccgtacctaaaaatacatctcagacggcagctattactacaaagggaggcctcgtgggtctggtagattatcctgatgatgatgaagatgatgatgaggatgaagataaggaagatacgttaccattgtcaaagaaagcaaaatttgattcataataatggcaacggcctaggatcagtacctgttgaaaaaaactggttctccacccctcccccatacaaaatccacaacaaagcgcagtggtctcttgtgaatgactgacacagatcagcctcttacacttgacttctgctcatcaagtgccaattcaatggagcaggaggaggggatatcatatatttaggggaaagacttaagcctttgagctctccagcttggaccacacattgcccttttctcagggaaggaaatggaaacaaaaagccaacagggcaggggttttgtaagtggaactctggattgactggtcagttgctacaatcagaatatgctttcttggaccatgtttgagactcagaagaatgggcctttctgccataattcttcactagtcaagaatgccagcagtttctttgtataaagagacctgcctttaaaatcatacattctgaacattttagtcaagctacaacaggtttggaaaacctctgtgggggaggggcgagtataaagttttcctcttttttaactgttccctttgcccttcaaactgcagatatttttttttttaagtggggacttctccctacttgattaaagattgagtggaattctagatgtggtcatttgtgtcataatttttttgttttattttgtttttgattttttttttcctcccctgagtgtatgcttagttgttgagtatatatatttgggaccattaaaactttttttgatgtaatataacctaacgttgtgctggtacctgttttaccatgtgtaatttttgttctacatcacagttcttaatttgtttagagttttatgaaagatggtatagtttttattgacaaaagcaaagtaatcttacaactatgtgcatacaaaagcaatactattttgtgactaaatattttatattaaaatttacatcagcaactgtcttgagaattcagggaaatagaatggaatttaaaacttcaacagttttgttaaatctagaaacatgaaattagtattccaaagagattctgaaatttcttttcttggggaaatgacggtacattaaatcaaaattgaggatggatgatttaaaaacatttgacttttgaataataaaaagaaaagtgaagagtaagagaaa

SEQ ID NO: 918 - DNA, 1461 bp, Homo sapiens
tttaaggcgccgggtttccggggctcctggccccgcttattccgcgggggtcggcggggtcggcctgggcgcccgcgccgccgctgcgctttgtccgctgggcacactgcttctgggaggggcgggcagacatggtggcggccgccgccccctcctcggccctagcatgccgcggccgcctcgcggctacccggcttgccggtcccgagcggcagccccggggtggcgatggggtcgcgccgaggcagcggaggttctgcgggcgactggaggttggcagtgggcgggagaaagaggaaggcaggcgcggctgggcctcggcctctggcgccgcggtaccctttgtctcggcagcctgacggccccgccgggctctccggagaggggaacgggcggcgagggtggcgggtcctgggcgccctgtgctgcggggccgagaggcgctcgggtcgcggcgggaccggccggaccagacagggttaatggaagagcctggccagtcccgcgcggggcccccgcagcgacagccttggccgcggggactggagtcctgagggggagaagcctgccgttctgaaggctcgggacttctgccccaaagacttcgccgccgagaactgcgggtgcactgcctcagggaagaagttgagaattttgccaggtcatctctgccagggcacagttcatcactgtgtgtttagtgtgtttcggtgaagctctccaagtgtgttgaatcagcgtgcctagcctcaagggtgcatcgtgaaaactgaaaccaaaggaatgatacaggcctgctttgtgtgtgtcttcccactttaagcttgttttcagtacaaatactcttgctttaaacctgattggactgtggcgagcggacatctgttcaaaggaggggccgagaccacagtacttctgaagggggcttgataatgtggaaacattttaagttttctctccggactgttttgctctctcaattcaggcaagttactgaagtacgttttttatctagaaaaaggtttgatgtagtctgtaaatggtccttgtaaagtacattgccatctcagaattaaaagatccactctcatttattatgcagaagttagtggtcattctttcctgtagatagtttatctcatgtaaagacccacccagcttggtttaaatttttttctcactgacgtataaccatcagctttgatacttccattttcaggctcagactttgaatttaaggaaactaaagatgactttattttcttttctcttggtttttttttccaaaaacaaaaaataaatccattacatgttaacatagatgataagagtgacatcttgcatttttgcaaatctttttaatgcctggtttaatagaagattctcagatctacgtcagactgttgtggttagcacaccatgtaacctctggaacactccactgtacactcatactttttt

SEQ ID NO: 919 - DNA, 4520 bp, Homo sapiens
atgggtaaggcgagcgggccgaaaccgaacgctaggccctcagtcccgggctgagggccgcggccaggcggggtggactgggagctgggggagacgccgaggccgccagtcggaactggggcccgaacccaggatgggcggggactgcctgggactcgggggctcccggggtcgtcatggcaacgcgccccctcccttgttccggcccgttcccgcccgggttctgaggcatagtggccgagggctcgaggtgccacggcgtccaggagcgaggacagggccaggcagggtgtcactcccgggtcggggagcaggcggggaggggcgatgacttttcaggtttgggggtggcggagggaagacgcatctcaggttttggcctgggtgcctgacgccgagggcgggagacggggaatgctgacgcgcaggagcctggctacaaaagaccccacagctgtagagagagcaaacttgttaaacatggctaaactgagtatcaaaggactcattgaatctgctctgagctttggccgcactttggattctgactatccccccttgcagcaattctttgttgttatggaacattgcctgaaacacggtcttaaagtaagaaaatcatttttgagttacaacaaaaccatctggggccctttggaactggtggagaagctgtaccccgaagcagaggaaataggagctagtgtccgggatctacctggtctgaagacccctctgggtcgagcaagagcgtggcttcgattagccctcatgcaaaaaaaaatggccgattacttacgttgcttaattattcagagggatctcttgagtgagttttatgagtatcacgcactaatgatggaagaagaaggagcagtaattgttgggctgctggttggcctgaatgtgatcgatgctaatctgtgtgtgaagggagaggatttagactcacaagttggagtgattgatttttctatgtatttaaagaatgaagaagatattggaaataaagaaaggaatgttcaaattgctgccatattagaccaaaagaattatgttgaagaattaaatagacaactgaacagcacagtcagcagcctccattcaagagttgattcattagaaaagtcaaatactaagctgattgaagagttagcaatagcaaagaataacatcattaaactccaggaagaaaatcatcaattacgaagtgaaaataaattgattttaatgaaaacacagcagcacctagaggttaccaaagtagatgtggaaactgagcttcaaacatataagcattctcgtcaggggctagatgaaatgtacaatgaagccagaaggcagcttcgagatgaatctcagttacgacaggatgtagagaatgagctagcagtacaagttagtatgaagcatgagattgaacttgccatgaagttgctggagaaagatatccatgagaaacaagatactctgataggccttcgacaacaactagaggaagttaaagcaattaacatagagatgtatcaaaagttgcagggttctgaagatggcttgaaagaaaaaaatgaaataattgcccgactagaagaaaaaaccaataaaattactgcagccatgaggcagctggaacaaagattgcagcaagcagagaaggcgcaaatggaagctgaagatgaggatgagaaatatctacaagaatgtctcagtaaatctgatagtctgcagaaacaaatctcccaaaaggagaaacagctggtgcaactggaaactgacttgaagattgagaaggaatggaggcagactttgcaggaagatcttcaaaaggagaaagatgccttatctcatcttagaaatgagactcaacaaatcattagtcttaaaaaagagttccttaacctccaggatgaaaatcagcagttgaaaaaaatatatcatgaacaagagcaagctcttcaagaactcggcaacaagcttagcgaatcaaaacttaaaattgaagacataaaagaagccaacaaagcattgcagggactggtttggctgaaagacaaagaagcaacacattgtaaactttgtgaaaaggaattctcactctctaagagaaagcaccactgtagaaattgtggggaaattttctgtaatgcctgctctgacaacgaactacctttgccttcttcaccaaaaccagtacgggtttgtgattcctgtcatgcactgctcattcagagatgctcatctaacttgccctgagactccagaactaaatccttatgtatgaaattacctacaatgaatgttatgatgttgtatacaaaggtaaccagacagctctccttaagcggctttcggtcagtatttggtaccagtttatcttctacatattcagctcatggaaattacaagttatatatttccttccccattgtttttcaaaatgtattttcaacagagcatgcttaaaaatcatgtaactcattaaaaggccagagagcagagctaacacaacttgccttatcttgtaaaggccttaaaaataaggcttcagattgtttttttcttctgaattctgtcaatttggtatttgatggtgcctgcagttctcttaatgcactttaaagcttcacagttctgaaactggaaacgcataaaacttttaaaattattaatattctaattcaacagattttcattatctttgtaagatttcaactatatttatttgccctttcttctccccctctccctttgcctcttgcattagacagggccaatattttgtcctacaaaatttcctcttggtctctttaaaaatcagttattgtcgtgcttgctgaagattttcagctacagtggattaaattaaagggggcattatttggcctcggcctctacttttttccttttaatcttgaaaggaagttacatataaccatctttcttttcctgatttataaatcttcccatatgctgtttcattaaattgctgtttttttaaggggtgactcagaccccaattcaaagatgaaaacacaaatccttccccagaaaaaaaagtatgtaatagtaggggatgttacaggctccttataaaggtcctctcctctaagcattaaaagtgagaaaaaaatcaggactttgctttggtaatgtattagagttcagttcaaaaaattttgtattaacattttcattggagtaaattttaggaagtatcacattgtagtggcctacctgtatacatccacagtaaaatttcaccatgtccattgagcacctctatgccaagggtgttgagatgatgaaatatacacttgacctatttctttttttttcgagatggagtttcactcttgttgcctaggctggagtgcaatggcacgatctccacctcctgggttcaagcaattctcctgcctcagcctcccaagtagctgggattacaggcgtgagccacagcacctggccagtacacttgacctatttcaagctgactcaatgaacactaatccaagttatattgcttatggcatactaagaatttaacttgtataaattacctctgaatagttacataaacactatcaccattcagtatcctattttttacattaatttttaaccatgcactttaagtttgtgagcctataaaaaatacatagaaaatttatggattaagagcattatatttagtggttaatcctaggtacctccctgcctacaaaggagttcttattaatactgcaggatcttttcttcatgaatatatgcttccatgaaatttaaatttttctgaatagcctaagtatgaaatgaatattttacttgaagatctattttttccaaaacccgtaaatttccagtcagcttttgaggtgtcagatgtgacacagatttctagatggtctttcttgaatactgacagaaatgtcctcaagagaggattatattcttgaaccattttgtattgataggtgggatgggctaacatttttatgattactgaataaacaaaaaatgaaattttcaaatatgcttttttattactgtgcttagaacaaattttaaaatgtgacttaagttgcttaaattccaaggctaatttcattcaacaaaccatgattttgtcatcctttaagtaagtttctcacttttcaaaactcatgtatcaacactgactgacttgctttttttttttttttttttttttttaggcagcttttatgacagcaacttgctccatgtagttttggcttatttaaaaactatactaactttggatttttctgttacaagacttttaacaatctgtatttcgtgattgtgaactcgtattcattttacttttcaaaaacagacttaacataccattccctcacctagcagtactaccacaataatgctatcatggtgccagggaattacaattgtaattcttctaacctataatgtttaaaaaataaaatgtgaattttatgaactaaataaatatttggaaaattaaaaaaaaaaaaaaaaaa

SEQ ID NO: 920 - DNA, 1894 bp, Homo sapiens
actctcctcccccgagcggcagcggcagcggcggcggcggcggctgctgcgggcgctgaatgagagacggtgactgttcgggtcgacgagtgctactctaggcggcggcggccgtggcggtgaagcgtggggccggcatcgtctttccgtcctctgagacgacggccgcggctgcacaggaataatgtatttgtggccttggacatgaggcagtcagtcctctgttgctgttaacataaggtcagggactgatgaggaaagcatggacctaatgaacgggcaggcaagcagtgtcaatattgcagctactgcttctgagaaaagtagcagctctgaatccttaagtgacaaaggctctgaattgaagaaaagctttgatgctgtggtattcgatgttcttaaggttacaccagaagaatatgcgggtcagataacattaatggatgttccagtatttaaagctattcaaccagatgagctttcaagttgtggatggaataaaaaagaaaaatatagttctgcaccaaatgcagttgccttcacaagaagattcaatcatgtaagcttttgggttgttagagagattcttcatgctcaaacattaaaaattagagcagaagttttgagccactatattaaaactgctaagaaactgtatgagctgaataaccttcatgcacttatggcagtggtttctggcctacagagtgccccaattttcaggttgactaaaacatgggcgttattaagtcgaaaagacaaaactacctttgaaaaattagaatatgtaatgagtaaagaagataactacaaaagactcagagactatataagtagcttaaagatgacaccttgcattccctatttaggtatctatttgtcagatttaacatacatcgattcagcatacccatcaactggcagcattctagaaaatgagcaaagatcaaatttaatgaataatatccttcgaataatttctgatttacagcagtcttgtgaatatgatattcccatgttgcctcatgtccaaaaatatctcaactctgttcagtatatagaagaactacaaaaatttgtggaagacgataattacaagtaggttggatcttcaaaagtggtttgtataactttgtcctgtcctccacctttctatccctatgtatttaaacatctaaatcctacatggtatcatacaaaggactaatccagtggtttacagcagtaaaggtactaacatgtattacttcttaatcacttgttatgattgagccaatatacaaatacctcatctgttctttttaatattttatctctgtttgtagagagctaacgtttgatagttctaatttaaatttcttcctttcccccatattcaatcattgaatccttatagaatttgtcttttaatagacagaaaaattaatgaaactttttaaaatagaaaaattactcttctttaatgctaagtattgacacatcgttgtttgtttttcattgtttttgcggattgagagacttggtccatcttgtctcaggagaagaaacctttctccaatgtagcagaattatcctcttccctgtattatagcaagttctttattaaagatttttgaggccgggcacagtgactcacgcctgtaaccccagcactttgggaggccgaggcgggtggatcacttgaggtcaggagctcaagaccagcctgaccaatatagtgaaacactgtctgtactaaaaatacagaattagccgggcatggtgcatgcctgtaatcccagctgcttgggaggctgaggcaggagaatcacttgaacacaggaggcagaggttgcagtgagccgagagtgcaccattgcactccagcctgggcaaaaagagcaaaactccgtct

SEQ ID NO: 921 - DNA, 6791 bp, Homo sapiens
gtttccgggtgagggttgggctccttggtaccatgtgggaagcgctgtgaagagttgttgccttccaagatatacccaaattcccagttccagcccgtgtcattaaaactccgctggcgtgaaagatgacgtccttagcccagcagctgcaacgactcgccctccctcaaagtgatgccagcctcttatctagagatgaagttgcttctttgttatttgaccctaaggaagcggccacaatcgacagggacaccgccttcgccattggatgtactggcctggaagagttgcttggaattgatccttcctttgagcagtttgaagcaccgttgttcagtcagctagcaaaaaccttggagcgaagtgttcagaccaaagcagtaaacaaacagttggatgaaaacatttcattattccttattcacttgtcgccttacttcctgcttaagccagcacagaagtgtctggagtggttgattcacaggttccatatacatctctataatcaagatagcctcattgcttgtgttctgccataccacgagacaagaatatttgtgcgagtcatacagcttctaaaaattaataattcaaagcacagatggttctggttgttgccagttaagcaatctggagtgccgttagctaaaggaactttgattacccactgctacaaagatcttggattcatggatttcatttgcagtttggtgacaaaatctgtgaaggtttttgctgagtacccgggcagctcagctcagttgagggtgctcttggctttctatgcttctaccatagtgtcggcgctggtagctgcagaggacgtatcagacaatatcatcgccaaactatttccctatatccaaaagggattgaaatcatctttaccagattacagagctgcaacatacatgataatatgtcagatttctgtgaaagtgaccatggaaaatacctttgtgaattcattggcatcacagatcatcaaaacattgaccaagattccctctttgatcaaggatgggttaagttgcttgatagtgctcctgcagagacagaagccagagagccttgggaaaaagccattccctcacttatgtaatgttcctgatcttattacaatacttcatgggatttctgaaacttacgatgtcagtcctcttctgcattacatgcttccccatctggtcgtctccatcattcatcatgttacaggagaagaaactgaaggaatggatggtcaaatctacaagagacacttagaagctatacttacaaaaatatcactgaagaacaacttagaccatttgttggctagccttctatttgaagagtatatttcatatagttcacaggaagaaatggattctaataaagtgtctttgcttaatgaacaatttcttccactcattaggcttttagaaagcaaataccccagaacattagatgttgtattagaggaacacttaaaggaaattgcagatctgaaaaaacaagagcttttccatcagtttgtttctctttctacaagtggaggaaagtatcagtttttagcagattctgatacttctttgatgctcagcctgaatcatccacttgctcctgtgagaattctggccatgaatcatttgaaaaagatcatgaaaacatcaaaggagggtgttgatgaatctttcataaaagaagctgttttagcccgattaggtgatgataatatagatgttgttttgtcggctataagtgcttttgagattttcaaagaacacttcagttcagaagtgacgatttcaaatcttctgaatctctttcaaagagcagaactttcaaagaatggagaatggtacgaggtacttaagatagccgctgacatattaattaaagaagagatactgagtgaaaatgatcagttgtcaaatcaggtggttgtatgtttgctgccatttatggttatcaataatgatgatacggaatctgctgagatgaaaattgctatatatttatcaaaatcaggaatctgctccctgcaccctctattaagaggctgggaagaagctcttgaaaatgtaattaaaagcacaaagccaggaaaactaatcggtgtagcaaatcagaagatgattgagttgttggctgataatataaatttaggagatccttcttcaatgttaaagatggtggaggatttgataagcgtgggtgaggaggagtcctttaacctgaagcagaaagtaacgtttcatgtgatcctgtctgtgctcgtctcttgttgttcatctttaaaagaaacccactttccatttgcgataagagtcttcagtttgttgcagaaaaaaataaagaagcttgaaagtgtcattactgcagtggaaatcccctcagaatggcacattgaactgatgttagacagagggatcccagtggagctgtgggcacattatgtagaagagctcaacagcactcagagggtggccgtggaggactcggtttttcttgtattttccttgaaaaaatttatttatgcactgaaagctcctaaatcttttcctaaaggtgatatatggtggaatcctgaacaactgaaagaagacagcagggactatctgcacttgctcattgggctgtttgagatgatgctcaatggtgccgatgctgttcatttcagagttctgatgaaacttttcataaaggtgcatctagaagatgtttttcagttattcaagttctgttctgttttatggacctatggttctagcctttcaaatccactaaactgcagtgtgaaaacagtgctgcagactcaagctctttatgtgggctgtgcaatgctttcttctcagaagacacagtgtaaacaccaactggcatccatatcttctccagtggtgacatctttactcattaacctgggaagccccgtaaaagaagttcgtagggctgccattcagtgtctccaggccctcagtggagtggcatccccgttttatctgataatagatcatttgatttctaaagcagaggagatcacttcagatgctgcctatgttattcaggatttggctactttatttgaggaactacagagagaaaagaaactgaaatctcatcagaagttgtctgaaactttgaaaaacttacttagttgtgtgtatagttgcccatcttatatagcaaaagatttgatgaaagtacttcagggagtcaacggtgagatggtgctttctcagctattgcctatggctgaacaactgctagaaaagatccagaaggagcccacagctgtgctgaaagatgaggccatggttctgcatctcactctgggaaagtataatgaattttcagtttcccttttaaatgaggatccgaagagtctagatatatttataaaagctgtgcacacaacaaaggaactttacgcgggaatgccaaccattcagatcacagcccttgaaaagattacaaaaccattttttgcagccatatcagatgaaaaagttcagcagaagcttttaagaatgttgtttgatttattggtgaactgtaaaaactcacattgtgctcagactgtcagcagtgtttttaaagggatttccgttaatgctgaacaagtccgaatagaactggagccaccagataaagctaaacccttgggcacagttcagcaaaaaagaaggcaaaaaatgcagcagaaaaaatcacaagatctagaatctgttcaggaagttggaggttcttactggcaaagagtaactctcatcctggaattactgcagcacaaaaagaagctcagaagtcctcagatattggtgccaactctttttaacttgctatcaagatgtttagaacccttgccacaagagcagggaaatatggaatacaccaaacaattaattcttagttgtctgctcaacatctgccaaaaactatctccagatggtggcaaaatacccaaagatattttagatgaggagaagttcaacgtggagttgatagttcagtgcatccgcctttcggagatgccgcagacccatcaccatgcccttttacttttgggcactgttgctggaatatttccggataaagttttacacaatatcatgtctatttttacatttatgggagccaatgtcatgcgcctagatgatacttacagttttcaagttattaacaagacagtgaaaatggttattcccgcacttattcagtctgatagtggagattctatagaagtttcaagaaacgttgaagagattgtggtaaaaatcattagtgtatttgtggatgcgctgccacacgtcccggagcacaggcgcctgcccatccttgttcaacttgttgatacactgggtgcagagaaattcctctggattctcctcatcttgctttttgaacagtatgtcacaaaaacagtgctggcggctgcctatggcgaaaaggatgctattttagaagcagacactgaattttggttttcagtctgttgtgagtttagtgtccagcatcagatacaaagcttgatgaatatcctccagtacttactaaagctgccagaggaaaaagaagaaaccattcccaaagcagtgtcatttaataagagtgaatcacaagaagaaatgctacaggtttttaatgtagagactcacactagcaagcaactgcggcattttaaatttttgtcagtgtccttcatgtctcagctcctgtcttccaataattttctgaaaaaggtagttgagagtggtggtcctgagattttaaaaggccttgaagagaggttgctggagaccgttctcggctatatcagtgcagttgcacagtccatggaaaggaacgcagacaaactcaccgtgaagttctggcgcgcgctccttagtaaagcttacgacctgttagataaggtcaatgccttgctgcccacagagacattcattcctgtgatcagagggctggtgggcaatcccctgccatctgttcgccgcaaagcgctggaccttttgaataacaagctgcagcaaaatatatcctggaagaagacaatagttacccgtttcctaaaactggttccagaccttttggccattgtgcagcgtaagaaaaaggaaggggaagaagaacaagcaatcaacagacagacagcattgtataccttaaagcttttatgcaagaattttggtgcagaaaatccagatccttttgtcccagtgctgaacactgctgtgaaactgattgctccagagagaaaggaggagaagaatgtcctgggaagcgcgctgctgtgcatagcagaggtgacctccaccctggaggcgctggccatcccccagcttcccagcctgatgccatcgttgctgacaacaatgaagaacaccagcgagctggtctccagcgaggtctacctgctcagtgccttggctgctctgcagaaggttgtggagactctcccgcacttcatcagcccctatctggaaggcattctctcccaggtgattcatctggagaaaatcactagtgaaatgggttctgcgtcacaggctaatatccgtctcacatctcttaaaaagacactggctaccacacttgcaccccgagtcctgttgcccgccatcaaaaaaacttacaagcagattgagaagaactggaagaatcacatgggtccgtttatgagcatcttgcaagagcatattggggtgatgaagaaggaagagctcacctcccatcagtctcagctaaccgcctttttcctggaagccctggacttccgagcccagcactctgagaacgatctggaggaagttggaaaaacggaaaattgtatcattgactgtctagtagccatggttgtcaaactttccgaggtcacattcaggcccctgttcttcaagctgtttgattgggctaaaacagaagatgccccaaaggacaggttgttgacattttacaacttggcagattgcattgctgaaaagctgaaagggctttttactctgtttgccggccacttagtgaagccttttgctgacaccttgaaccaggtgaacatctccaaaacagatgaagcattttttgactctgaaaatgaccctgaaaagtgctgcttgctgttgcagtttattttgaactgtttatacaaaatcttcctttttgatacccagcattttataagtaaagagagagcagaagccttgatgatgcctctggtggatcagctggaaaacaggcttgggggagaagagaaattccaggaacgggtgacaaagcacctgataccatgcatcgcacagttttcggtggccatggcggatgactctctttggaaaccactgaactaccagattctgctaaagacgagagactcctcgcctaaggttcgatttgctgctttgattactgtgttagcactggctgaaaaactaaaggagaattatattgtcttgctaccagaatccattcctttcttagcagagttgatggaagatgaatgtgaagaagtagaacatcagtgccaaaagactattcagcaactggaaactgtcctgggagagccactccagagctatttctaagactttctgtggtgtttcatactctactcagagttcacactcatatttcatatttttatttttgggtgttgggtgccatgttacttttggtgccttaatacacctacttggattacttacaaatgttttatcacttctttacaaaatccccacctggcttgtgctgccacataagcctctcctgcctatcgtatagagctgcagaaagagtaaatgatacacggtattttt

SEQ ID NO: 922 - DNA, 3031 bp, Homo sapiens
gcgctatttccggtcatacccggaaacacgagtccaagctgcagctggcagggattgcggggtgccggccgtctgagtttttttaaaactgctcgccgcgaagtctgtctgcagccaaaatgtccaacagaaacaacaacaagcttcccagcaacctgccgcagttacagaatctaatcaagcgagacccgccggcctacatcgaggagtttctacagcagtataatcactacaaatccaatgtggagattttcaaattgcaaccaaataaacccagcaaagaactagcagagctggtgatgtttatggcacagattagtcactgctacccagagtacctaagtaattttcctcaagaggtgaaagatcttctctcctgcaatcataccgtattggatccagatctgcgaatgacattttgcaaagctttgatcttgctgagaaataagaatctcatcaatccatcaagcctgctagaactcttctttgaactttttcgttgccatgataaacttctgcgaaagactttatacacacatattgtgactgatatcaagaatataaatgcaaaacacaagaacaataaagtgaatgtagtattgcaaaatttcatgtacaccatgttaagagatagcaatgcaaccgcagccaagatgtctttagatgtaatgattgaactctacagaaggaacatctggaatgatgcaaaaactgtcaatgttatcacaactgcatgtttctctaaggtcaccaagatattagttgccgctttgacattctttcttgggaaagatgaagatgaaaaacaggacagtgactccgaatctgaggatgatggaccaacagcaagagacctgctagtacaatatgctacagggaagaaaagttccaaaaacaagaaaaagttggaaaaggcaatgaaagtgctcaagaaacaaaaaaagaagaaaaaaccagaggtgtttaacttttcagccattcacttgattcatgatccccaagattttgcggaaaaactactaaagcagcttgagtgctgtaaggagaggtttgaagtgaagatgatgctcatgaaccttatctccagattggtgggaattcatgagcttttcctcttcaatttctatccctttttgcaaaggtttctgcagccccaccaaagagaagtaaccaagatccttctgtttgctgcacaagcatctcatcacctagtacccccagagattattcaatcattgcttatgactgtggcaaacaattttgttaccgacaagaactctggagaagtcatgacagtaggaatcaatgctataaaggagataacagctcgatgtcctctggccatgactgaagaacttctccaagacctggctcagtataaaacacacaaggataagaatgtaatgatgtctgctagaactttgattcacctcttccgaacactgaatcctcagatgctgcagaagaaattccggggtaagcctacagaggcctccatagaagcaagagtacaagaatatggagaattagatgctaaagattacattccaggagcagaagttctggaagttgagaaagaagagaatgctgaaaatgatgaagatggatgggaaagtaccagtctcagtgaggaggaggatgctgatggtgaatggattgatgtgcaacactcttccgatgaagaacagcaagaaatctccaagaagctgaacagcatgcccatggaggagcggaaggccaaagctgcagccatcagcactagccgagttttaactcaggaagacttccagaaaatccgcatggcccaaatgagaaaagaacttgatgctgcccccgggaaatcccagaagaggaaatacattgaaatagacagtgatgaagagcccaggggtgaattactttctcttcgggacattgaacgccttcataaaaagccaaagtctgacaaagagacaagactagcaactgcaatggctggaaagacagaccgaaaagaatttgtgaggaagaaaaccaaaacaaatccattttccagttcgacaaataaagagaagaaaaaacagaagaactttatgatgatgcggtatagccagaatgtccggtcaaaaaataagcgttccttccgagaaaaacagttggcactacgagatgcacttttgaaaaagagaaaaagaatgaagtaacttcctggcaagttttccattcctagaagaatgctaagtttgtgtccttgctctgaaaattggtaaatcaagcatgtttgtttacattaaaaagtccagacacactgtattgtgaaaactgctgaacatgtggcagcaattttgtgtttttattttggagacggctaatggtaggaatgttaatgtaaatagtggtggtaatgtaaaatcatttcatttatcattcatgcaaaaaaaagtatgtattgagtgcctattcattgtcactgtagatgcaaaacgaatgagctgtaaccccttcactcaaggcattgacagcttagctgtgagggtggacacacatatgtgtatttacagtgcagtgtaaatagttctgtagtagaggttaactccatatttctgtgaggtcactgaggccttatggactaactctgtgaggataggagttatatattcttataagacaaaacaaaacaggacaatgttacaagagtaagaggttcttacttgtacataggctttcctgctgaaaacaggcccctgctgtacagattttgggtacataatttagctcttttagtcaatccaagagatttaagtgacccccccccccccgtgttttttttgtttttgtttttgttttgaatgccatgtaaaggctttttggttaagacctcacttttaaaactgccttaagtataaatagtacctttggaatatatttagttcatcatttgagctgccttcatactggtttcctcagccttccttcagcctgtaatattttcagcccactgtttaccttgtctcaataaaaggtttctaatgccaaataaaaaaaaaaaaaa

SEQ ID NO: 923 - DNA, 7174 bp, Homo sapiens
agcggcggtagcagtggcaacggcagcaagaggaccggccgccccatagacccccccgcgcaccacccccgccgcttcctctgcttgggtgcccccccggtctgacttcccttttctcccacctttcccggcaccgcgggaaaagcagcgcagggcagagcaggcagggagggcggccggagcccggacacgggagcctcccagtcagttcaagacccgacatgagggaaaagggacgtaggaagaagggcaggacctgggcggaggccgccaagacggtcttagaaaaataccccaatacacccatgagtcataaagaaattcttcaagttatccagagagaaggactaaaagaaatcagaagtgggacttctcctcttgcatgcctgaatgcaatgcttcacacaaactccagaggtgaagagggcatcttctataaggttccaggtagaatgggagtatatactttgaagaaagatgtgccggatggggtgaaagagctgtcagaaggttcagaagaaagcagtgatggtcagtcagattcccagagttctgagaacagcagcagcagcagtgatggtggcagcaacaaggagggaaaaaagagcaggtggaaaaggaaagtatcgtcgtcctccccgcagtcaggctgcccatcacccaccattccagcaggtaaagtcatttctccatcacagaagcacagcaagaaggcactaaagcaggcgctaaagcagcaacagcagaagaagcagcagcagcaatgcaggccaagcatatccatctcctccaaccagcatctctcactaaagactgtcaaagcagccagtgactctgtacctgccaaacctgcaacatgggaaggaaagcaatctgatggacagacaggcagccctcaaaactcaaactccagcttttcttcctcagttaaagtggaaaatactttactaggcttggggaagaagtcattccagagatctgagagactccataccagacaaatgaaaagaactaaatgtgctgacattgacgttgagacaccggactccattctggttaatacaaatctgcgagcactgatcaacaagcacacattttcagtccttcctggagattgccagcaacgactgcttttactactcccagaggtagatcgacaggttggtccagatggtttaatgaagttaaatggctcagcccttaacaatgaattcttcacttcagcagcccaaggctggaaggaaagactctcagaaggtgagtttacacctgagatgcaggtgagaattcgacaagagattgagaaggagaaaaaagtggagccatggaaagaacaattctttgaaagctactatgggcagagttctggcctgagccttgaagattctaagaaattgacagcttctcccagtgatcccaaagtaaagaaaaccccagctgaacaaccaaaatccatgcctgtgtcagaggcctctcttatcagaatagttccagtagtctcccagtcagagtgtaaagaagaagcattgcaaatgtcatcaccaggcagaaaagaagagtgtgaaagccaaggtgaagtgcagccgaacttctccacatcttcagagcccctgctttcctcagctctcaatacacatgagcttagcagcattcttcccatcaagtgcccaaaggatgaggatctcttggagcagaagccagtcacctctgctgaacaggaatctgagaagaaccatctcaccacagcttctaattataacaaaagtgaaagccaagaatctttagttacatcgccaagcaaacccaagagtcctggggttgaaaaaccaatagtgaagcccacagcaggagcgggtccacaggagactaatatgaaagaacctctagcaactcttgttgatcagagcccagaaagcctcaagaggaagtcttccctcacccaagaagaggcccctgtgagctgggagaagaggccacgtgtcactgagaatcgccagcaccagcagccatttcaggtctcaccacagccctttctcaatagaggggacagaatccaggtgcgaaaagtaccacctctcaagatcccggtctccagaatctcccccatgccgtttcatccatcgcaggtctctcccagggctcgttttccagtctccatcactagtcctaacagaacaggagccagaactcttgcagacatcaaagcaaaagcccaactggtcaaagcacagagggcagcagctgccgctgccgccgcagctgctgcagccgcctcagttggagggaccattccaggacctggcccagggggtggacaaggtccaggagagggtggtgaagggcagactgctagaggaggcagtccaggctcagacagagtcagtgaaactggaaagggccccacactggaactggcaggaactggaagcaggggaggtacgagagagcttttaccctgtggtccagagactcagccccagtctgagaccaagaccaccccaagccaggcacagcctcatagtgtctctggagcacaactacagcaaacccccccagtgcctccaacacctgccgtcagtggagcatgcacaagtgtcccatcaccagcccacatagagaaattggataatgaaaaactgaaccccaccagagcaacagccacagtggcctctgtcagccatccacaagggcccagtagttgcagacaggagaaagcaccttctccaacaggtcctgctctaatctcaggtgcctcacctgttcattgtgcagctgatggcacagttgagctcaaagcaggtcctagtaagaatatacctaacccttcagcctcatcaaagacagatgctagtgtgccagtggctgtaactccctcccctttaacatctttattgaccacagccactttagaaaagcttcctgtaccccaggtcagtgcaactacagcacctgctggatcagctccaccctcgagcactttgccagcagcttctagccttaaaaccccaggaacttctttaaacatgaatggacccactttaagaccaacctctagtatccctgctaataatcctttagtgactcagctgcttcaaggcaaagatgttcccatggagcaaattctgcctaaacctctcaccaaagttgaaatgaaaacggttccactgactgcaaaagaggaaagggggatgggagcgctcatagctaccaacacaacagaaaatagcaccagagaggaagttaatgagagacagtcccatccagctacgcagcagcagctgggcaaaaccttgcaaagtaagcagctcccccaggttccaaggccccttcagctcttttcagctaaggagctgagggactccagcattgacacacaccaataccacgaaggactaagtaaagcaacccaagatcagatccttcagactctcattcagagggttcggaggcagaatcttctctcagttgtgccgccctcacagttcaacttcgctcactcaggtttccagctggaagacatctccacaagccagaggttcatgctgggttttgctggcagaaggacatccaaacctgcaatggcagggcactacttactgaatatttctacctacggccggggctcagagagctttaggaggacccattctgtaaaccctgaagatcgtttttgtctaagcagccccactgaagccttgaaaatgggatatacagactgtaaaaatgcaacaggagagagtagcagcagcaaagaagatgacactgatgaggaaagtactggtgatgagcaggaatctgtcacagtgaaagaggagccccaggtttcccagagtgctggcaagggtgacacaagttcaggacctcacagcagggaaactctatctaccagtgattgcttagctagcaagaatgtgaaggctgagataccattgaatgagcaaaccactttaagtaaggagaattacctgttcactagaggccaaacatttgatgaaaagaccctagccagagatttaattcaggcagcacagaagcagatggctcatgcagtgagaggtaaggcaatccgtagcagccccgagcttttcagttctactgttcttcctctgcctgcagacagccccacccaccagcccctactccttccacccctgcaaaccccgaagttgtatggaagccccacccagatagggccaagctatagaggcatgatcaatgtctccacctcatctgacatggaccataactctgctgtaccaggtagccaggtatctagcaatgtaggtgatgtcatgtcattttcagtgactgtcactaccatccctgctagccaagctatgaatcccagcagccatggccagaccattcctgttcaggcgttctccgaagagaacagcatagagggcacgccttcgaaatgttactgccgcttgaaagccatgatcatgtgcaaaggctgtggcgctttctgccatgatgattgcatcggcccctccaaactgtgcgtctcctgccttgtcgttcggtaatgagactagaaagagatacactgtaaaggagggggaagggaagggttgaccagttgggttttttgcgtccttttggaatcacagaaataaacaagtaggtttcagttgtcttcagagacaaatgttacttaatcaggaatacaaagtacagattttttacattttagaggaagagcaccttgtatagtaagtctaagtcaagcaagactttgtgaatttgtgacaagtttgcacttacaaaatcatgtaaatatgtcacattttgtttaacattatttttccaagtgtttaggtaataatgtattactttgaattcagattaatgttctactacttgtgactgagaaaagtttaatgccggcatggtaaaaggaagctgtctcccttctgacatttcctaggaagctaggaaaaggaaagtgaaggaatggtctaaagaaatgaccattcacactgattttgtctggacagtctggccgcaggttattcatagattattcagcctttgcaggacttggattcagggttttactcagtccctttaccttaggtggaatcttcttaaattgaaatttttggtaaggaattcatttcacaggtagtgtttcagactctgaaagccctgacttggttcttggcttctactgtactagttactagttactggtactgttgccaagcaatctgcttggaatttgtggatccctgctgttccctaatcccaccccctgccctgagacagtgaatgtagtccgtgaagggagtgcctctctgggaccccctgtgttgttacaggctgtgcagtgcaacaattccagcaaaaataccctatccccgcacttagtcattcgtggtaactaacaattttgaaatactcatataaaatgaacaggaaagtgttagtgattgggtgatttgagctacatcttgttgagcaaggggagtgaaaccacagaaactgttaaattgaacgtaaataactttggaaaacagttttgacactagaacaaggtcgcttctcttttcctcttctctcccaacctgttaacctagtgctagatagtcagctgctgttgcaggtagaaaagctcaccaatgccacatttgttcattctgttcaacctgttttgacctcccaggcatctgaacaggatgacatcatcttattatatcttactttacacatacgtgtatgtacacacacacacacaatacaagacatttttcctgttttagaaaatatagcccttgtttggattactgctgtctgagcactagaaatttctaatggaaagaggcctctgaatggctaagggaacatctggaaaggaaggaaaatgagccctaaaggttttttggttgcttgtttttgtttctttttctttcttgtttccttttttgtttttaaatccttctctagtgactgaagaaattgtgagtacataatatttaggtcatggttaaggaacattaaaataaacctgcagtttaacagaattttgtattaaatgggggagtgtcaatttgcatcatttgcatattgatttcaagtctcctaatttggaatgggtaaagtacaaatgttaatgcaacatagtacagttgtatttgtccttcatattcaggatgtgatatttacaaaatgcagaacagtttaaacttgttaagtcacattccagattaggagaaaatgggcaataatcatctctgttttgcccccattctactacccaccactgcccaccccacccccacatcacacactcttcgatgctttcccacagcccctgctccgctcctctccgtaagaaactcacttcactgtttttcacttttcacttctggcttttttgtggcccaaggccaatataggattaatatctgtgttccagcttcagccagaacgatatgtctgtccatctttctcctttcttccagcacacacagctaagagataagaaggctgcaaggattggggataaggagtatattttcaagccaagaaccagtagaaaacagaaataatggtgctcccaaatattcagtaccttgggcaatccaggaagggtttaaagagacctgttgctgcatagaactctccctgccctaccccttaactccaccttagtgccagggccgagggctggtctgcatgctggaagaggttgagagttttggaattgattccatgctaaatgtcagttaccagtttggattgatgaaagtgatttttctgctttacctttttcctgtcagaaaggttttcctctgtgctacccttaacttagggatgaacagactataactaggaaaggaggaaaggtatcagggatttttaagtccgtttagagagcaaaccatattgtgcctcttcatcttgacccaggctcttatagataggtcctaaacattgctgttcactagattatcttaacaaataatactcagctaaatatttgcatttaggaatactcctaaaacagatattgccaactagatacactgcctcaatcttgaccagacaagagaacagttaagttctctcagttgggtagtaacttgaataccagtctatttatcagttggtttcaacacagaggtttcaagtggaaagccattcatcttaaaagctgaacagaaaaatt

SEQ ID NO: 924 - DNA, 2055 bp, Homo sapiens
acaaaagataggaagaaccttaaaaatatagatgccttttatgcagtgataaaatgtctagatatttatactgtggtgattattaggaatatgtgcaaagattggctattaggatgttcattacagtgttgtttaataattataaaaggacagaaagcaatgtggactcaaaaataggaaaagaatttaaataaatcctagtgtacccgttatacatgaaattatggaaatatgaccctgagcatggaaatatgtacatgagaatgtctaaaagctagttcattttgaaaaacaaaataatgtcacctcatattatttatagtatataaagatgattttaagagtggcagtgtctgggattataggtgattgtatttcttcccttttgcacatctatgttctctcatttgtattgtgtggggagaagtgactttttttataaaaagaaaaaggtatatgcatcccagcagagaagcactggctccacccagtacctgcctcctcatgccaccctctcaagccaaaagccgggggaagcccaggcaccttgaccatgaccgcccgagactcacacttcttctttctcatcagggaaggaaagcccccctgtaagcgatactccagatgagggcgatgagcccatgccgatccccgaggacctctccaccacctcgggaggacagcaaagctccaagagtgacagagtcgtgggtaagtgggtcaccagcggcctctgtgcctgtgaaacctttatctctttgtatttttccaagacagtgatgaagggatgcaagtcattttatccattgtgttccctcaactggcatattaaagaaatatggcacaaagatcagcaggatgggggtcctctggtgtgtgggaggatggacactcacaggccagcatggccgtgagagccacacaccccgcaaaatgtccaagttgaggagcaatcctgcccagggacgcgtctctgtcactgtcctctgtcctcactgcacttgcaggaatatcaaatgttatggattgtagatcgtgaaaattacacacttacgtgttttggcaacagtgcttttcagtgtttggggttagaacaagccacatctggccattttatgttatccctctaatctctagttcttaaatttcagatttaactgaaaatagaaagtttcataaatggtaatttttaaatgttagaaaaaaatcaaagcacacatttacataccttttccataaaaaagtgtgtgtgaaaccatctgcaactccactggttaacttacacatgcgacagtttgtgtttggaaaacttcacccaccctctttatttcaagaaaccaaagacggagagaagttcagtgaattaaccaaggtgaaatgacagagtcagaattgaactgaatttctgactgaaaaactagttctcgctccattataccatgttctaatgagctaatgagtcaacagttccctggaatacctgttttcttctttaaaaagagaaagagctgtgatactgagagctacctattggcataaaagaatatgaaggacatacaggtaaaatgaggtagactggatcaatgtgggtcagctacataagcccccatagccaaggagggaacatgtatgtaaaattctcaggcttatgagaatcacaactgtatgtctataggacatcctaatgcaataatgggaaaatgtgataactgaattttatctacatgtatagaaaacatattttgggccgggcatggtggctcaagcttgtaatcccagcactttgggaggccgaggctggcggatcacaaggtcaggaaatcgagaccatcctggctaacacggtgaaaccctgtctctactaaaaatacaaaaaattagccgggcgtagtggtgggcgcctgtagtcccagctactcgggaggctgaggcaggagaatggcgtgaacccggcaggcggagcttgcagtgagccgagattgcgccactgcactccagcctggatgacagagccagactccatctcaaaaaaaaaaaaaaaaaaaaaaaaaaaaa

SEQ ID NO: 925 - DNA, 1330 bp, Homo sapiens
ttttttttttcctgtgtcagcaagatcagtcttcatgaaatcctgctaaattccctgtgaaatataataagcttaagacattttagagaaccaaatgctgtttatgatacagtttagtagagttgtaatatatttcagcacagaattttagaatactatgggggctgattttcaattttgtaagagaaattatgagcatagtttatatagtcttttatttgtaattgtttacgtgatttcagaagtaatatgcttaagttattctaatgtttttaaagctagagagtctgaaaagagggaagaagaaagaaaagtgtttaaattgatctcttttgaatttaaaatgcatattaagtataactagaacataaaatgaagaatttaaattctcatcttattcctagaattatacctataatatgtatcattacttataacaattcatattttaattttgcatggcacataatctcttctgtgagttggatttttaggtggtgggaatttaagcataaattctcataactttcttggggtcaatttaatattaataagtgtagtaagtaataatacccagcttgagacctcatgtacttgttgcatttggatttaaagctcatttcctatagaagagctgtagaaatcagtcatgtagtttcataaactccttcatgcttgttaataattttcaagaatcttaaaataaattacaggaatattgttatgaagtagtagaagcagtatggtataggggagaaagtgattgtagttgggatctgaggatagtctttactttgctattaactagctgtgtgaccttgggcaagttgcttatctctgcttcagttccataaactaagaattacagagctgaaccggatcttggaagcaatctagtacaaacctctcattttacagatgaggaagcagataatttgcacaggctttcactgtaagacagttgggcccaaaattcagttttctgactctcaggttggttttttttttccattatactttacagcctcttttcatctgtaaaatgagagcattggattagaggctctcaaaggtctcttccagctcaaaaatattgtcattcctgtgacattagtcgtaatataatttattaggggaaagtttgtagcttttatttattggtgaaagaaatgtttcttgaagaggcagtataacctttgcaaggttatattttgtttttttaagagaatatcatcaggcgaggtgctatgtctcaggcctgtaatcccagctttgggagaccaaggcaagaggattgcttgagtccaggagtttgagactagcctgatcc

SEQ ID NO: 926 - DNA, 4273 bp, Homo sapiens
aggagcggccacctggttcctgcgtgctacggccctgtgggcctgggagctgcctctgaggaacacgccgcagggccaggcatgtgaggtctctgcgggtcatggagaacctccctgccgtgaccactgaggagccgacccccatggggaggggtcctgtgggaccctcaggaggtggcagcacccgggaccaggtccggactgtggtcatgaggccctctgtgagctgggagaaagcggggcccgaggaggccaaggcgccagtgagaggcgacgaggctcctcctgcccgcgtggctgggcctgctgctgggacccctccctgccagatgggggtttatcccacagacctgaccctgcagctgctggctgtgcggaggaagagcagactgcgggaccccggcctacagcagaccctccggggccagctccgcctgctggagaatgatagccgggagatggcccgcgtgcttggggaattatcagccaggctgctgtccatccacagtgaccaggaccggatcgtggtgacgtttaagacttttgaagaaatctggaagttttccacctaccatgctctcggcttcactcatcactgcctggcaaacctgctcatggaccaggccttctggctgctcttgcccagtgaggaggaggagacggccatccaagtccatgtggatgagaacgccttaaggctgacccacgagagcctcctcatccaagaagggcccttctttgtcctgtgtcctgaccaccatgtgagagtgatgacgggtccccgggatgcaggaaatggcccccaggccctcaggcaggcttcgggggcaccccagggagaggcggccccggaaacagactcttcaccgccgagccccagcgtgtcctccgaggaggtggcagtggcggccgccccggagcctttgattccatttcatcagtgggctcttaggatcccccaggaccccatcgacgatgccatgggtggccctgtgatgcccggcaacccgctgatggctgtgggcctggcctcggcattggcagacttccagggctcggggcccgaagagatgaccttccgaggtggcgacctcatcgagatccttggggcgcaggtgcccagcctgccctggtgcgtgggccgacacgcagcctcgggccgggtggggtttgtgcggagcagcctcatcagcatgcagggccccgtgtccgagttggaaagtgcgatttttctcaatgaggaagaaaagtcattcttcagcgagggctgcttttctgaggaggatgccaggcagttgctgaggcggatgtcgggcaccgatgtctgcagcgtgtacagcctggactcagtagaggaagctgagaccgagcagccgcaggaaaaagaaatacctccaccttgcctgagcccggagccacaggagaccttgcagaaggtgaagaatgttctggaacaatgcaagacctgcccaggctgcccccaggagccagcgtcctggggtctctgtgcggcatccagcgacgtgagcttgcaggaccccgaggagccctccttctgcttggaagccgaggacgactgggaggacccagaggccctgagctcactgctgctgttcctgaacgcccctgggtacaaggccagcttccgtggcctgtacgatgtggcgctgccgtggctgagcagcgtgttccgcagcttcagcgacgaggaggagctgactgggcgcctggcacaggcccggggggcggccaagaaagctggcctcctcatggccctggccaggctctgcttcctcctggggcggctgtgcagcaggaggctcaagctgtcccaggcccgggtgtactttgaggaagcgctgggggccctggagggcagcttcggggacctgttcctagtggtggctgtgtacgccaacctggccagcatttaccggaagcagaagaaccgggagaagtgtgcacaggtggtgcccaaagccatggccctgctcctggggacgcctgaccacatctgcagcaccgaggcggagggggagctcctgcagctggcgctgcggcgggcggtgggtggccagagcctgcaggccgaggcccgggcctgcttcctgctggccaggcaccacgtgcacctcaagcagcccgaggaggccctgcccttcctagagcggctgctgcttttgcacagggactcgggagccccagaggccgcgtggctctcagactgctacctactcctggctgacatctacagccgcaagtgcctgccccacctggtgctgagctgtgtcaaggtggcctcattgcggacacggggctcgctggccggctcgctgaggagtgtgaacctggtgctccagaacgccccccagccccacagcctccctgcccaaacttcccactacctcaggcaagcgctggcctccctgaccccgggcacaggccaggcgctgcgcggccccctctacaccagcttggcccagctgtacagccaccatggctgccacggcccggccatcaccttcatgacgcaggcagtggaagccagtgctattgccggagtccgtgccatcgtggaccacctggtggccctggcctggctgcacgtgcttcatgggcagagcccggtggccctggacatcctgcagtctgtccgggatgcagtggtggccagcgaggaccaggagggcgtgattgccaacatggtggccgtggctctgaagaggacgggccggacgaggcaggcagctgagagctactaccgcgccctgcgggtggctcgggacctgggccagcaaaggaaccaggcagtggggctggccaacttcggggccctgtgcctgcatgcgggtgccagcaggctggcccagcactacctcctggaggccgtgcggctgttctcgaggctgccccttggggagtgtggccgggacttcacccacgtgctcctgcagctgggccatctctgcacccgccagggcccggcccagcagggcaagggctactacgagtgggcccttctggtcgccgtggagatgggccacgtggagagccagctgcgggccgtccagcggctgtgccacttctacagcgccgtcatgcccagcgaggcccagtgtgtcatctaccatgagctccagctctccctggcctgcaaggtggccgacaaggtgctggaggggcagctcctggagaccatcagccagctctacctgtccctgggcaccgagcgggcctacaaatccgcactggactacaccaaacgaagtctggggattttcattgacctccagaagaaagagaaggaggcgcatgcctggctgcaagcagggaagatctattacatcttgcggcagagcgagctggtggacctctacatccaggtggcacagaacgtggccctgtacacaggcgaccccaacctggggctggagctgtttgaggcggctggagacatcttcttcgacggggcctgggagcgggagaaagctgtgtccttctaccgggaccgggccctgcccctggcagtgactacgggcaaccgcaaggcggagctgcggctgtgcaacaagctggtggcactgctggccacgctggaggagccccaggagggcttggagtttgcccacatggccctagcactcagcatcaccctgggggaccggctgaacgagcgcgtggcctaccaccggctggccgccctgcaacaccgactgggccatggcgagctggcagagcacttctacctcaaggccctgtcgctctgcaactcgccgctggagtttgacgaggagaccctctactacgtgaaggtgtacctggtgctcggtgacatcatcttctacgacctgaaggacccgtttgatgcagccgggtactaccagctggcgctggcggccgccgtggacctgggcaacaagaaggcacagctgaagatctacacgcggctggccaccatctaccacaacttcctcctggaccgtgagaagtcgctcttcttctaccagaaggccaggaccttcgccacagagctcaacgtccgcagggtcaacctgcctcctctgccactctgcgggtgggccccctggttggcccccagccaccctcgctgaggacagcatccaagggagtgggttttgtgcaagggctgggggtctcctgcctctcctggtgtcgccggtggctcattttctggcaaatggaggcacgaacgcaggggccaaatagcaataaatgggttttgttttttttttgcaataaaaaaaaaaaaaaa

SEQ ID NO: 927 - DNA, 2035 bp, Homo sapiens
attaacctccagctttttaagcagtttatcgatggtcgactggcaaaactaaatgcaggaaggggtttctctgatgtatttgaagaagagatcacttcaggtggcttttgtggagggaacccgaggtcatatcaacaatgggtgcatacagtcaagaaaggaggtgcactgttcaacacagcaatgaccaaagcaacccctgctgtacggacagcatataaatttgcaaaaaatcatgcaaagctgggactaaaggaagtgaagagtaaactaaaacacaaggaaaatgaagaagattatgggacctgttctagttctgtacaatatacaccagtttacaaattacacaatgaaaagggaggaaactcagaaaagcgtaagcttgctcaggcacgcttaaaaaggcctcttaagagccttgatggtgctctatatgatgatgaagatgatgatgacattgaaagagcaagcaagttatcttctgaagatggtgaagaagcttctgcttatctctatgagagtgatgactctgttgaaacaagagtgaagactccttactcaggtgaaatggacttactaggagagattcttgatacattgagcacacacagctcagatcaggggaagctggcagctgcaaagagcttggatttctttagatcaatggatgacattgattacaaacctacgaataaatctaatgctcctagtgagaataacctggctttcctctgtggtggttctggtgaccaagcagagtggaatcttgggcaagacgatagtgccctccatggcaaacacctccctccatctcctaggaagcgggtttcctctagtggtttgacagattctctgtttatcctgagagaggaaaacagtaacaagcacctcggtgctgacaatgtgagtgaccctacttcaggactggatttccaactcacttcccctgaagtttcccagactgataaaggaaaaacagaaaagagggaaacactaagccagatttcagatgatctgcttatacccggtcttgggcggcattcatcgacttttgttccttgggagaaagaagggaaagaagccaaagagacttcagaagatattggactgctccatgaagtagtgtcattatgtcatatgacatctgacttccaacaaagcttgaacatttcagacaaaaacacaaatggaaaccaaacttaaatcttgcatccaagcttctatggagacattttgagattcaatgcaatctgtataataaacagaattatttgtaggaatggcaactcatactatttaaatttttttttgcatttgcaacatttttctcacttgttcatttcgaggatatatgaaatgcattgatttttaaatataaagcgaattctactgtgcttttaaatcaggtactagtttgtatgtatgtttaaagtatgtattgaccatgagatttcccagtgtttggtgcttaatgccgtttattttatttaagctaagaatgcatatgtaacccatgcacataaccagtagctactatactaatctggttgagcatgaactgatcaagatatcaaaacttatcaaaactagcctgaagctgatgaaactgttaacccactaattgccttaatcttaaagctgttttttaagcatacttaaataatgtatgaaagtatgtataaagtttgaaggataagttattagtgttctgcagagcaataatgcctttttctattcatcaaatcaaggtcaaaattcatcttttcaagattaaaaagctctcttaatggaaatatttaatttgcttatataaagcactatagccatgttttccaaaaagtataaaatatacacttacctttcattcagtgaaatataggaagtgctgaattacaatgtgaagttaatgacttctgtttacaaatgagacactctaacgagttttcagtctctctgtatgcctttgctatttaggggtccaccccaagaaagccaaatacaacataaaccgtcctgacaaaaaaaaaaaaaaaaa

SEQ ID NO: 928 - DNA, 1752 bp, Homo sapiens
agggcgcagcaggccaagggggaggtgcgagcgtggacctgggacgggtctgggcggctctcggtggttggcacgggttcgcacacccattcaagcggcaggacgcacttgtcttagcagttctcgctgaccgcgctagctgcggcttctacgctccggcactctgagttcatcagcaaacgccctggcgtctgtcctcaccatgcctagcctttgggaccgcttctcgtcgtcgtccacctcctcttcgccctcgtccttgccccgaactcccaccccagatcggccgccgcgctcagcctgggggtcggcgacccgggaggaggggtttgaccgctccacgagcctggagagctcggactgcgagtccctggacagcagcaacagtggcttcgggccggaggaagacacggcttacctggatggggtgtcgttgcccgacttcgagctgctcagtgaccctgaggatgaacacttgtgtgccaacctgatgcagctgctgcaggagagcctggcccaggcgcggctgggctctcgacgccctgcgcgcctgctgatgcctagccagttggtaagccaggtgggcaaagaactactgcgcctggcctacagcgagccgtgcggcctgcggggggcgctgctggacgtctgcgtggagcagggcaagagctgccacagcgtgggccagctggcactcgaccccagcctggtgcccaccttccagctgaccctcgtgctgcgcctggactcacgactctggcccaagatccaggggctgtttagctccgccaactctcccttcctccctggcttcagccagtccctgacgctgagcactggcttccgagtcatcaagaagaagctgtacagctcggaacagctgctcattgaggagtgttgaacttcaacctgagggggccgacagtgccctccaagacagagacgactgaacttttggggtggagactagaggcaggagctgagggactgattcctgtggttggaaaactgaggcagccacctaaggtggaggtgggggaatagtgtttcccaggaagctcattgagttgtgtgcgggtggctgtgcattggggacacatacccctcagtactgtagcatgaaacaaaggcttaggggccaacaaggcttccagctggatgtgtgtgtagcatgtaccttattatttttgttactgacagttaacagtggtgtgacatccagagagcagctgggctgctcccgccccagcccggcccagggtgaaggaagaggcacgtgctcctcagagcagccggagggaggggggaggtcggaggtcgtggaggtggtttgtgtatcttactggtctgaagggaccaagtgtgtttgttgtttgttttgtatcttgtttttctgatcggagcatcactactgacctgttgtaggcagctatcttacagacgcatgaatgtaagagtaggaaggggtgggtgtcagggatcacttgggatctttgacacttgaaaaattacacctggcagctgcgtttaagccttcccccatcgtgtactgcagagttgagctggcaggggaggggctgagagggtgggggctggaacccctccccgggaggagtgccatctgggtcttccatctagaactgtttacatgaagataagatactcactgttcatgaatacacttgatgttcaagtattaagacctatgcaatattttttacttttctaataaacatgtttgttaaaacagtt

SEQ ID NO: 929 - DNA, 6826 bp, Homo sapiens
gatccggaagtcggagcctagctgcgcgagagtttctgctcgctcaaccgagttgtcgtgttgccctcgcttctcagatccccgccggaagtgaagagagcaagcagatttgaacctatctgctttcaagctggtcatcatgatgaaacttagacacaaaaataaaaagccaggtgaaggttccaagggccacaagaagataagttggccctaccctcagcctgcaaagcaaaatgggaagaaagcaacctccaaagtgccctctgcacctcattttgttcaccccaatgatcatgccaatcgagaggctgaattaaagaagaagtgggttgaggagatgagggagaagcagcaagccgcccgggagcaagaaagacaaaaacgcaggaccattgagagctactgtcaggatgtcctaagacgccaggaggagtttgagcataaggaggaagttttgcaggaattaaatatgtttcctcagctggatgacgaggccacgaggaaggcttattacaaggagttccgtaaggtggtggaatactctgatgtgattctggaagtcctggatgccagagacccattaggctgccgctgcttccaaatggaggaggctgtcctgcgagcacaaggcaacaagaagctggtcctggtcttgaacaagattgacctggtccccaaggaggttgtggagaaatggctggattaccttcggaatgagttgccaaccgtggctttcaaggccagtacccagcatcaggtcaaaaacctgaatcgttgcagtgtgccagtagatcaggcctctgagtcactgctgaaaagcaaagcctgctttggagctgaaaacctcatgagggttctggggaactattgccgccttggtgaagtgcgcacccacattcgtgtgggtgttgtgggtcttcccaatgttgggaagagcagcctgatcaatagcctgaagcgcagccgcgcatgcagcgtgggagctgttcctggaattaccaaattcatgcaggaggtctacctggacaagttcatccggctcttggatgctccaggcattgtcccagggcccaactcagaggtgggcaccatcctgcgtaactgcgtccacgtgcagaagctggcagaccctgtgaccccagtggagaccatcctgcagcgctgcaacctggaggagatttccaactattatggcgtctctgggttccagaccactgagcactttctgacggcagtggcccaccgtttggggaagaagaagaagggaggcttatatagtcaggaacaggcggccaaagctgtcctagctgactgggtgagcgggaagatcagcttctatataccaccaccagccactcacactctgcccacccatctcagtgctgagatcgttaaggaaatgaccgaggtctttgacatcgaggatactgagcaggccaatgaagacaccatggaatgcttggccaccggagaatctgatgagctgttgggtgacacggacccacttgaaatggagatcaagttgctccattctccgatgacgaaaatagcagatgccattgaaaataaaaccaccgtgtataagattggagatctcactgggtattgcaccaatccgaaccgtcatcagatggggtgggctaaacgcaatgtggaccaccgccctaagagcaacagtatggtggatgtctgctcagtggaccgccgctcagtgctgcagaggatcatggagacggaccccctgcaacagggccaggctctggcatctgccctgaaaaataagaagaagatgcagaaacgtgcagataaaatcgccagcaagctgtctgattccatgatgtctgctctcgacctctctggcaatgctgatgatggtgttggtgactaatcgactgatctcacttcccttccgctccaagcaccagttccggtggtacgggggaataccagtgaaatagtttggttctccctgaagcatctgcatattgaaagaacgctttccccactgtgtgtcttctccccctcctccagtaaaaacagtcccggctaggtgctgtggctcacgtctgtaatcccagcactttgggaggccgaggtgggcagatcacctgaggtcaggagttcgagaccagcctggccaacatggtgaaaccccgtctctactaaaaatacaaaaaaatttagccgtgcttagtggcacctataatcccagctacttgggaggctgaggcaggagaatcgcctgaacctgggagactaaggcaggagaatcgcctgaacctgggaggcagaggttgcagtgagcccagacggcaccattgcactctagcctgggcaacaacacgaaactccgtcccaaaaaaaaaaaaaaaaaaaaaatcccaaggggctgcagctgccaaacccaataccctctatttaacccctactctgttttacaagagaaataaaagaagtatcagcagagctcaggtgctaacacctgttgagggctgacctacaaaactctgcctacaaaactctcttagacaggtgaatatgccactagaagttaggttgctggtagacctgggggtccctgcgggagggtgatggtttctttaccaccccacaggagatttcagtggcaaggcatgcctgcagtgggctttgggccatgcatcttccaagtccataggtcttcacctgggtggcagtgagaaaaagtagaaagtaatgagcctcctgtgtctctggaaggttctagggatagggtagagggaagaagagaacaaacaagcctggcttgtgctgaagtgtggtaggcactaccctgtttgcgtgaagagaaaacaaagcacctgttagtagggaggctttagggggaagccccgtcttgggggcatttctgggcagattgtgaattggaggaatctctttaactgaagtactctggctggaccctgcccttgtgtgaccatgtctcctattgcaccagcatttgaattccatggctcaagagggttctggtaccatttattcacagactgtatcctcgagagagctgctatatatgggagtgtaccagccaactccttttccagtgtctgtaagtcacctcattaaagtataattagctgtctcctctgggagatcctaccccatcagacaagggcagtgagcccaagcagtgccagaggccctcagaaagggattagggtagatgattgcaactgaaacacaatcttctttctttgccagggtattttgggggttttgccccaaaatataccctgggcatagcattactgcagtcttggatgtctaccccaaacttccacaccatccttcgacccacagctgcacctttatttatttattttgctctgttgcccaggctggagtgcaatggcgtgatctcggctcactgcaacctctgcctcccgggttcaagtgatcctcctgccttagcctcccaagtagctgggattacaggcacctgccaccacgcctggctagtttttgtatttttagtagagacgatgtttcaccatgttgaccaggctggtctcgaactcttgacctcaagtgatccactcgcttcggcctcccaaagtgctgggattataggcgtgagccactgtgcccagcctcacagctgcatcttaaccttacctttgcctctgcctctcaagctggtacctcctaatttacatcctaagagtggaaccatgtgacaaggactggagtgccattggctgtggactgttcaggcagggaagtacaagaccactcttgtattcaggggcaaccaaaggagagaattacgtacttgttgagtacaaactgcaccaagccctggagacccattaccaccgttaaccctcaatacagctctgctagtaagggattcgtctccccaaatgaaaaaaaaaagtaatctcagaatgttggccgagcatggtggctcacacctgtaatcccagttatgcaggaggctgaggcaggagaatcacttgatctcaggaggcggaggttgcagtgagtcgacatcacaccactgcactccagcctgggggacagagtgagacttcgtctcggaaaaaaaaaaaaaaagttgacaggatggccagacccaagtgggcgtattaagtggtggtgctaggattggaacccaagcgtgattaaaaccctatgcaggccctttcctctatattgtactgcctccttaacaaaggaagattgattaagcccctactttgtgccagtctctgttatcaagtccgttaaatgcatttaacgttaaattttttcttttttggtttaaaaaactctagtttcttaaactactagtttttagtgtcttgctaaaactatgtgctcttgaataggctacaacttatttcacactatctcattgaactctcctggtatgtgatagtgttataatgaaaaattgcataccaggacagctaagtctattttgcaaccatacagcgtttcataatttagcatttaaaatacagacagtccccgacttttggtggtttgatgtgggatttttggtggaaaagcagtatacattcagaatgcacctctacttatgatggggctacttcctggtaaacccattgtaatgtgcaaattacgggtttatcaggaggtgaccccatcggtaatggagaagtgctgggaggtaaatattagaaatggaagtatctaaatgagtaagaaacagcatgggagcataatttggccaaaatcaaacagaactaaagtagtcatgtcggtaagaatttgggactgcaggccagttacgatagctctcacctgtaatcccagcattttgggaggccgaggcaggcggatcacttgaggtcaggagttcaagaccagcctaaacaatatggcgaaacctcatctctaccaaaaaaatacaaagattagctgggcatggtgtctcatgcctgtagtcccagctacctatggggctgaggcaggaggatctcttgagcccaggaggtcgatgctgcattgagccgagattgtgccactgctctccagcgtgggcaacagagtgagactgtctcagggggaaaaaaaaagaggaaaacaaaaaagacgttgggagtgcagtttctctacctacagcatatctcaaaggttttttttaaaaaagtattttcttaactttttaccttcatttttcaaaacaattagggtacaatttacatatagtaaagttcactctttatagttttagttatgtgagtttgtacaaacatatacaggagtgaaccactaccacaatcgaaatatagttgcatcacccccctaaaactctccaggcccttttgtagtcaactcctacccccgaccctcagattctgctaaccactgatttgttttctgcccctatagttttgctttagtatgactgtcatatcaatagaatcatacaatgagtaggcttattttatgccttcaggttttaaaaattataaacatttacattacagtaaaattcactctggtatacagttctataaagctctgataaatgtgtagagttgtgtaaccaccaatgcaaccaaggtacagaacagtcctcttagcctctccctaccaaatttattcctgctactttgtagtcaaaaccagtcccctacacccaaaccctggcagtcactggtttttttcttcgttctcttttttttttttttttttttgagacagagtctagctctgttgtccaggctggagtggtgcagtggcgtgatctcggttcactgcaacctccgcctccagggttcaagcggttctcctgcctcagcctcccgagtagctgggattatgggcgcccgccaccacgcccagctaatttttgtatttttagtagagatggggtttcactgttttggccaggctggtctcgaactcctgacctcatgatcctcctgcctcagcctcccaaagtgctgggattacaagagtgagccactgcgcctggcctttttctttgttcttatatttttgtcttttttttttttttttttttgaaacagagtctcactctttcactgaggctggagtgcagtggcgtgatcttggctcactgcaacctccacctcctgggttcaagcgattctcctgccttagcctcccgagtaacagggactacaggtgcccaccaccatgctgggctaatttttgtatttttagtagaggcgggggtttctccacactggccaggctggtcttgaacttctgacctcaaaagatccacccacctcggcctcccaaagtgctgggattataggcatgaaccaccgtgtccggccatatattttcgtcttttgaagactgttatatacatgaaattatatggtatgtagcattttgagagcgacttcttttgctatgagtaatacatttgagattcatccatatttctcagtatattaatagttcttatttctgagtcactccattgtgtggatttactactgtttgttccccagttgaaggatgtttaggatctttgcagttttggacaattacaagtaaagctgctataaacatttgtatgcaacattttgtgttttcatttatctatagtaaatacctagagttggattgctgggatatatggtaagcatatgtttgacattttaagaaacttctaaactgtttttcaaagtggctctaccatttcacattcccatcagtatgaaagtttcatttccacatcctctctagtacttgggggtgtcagtttagttttttaatttttaaattttttaatttttttaatacatttaaatagagatggggtctcactgtgttg

SEQ ID NO: 930 - DNA, 3521 bp, Homo sapiens
ggccgccgagcggcggaggcaccgagtgcagagcattgtagaccaaggagccatggataggagaagtatgggtgaaacagaaagtggagatgctttccttgacctgaagaagcctcctgcctccaaatgcccccatcgctatacaaaagaagaactcttggatataaaagaactcccccattccaaacagaggccttcatgcctttctgaaaaatatgacagtgatggtgtctgggaccctgagaagtggcatgcctctctctacccagcttcagggcggagctcaccagtggaaagtctgaagaaagagttggatacagaccggccttccctggtgcgcaggatagtagatccacgagagcgtgtgaaagaagatgacttagatgttgttttcagccctcagagacggagctttggagggggctgccacgtgacagccgctgttagctcccggcgctcaggaagtccattagagaaagatagtgatgggcttcgtctgcttggtggacgtaggattggcagtgggaggataatctctgcccggacctttgagaaggatcaccgtcttagcgataaggacctgcgggacttgagagacagagaccgagagagggacttcaaggacaagcgtttcaggagagagtttggagatagtaagcgtgtctttggtgagcgtagaagaaatgattcttacacagaagaagaaccagagtggttctctgctggacccacaagtcagtctgaaaccatcgaactgactggctttgatgataagatactagaagaagatcacaaagggagaaaaagaacaaggcgacggacagcctctgtgaaggaaggtatagtagagtgcaatggaggagtggccgaagaggatgaagtggaggtcatccttgcacaggagcctgcggctgatcaggaagtgccaagggatgctgtcttgcctgagcagtccccaggagactttgactttaatgagttctttaaccttgataaggtgccatgcttggcttcgatgatagaagatgttttgggagaagggtcagtctctgccagtcggttcagtaggtggttctctaacccgagcagatcaggaagccgatccagcagtcttgggtcaacaccacatgaagagctagagagacttgcaggtctggagcaagccatcctctctcctggacagaactcggggaattactttgctcctataccattggaagaccatgctgaaaataaagtggatattttagaaatgctacagaaagccaaagtggatttgaaacctcttctttccagcctttctgcaaataaagaaaaacttaaagaaagctcacattcaggggttgtgctttcagtggaggaggtagaagcaggtctgaagggcttgaaggttgaccagcaagtgaagaattcaactcccttcatggcagaacacctagaagagaccttgagtgccgtaaccaacaatcgacaactgaagaaagacggagacatgactgcgttcaacaagctagtgagcacaatgaaggcaagtgggactttgccttctcagcccaaagtcagccgaaaccttgaaagccatttgatgtcccctgctgagattccaggccagcctgtccctaagaacatcctgcaggaacttctgggtcaaccagttcagagacctgcttcttccaatcttctgagtggccttatggggagcttggagcctacaacatctttactgggccaaagagcaccctctcctcccttgtcacaggtgtttcaaactcgagcagcctcagctgactaccttcgcccaagaataccatcaccaattggtttcacaccaggaccacagcagctactcggagatccattccaaggcatgcgcaaacccatgagccccatcacagcccagatgagccagctggagttgcaacaggcagctttagaagggctggccttgccacatgaccttgctgtacaggcagcaaacttctaccagcctggttttggcaaaccacaggtggacagaaccagagatggattcagaaacaggcaacagcgagtgaccaagtcaccagcacccgtgcatcgagggaattcctcttcccctgcccctgctgcctccatcacaagcatgctttctccttcctttacccctacctcagtgattcgtaagatgtacgagagcaaagagaaaagcaaggaggagccagcatctggaaaagcagctcttggtgacagtaaagaggatactcagaaggccagtgaagaaaacctcctgtcatccagctctgtacccagtgccgatcgagactcttctcccactacaaattccaaactgtcagcattacagaggtcttcgtgttccaccccactgtcccaggccaaccgttacaccaaagaacaagattatcgacctaaagcaactgggagaaaaacacccaccttggcatccccagttcctacaacaccttttctccgccctgtccaccaagttccccttgtcccccatgtccctatggttaggcctgctcaccagcttcacccagggttggtacagaggatgctggcccagggagtacatccacagcatcttccaagtttgctccaaactggtgtgcttcctcctgggatggacttgagtcatttacagggaatatctggccccatcctgggtcagcccttttaccctttacctgctgctagtcaccctctcttaaaccctcgtcctggaacacctctgcatctggcaatggtgcaacagcagctacagcgctcagttctgcatcctccaggctctggttcccatgcagcagctgtcagcgttcagacaacccctcagaacgtgcccagccggtcaggcctgccccacatgcactcccagctggagcatcgccccagccagaggagcagctcccctgtgggccttgccaaatggtttggctcagatgtgctacagcaacccctgccctccatgcccgccaaagttatcagtgtagatgaattggaataccgacagtgagcagggcaggcagactcaactaagcccggacctgtggtggcacactgggcaggaccctgcttcatctcgggttggtttatgggcttttactttggagcactctgtgtgaagctgtttggtggaacccatgcatctggtgtggtccgcattatgatggaaggatcttaaccagtcgagtggagtgtacattgtctgaatacaggatgcacaatgttgtcaatcctggaaatggtctttcttttttgtaagatatgtgaatgaagtgttggtgtcctcaccaagaggtggcacctaagggttctgaggaaataaatgtatagacccttatgtacagacctgtgtataaacaacttttgtatatacatataggatagcttttttgaactatacagctgtacataaaagtagctgatattagttaggcctgtgtcaacagtttggatttttttcacttgtacatttgggattttcttttggttgattaaaattgcatatgctaagtgtgtgaatg

SEQ ID NO: 931 - DNA, 4195 bp, Homo sapiens
gagagaagctgctgctgctaatgctgctgctgctgctgccgccgccgccgctgctgctgctgctgttggtctgaggctgcagtaggtttctgtgcagcattgcagaatccacacctagagaacagaagacacagacacgtacgtctactacccttgttagaaggaagctttggatcttcggtggataacaagagtaatccacagacttaaaacatgagctcagatgccagccaaggcgtgattaccactcctcctcctcccagcatgcctcacaaagagagatattttgaccgcatcaatgaaaatgacccagaatacattagggagaggaacatgtctcctgatctacgacaagacttcaacatgatggagcagaggaaacgagttactcagatcctgcaaagtcctgcctttcgggaagacttggaatgccttattcaagaacagatgaagaaaggccacaacccaactggattactagcattacagcagattgcagattacatcatggccaattctttctcgggtttttcttcacctcctctcagtcttggcatggtcacacctatcaatgaccttcctggtgcagatacatcctcatatgtgaagggagaaaaacttactcgctgtaaacttgccagcctgtacagacttgtagacttgtttggatgggcacacctggcaaatacctatatctcagtaagaataagtaaggagcaagaccacattataataattcccagaggcctatctttttctgaagctacagcctccaatttggtgaaagtcaatataataggagaagtggttgaccagggaagtaccaatttgaaaattgaccatacaggattcagtccccatgctgcaatctattcaacacgtcctgatgttaagtgtgtgatacacatccatacccttgcaacagcagctgtatcctccatgaaatgtgggatccttccaatttctcaagagtctcttcttctgggagatgttgcctattatgactaccaagggtcacttgaagaacaggaggagagaattcaactgcagaaggttctgggaccaagttgtaaggtgctggtactcaggaatcatggtgtggttgcacttggagaaacattagaggaggcttttcattatatttttaatgtgcaactagcctgtgagattcaggtgcaggccctagcaggtgcaggtggagtagacaatctccatgtactggactttcagaagtataaagctttcacttacactgtagcagcgtctggtggaggaggtgtgaatatgggttcccatcaaaaatggaaggttggcgaaattgagtttgaagggcttatgaggactctggacaacttggggtatagaacaggctatgcttacaggcatcctctcattcgagagaagcctaggcacaagagtgatgtggaaatcccagcaactgtgactgctttttcctttgaagacgatacagtgccactctctcctctcaaatacatggcacagaggcaacagcgtgaaaaaacaagatggctgaactcaccaaatacttacatgaaagtgaatgtgcctgaggagtctcggaacggagaaaccagtccccgaaccaaaatcacgtggatgaaagcagaagactcatctaaagttagtggtggaacacctatcaaaattgaagatccaaatcagtttgttcctttaaacacaaacccgaatgaggtactagaaaagagaaataagattcgggaacaaaatcgatatgacttgaaaacagcaggaccacaatctcagttgcttgctggaattgttgtggataagccaccttctactatgcaatttgaagatgatgatcatggcccaccagctcctcctaacccatttagtcatctcacagaaggagaacttgaagagtataagaggacaatcgaacgtaaacaacaaggcctagaagaaaaccatgagctgttttccaagagcttcatctccatggaagtgcctgtcatggtagtaaatggcaaggatgatatgcatgatgttgaagatgagcttgctaagcgagtgagtaggttaagcacaagtacaaccatagaaaacatcgagattactattaagtctccagagaaaatcgaagaagtcctgtcacctgaaggctccccttcaaaatcgccatccaagaaaaagaagaaattccgcactccttcttttctgaaaaagaacaaaaaaaaggagaaagttgaggcctaaataaagtctttttataattattattataacaatgtgacattgcacatctaaataccacatttaagttgatcattaatatgcaatggtagatcagattgggggatgtagcaaactggactttaagaactggaaagaggttttacaaaagaaaaactttcagattcatctctcattttatatgtccagaaatggctttgaattttaagcaattactagttttaattagctctgccctcatgaagtattattataattcaccataaacagctatctgtctgaattacttcaggccttctccataatatctgttagaaagaaattgccagtgagcaagtgagaatttttatttctcaatacctgcttcacttgataatcatattataattttttatcatgattattgactatatttttggagtcccattgtttcagtgggcattaacagaatgctttaaaaacttctaagacaagaatctatagcattagtatacactggcacataattttttaaaaagttttaagaaaagattcatttggaattttattcacagtataaaatttcctcacctgaagtaactttgtttgccaaaaaagttgttttaataaactataatttttgaaaacttccttttttattagtttagaaagccccttatttttcaacaaaggggattttgtacacataacatgggttatttagtttaactctggcaaaaaaaaaaaaaaaaattttgtatgttgatgtttgtataccgttcagtataaaagtgtcctaagcatattagccaatcttttcacagtagagcatacttaaggctgcttggtactgagtatacttaaatataactccagaatccagggacttggtgttaaaacaggattagagcatgtaaaggtacatctagattcatatttgaatcttaaactgtatttttctcttagtattgctaatgagtaaagaaaagtctcataaggtagccaaatgaaaaagaatgaaagggaaagtgaaaaattaaggggacaaaagatgggatgtgaaaagaagaattctagtttgatggtgactcatattcacgataggatacaaagtgtgatttgttggaaacatgtcccaaatttctaaaattctgcttctctgccaaaagcaatgtctttcttggttgatatttgagttttaaaagggtcaaatctttctaattttttgtatctttagagggcagcactagaagaaatcagcaggtctaatcccaccagtaagaaaactaccacttcttgatttttacagatttaaaaaaatcttttcagtgacctttctttttaatgtaaatacaaatttaaacctaggcttaatataggcgtttcccctttcacccaagtgatgtcacagttcgatgcaaaatcaatgatccagaatgatcgtgggtaaaaataactcaaagtgtttcttaagggtgagttggcatgcaaaaaattacattgattacagtgtgttttggagctggctctgtttgtgtgcatatgataatgcagagttgagccagagcctggaaatgtcattctagatctcactaactactggaatcagtgttttaatctcttggtggaaactttcagttgcttaactctctattggaagatttttttaatgttctacatcatttatgttgtattacaatgtatgtagaaatagtaacctgtgaactatgcttttccataactttttaaaaatatatatatctaaatgaatgcaatgtgcataaatattttttaaacataacagtgaactattgcaccttttgctaatgcctctatttacttgctttggcataaagaatgagccaatgaacctctgtgtcctgtggaaaaatgtataaatgttatctgatattgctcttagatgtaatgctaattaatgttaaatcacaaataaacagtattttaaatataaaaaaaaaaa

SEQ ID NO: 932 - DNA, 1997 bp, Homo sapiens
atgtacaagggcagccgtggggctggcaacagcttcgtaatcctggcttcctgctttctgggtcaaagccctggtggtgtgttcttgatatcggtccatctagtggcgttgtttgattcctcccaccttgctgatcattcgtagtgtagcccccaaggtgtggaataacccttaagcccttaccggggtccttctggactgagaattgttgtaaagtaatactgctcaggtgaaagacaacttgagtggttaaattactgtcatgcaaagcgactagatggttcagctgattgcacctttagaagttatgtggaacgaggcagcagatcttaagccccttgctctgtcacgcaggctggaatgcagtggtggaatcatggctcactacagccctgacctcctgggcccagagatggagtctcgctattttgcccaggttggtcttgaacacctggcttcaagcagtcctcctgcttttggcttcttgaagtgcttggattacagtatttcagttttatgctctgcaacaagtttggccatgttggaggacaatccaaaggtcagcaagttggctactggcgattggatgctcactctgaagccaaagtctattactgtgcccgtggaaatccccagctcccctctggatgatacaccccctgaagactccattcctttggtctttccagaattagaccagcagctacagcccctgccgccttgtcatgactccgaggaatccatggaggtgttcaaacagcactgccaaatagcagaagaataccatgaggtcaaaaaggaaatcaccctgcttgagcaaaggaagaaggagctcattgccaagttagatcaggcagaaaaggagaaggtggatgctgctgagctggttcgggaattcgaggctctgacggaggagaatcggacgttgaggttggcccagtctcaatgtgtggaacaactggagaaacttcgaatacagtatcagaagaggcagggctcgtcctaactttaaatttttcagtgtgagcatacgaggctgatgactgccctgtgctggccaaaagatttttattttaaatgaatagtgagtcagatctattgcttctctgtattacccacatgacaactgtctataatgagtttactgcttgccagcttctagcttgagagaagggatattttaaatgagatcattaacgtgaaactattactagtatatgtttttggagatcagaattcttttccaaagatatatgtttttttcttttttaggaagatatgatcatgctgtacaacagggtagaaaatgataaaaatagactattgactgacccagctaagaatcgtgggctgagcagagttaaaccatgggacaaacccataacatgttcaccatagtttcacgtatgtgtatttttaaatttcatgcctttaatatttcaaatatgctcaaatttaaactgtcagaaacttctctgcatgtatttatatttgccagagtataaacttttatactctgatttttatccttcaatgattgattatactaagaataaatggtcacatatcctaaaagcttcttcatgaaattattagcagaaaccatgtttgtaaccaaagcacatttgccaatgctaactggctgttgtaataataaacagataaggctgcatttgcttcatgccatgtgacctcacagtaaacatctctgcctttgcctgtgtgtgttctgggggaggggggacatggaaaaatattgtttggacattacttgggtgagtgcccatgaaaacatcagtgaacttgtaactattgttttgttttggatttaaggagatgttttagatcagtaacagctaataggaatatgcgagtaaattcagaattgaaacaatttctccttgttctacctatcaccacattttctcaaattgaactctttgttatatgtccatttctattcatgtaacttctttttcattaaacatggatcaaaa

SEQ ID NO: 933 - DNA, 469 bp, Homo sapiens
gaggaagtgcgatcgggaacctcctatatacttccgtttgcctcgcggtttctttctttccgcgccgatagcgctcacgcaagcatggttaacgtccctaaaacccgccggactttctgtaagaagtgtggcaagcaccaaccccataaagtgacacagtacaagaagggcaaggattctctgtacgcccagggaaagcggcgttatgacaggaagcagagtggctatggtgggcaaactaagccgattttccggaaaaaggctaaaactacaaagaagattgtgctaaggcttgagtgcgttgagcccaactgcagatctaagagaatgctggctattaaaagatgcaagcattttgaactgggaggagataagaagagaaagggccaagtgatccagttctaagtgtcatcttttattatgaagacaataaaatcttgagtttatgttcaaaaaaaaaaaaaaaaaa

SEQ ID NO: 934 - DNA, 1857 bp, Homo sapiens
agagtcgggtagacggcagcgggagcggtggcgtctccccgccttccctccctcccgggcctgggcgcccagccggacaggtgagcggcagccaggtgagcgcgcccacctgcgcctctccgcgcggcccgccctccccggcgccgggctcctctccgcgcccctgtcggcgcggaaccctggcctcgtccgcggcccagctccctggagcctcgcatcagcgggggcgcccccgcgagctgcgctctccccggccggagcgctcctcctccagcccccagcccgcagggtactttgccctcggagcgaaggaggctccagaactggtagagccgggccatcgggctgggcacctccccgcggcgcccgcagcgcggagtccactgaccggctcaaaggtatggcgttgacggtggatgtggccgggccagcgccctggggcttccgtatcacagggggcagggatttccacacgcccatcatggtgactaaggtggccgagcggggcaaagccaaggacgctgacctccggcctggagacataatcgtggccatcaacggggaaagcgcggagggcatgctgcatgccgaggcccagagcaagatccgccagagcccctcgcccctgcggctgcagctggaccggtctcaggctacgtctccagggcagaccaatggggacagctccttggaagtgctggcgactcgcttccagggctccgtgaggacatacactgagagtcagtcctccttaaggtcctcctactccagcccaacctccctcagcccgagggccggcagccccttctcaccaccaccctctagcagctccctcactggagaggcagccatcagccgcagcttccagagtctggcatgttccccgggcctccccgctgctgaccgcctgtcctactcaggccgccctggaagccgacaggccggcctcggccgcgctggcgactcggcggtgctggtgctgccgccttccccgggccctcgttcctccaggcccagcatggactcggaagggggaagcctcctcctggacgaggactcggaagtcttcaagatgctgcaggaaaatcgcgagggacgggcggccccccgacagtccagctcctttcggctcttgcaggaagccctggaggctgaggagagaggtggcacgccagccttcttgcccagctcactgagcccccagtcctccctgcccgcctccagggccctggccacccctcccaagctccacacttgtgagaagtgcagtaccagcatcgcgaaccaggctgtgcgcatccaggagggccggtaccgccaccccggctgctacacctgtgccgactgtgggctgaacctgaagatgcgcgggcacttctgggtgggtgacgagctgtactgtgagaagcatgcccgccagcgctactccgcacctgccaccctcagctctcgggcctgagcccgccatgccctcagcctgcctcactgctgggccagggtcatgcctatataagttggcatggcagggacaatggtgggcagttgctcttacatgagctaagtttggagacctgaggcccctttgtcctcgctgggtgggccaaggtctgggacctgtcttggactgtgggagactcaccctcaccttgccaggcctctcccctgcaggactggcattgcactagtctgaggtggccactgcctttgatcaacctttgtgtgcgagggtctaagtagggtcgaacacagaagtgggaaggagaggggtgggccaggggctaatggtgtcactgtgtaaagtttttgacatactagctctataaatatatgaatatggacaaaataaaaaaaaaaaaa

SEQ ID NO: 935 - DNA, 4020 bp, Homo sapiens
caccccgtaggactggccgccctaaaaccgtgataaaggagctgctcgccacttctcacttccgcttccttccagtaaggagtcggggtcttccccagttttctcagccaggcggcggcggcgactggcaatgtttggcctcaaaagaaacgcggtaatcggactcaacctctactgtgggggggccggcttgggggccggcagcggcggcgccacccgcccgggagggcgacttttggctacggagaaggaggcctcggcccggcgagagatagggggaggggaggccggcgcggtgattggcggaagcgccggcgcaagccccccgtccaccctcacgccagactcccggagggtcgcgcggccgccgcccattggcgccgaggtccccgacgtcaccgcgacccccgcgaggctgcttttcttcgcgcccacccgccgcgcggcgccgcttgaggagatggaagccccggccgctgacgccatcatgtcgcccgaagaggagctggacgggtacgagccggagcctctcgggaagcggccggctgtcctgccgctgctggagttggtcggggaatctggtaataacaccagtacggacgggtcactaccctcgacgccgccgccagcagaggaggaggaggacgagttgtaccggcagtcgctggagattatctctcggtaccttcgggagcaggccaccggcgccaaggacacaaagccaatgggcaggtctggggccaccagcaggaaggcgctggagaccttacgacgggttggggatggcgtgcagcgcaaccacgagacggccttccaaggcatgcttcggaaactggacatcaaaaacgaagacgatgtgaaatcgttgtctcgagtgatgatccatgttttcagcgacggcgtaacaaactggggcaggattgtgactctcatttcttttggtgcctttgtggctaaacacttgaagaccataaaccaagaaagctgcatcgaaccattagcagaaagtatcacagacgttctcgtaaggacaaaacgggactggctagttaaacaaagaggctgggatgggtttgtggagttcttccatgtagaggacctagaaggtggcatcaggaatgtgctgctggcttttgcaggtgttgctggagtaggagctggtttggcatatctaataagatagccttactgtaagtgcaatagttgacttttaaccaaccaccaccaccaccaaaaccagtttatgcagttggactccaagctgtaacttcctagagttgcaccctagcaacctagccagaaaagcaagtggcaagaggattatggctaacaagaataaatacatgggaagagtgctccccattgattgaagagtcactgtctgaaagaagcaaagttcagtttcagcaacaaacaaactttgtttgggaagctatggaggaggacttttagatttagtgaagatggtagggtggaaagacttaatttccttgttgagaacaggaaagtggccagtagccaggcaagtcatagaattgattacccgccgaattcattaatttactgtagtgttaagagaagcactaagaatgccagtgacctgtgtaaaagttacaagtaatagaactatgactgtaagcctcagtactgtacaagggaagcttttcctctctctaattagctttcccagtatacttcttagaaagtccaagtgttcaggacttttatacctgttatactttggcttggtttccatgattcttactttattagcctagtttatcaccaataatacttgacggaaggctcagtaattagttatgaatatggatatcctcaattcttaagacagcttgtaaatgtatttgtaaaaattgtatatatttttacagaaagtctatttctttgaaacgaaggaagtatcgaatttacattagtttttttcatacccttttgaactttgcaacttccgtaattaggaacctgtttcttacagcttttctatgctaaactttgttctgttcagttctagagtgtatacagaacgaattgatgtgtaactgtatgcagactggttgtagtggaacaaatctgataactatgcaggtttaaattttcttatctgattttggtaagtattccttagataggtttttctttgaaaacctgggattgagaggttgatgaatggaaattctttcacttcattatatgcaagttttcaataattaggtctaagtggagttttaaggttactgatgacttacaaataatgggctctgattgggcaatactcatttgagttccttccatttgacctaatttaactggtgaaatttaaagtgaattcatgggctcatctttaaagcttttactaaaagattttcagctgaatggaactcattagctgtgtgcatataaaaagatcacatcaggtggatggagagacatttgatcccttgtttgcttaataaattataaaatgatggcttggaaaagcaggctagtctaaccatggtgctattattaggcttgcttgttacacacacaggtctaagcctagtatgtcaataaagcaaatacttactgttttgtttctattaatgattcccaaaccttgttgcaagtttttgcattggcatctttggatttcagtcttgatgtttgttctatcagacttaaccttttatttcctgtccttccttgaaattgctgattgttctgctccctctacagatatttatatcaattcctacagctttcccctgccatccctgaactctttctagcccttttagattttggcactgtgaaacccctgctggaaacctgagtgaccctccctccccaccaagagtccacagacctttcatctttcacgaacttgatcctgttagcaggtggtaataccatgggtgctgtgacactaacagtcattgagaggtgggaggaagtcccttttccttggactggtatcttttcaactattgttttatcctgtctttgggggcaatgtgtcaaaagtcccctcaggaattttcagaggaaagaacattttatgaggctttctctaaagtttcctttgtataggagtatgctcacttaaatttacagaaagaggtgagctgtgttaaacctcagagtttaaaagctactgataaactgaagaaagtgtctatattggaactagggtcatttgaaagcttcagtctcggaacatgacctttagtctgtggactccatttaaaaataggtatgaataagatgactaagaatgtaatggggaagaactgccctgcctgcccatctcagagccataaggtcatctttgctagagctatttttacctatgtatttatcgttcttgatcataagccgcttatttatatcatgtatctctaaggacctaaaagcactttatgtagtttttaattaatcttaagatctggttacggtaactaaaaaagcctgtctgccaaatccagtggaaacaagtgcatagatgtgaattggtttttaggggccccacttcccaattcattaggtatgactgtggaaatacagacaaggatcttagttgatattttgggcttggggcagtgagggcttaggacaccccaagtggtttgggaaaggaggaggggagtggtgggtttatagggggaggaggaggcaggtggtctaagtgctgactggctacgtagttcgggcaaatcctccaaaagggaaagggaggatttgcttagaaggatggcgctcccagtgactactttttgacttctgtttgtcttacgcttctctcagggaaaaacatgcagtcctctagtgtttcatgtacattctgtggggggtgaacaccttggttctggttaaacagctgtacttttgatagctgtgccaggaagggttaggaccaactacaaattaatgttggttgtcaaatgtagtgtgtttccctaactttctgtttttcctgagaaaaaaaaataaatcttttattcaaaaaaaaaaaaaaaaaaa

SEQ ID NO: 936 - DNA, 3319 bp, Homo sapiens
agcggagctgcagccggagaaagaggaagagggagagagagcgcgccagggcgagggcaccgccgccggtcgggcgcgctgggcctgcccggaatcccgccgcctgcgccccgcgccccgcgccctgcgggccatgggagccggccgccggcagggacgacgcctgtgagacccgcgagcggcctcggggaccatggggagcgatcgggcccgcaagggcggagggggcccgaaggacttcggcgcgggactcaagtacaactcccggcacgagaaagtgaatggcttggaggaaggcgtggagttcctgccagtcaacaacgtcaagaaggtggaaaagcatggcccggggcgctgggtggtgctggcagccgtgctgatcggcctcctcttggtcttgctggggatcggcttcctggtgtggcatttgcagtaccgggacgtgcgtgtccagaaggtcttcaatggctacatgaggatcacaaatgagaattttgtggatgcctacgagaactccaactccactgagtttgtaagcctggccagcaaggtgaaggacgcgctgaagctgctgtacagcggagtcccattcctgggcccctaccacaaggagtcggctgtgacggccttcagcgagggcagcgtcatcgcctactactggtctgagttcagcatcccgcagcacctggtggaggaggccgagcgcgtcatggccgaggagcgcgtagtcatgctgcccccgcgggcgcgctccctgaagtcctttgtggtcacctcagtggtggctttccccacggactccaaaacagtacagaggacccaggacaacagctgcagctttggcctgcacgcccgcggtgtggagctgatgcgcttcaccacgcccggcttccctgacagcccctaccccgctcatgcccgctgccagtgggccctgcggggggacgccgactcagtgctgagcctcaccttccgcagctttgaccttgcgtcctgcgacgagcgcggcagcgacctggtgacggtgtacaacaccctgagccccatggagccccacgccctggtgcagttgtgtggcacctaccctccctcctacaacctgaccttccactcctcccagaacgtcctgctcatcacactgataaccaacactgagcggcggcatcccggctttgaggccaccttcttccagctgcctaggatgagcagctgtggaggccgcttacgtaaagcccaggggacattcaacagcccctactacccaggccactacccacccaacattgactgcacatggaacattgaggtgcccaacaaccagcatgtgaaggtgcgcttcaaattcttctacctgctggagcccggcgtgcctgcgggcacctgccccaaggactacgtggagatcaacggggagaaatactgcggagagaggtcccagttcgtcgtcaccagcaacagcaacaagatcacagttcgcttccactcagatcagtcctacaccgacaccggcttcttagctgaatacctctcctacgactccagtgacccatgcccggggcagttcacgtgccgcacggggcggtgtatccggaaggagctgcgctgtgatggctgggccgactgcaccgaccacagcgatgagctcaactgcagttgcgacgccggccaccagttcacgtgcaagaacaagttctgcaagcccctcttctgggtctgcgacagtgtgaacgactgcggagacaacagcgacgagcaggggtgcagttgtccggcccagaccttcaggtgttccaatgggaagtgcctctcgaaaagccagcagtgcaatgggaaggacgactgtggggacgggtccgacgaggcctcctgccccaaggtgaacgtcgtcacttgtaccaaacacacctaccgctgcctcaatgggctctgcttgagcaagggcaaccctgagtgtgacgggaaggaggactgtagcgacggctcagatgagaaggactgcgactgtgggctgcggtcattcacgagacaggctcgtgttgttgggggcacggatgcggatgagggcgagtggccctggcaggtaagcctgcatgctctgggccagggccacatctgcggtgcttccctcatctctcccaactggctggtctctgccgcacactgctacatcgatgacagaggattcaggtactcagaccccacgcagtggacggccttcctgggcttgcacgaccagagccagcgcagcgcccctggggtgcaggagcgcaggctcaagcgcatcatctcccaccccttcttcaatgacttcaccttcgactatgacatcgcgctgctggagctggagaaaccggcagagtacagctccatggtgcggcccatctgcctgccggacgcctcccatgtcttccctgccggcaaggccatctgggtcacgggctggggacacacccagtatggaggcactggcgcgctgatcctgcaaaagggtgagatccgcgtcatcaaccagaccacctgcgagaacctcctgccgcagcagatcacgccgcgcatgatgtgcgtgggcttcctcagcggcggcgtggactcctgccagggtgattccgggggacccctgtccagcgtggaggcggatgggcggatcttccaggccggtgtggtgagctggggagacggctgcgctcagaggaacaagccaggcgtgtacacaaggctccctctgtttcgggactggatcaaagagaacactggggtataggggccggggccacccaaatgtgtacacctgcggggccacccatcgtccaccccagtgtgcacgcctgcaggctggagactggaccgctgactgcaccagcgcccccagaacatacactgtgaactcaatctccagggctccaaatctgcctagaaaacctctcgcttcctcagcctccaaagtggagctgggaggtagaaggggaggacactggtggttctactgacccaactgggggcaaaggtttgaagacacagcctcccccgccagccccaagctgggccgaggcgcgtttgtgcatatctgcctcccctgtctctaaggagcagcgggaacggagcttcggggcctcctcagtgaaggtggtggggctgccggatctgggctgtggggcccttgggccacgctcttgaggaagcccaggctcggaggaccctggaaaacagacgggtctgagactgaaattgttttaccagctcccagggtggacttcagtgtgtgtatttgtgtaaatgagtaaaacattttatttctttttaaaaaaaaaaaaaaaaaaaa

SEQ ID NO: 937 - DNA, 2320 bp, Homo sapiens
agtgtcagagccgcccccagccgggcgggcgcctcagccatggccctgcgcaaggaactgctcaagtccatctggtacgcctttaccgcgctggacgtggagaagagtggcaaagtctccaagtcccagctcaaggtgctgtcccacaacctgtacacggtcctgcacatcccccatgaccccgtggccctggaggaacacttccgagatgatgatgacggccctgtgtccagccagggatacatgccctacctcaacaagtacatcctggacaaggtggaggagggggcttttgttaaagagcactttgatgagctgtgctggacgctgacggccaagaagaactatcgggcagatagcaacgggaacagtatgctctccaatcaggatgccttccgcctctggtgcctcttcaacttcctgtctgaggacaagtaccctctgatcatggttcctgatgaggtggaatacctgctgaaaaaggtactcagcagcatgagcttggaggtgagcttgggtgagctggaggagcttctggcccaggaggcccaggtggcccagaccaccggggggctcagcgtctggcagttcctggagctcttcaattcgggccgctgcctgcggggcgtgggccgggacaccctcagcatggccatccacgaggtctaccaggagctcatccaagatgtcctgaagcagggctacctgtggaagcgagggcacctgagaaggaactgggccgaacgctggttccagctgcagcccagctgcctctgctactttgggagtgaagagtgcaaagagaaaaggggcattatcccgctggatgcacactgctgcgtggaggtgctgccagaccgcgacggaaagcgctgcatgttctgtgtgaagacagccaaccgcacgtatgagatgagcgcctcagacacgcgccagcgccaggagtggacagctgccatccagatggcgatccggctgcaggccgaggggaagacgtccctacacaaggacctgaagcagaaacggcgcgagcagcgggagcagcgggagcggcgccgggcggccaaggaagaggagctgctgcggctgcagcagctgcaggaggagaaggagcggaagctgcaggagctggagctgctgcaggaggcgcagcggcaggccgagcggctgctgcaggaggaggaggaacggcgccgcagccagcaccgcgagctgcagcaggcgctcgagggccaactgcgcgaggcggagcaggcccgggcctccatgcaggctgagatggagctgaaggaggaggaggctgcccggcagcggcagcgcatcaaggagctggaggagatgcagcagcggttgcaggaggccctgcaactagaggtgaaagctcggcgagatgaagaatctgtgcgaatcgctcagaccagactgctggaagaggaggaagagaagctgaagcagttgatgcagctgaaggaggagcaggagcgctacatcgaacgggcgcagcaggagaaggaagagctgcagcaggagatggcacagcagagccgctccctgcagcaggcccagcagcagctggaggaggtgcggcagaaccggcagagggctgacgaggatgtggaggctgcccagagaaaactgcgccaggccagcaccaacgtgaaacactggaatgtccagatgaaccggctgatgcatccaattgagcctggagataagcgtccggtcaccagcagctccttctcaggcttccagccccctctgcttgcccaccgtgactcctccctaaagcgcctgacccgctggggatcccagggcaacaggaccccctcgcccaacagcaatgagcagcagaagtccctcaatggtggggatgaggctcctgccccggcttccacccctcaggaagataaactggatccagcaccagaaaattagcctctcttagccccttgttcttcccaatgtcatatccaccaggacctggccacagctggcctgtgggtgatcccagctcttactaggagagggagctgaggtcctggtgccaggggcccaggccctccaaccataaacagtccaggatggaacctggttcacccttcataccagctccaagccccagaccatgggagctgtctgggatgttgatccttgagaacttggccctgtgctttagacccaaggacccgattcttgggctaggaaagagagaacaagcaagccggggctacctgcccccaggtggccaccaagttgtggaagcacatttctaaataaaaactgctcttagaatgaaaaaaaaaaaaaaaaaaaaaaaaaa

SEQ ID NO: 938 - DNA, 3434 bp, Homo sapiens
gccccgctgcccacctgcccgcctgcccacctgcccaggtgcgagtgcagccccgcgcgccggcctgagagccctgtggacaacctcgtcattgtcaggcacagagcggtagaccctgcttctctaagtgggcagcggacagcggcacgcacatttcacctgtcccgcagacaacagcaccatctgcttgggagaaccctctcccttctctgagaaagaaagatgtcgaatgggtattccacagacgagaatttccgctatctcatctcgtgcttcagggccagggtgaaaatgtacatccaggtggagcctgtgctggactacctgacctttctgcctgcagaggtgaaggagcagattcagaggacagtcgccacctccgggaacatgcaggcagttgaactgctgctgagcaccttggagaagggagtctggcaccttggttggactcgggaattcgtggaggccctccggagaaccggcagccctctggccgcccgctacatgaaccctgagctcacggacttgccctctccatcgtttgagaacgctcatgatgaatatctccaactgctgaacctccttcagcccactctggtggacaagcttctagttagagacgtcttggataagtgcatggaggaggaactgttgacaattgaagacagaaaccggattgctgctgcagaaaacaatggaaatgaatcaggtgtaagagagctactaaaaaggattgtgcagaaagaaaactggttctctgcatttctgaatgttcttcgtcaaacaggaaacaatgaacttgtccaagagttaacaggctctgattgctcagaaagcaatgcagagattgagaatttatcacaagttgatggtcctcaagtggaagagcaacttctttcaaccacagttcagccaaatctggagaaggaggtctggggcatggagaataactcatcagaatcatcttttgcagattcttctgtagtttcagaatcagacacaagtttggcagaaggaagtgtcagctgcttagatgaaagtcttggacataacagcaacatgggcagtgattcaggcaccatgggaagtgattcagatgaagagaatgtggcagcaagagcatccccggagccagaactccagctcaggccttaccaaatggaagttgcccagccagccttggaagggaagaatatcatcatctgcctccctacagggagtggaaaaaccagagtggctgtttacattgccaaggatcacttagacaagaagaaaaaagcatctgagcctggaaaagttatagttcttgtcaataaggtactgctagttgaacagctcttccgcaaggagttccaaccatttttgaagaaatggtatcgtgttattggattaagtggtgatacccaactgaaaatatcatttccagaagttgtcaagtcctgtgatattattatcagtacagctcaaatccttgaaaactccctcttaaacttggaaaatggagaagatgctggtgttcaattgtcagacttttccctcattatcattgatgaatgtcatcacaccaacaaagaagcagtgtataataacatcatgaggcattatttgatgcagaagttgaaaaacaatagactcaagaaagaaaacaaaccagtgattccccttcctcagatactgggactaacagcttcacctggtgttggaggggccacgaagcaagccaaagctgaagaacacattttaaaactatgtgccaatcttgatgcatttactattaaaactgttaaagaaaaccttgatcaactgaaaaaccaaatacaggagccatgcaagaagtttgccattgcagatgcaaccagagaagatccatttaaagagaaacttctagaaataatgacaaggattcaaacttattgtcaaatgagtccaatgtcagattttggaactcaaccctatgaacaatgggccattcaaatggaaaaaaaagctgcaaaagaaggaaatcgcaaagaacgtgtttgtgcagaacatttgaggaagtacaatgaggccctacaaattaatgacacaattcgaatgatagatgcgtatactcatcttgaaactttctataatgaagagaaagataagaagtttgcagtcatagaagatgatagtgatgagggtggtgatgatgagtattgtgatggtgatgaagatgaggatgatttaaagaaacctttgaaactggatgaaacagatagatttctcatgactttattttttgaaaacaataaaatgttgaaaaggctggctgaaaacccagaatatgaaaatgaaaagctgaccaaattaagaaataccataatggagcaatatactaggactgaggaatcagcacgaggaataatctttacaaaaacacgacagagtgcatatgcgctttcccagtggattactgaaaatgaaaaatttgctgaagtaggagtcaaagcccaccatctgattggagctggacacagcagtgagttcaaacccatgacacagaatgaacaaaaagaagtcattagtaaatttcgcactggaaaaataaatctgcttatcgctaccacagtggcagaagaaggtctggatattaaagaatgtaacattgttatccgttatggtctcgtcaccaatgaaatagccatggtccaggcccgtggtcgagccagagctgatgagagcacctacgtcctggttgctcacagtggttcaggagttatcgaacatgagacagttaatgatttccgagagaagatgatgtataaagctatacattgtgttcaaaatatgaaaccagaggagtatgctcataagattttggaattacagatgcaaagtataatggaaaagaaaatgaaaaccaagagaaatattgccaagcattacaagaataacccatcactaataactttcctttgcaaaaactgcagtgtgctagcctgttctggggaagatatccatgtaattgagaaaatgcatcacgtcaatatgaccccagaattcaaggaactttacattgtaagagaaaacaaagcactgcaaaagaagtgtgccgactatcaaataaatggtgaaatcatctgcaaatgtggccaggcttggggaacaatgatggtgcacaaaggcttagatttgccttgtctcaaaataaggaattttgtagtggttttcaaaaataattcaacaaagaaacaatacaaaaagtgggtagaattacctatcacatttcccaatcttgactattcagaatgctgtttatttagtgatgaggattagcacttgattgaagattcttttaaaatactatcagttaaacatttaatatgattatgattaatgtattcattatgctacagaactgacataagaatcaataaaatgattgttttactctgcaaaaaaaaaaaaaa

SEQ ID NO: 939 - DNA, 3257 bp, Homo sapiens
ggcatgatgggcacctggagggccgcactcccgttccagccaggctgagccttctgtcccctgcctctggggcctgggaaccccccttcttctttctcctgaatggcacccccgccctagaatccagacaccgagtttcccactgtggctggttcaagggtatgtgagagctccctggtgacagtctgtggctgagcatggccctcccagccctgggcctggacccctggagcctcctgggccttttcctcttccaactgcttcagctgctgctgccgacgacgaccgcggggggaggcgggcaggggcccatgcccagggtcagatactatgcaggggatgaacgtagggcacttagcttcttccaccagaagggcctccaggattttgacactctgctcctgagtggtgatggaaatactctctacgtgggggctcgagaagccattctggccttggatatccaggatccaggggtccccaggctaaagaacatgataccgtggccagccagtgacagaaaaaagagtgaatgtgcctttaagaagaagagcaatgagacacagtgtttcaacttcatccgtgtcctggtttcttacaatgtcacccatctctacacctgcggcaccttcgccttcagccctgcttgtaccttcattgaacttcaagattcctacctgttgcccatctcggaggacaaggtcatggagggaaaaggccaaagcccctttgaccccgctcacaagcatacggctgtcttggtggatgggatgctctattctggtactatgaacaacttcctgggcagtgagcccatcctgatgcgcacactgggatcccagcctgtcctcaagaccgacaacttcctccgctggctgcatcatgacgcctcctttgtggcagccatcccttcgacccaggtcgtctacttcttcttcgaggagacagccagcgagtttgacttctttgagaggctccacacatcgcgggtggctagagtctgcaagaatgacgtgggcggcgaaaagctgctgcagaagaagtggaccaccttcctgaaggcccagctgctctgcacccagccggggcagctgcccttcaacgtcatccgccacgcggtcctgctccccgccgattctcccacagctccccacatctacgcagtcttcacctcccagtggcaggttggcgggaccaggagctctgcggtttgtgccttctctctcttggacattgaacgtgtctttaaggggaaatacaaagagttgaacaaagaaacttcacgctggactacttataggggccctgagaccaacccccggccaggcagttgctcagtgggcccctcctctgataaggccctgaccttcatgaaggaccatttcctgatggatgagcaagtggtggggacgcccctgctggtgaaatctggcgtggagtatacacggcttgcagtggagacagcccagggccttgatgggcacagccatcttgtcatgtacctgggaaccaccacagggtcgctccacaaggctgtggtaagtggggacagcagtgctcatctggtggaagagattcagctgttccctgaccctgaacctgttcgcaacctgcagctggcccccacccagggtgcagtgtttgtaggcttctcaggaggtgtctggagggtgccccgagccaactgtagtgtctatgagagctgtgtggactgtgtccttgcccgggacccccactgtgcctgggaccctgagtcccgaacctgttgcctcctgtctgcccccaacctgaactcctggaagcaggacatggagcgggggaacccagagtgggcatgtgccagtggccccatgagcaggagccttcggcctcagagccgcccgcaaatcattaaagaagtcctggctgtccctaactccatcctggagctcccctgcccccacctgtcagccttggcctcttattattggagtcatggcccagcagcagtcccagaagcctcttccactgtctacaatggctccctcttgctgatagtgcaggatggagttgggggtctctaccagtgctgggcaactgagaatggcttttcataccctgtgatctcctactgggtggacagccaggaccagaccctggccctggatcctgaactggcaggcatcccccgggagcatgtgaaggtcccgttgaccagggtcagtggtggggccgccctggctgcccagcagtcctactggccccactttgtcactgtcactgtcctctttgccttagtgctttcaggagccctcatcatcctcgtggcctccccattgagagcactccgggctcggggcaaggttcagggctgtgagaccctgcgccctggggagaaggccccgttaagcagagagcaacacctccagtctcccaaggaatgcaggacctctgccagtgatgtggacgctgacaacaactgcctaggcactgaggtagcttaaactctaggcacaggccggggctgcggtgcaggcacctggccatgctggctgggcggcccaagcacagccctgactaggatgacagcagcacaaaagaccacctttctcccctgagaggagcttctgctactctgcatcactgatgacactcagcagggtgatgcacagcagtctgcctcccctatgggactcccttctaccaagcacatgagctctctaacagggtgggggctacccccagacctgctcctacactgatattgaagaacctggagaggatccttcagttctggccattccagggaccctccagaaacacagtgtttcaagagaccctaaaaaacctgcctgtcccaggaccctatggtaatgaacaccaaacatctaaacaatcatatgctaacatgccactcctggaaactccactctgaagctgccgctttggacaccaacactcccttctcccagggtcatgcagggatctgctccctcctgcttcccttaccagtcgtgcaccgctgactcccaggaagtctttcctgaagtctgaccacctttcttcttgcttcagttggggcagactctgatcccttctgccctggcagaatggcaggggtaatctgagccttcttcactcctttaccctagctgaccccttcacctctccccctcccttttcctttgttttgggattcagaaaactgcttgtcagagactgtttattttttattaaaaatataaggcttaaaaaaaaaaaaaaaaaaaaaaaaaaaa

SEQ ID NO: 940 - DNA, 3113 bp, Homo sapiens
gaacctggcttcgctaacgccctcccagctccctcgggcctgacttccggtttcctcgcgcgtccctggcgccgagcccgcggacagcggcagccccttttccggctgagagctcatccacacttccaatcactttccggagtgcttcccctccctccggcccgtgctggtcccgacggcgggcctgggtctcgcgcgcgtattgctgggtaacgggccttctctcgcgtcggcccggcccctcctgcctcggctcgtccctccttccagaacgtcccgggctcctgccgagtcagaagaaatgggactccctccgcgacgtgcccggagcagctcccttcgctgtggaagcggcggtgtcttcgaagaaaccggaagcccgtggtgacccctggcgacccggtttgttttcggtccgtttccaaacactaaggaatcgaaactcggcggccttgggggcggccctacgtagcctggcttctggttgtcatggatgcactggtagaagatgatatctgtattctgaatcatgaaaaagcccataagagagatacagtgactccagtttcaatatattcaggagatgaatctgttgcttcccattttgctcttgtcactgcatatgaagacatcaaaaaacgacttaaggattcagagaaagagaactctttgttaaagaagagaataagatttttggaagaaaagctaatagctcgatttgaagaagaaacaagttccgtgggacgagaacaagtaaataaggcctatcatgcatatcgagaggtttgcattgatagagataatttgaagagcaaactggacaaaatgaataaagacaactctgaatctttgaaagtattgaatgagcagctacaatctaaagaagtagaactcctccagctgaggacagaggtggaaactcagcaggtgatgaggaatttaaatccaccttcatcaaactgggaggtggaaaagttgagctgtgacctgaagatccatggtttggaacaagagctggaactgatgaggaaagaatgtagcgatctcaaaatagaactacagaaagccaaacaaacggatccatatcaggaagacaatctgaagagcagagatctccaaaaactaagcatttcaagtgataatatgcagcatgcatactgggaactgaagagagaaatgtctaatttacatctggtgactcaagtacaagctgaactactaagaaaactgaaaacctcaactgcaatcaagaaagcctgtgcccctgtaggatgcagtgaagaccttggaagagacagcacaaaactgcacttgatgaattttactgcaacatacacaagacatccccctctcttaccaaatggcaaagctctttgtcataccacatcttcccctttaccaggagatgtaaaggttttatcagagaaagcaatcctccaatcatggacagacaatgagagatccattcctaatgatggtacatgctttcaggaacacagttcttatggcagaaattctctggaagacaattcctgggtatttccaagtcctcctaaatcaagtgagacagcatttggggaaactaaaactaaaactttgcctttacccaaccttccaccactgcattacttggatcaacataatcagaactgcctttataagaattaatttggaagagattcacgatttcaccatgaggacacttatctctttcagtggtcctcccaagaaattatttaacaaactgaaaggagattttgattaaaattttgcagaggtcttcagtatctatatttgaacacactgtacaatagtacaaaaaccaacatagttggttttctagtatgaaagagcaccctctagctccatattctaagaatctgaaatatgctactatactaattaataagtaaacttaaggtgtttaaaaaactctgccttctatattaattgtaaaattttgcctctcagaagaatggaattggagattgtagacgtggttttacaaaatgtgaaatgtctaaatatctgttcataaaaataaaaggaaaacatgtttcttcaaattgcataatggaacaaatggcaatgtgagtaggttacatttctgttgttataatgcgtaaagatattgaaaatataatgaaataaaagcatcttaggttataccatctttatatgctattgcgtttcaatatttaagatttaaagtgattttttggtcacagtgttttgttgataaaatttttttagaattgaagtttgaattctaagacttgaaacaacctgatcactgaagccaactttgtcccagcacattccttaagtcctaattgggaaaaaaaaaaaaaaaaatgaaatagttgaaaaactctggggtgtaaacaaatgattgtaaccctacacactattcaataagtagtagaaggagcatcacacagatttcagtctaatctgcccttctgtgggccataatataaacataaatgtgtgtaatgataaaaagtcattttcttcaaagagactacagctagctgcacattgtgtagagcagcttctaaattgttagactttgtgttgaaatgtaatattctatttattgagaaagtgatttaaaattattatttttaatcatagaaatcagggtttgggctgtattgatattgtcgatcatgaaatgtccacactttctaagtggccaattatttggaaataaagaaggaaataaagatggcttcacatggaaatttaagttctttcagggtggagatttacttggttcatacaccttttgcctgaattaaagtatttcatgtaggaggacttttatcctttttgatagacagtttcatatatcttgaactcaatatctcagatctcttctactgtattactgaatagcatacatacatagacaatgttcgccattcactagatatttttttctattatcttacacttattcaagcttgtctgtgattaatggaattggtgtcagatgctggaatttattctgaccaatgaacacagctgactcaggggagtacaatctcctgccaagtaatagaaccaaacccaatatgcataaaagaaatacaatactccaggcttta

SEQ ID NO: 941 - DNA, 5101 bp, Homo sapiens
cggaacccggtcgaaagggtcctctctggcgtccttctgcttccgtgggtttctggataggctgcgttttgttctcaggggatgcaagttcttcctttcagggttgaagcgtgagagaggttggtttttgaaacgggagtgtttcaggttattgaggtccaaaaagaaataaagtttttgtttacgtctgtatggcttgtaagatatctcccggggccaattcagcatctctacctggccatcctaacaaggtgatttgtgaaagggtgagacttcagagcctgttccctctcctcccaagtgatcagaacactaccgttcaagaggatgctcacttcaaagctttcttccagagtgaagatagtccaagtcctaagagacagcgcctctctcattcagtctttgattatacatcagcatcaccagctccctcaccaccaatgcgaccatgggagatgacatcaaataggcagcccccttcagttcgaccaagccaacatcacttctcaggggaacgatgcaacacacctgcacgcaacagaagaagtcctcctgtcaggcgccagagaggaagaagggatcgtctgtctcgacataattccattagtcaagatgaaaactatcaccatctcccttacgcacagcagcaagcaatagaggagcctcgagccttccaccctccgaatgtatctccccgtctgctacatcctgctgctcatccaccccagcagaatgcagtcatggttgacatacatgatcagctccatcaaggaacagtccctgtttcttacacagtaacaacagtggcaccacatgggattccactctgcacaggccagcacatccctgcttgtagtacacagcaggtcccaggatgctctgtggttttcagtggacagcacctccctgtctgtagtgtgcctcctccaatgcttcaggcatgttcagttcagcacttaccagtaccatatgctgcattcccaccccttatttctagtgatccatttcttatacatcctcctcacctttctccccatcatcctcctcatttgccaccaccaggccagtttgtccctttccaaacacagcaatcacgatcgcctctgcaaaggatagaaaatgaagtggaactcttaggagaacatcttccagtaggaggttttacttaccctccatcagcccaccccccaacattacctccatcagctcccttgcagttcttaacacatgatcctttgcatcaggaggtgtcctttggagtaccttatcctccatttatgcctcggaggcttacaggacgtagtagataccgatcccagcagccaataccacctcccccttatcatcccagcttactgccatatgtgttatcaatgcttccagtgccacctgcagtgggcccaactttcagctttgaattagatgtagaagatggagaagtagaaaattacgaggccctgttaaacctggcagagcgactgggagaggcaaagcctcgtggactgactaaagcagatattgaacaacttccttcttatcggttcaatcctaacaaccaccagtcagaacagactttgtgtgtagtatgcatgtgtgattttgagtcaaggcagctacttagagtcttaccctgtaaccacgagttccatgccaagtgtgttgacaaatggcttaaggcaaatcgtacttgcccaatttgccgagctgatgcttcagaagtgcatcgggattcagaatgaccaacctaagaagcacaaatttagtttgggtgttcctcatcacatgtatatacggactatccattgaacttaatctgtgtggcttccagccctccctttaccaaaagggtcaatggacctttctttgcactgtgtgacttaatcaactataaaagcttacaattagtcttcacagttatgggattgttatactaaccgtgtgattggaactccaaagactttttctttagcttaattttgtgtgtgcactaacattccctggtttttgtgtgatcattccgagtgttgctgcaagattacagtggacgtgatcttttagcatgtgcttttataaaaagtggtagctacagatgatatagcaatctaccttatatagagccttcagaaactgtgagtggaaatgaatgcgcagcgtatgactgttggtgataagtgtatctgtgtgagtgtgtgcaactacttgtgtgagggcatggtagctaacgtgtgtatgagatcctatataccagcatgtaccaagaatgtgtgtgtagttttaattatgctgcaatgtataatctggtgtgttatttaaacagcactagtactgtacactggtttttttcccttgtgtttgctgttgcacactgattgctgagggtgcatcaattacaagcattgaatactccatccccttccctcccagtgaatggaatgagaaaagccttcttcctttgcttcaggcagctgtcaccttctctttattggtggtcctaagtgggtcacttaagaaaaaaaagtgtaacaaattctcgctccatgaacctggtttttttttattctgttgtggaaatttttaaatctccaacttgctgtttccaaaaagaaggtgcaatatcatatatcatcagttagcaatattagcatttcaatcagtgatttgaatgttgatacttttttttcctttacatttccagtaagtttcttacagaaagtacctgtgattttttttaatgtttagatttgtagtctagtctattctgaagatatttgattaatatatttctaagaagaccactagtcccatgaagtctcaccttgttgacttccaccagaacaaaacctgttaattcagcttgacttctcatatgtgttctgtgttcaagctcctgtgggcaactcaattgttttaagaaaactctatttctgttcatattaattcacttgccagactccaattctgaaagttgtctagttcttccttcatcacacgtgcttctcatcgaaaccctggtttcaggatggatcaagtgctgttacagctcatgttccttagacctgatttgttttgatattttactgcctttccttttaatttttgtttgaatgagaaaagtttaatacaacaggtgtccagaatacttgcagtataaatgaagatttggtttttgtataaaaaaataatgctgttaaacaggagttgaccttcatttagttgatgtaatacatagctgtatggggttttttttagtaagttctttgagcataattcactttaaagtcatttttccagcaatgtttaaattactttctcattcttttagtgtattcaacattgtctgcctcttcctgcagttgatgtaattgctttgtttgcaatagcacaagctgcattattccagtcaggactgtgataacttgctgccagccccactcaactttcagttggctctgtgtcagttttccattcagtgttaactacttgttactgccatgctgcttgccctcccttgaagtgtctataagctcatcacagcctagagttaagtaaagtcaattcacagaagcacaattttgccctttgcgagacattgttgcctctatctagtcctacaagtagggttttgcatactgtgtttgcccctagggttgtcagtgcatcagaaatacttctaaatagtggtaaaaatgcacatggttaatgcacatgttacttttaaatcattaggatatccctcacctgttcctgatgaataaaaagtgtgttaaagaccaaaattcttggcataataatcagctacatacaaatcacatatagtttaatcttttttaatgaaaaaaaatcatgtttaaaatggcaaaagcccatcttatacacttttatatagctgcaaaaaatttatatctgtacagatctaacactacgacactcagtattcattttattgaagcatgcaagtaaagcactttttctaatttatatagaggtatctaattaacacagcacattgtactaatgactaggagtagcagctttttcttctctccctctatgaattcttataatgtccctttttctgtaagtttttgagaggcaattggcaatttaggaggcagcagggtctgttttggtcaaatcttgaatttcgttgttgcactctagtgactgatctttgggaatgtcttgtctttgcatggggctcatagagatgtgtgcagacttgcttattgtggttagtgtgtatcaggaacacacacacaggtgttctgaccagctcaggcttgccacagtgagcaactctgtggctagcaaaagagaagtttatttgtgcccagccattggtcaccttgggtgatgcaccagatagcaggcagatgttggttcattggccttcgtcctctttcctcctaaaataatattggctttaccatcttaactcagctgtgggttttttgtgggttcttgtttgttttttggcatgaattgtcatctttggtgtttttttaacccccagcccctcaaaaaaataaggcctccaggtatcaagatctcatattaggattttctgtccttaattttttgagcaaaatctggaaaatgtgaaagcatatttagattttatatactatctgaaatgtgatttgttaagattcttaaatttgggcctcttagaataattttgaatgagatctaccgactcacttgtgagaatatttttcacagattatctttgggccttttcattagaaagctgtttgtttgtccccctgttggtacatttggttacctcattttgccgtttcagattgtgaaagctcacaggggtgttttttggaatcatttgctgagtcattttctcaaatcatattccattgtatcagttaacatatagttttaaatgtatgtattataaatatctgtaaccaaatcatttgaaggcttgataaatttttaacaaagtttgtacattttttatgaaagttactagtaatgctttactaagtagtgcaatgaatttttatttttaatccctgtgcccaattttggagttgagagggttgttggtaataaatgtatgatgtacacttaaaaaaaaaaaaaa

SEQ ID NO: 942 - DNA, 860 bp, Homo sapiens
ccagccttcagccggagaaccgtttactcgctgctgtgcccatctatcagcaggctccgggctgaagattgcttctcttctctcctccaaggtctagtgacggagcccgcgcgcggcgccaccatgcggcagaaggcggtatcgcttttcttgtgctacctgctgctcttcacttgcagtggggtggaggcaggtgagaatgcgggtaaggatgcaggtaagaaaaagtgctcggagagctcggacagcggctccgggttctggaaggccctgaccttcatggccgtcggaggaggactcgcagtcgccgggctgcccgcgctgggcttcaccggcgccggcatcgcggccaactcggtggctgcctcgctgatgagctggtctgcgatcctgaatgggggcggcgtgcccgccggggggctagtggccacgctgcagagcctcggggctggtggcagcagcgtcgtcataggtaatattggtgccctgatgggctacgccacccacaagtatctcgatagtgaggaggatgaggagtagccagcagctcccagaacctcttcttccttcttggcctaactcttccagttaggatctagaactttgcctttttttttttttttttttttttgagatgggttctcactatattgtccaggctagagtgcagtggctattcacagatgcgaacatagtacactgcagcctccaactcctagcctcaagtgatcctcctgtctcaacctcccaagtaggattacaagcatgcgccgacgatgcccagaatccagaactttgtctatcactctccccaacaacctagatgtgaaaacagaataaacttcacccagaaaacactt

SEQ ID NO: 943 - DNA, 4538 bp, Homo sapiens
tggtgtggggagacgctggtcctccccgtcctcccatagcgcttattgcctcaccctcaccccctaggggccggatccaaaggcgctgcactccccaagccttggggcatcagccaggaaggtttcctacctcctaattcaggggcaggactcctcttttccccccacggggaaaagaggcagaaacttaggggtttccctcctttcttagggtcagacgctcttagggtccacttcttcaggggcggaagcctctcctacccttcccataggggcacaggcctttaccccactgtacttcggagccaacgcctttccctcagcactgccaccccagagtcaggacccagaggactgtgccttcgcccccaacgcaggcgcggccttttggagaggagggaggagtggagaggacaggggcccttgctctcccctccccaacttgttcctcttgccccccagtccctggcaatccagagatcccgatatctaggactgtccatccatccactccctgaccttttcccggctcctggctgcagccatggagttgcagaagggaaaaggggcggcagcagcagcagctgcttcgggagcagcgggaggtggaggaggaggagcgggagcaggagccccaggaggggggaggctgctactttcaaccagtttggatgccaaggatgagttagaggagagattggaaaggtgtatgagcattgtgacatcgatgactgctggtgtctcggagagagaagccaatgatgccctcaatgcgtatgtgtgcaaaggcctcccccagcatgaagaaatctgcctgggcctgtttactctcatcctcactgaacctgcccaagcccagaagtgttaccgggacttagctctggtgagtcgtgatggcatgaatattgtcctgaataaaatcaaccagatacttatggagaagtacctgaagctgcaggatacctgccgtactcagttggtgtggttggtacgggaactggtgaagagtggggttctgggagccgatggtgtttgtatgacgtttatgaagcagattgcaggtggagatgttacagccaaaaatatctggttggcagaaagtgttctggatatcctgacagagcaaagggagtgggtcctgaagagcagcatcctcattgccatggctgtttacacgtacctccgcctcatcgtggaccaccatgggactgcccagctccaggccctgcgacagaaggaagtagacttctgcatctcactgcttcgggaacggttcatggaatgtctgatgattggtcgggatctcgtaagactacttcagaatgttgctaggataccagaatttgaactgctttggaaagatattatccataatcctcaggccttgagtcctcagttcacaggtatcctacagcttcttcagtcaagaacatcccgaaaattcctagcatgtcgtctaaccccggacatggagactaaactcctcttcatgacatcccgggtgcgatttggtcaacaaaagcgataccaagattggttccagcgccagtacctgtcaactccagatagtcagtctctgcgctgtgacctcattcgctacatctgtggggtagtccacccttctaatgaagtactgagttcagatatcttgccccggtgggccatcattggttggctcctgacaacgtgcacgtcaaatgtcgctgcctccaatgccaagctggctttgttttatgactggctgttctttagtccagacaaggatagcattatgaacatagaaccagccatcctggtcatgcaccactccatgaagccccacccagccatcactgccacactcctggacttcatgtgccgcatcattcccaacttctatccaccattggagggccacgtgcggcagggtgtcttttcctccctcaaccacattgtggagaaacgggtcttggcacacctagctcccctgtttgacaaccctaagttggataaggagctgcgggcaatgctgagagagaagtttcctgagttctgcagctcaccctccccacctgtggaagtcaaaattgaggagccagtttccatggagatggacaaccatatgtcggataaggatgagagttgctatgacaatgcagaggcagccttcagtgacgatgaagaggatctcaacagcaaaggaaagaagagggagtttcgcttccaccctatcaaggagacagttgtggaggagccagttgatatcaccccttaccttgaccagttggatgagtccctgagggacaaagtactccagctacagaaggggagtgatacggaggcccagtgtgaggtcatgcaggaaattgtggaccaggtcctggaggaagactttgactcggagcagctgtctgtccttgcttcctgcctacaggagctcttcaaggcccactttcgaggggaggtcctgcctgaggagattactgaggagtccctggaggagtctgtaggaaagcctctgtacctaatatttaggaacctatgtcagatgcaggaagacaacagcagcttctctctacttctagaccttctctccgagctatatcagaagcagcccaagattggctaccacctgctctactacctgagggccagcaaagccgccgcagggaagatgaacctgtacgagtcatttgcccaggctacccagctgggcgatctgcacacctgcctgatgatggacatgaaggcctgccaggaggacgatgtgcggctcctgtgccacctcacgccctccatctacacagagtttccagatgaaaccttgaggagcggagagctgctgaacatgatcgtggctgttattgactctgcacagctccaggagctggtctgccacgtgatgatgggtaacctggttatgtttcgaaaagactcagttctcaacatactcattcagagcctagactgggagacctttgagcagtattgtgcctggcagctctttctggcccacaatattcccctggagaccataatccccatcctgcagcacctcaaatacaaggagcacccagaggccctgtcctgcctactgcttcaactccgaagagaaaagcccagcgaggagatggtgaagatggtgctgagccggccctgccatcctgacgaccagttcaccaccagcatcctgcggcactggtgcatgaaacatgacgagctgctggccgagcacatcaagtccctgctcatcaagaacaacagcctgcctcgcaagagacagagcctgaggagctctagcagcaagctggcccagctgactctggagcagatcctggagcacttggacaatctgcggctcaacctgaccaacaccaagcagaacttttttagccagacgccaattctccaggcgctgcagcatgtccaagcgagctgtgacgaagcccacaagatgaaattcagtgatctcttctccctggcggaggaatatgaggactcttccaccaagccacccaagagccggcgaaaagcagctctgtccagccctcgaagtcgaaagaatgccacacagccccccaatgccgaagaagagtcgggctccagcagtgcttcagaagaggaagacacgaaaccgaagcctaccaagcggaaacgaaaagggtcctctgcagtgggctctgacagtgactgaggccctgcattccccatcccacccccggctggactgccctctccttcttggtgattcaaaggttaatagaggctgaggagattgcaggggaaacacccttgctgcatccccaagctcccccggtggaaggaggagctttctcctctggctgagtttgagaagctgccatgcagcccctagccccttccctcctcctggggcctccagcccctcacactgctgttcccagtgatatttgggatctgactgaagccagaggctctgtaaaatcagaccatagtggaagtcctcagccccctggccccttccgcaatctcctcccccagtctcccaaagagccatttcaacagagaagggaaatgacaaaggggcagctggccagataagctaggatgagagcagagactcagtgtgtgggtgtcccttcctgcttccccttcaggtcttggtttgttctgaagggacgttttatagtcactatccacatgccagtgtgaaatgggcatctatgacgtggtcagggtgtccattcctaatcatggggcagatgccacaagcattcagaaaggagtctgaaagggtggccacagccccacgtggtgtgccctggaggcttaggttggtctgaggttggcacctcaatctacaccagagcccagggagtcccagaggcaagtttcacagaattgtcaaatgatcccatttccttgagtctgtttttttttttgtttttttttgttttttttttggcagagataatcgtgtcttaaaagttgtttttaaatgacaataaaacaagccagaatgtcaaaaaaaaaaaaaaaaaaaaaaaaaaaaaaaaaaaaaaaaaaaaaaaaaaaaaaaa

SEQ ID NO: 944 - DNA, 2858 bp, Homo sapiens
aacagtattttccttttcaacacatctattgaaagtgttggataaatgcaggatgttaatatgctataaacataaagtctgtttttaaaaaatagcatttgaaaatcatgaagggctttttgttttcttttgtttgtatatatgtttattggtaacaggtgacactggaagcaatgaacaccacagtgatgcaaggcttcaacagatctgagcggtgccccagagacactcggatagtacagctggtattcccagccctctacacagtggttttcttgaccggcatcctgctgaatactttggctctgtgggtgtttgttcacatccccagctcctccaccttcatcatctacctcaaaaacactttggtggccgacttgataatgacactcatgcttcctttcaaaatcctctctgactcacacctggcaccctggcagctcagagcttttgtgtgtcgtttttcttcggtgatattttatgagaccatgtatgtgggcatcgtgctgttagggctcatagcctttgacagattcctcaagatcatcagacctttgagaaatatttttctaaaaaaacctgtttttgcaaaaacggtctcaatcttcatctggttctttttgttcttcatctccctgccaaatacgatcttgagcaacaaggaagcaacaccatcgtctgtgaaaaagtgtgcttccttaaaggggcctctggggctgaaatggcatcaaatggtaaataacatatgccagtttattttctggactgtttttatcctaatgcttgtgttttatgtggttattgcaaaaaaagtatatgattcttatagaaagtccaaaagtaaggacagaaaaaacaacaaaaagctggaaggcaaagtatttgttgtcgtggctgtcttctttgtgtgttttgctccatttcattttgccagagttccatatactcacagtcaaaccaacaataagactgactgtagactgcaaaatcaactgtttattgctaaagaaacaactctctttttggcagcaactaacatttgtatggatcccttaatatacatattcttatgtaaaaaattcacagaaaagctaccatgtatgcaagggagaaagaccacagcatcaagccaagaaaatcatagcagtcagacagacaacataaccttaggctgacaactgtacatagggttaacttctatttattgatgagacttccgtagataatgtggaaatcaaatttaaccaagaaaaaaagattggaacaaatgctctcttacattttattatcctcgtgtacagaaaagattatataaaatttaaatccacatagatctattcataagctgaatgaaccattactaagagaatgcaacaggatacaaatggccactagaggtcattatttctttctttctttttttttttttttaatttcaagagcatttcactttaacattttggaaaagactaaggagaaacgtatatccctacaaacctcccctccaaacaccttctcacattcttttccacaattcacataacactactgcttttgtgccccttaaatgtagatatgtgctgaaagaaaaaaaaaacgcccaactcttgaagtccattgctgaaaactgcagccaggggttgaaagggatgcagacttgaagagtctgaggaactgaagtgggtcagcaagacctctgaaatcctgggtaaaggattttctccttacaattacaaacagcctctttcacattacaataatataccataggaggcacaagcaccattattaagccactttgcttacaccttaagtgtgtacaattcaagtgtgagaatgctgtgttaactattctttggaattctccttctgtccagcaaatactctaatgatggttaaacatggcacctactcagcaatgccttcctggaccacaacccctatccccctgccccaccctcctcattaaaaacaaatacttctactgtttgggtgtgtgatagggttctcaatgcagatctcccttttctagttagctatattcttgactgcatccgctaaaaatgttaaagcttcttgagagacagacatgccagattttcttggtatctcccataatacgacctacagtccatggtctacagatgttttaaatagaattgctattctcgatacatacaaagacgtaattgctgacccacaatcagtaacatccatattgagagatttttcaaaggatggtgaccctgcttgtatttatttaccttggtattttttcttgcatccttctgtgattcaaaaaagtaaaatgtggctttctgaaatgatggataagagtctacatcttctagaaaaaatacataaaggagtagttaagctctgtaaatgtgccacgagctccaacacgaccatcgtagggtgaagcccacgttttcttccatggcctcaaaggccctagaacttgcctacctttctggccttacctcctagctacttatccatctcttgaactttatactcttgtataaatttctaactttcagaaaatgccatactctgttttggcaccacacatgtatatttccccctggtacacttggaagactcttatccatctgtgaaaccctatgttgtcatcacttggtccatgaaatattacctggccaatatcccaccatcacctcaaacccaatcaccccctcctctgtatgctgtcacacctatattattaaacttatcacattgcattgtaattacttcctgacctttgtatctactcttttagtaactgatgtatatatctgaaaggagagattgtttcattgtgcaatcaataaatgtttgataaaataaagccc

SEQ ID NO: 945 - DNA, 1619 bp, Homo sapiens
aacattcctgcaaatggtttcaatatatgcagatgtctcgatataggaatgaaattacgtctttggaacaacttaaataagtcaaatatacttggagctttaaaaattaaaaggagagagattcgagcaccttttctgctgccatgacaaccatgcaaggaatggaacaggccatgccaggggctggccctggtgtgccccagctgggaaacatggctgtcatacattcacatctgtggaaaggattgcaagagaagttcttgaagggagaacccaaagtccttggggttgtgcagattctgactgccctgatgagccttagcatgggaataacaatgatgtgtatggcatctaatacttatggaagtaaccctatttccgtgtatatcgggtacacaatttgggggtcagtaatgtttattatttcaggatccttgtcaattgcagcaggaattagaactacaaaaggcctggtccgaggtagtctaggaatgaatatcaccagctctgtactggctgcatcagggatcttaatcaacacatttagcttggcgttttattcattccatcacccttactgtaactactatggcaactcaaataattgtcatgggactatgtccatcttaatgggtctggatggcatggtgctcctcttaagtgtgctggaattctgcattgctgtgtccctctctgcctttggatgtaaagtgctctgttgtacccctggtggggttgtgttaattctgccatcacattctcacatggcagaaacagcatctcccacaccacttaatgaggtttgaggccaccaaaagatcaacagacaaatgctccagaaatctatgctgactgtgacacaagagcctcacatgagaaattaccagtatccaacttcgatactgatagacttgttgatattattattatatgtaatccaattatgaactgtgtgtgtatagagagataataaattcaaaattatgttctcatttttttccctggaactcaataactcatttcactggctctttatcgagagtactagaagttaaattaataaataatgcatttaatgaggcaacagcacttgaaagtttttcattcatcataagaactttatataaaggcattacattggcaaataaggtttggaagcagaagagcaaaaaaaagatattgttaaaatgaggcctccatgcaaaacacatacttccctcccatttatttaactttttttttctcctacctatggggaccaaagtgctttttccttcaggaagtggagatgcatggccatctccccctccctttttccttctcctgcttttctttccccatagaaagtaccttgaagtagcacagtccgtccttgcatgtgcacgagctatcatttgagtaaaagtatacatggagtaaaaatcatattaagcatcagattcaacttatattttctatttcatcttcttcctttcccttctcccaccttctactgggcataattatatcttaatcatatatggaaatgtgcaacatatggtatttgttaaatacgtttgtttttattgcagagcaaaaataaatcaaattagaagcaataaaaaaaaaaaaaaaaaaaa

SEQ ID NO: 946 - DNA, 1389 bp, Homo sapiens
gaattcgggagagaactacagaaacctggttttcttgggtgaaggtattgctgtctctaagccagacctgattacctgtctggagcaaggaaaagagccctggaatatgaagagacatgagatggtagctaaacatttagttatgttttattattttgcccaacacctttggccagagcagaacataagagattctttccagaaagtgaccctaagaagatatagaaaatgtggatatgagaatttacagttaagaaaaggctgtaaaagtgtggttgagtgtaaacagcacaaaggagattatagtggacttaaccaatgtttgaaaactaccttgagcaaaatatttcaatgtaataaatatgtagaagttttccataaaatttcaaattcaaatagacacaagatgagacatactgaaaataaacattttaaatgtaaagaatgtcgcaaaacattttgcatgctttcacacctaactcaacataaaagaatccatactagagtgaatttctacaaatgtgaagcatatggaagagcctttaactggtcctcaacccttaataaacataagagaattcatactggagaaaaaccttacaaatgtaaagaatgtggcaaagcctttaaccagacctcacaccttattagacataagagaattcatactgaagagaaaccctacaaatgtgaagaatgtggcaaagcctttaaccagtcatcgacccttactacacataatataattcatactggggaaattccctacaaatgtgagaaatgtgttagagcttttaaccaagcctcaaagcttactgaacataagttaattcataccggagagaaacgttatgaatgtgaagaatgcggcaaagcttttaaccgatcctcaaaacttactgaacataagtacattcatactggagagaagctgtacaaatgtgaagaatgtgacaaggcctttaacctgtcctcaacgcttactaaacataaggtaattcatactggagagaaactgtacaaatgtaaagaatgtggtaaagcttttaaacagttctcacaccttgctatacataatataattcatactggagagaaactctacaaatgtgaagaatgtggcaaagcttttaactcatcctcaaaccttactgcacataagaaaaatcgtactggagagaaaccctacaaatgtgaagaatgtggcaaagctaacctatcatcaacccttactccacataagacaattcatatttgagagaaaccctgcaaatgtgaagaatgtggcaatgcttgtaactaaatctcaaactttactaaacataagaaaattaatactggaaactttacaaacctgaaagatgtgacaatgattttgaccccgaattc

SEQ ID NO: 947 - DNA, 2805 bp, Homo sapiens
gaatcttcctagttctagtggttggacaagtctttaactccatagcctagctccagctaggttcatgagctggccctactgctctctcctttccccttttcctcttatcccattgcattagtctggattcttgcttacagataaccaaaaccttagtcaatctgatttaagcaaaaaccagaattgataggctcacataactgaaattccagggtagaccctaaggccgggctggatgcagggactcagtcatctcactcgggctaggtctctctcaatgcctagtccctatttcatctgagttggcttccctctcaggtgggctttttctcatggagatcctcagcagcccatggaaggagagtctgtttttcccatcatcttgtacaagtccccaggttgagtctcattggcctgctggccccatgcccatccctgaacaatactgcaattggtcacctgcagtcacatgccctgtgactgcaggaaggtggggatgggctagttacccaaaggaaagtccaggtgctgtgcccagaagggagaatggatgtggggcagagcaaaccgtagatgtctaccttacccagccagacaagactgcatgtaagaaccaggcttacgggccagcccctctctgcaggcccacactgtacactcctgaaatgccattccttagtctggccaaccctcattcacccttccaatctcagcttatatagatggctccccatgctgcctaggaactaccccacattgcactcccatctctgcatgctccctggaggcagggaggaggttttgtccacctctatatccccagtctctggcccacatcagtgttttcagtaagtgttagtgtgttagtggcatcacttccaactgatatacctccttggtactacccttcccagacttaggaggccatctttggacaatggtgtatggtgggaaagtgctcagcaaggaggctctccttccatcctaggaccctgggccagttgtttcacctccggtcctcataccccagactgtgctgatacggttttccttcctaccccacaagataggatcaaatgagatgctgtgtggaaagccctctgacatacacagatatgaggggttgtttggattaggggtggaggcagcaggatgagcagaaaggaaactgcacagtgtccccaggaggccatggttaggttatctccaactatgagatacaggagacagaaagtatccaaccaggacaatgtgaccaaactaaagtgagaaaaatgtaggctttggggcagtgtaagtgggtatatcttctgtgaatagcaatttggcaaaatccattacatttcagagcaagcacattctttgacctgaaattccatgcccaggagtttatataagagagacagtgatgagcaaagatttatttgctgaagtgttacttaccatagcagaagattgaaaatgacccaaatgcacgtcctttggggataaataagttagagcatatctaaacaagaaaatattacgtaaaataaattggaggtctccacaaaaaaaaaaaaaaacccattttttttcagacaggatctcacaccgttgcccaggctggagggcagtgacgtgatcagagctcactgcagcttcaacaccccagggctcgagcagttgtcccacttcagcctcccaaatagctgggactacaggtctacaccaccactcccggctaattttttaatattttgtaatgacagggtctccatatgttgcccaggctggtctcgaactcctggcctcgagcagtcttcctgcctcgggctcccaacatgctggcattacaggtatgagccaccgcgcccagcccatctcacttctgaaaatgactcagtgccatgaacccttcatccctagtggcctttgggggtgggaggtcttcaaagtacagccgtctctttctacctaatgtgtgtctgcaacatcgaacttgttcatcataagtacgtattacttctgtaaccaggaaaagttacaagaagagggggccaggcacagtggctcatgcccgtaattctcacattttgggaggtcgaggcaggagtattgcttgagcccggaagttcgagaccagctttgggcaacacagtgagacctcatctctaaaaaaaagttcttttaattagctgggcatggtggtgtgctgcgtgcctgtggtcccagctacttggaaggctaaggtaggaggaggattcctttagcctggaggtcaaggctgcagtgagccatgttcatgacactgcactccagcctgggtgatagagtgagaacttgtctcaaaggaaagaaaaaaaaaataagaaaatgttgggttctcagcacttccagcccacccccatccatatacattccagcacattgttggggccatttgcaagctctgagatgagattctgcacaagtcagcagtgcagagactcccagggaaggcctgaggccgccaagagcaactctgcagggtctgctccaagaggcagaggtgggccccaccgtccttggcaaaatggagattggtctgagggttccatgaggcaggcttgcaggagcaagggagtgatagaaagccatgtgaggggacgagagggaggacaccctcccctgcagaagtcaggaaggtctttgagcttgttctgagaggaaaacccattctctgggtagaggaatgaagactcagaggagactggggttcgctttgtgtgatactgatatggttactgaaaggctagcccagtcccaggctacgtgaacagactt

SEQ ID NO: 948 - DNA, 1674 bp, Homo sapiens
ggggcggggcgtgccggggcggggcgtagtacggactgggcctggcctggggcgtccccgcgaagcctgggcctgtcaggcggttccgtccgggtctcggccaccgtcgagttccgtcgagttccgtcccggccctgctcacagcagcgccctcggagcgcccagcacctgcggccggccaggcagcgcgatcctgcggcgtctggccatcccgaatgctatggccgccgtcgccgtcttgcgggccttcggggcaagtgggcccatgtgtctccggcgcggcccctgggcccagctccccgcccgcttctgcagccgggacccggccggggcggggcggcgggagtcggagccgcggcccaccagcgcgcggcagctggacggcataaggaacatcgtcttgagcaatcccaagaagaggaacacgttgtcacttgcaatgctgaaatctctccaaagtgacattcttcatgacgctgacagcaacgatctgaaagtcattatcatctcggctgaggggcctgtgttttcttctgggcatgacttaaaggagctgacagaggagcaaggccgtgattaccatgccgaagtatttcagacctgttccaaggtcatgatgcacatccggaaccaccccgtccccgtcattgccatggtcaatggcctggccacggctgccggctgtcaactggttgccagctgcgacattgccgtggcgagcgacaagtcctcttttgccactcctggggtgaacgtcgggctcttctgttctacccctggggttgccttggcaagagcagtgcctagaaaggtggccttggagatgctctttactggtgagcccatttctgcccaggaggccctgctccacgggctgcttagcaaggtggtgccagaggcggagctgcaggaggagaccatgcggatcgctaggaagatcgcatcgctgagccgtccggtggtgtccctgggcaaagccaccttctacaagcagctgccccaggacctggggacggcttactacctcacctcccaggccatggtggacaacctggccctgcgggacgggcaggagggcatcacggccttcctccagaagagaaaacctgtctggtcacacgagccagtgtgagtggaggcagaggagtgaggcccacgggcagcgcccaggagcccaccttcccctctggcccagccaccactgcctctcagcttcaacaggtgacaggctgctttcgtgacttgatattggtgtcatagcatttggcctacattaaaagccacaatttcatggggaaaggacaaaatggagagtgactgaggtgctgacctcagtgcaaggctggtgaaccctgcagcgggccagctatggtgggaagcctggcatttggggtgctccttgcaacgtcttaagcaagcgacccccctgacatagcaaaaggtggcaacccatggaggcagaaagaaggacgccagcctgacccttatctgaaacgtcctaagcagagttaatcctggctgctcaggagaggcgacacatttcaaatctccacgagatattctccacacagaaaatcttcttgattctatagagacttaatcatgcctatggctttgaataatcttatgtgatttaaataaattaaatctttataaaaaaaaaaaaaaaaaaaa

SEQ ID NO: 949 - DNA, 3578 bp, Homo sapiens
acttccggacgggactcccctctgtccgcgcctcacatctccccttcctctcgcctagtcctgtgccgttttccgtccgcgactcttccggcccagagctttcggagtgcggttgctcaggggaagccgtcgccgcccccgcctcggggccgagtgagagtgcccgtcgcgtcgcgccgcgtcgccccccgggccgcctccttgccgccagtggcgggctccgttctccctcgaagcactccccccagctccatgaatggaaatcggctccgcaggacccgctggggcccagcccctactcatggtgcccagaagacctggctatggcaccatgggcaaacccattaaactgctggctaactgttttcaagttgaaatcccaaagattgatgtctacctctatgaggtagatattaaaccagacaagtgtcctaggagagtgaacagggaggtggttgactcaatggttcagcattttaaagtaactatatttggagaccgtagaccagtttatgatggaaaaagaagtctttacaccgccaatccacttcctgtggcaactacaggggtagatttagacgttactttacctggggaaggtggaaaagatcgacctttcaaggtgtcaatcaaatttgtctctcgggtgagttggcacctactgcatgaagtactgacaggacggaccttgcctgagccactggaattagacaagccaatcagcactaaccctgtccatgccgttgatgtggtgctacgacatctgccctccatgaaatacacacctgtggggcgttcatttttctccgctccagaaggatatgaccaccctctgggagggggcagggaagtgtggtttggattccatcagtctgttcggcctgccatgtggaaaatgatgcttaatatcgatgtttctgccactgccttctacaaagcacaacctgtaattcagttcatgtgtgaagttcttgatattcataatattgatgagcaaccaagacctctgactgattctcatcgggtaaaattcaccaaagagataaaaggtttgaaggttgaagtgactcattgtggaacaatgagacggaaataccgtgtttgtaatgtaacaaggaggcctgccagtcatcaaacctttcctttacagttagaaaacggccaaactgtggagagaacagtagcgcagtatttcagagaaaagtatactcttcagctgaagtacccgcaccttccctgtctgcaagtcgggcaggaacagaaacacacctacctgccactagaagtctgtaatattgtggcagggcaacgatgtatcaagaagctaacagacaatcagacttccactatgatcaaggcaacagcaagatctgcaccagatagacaagaggaaattagcagattggtaagaagtgcaaattatgaaacagatccatttgttcaggagtttcaatttaaagttcgggatgaaatggctcatgtaactggacgcgtacttccagcacctatgctccagtatggaggacggaatcggacagtagcaacaccgagccatggagtatgggacatgcgagggaaacaattccacacaggagttgaaatcaaaatgtgggctatcgcttgttttgccacacagaggcagtgcagagaagaaatattgaagggtttcacagaccagctgcgtaagatttctaaggatgcagggatgcccatccagggccagccatgcttctgcaaatatgcacagggggcagacagcgtagagcccatgttccggcatctcaagaacacatattctggcctacagcttattatcgtcatcctgccggggaagacaccagtgtatgcggaagtgaaacgtgtaggagacacacttttgggtatggctacacaatgtgttcaagtcaagaatgtaataaaaacatctcctcaaactctgtcaaacttgtgcctaaagataaatgttaaactcggagggatcaataatattcttgtacctcatcaaagaccttctgtgttccagcaaccagtgatctttttgggagccgatgtcactcatccacctgctggtgatggaaagaagccttctattgctgctgttgtaggtagtatggatgcacacccaagcagatactgtgccacagtaagagttcagagaccccgacaggagatcatccaggacttggcctccatggtccgggaacttcttattcaattttataagtcaactcggttcaagcctactcgtatcatcttttatcgggatggtgtttcagaggggcagtttaggcaggtattatattatgaactactagcaattcgagaagcctgcatcagtttggagaaagactatcaacctggaataacctacattgtagttcagaagagacatcacactcgattattttgtgctgataggacagaaagggttggaagaagtggcaatatcccagctggaacaacagttgatacagacattacacacccatatgagttcgatttttacctctgtagccatgctggaatacagggtaccagtcgtccttcacactatcatgttttatgggatgataactgctttactgcagatgaacttcagctgctaacttaccagctctgccacacttacgtacgctgtacacgatctgtttctatacctgcaccagcgtattatgctcacctggtagcatttagagccagatatcatcttgtggacaaagaacatgacagtgctgaaggaagtcacgtttcaggacaaagcaatgggcgagatccacaagctcttgccaaggctgtacagattcaccaagataccttacgcacaatgtacttcgcttaaatagtccaagtatattctctgagaggaagtactgaaagatgaattgacatacaacgtatgtttccagtgaagtcaattgagtaaggacacctccagccatacagaaaccaacactgtgtgggggccaaggtctgatccttatgttaatacaaggaagattgtttacttcatcaaggaacacagcatcattatgcaatatgaaaccagccaactgctttttgtgcggtctcctataggaagtatcgcaattgttttgttttcatttcttgtagtctaacccttttaatgcctttacctcaagttgcttggcagcacaactatctttgcaaaaaaaagtaaagaaaaagtaaatgatggtttaaaaaatacacaccttcatgaataatcaaagtgatttttcagaattatgtgtgcaaaaaattaatgtgcattcatatattcttgtaaaaggtgtctgtgtatttttaaaatatatacatccatacttcatatgcatatatatctagatctggattgataatagatatatatgtgtctgttatatattttagagttcattccattggggaattttctttcccttttattctacccccactaccgcctttatttctctatttcccttgccttcatcacctacatttttttcccagtcctaccagtgacattcaaatgttgatgtatctggttcgtttgaatataaaatatggcaaactaaaaaaaaaaaaaaaaaaaaaaa

SEQ ID NO: 950 - DNA, 2080 bp, Homo sapiens
attttcacagctcctcctccccggccgcgcgcccctcccgccccgcgcgcgcctcctctttctcgcggccgagttcagcccgggcagccatatgggggatacgccagcaacagacgccggccgccaagatctgcatccctaggccacgctaagaccctggggaagagcgcaggagcccgggagaagggctggaaggaggggactggacgtgcggagaattcccccctaaaaggcagaagcccccgcccccaccctcgagctccgctcgggcagagcgcctgcctgcctgccgctgctgcgggcgcccacctcgcccagccatgccaggcccggccaccgacgcggggaagatccctttctgcgacgccaaggaagaaatccgtgccgggctcgaaagctctgagggcggcggcggcccggagaggccaggcgcgcgcgggcagcggcagaacatcgtctggaggaatgtcgtcctgatgagcttgctccacttgggggccgtgtactccctggtgctcatccccaaagccaagccactcactctgctctgggcctacttctgcttcctcctggccgctctgggtgtgacagctggtgcccatcgcttgtggagccacaggtcctaccgggccaagctgcctctgaggatatttctggctgtcgccaactccatggctttccagaatgacatcttcgagtggtccagggaccaccgagcccaccacaagtactcagagacggatgctgacccccacaatgcccgccggggcttcttcttctcccatattgggtggctgtttgttcgcaagcatcgagatgttattgagaaggggagaaagcttgacgtcactgacctgcttgctgatcctgtggtccggatccagagaaatacacagcacatccagaaagaaggaagagctctcaatcaagaggcagcgtgtgagatgcttcgtgaatggcatcaagggcatatattgaaagtcacccttcccggattacacattttagctttgttacatactcattgtaaccactccgaaaagtgctgcttgatgctgcgtgctctttctgtgtccctggaggtattctgaaggtcagaagagagatatacaacagcgaggcttggtgataacgtatagaataacagacggggactccacacccaggccttttttaacggtgtgaagcatagacagagctgcagtctgtgctaacattaggttatttattgattcaatcagttgacacaaggaggcagctacggggaggtaaaatatggtcctaaaatcaaaaagatttcagttttgtcattctgtctctgagattctatttccacatctagagcagggtaataatgatacctaccttacaaaattattgggagaatacattagttaatatatgtgaaagtatggaggagatgtgcaataaatatttgtgttattaactacacatacagcactctataggagatattccatttataaaaactttaggttctaaaaacctgtacacgttgattatttttgtaagtcaaaagtgattaagaggagtttaagctatcatttccagatgtatttctataaataaaaacataagtatattcagttgatttggggtggagagttccatagatgtctgttaggtccgcttggtccagagctgagttcaagtcctgaatatccttgttaattttctgtcttgttgatctgtctaatattgacagtggggtattaaagtctcccactattattatatgggagtctaagtctccttgtaggtctctaagaacttgctttatgaatctgggtgctcctgtattaggtgcatacatatttaggatagttagctcttcttgctgcattgatcccattaccattatataatgcccttctttgtcttttttgatctttgttggtttaaagtctgttttattagagactaggattgcaacccctgctatttttttttttttttttgcttgataaatattcctgtatccctttattttgagcctatatgtgtctttgcacgtgaggtgggtctcctgaatacagcacaccgatgggttttgactcta

SEQ ID NO: 951 - DNA, 11479 bp, Homo sapiens
gagtcccaggattccggggactggagggcagcgccggcagccaaggattttgacacttcatgacatgtcattatttagagcaataatgaatattgacctgttttggattagttgatgaccttcggaaatgatccaataatatctactatagagaagctgaatatactccatttggagtgaacagcccggattgttacagaattttcaagatgacagatccaatgatggacttttttgatgatgccaatctttttggtgagaccttagaaggtttgtcagatgatgcatttgtacaaccaggacctgtttcactagttgatgaattgaatttgggtgcagaatttgaaccgttgcacatagattcactgaaccatgttcaaggtactccaacacatcagaagatgactgattttgaacagttaaatcaatttgattcaataaaatttcaccatgttaatcaatcttttggtagcccagctgaacatgtgttatctccacactctcagtttaattgttctccaatccatccccaaaaccaacccaatggtttgtttccagatgtatcagatggcagtccaatgtggggccatcagacagctactaccatttcaaatcaaaatggatctccttttcaccaacaaggacattcacactctatgcatcaaaataaaagctttgtggcacaccatgactttgccttatttcaggccaatgaacaacaaacacagtgtacttcactacgctcacaacaaaacagaaataatctcaacccagggcagaattctcttagccagtctaaaaattttatgaatgtttctggtccacatagagtcaatgttaaccacccaccacagatgactaatgcatctaattcacaacagtctatttcaatgcagcaattttctcaaacgtcaaatccttcagcacacttccacaagtgtagcagtcatcaagaaggaaattttaatggaccttccccaaatatgacttcttgttctgtcagtaattcacagcaattttcttcacattattccttttccagtaatcatatatcaccaaacagtctacttcagtcctctgcagttcttgcatctaatcatacaaatcagactttatctgattttactggaagtaattccttttcacctcatagaggaatcaagcaagaatctactcagcatatcctaaaccccaatacatcattgaattcaaataatttccaaatattgcattcatcacatcctcagggtaattatagcaattcaaaattatctcctgtgcacatgaacttcccagatcctgttgactcaggaactcaaatgggccatttcaatgatcatgtagaaactaatggcttttcatctttagaagagaatttacttcatcaagtggaatctcaaactgagccattcacaggacttgaccccgaggacctccttcaggagggtcttcttcctcactttgatgagtcaacattcggacaagataattcaagtcacattttagatcatgaccttgatcggcagtttacttcgcatctggtaacacggccttctgatatggctcagactcagttgcaaagtcaggctcggagttggcattcatcattttctaatcatcagcatttacatgacagaaatcacctatgtttacagcgacagcctccatcttccaagaagagcgatggttctgggacatatactaagttgcagaatacccaggtgagggtcatgtctgagaagaagcagagaaaaaaggtggaatcagaaagcaagcaagaaaaggctaatcgtataatatcagaggccatagcaaaagcaaaggagcgtggggaacgcaatattccacgagtaatgagccctgaaaactttcctactgcttcagttgaaggaaaagaggaaaagaaaggtagaaggatgaaatccaagccaaaggacaaagacagcaaaaaaacaaaaacatgttctaagttaaaagagaagacaaaaattggcaaactcattattacattgggtaagaaacaaaaaagaaagaatgagtcttcagatgaaatatctgatgcagaacagatgccacagcatacattaaaagatcaagactctcaaaaaagaagatcaaatcgacaaattaaaagaaaaaaatacgcagaagatatagaagggaagcaatctgaagaagaggttaaaggttctatgaaaataaaaaagaattcagctcctttacctggtgaacagcctttacaattgtttgtggagaatccgagtgaagaagatgctgcaattgtagacaaaattctatcttctagaaccgtaaaaaaggaaatatcacctggagtgatgattgatacagaagaattttttgtaaaatacaagaattactcctatcttcactgtgagtgggccacagaagagcagcttttgaaagataaaaggatccagcagaaaatcaaacgattcaaattgagacaagcacaaagagcacatttttttgcagacatggaagaagaaccatttaacccagactacgttgaagtagacagagtattagaagtctctttttgtgaagataaggatactggtgagcctgttatttactacttagtaaaatggtgctcattgccatatgaagatagtacttgggaactaaaagaagatgtagatcttgcaaaaatagaagagtttgaacaactgcaagcttcaaggcctgacacaagacgtttggaccgtcctccttctaatatttggaagaaaatagatcaatccagggactataaaaatggcaatcaactcagggaatatcaactggaaggactcaactggctcttgttcaattggtacaatagacgaaactgcatcttagcagatgaaatgggtcttggcaaaactattcaatcaattacattcctctatgaaatccttctgactggtataagaggacctttcctgattattgctccactttctactattgcaaactgggagagagaatttcgtacgtggactgatattaacgttgtggtttatcatgggagcctgattagcagacaaatgatacagcaatacgagatgtacttcagggattcacaggggcgtatcattcgaggagcttacagattccaagccatcatcaccacttttgaaatgattcttggaggctgtggagagcttaatgcaattgaatggcgatgtgtgattattgatgaagcacataggttaaaaaataaaaattgtaaactcttagagggcctgaaactcatgaatctggaacacaaggtgcttttgactggcacccctctccaaaatacagttgaagaactatttagtcttcttcactttcttgaacccttaaggtttccttctgaatcaacatttatgcaagaatttggggatctgaaaacagaggaacaggtacagaaacttcaggctatcctgaaaccaatgatgttgagacgattaaaagaagatgtggaaaagaagttggcacctaaagaagaaaccatcattgaagtagaacttactaatattcaaaagaaatactaccgggctatcttggaaaagaacttttcttttttatccaaaggagcaggacaaactaatgtacctaacttggtcaataccatgatggagctcaggaaatgttgtaatcatccatatcttataaaaggtgctgaggagaaaatacttggagaatttagagatacttacaatccagctgcttctgattttcatcttcaagcaatgatccagtctgctggtaaattggtccttattgataaattgcttcccaaaatgaaagccggaggtcataaagtgctcatcttctctcaaatggttcgttgccttgacattctggaggactatctcatacataaaagatacttatatgagcgaattgatggcagagtcagaggaaatcttcggcaagctgctatagatagatttagtaaacctgattcagatagatttgtttttctcctgtgtacccgagctggtgggttgggcatcaacttaactgcagctgatacatgtataatttttgattctgattggaatcctcagaatgatcttcaggcccaagctcgttgccacagaattggtcagaacaaagcagttaaagtctacagactggtaactcgtaactcatatgagagagagatgtttgaccgagccagtttgaaactgggcctagataaagctgtgttacagagcatgagtggaagagaaagtaatgttggtggtattcagcagctttccaaaaaggaaatagaagatctgcttcgaagaggtgcttatggtgctattatggaggaagaagatgaaggctctaaattctgcgaagaggatatcgatcagattttactacgtcgtacaaaaactattacaattgaatcagaaggacgtgggtcaacatttgccaaggcgagttttgtggcatctggaaaccggacagatatttctttagatgatcccaacttctggcaaaaatgggctaaaaaggcagaaatagatatagaggccatcagtggcagaaacagcttggttattgacactccaagaattaggaagcaaacaagaccttttagtgccacaaaagatgaattggctgaattatctgaagctgaaagtgaaggagatgaaaagcccaaactccggagaccctgtgaccgttccaatggctatggaagaactgaatgctttagagttgagaaaaacctgctagtttatgggtggggccgatggagagagattctatctcatggccgtttcaaaaggcagctaaatgaacacgatgtagagataatttgccgagctctcttagcatattgccttgttcactaccgaggagatgagaagattaaaggtttcatatgggatctcattactccaactgaagatggacagacacgagagctacagaatcatctaggcctatcagctcctgtacccaggggtcgaaaagggaagaaagtaaaaactcaaacaagctcatttgatatacaaaaagcagaatggcttcgaaaatataatcccgagcagctccttcaagatgaaggctacaaaaaacatataaaacaccactgtaataaggttttgcttcgtgtgagaatgctgtattatctaaagcaagaagttattggaaatgagtgtcagaaagtatttgatggagttgatgcaagtgacattgatgtttgggtaccagaaccagaccactcagaagttcctgctgagtggtgggattttgatgctgataagtcactccttattggagtttttaaacatggatatgaaaaatataacactattcgagcagacccagcattatgcttcttggaaagagtgggaaaacctgatgagaaagcagttgctgctgaacagagagcgaatgattatatggatggggatgtggaagatccagaatacaaacctgccccagccatctttaaagatgatatagaggatgatgtttcctcaccaggagatcttgttatagcagatggagatggtcaactgatggagggtgataaagtatattggcctactcaatcagctttaaccacacgtttgaggcgtctcatcactgcataccagcgtactaataaaaacagacaaattcagcagatacaaccgactttctcggtgcctaccagtgtaatgcagcctatttatgaggaagccactcttaatcctaaaatggcagccaagatagaaagacagcaaagatggacaagaagagaagaagctgacttttatagggttgtatctacatttggagtggtttttgaccctgacagaggccaatttgattggacaaaatttagagctatggctaggctacataagaaaactgatgatagtttggaaaaatatttgtacgcattcatgtccatgtgtcggagggtttgtcgtcttccttccaaagaagaattggtggatccaaatatttttatccagcccatcacagaagaacgtgcttctaggactttgtatcgcattgaacttctaaggaaagtacgggaacaggcccttcgacatccacagttgtttgaacgcttgaagctttgccatccaaatccagatttaccagtctggtgggaatgtggccctcatgatagggatttgcttattggtgctgccaaacacggggtgagccgaacagactatcacattcttcgtgatcctgaactctcatttatggcagctcagaggaactacagtcaaagtaagatggctcattcaaggacttctaccccacttctacagcaatatcaagtagcactttctgcttctcctcttacctctctacctaggctcctagatgctaaaggtattattctagaggagatgaaagttaaaagtgaaaaccttaaagaggagcctcagtcttctgaagaagaatctatgtcttctgtggaaaccaggacactaataaaatctgagcctgtaagtccaaagaatggtgttttaccacaggctactggagaccagaaatctggtggaaaatgtgaaacagacagacgcatggttgcagccagaacagaacccctaactccaaacccagcttctaagaaaccaagagtccacaaaaggggatcagaatctagttctgattctgactcagattctgagagatcatcttgttcttccagatcatcttcttcctcatcatcctcttcttgctcccactctcgatcaggctctagttcttcttcatcttcatcttgttcttcagcatcttcttcatcctcttcctccacctcttcctcctcctcctcctcttcatcttcatcagaagaaagtgacagtgatgaagaagaagcccaaaaacgagaaagtactactcacatgaaagcctatgatgaagaaagcgtcgcgtcactgagcactacccaggatgagactcaggatagttttcagatgaacaatgggacaccagagtctgcttatatcttacaaggtggatatatgctggcagcctcgtattggccaaaggatcgtgtgatgatcaataggttggacagtatttgtcaaacagttctgaaaggaaagtggccttcagctagaagaagttatgatgctaacacagtggcttctttctataccacaaaactgctggacagccctggagcagctacagaatacagcgatcccagtgtacccactcccccaggtgccggtgttaaagaagaacatgatcagtcaacacagatgtcaaaggaaggtggtttgaagttgacatttcagaagcaagggcttgctcagaaaagaccatttgatggtgaagacggtgctctggggcagcagcagtacctcactcggcttcgagagcttcaaagtgcatcagagaccagcctcgtcaatttcccaaaatccataccagtatcaggtacttccattcaaccaacccttggtgccaatggtgtgatattagacaaccagcctatagtcaaaaaaaggcgaggaaggaggaagaatgtagaaggtgttgacatcttcttttttaacagaaataaaccacctaatcatgtttctttaggcttaacctcctcacagatttccacagggataaatccagcactatcctatactcaacctcaaggaattcctgatacagaaagtccagttccagttattaatcttaaagatggaacgagacttgcaggagatgatgcaccaaagagaaaggatttggaaaaatggcttaaggagcacccgggttatgtggaagatttgggagcttttattcctagaatgcagcttcatgagggaagacccaaacaaaaaagacaccgttgcagaaaccccaataaactagatgtgaatagtctcactggagaagaacgtgttcaactgattaacagaagaaatgctagaaaggttggaggtgcatttgctccccctttgaaagatttatgtagattcctaaaagaaaattcagaatatggagtagctcctgaatggggagatgttgttaagcaatctggatttcttccagaaagcatgtatgaacgtattctcactggtcccgttgtgagagaggaagtaagcaggcgggggagacggcctaaaagtggaattgcaaaggccacagcagcagcagctgctgcatctgccaccagtgtttcaggcaatcctttgttagccaatggactacttccaggtgtggatctcacaactcttcaggccttacaacaaaacctacaaaacttgcagtcactgcaagtaactgctgggttgatgggaatgcctaccggccttccttctggaggagaagctaaaaacatggctgctatgttccccatgctgctgtcaggaatggctggattaccaaatctgttgggcatgggaggactcctgacaaagcctacggaatctgggacagaagacaaaaagggaagtgactctaaggagtcagaaggaaaaacagaaaggacagagagccaaagttcagagaatggtggagaaaactctgtgtcaagttctccttccacatcctctactgctgcattaaatacagctgcagctgccaacccattagctcttaacccactattactatctaatatactttatccagggatgcttctcactccaggccttaatcttcatattccaactttgtcccagtccaatacttttgatgtacaaaacaaaaacagtgacttaggctcgtctaagtctgtagaagtaaaagaagaagattccagaattaaagatcaggaagacaaaggaggaactgaaccaagtcctctcaatgaaaacagcacagatgagggttcagagaaagctgatgcttcatctggatctgatagtacatcgtcgtcatctgaggattcagattctagtaatgaagactgattcccagactctgcacttaaaatatgaactgattttggattttttctttaataattaattgtaaataccccagtgttgagtgcatcaataacttactgaccgaacatttcagttatttgtttagaagtgcaaactgctttcagagactttttgcatgtaatatttcttaagattcataagtttctgaactcgtatgtactatcaaatacataaaggtgtaaaattacaacaaaaggcattataattttgttgggggttaattttatgaaaattatgctcaataagagttgtatatttaatatatttgcagtgaacacagaatactttatgcatattactgatttaatttgaatatagttttacagcctccttgacacctataatttacagatcaaaactcagcaataatttgggcagctaatgaatgtcatgaaagctgtagaatctacatcaccatccattgctttaattacatgaaaatgctctagtgttgtgatgcactgctgatgtttccaattcaggtacaagtatgttttaaagaagaaataagtttcccaatcagccaatttaactggctacctgttacctcagctgagttagtttaggaagtttacattcgtttctaattctatacttgttttcaggggttttttaaacacatcctatatatcatgtcaatctggcaagaaatatgacttgctttttgctgagcttaattcagatatcagtaaaattaagtcataaaataatcatgtgtcatgtgactttggcaccctatagacatacttagttttaacttttcaaagtttggcctcctattagaaataatcatgtctcagatgagtaatgtctgtttccagggttcagaaaaggcaaactcatgaaatgccactgaaaagaactttcaacacagcatacttcatgtaaaagaaattgtttgtttgctttctttgtgtagatttctatttgtgttttatgtcatggaaatattccagaattaacagataatagtggtaaagtaatatgcagatagtctaaattcattttgagtttctaggtgtaagcagactaaatgttgcccagaatcagtgttgggttatcagtttatattaaatatactgagttgcccgttttgaaaatgcactttgaataatctcaaaaagatgtacaagttatacctgtaaaccacaaaagtgaagcctgaggcttctgttcaatttcatagactcctttaccatgtaaaatttgtctgatatttgatttgtgatacaatttctcctgctaaagctgctattattctgacaaggtagaggtccaggttcacctttatatatatttaaaacaattagtactgaattggacataaaaatattgacattctaaggagagatatatgttagcatttttctggtactcaaataagttagtagtaaagtctgcaagggcataaatttagggggaaaaagtgtcccagttctctcctacagaaaaaatactttcagtatgttttgataaaactgttgctttgtcatgagttagtcaattgtatcaggttttccaagacctttaccagtaaattatgtttctgtatgtaaaataaccccttattagagagacagtgttatatgtatttacaaaattatataagttccattgggattgtattgattttgtattttcccaaaatagtactttgaattgatagtcctttatgcaatgtcttagcaatagtctctataatgcccatccaggagaagtgggtagtaattcttcatcatgaaaatgatatattacatatttagtatcttccctttgcagtattgcacttttgtttaactagaatacacctatgagatagccaaagtttcaaacacagttatcttagtttaccggtggagtatttcaacaccaaccacatttcccttcctccctctaattctacccacatgatctttattccttcctttcgccaattaaaaaaaaaaaaaaggaaaaaaaatctgtagatcttgtcactaaaatctaatttatatcaaatttatgagagaaagtattttcctaattatggtcaaataaatttggttaacatcctagtgattctctttctatataataaggcaattacagttttcaaagcattaagtctaacataactttaaacattctcttaggtttcaagacacttctatttaatattcattggggaaaagttgtccagctatcagctaagaaaacacatgcaaatatggttgtgtaaagttaagggttataaggaaaaaaaaatcagtagaattacataatactaaagttgcagttgaaagaatatccaagtatgtgttggtagttactaaaagaattatagctgttattgccttgtatttatagcccttgtttcaggttttatgattcaagtcttagtccaatctttcttttggacatttgcaatatttaccagttgtgttttgtgtagtctgaatttgctttctgtagttgagcaaacgtcttaaaaagtcatttgtaatttattaaattactttctatgatgttctatagagcaaatggaagtttaattattttttattaaacatattctttgactacccatgaaaaaaaaaaaaaaaaaa

SEQ ID NO: 952 - DNA, 5819 bp, Homo sapiens
cgtttctgcggagaggcgggaggcgctgagagtctgcgcggaggtccgtgcacagactgctttgcctgttgttgctcttcggaggcggcgatccccgaaggcgagctgaaatacggctgcaggctacaatttgcagccgacgattaaggaagacgacgagcgggagaggtggcccaccctcatggagcgcttgtgctcggatggcttcgcatttccccattactacattaaaccgtatcatctgaagaggatccacagagctgtcttacgtggtaatctggagaaactgaagtaccttctgctcacgtattatgacgccaataagagagacaggaaggaaaggactgccctacatttggcctgtgccactggccaaccggaaatggtacatctcctggtgtccagaagatgtgagcttaacctctgcgaccgtgaagacaggacacctctgatcaaggctgtacaactgaggcaggaggcttgtgcaactcttctgctgcaaaatggcgccgatccaaatattacggatgtctttggaaggactgctctgcactacgctgtgtataatgaagatacatccatgatagaaaaacttctttcacatggtacaaatattgaagaatgcagcaagaatgaatatcagccactgttacttgctgtgagtcgaagaaaagtgaaaatggtggaatttttattaaagaaaaaagcaaatgtaaatgccattgattatcttggcagatcagccctcatacttgctgttactcttggagaaaaagatatagtcattcttcttctgcagcacaatattgatgtgttttctcgagatgtgtatggaaagcttgcagaagattatgccagtgaggctgagaatagagttgtctcctcagaaacaacgagctgagaaggctacaagtgacgacaaagattctgtttcaaatatagccacagaaataaaggagggacctatatctgggacagtgtcttctcagaaacaaccagctgagaaggctacaagtgacgagaaagattctgtttcaaatatagccacagaaataaaggagggacaacaatctgggacagtgtctcctcagaaacaatcggcccagaaggttatatttaaaaagaaagtttctcttttgaatattgccacaagaataatgggcggtgggaaatctggaacagtgtcttctcagaaacaaccagcctcaaagactgcaagtgacaagacagattctgctttgaatacagctacagaaataaaggatggactacaatgtgggacagtgtcttctcagaaacaacaagccttgaaggctacaactgacgaggaaggttctgtttctaatatagccacagaaataaaggatggagaaaaatctgggacagtgtcttctcagaaaaaaccagccttgaaggccacaagtgatgagaaagattctttttcgaatataaccagagaaaaaaaggatggagaaatatctaggacagtgtcttctcagaaaccaccagccttgaaggctacaagtgtcaaggaagattctgttttgaatatagccagagaaaaaaaggatggagaaaaatctaggacagtgtcttttgagcaaccaccaggcttgaaggctacaagagacgagaaagattctcttttgaatatagccagaggaaaaaaagatggagaaaaaactaggagagtgtcttctcataaacaaccatccttgaaggctacaagtgacaaggaagattctgttccgaatatggccacagaaacaaaggatgaacaaatatctgggacagtgtcttgtcagaaacaaccagccttgaaggctacaagtgacaagaaagattctgtttcgaatatacccacagaaataaaggatggacaacaatctggaacagtgtcttctcagaaacaaccggcctggaaggctacaagtgtcaagaaagattctgtttcgaatatagccacagaaataaaggatggacaaatacgtgggacagtgtcttctcagagacgaccagccttgaagactacaggtgatgagaaagattctgtttcgaatatagccagagaaataaaggatggagaaaaatctgggacagtgtctcctcagaaacaatcggcccagaaggttatatttaaaaagaaagtttctcttttgaatattgccacaagaataacgggcggtgggaaatctggaacagagtatcctgagaatctgcgcaccttgaaggctacaattgaaaataaagattctgttctgaatacagccaccaaaatgaaggaggtacaaacatccacaccagcagaacaagacttagaaatggcatcagagggagagcaaaagaggcttgaagaatatgaaaataaccagccacaggtgaaaaaccaaatacattctagggatgaccttgatgacataattcagtcatctcaaacagtctcagaggacggtgactcgctttgctgtaattgtaagaatgtcatattactcattgatcaacatgaaatgaagtgtaaagattgtgttcacctattgaaaattaaaaatacattttgtttatggaaaagattaataaaacttaaagataaccactgtgagcaacttagagtaaaaattcgaaaactgaaaaataaggctagtgtactacaaaagagaatatctgaaaaagaagaaataaaatcgcagttaaagcatgaaatacttgaattggaaaaagaactctgtagtttgagatttgccatacagcaagaaaaaaagaaaagaagaaatgttgaagagttgcaccaaaaagttagggaaaagttaagaataacagaagagcaatataggatagaagctgatgtgacaaaaccaattaaaccggctctcaaatcagcagaggtggaattgaagacaggaggaaataattcaaatcaggtttctgaaactgatgaaaaagaagacctgctgcatgaaaaccgcttgatgcaagatgaaattgccaggctcaggctggaaaaagacacaataaaaaaccaaaacctggaaaagaaatacttaaaagactttgaaattgtgaaaagaaagcatgaagaccttcaaaaggctctaaaacggaatggggaaacattagcaaaaacgatagcctgttatagtggacagcttgctgctctgacagatgaaaacacaacgctccgttccaaactggagaagcaaagagagagcaggcaaagactggaaacagaaatgcaatcataccgttgtagactgaatgctgctcgatgtgatcatgatcaaagtcactcatcaaaaagagaccaagagcttgctttccagggcacagtagataaatgtcgtcacttacaggaaaatttgaattctcatgttctgattctttctctgcaactttctaaagctgagagtaagtccagagtcctcaaaactgagctccattacacaggagaggctctgaaagaaaaggctttggtttttgaacacgtgcaaagtgagctaaagcaaaaacagagtcaaatgaaggacattgaaaaaatgtacaaaagtggatacaatacaatggaaaaatgcatagaaaaacaggaaagattttgtcaactaaaaaaacaaaatatgttgcttcaacagcaactggatgatgctcgcaacaaagctgacaatcaagaaaaagcaatacttaatattcaagccagatgtgatgctagagtacaaaaccttcaagctgagtgcagaaagcaccgtcttttactagaagaagacaataaaatgttggtcaatgaactgaatcattcgaaagaaaaagaatgccaatatgaaaaagagaaagcagaaagagaagtagctgtgagacagcttcaacaaaaacgagatgatgtcttaaacaaaggatcagcaacaaaagctctgctggatgcttcatcgcgtcactgcacctatttagaaaatgggatgcaggattcaaggaagaaattagaccagatgagaagtcaatttcaagaaatacaggatcaacttacagctactataagatgtactaaggagatggaaggcgacacacaaaagcttgaagtagaacatgtgatgatgagaaaaattattaaaaaacaggatgaccaaattgagcggcttgagaaaatcctgcagcattcaagtttgatgctgcaggtgtttgagagctagatgaagcatccagccaaactagactacatggagctccacagtgatcgtcttcacctccagctgtttgcatttacttcttccctctatcctacatgtgttttccttccccttcagatatcaacctatgaattgcctctaccaaaaagcctacaatattgacacaaacctgggctagtatcccttctatgtcttccaataagtgctgtcttatgcttgtcattgtatgtatgactctgtatgggaattgcctgtttgttttttcagattatagcatacagttgttgaggggcggaccgtatcatctttatcttgtaattccagtgcttgtcctagtaccttagcacatggttgctgaatacatgaacgaagagtgagaaaccagaagctctgatacttaactgccatgataatgaattcggtgtgcaactatgggcaaattatatttaatagtaattgcatattgtacatatttttcattcttattaacactgataagcttttcagcatatactgactttctcttagttaactgtgaaatcatttagataaagaatataattctttttcattctaacttctgaatttaaatctgaatcctctatagcaggggtccccaactcccaggccacacacagttccatgacctgttaggaagcaggctgcacagcaggaggtgagtggcaggcaagcgagtgaagcttcatctgtatttccagccactccctgttgctcacattatcacctgagctctgcctcctgtcagatcagcaaagccattagattctcacaggagtgaaaatcctactgtgaactgctcgttcaagggatctaggtcacatgctccttatgagactctaatgcctgatgatatgtcattgtctcctatctcttcacgatgggaccatctagttacagaaaaacaagctcaggactcccattgattctccattatgatgagttgtgtaattatttcattatgtattacaatgtagtcataataggaataaagtgcacaatagatgtaatacgcttgaatcaccatcctgaaaccatcccccaaacccccatctgtggaaaaattatctttcacaaaactgctgcctggtgccaaaaaggctggggactgctgctctatagcttctgcactagaatctactaatgagtaaaatttaaatcaataactagttttaaaagcataacaagaatatgtgctgtctggctgcagtggctcatgcctgtattctcagcactttgggaggccagtgcaggtggatcacttgaggtcaggagttcaagaccagcctggccaatatggtgaaatcctgtctctactaaaaatacaaaaattagctgggtgtggtggtgcatgcctgtagtctcagctactcgggaggctgaggtgggagaatcacttgaacccgggaggcagaggtttcagtgagccaagatcgtgccactgcactccagcctgagcaacagagtgactccatctcaaatgcaaaacaaaacagaaagaatacatgctgacgaaaaaaatctaagacaataaaattgtattactaggctgttaacatgatattttgtttcccgttaaatgtgtgacatgcaaaagtatttattaaatgaaaatattttttatctttt

SEQ ID NO: 953 - DNA, 3232 bp, Homo sapiens
agcgataaggcggtggcggcggcggtggctcggggaccactggtagcggcagcagctcgcgcccgcgccctcctcgtacccgtgcgcccccggagaccgatcccgccccgcggcccaggccgggcctgaacccagcgggtgccgcttctccacccgaggcttccacctccaacgagccatgttccaggctgcaggagccgcccaggccaccccctctcatgacgccaaaggcggcggcagcagcacggtgcagcgctccaagtccttcagcctgcgggcccaggtgaaggagacctgcgccgcctgccagaagaccgtgtaccccatggagcggctggtggccgacaagctcattttccacaactcttgcttctgctgcaagcactgtcacaccaagctcagcctgggcagctacgccgcgctgcacggggagttctactgcaaaccccacttccagcagctgtttaagagcaaaggcaactacgacgaggggtttggccgcaagcagcacaaggagctctgggcccacaaggaggtggaccccggcaccaagacggcctgaggcctctgtaaccttccaccccctctgcggaaggcctggagccggcagggggaaggtgggaaggaggtcgagctgggcttgcgtgggggccaggtgggaaggggatgaggcttgctcaggcgtaggggaccagggcagggctctgctccaggactccttccttcttccttctcccgcagccggtgagggtttggaaaccaggattggggtctgcccaccaccctgcttcctgcttcgttcagcctccctccccacctcaccccaggaccccctgggaggcccccaagcccagctcccctatctaggtgccttttctccagcaaggagtcagcatgcccccctcagggtcccaagctccctcactgccaccggagactgtgtggcccccacgtctccccatctacctctacccttaacctgtttctgagccacggagacagggaggaaggagcgcgacagtgccacctgttgggcatcataaatgcccctgcagcccatgggggaggagatggggaagtggagccaccctgcctctgcagggcaaggcagggcctgccccagtggggcttgggaccatctcgaaccaccagcgtggagaagcagaagcaaaagcactcgccaggctgcagcctcaggcactggcaggggctggtgcggccccactcccctcccccgctcccatttgtgcccatcctgttgtgaccaaccccgttttaaacatgtttcaatagatccagattctctattgtgtggcctgctgggggatctgtcacaggaagggtgcagactcaccatggggcgggcatggggggacagggccagccccgactacctcggccctgatgggggcagggagctagaagtgggtgtcagttccctgacacaccattgagaaatgggagggctcctcttcacagcgagggcttcatgctgtcacacccacagtggttttggaactgaaactccacctcacccctcagttctgggttggttcagacccaccaacttaccatatgcaccccattgtgaagaggcctgagagcgggagggccaggctgccagtgggtgatggcgcctgtcctcgctgcacttcagtgcctggggtgcaagctgccgcgttccctggctggttccagctgtctagctccctcccttcttcccagccctttgacctggaagtaagttagcgaagaatggcggtaaccagcagacccagcaagtgctgcccaaggttttagtgacccctggattgtcccccctcatcattacccctcgctgctgtcatcatccccttgccttttcaagctctgcggaggtgcagtcacagctactgtctcaggaaatccaaagagaaactacctctgcttctctgaaaacccagggacaatgagggatgagttcacagcagagcaaaccaggcaagttgggaggacctgagggcgccccggtgggacacaggcagaagtctgggttgtcctgctccagattcaacttcctgatgtctccagacatgggatcgatgagaacagagactcctggagggtttgctgccaccacaccatacaactgcctgagttcctaagtggcctccccgtggaacagggcagggagctgggccacaggctccagtgtcacataagtcactatgctgaggcaggcactgctcctcgagggagcagagcgaatactcagcagagatggtgccccggcctggatcctcccaagtgtgaagtgagcgcctcagagcctctcagggcaggccaacttcctgcaccagaggtctcagatggcaaggatcatcttggttcggttaagcaacagtagcagatgaccacaagggggtactggagaggtggctcttggagacacctgacccctgccctgcaaagatgggactgaaggaagtcctctgggccaggaagaccctaccaaatatcatgaaagctccgggaactcagccactggtgacgttcaggttgtgagggccagcagtgccaccctggtaaatcagccctgttgggaccaccccagtggagctcctggaggggcaactggaggaaaggggcagacacctctggactgacaatggtatcagccagatcaccccaggacccctctacttggagtcaagttctcttctgcttgaaaggcccaggctcgttgccaggcaccatacctggcccctgctaagcaaaaacctacctccaccccccacaactgaaagcactgccacaggacccctctgatataaatgatcccttttattgtaagtaatgcgcaacactggcctggctttgcactgcaagccctcggtcaagatatagtcaaataactatggctgcaggttccacagttccacaataaccatggctgcacgatccacaattcagacacagacatagagctggggtgggtggaaggggcaggagggtggcagagtgcggactgtccccagccctggcctctccatgcagagttggcccaggcagacacaccccatggaatgatgagaaagtgacggcacggccccttcccacagcaagcctggggctgccaggaactgcccttcagaacctttgggcccaggtcaccctgaagccccacaactttttatctggattagttattaaaaaacaataaattaagcaacaacttggtcctgaaaaaaaa

SEQ ID NO: 954 - DNA, 3755 bp, Homo sapiens
gggcacaggggagactaaaaaggccagggaagttggcctgccggaagttcccagggagaaggcagcgcgttgtacccgagttacctgtagtcaaccacagtctgaaaatattaaggtattttaagacagaaagagagagaggagagaaaccgcattcacaaaaaagaaatcctctttttagaacatctcttggtggtaccatcagaaatgtcttccttaagtggaaaagtccaaaccgttttgggccttgtagagccaagcaaactgggccgtaccctgacccatgaacacctggccatgacctttgactgctgttactgtccacctcccccgtgccaggaagctatttccaaagaacctatcgtgatgaaaaatttatattggattcagaaaaacgcctattcccataaagaaaaccttcaattaaatcaggagacagaagccataaaggaagaactgttgtattttaaagctaatggtggaggggctttggtggaaaacacaaccactgggattagccgagacacacagacgttgaagaggcttgcagaagagactggcgtccatatcatatctggagccgggttttatgtggatgcaactcactcctcagagaccagggccatgtcagtggagcagcttaccgatgtccttatgaatgaaattctccatggagctgatggaaccagtatcaagtgtggcattattggagaaattggttgctcctggcctttgactgagagtgaaagaaaggttctccaggccacagctcatgcccaggctcagcttggttgtcctgttattatccatcctggacggagctccagggcaccatttcagattatccgaatattgcaagaagcaggcgcagacatctccaaaacagtcatgtcacacctggataggactattcttgataagaaagagctcttggagtttgctcaacttggctgctacttggaatatgatctctttggtactgaactacttcattaccaactcggcccagatattgacatgcctgatgataacaaaagaattagaagggtgcgtctcctggtggaagagggctgtgaagatcgaattctggtagcacatgacatacatacgaaaacccggctgatgaaatatggaggtcacggctattctcatatactcaccaatgttgttcctaaaatgttgctgagaggcataactgagaatgtgcttgataagattctaatagagaaccctaagcaatggctaactttcaaataggatggttgcttatgaattcacaccttgagtataaaacttgcagagaacattcagcgatttccagtccactgtgagatattaatcagttacctaggactaatgacagatcatttccttctgatgagaactaggagggtttgccttctctgagaccagctattacaactgtgcctctagggagttactcagcctaattgagccctattattttaacttaacaaaataaatacagaagtacctatttctaaacaatgatttaaagtctatatcccctaagcggagttgttgtttttctccctaatctatcagctgcactacttgagaaaatttaaagtgtttctagttaaattatttccttcttgagcgatctaatgtttcttgtaatattgatgatcctactaattatcctgctgttctttaattaatgcttaatgaataatatggcactgtaaaatagcttctgcaacaagggaagttaaattttgagacttttttccccaaaggatactgactgtaatacaattaccaattcacaatgataaaaatattttgaaaggttaattttatactgtccacctatctatatattcttctactgaaatgattttgatatctttggctttccggtatctatttttgccatacattttgctgttttgcaaagtttgtataagaacacataacactactgaattataaaaattcaatcataaaagtcaaaatatattacataatatagtttaatgaatcattacatttataataacaaaggccacaatttaattaattggtaagatataatgcaaaaaaaaaaagagaaatgtttgccttatgtatattccctttatttcctttaccttttgtttttccttggacctaaacagagaaaataatgcttatgtatctgaagaaaaggtcagatctattggaaatgacagcccgatacttgagcctcctctttaaaaggtatccagccctgatattttgtgtaaataaaatgtttttaaaacctgttagttaaaacacttaggtgatgggcactgctgcttataaattcatcttttggttgaatcctcactatgctatttggtacctaaaaatattctccaaacccttgctgccagttcctctttgataaatatatagttaattcgaaataaaatccattgcaattcatttatgagttatcttacatatcacaaagaccaattagaattagtcattattcttgatgaagagtctgtttttaatcataaaaatcatgacagttactcagacccaggcatttcaacagagctaacaccaccttcagataggcacaccatgcataactcttgggaagttgagctttgctaaataaaagatatttctgctgatcaaagatgatcaagctttctgtgtattggaacagaaagtaacaaagaggaatgagccaggagaacaaactaattcctttaaataaataaaaaaaaaaaatgcaaatgtccttcaccagtaaagcaagcaaatttttaaaatctctgtttttgaaatctactcgtcaaagagttttcagaggcaatgaaaggggaacagatttttcattgtaatagtggaagttgtgtgatagttaggagatatcaacatgcatttttaatcttttccttagatgaaagagatggcttttggcagtgtgttctaaccagaaagaaaggatttgtattactctccaaatctactgtactgtcagcttcactccacctgagaaaaaagaaaaaaaaattgatagctcaaatgcatgtaattcataaacactgcaaaggagagccacttggtgtctgcagtcctcatattaacagtctgtcacagaatgcagttaaagtattgattggcatatggtaatagagcaaccatagccttaacttacagacctgtgaaataaagggcattttgacctaatacaattaattttctggataactcttaaagagaagtcattttaactgtttttgctactccatatattgtcattcaaaatatattttaacccaaaataagttaaataatttgtgcatgtttgtgtgtgtatatatgcatacacttttttatattaaaattttgaggctatacagccactgtgccctgtggaataaagccatatatataaatgttttatatgtatatgttttatacataaataaaacatttcatctaatatatatatgtgtgtgtgagtatatgtgtgcatgtttagcagatatttgtataaaatataaacactctgttgtcatataggctatatgcgaaattgttaattttaaaataacctcaggccacagacttgtagtaatcatttgaaggcctcacctagtgtccccttggtgacgtatgcagcagctcaaattaaacctttgtgcattgggttatgaataatcttttcttccaaagatggcaaaagcctcggtttgatttgatactaaagaataaatttctctgactttcaaaaaaaaaaaaaaaaa

SEQ ID NO: 955 - DNA, 8487 bp, Homo sapiens
ccttcggccccggcggggctctggcgtacccaaaatgcaggccccagcggaacgcacagccctcctgtcctccgccggtgcccctttagccgccccacccccatccctaagggctctcattctccagctgcagccgcagctgggttccgaacacgccgccgggccccgggagggagaggggcaggtgccagggcggcgcgcagcctctgctcccggtgccagcttcagtgcgccgggcacacgcgcgccccgcaacccctccctcaccctttccccgttgctcaatctccgccagccgcggtcgctgcatcgtcagagagctgcaagagggaggcagcaaggtgcggccgccagcagtgacaccatgtgaccggcacggctcactgacacgcagctttggttaaagagcgggcgcacaggaggggaggagaccgcgcgcgggacggggaggaatggcctgtccgcgttaaaccatcacaagccatggttgcggaagggccacgcgtcccccagtaggagaatgactccgattcgtgaccctcagcgccggtgcatgtcgatgtaagtgcgaggccggcgagcagagtgtgagtgggggttggtggtgaggggagattctgatgcaatcggcccggaaaggaggagagccaggcgagcgcggactggggcggccacgccactccgccagaaggtcgccaggagcctccgcccttcaccttcctccgaaatccgccaggccacgccaagctccctgcccaacccttactgacgggggccacattttcccggcctccgcagccagaccttgacacaaaggacatcaaactgccgagggtaaaaaccccggaagggcggacacctccacatcgccttttgccacctttccctttatttccggagatatttattgagtgtctactgtgtgccaggcactatatctatgtgcatagaaaaaccctggaaggccatacaacaatatatatagagtgatcgtctctgcttgctgagctaacaggggtgtcaagcttccattttggtatctacttctaaatacactcagaacaggagaaatttggactaattttcaaactacagacactttctaatcatgatgcatttcaaaagtggactcgaattaactgagttgcaaaacatgacagtgcccgaggatgataacattagcaatgactccaatgatttcaccgaagtagaaaatggtcagataaatagcaagtttatttctgatcgtgaaagtagaagaagtctcacaaacagccatttggaaaaaaagaagtgtgatgagtatattccaggtacaacctccttaggcatgtctgtttttaacctaagcaacgccattatgggcagtgggattttgggactcgcctttgccctggcaaacactggaatcctactttttctggtacttttgacttcagtgacattgctgtctatatattcaataaacctcctattgatctgttcaaaagaaacaggctgcatggtgtatgaaaagctgggggaacaagtctttggcaccacagggaagttcgtaatctttggagccacctctctacagaacactggagcaatgctgagctacctcttcatcgtaaaaaatgaactaccctctgccataaagtttctaatgggaaaggaagagacattttcagcctggtacgtggatggccgcgttctggtggtgatagttacctttggcataattctccctctgtgtctcttgaagaacttagggtatcttggctatactagtggattttccttgagctgtatggtttttttcctaattgtggttatttacaagaaatttcaaattccctgcattgttccagagctaaattcaacaataagtgctaattcaacaaatgctgacacgtgtacgccaaaatatgttaccttcaattcaaagaccgtgtatgctttacccaccattgcatttgcatttgtttgccacccgtcagtcctgccaatttacagtgagcttaaagaccgatcacagaaaaaaatgcagatggtttcaaacatctcctttttcgccatgtttgttatgtacttcttgactgccatttttggctacttgacattctatgacaacgtgcagtccgacctccttcacaaatatcagagtaaagatgacattctcatcctgacagtgcggctggctgtcattgttgctgtgatcctcacagtgccggtgttatttttcacggttcgttcatctttatttgaactggctaagaaaacaaagtttaatttatgtcgtcataccgtggttacctgcatactcttggttgttatcaacttgttggtgatcttcataccctccatgaaggatatttttggagtcgtaggagttacatctgctaacatgcttattttcattcttccttcatctctttatttaaaaatcacagaccaggatggagataaaggaactcaaagaatttgggctgcccttttcttgggcctgggggtgttgttctccttggtcagcattcccttggtcatctatgactgggcctgctcatcgagtagtgacgaaggccactgaaacccgccgagaaaaagaaacatccctgttgtctgctcagtcaagtccccacacatcagcaatctctcaccacttcttttgcaagtttacagaagcaaacagaaatgtacaggatacttaaaatggaataactttttggttgcaaaacagagacatggttctataatgcttcatgtccctccaagatttgagatcaatttagggattgtgaaatttttttttcaaatttcatacaatcatatttcccagtacttttcacaatcattttttacccatctaactctatgttttgtggcttcccggtctcttagaactttgaaaacatgatatacaataatgtttatttattatacatccagattctgaaataattttcctactgatgttcagctcacactatctgtacctttttagaagagaaaagaatcttgaattgtatatatttattttgctttacagaaaaaaatggtttcgtaaataatttgcctattttggttaacatagcacatggagataatcatctgaaagttatagggcactgccactgctgaatcagagcatgcccaatatttgaggtggctctgatttcctggcagctgaactcgggtagtccagtggcctagctggtaccacatctattcccatccagagacattctctggcaagtgttctcagctgaaaagtggttggggatgattcttaccttggtaattaaatgaagctacacatttgggtaatctagcaaatgaagtattttttccctcttggcaacttgtgtcagagttactctggtctgagtcaactttcgctggggaaaacctatggaacctactgcaaaaagattgtccaaaatgcctaagaaaatactcctctgatgcatttagccttcaaccctacctgtcttgctgaagggagaaaaatgttttagtacattataggcccagcagcttttattcatgtccaccagctagttgcacagagaatcatgtgtacctaactaaggatgatctaggataagtaactcctgttttatattgagtattttagggaagtctttaaaagacttgttttatatctataaatctaggttattacaaatacaagaattttgtaccttaaataagcctcatttctatttcttcttcattaattctccatctagtcttgtgaaaaaaaaaaaaaaaaaaccctcagagatagtctttgtgaagagcttctgacagaatcactgagtaccttccttcccccagatgaggaagacaagggggtctcagtgtctgtgctgtctcctcttctcttccccaaccaaggactgtgccattactgcccgtctcaactgtccatgcaggaggacagagttgcctggtactcttacccttgtccctctcctaaagggagcacaaggaaactgaagagactgaaaaagaagagagtttgtagctgaaaaagaatagggatagcaaggaaacccagaactgcattcccctaagtggggccatcccatgtgattgaattgtccatagcttgcctatggtgagaaatgtgcatgctccgtgagctggtctcttgaaacaggacttatgcttcctctatattctggttaaattttccaaacacataagttcactgagcacagatttcttatccagagacaagtagaatctaaccgcagactgttggcagagtttccaggcacttagccatgttcccttcctgactcaaatccccaaaggccttcactctcactgagaatcacactactgtcccatagataaggcaggcattgaagcacctgtcgtgatcctctaggggggagaatgaaaggttatttcctgcattgcatcatcatagcttttaatataatgctacagaatcatatccacattaggttagagttcagatatttggatatgaatacctaacctagccatatccatggccatctctgttcttttcagcaatgttttccatattatattagcaatgacagaaacagaacaagccaagatccagtcagttcttgggagcttgtctagagcaccaagtaatgaaatagccaggtagtgggatgactgtacctttaaaaatacataatttagtttgcaagctatattatgctactttctattttccttgttactttatagcaattcattttaccctcacaaagtcaatttagaaccttatcattaactgggatgtgtagtgatatttttgggcctctgggtttcatgtgtcaatacaaggaatatttatttaaaatagatttatttagaggaggcacagtgttgttgatctgtgtgacaccacccatatttttaaaaacctttgtatgtttctctaaatttgttgttgactgaatataatagaccctaccataattcgtcaaatatcactgattagttacatcctttgtgtgagattagctgtaaagtatactgctcttattcttattcagaatagttaattggtagccaaaaatacatgtatcacagatgttaggtcgaatttaaacagcacagtcaagtgctatggaagtttttctgctaaattagtagattaaagaatactataccctaggcatggggagcagcacgttttcctttggtaggtaggatctctatactagtgaacagtgccagttccacactttggacttagaactgttctctagttattgtaacacagaatactgtcaatccctaatttacttaatgttacttattggaagtggggctgatgaaatacgcacaggagggaaatctactgtgtttaggcacaggcagccccagtgtataaggagatcatattccaaaaggttgtcagttggttgtttgcaacctggaatgtattttcctttagagaccaggttatccatggtggttaggcccctagagcagctggaaaagatgatcaaaccaataggttagctgacatcgaataatgtaataggtttgctaaagaatctaaccatcaaatataatattgtttccagggagggtgtttgttcagagttgcctgttagtagaatctggactgtccatcccagccacatcccacctactggacagtaggggtagagatgccaccagactacaggtgaccagattggcctgaaacatggtgtccagtaaaaacggggaggaataagtccatgactgctggagagcttggtggtaggaggagggtgaaggagggtgagggggcctctcatgggtcagaaacctccagggacatccctcagctggtaactctgctgttgtccggagggttcaggcttggtgtgccttcttctgtttgtctgacttttggctcctatggttcatctcctgccctgcccaccacagaaaaggatgctgctgcatagcttctccaatgtaccagtcattgaggccagcgcgcagcacttttaatgtttttagtgctagtaactgtgttttaactctccaggaataagctgggaggttagaaaacaagaaaaaagggggaaaaaaaaacctctccacccactttccttttttacagttacagaccctgttgagaaaaagaagcacccagatgggtgatggtgatagggcttgtggtggacacagggttgtggtaagattcctcagtgcttcggcgagcacctaagactattaccctggaactgactgctttctagagcttgattcatgcctctaagccagtggttctcaaagtgtggcccctagaccagtagcatcagcatcatcggggacctcattagaatgcagattctcagccccctcccagacatggtgaagtcagaagctctcagggagggactcagcaaatgattctaaagcgcatcaagtttgagaaccaccctaagccaatgagtctcccttttacttcccattagtcctccctcaccagatgattcctaggactcatggtgcaacatacaggagccaggctttagggaggggaggaaaggagcctggcggcaggggtctctgcaatggcaagaaagtgagtgaatccagcgctgccacctggttatccccttctcgttgaaaatagcagcgcaggtgcaaattcctaaacacaggctgcctgcactcggtgttacctcgggctgaggcatgataatattttattttttaaagctgtgaggaaatgaaagtgaggctttggttggggcgaggcagttgtgaaagaaattaaaataaaagaccctttgtaaatgcagacttagaagaaatactgaatttgtgtcagaagttctccagtgtttgtgttaatcgtgtggtgataatcctgtcctccttttaaagcgaattctctactgaaaggtctgctctgcttaaggagctacaaactgctctcaaaagaatgaaatactgagttccaattcagtgaggcacagtgttggactatggcacatttagttggagtcggggggaggtcaggaatatgatcagataatggattttataccttagagcaaaatctattagtctctctcagtttatcaatttaaatggctttaggcttatagggggtgtaaactttaagaatataattctcccattcaagtttacagcaaacatctagccaccttcaaaacaaagaatatacagaccatcatttagcaatactaatacatgattttccttggggatggcaggtttgagaatcctttagcaacaggacatacttcccctaaattacagtgaattatttataacgagataaagctttcaggtacaagctgaaggtggggtgtctaacaactaaaaactatcactaaatctcaaagagaaagttcttgcaaaatatgtaaagttcacaaggtgcagacattttccttctttaggcttttatctaaggaagggctatgaaactgggcccatctgtatacaggctcaaatttacgtttttaaaggaagaatctatgcagctgaggcttattgcaggaaatacttcatttgtatgtaaatattattgtaaataaataggaggctgtatatttttgaagttgttgatctgcactgaaatagaagtctctaggatctgcatataaacaataaatgtttcctagaaattagtggttttgtttgggaattagaaaaatttacattctctcccaggtaacatagttctctcaatgtaaacttggaacctgaaaccctacttaatttagagaaagaaatgtctgagaaatagttcccttgatttcttatgctggcattaagatcaattatttaacagatagtcctctgagatacaagtaaggaatatttagacacaaatccttgtcctatagaaacagatatacccaaatgacaaattgtttcttcataatgatcttccatttttaacactgataccactacacagtacatatgaaaacagaagctggggagaagaatgtttttttcacaattgaattgctgcatttctcaaactttgggatctatgaaagcggggagagggaacctgaatattaattatgagcacaaatttgaaggaaagaaaacaaagaaccattatctaatcaagctttgaaagtcctgcatgtttgccttttattttagtgttgacgccaacatagactgtctaaggtatttttttccccaaacacttgaatcttggtcgttggtatgtaatccactctctagagtccagtgtactttagacttcatctgagtccaatacatgtaccacactactgttttattaatgtaaaaaccttgtaaatgaatttcagatgggtgatttaagtgagtcacaagtcacaaaactttgctattcatagttaatcaaatagaactgggttttttttttcagagtgtggtgtaaataaagaaatataagaagttctgttctataactgctctgttaacatagtttttaaacattaaaaaatgtgaactaaaagtatttaaaaa

SEQ ID NO: 956 - DNA, 2753 bp, Homo sapiens
gagcgaccgtcggggccggctggggccggagctcggggctcggtgggcctacagcggctccggacggacccccggggctggggagtcggggaggcctgccccggccccctgcccgcggccgccatggcggagaattggaagaactgcttcgaggaggagctcatctgccctatctgcctgcacgttttcgtggagccagtgcagctgccgtgcaaacacaacttctgccggggctgcatcggcgaggcgtgggccaaggacagcggcctcgtacgctgcccagagtgcaaccaggcctacaaccagaagccgggcctggagaagaacctgaagctcaccaacatcgtggagaagttcaatgccctgcacgtggagaagccgccggcggcgctgcactgcgtgttctgccgccgcggccccccgctgcccgcgcagaaggtctgcctgcgctgcgaggcgccctgctgccagtcccacgtgcagacgcacctgcagcagccctccaccgcccgcgggcacctcctggtggaggcggacgacgtgcgggcctggagctgcccgcagcacaacgcctaccgcctctaccactgcgaggccgagcaggtggccgtgtgccagtactgctgctactacagcggcgcgcatcagggacactcggtgtgcgacgtggagatccgaaggaatgaaatccggaagatgctcatgaagcagcaggaccggctggaggagcgagagcaggacattgaggaccagctgtacaaactcgagtcagacaagcgcctggtggaggagaaagtgaaccaactgaaggaggaagttcggctgcagtacgagaagctgcaccagctgctggacgaggacctgcggcagacagtggaggtcctagacaaggcccaggccaagttctgcagcgagaacgcagcgcaggcgctgcacctcggggagcgcatgcaggaggccaagaagctgctgggctccctgcagctgctctttgataagacggaggatgtcagcttcatgaagaacaccaagtctgtgaaaatcctgatggacaggacccagacctgcacgagcagcagcctttcccccactaagatcggccacctgaactccaagctcttcctgaacgaagtggccaagaaggagaagcagctgcggaaaatgctagaaggccccttcagcacgccggtgcccttcctgcagagtgtccccctgtacccttgcggcgtgagcagctctggggcggaaaagcgcaagcactcaacggccttcccagaggccagtttcctagagacgtcgtcgggccctgtgggcggccagtacggggcggcgggcacagccagcggtgagggccagtctgggcagcccctggggccctgcagctccacgcagcacttggtggccctgccgggcggcgcccaaccagtgcactcaagccccgtgttccccccatcgcagtatcccaatggctccgccgcccagcagcccatgctcccccagtatggcggccgcaagattctcgtctgttctgtggacaactgttactgttcttccgtggccaaccatggcggccaccagccctacccccgctccggccactttccctggacagtgccctcgcaggagtactcacacccgctcccgcccacaccctccgtcccccagtcccttcccagcctggcggtcagagactggcttgacgcctcccagcagcccggccaccaggatttctacagggtgtatgggcagccgtccaccaaacactacgtgacgagctaacgccacgcaggcggcggggcgctggggaatcttcctccccagcccccgggctcgggagttatgcatccagagacctgcccttctaccttcctcgcctcccctcttcctcattccattgccccaggtcttttccttttggattttgttttggttttggctttgtttttgatttttttttattatgaatctcctggacgcagaggtgacagtgggagctggcctgggccaggacggcaggtggccctggagatgggaaagtgtctgtgtcgaggcgctgagctctctctctgtttctccttttttcctctactccttccccttcacacccccgtggctggaaggaacctcggcttccctgaaagcttgggggtcccacccttcttaccccacccgggaggaacgcccagggccccgggcttgtttctcctcttgttttccttttgggcagtttgatcactgatcgagtaaggaatgacctttagattgtgcgacttttgtttttgtttttttaaatttttttaaaccaagaatgatttctcctgcttccttctcctcaccatcttcccagacggagttcaaaggccacttctcaagcagcttttggcaccttcagcctcagagtggaatcttttaaagacaggacccctatgtccaggaaaggggaaaaggaactttgccaatgatagtgaccacagcaaaagcaaataataataatattaataataataaagagaaataaaataataaaataaaaaacaatagcacagcccttgttgaggtcagcagggaggaggggctgcccggagttgggtccttgcctggattttgacacagcaacttcctgtagtgagcactttgtatgaatcgtggacttcctgttctcaaggcgcaggtatttattctgtatctgtctagagcacacaccaaaatccaaccttctaataaacatgatggcgcagtcccacaaaaaaaaa

SEQ ID NO: 957 - DNA, 2154 bp, Homo sapiens
gccttcctgggattggagtctcgagctttcttcgttcgttcgtcggcgggttcgcgcccttctcgcgcctcggggctgcgaggctggggaaggggttggagggggctgttgatcgccgcgtttaagttgcgctcggggcggccatgtcggccggcgaggtcgagcgcctagtgtcggagctgagcggcgggaccggaggggatgaggaggaagagtggctctatggcggcccatgggacgtgcatgtgcacagtgatttggcaaaggacctagatgaaaatgaagttgaaaggccagaagaagaaaatgccagtgctaatcctccatctggaattgaagatgaaactgctgaaaatggtgtaccaaaaccgaaagtgactgagaccgaagatgatagtgatagtgacagcgatgatgatgaagatgatgttcatgtcactataggagacattaaaacgggagcaccacagtatgggagttatggtacagcacctgtaaatcttaacatcaagacagggggaagagtttatggaactacagggacaaaagtcaaaggagtagaccttgatgcacctggaagcattaatggagttccactcttagaggtagatttggattcttttgaagataaaccatggcgtaaacctggtgctgatctttctgattattttaattatgggtttaatgaagatacctggaaagcttactgtgaaaaacaaaagaggatacgaatgggacttgaagttataccagtaacctctactacaaataaaattacggccgaagactgtactatggaagttacaccaggtgcagagatccaagatggcagattcaatctttttaaggtacagcagggaagaactggaaactcagagaaagaaactgcccttccatctacaaaagctgagtttacttctcctccttctttgttcaagactgggcttccaccgagcagaaacagcacttcttctcagtctcagacaagtactgcctccagaaaagccaattcaagcgttgggaagtggcaggatcgatatgggagggccgaatcacctgatctaaggagattacctggggcaattgatgttatcggtcagactataactatcagccgagtagaaggcaggcgacgggcaaatgagaacagcaacatacaggtcctttctgaaagatctgctactgaagtagacaacaattttagcaaaccacctccgtttttccctccaggagctcctcccactcaccttccacctcctccatttcttccacctcctccgactgtcagcactgctccacctctgattccaccaccgggttttcctcctccaccaggcgctccacctccatctcttataccaacaatagaaagtggacattcctctggttatgatagtcgttctgcacgtgcatttccatatggcaatgttgcctttccccatcttcctggttctgctccttcgtggcctagtcttgtggacaccagcaagcagtgggactattatgccagaagagagaaagaccgagatagagagagagacagagacagagagcgagaccgtgatcgggacagagaaagagaacgcaccagagagagagagagggagcgtgatcacagtcctacaccaagtgttttcaacagcgatgaagaacgatacagatacagggaatatgcagaaagaggttatgagcgtcacagagcaagtcgagaaaaagaagaacgacatagagaaagacgacacagggagaaagaggaaaccagacataagtcttctcgaagtaatagtagacgtcgccatgaaagtgaagaaggagatagtcacaggagacacaaacacaaaaaatctaaaagaagcaaagaaggaaaagaagcgggcagtgagcctgcccctgaacaggagagcaccgaagctacacctgcagaataggcatggttttggccttttgtgtatattagtaccagaagtagatactataaatcttgttatttttctggataatgtttaagaaatttaccttaaatcttgttctgtttgttagtatgaaaagttaactttttttccaaaataaaagagtgaatttttcatgttaagttaaaaatctttgtcttgtactatttcaaaaataaaaagacagcaatgactttatatccaa

SEQ ID NO: 958 - DNA, 2556 bp, Homo sapiens
aacttgctctaacttcctcggccgagccgggccgcgccgccgctgccgccgccgcgcgcggattctgcttctcagaagatgcactattatagatactctaacgccaaggtcagctgctggtacaagtacctccttttcagctacaacatcatcttctggttggctggagttgtcttccttggagtcgggctgtgggcatggagcgaaaagggtgtgctgtccgacctcaccaaagtgacccggatgcatggaatcgaccctgtggtgctggtcctgatggtgggcgtggtgatgttcaccctggggttcgccggctgcgtgggggctctgcgggagaatatctgcttgctcaactttttctgtggcaccatcgtgctcatcttcttcctggagctggctgtggccgtgctggccttcctgttccaggactgggtgagggaccggttccgggagttcttcgagagcaacatcaagtcctaccgggacgatatcgatctgcaaaacgtcatcgactcccttcagaaagctaaccagtgctgtggcgcatatggccctgaagactgggacctcaacgtctacttcaattgcagcggtgccagctacagccgagagaagtgcggggtccccttctcctgctgcgtgccagatcctgcgcaaaaagttgtgaacacacagtgtggatatgatgtcaggattcagctgaagagcaagtgggatgagtccatcttcacgaaaggctgcatccaggcgctggaaagctggctcccgcggaacatttacattgtggctggcgtcttcatcgccatctcgctgttgcagatatttggcatcttcctggcaaggacgctgatctcagacatcgaggcagtgaaggccggccgtcacttctgaggagcagagttgagggagccgagctgagccacgctgggaggccagagcctttctctgccatcagccctacgtccagagggagaggagccgacacccccagagccagtgccccatcttaagcatcagcgtgacgtgacctctctgtttctgcttgctggtgctgaagaccaagggtcccccttgttacctgcccaaacttgtgactgcatccctctggagtctacccagagacagagaatgtgtctttatgtgggagtggtgactctgaaagacagagagggctcctgtggctgccaggagggcttgactcagaccccctgcagctcaagcatgtctgcaggacaccctggtcccctctccactggcatccagacatctgctttgggtcatccacatctgtgggtgggccgtgggtagagggacccacaggcgtggaccgggcatctccctccatcaagcaaagcagcatgggggcctgcccgtaacgggaggcggacgtggccccgctgggcctctgagtgccagcgcagtctgctgggacatgcacatatcaggggttgtttgcaggatcctcagccatgttcaagtgaagtaagcctgagccagtgcgtggactggtgccacgggagtgccttgtccactgtccccctgtgtccaccagctattctcctggcgccggaactgcctctggtcttgatagcattaagccctgatggcgccggtggcgcggtgggcatggttcttcactgagagccggctctccttttcttaaagtgtgtaaatagtttatttataggggtaagaatgttctcacaccatttcacttcctcttcctctcctccagcattctcctctgagcagccttagatagtgtccatggctggagccgaccctttgagtccccttgagtgtcttaagaaccagcccacaacagcctctctttctcctccacatactgcagcctccctccatgcatcccacatacaagcactcccccactccccagcgtggcctcactgtcttctggtcttggtgctactgaaattgtcacccagaatttgaatcctgaccctccccactgcaagcccagggagccccagcccaagatggccagcctgaaactgttggccagggctcctcttgtggccatgtacccagggctggctggcctgccatttgcctctccccggagacagccgttcttctgcaaccacaccccgtgcctagccacaaccccaggctgcagctgctcagaagctccaggcattttgtttctggtgaccgcccctaatgggatatcggtgatcactggtccacccttcctgtcagggcttttctggggctgctcttggaaatgaagtcttaagtactgaataactcccctggggatagctggggcatttgtctagctgggctaccttctaacactttgccatagctcagaccacttctcatcgttcagggatggactgcaaccttaatttacttgccggagtgtacattctagtgtggtgtatactggtggctgttgatgacgattttttttttttttttacacaattctctgtagactaggagaagaatgcttgtgtttttcggaagtgtgatgcttctctttgactgccaaactcttttatggaatatatctttatattaaaaaaaaaa

SEQ ID NO: 959 - DNA, 2334 bp, Homo sapiens
gtcccggccgccgggaggaagtggccgggcggtcgcagggactccggggcgaccgccgcgagtccgcagtagttcgggccatggaggcggagccgccgctctacccgatggcgggggctgcggggccgcagggcgacgaggacctgctcggggtcccggacgggcccgaggccccgctggacgagctggtgggcgcgtaccccaactacaacgaggaggaggaggagcgccgctactaccgccgcaagcgcctgggcgtgctcaagaacgtgctggctgccagcgccgggggcatgctcacctacggcgtctacctgggcctcctgcagatgcagctgatcctgcactacgacgagacctaccgcgaggtgaagtatggcaacatggggctgcccgacatcgacagcaaaatgctgatgggcatcaacgtgactcccatcgccgccctgctctacacacctgtgctcatcaggttttttggaacgaagtggatgatgttcctcgctgtgggcatctacgccctctttgtctccaccaactactgggagcgctactacacgcttgtgccctcggctgtggccctgggcatggccatcgtgcctctttgggcttccatgggcaactacatcaccaggatggcgcagaagtaccatgagtactcccactacaaggagcaggatgggcaggggatgaagcagcggcctccgcggggctcccacgcgccctatctcctggtcttccaagccatcttctacagcttcttccatctgagcttcgcctgcgcccagctgcccatgatttatttcctgaaccactacctgtatgacctgaaccacacgctgtacaatgtgcagagctgcggcaccaacagccacgggatcctcagcggcttcaacaagacggttctgcggacgctcccgcggagcggaaacctcattgtggtggagagcgtgctcatggcagtggccttcctggccatgctgctggtgctgggtttgtgcggagccgcttaccggcccacggaggagatcgatctgcgcagcgtgggctggggcaacatcttccagctgcccttcaagcacgtgcgtgactaccgcctgcgccacctcgtgcctttctttatctacagcggcttcgaggtgctctttgcctgcactggtatcgccttgggctatggcgtgtgctcggtggggctggagcggctggcttacctcctcgtggcttacagcctgggcgcctcagccgcctcactcctgggcctgctgggcctgtggctgccacgcccggtgcccctggtggccggagcaggggtgcacctgctgctcaccttcatcctctttttctgggcccctgtgcctcgggtcctgcaacacagctggatcctctatgtggcagctgccctttggggtgtgggcagtgccctgaacaagactggactcagcacactcctgggaatcttgtacgaagacaaggagagacaggacttcatcttcaccatctaccactggtggcaggctgtggccatcttcaccgtgtacctgggctcgagcctgcacatgaaggctaagctggcggtgctgctggtgacgctggtggcggccgcggtctcctacctgcggatggagcagaagctgcgccggggcgtggccccgcgccagccccgcatcccgcggccccagcacaaggtgcgcggttaccgctacttggaggaggacaactcggacgagagcgacgcggagggcgagcatggggacggcgcggaggaggaggcgccgcccgcagggcccaggcctggccccgagcccgctggactcggccgccggccctgcccgtacgaacaggcgcaggggggagacgggccggaggagcagtgaggggccgcctggtccccggactcagcctccctcctcgccggcctcagtttaccacgtctgaggtcggggggaccccctccgagtcccgcgctgtcttcaaaggcccctgtctcccctcccccacgttggggacgcccctcccagagcccaggtcacctccgggcttccgcagccccctccaaggcggagtggagccttgggaacccctcggccaagcacaggggttcgaaaatacagctgaaaccccgcgggcccttagcacgcgccccagcgccggagcacggtcagggtcttcttgcgacccggcccgctccagatccccacagctctcggccgcggacccgggccgcgtgtgagcgcactttgcacctcctatccccagggtccgccgagagccacgattttttacagaaaatgagcaataaagagattttgtactgtcaaaaaaaaaaaaaaaaaa

SEQ ID NO: 960 - DNA, 2583 bp, Homo sapiens
tcggggagagaagctggactgcagctggtttcaggaacttctcttgacgagaagagagaccaaggaggccaagcaggggctgggccagaggtgccaacatggggaaactgaggctcggctcggaaaggtgaagtaacttgtccaagatcacaaagctggtgaacatcaagttggtgctatggcaaggctgggaaactgcagcctgacttgggctgccctgatcatcctgctgctccccggaagtctggaggagtgcgggcacatcagtgtctcagcccccatcgtccacctgggggatcccatcacagcctcctgcatcatcaagcagaactgcagccatctggacccggagccacagattctgtggagactgggagcagagcttcagcccgggggcaggcagcagcgtctgtctgatgggacccaggaatctatcatcaccctgccccacctcaaccacactcaggcctttctctcctgctgcctgaactggggcaacagcctgcagatcctggaccaggttgagctgcgcgcaggctaccctccagccataccccacaacctctcctgcctcatgaacctcacaaccagcagcctcatctgccagtgggagccaggacctgagacccacctacccaccagcttcactctgaagagtttcaagagccggggcaactgtcagacccaaggggactccatcctggactgcgtgcccaaggacgggcagagccactgctgcatcccacgcaaacacctgctgttgtaccagaatatgggcatctgggtgcaggcagagaatgcgctggggaccagcatgtccccacaactgtgtcttgatcccatggatgttgtgaaactggagccccccatgctgcggaccatggaccccagccctgaagcggcccctccccaggcaggctgcctacagctgtgctgggagccatggcagccaggcctgcacataaatcagaagtgtgagctgcgccacaagccgcagcgtggagaagccagctgggcactggtgggccccctccccttggaggcccttcagtatgagctctgcgggctcctcccagccacggcctacaccctgcagatacgctgcatccgctggcccctgcctggccactggagcgactggagccccagcctggagctgagaactaccgaacgggcccccactgtcagactggacacatggtggcggcagaggcagctggaccccaggacagtgcagctgttctggaagccagtgcccctggaggaagacagcggacggatccaaggttatgtggtttcttggagaccctcaggccaggctggggccatcctgcccctctgcaacaccacagagctcagctgcaccttccacctgccttcagaagcccaggaggtggcccttgtggcctataactcagccgggacctctcgtcccactccggtggtcttctcagaaagcagaggcccagctctgaccagactccatgccatggcccgagaccctcacagcctctgggtaggctgggagccccccaatccatggcctcagggctatgtgattgagtggggcctgggcccccccagcgcgagcaatagcaacaagacctggaggatggaacagaatgggagagccacggggtttctgctgaaggagaacatcaggccctttcagctctatgagatcatcgtgactcccttgtaccaggacaccatgggaccctcccagcatgtctatgcctactctcaagaaatggctccctcccatgccccagagctgcatctaaagcacattggcaagacctgggcacagctggagtgggtgcctgagccccctgagctggggaagagcccccttacccactacaccatcttctggaccaacgctcagaaccagtccttctccgccatcctgaatgcctcctcccgtggctttgtcctccatggcctggagcccgccagtctgtatcacatccacctcatggctgccagccaggctggggccaccaacagtacagtcctcaccctgatgaccttgaccccagaggggtcggagctacacatcatcctgggcctgttcggcctcctgctgttgctcacctgcctctgtggaactgcctggctctgttgcagccccaacaggaagaatcccctctggccaagtgtcccagacccagctcacagcagcctgggctcctgggtgcccacaatcatggaggaggatgccttccagctgcccggccttggcacgccacccatcaccaagctcacagtgctggaggaggatgaaaagaagccggtgccctgggagtcccataacagctcagagacctgtggcctccccactctggtccagacctatgtgctccagggggacccaagagcagtttccacccagccccaatcccagtctggcaccagcgatcaggctgggcctcccaggcgatctgcatactttaaggaccagatcatgctccatccagccccacccaatggccttttgtgcttgtttcctataacttcagtattgtaaactagtttttggtttgcagtttttgttgttgtttatagacactcttgggtgta

SEQ ID NO: 961 - DNA, 473 bp, Homo sapiens
  misc_feature (348)..(348): n is a, c, g, or t
  misc_feature (360)..(360): n is a, c, g, or t
  misc_feature (385)..(385): n is a, c, g, or t
  misc_feature (392)..(392): n is a, c, g, or t
  misc_feature (417)..(417): n is a, c, g, or t
  misc_feature (471)..(471): n is a, c, g, or t
aaattttgatggcatatgggtttggttccacttgtagagaataaatgttcacaacttactggtattagcacacacacatcacatgcagaaatggtgttttcttgccacttactctttctcataagatgcttatattcctgtgggcatttgtcttccacactacagcacataatttgatgaaactgattttctgtgcaagagcttgtgtttctccaactctgggttttatgggaccacttttcattgggtatatagggagggcggttaaaacgtgggtgggtaggaatgcaggttttagggttaggctggggtgtggaaggaatcccagggtctttggggatagtcttnggcaagttactncaactcctcttaaggttaggtttcnttgatcntgttcagatggacagttaaacctcnggagtttgtggaaaattaatggggttttatgtgtgttaaagccctttggccttntt

SEQ ID NO: 962 - DNA, 516 bp, Homo sapiens
  misc_feature (321)..(321): n is a, c, g, or t
  misc_feature (458)..(458): n is a, c, g, or t
  misc_feature (469)..(469): n is a, c, g, or t
  misc_feature (489)..(489): n is a, c, g, or t
  misc_feature (494)..(494): n is a, c, g, or t
  misc_feature (507)..(507): n is a, c, g, or t
  misc_feature (513)..(513): n is a, c, g, or t
tttttttttttctcccctgcctggaggtgctcttttaccatggacgtggacaaaggaggtttaaatgaatactttgttttgtcatgttcaaaaaaagagtattaatattttgtgactgcatctgtgaatgaagacactcaaaaagccatgtttccaacttaggttaataataaggctatttgtccacccactcttcgggcattgctgcaatattcctgggcctcaagtgggaggccacgtgggaacaaggcctcagaaaacaaaggacatgcagcctccctgagccagttcctataaaacaccaccagggcaggccacagnctttggactctcttaggtgggctgcaactctccttttccctttctccaggcaaggcgtacgggttttgtggacgttcaagggtcttgccaaaaggagcttggggtcacgggtaacctagggtttttgggccaaaatnatttttccctntaatttccattcaggacggncagtnaaaaattttggancacaantgt

SEQ ID NO: 963 - DNA, 491 bp, Homo sapiens
  misc_feature (45)..(45): n is a, c, g, or t
  misc_feature (305)..(305): n is a, c, g, or t
  misc_feature (423)..(423): n is a, c, g, or t
  misc_feature (463)..(463): n is a, c, g, or t
  misc_feature (474)..(474): n is a, c, g, or t
  misc_feature (483)..(483): n is a, c, g, or t
ttaggcaagaattagagggttgaaaccaggcttatttattttcancttctttctgccatcttttaaccaaccttctcagaataaaatgtgatttttgagacagaatgaaacacatatccaaattttaatacagtaagaataggtatcctgaataaatgagaactctagaaaatcaaggtttcaaaattctacccttcctgggagttaaagaagtttggcagaaacagaacaaattaatcagcagattcatcacctgccaattttttctgtacaattttcttgattctgggagcatctggggtccngggcaggattttcctcccatccttcagtgtgggctatcacttcggacttgggttgcaatggggttccctttcccgattcactttccaaacttttgggatgtttttgggggtggaattnccagagggttgtctttatacacatgcagcggggtttcagnatacaagtcantgtctaggnctttcctt

SEQ ID NO: 964 - DNA, 419 bp, Homo sapiens
  misc_feature (157)..(157): n is a, c, g, or t
  misc_feature (403)..(403): n is a, c, g, or t
ccaagacctttggaaagatgaaacctcgttatgaaatcaactccctgattagataccactgcaaagatggtttcattcaacgtcaccttccaactatccggtgcttaggaaatggaagatgggctatacctaaaattacctgcatgaaccgtaagtngtcctttagaaagaatggactaccgtgctataacaactactagacaccttcattttacggctgtggtatcggcagtttagggtatggagcaagtaatattgtgtgttttctttttttctttctttccttccatgtaggcatctgcataccaaaggacttattctatggaaatactttaaaaaattcctcatcaggcaaagggacaattcaataaatacatccaaacatgattcattcgttgggagnccggggtgggcaggga

SEQ ID NO: 965 - DNA, 1299 bp, Homo sapiens
caagttacgcggactccgtgaagggccgattcaccatctccagagacaacgccaagaatatattgtttctgcaaatgaacgaattgagagccgacgacacggctgtgtattactgtgcaagagggggggatcatatagtaccggctgctgtcgctcccttccacatggacgtctggggccaagggaccacggtcaccgtctcgtcagcatccccgaccagccccaaggtcttcccgctgagcctctgcagcacccagccagatgggaacgtggtcatcgcctgcctgcctggtccagggcttcttccccaggagccactcagtgtgacctggagcaaagcggacagggcgtgaccgccagaaacttcccacccagccaggatgcctccggggacctgtacaccacgagcagccagctgaccctgccggcacacagtgcctagccggcaagtccgtgacatgccacgtgaagcactacacgaatcccagccaggatgtgactgtgccctgcccagttccctcaactccacctaccccatctccctcaactccacctaccccatctccctcatgctgccacccccgactgtcactgcaccgaccggccctcgaggacctgctcttaggttcagaagcgaacctcaggtgcacactgaccggcctgagagatgcctcaggtgtcaccttcacctggacgccctcaagtgggaagagcgctgttcaaggaccacctgagcgtgacctctgtggctgctacagcgtgttccagtgtcctgccgggctgtgccgagccatggaaccatggggagaccttcacttgcactgctgcccaccccgagttgaagaccccactaaccgccaacatcacaaaatccggaaacacattccggcccgaggtccacctgctgccgccgccgtcggaggagctggccctgaacgagctggtgacgctgacgtgcctggcacgtggcttcagcccaaggatgtgctggttcgctggctgcaggggtcacaggagctgccccgcgagaagtacctgacttgggcatcccggcaggagcccagccagggcaccaccaccttcgctgtgaccagcatactgcgcgtggcagccgaggactggaagaagggggacaccttctcctgcatggtgggccacgaggccctgccgctggccttcacacagaagaccatcgaccgcttggcgggtaaacccacccatgtcaatgtgtctgttgtcatggcggaggtggacggcacctgctactgagccgcccgcctgtccccacccctgaataaa

SEQ ID NO: 966 - DNA, 2600 bp, Homo sapiens
ggtattccagaagtgtttgaggatcccttccatgaaggaagagaggaaagtttttaagtaaacctcccactcccatgtgtcttcagctttcttttgcaaaggagaaaatccttgaagtttggtaaagaccgagttagtctatctctctttgcctatctcgagttgggctggggagaggaggagataggttcttttgtctttttctgtcttctcccttccccacttccttccctccagtccccactcactcacatgcacacactaaccttggagccgatgggattgagtgactggcacttgggaccacagagaaatgtcagagtgtttggttacagactcaaggaaacctctcattttagagtgctcatttggttttgagcaaaattttggactgtgaagcaaggcattggtgaagacaaaatggcctcgccggctgacagctgtatccagttcacccgccatgccagtgatgttcttctcaaccttaatcgtctccggagtcgagacatcttgactgatgttgtcattgttgtgagccgtgagcagtttagagcccataaaacggtcctcatggcctgcagtggcctgttctatagcattttacagaccagttgaaatgcaaccttagtgtgatcaatctagatcctgagatcaaccctgagggattctgcatcctcctggacttcatgtacacatctcggctcaatttgcgggagggcaacatcatggctgtgatggccacggctatgtacctgcagatggagcatgttgtggacacttgccggaagtttattaaggccagtgaagcagagatggtttctgccatcaagcctcctcgtgaagagttcctcaacagccggatgctgatgccccaagacatcatggcctatcggggtcgtgaggtggtggagaacaacctgccactgaggagcgcccctgggtgtgagagcagagcctttgcccccagcctgtacagtggcctgtccacaccgccagcctcttattccatgtacagccacctccctgtcagcagcctcctcttctccgatgaggagtttcgggatgtccggatgcctgtggccaaccccttccccaaggagcgggcactcccatgtgatagtgccaggccagtccctggtgagtacagccggccgactttggaggtgtcccccaatgtgtgccacagcaatatctattcacccaaggaaacaatcccagaagaggcacgaagtgatatgcactacagtgtggctgagggcctcaaacctgctgccccctcagcccgaaatgccccctacttcccttgtgacaaggccagcaaagaagaagagagaccctcctcggaagatgagattgccctgcatttcgagccccccaatgcacccctgaaccggaagggtctggttagtccacagagcccccagaaatctgactgccagcccaactcgcccacagagtcctgcagcagtaagaatgcctgcatcctccaggcttctggctcccctccagccaagagccccactgaccccaaagcctgcaactggaagaaatacaagttcatcgtgctcaacagcctcaatcagaatgccaaaccagaggggcctgagcaggctgagctgggccgcctttccccacgagcctacacggccccacctgcctgccagccacccatggagcctgagaaccttgacctccagtccccaaccaagctgagtgccagcggggaggactccaccatcccacaagccagccggctcaataacatcgttaacaggtccatgacgggctctccccgcagcagcagcgagagccactcaccactctacatgcaccccccgaagtgcacgtcctgcggctctcagtccccacagcatgcagagatgtgcctccacaccgctggccccacgttccctgaggagatgggagagacccagtctgagtactcagattctagctgtgagaacggggccttcttctgcaatgagtgtgactgccgcttctctgaggaggcctcactcaagaggcacacgctgcagacccacagtgacaaaccctacaagtgtgaccgctgccaggcctccttccgctacaagggcaacctcgccagccacaagaccgtccataccggtgagaaaccctatcgttgcaacatctgtggggcccagttcaaccggccagccaacctgaaaacccacactcgaattcactctggagagaagccctacaaatgcgaaacctgcggagccagatttgtacaggtggcccacctccgtgcccatgtgcttatccacactggtgagaagccctatccctgtgaaatctgtggcacccgtttccggcaccttcagactctgaagagccacctgcgaatccacacaggagagaaaccttaccattgtgagaagtgtaacctgcatttccgtcacaaaagccagctgcgacttcacttgcgccagaagcatggcgccatcaccaacaccaaggtgcaataccgcgtgtcagccactgacctgcctccggagctccccaaagcctgctgaagcatggagtgttgatgctttcgtctccagccccttctcagaatctacccaaaggatact

SEQ ID NO: 967 - DNA, 117 bp, Homo sapiens
aggtcattgcttcttgctgatcttgacaaagaagaaaaggaaaaagactggtattacgctcaacttcagaatctcactaaaagaatatagcgtcctcctttaactgaaaatttttcc

SEQ ID NO: 968 - DNA, 162 bp, Homo sapiens
acgccttggacagaatccaggagtcctccagctgagaacgaggtgtccacccccatgcaggcacttactactaataaagacgatgataatattctcttcagagattctgcaaatgcgacaagcctcccaggttcaagaagacgtggaagctgcgggctctga

(The sequence listing continues in the following parts.)

1. A method for evaluating multiple sclerosis (MS) in a patient, comprising:
determining a gene expression profile for a blood sample of a patient having or suspected of having MS, said gene expression profile comprising gene expression values for a plurality of genes that are differentially expressed in MS, said genes being listed in Tables 1-5;
comparing said gene expression profile to an MS- and/or a non-MS profile; and
classifying the gene expression profile as an MS profile or a non-MS profile.

2. (canceled)

3. The method of claim 1, wherein the gene expression profile is determined prior to treatment for MS.

4. The method of claim 1, wherein said patient is being treated with at least one of Beta-interferon, Glatiramer acetate, and Natalizumab.

5. The method of claim 1, wherein said patient is suspected of having MS.

6. (canceled)

7. (canceled)

8. The method of claim 1, wherein the gene expression profile is determined after about 3 months of treatment, after about 6 months of treatment, and/or after about 12 months of treatment for MS.

9. The method of claim 1, wherein classifying the gene expression profile as an MS profile or a non-MS profile includes determining a probability that the patient has MS.

10. The method of claim 1, wherein the non-MS profile and/or the MS profile is matched to the patient by at least one of age, race, gender, and clinical manifestation of MS.

11. The method of claim 1, wherein said MS profile is a relapsing—remitting MS profile.

12. The method of claim 1, wherein the sample is a whole blood sample.

13. The method of claim 11, wherein the genes that are differentially expressed in MS patients are listed in Table 1 or 2.

14. The method of claim 1, wherein the sample is a white blood cell sample.

15. The method of claim 14, wherein the genes that are differentially expressed in MS patients are listed in Table 2.

16. (canceled)

17. The method of claim 1, wherein said gene expression profile comprises the levels of expression for at least 7 genes listed in Table 1 or 2.

18-21. (canceled)

22. The method of claim 1, wherein said levels of expression have been normalized to the MS-profile and non-MS profile based on the level of expression of at least one constitutively expressed gene.

23. The method of claim 1, wherein the sample is a Peripheral Blood Mononuclear Cell (PBMC) sample.

24. The method of claim 1, wherein said gene expression profile is determined using a hybridization-based assay or a polymerase-based assay.

25. The method of claim 1, wherein the gene expression profile is classified as an MS profile or a non-MS profile using one or more classification schemes selected from Naïve Bayes, Support Vector Machine, Nearest Neighbor, Decision Tree, Logistic, Artificial Neural Network, and Rule-based scheme.

26. (canceled)

27. A method for preparing a patient gene expression profile for evaluating MS, comprising, quantifying the level of expression of a plurality of genes listed in one or more of Tables 1-5 in a patient blood sample.

28-44. (canceled)

45. A method for monitoring treatment of a multiple sclerosis patient, comprising:
determining a pre-treatment gene expression profile and at least one post-treatment gene expression profile, said pre-treatment and said post-treatment gene expression profiles comprising gene expression values for a plurality of genes that are differentially expressed upon treatment for MS, said genes being listed in one of Tables 3-5;
comparing said pre-treatment gene expression profile with said post-treatment gene expression profile; and
identifying differences between the pre-treatment gene expression profile and the post-treatment gene expression profile, wherein said differences are indicative of effective treatment for MS.

46-54. (canceled)

55. A computer system comprising a database on one or more computer readable medium, and containing mean gene expression values for at least ten genes in an MS patient population and in a non-MS patient population, said at least ten genes being selected from Table 1 and/or 2.

56-65. (canceled)

66. A kit for evaluating MS, comprising nucleic acid primers and/or probes for determining the level of expression in a patient sample of a plurality of genes listed in Tables 1-5.

67. (canceled)

68. (canceled)
